United States Patent Application Publication US 2009/0119022 A1 - sequence listing, part 3

SEQ ID NO: 2254 - DNA, 4517 bp, Emericella nidulans
cggagaaagtagatgatccttggcgagacgcatgacgtacgtaggtttgaataacagcttcaacctgatcgcgcccgactttccgtctagagttagagaaacctcttgagcctggaagggttccagcatttcaaggttgatcggcacaccgccgagataatcagccttgtcgccaaagtcccaatcatagacatcgcagcggaaattggcaccaatacgggacttgattggcgtctcgaaaaactcgttccaggcaggatggagggtcttcttctgcactttagtcttgaagatttccttaccgtccaagcggaatttgcagtacggatcactgtagccgttgcggtcggcagacggtagatcggcagcgtccaagacatccacacggagagttcccatgttgttgatgctttctgatggatccagtttcatagtgacaggaatgtatcgagcactaactgtgactctgctcacctctccatcggtggatcggaggacaagctctgtaggtgtgtacaggatgcgctggagcgtactgaacgtgtcgcctgtgagtttggccacgatatgttcgtcatcatcagtgtcggcattgaccttctccacaatccgaagggtgatctttgagaactcaagttcacgcacaaacgcatcgccaactggataaaaagtcagccaacttcaaatttccagaaagactagaatacttactgtcctcgatcttagcagtcttagtgcggattttgggcgatgaccacactgggaacatataatcatccattatgatttccacatgcacgttgctgcgcgaaaggttgacctcgtgaagtttaaacacgatgaagccggattctacaagatcagccgggtcaacgacaaatacaacaacagaagggaacaaagacttaccatggttggcaaggtcgtccacagagatataagtcttggggacctccttaatagacctaaccgacgccgtctccgagtctttaacagtaccagagcgagactcaaggctaggacgtccgttcgactgcaaatctgcggtcccattggtagcaccttattgtcggagatcttcgagtccacgctcctggacttggagtggtagctcttgcgtctggaatcagtgctcttcctcgtcaacccagctgcctcagtctcggcctcggcctcagcctcagcctcctcctcttcctcctcttcgtcttcaggattgacgacggggattgttgggtagaaagcgacagtatagttcaaagttcccttggcacgttgaccaaggcgaagggaactggatacaagttgtttctcgtcatcgatttcgtattcaccggcctcattctcatgaacgtagtctgctgcagagagctccaccgagccaagtgaccgatcacttccaacagactcctcatccatgacttccaaggtgagcttctcgcgagcactgtgaatcggaacgtacacgacttcatcccaatcagggttgaggttgttcctaaaggtaactgtgcggcccttcatgtagccagccagcagcactcgagcataaggatcagacttgcccatcttctcaaggttgcgcagatccgctgcgtccttgaagtggattcgcataactccaattggatcgacgtagccggcgcttcctgcaatgcctcccaccgcaacgggcttccaatccaagaccagtttggcacgtccagacttagcaccgtggagatggaaccactggtggcctttctccatcattttgagcatgtcattcatcttgatctgataggaaccgaggatggggtccttgactagatcccggtcgtccttgatcaccagaccaagccgggcagtcttacgatcagtgaccaaaaactctttcgaggcattttggaagatagggttgttcgttcgcttgagtttgttggttatgtggatttctttgccgttgagtagaagaacgccgtatgggttcagttgcccaaccaagctcctacttccgtccaggtccttggcttgttcgactgtgaatcgagcgataccagtgttcagctctggaggcggttcagtctcaccgttctccaattttctaccctccaaaacggggaagaatcgaatatctgcgtggatagaaccccgggatcggccgcttgccaagacttcgaggtatacactttcatgctcgggctcttgctcaagcttgtccagggcgaaagttgcggttcccagctccttgtccttccggaattcgttccaatcgtaaggttggatagtcaaagtgtcagtgaaggaggtgataatcacgtagatagtctcgttccatcttgggctatccgtatcttgtatcgtcttagtgcggccaacttcggtccggttgttcagagataccactgcataagggtcaggagtaccagcgaacttgtcagggttctttagctggcgcgcgccgtgaagagttacggcaacaacaccgattgcctgatcaacagcgtttccagcaagcatcttggcaatctcaatcgggaaaacgttgggctcatacatcatcggaccaagattggcgtggatctgttctttgataaagctctccagaccagggatgaagttgatatcgaacccgagggtatcgccaccgagaggcttgcaaacatagtcaagttccggccgtcccaaaaagcagacatcaacccgttcaatatgtgggaagggaatctgaagcttcaccttgactctcataagaccgctgcaagccatgtcctcaacaatcacatcgagacccttgctgacgacgcctttaccaacacggacttccaagacaactttggggttgatcttgtctttgacctggcgggcggtcaaatccatggtatcgttaggtgtgaagctgaatttccagtccatgatgacagtgtcaacttcggtcttaggataggtcttgacgtgctccaatcgaggcggtttgctgcctaggataaatgtcttcaatcgtaggctgtccaggaatgctggggttgctgtgctgagcacctgatcaacggaattgatgatcgtgtcgcacatcactggcgcataaatgggccaaaacttgacaaggaaactgttgatccactccaagctctcggtatcggtttccaggcgttgcttcgccatctcgcggttaacgtcatcgcggaagtttcgccgaactcgccggatagaggttcgataataggtgccacaggcggccatgataatgaagacccaagccagtccaccgcctagaacggcgacaatccatgatgataagcatgcaaaaacaatgacgccggcattgtgataccaatctaatacactgttagttatattggggttcaattgtccgcagcgacataccgccaaagaacttctcgtccagtttggcctccaagaaggtctgatggtccaacaatgttgcttcatcgtgctcttcttgagtttcctcatgaacgaaccgtggagcccagcccgtccggtcgcgcgcccaacgctgctcatcatcaacctcctcctctttcttgtctgctgcaggttcttgggatttttcatcaagcaacgtggttgcggatttcggtggaggaagatcatacggggcgggagtgccatcgtcctttaagcaggatatcaataagcaaatgtcgagtgtacaattgaatgtacgcgctcaccttgtctgtgatcacgccgattgccttcggttcccggtcacggtgaaatcccgggggaacgcactagcggaacagagatgagtgtcagtgaacatagtctcaagcagacaacccccagtcaaagacgtacagattcagcttcggcggccttttcttggggtgatgcgtctgggttgaattggtaagctggtagacccgctttccgggtctcttcaaccagttttttctcgactgtttccggttggatgtgcgattggggatcttgagaggcagcctgggcggtctcgatagctccttgttgcttcaattccgcagactctgcattttgagaagccatgctatcgctgagtctccggcgcgcagtcgcccactgcagttcaactcagcttataatcgacgggcgaagtcagccaagacgctcgtaacgttttcgataaaatagaagcgtaagaaactgcacagctagcaattgggaaacagaataaaaagaagcccagaaatcgaagcgcggcggaagaatggtgggtagattcgggaataggtggttgccttgccgctgagctcggcagcggggaggctggagtgtggcaggcttgaacggtggaaggatacgagtcgaaaaactcgaaactggattagtgaattactcacatgagttggatgtacgatgatgatgatgtactcaagtctgctggcgggtgaccctggcctctgacaatcggcgagtgtttaggagacggagatacggagcagaggaaggccaggggaggaaagaggaaagtggagagggtgaggggggagtgttcagggcagccgaagaaaagaaagaaagaggagcca

SEQ ID NO: 2255 - DNA, 1253 bp, Emericella nidulans
ccaactccccctagcccgcatcaagaaggtcatgaaggctgatccggaagttaaaatgatatccgcagaagctccgattttgtttgctaagggctgtgatgtttttattaccgagctgactatgcgggcatggattcatgccgaagacaacaaacggagaacacttcagagatcagacattgcagcagcgttgtcaaagtctgacatgttcgattttctcatcgatattgttccccgtgaggaagccacgtcgcatgcaaagcgctcgagtcagtcagcgggtgcgccagctgggcctggaggacctaccgctgcgggccagttgccacaaactcagcacggggttcagcatcatccccatcatatggcgccgccagattatggtgcgttaggacagcatcctcttcaagaccaggaatacaggcagcaaactatgtatggaggagcagtacagtcagacccaacagcggcgtatgcccagcctcaaactcaaatgtttgaaggaatgtatactgcttaccctcatttacccccgcagcaggtacgcatcggttgattccgtttggcaatctagtgctttcgttttatttcgacctgaagtactgatctcatgacccctacagtgacttattagcgaatgatcgatcgtctctccgcagccgggcggtttctttgtttcagattgtccaccgggcgactgcaccagctatgctttaagagtatcgagactacgttttaaatacccattttgattatttacttctttgcgttatcggtgatacaacagtaaaattagaagagtaataaacgctagccatgctactttttcccgaatcttgacgataacgttgaaaatttgtccatcttcacagggctctgaaccgtgtgcgtaagtctgcgacaattaatatgcgtatgaattggccgagggtgcgccacttacttctccaataaagtagggccgttgatcgcatctacacgcccatactttttatttcgcatggatatgtcataaaattcgtccgcgttctccgcttgcattagctgaaccgtctgttgcagttcatctagattctctcgaagaatggggttgttgagactgtcgacgaattgatataagtattcaacatctttggcgagagccatcactccgttagggttaattcttttcacttccgctgaaagcgggagggcctaggtagtcggttagtcctttctgcaaacatatcgcagccaacgcaatgacatacgag

SEQ ID NO: 2256 - DNA, 3576 bp, Emericella nidulans
tttatgtggtcaatctccggcgcttaaatgcggcaacccggcacttccgagattgcgatggtctcgagccgccgtgggggttgccaatggacgctgccactagaggctggaggctggaggctgggagctgggagctgttttaagtgctcgcggctcgcccgtggcttgtgcgaatcatgattcgacagcaccaaggaataccgtgactggattcttcacagcagtaaacaggtgtaacacaaagtgtgatttccctacatctcgctaaccgggctgaggatgacctttttctcccatgcaaggcgagcatcgccaggctcagagcctaaaaccagctaggtgcacggacatgtgctccgtattgagcccagccgagacgggctaaaagctgcggtcaccagcgcctcggttatattccttgttagggaagcccaaggttgcgccccgggtcgccatcgggcagccaaaagaatatgccgacgagatgtatatcagcaaggacaagcatacattttccttcaccccttgtcgattgggaccgctggaatacacttctgagtctgaacgggacgccggaaaagggccagaacccgcggacacgaggctgacgcgagacatcgaaggtgcagttgggtgcagttggagtcggggcatcttttcgaatctggcttttggaatcggctttcgagatccttgtcggtgtgcaactgagcgtctgggaatacgagcaatcccagcgcggcagagctagcattgagcacatcttcggtgacccgtcattattctaagcccagccaggcagacatccgttcaatcggagttttgcttctctttcgcatggatatttggaaagcctcgaaaagggtctgctcgagagacaaggtctcggtaccgtaacttggtgaggacggactacggagtagatgtgtcgactgtctcgcgctggatcttggttgatacctgtcatggctagacccaggatcctgaaaaatgaatgatattgggccgatctgtgccacaccacgtgtaggaactgggaatcgaccgctgcctgcccgtgacaatcactcacctttggttctggattttaaagccggaaaactgcagcctgtacgcagcatctcacctgctccaacttcctactctgagtacatctaattcagtccgagtctgtaattgggtaaacacgaaatgctcaactctgtgccttgacgtcactctatatcgttccccacacggtacaccgctcagtcagtgggatcgcctgcgctctgtgctttgtataaaatttagttcgcgtttctttttttagcaggataggtatttcccaaaatgaggaagcctagttcttatggcgctcaatagcttttcctatcaagaggcggtcaaatttcagtgccagctttgttggatctcagaactccccacaccatcgccacgcgttgctctggtgttccagaagatgtcatcgatctgtgagaggtggagcctgctgccgactgtcgacttcgccgtcggcttatcaaaaagatggcgccgatctgatgactgcttggaacctgctctgcgactatgactggcatttgtgagtcccagaatgtgagcactctaccctttatcggcagtcgtgccttctcttcgagctcggaggttttacctcgaatcccgagctcctgtactccctcgtgcacggttcacttgtttgacaatctcactctctatcgtcgacttttctgcggaaagagactaacggtttgggccctggatcagatatctacatgtgcgcttgatcactcagccggccgtctgtttcttacaggaactacggtgcaggtcaagtgtaaggtatcgacgaaacacgattacctcaataagagctcattgaaacgcaatgtgctcctacgatgctatgactcgaaccgtccgagctttgtggtcagcgtcgtacaaccgcgtgaagtgaaacttctcgctgtcttctcgaatccatgttcaagttgcttgggatcctcaagattgagttttatctagtttcgagtaactacactcgttcgacgtgaacatcgacgcggatatgggcgctgattagtaggtttgtcttctgctagtgcttggacgttaggtaggataccggcctggcagctgctttgaattcatggcagtgctactccgtacactgcgtatcatttctgttgtccgagtgctgcatccgctgaactgtggtcacggagcccgagtgtggatatatctccagctgacaattcctccatgagtgatatcatgggtcttccttcgtcggatggtgacgatatcgtgaaatatgggttgctgaacgacgaccaatcgctcggacgtcaacttgccccatgaaacacaaagcaaggctgacaggctacattcatccagagggaagcacaaaagacgcattgcaaggtgctggcacgcagcagctgtcatgcttagtacttatctctgcaccgtcattcgttgagggctagccctccaaggccttttctgtgacgtggctgaggccagaacaggctgtatctaggctgatacaagactaagtgtgcggtccttactaggccacgaaatggtattacgcctgtccttgccgccgcgcatcgtgattccttccacaaactatctctccagggggatggaatgcacatgacagtctctgagaggcaactactccggagtagatagccgctgccatttccctgaacggccacggcacccatctgaacactggtgcaggacctcgtcatctgaacgagatgtccaatcggacatcagatgtagcttctcggtctgcgacggggcagcgcggggtgtggagcttgcagtataagttgcatgacttgtctggccgcccccgtcttattggattcttgccgcctggagcagggaaagtccctctggacacggcccggggagaaagtcgatgagccactctgatatttctcgccactatcacactcgtcacgtctatgatgaccatacatggatcactagcaatttacgtactcttgcaatttacgtactcttcatttcctatacaacctgagaagctgaaaaagggatcatctatgccttgccgcactctgtgccctctcacagcctgacgctgatgtgatgaagatcgtatcttccggacgttctctaagagccgcttctcccttttggatgctgcatctaattagcttcattacgaataggacacactaaaagagcgccctagcatcaccacgcacagtaccaagaatatgcccagtcctaatgtttgcgttttatatcaattctctggagctgggacttgggagtgttgaagttgatggtgtaaagcaaccctctaaccactcacgatctaggccacattgcgttatttcgagctcagtcttcgtgaaggtttatcttatcaggacaccccatgatcccaacacagacggagtacacgttcgtcattgtcttcaggctaaggcaggcaatattcaaaatagacattagttcaatactgagtagaggtatgtcgtattccattaggggtgcgtgcatgcaatgcagatctcaatc

SEQ ID NO: 2257 - DNA, 1852 bp, Emericella nidulans
tcccaattctaaatcggtctactgcaaatggaaatataacaattttatcggcatataatgcgctacttctcgatatattgttgcaatcaatgaaaataggttccatgcaggtatacatgcaccgccggtctggcgtagtaccctctgttcctcaatgtcttacccttatgagcagtgagataaccctttacattcatcgatgtaggcttttaatcctcgtgactgtcatacagtaataccatcagcgactgataatctaatctacgtagtatttcgcatgaattctgacgttgtgcacccgggaactggatacataggcacgtagggcgcaaatctagcaacagaaccagatccaaatttacaaatagaagcctgacatctttcacataaaggtgctacattggtggtactcaactgcaggtgtcatgcagctgacgacctccatcttttctagacatatcaccaggtaatggctccgttcctaaaggagtctaacccccccgggtccaggccgccaccaagctggatatagaggcaacaaaaaaaaaaaaaaaaaattctcgagctacaagcccagtccaaacttgaacaacttgcaaccctactcacaatcgaaacgagggagacgccccgcacaggacggggcgcccggggatcggtgccttgcatcgaagtttcggtttctgtaccactgtcaggggatacaccacgatgtccacgaataggcgctggacatgtttaaaacatccacgtcgcggttgtcccagcgctacgggaactattggatatgactgccgcatgtttccattatggatgggagagatcgttccctccccaccgtaacgggtctccagcgtcacgctcaatagtatactgaatggtgggctttaccaggaactagctccctcaaggacatggggtggtcagagcccccgaagtcaagttactatccactaagttacgatctacttcatgaagttttctatcaaatggcctttgactgcaagggccggaagcgctggatattgcatgattacgcagcacactgcattgatacataaattgaacttgtactaaagtatttcttggtttaccctgcagctggagggcgtggggatgtaagggagggccggagcatcaagctacctccgtgacgtggtacccgagtacacagatatggtccgatgatcccacagtatattggccgcaaaccaggcctggacagtctggaacggcctcctttagtaagaacactcttaccagcaatcaatggagttgcgttgttcattggacaatgtaaggtgccctggtcccatagcgcctgcctcgtaccctaaatcagaatatgcaagtctcgctcgttgacgtgagtagagagggaaaaatcaatatgcctacgtagtagacctatctccggtatacaactgctagggtctaagtcaatgtttgtgaatagtagacccgtgccgaggcttaccataatagaaaaatccctctggagtttgaagtatctagttatgctattcattattagtcattaaataacatacgctttatgcacattcatctccgagagccggactgactctctgcactcctcattcctgtggctcccgagctcctacgctggggaaatcccgagtcgccgccttctgcaatggctgatgatgcttcagcttctatttcaagatgctctatatgcctcgaaaccttccggagagcagagcatctgaaacggcacattctaacccgtgaggacctcacaccgtcagcacctagtacatgcccactaaccgatgacgcagatgacgacgccaagcggcatacatgtcatttctgcatggcccagtat

SEQ ID NO: 2258 - DNA, 3629 bp, Emericella nidulans
ccgcgtaatcaatcatttctgacactatggacccgatacgtccagatagggatactagtcgaatggaagaaccctgtctgctcttcgctcggcggcgactggaaaggtatctgctctacggcgagggcgttccgtgctacaggcgactgaatcagatgtctacaaggcagaaaaggaagaaaagggagagaagagagggccggggtccttccgaccatagctgagagctgaaaaggggagtaacttaccgcaggcatctaagaatgtgcgaaatgtatcctcgttacggactgtggcagcaatgataaactccttcagggagtagttgtcgaagagatctttgattgtaaagacgagaagggtcacgatatccgagtcgtagatctacgctgaatcagtaggtgtcgcatcgttgtgctgaagagtcataccaggtccgctccgagggcaatatcaaaccctgcacgatcatttttctctaagagtgaagggacctgaagtggcattccccattcccagattcccgcctggatttgcgttctctccaacccatttttgtcaatacaatcatcgatttgttcgataagggcgggctcccgatccgtaacaatgacgctctccgcaccaagatgtttcgcgcaaagaaaggatagaaacccggtgccggcaccaagttcgagaacgcgtttgtttgctaccagggatttgccagccctagtcgttgagaggaatgtgcctaggtgtagagccgcttcccaggtgcggaaaccagtggtcccgccggagagaataagggagcggttttcagaggttataattgttcttgggtctatggttccatcacattcggatgagctctctgaaacaggtattaaggagacgggagcgctgtatttgatgtaggtgagcttctgcgcttgttggagagcagaaggttttggtgttgagagtaaagaggtccatttctccatgagactgtcgataatttcctatccacttaggtcagatatcgaagcgcgaggacttggtataatctttgatcttgcaatagctgtgaaagcttaggcatactcatacatcctcctcagtgttggaaattgatttttcaatttgtgcgataatcgtcttcaagacgcgtgtttggtaggaagctggagggagaggccatgctgtgtcctcattgaacattttctcatagatggcggtttgtatggtggaagaaacgagggcggggccatcgggaagagagagagagggaggatcgacttgttgaaagtactgcgctgtcaggagcgctattctgtccatgaagctgagtaaattggattctctgtagcttagaatggaaatagatttgctacagtatgattgacttgattgttctacagctaagtcccgttcggtatggcggagcatgcagcggagtagtcacgtgagcactagctcagaacggctagcgcgccctagccgagcccacagccgactttgcacagaaaagcgaaattgaacgaagcgcatctcgacgcccgccagaatcgacagtctacaacgacgacattcaaccaccgccccctgaccttgtcattctcgctgctggtggttcagtcttgtcaagcctacaacaaccacaaccatgggcgacgctcccgttaccctgcggactcgcaagttcatccgcaaccctctgcttgcccgcaagcagatggtcgtgtaagacccctttctcctgcaccgcactgcatctgcctacgttagactggatttgggagatatttgcaacggtctctgcgcgaaaagaacgaggaagagttggaaatgtctacatttgggcgcacaaaccgaatgagtccgactgggtactgatgtgagatgatagggacgtcctgcaccccaaccgcgccaacgtctccaaggatgagctccgtgagaagctcgccgacctgtacaagtccaacaaggaccaggtttccgtcttcggcttccgcacacaatacggtggtggcaagagcactggctttgctctcatctacgactccactgaggctctgaagaagttcgagcctcgctaccgtcttatccgcatcggtgctgccgagaagattgagaagcccagcagacagcagcgtacgtctatcccgagccatttacacctcattcttgagatggcagtggaggagctaacattcgttcaggcaagcaaaggaagaaccgctccaagaagttccgcggtgtcgccaaggtcaagggccccaagaagagcaaggactaagcgtgtgcttctcgcgaatgattacgttggtgctcggggtttggtgggagattgtggctagaaaactggcgcctggagtgtgacttggactcgggttcgcagcgcggacttgggcgcagcaagcaaaactggtgtccacgatgataataatgatgaacccaacaaccctgtgattagcaacaaaaagagaacaaaaaaagcatgctcgtccaaggttttcgccatggtatatcattatttattgtctttcccaatctttgagcgtccgtccccgtcgtgaccaagcggatagacaggtttcaagaggataaaaatttcactggattcctgcacgggtatcgttatagtcggctgttcaatgcattttgtttcattcaatacatgtccatagccgtgtccatatcctagggccaggctttgatccataccaacatctcagattgggaagtagaggtacaggtaagtaccggctgtaggtactttagaccgatctagaaaaagaaaagaatgtccacggtcccacggagcctgtcgtgaatgtgatgatcgccctcagctgcaagcaagaacgcccgctcccaaaccccagctcacgtagcctttattggatctggcatccacatccaccaaccggacattgaccctctgaggtattacacaaggtactttgttcctaaacgcaacccaattttcttcccacagttggcgtgtcgatcagacagcgatgcactgcagactagccagactagctagccaacatcaaccactgcaagtaagtgccctaccgaatccgagggcatggacggggtatccctgctgcacatcttcatatatccgatcaactcccagttttcatagttgtcagcacgcaaattgcctattccttggtcaccgagatagcgccctcatccaaccttatcctccaaccaggttgtggctgcagacagaactccgctgctgttcccttctcaagttgatcttcactgtagatggcgcccactattcacctactacccggggactagcagctagagcctagaggctggaacacccagatgccatccccaaccaataacgaactcttgatttgctcgagtcgctgcgtcaggacggattcgacaaccccgggagcttcgtgcggacttccgacgggacgggacgcgccaaggagaacgtgtgccgttgatactgtaagtaatttggacctccggccctgagtagcgtggtttgctcgttttagagatctgtaaggtatgagggattatttccgttcttccatatgccttagtcgttttgaggagtagttgtaacatacacgcagctgatctagtatttgccagaggctgcgtgtgtggcataa

SEQ ID NO: 2259 - DNA, 1581 bp, Emericella nidulans
tcaagtaatgataagtcagaggatatactcgaccaggttcataggatgtatcaggaacccacctggtcgcccgccgacacaccagcgcttacggccgccctacgcaggcttgtcgacaaagtccaggaatggcgaaagcaggtcgaagattttgatatcttgatagccgcacgccgagacctgctgcacgaagacgacgtacgtaccaaccaggcagaacaaaatctcggaactcctgctcctcgcagtacggaacgatactcgtcaaacacaccgagaacgccgccgctgggttttgaccaagggacaccacgtggcagacgcgacctgcggaacctgacatcgccacagcgcagcatcgtcgggtcgcctttaagagaggttacggtaaacaaaacccactcgcctcctccccgcgacgcttctgaggctcgttctgcggcggaagagctgcgcaagcgcctagcggcaccgttcttgccagaaagcaaagttagtacattcaacgaccgcaccgacaacagtgcgcaagagccatctccagcagatcaagaggtagcggtcacggacgaagaggagcggaaaccgaaagctgagaccgcaagtctcggccacgtcctgaccaacgttgtgatcctgtacgagtttctcctggagatctcggcagccgtacaggcacgcggcgctatattcgaggaagcgggcttccacggtgtaggctcgtctctgccagttgacgattcctgaaactatgcctaagcggcgggcgtccgtggctggcccgagcgacgcctttgtatttagacctgttgatatccaagcgagccaaacatttgcgaattgcaattgtattataaccgatcatatacaagacctacccagagtacatatcacaatataatgagctggcggattccaagatcagaaaatggttatccctatgtcggtaggctattatcgattatcaatcttggctgcctcccaagttagtgcctaaccctccggaatcatccggaacttgacgtccttgggaatccggaaagatggatggttttacccccgagggcagtgctactagtgctgatcatcaggattccaaggagtacaagcccagagtactcctaaggcaaccctgactcgagttgggagttgagaccagtttcagccatcgtaatgggggcgcagggcatgctctcattggctgctaattcaggaactgcgcgagctgaagaataattccattcaatatggtagcagggaatgccgttatgtagaccattatcttcatttacaaacacctttgatggataaaaccggtaagagctttttcatgctgctctagaataaaggtagagaataatgttattgttttaagtgggctgcttgcgcatctttgccccttttcctcccccaccaaacgactcgaactatggagggcggatcatggcttagattttacctaaccggcgcttgatgattattggccccctgtatcatttttattgtttgactgccaaatgagctgcttatagtcctgtgaatttataattttgcttccgccttgggtctcatctgattact

SEQ ID NO: 2260 - DNA, 3144 bp, Emericella nidulans
ttgactcggcctcccgcgcggatatcccgaagaatcgatgatcaaaggcatctgggcgcgcgaggtaatttccaaagaatggcccttttggctctctctgcagactgccacttttaagccgactgttgggcattggactgacggtgcactggcccagatctaagattctccacagttcttccacggaatcggcttggggatatcggcatgccatcccagtaaccgcgataggcactgcggtggtctcgggggccgtgacatttaccccgacatcaagtgcagtggcggactgcatcttgcgtctgccatttatgtgctcgcctttgttgaactcaacaatgttcaacatacgacatctagcgtgtcgcggtacgaattggcctgcacctatggggataatgcttctagcatccgattgccccatgttgtctagagtagcggtgacggtgatcttccaatttgcttgcgttgtcaagatcgactcgactgcaacagtgaaaagcgagtcagcttcgcacactctcccgttgatattggatctcggcagactgcgcttgtgacacttcgatggcaggcaaagtcggctattccgctcacaagattgcaaaatatcctccacagcttgagtgtggttcgagtgatggaatcggcctctaagtgtcgtagtcttcaccgagagcccatgtttctccagctcctttgcgaaggaaacggactgagagtcccaaacggtgaccgttacagcgttttcatcagtcacgcatgaaatgtatgcctgtcgcgttcattaacaagaagaaaagaagaatataagcaaggaacaagcagcactgacaccttgataacgagttaagacttccgtcagaagcttatgctcctgagcagttctccacctgacggcgattgaccttgcaggctgttcacaaagctcgtccaagtccactgcagccccaatgtagacggcgagacgcaagacggtgctcacaactttgccgaattcatcctcgttgtccgaccagcatgcagctgcgatggctgccaggaatccgacgcagaatccctggatatcgcagacgtcgtagttcttgtcttctttcagctcgaggaaatcgactaaatgtcgcaagactgtggctggtactagcaagaaattcatcggctcggccatatcaggccgtagcgttccacccccgagaaacgctgaaagctgacggagacgtgcgtccccatgaagcttctcggctgctggccagagcctcaggatatcgtgccagacggaaggtaaatctcggattgcgtcgtgaagccagtttgcattccgctgattcgaaagatatctgcgtatgtgcccagctggcagttcaacctccggatatttcggtccgaaaaggaccgaaacctgctgcaaagtattatcatcaagggaccccatctttcgaaataaagtgatcttgactaaaaggaatgagacacagtcgcttaacaaagtgtgcttatgaaagaaccaagaaccaacggcgttgaagcagttgctcaaatgactagtccccgactcttagaacttgaccgagaatttcaagggatataggcggagcccattgaaggaaccctctaatctcagcggacggtctacttgaagctcaagaggggttactgcagcagcgcctgcactaccgcccatagcggtccaagaatccccaacctattcctgccagctgcaagtgaggaattttgtcgagatctcgtcaataaagactcagaagacgatatcctgacatattgttctcaaaacaacgcctgtatagggcaaagtgcgcatagcgacagtccgcccgtgtcgcacgaaagggcgcctgctatttcagcgtcgatcaacagccttctttaggccagatttcgacttctgcaggagccactgtctggttacatacgaccaattcggtccaattgccagatagctcgttatgtatataagctagggcaaaggatccacaccactttggaccgaaccgcccgaaagctagaccagaagaatgttggcttctcagtcaatatgcggcccccttgctccaggctcgagccaagtgggcacgcaaggcttagtttgcatttgcattgtcccaagtgaggaaccagatcggactcagatcaaagacataacccaaaggacggcattttgtacaaccctaaaaagcgttgatcgacatataaaaacagcctcctttgctgattgccaaccacagctcgtgcttggatccgtctttccactacttgaggaatgaacgggcgtatccatcatgcataacacatctacgttccttgtagattatgcccgagtaattccgatcgcagcccttcatgctcaacgtggaatcatctcgttgactccggactgtctagctgcaccgccattccgttcgtggctcgtaacagtagctggcaaggtatggcagctctgcagcgtagtatcacatacatatttcacataatatgatactctggcgcaacggatttccttactgttcttaaactcttcttatctttccgtacgtgtccatcactctacaattttggtgctgcggggtctctccgtgatgagtgctcttaattccatactaggccatctatctctgctattcaagtttattgctcgttattgtcatcttcatttttactaactatccactcattatagcaagcacaagccgttctcaagattgaacgatgatagcaatgcaacccgaaacccaactaaaaaccgcccttaagaacgggtttgacccgaacatcctctacaaagaccctttaacaatcgtaaaggagcctatgtgtactattctcgagaagcacagcaagatcccagtggacaaagtcgtcagtcatgtcaacaaggtggtgagtaaatcagccagccctttcaaatctgctagtctgacttcctttcgccagagagatcgcgcttttgccgtggttagtactctgtatccctatgcactccccaatctgacccaatgaaagtttccttatgcatgcattgggcaattctcctttgtcgagctgagcatcgccgcatcgccgtactatcccgaaatgctcgagcgcgtgaagaatggccacaaacttctggacctaggctgagcattt

SEQ ID NO: 2261 - DNA, 1796 bp, Emericella nidulans
tcctatgctcgttagctcatcgataagattagactgatgatgaaatgcgcaccgttctgttcggtaatttctctactttccatacccccacgctgaaatccagggccgtggctgcgtacatgggtctggtcttccccgacgaaagaaccttggacaatagcagcaccagaggcggattcaccaaacgtcacttcggaaacgatgttggcttcactgacaactgtaccacacccggaacagaccttctggccatcatcctcaatgatatgaggggctggacagctcgggttagggcatgtagtggtcttggggtgagtggttggctttgcgggctgcggccgtgcaactggctgggggcgcctgatggccgtagcaccgggggatttcagactggccaagcggccaacaggaggtttggggcctcgcgggggaacgggaggacgcatcccaggtctcgcagacatggtgcaactgcaagtggtgcaaatattaagagataggggtaggctatagtggcctcagagctcgacaactctcctatgcgagcctttgcacgggcgagtagatgtccaagaagatatagtcctgctatatcgtcattttttatcgataaattgctgatgtaggaactagacaacagctttggatacgaagctcggtatagttccgaaaacggcaggaatgtcagtgattagataaggcgggcaattttcagcgctggggcgagcgacgctgaatacgcgacaaagcttgaaatacaagaacaatagatgttataactagtaaaggagaaagagagtccttcaaatagcagaagatagacaagacaacttttgacaaattggggatggagcgcggtggatgaggatggagagagctggatggcgcgacgcgagaatcgggacgcagtggcggaaaattctgtctggatggtggagtggaatggatgtgtcacgtgcacaagaaggtccggagtcgaagtgaaggaaaacagatcctgaagaggataaaaccagccggccgttcgatcctcggtcgctgctggttttcttttcttttctcggttccattccaaggataatgacaatttgatagaagcaaatgcattgctcatatgactagcactaacaatgattcccatggtctcattgctcatgacctccctggcgttggtctgggtgcgcgttttgtgcgcagtttagcctcatccactgtcgatttccacatcatccgcacaaaacccgcattccagcccattcaccatcctctgtcattgagtaatggtaatagcatagcagagtcgcccttagatatttaataatgtcacaacccagttccagttcacttttcttcactttttcagatctctccccccctttcaatctctcaacacccgtaccccttccagccaggaaaaaggaagaattcccagattcagtacaacatacctccatcatctctccccatcatccatctctgtttcttcggtacctctgcggattgagcaggctggaacactagccgccactcgtcatggcgcagccggctgaaagacaccgcagtacgttttttatcagtaacgtgcactgcacctcctgcgtcgcgtatatcaatcaggtcctatcggaaacgcaagggatagcagatatcgatgtctcgatcttcactcacgaagtgcatgtcgtccatacaaagggaacaaacccgctctcgatagctgagatcttggctgaggccgcgttcgaggtccaccatgtcacgaccaggaattcagcaggcgtcatcatagtcgattc

SEQ ID NO: 2262 - DNA, 1225 bp, Emericella nidulans
  unsure (1)..(1225): unsure at all n locations
gatagagattgagtgatggaaagaagattataagtcaactttaagaaaaaaaaaagagatggtttgttaaaaaaaacagggtgcaaagagttggcttaagcatatttaagggggaaagctatcggggacgcaagtagacgtctatccaagataagggccaaaaagatatttaaaagcgttaatgtaggagtgggagttgaaaaaccaattaaccaaaaaaaggaaccgtgagtaaagttaaagatgtagtagcatcgatccacatacctacctaggctatgaactgattcgtaataagaggtacactaagatcgcttcaagccaaagcagtatcaacccaccaccatggtaacccgctctgaaaaactcccaacgcatccgaaaaagacgagcattggccaaatatctccctatcgtcaagaataatcccgtccgggccgacgaacgccacgtcgagattcaccgcccagacggccttgtgagcttcctcttttgagtcgtcatagcagagacgcaggtagaggccttcatctagggagcctgtgtagtccgcgtaggggcggagttgctcggggcggagagggcggaggattgtgtcaatctgggcgagcgttgggcggctttctttctcggattgggattgggtgttgtagggctgtatacagttcatattcacattagacattcgtatcaatgtgaatattacaggttaaaaaaaaaaaaggtggtagggggtcttggagaagaaaggaggcgcacctctcgaccttgacttcccagctccaggaattggcgtattagacgggtgcgacgctcagagggggtctccgatattggcgcggggtatgctcctgctggtgctggtctgacggagtcccattgtgaaaggatgtatttctctagtggaagggagcccaagggaggaggaggaggggcttcgccttctaggatttcgaggggcatgatgataatatctgaagagagtagataggaattggtagacttgttaaaccatgggttggggcgggttttcaggcctagctaatccgcccgcgcgggttttagggtgggttacctggacagcaaaccgcccatgggtttagcaaataattctaaccgaacccaaataacctaaaataagccagttatgcatatcattacttaaatcaccggtgatctacatagctaatgagatncaagtcttgtggttcagaattataaacaa

SEQ ID NO: 2263 - DNA, 1215 bp, Emericella nidulans
cgacacagattcagccggtcctttccacctgatcggacagtgcctaagtagccgattatctggtaggcgagcgttgcgagcccagcgacgctggcggtgatgctcaacgggtccatgccgggccatcacctgtggaaataaactggcggaccaaaattcgagagaaaaaaaaatgggagcatatcaaacagcggcaggggcagtcacttttatttatgatttaatttattataaatagaggctgggctgtgtgactgcagaaaacccccaactttgctgccgcaagctagtcagaggggctaaaaagcagatcagcgaatcccaccatctgtgcagacactgacggcaagccccgtgcatacactgaaatgacaggaattgagaatagcagaaatggccggagctgagcttgcacaagccaatcactgctgtagttgcggctgagatggctgcagccagctcgtgtatgggtctagcccccacgagtatctccagccaattgaaggccctaaaaacgtgacgaatgcattcagactgctgacttgcaatgacttattttgatctgatctaatttcttcaagtgtgcttattgccgctcatgccggggaatactgctctagtactagagtagtacttatctataatctgagactcacaagcctacagccggctacacagcctcacggttgtcataagcataatacaagcttatattatggcccttctgcctccaccaggcaaacagctgcatagggcacgccccattccccgtctctgtaagcagtcatccgcagatcttcatgccccttccagaacccatgataccaagcggttgctccagcctcgccagtttattccgggatctgatggccctccacaccggcatgccaccgatactttgctgccggatgatctgccggagggccactttgcccgggcttgccgtagagattctcgcggtacgtggccctaggtgccgcgtagtcctcgtggaagagcccgcgacggcgcacgtcggggatcagcaggtcgatgatgtctttgaacgagccgggtttgattgcgtaggcctgtaacattcgcatcagcgcgacgtccctcgataggttgtaaaaaggaaaggaaagaagaggacagtataggaaaaaagtaaaaaaaaaaaagaactggaaagagaaaaaaaaataaagagaaagatatggataacttaccaga

SEQ ID NO: 2264 - DNA, 2019 bp, Emericella nidulans
tggggtccttcacgatcgggtaaggtgccgtcgagtcaaacatgaaggcctctttcggatttgcgatactgcttcaagagttttgttctgtctagggccgggtcgccatagactgatcgaaagaggagaggtttgcgagcaggcgcgagatgaactggttagaccatgctgaaaccgtattggtcgtgacatgcttgtagagtttcaaatgctgctcctttttgtcagcgacagattctgttagggctttgttgattgcttctgagacgccgatagtgtcccatgggttaatgtggatcgcgctcgataatgcgccagccgttccggagaattcggaaagaatgagcggactatggttttcctgctggcaaagtatgtactccaaactcgtcgtgttcataccgtcgcggactgttgtaataaggccgacatcggccacccgcaacaacgcgaagtattcgtgcggcgagagatattgaggataatatttaacaggagaaaaactcagcgacccgaaacggccgttgattgtactgactaagttggagatgcggctggcaatcttttgttcttctttctcctcttcgacgcttgtcggactggtgacctggataagtacgaccttgtcacgccattcagggaatcgttcgaggaacgtctcgaaagcttggagcttctgggcgaccccgcgggcactgtctaggcgatcacggccaacaatgattttcttcccagcgtataactgtcgcaacccttctacagccttctccgtgtctgcgttttcaaacgcaatcttctgtattgcttcagcatcgataccgataggaaagacatccacagccacgtgagcaccatatgcatcgacgccagccgagtcggactcaaatcctagtacgcgagtacagcaggacgagaagtgacgcgagtaggagaacgtctggaagccaatcatgtttgcaccaagcacgcctgtgagaatctcctttcttttggctaggcaccgcatgtactcgctgctagggaacggcgagtgcagatagaaaccaatgtagatattcggaacatgctgccgcagaatgcttgggagcaaaaataagtggtaatcatgaatccaaacaatatccccctccttgtattcctggagaatacgctctgcaaagagctggttcattctcacgtagtctgtccaagaatcgcgctcgaacctgccgtcagttggtccattttgtttatagtgcagaagagcatagagctctttctccgcatagcgcctccatctgctttgatccccaagaattattgtgtcctcgggcacgtcggattcatctgacagccatactggaacaaccttgccgtggcgacttgaactcaattgatcctccaaccttttccgatcatcaggtcccacagtcgaggtttctgcaacggaactatttgattgcagcaaacttatatcgggtaccacaggagctgatcctttactaagagatcgcgaagtgttgtcaagagctgcaggcaagtttgtattcgcattggagttaagtgcctgcaagggattgctcccctcgttgagtggttccacttcaccggtccacccgacaagtgtatgactccagcccgatttctcggaggctaaatatgcaaatgaatcgaacaaagcagaagatccaggccgaggtttcaactcctacacagccgtaggttagagctaatcattttatctttgatgacgcggaatttcatacccaatcacggccagcccggaagtataacttatgtgggatacagaaagcagcactgatgatacgaccagaaaggttcaagccctgatactgcttctggaaatcgggtgctcgcattgtgagaatctcctttaagctcaggcgatgcagcaaatcgctccctgattgggtgcctttatcggcttctgatagagcggaccgggtctttgaggcattgttaaagttcgatgagacatttggagcggaagcgtcagtgaaggaatcgaatcggacctct

SEQ ID NO: 2265 - DNA, 1045 bp, Emericella nidulans
accaattctgcaccctcagtatagtggcccttggccatgttgtttcccgcactggactgcccgtagatgaaattatctggccgatacaaagcaccgttgggaccggagcggagggcatccatggtgccgggttcgagatcgataagcaccgcgcgcgggacgtatttgttaccgccagcttcgttgaagtagacgttcatccgttcgagctggagatcggagtcgccagtgtaactatctgaattagccaggtaaaagaatgcagttggattggattacttacattccagaggcgtcgaggccatgttcgccggagatggtctgcctgggtagtgttagagaacgagcaggaacgagaattgttgatagacttaccagaaggcagaaccaacctggttaccctgtgaaggagagagacttcagtatcatgaggataattggctcgagatcggtggacttacacactggccggtctggagatgaacctaagagatggtcagctggataaacaattgtagttgttggaataaactcacaatctcacgcatgatgggcttgaagggatgggtttttggttgaagggggtacaaggaagggaattaaagaaggagaggtgggcaggtcagatgttgagcggctgcagtagtacctaattgggcttactgggcttactgcgctaactaggccaactaggctaactagatcaaggtactcggctaggccccgaagtcacgagcactggccactagcagatcaactacctgcttcgttagtagactgtagctctagaagccgaatcaaagtgacccttgacaacccgcggatacgaaatgcggcatatgccgcatatgccgcaaatattggctctgcagctgtacgcaaaccaaaagagtcggacgtctcctactatcacaccgctatcgattcccccatccaattgtggctagaccctgtaaacagaccggatggacggtttccgaggtggagcccgctacggagaagatcgaccaactttgtctgaggttctttatttgttggcctttta

SEQ ID NO: 2266 - DNA, 3140 bp, Emericella nidulans
cattccttcgtcagggagtgtcttgtcaataaaccctcaaagcgtcacccatacaacatgcttatctgacatccttggttatcttcattaatgcaacctcctgactcggataaccctgacgtaccatttttttctcttgcagatggcgcatctggcgacgtcacaccaccagttacagatgatcaggaagttgcggactgggtcaaagataggctggagaaacggttgaatgggcttctgaaagacgaaactaagccagcactgcacgccgttccattggatgccgtgcctgggagcccgcttcttgatgaccctcccatcgctaacctctcgcttgcgtcctccatgccagaatagccatttacacgcctccgttcaccaccattatatgaagacacatagcaaggcctacggcctacgcatttgctctgtttcattaattctgccataccctctttttgctgctgttccgacgcatacctccaagaacttctggcgctggcgccactcaggcagacagtctggctttttgaaatcgttttgtcagctatgggccacgtttggtggtgttttgtatgaaagaaaaccgctagctgatatgaacgtgcggtcttgcttcgatttttcctatgtgatgagcagggcctactcaatacaacagtgtatgaatgctcccatgtaccgtattatcttccaatttcagtataaccagaaggatcgagcttgtgccatatgcttccacaccttagtaatagtctcaacattcctaatgcttatcaaccggcataataagtgctgagtaatgttgctagtctacgatttttttggatgagtccgggaataaggcaaacagtaaaaaaactagatttttacagtgtaggaggttactaactctcagttaacttggaataatcttttgcttcctgttgtgcattatttgtcagtattactcggttattttcccagcactggtggtcgatagcgtcatcctgcgcctaagctcgcacctccggcttcgctccccgccagctttttctctccaatccagcctgcagattcccccctccccctccttttattccttcgggtgcccgtcaataatctccctccatgctctctcgctcctcgcttcggtcattaagtgcccaagcgtcgaagattcggctcacccgttcgtctctcgtctgttcgccaatcactcaatccaatcgagcctacacaagctacggcattgccactagaaaccagaagagaggagtcctggattcttcatctcgctcagctatctccactcccactgggctgcgtctggcctcgctcacaagacaattttcatccacttcgcctgcagcgaactcgagcaacatgccgccggtggagacaaaacagtatgactatatcgtgttaggtggtggtagcggtggtagcggtagtggccgtagagctgccggttggtacggagcgaagacattgattgtggagagtggacgcgctggcggtacttgcgttaatgttgggtatggaatgactcgaccctggtgaaccagcgcattgctgattgatacccgtgtagctgcgtccccaagaagatgacctggaacttcgcttccatcaccgaatcgatcgaggccggccgccactacggttatgacctccctcataatattgacgtaaactacacacatttcaagaaactgcgcgactccacaattgagcggttgaatggcgtatacgagaaaaactggggtaacgaaggaattgacctcgtgcacggccgggctcgcttcgttgagaaaaagaccatcgaggtcaccaaccaggacggcagcaggacacggtacactgcgccgcacatcctaattgcgaccggtggccgacccagccttccggatatcaagggctctgagcacggtattagtagcgatggattctttgagattgaggagctgccccctaagcttgctgttgttggtgcggggtacatcgccgtcgagctggcaggtgtcatgggcactgtcggcgttgacacacacatgttcatccgtggcgagaccttcttgcgcaaattcgatccaatgatccagaagaccatgacggacgatacgaggccgtcggcattcacgttcacaagaagcaccctggtatcaaggaggttcagctccttcgcgacggcaagggcaaggacaagcttctcaagctgataatgaacgatggctcggagatggaggtcaacgaactcctatgggctatcggccgtgtccccgaagttgaggatttgcatcttgagatccccggtgtggaactcaacaagagtgggcacgttgttgtcgacgaataccaaaacaccaacgtcgagggcatttacgctattggcgatgtcacaggtcaggccgagctaaccccaggtatgttacagcctctactcttctcaaatccattgaggaaatattcttattaatatgtcaacagttgctatcgctgccggccgccaactcggcaaccgcctcttcggcggaccccaattcaaaaatgccaaactctcttatgacaacattccaacagtcgtcttctcccaccctgaggtcggcaccgtcggtctcacagagccgcaagcccgcgagcgcttcggcgacgagaacgtcaaggtctaccacacccgcttcccggccatgttttattccgtcttcccgcccgaggagaaggcgaagaacccaactgagttcaagatggttgttgcaggaccagaggagaaggttgttggattgcaccttctgggtctcggtgttggggagatgacgcaagggtttggagtagccgtgaagatgggtgctacgaagaaggactttgacagctgtgttgctattcatcctactagtgcggaagagcttgttactttgcgttagttggatagaaggaattgttttcacatagaacctctgaatgaggttatgccggagattattgataatcgaggctgatagtacgtatttgaattttttgtatttatgcttgtacttataagatatatgaaaatgagctacatatcgaatgtgttcgcttctcaagtatcaatagatcgcaagttactaacgatgtgatcaaggctattttcgtaaggtgtacccgctagaaaatccgct

SEQ ID NO: 2267 - DNA, 896 bp, Emericella nidulans
caaatgcaaaacagacaaaaagaacaaccaagcgtcaatcttccgtacgagtatctaaggtcaaacaggagcctgagatcaagcaagaacctgaggtgaagcgggagcttgaacaggatataactatacaagataacaatcttgaagttgttcctgggcctgctatacagaagaaatgcttatttttaattgcattaaaggagaaggagccagagagagatattcaagagaaggatctagagcaggaactattagagttactgtttgttcctgggaagaaagatagagtggcttattatacaagaaagtgctatatcctctagcaggaggatattaagcgctctgcagagtttggcattctaatttagatacagagatatgatgttttaacagctggtaatgaggaaggcattcaacatggccatccatgtaatttgtacaaaggcatttagtaacacagctcaaagtttgaaatctctactgttttgcttcttcctcttctcttccttccttccacatctttctttctacaacaaccatcaccatggcgtacgagactcctgttccctatcccctatcattaaaatcatctgctgactattttacttgctctgtacgagtatactgctgcctctgtagcttgtatctcgtccgaagcagacaaaatagcctccaagctcctcgtacacccaaccgcgccccctccttccctgccgaccggcctctcagtcgagaagagtgcctgagcctctttgcctttgttaatagacgagctggacgagcaccaactgctatgcttccacttgggggtcaagagctatctgggtatatcatacagatatacagaggcattggctggccctttcttggcgggattgtgagtttattccgacaga

SEQ ID NO: 2268 - DNA, 1791 bp, Emericella nidulans
tgagattgtcttaaatataactgacgccggggctctactactggcgggcctccgacccgacggcaatctctctgacgttccttctctggtgtgtgctgagtcgaccagaagtccaaaagcaagtcgaggccgaggtcgccactcttgaaggtgaactgaccgacgaagcctgcgagcggttgcccatcctgaatgcggtcatcgacgaaagtctacggctatacggggcggctccaggatgcatgcctcgcagtccaccatccgggggtgtgacaattggggggtatttcattcccgacgacaccatagttgctacgcagaactggagtcttcagcgcaatccgagtatctgggatgatgcagacacgtaagtggaagcccagtggaagcgaatcaacaaaaaaaatgcggatggcagtgttgatacagagcggctaggttcgatcatacgcgctggctatccaactcgagaatcactgaccaagccaagctggctttcaacccgttcgggtacggggcacgccagtgcctaggtattcatctcggccgtatggagatgcgtctggctgcggccatgttttttcgcgaatgtgttggggcgcgattaggacgatcggtgacggacgagagcatgcacgtggtagacagtttcatagcgggcgttccccgcgatcgtcgatgcgccattacactgacatagacgccgattgatggaacgagacgctgtcgtggagagtctggcgtaccatgccagacgcaccaacaattttctaactcgcttcggatagagccgaccgatgcgcgatgtttgtcggggcatactgttctatggcaccgcccagattgcagctcggttagacctgatttttagtcgcgcgatacaaattggttatataagcaacattagtcatgactgtcacgcgaccataaagacgatgatgagtttcaagtcgcgtcacctgccctaggggtcgagctcgcttagtcattatttagtaagctaggtatagataggcggcaacgttggccaccaataatgacaattgtccgtccctttccacagtgctagttagtcacgtgtcaaacaccctacgctaagcccagtttagcgatcgcggttaacattgaccttggcgttccgaatttccattaaaaatactcacccttgtcagtttagtcatgcgctctggatagtgatatttttccaatcccaagccctttcttgacttgtgtttcttcctgctgttctcgtagccactagtagatctcaggcagatgttaaactcgcaccggcctgtttagaccacgcagtggatccactactgaatcctctgccgcactttattctcacgcccagcaacatgccagcattaagtaagatcatactataagggatcattattacctggattggtagagcagtttagagctggtactttgaattgatagatgccaatgattaattatgtttgtacaaacaagaccaattctagtactatagacaaacgaaagagaaatatatatgtgcgtgtatatagttttgcgctgcaacgccgagcgaaggcagtgaccaaagcctcagaaagatagatgtctatcaagcacgaaacggaagggccttcttcgcaaacctcccgacaagctcagagaaatgcctcttactgaaacccgggtagttcgggggagtccagatgggaggcgtgccatggcagcgggtcaaaggcctgtctgcaaacggacgctggtcgaacggcatgccaatgaacttcgctaggggtgcgcagcgccagc

SEQ ID NO: 2269 - DNA, 2543 bp, Emericella nidulans
acaacaacttcaataatgtagtccgcagcgttggtaatattttcaggcttctgcccgtatttcgcaaagtagtcgaagatagagtgccctgcctctccaacttcgccaaaataataggtcttgccaccgggactcagagccagcactcgatcaaacatctcgaactgctcctggtttgcttggtgtattgtgcaaaggattgccagaccctggtcggcgagtcgtcttagtagggcacaaatactagacgcagcctggctgtctaggccactagtgggctcgtccaggaatagtagcagctcaggtcttgcacaaagttcaacgccgatggtgacccttttcttcttttcgatgtccaaagagccgataatggcgttctgcaattccaccaagtctaacgtctctagcaccgttcttgcataagccaacttctcctgatcaggtacagtggagtcttgacgaagcagtgcagagaactcgaatgcttcgcgaatggtgctgctttcgtcatgaatgtccatctgttcacagtagccaattctagatttgaaagaagagtcgataggtcttccgtctacatacatcgtacctgtaaggtcgccagagctttgcctctgggtaagcgcagtcaacactaagaatgtcaggacacaatcctgggatgagcaaaaacacagaccaggttcactcacaagtcgatttgcccgctccagaagctccgaccaaagcagtcagggtccccggtttgcaatatccactaacaccgtccaatagcttgcgattttcctttccaacacggacaaacagttccaggttatcccaggtgaaggttgatttggtggcagtgagggctccaacagacggtccatcagtgtcagatgctgaaggcgatgtttgattgacctgcacagggcgctcttcttcatcactaatgttcgcaatcttcctcagctgttttcgagactttttgtactggactggtccggcactgtctggttcccattccataatttcactcagaaggcaggtagcagcaacggaagcaacagtgaaaagacagaggataccgaagttgcgccaaacatgactaaaatagaacccgtatttgactgcaagatagtcatcgccgttgactatagtgcttccgatctgacttccagcataagcacatgtctggtaggcaatgtcagtatagacaggtcctgcagggacaaccgaagctggggagcaggtaaagttggtgttgtgaaacctccgcagccatcattgcctcgtatgtatataacgctggtgtgatatactaggtatgcattagttttattatatagacattaggtaagatactcaccgctatccatccgacccagggaacatcagccatcatcttgtccacagagagtacgtaacctccaaaaacaatgcaaagcagaacgaggaatcctgtgtagcggagggcaacctcgaagttagaggacgcggcggcaaacagccggaattgagctgttagagatatcgtgcacatatagatgaacaagaaatcgatgaagaaggccccggcctatgatagagttagcgactgggtgcacaatcgcttggcagatactcacatcagacttcaaccctgacagaaaataaacaaccactaggtagaggaaagtaaggagagctgcaatgaagatatctgcgacgactcgggccaggcacacagcactgggccggacgaatgcaaatttcttctggcgactgaggatgtcacgtccctgcattgcttcttctaattcagacatttggagccaggccagaagaatagatgagtaaaaaatcacgccccctcgtgagtacatcccgtccgtggtttgcggttggtcataaaacatggacccgacaaggagtccgtaaatgaccgaggagataagtttgatgtacaagggcgacatgtggcctctaatctgccatatctgacgtttagcacataataccacctgtcggaagagggagatggtatacggagatttggaggacacgaatcgggatttgtcggtttggagggcctctttgacgtcttctaagctttcatagtctgtatcagagtgcgactcggcgcggctcctcccaccgaatccctggctgtcatagctccgtacttccttctgaacgttcatgaacgcagcgctctttctgaaagcttgttccagctcaatgggtccttttggtgcgcgctgttcccacccttctcggaacttccttcttttttggacagtagaactagtaatgagatcatatgctgcaagcatgcgaacacactgatctgtaggatcatgtaaggatgcagtgccagcgtgcacgggacctaggtagagcagatccctttggcggtgtgaacgccagccaccagggctatgtcatttatcgcggcaacagggtggtacgcggtcataagcgtggcatatccgcaagtgtcggtcatgagccaagaaaaccgggcatagtctagaccgaataaggcatcaagacctcgggtcgggtcatcaaagcacaatcgg

SEQ ID NO: 2270 - DNA, 1984 bp, Emericella nidulans
cagcatcatattcaccatgtaaaatactggtttgcgtatcaggtgacatactgtagatgttcatcttggagtgaccgacaaccttcttgatctgtcccttttcctcgagatcagcgagggccttgcgggccaagctgccgttgatcttgagacggtcaacgagagtggcgacggtgatgagacggtaggactggacgtccttgttgagtctctcagcggtcgccttctcgaggacgacggcgtgctgggccttgtccttgactatagcggaaatatgttagttcgggtattcattatccattttcatgtgtagatgagtgcgaaagtcggtccaattttctggttcgtaggatgttgcgaaatcgaggattgttcggtgttgggtgatggagatcattatgaggacggagaagcatcccttgcccttggaccacttcatcttttgcttgcctgcaggagcctatttcatctattagcatcatattgggcagatatatcgtctgttctgaggagggctgcagcttaccattttgactgtctgtgtggttgttgagagctgcgagactgaagcgtccagaagttgagcctaagtgcaaaattcgagtggggagagaaagatcacgtgagaataaaccctagccctgggatggtcacgggtccaggctcggttactgaattctagctactaatgtgattggctgcgagaactatgaagttaatgcctggaacgtaaggcagtgacataattatccctttaaaacggcaacataaagatggttatgcaacggtcgcttatagaatattagacatgtggcgcagatagataatctcatcggttcgtgtaagtgccatggctgcctgataatacctttccaccaagagtgtttagagccttaaattctgcaccatgctcatccagctcaataaatcccaaaacgtagtcctcttgggagccaaaccagaatctagacttctgacccatgtcagaggataaccatcgcacgtcgtatctcccactgtcgcttcttgaaatagggactcgaaagatgcatggtggtcggtgcgggctccaaaatcgtacaccgggaagagcattgttggctgtagtaatgagcatttgcgtgctggaatgatgccatataacctgtctaacagcatgctcgtgaaccaaaaccgaaacaagaactggagtgctctccaagtcccatacccagacaatgttaggccgcgtctggtccacagtgctcagaagtttaccatcaaagctgaatcccatcaaggaaaccccacgggagacactcgtcggttcggggacggttgagaatgcagatgagcttgacgactcagcgtattctaagctcatgcctccagcggcgtagcgttcccgccataggctaggaggggattggtcgatggggaagatatgtgagagtgtagacgagcaagagaacttcggatgttagtaatgagacataaagcaacacagtaattataataccgttttcgttccaagtaggtccaccgtgccatctatcttaccaacagccaatacttgcgataagccatctcgcacaacaggactccattcaaggcctctaactcctagatcaaataatccatcagattccggtaagcctgtataggtcctaaagagctgcacatcggcagtaaagacgagaactttggttcctgcacttgcagcctcccatacagctatccagtgcccatcagggctccatttcagcccttgcgcgtcgaccgtcggaagcacttcgcgtccgatgacctcataggtcagaggctcatgcacggtcagcaggtcactagtctctggtttcaataagatcgcgagctgcccggtcttcggccgatatccgtaaccattctgatgcgagaacttgggggactttataataagactgcggccagagtccaactcaaagacagtgagcttggtgttgaatgcgtggaaagcaacaatctc

SEQ ID NO: 2271 - DNA, 3651 bp, Emericella nidulans
agacacttcacttgggtgggggttatagactagaaagagctcttactataggtaatcatactaatgctaattagaggtggcgacacctgtcactcgccacaatctaccaatggccagatcccttctgaaccctggatgtaccgacatggcaactccgcaaaaaagaagctaatgatgctcaatcgacgcatcgacgatatcatcgtagaccgcggcccagccagagctatggatcacgacttatgacttcatctcctttcgtcaagcaatcaaagcagtttctcaacgctgggatcaagcgaacagctgacacttccgtatggaggaatctcgcactcatagctcggagtgctgcgtgttcgcgtcatcattcatcatggacgccacctgctggctcttatatcgggaactgtcaccagaagctttgcaaaacaatcaaataacattatctatcaagaaccatcattactgtaactcaacccaaattgcacgtctcccctaaacatggaagtacacctgcatgctaatatcatcagcacgatgtcgtcaaaaaccaacttcatgagcgccggaaaccagacccaacagtccggaaaccgttcgcaaacgggcgctagctcgaagtcacaaaaagatccgacctctggctggagtgtcgaggaaatgcttgagactggactcgatcagaacggcaacattgtctcggacgattattcctggattgacggccgtcgactaaataagggccaacacggcggccaagaggccgatgatgttgccgcttcgcttgatgagcatttcgcttaaagcgacataggtcgaattgtgaggtgattacaaactgcgcctcggtttatgacaggttggtgcttttcgttccttcattcttaggattggagtccatgtcgctatcgctaccgcactaaccgatggaacgagtttgactatgtcggcgctcatttgatatgtaacttaaggaatctttgatcaattgaatatcataatcaatgcggctacgagtacgctgcaaggtaaatgctcaagcccttgtaatgtagaacttggttgtccttgataagtagtagtcggtggtagtcgtcattgctatggcaaccgaccgcactgcgcgggaccaggataggcctgaatcttgcctggggctccacgccatgctcgattcggcaaaacccaaacgaagctggtttggagccagccgtttgtgacgctacaagtcggtgttattgttcctctcgatattatcctcctgtcccggcagactgagacaaagatgagaagcttcgcggtgttatcctgaggacaattgattcatccgctgtcaattgttatcttgcggtaccttgccgtatctcatcgcgttgcccttccttgcttcggctgcatgtttcgctcttttacttcacatcgcaggctgtctgcattctccatccgtctttatcattccacagtcaatacagtgtcgagcactgaacaataagcttgcattttaagacgacctgaccctaagtccacgtctatacttcaccgcaacgagcggcagcgacagcgacccttgcacttgcctccacatcttttcgtgtttccgcccttagtggtacaccgaccttctgtatgtaccatcactttatccgtcgccaacgagaaatcgtcgctcaacttgaacagacattgtcagatcacggtgaagagatggcgctggaccctcgcttctatcaccatctcggccccggcatcggatctggttcgcagtcttcggcttcgctgtcggggttatcttcggcgacgggaatcacgagcccatctatacaatcgtctgctgcttcttctgccggcttgcggtcaactgcttctagtccatccctacggtcacgacaaggcgttgttgccagaccttctgatggcgtcccgggcctcggtcctggaggaaatgttcgtgtcgttgtaagagtgcggaagtttctgccgagaggtacgtgcagccagtttgatggacatgaaagctaatatgatttatggttcagagctcgagcgcaaggcaccatgtttgatttcaatggatccggatacacagacgacgaggctaaaggcaccgagctcccactatgacgaagggaaaccgaaatcgcaggcgcgcgggaaagtgctggacgataaggaattcgtattcgataattcattctggtcacacaacgaggcagacgaacattatgcccaccaggaggatatctataactgtctaggagaggagtttctagaccacaattttgaaggttaccacacgtgtatcttcgcatacggtcaaacaggttctggtaagagttatactatgatgggaactcctgagcagcccggcttgatcccgcggacatgcgaggatttattccaacgaattgaacacgccgagtctccggatgtcagctataacgttcgcgtctcctattttgaagtctacaacgagcatgtacgcgacttgctggttcctcgaactgacccgcctcattatcttcgaattcgagaatcacctactgaggggccgtatgtgaaagatcttaccgaagtcacagtccggaactatgcagagatcatgaagtacatgcgcaaaggcgatatatcacgcaccgttgctagcactaagatgaatgatacgtcctcgcggtcacatgccgttttcacgatcacactgaagcagatccaccatgatctctctacagacgagacaacagaacgcacagcgcgcattcgccttgtcgatctcgctggttctgaaagagccaaatccaccgaagctacgggtcagcgactgcgcgagggatctaatatcaacaaatctcttaccactttgggtagagttattgcggctttggccgaccccaaagcaggacggacgggtaaacggaagggaaaggaagttgttccttaccgtgactcaatcctcacatggttattgaaagacagtcttgggggtaactcaaaaacggctatgattgcctgtatctcgcccacagattatgaagaaacactctccacgctacgctacgctgaccaggcgaagcatatccgcacgcgcgcgagagttaatcaagatcatctgtccgctgctgagcgtgaccgacagatcgaagaaatggcggagactatccgcacgctccagctcagcgtcagccaagctgcgcagaatcgccgagagaccgaggtccagaatgaacggcttgaagagtatcagcagcaggtggagaagcttcagcggctcatggaggagaacaagatggttagtgaatgcaaaatcaggcagctgcagaccgagaacgaagccgatcgcaaccacctaaagctggctttggatagcttaaagaatcctattcctccagtgacaatcgagaaggctctcagcgacgttgatattccagacgaggagcagccgatcgacgagcagcagccgggctctcctacttcggaggcagaaacagagccggatctaatttgggaagacgagaacctcccacccgacacaagcgagttagaagcccaagaaatgcaggcaacaatggagaatcttttgggcgatctcgatgtcttcaagataaagctggctacagaccacgaatgctttggtgcaagtcgaaaacacgaggg

SEQ ID NO: 2272 - DNA, 1533 bp, Emericella nidulans
tttgtgcgtgtgcatcaacccccttttctaagagcattctgacaatatccgagttcccggccattgttgccaggtggagaggctgggcttcgtaggcatccttccggtacaagccagtcggtttcacattatcgttgttccattgcgaagtctctgcgtgcacgtcgctgccggcttctatcagtattttggcggtatcagtgcggccaaagtagcacgctgcgtggagaggggtccagccatataaatctgccaggtctacgctagcgccctgggtcaagagaagctcaactagaccggaatgccccctttctgctgcatagtacagtagtggtttcccgtcacgccacaatcatgacatccgtgtgttcgggtccattccatatgccagtaaatgttgggtcatatgcaagtttcctaggatgggtggccattcgaacatgctctggcgttgcccgtactcacatggaatttcgactggttgggttaggatattgagccaaaaagctattgtctcagcatttccggaaatcgcagtcctcaaaggcaacagtgcctgcagtgcgtcggtcttgagatttgctcctgcgtactggacagcatatcgaccgtctgcatctacgatatcaggacgtgcgccgtgggccaataaactggtaatgagcggcacattccctctttccgcggccagatgcaatatcgtgcgccccttgtcattaactctgtccaaggctcctactttctcaaggcatacgcatacacgcgtgatggggtcagaaatctctcccagtttgccgagaattccggtccaatgaccctctctaggacgggctgcagcaacatgaagaatgtaatccaaacacttagtatcaccatgtacagcagcagtgataattggatcaaagctagtgcctgaggcggagaacacatctgcgcccatgtctactaggtctttcaaaacatcaactgggcctgctgctctggctgcgacagtaagcgcggtatcgccgttctcagaccggaaattaacatctgctccggccagtatgatcctgcccagtatatgtctaaactgagataggtcttcgttcaccctcttactctctgacagccgatgccgaagggcacctagaagagaatggaccgcagacggactgacctgagcaccattatcaagcagaagatcaacagcgttggccacaaagtctgcaatagcagctgatgctataggcccaagatctagaccatcagggatgcgagcaccgagatggtagagcgtgatggcgacttcccacctattcgcccctagtgctatatccaacggcgtaaggcattcgaggctatctttctcgtctgatgagctattcttttgatctttcatggcactcatcccacgatgtataggcatgttcagcatgctgacagaatcagcaccctgtccgcctcggataagaacacgagcagtttccaataaactattgttttcttgggcttgatgagttccgcgatataaactatgcatatggctcccaa

SEQ ID NO: 2273 - DNA, 1579 bp, Emericella nidulans
aaaaatatgtttcagaactttggagatcttgggcaaaatatcaaagaatacgtggagcagtatcaggtgaagactaagaacactatgaacatcgagtctattgccgatatgaagcgtttcgttgaagactatcccgaattccgaaaactttcaggcaatgtgagcaaacacgtcacactggtcggggaactcagtcggcgagtgggtgaggaaaaccttctcgatgtgagtgagttggaacaaagtctggcttgcaatgacaaccacaatagcgacctaaaggtatggtactcttacatttgatctgtcctcaaatcctaacgctttatagactctgcaaaggatcattcaattacctacagtgccccctgagaataaattgcgactagtggctttatatgctatcagatatgagaaacaaccgtccaatgcccttccggtccttcttgatcttcttgtgacggccgggggtgttccttctcaccgagtcaacattataccaaaattactggcctaccaccactctctccaagctccgccaattgccggcggattctctgacctctttgagtccacatcgttgttttctggtgctcgcgacagattcaaaggcttaaaaggcgtcgagaatgtctatacccagcattcgccgcgcttggaagcgaccctccaaaatctgatcaaaggcaaactcaaagagcttcaataccccttcctcgaaggtggcggtcatgttcgggacaagccacaggatattatcattttcatggttggcggaacaacatacgaggaggcaaagatgataactcaggtcaacgccagctcacctggtatacgggtagttttagccagcacgtctgtccacaacagtaagagtttccttgaagaggtcgatgatgctgtgagcggatggcctgagagtgaaccctccaccgccgctggacggcttcggaggaatattgggcgatagatttccaattatgtttatcattctctacatatttttttttttctttttctttttcggtgtgctggcgttcatatgactgcattttgagtaagggagatgtatatccaaaagggtcgagattccggcagcgatagtttcattcacaaataagatatatatacagactgccacgttgtattcatttgagctcgaattttcattgcaagtaacgcaaaagtagaggacttgatgtgaagacgccgccccagaaccccaatgcggagaagcggagatcacaactgaatcctcagcagcgtcatcaacgaatctgccctctgtcttccaacaagttctccatggaatttcacaattccccgccgagggcggctacagctttgtcgccctctacagctgttagcagtcgagaaccgaagctccagcttccttcgacaactgaccctccaggcccgcaaaacccgcccaaaccgcttgtctggctggtaggtcactccattatcgcaagagtttacatgcttaatccgtctattaccgcgaattagatctttggtgcaactggccatatgggccgctccctcgtgaaaaccgccctttcgcgcgacgacctggtct

SEQ ID NO: 2274 - DNA, 1643 bp, Emericella nidulans
  unsure (1)..(1643): unsure at all n locations
acctgaccaaacagcgtttgaacaagagacaaaagacaatgtcgtcgactgggatgggccaggcgatccccataatccacggaactggccagcatggagacgcatgagccaagtcgtgctcgccagcggtttcttgctcactgcgtaaggcggttactgtactcctttggtgaagccattcccgtgctgactgatagccctacagcaacctcgccgcgacaatgtttgcccctggagccgcctcgcttgcgaaggagttccatatcacgagttccaccattgtcagtctcaccgtgtccatttacctttgcggcttcgccgttgggccaatgttcattgccccgctctctgaactgtatggacgtcttgtgatctaccacgcctgcaatgtcatttacattggcttcctcatcggatgtgcgctggccaaaaacacaggcatgttcctcgtttttcgatttctggccggatgtgcatcttcgggcccattgacagttggtggaggaaccgttgccgacgtcgtcccgcccgctcagcgtggaagggccatgtctctattctctacaggaccacttctgggaccagtaggtgacatcgcccgcatgatccgtcataatgctgacgatcattcaggtcttgggcccaattatcgggggtttcgtgtccgagttaatcggctggcgatggacattttggatcattacagttctagtgagtgaagtacgacctctgctattctcgagtcgctgacagttcgacctaggcaggagtattgttcatcatatcgatcttcttcctccgcgagacaaatgccgccgtgctgctagaatggaaggctgctcgtctccggaaagaaactggtaatacggctctggtttcgaagatggatcgaggcctgaccccccgccagctattcgtccgcgcgattactcgaccaacaaagtttctcctcttgtcccctatcgtgctcctcctatcacttctgtgcgcgttcgttttcggcctcctttttatgctgttcactacgtttcccacggtctttgaggaacaatacaatttctccgccggcatttctggcctgtcatatctcggcgttggaattggaatggccgtctctctcggagtctttgccgctgtgagcgacaagctgcaaaaggcacttggagattcgcccaaacctgaagggcgcctaaagcccatggcgtgggtcatgcccgccgtaccggtcggcatcttctggtatggctgggctgccgagaagcagactcactggatcgtgcccatcatcgggacatccttctttgggttcggccttctctggatcataatgccgacacagctctacatggtggatgcttttgggcctnngagtgccgcctctgctttggctgcaaacgtcattctccgacttctttttgcagcttttgttccattggcagggccacctttgtatgcggatctaggacttgggtggggaaatagcgttctaggttttataggcgtggcttttcttccagtgccactctttttctatcattacggaggatggcttagggagcgtttccctgtgaagctatagcattacattgaggtagatattatagatctattttaccatttcagcgctacacgaggatattgtc

SEQ ID NO: 2275 - DNA, 1319 bp, Emericella nidulans
ttgtgcctttactccagaagattgtgaagactgaacgtccactcaaggagtttgcgttgcctattctctgcgatatggcacactctgggaaagttggccgtcgggagttgtggcggaacaagggactcgcattctatatctcattactttctgacccttactggcaggtgaccgctttggatgcaatattcatatggtatgtcacattctctctggctggtatgtgcctagctaataaccattgacaggcttcaggaagagaccgctaaggtggaagagcatctattggaaaatcgttacgatcagccatcattcacagacgcgatcgtgagatgcttgacattgtccaaggcgaatgcgttcgagaacatccttgagccgctgcaaaagcttctgaggctcagtcctccaatagcctcgaccctggcgcgcccagacttgttcagccggctcggacagaaactccatcattccaaggctgcggtccgtctgaatctcctgcgcataatttctagcatttgcgactctagtgagcaacagggcggactacttgcaagctacgggctcctggactcaattcgcgagttagagcatgatcctgcgattcttgttcgggatatggctggaaaattaatccagtccagcgagagaaatgattcgtacggactctgtaaactcaagcccaatgttaggcggggaagtacatctgccacttcccctggtctccttgccaaccaatcagcgcctgtcactcctcagttgagtcgacaaaaccagtcgaaaggatactacgatagtcgggaaacgcaacggcggccgcgaagtgcaatcagtggctctgcactggctctccgtcctggaagcagagacgggccaactccgggtattgtagggggtgctaacggaagtgctggtgcctcaagaaataggatagctcgcggagtgtccaatagattgtcgcacatcgagctgttaccgaatgatgatgatcgaatcccgagttctataactcgtcgatcgtcggtcctcccacgtcgtcgacgattgacgcagtttgaggcggagcgaggatcgtaatcggttggtccgtaatggggcatctatttatcactatatttcctttgcgaatgggttctgtgagtacttctcttcgatgtctgatcactatgagcccatgcatcatcgtataggcgtattttgcggcgtttgccatcagttatctctcttttgcccttgggtttacaatacatcatatgttttgctggctggtagggtatggaatttggtgcatcggcgacctagacaatagcgcatgtaga

SEQ ID NO: 2276 - DNA, 2502 bp, Emericella nidulans
catcttcttctccaagttgccagtcattgcatgtaagagcgtttggatgttatgcagcgtgcttgtctattgaccatcttgatctctacttcttggtttactttttccattcgccgacttctgggggaacagcccattgtgccctatcgattcaacatgtccttgctttcagctgcctcaccggaaactggccgtagagaccacgatgagagaacgtcttccaatagcggaaatgttgaaattcacacgctatctggtggacgtgagatatcagtaagttaacatacacttgccatcgcagtataaaccggactggttaatgaattcttagggtcacaagcactcaaacccctgtatcagctctcccgaccctttggctacttcgaagcttgggaacctgcagtcccccgtcggccagaaaaatgacaatgcttccaataaggtcaggttaccgttgctcttgattttccttggcagatagtgtctgacaatcctagaagcagaagttggaacatacaagcaatacccttcctctgacgggaaattctgaaatggaaaggctcctggcgaagctttcgccaaagccccagttgtcagactccaagcaaacgatcaaccaggatatcctctcaaagttgtctgagcagcagctactcctcgaccagcaaaagagtattttggcgaaaaataaagttgttggcccagggcatctcgaagagcgcgataaacctctcaccatgccacagcgtatggacgctaaacaggctgctagccccaaagaagttgcgcgtttcgaggctttcgacaccgagggttccgagttgcttcgtctaaagcgggaactccaggctgctaactccaaaatcgccctacaggagcaggaactagcacaaacccgtgttatcaaacatactttggaccaggcccttggtcctccatccgaagctgactttagcggacgggatataagcgaacaaacaatcagcaatctgcagagcgccttcaacgcatccataccggcgccgcatctacttcaagacggttggaatacgcaggaagattcgcagtcagatatatccgatgcactctccgccggtgcttacaatagatccaggggattttggggccctcctgctcagcaagtttatggtgtgggattgaactcagataaagcctacgctgatagcaatatgcctctccctggcactgctttcggtcacgattcgagcagattttggggtccttcaaacacaaacccctcgattccagcgaacagttctttccaaccccatcgcgtgctttcaggcccatccacagctccttgcagctttgatggacctttctccgacgaccaaggtaggtatttgcaaagttcaggttttggcccgcgccctccaacagcccagccaagtcgtattgggtcatgctttcctgggacaggctctccctggggtacatttgctcctagctcggccgacagtcagggttctcgatcaccgccgagtaaaccgaacagtacttatcaacaagtaggactttaccctttgcccccctaccatcagcgggcagttgcacctccgctctcaccgacagcgaccgagttttcagcacctagtggaacctctgtaccctgggcaacctcatctgtgtgtaacaccgattctgatcttcgtgctcgattgacagtttacaggtcggcgaaagctccattcaaacgtacatttcacctctcgaaaccacttaattatcggcgactgttagataagaatgtttcttgtgattggaaatacatagtcgacaagattgtttgcaacaatgaccaacaagcctctatattcttgcagcaaaagctcaaagtcggcacaacagagcaaaaattcgacatcatcgaagccatcatccaacaggcttactcgctcatggtgaatcgattcggaaacttccttgtccagcgttgtttcgaacacggaacttctgagcagatcgtcgcaattgcgaatgctattaagggtaacactttgagcctcagcatggatcctttcggctgccatgtagtccagaaggcctttgactgcgtgcctgaggaacacaaagcagtcatggtgcatgaacttctgcgcaggatccctgaaacagtcattcaccggtatgcgtgccatgtatggcagaagcttttcgaattacgctggagtggtgagcctccgcaaattatggcaaaggtcaacgaagctttgcgcgggatgtggcatgaggttgcattgggagagactgggagcttagtggttcagaatatctttgagaattgcgtcgaagacgaaaaggtatgacttcgctgcatttttgcctctcctttacgaaggctttctaaccacaccatctagcgccctgccattgaagaagtcctagcgaagatcgatgtgcttgctcatggtcagtttggaaactggtgcattcaacacatctgcgagcatggtgccccccgcgataagagtcgtgctattg

SEQ ID NO: 2277 - DNA, 1875 bp, Emericella nidulans
cctttgcagtgcattccacggaccactggagagagcgagttgaatcttctcaatttctgcttttttgctgtggcctgtcggttgcggaaccagccgtgactagcgcatttgattttacctcaatcgcgtgtaacaaccggcacttgtcgcatcggaagtcgtcgatatattcggtcttgagaaggccgtcaaagcaagcattgagtgtggtagagctcctctgcgggacttgcagtgtcaaattgacaaatgaagtttggttcggcttgtacttgtagtggcagaattggcattcaatctgggactccaacttgccttcaaaaggaaagccatactcgttgtcgatctccttgagcttggtgtctattatggccggaagaccattctctgtgccgtcatccagtcgcacttcaatctcagacggcgccttctcgcgctcttggtagggattgaattcgattgatttctccgccctttgacgtgctttcacaccagcatggtactcgtcggacagtctttcagccacaatctgcaggaactcctgcgcgtcctgctggttgcgactaatgcgagtgcgatatgcaaactccaaggcctggatgaatgcccgcgccgagatcgtcttcttataaattggccgctcgtttaaccgatccagcatctccttcagcgccctggtaatggtaccctgctgaagctcccggatcctgtccggtctcttctcacgcaattggtcagcctcctctggcccgggcagctggttgtagatttcaggcccgtccagctcccgccgatggagctcgcggatcaaatataaccgtagatcgcccagaccggcaagtgcctggagcacggagttgatgaaacagtcattcgcgggattcgagaggcccacgatgctctttttgcggttccctcctgcctcatctccatcgatggtgtaattcggcccaaagacatagaacagagcaacggccgctagggatgctccagccgcatacgcggcgaccgtagttggtttttcctgcatcaaactgcggatttcacgaaccaagactgtttggctgtagttctatggcctttccataggtcgcctaatgatacaaagcctgcgagcgatgtttgtgctcgcccgtcggctctgagagacaaagcaatcacagtcgcttccaaaggacgatgacgcttcgactcctcgacttgaatccagcacactctccaagatgtcgtcctcagctcgggtgagcccggaagtgggtgaatgtcagccgtcgacaattaaatttgccatgaaaccccaaccaggtttcccgggaaggctgtgcgccgtgcgggctgcggagagaaaaaagactggggtaggctgagaaggctgacagggttccgcctacgtccggagggagtcgtgagaaatgtaggcagcacaataatcgggctgcgccccgaggacttatcagtccgtttcctccgtgaaatttgcaaatttgcaataataaagggagaaagaaagtagaaggaaggctgcagagtgcaggagttcggatgttcttcagaatcagtgccgaccgtagtcgctgtacctagcgaccggccctccgtcggcgtccccacatccttctgtttcaaggccagctcgcttcaaacagtgagcagtacagattaaaaaccagggctggtggactggtaaggctaaatgcgttgggactccatgttattgcttaggaccagtgtcgagatccgcagaaccaatgaatgtggttgaattggtgaccgtgaagtgggcgcaacataggatttgcgttgatagacctgcagatcccttgctagacggtcagtgacgcagcggccagatgtgactgggtcatggctccgagt

SEQ ID NO: 2278 - DNA, 1295 bp, Emericella nidulans
gcatcgacgcgatcgcaatgaagcgctggagggcgaacggccgggtgaggcggttttcaaggccattttcggcagtgatgacgaagacgaggatcaagacgactgattatatagattataatcatattgttacttctacattataaattgtactaccacagtactaaaaaatagcgtaagagagtgcgcaatcagaccgaaccccgcagagaaaggctgctcctagtctgagtctagagtttcggggcctctcgaagctaagcttacgattgcaccgcaggtggtcagacggttgaccgagattgcgggccacggaactttctctcttagcaacctcgaacctactagtagcaggtatatttagctgatcccgagtccacttttgtcggggttctacttctaaaagaccttctgtcatcgcttaccgatcctcaatataacatatagttttatgcatcttacctatgtctcgcgattgcagctgatggagtcgaagtcttctctccgccaaaatggtacctcacctctcccgcctcatttctgcagtctagtactgacagccgaccgcaacaccgcagggctgctgcttctccgtgtcgcgtgaaccccacgactccaacggccaaacacccacagaggagcatagctccgcaatagcaccgccgtcccacattccatcttcatcccgccagagccgccagcgtcatcttacgcacaacccctccccatcctcctctcaccatgaccgccaaagacagcaacaacaggccgtacccctccagcagcacataaacgcacccatccgaccgcacatatggcactctaagaagcgcctatggactcgcgcgcttcttgaccgcgagcgaacggagttcttcgagacccgcgtcacggggcggccggaagtctgggacgcactgtctgcggcattgcagttcatgcggaacggagactacgagaccgcgcagagcatcattgatgcggcgggagtgacagttccgactggggacctttgtcagggagtttatgatgagcagggggttctctatcggttgccgaggtgtattgttagtgatcctgtgaatattgtagttggggatgtgggtttgggtgggagtgggagtggaagtggaagtgattctgaaggaagtgacggcggggcagatgatgatttggggtttgagacagatgagaatgagcatggggataggaaggtgggatatgttcgagagggcgagggtgttgagtcgggagatgagttgatcaagaacggcgctggggcgagggcgagggtt

SEQ ID NO: 2279 - DNA, 1884 bp, Emericella nidulans
agatgatattgcaaatctcagagaaccccgcagccagatctgtctctgcagatattctatcccaatttctgttgcgctgaatcagtgcgggcggacaaacacggcatcattcgtttgtctcaatccgcttgcaatcagcttgccaaaccagatccaggactaggatatcatacgctgctatgaagttgaatgcttccgaactcagtattttcaggggagcagtctggtgatcgggacacttcgtgatgttgtcacgttccatgcgcaacggtcgcacacctgctcctgctggtgactttggagctagcgagaccgtacgcatattctctgcaccaacgacaggtgtcagaggacctgatgttctctcgtagatgggttgttctataccagtacccttggtcgacgtcgctctctggtctgcgtcttatctttcagcaatcgagagcggattggtaatcgctgcaatgtcttggagggcgtttccatgtctggaccttttctttctctggaaatgctccaaggccggtttgcattgatgacgctcggaatgctttttgcttgtcctgggaggtatacttcaagcgtctgtcccatgctctgtcgtcttctagtagcggtctcgaggccagtaagatcaggataaatagcgtttcgaggtaaataagtagaaaaccaagcacgcactttggtaccgtattctctggtcgaggacaccgagtgaggcgcaagttcatcgctggggctgaagctggtcttgccagaagacccatctcgacgacgtcatctttgccatatctgggccagaggttcaggttatggtctaggtcaaggctttgctctccctgtaatttggacagatcaacgagaaggtgtgaggaggcgcgtcgtacggagtatctatccggggtttgcaggctggagaccgaactgacagataaatagcctgcggtgacatgctggctgggtctgatcaatgctggggtaatgccggagctgaatggcgggaaagatgaagtgatggacgtctattgaatgggcatgggttggagggaaagaaaggagagaagatacggcctatacttcgtcccttctgcccctgacataactttataacgcgaatcaagaacagccactgcgtagacccttagactggatttggtagtaattggtaagagacctcgctcttcctggctcacagtctcactaggttgagcccacaatgcagcagcaaaacaagcctaatgtgcccgattcctctcaatcatgatcatcatcaccacaattatgaaccgtacaataaacccatcacgatggctgcgacgagcattgccgcacaaatgcagaaaacgcccaccatacagtttgccacaaacaggccgcatgaaccagggtcttcatctcggtcgaggaagggacgggttttggttccacgccccttggagtccctgacaagaggcatagttgactctttactaaatatcgagggggtttcatgggatatccctgtttctttggggtgtgaatctgattactgaatgagggaaaaggcctgggcacgtacctagatcttcgtccgagtcccagtggcagtaggaatagggggctatccaaggagaggtagatatgggcatactgaggtacctgagtatgtctgagagtcccaggggatcaatccttgcaaagcaagagaagataatcaagcggaggccagtaggagttctggaaggaagctttgttatcagaagaaacggaagtgcattccgatacccgacgatgttgatggcccctcaggcggtggcatcataggtaggtcttctagccgttcgaattgaaaaagaaacatagcgttgaaagccaaagcaagagctttcaatgtagagaccc

SEQ ID NO: 2280 - DNA, 2110 bp, Emericella nidulans
aaaactggacgggttcactgccgccactggtcctgggaatgcgacaaccaccaaaagccgggcagaataccacagccatgtcaacggtaaacctgatgctcccggcttcgcatcggggcaccttccgacacccttgacgtcaagccacggaccggccacaccgacgccacatggccagacacaccagtaccgacaagtctgcggagtcacatccaccatctcacagaggacatcatctgggtcttcggcctctatcacccaccttccagtccacgagcagcagaatggcaatggaggattcccgggtacgttgcatgccgattggtcccagccgcaaccgaggcacgacttctccatcaactccaatgatagcatcaacactggaaatgcgattctagatataccagagcccaatatgggtgatcagtccagtggctttaccgagtcgtttccatttgaggggttcaatgtcgaggagttatggaattggatgttatattttgacagcccgccgcggacggatatgctatagtccggaagaggtgcagcataacagccggcatatatctattgttattttaagaatcttattcaccgggacgggtatttatttacttagttccggcggagacttacgatatgtaactgcaggttattgtcaggagatttcccggcgggggatcgacctactcactctgcattctcaaaatctcgcatactagtgtagaagataatcatcatgcaactacagaaagcagggattagcatatgccaaggccactgacgtttgtttctccgtcacggcatccccagaagccgagtaggacgggatctatgccccatataaagcgcaacagtgggcaaattcatcagttcaacagaatcagcacctctcgatgaagttactcacgatgcgctttcaatctagccttctagcactagcctccctccttccccagggactcgccgccaccctccctatcccgcgccagaatcaaccgggtcaatacgccgggtatctgctctcaacattcacagacgcgaacccatcggtcttctggtacttatcatctgctgaagatccacttgcatttaaaccgcttaatggtgggaatccggttctgcaagctaccgttggaacccgcgctgtgagagatatcttcctcacggcgagcgaagaacggaacgagtatttcatcattgcaaccggtaagactggtccgctttaccagaaggatattatcaagatcttttatgactaactatgatcctcttgagcagatctcgatataaatgctgatggcttctcatgggacgaggcaacaagacgcggaagcaggggcctgacaatctggcgctccgacaatctcgttgactgggacgatgctacattagagatgtacgtttctcataacatattgctactgagttatatccaatctaatgcctagctgcagaatcgaatcacccgaagctggaatggcctgggcaccgtccgtagtctacaacgccactgaaagcgaatactacctcttctgggcttcacgcctttatgcagaggacgacgcagaccacaccgacaccgcatctcttgaccgaattcggtacgcgacaacgccagatttcagcacgggatcgttcagcgagcctgccgattacgtcgccctagatgcggagaatatcccactcatagaccaggaattcctctatctcggtaacgaagggcactacgcacggttcttaaaagacgagaatgtgctgcatgtgtaccaggaaacaacgacaggaggcctgtttggtgaatggacgaggacgcagccggagggcgaatatatcaggacgagcgtatatgaagggcccgcggcatttcccgatgttaatgttgaagggcgctattatcttctcatggataactatgaggagtatgtgcccttcgtgacggaaaacgtactctctggggaatgggaggagttgagctctgatgagacggggttgccgcgggggttgaagcatggaaatgtgttcttgcttacggagtcagagtatcaggcagttgctgagcggtattgggtgtaagatacctaagtctgatggtgtctaccaaactacc

SEQ ID NO: 2281 - DNA, 2176 bp, Emericella nidulans
gtggagggggatcgagtcagagagcaatcaagacccaatgataaggaatcaagaccaggccgttagggagaaaaagaatactcgaccacaaaggtacgaaaaccatacagcgaccgagtattaaatcgcgattaaagccgaaaacctcaaggatcacgcttccctccctgaacacgctagtccaaacccggtaacattagctagctctaaggcaccaggtgttcatgcctgaagataatgtgaagaatatgacgaaccaaactacatgagtacaggcttgagaactttcatatggatctaaattaaatcgccttaaaggaaaattacatatctacctagactattgtactatgtcattggagttaccaaagctactgtatcgatacacaaaagcgaccaaatggcggagcagcggagatggacgaaatgaacacaaacacgctatttgggggtgtacaaaaaatgatagacaaaaaggaatagatgcagacgtctaatcttcgagttgatgtacaacgcgacttttaccgcgaggtagcgcggctcaggataaacactccggcaatgacagccgccaaagtgacaattgctcctgggagcaataagtcattgggaacgcctgcaataagttgctcttcgggaggatgggcgggatacgcctgagttgctcggggcttagggataggcgattcttctgataattggtcgtctgaagcaggtgtcttaacctccacaggcttgacaggggcgggttccacaggggcaggaataactggaggttgagctgggtcgtgaacgaagaggtctaccttgtcacgacgagcgtgacgagcaatgtacacggcgtcaacgagatcctgatcagtggtgatagaaacggtatccccctcattgtccacatagctcaaagcgtagcctgtgttgctaagtacgccatccgcacaactggccgcaccaccaacagcttcaacctcggggccaagttttgcagtaacctgagccacgagttcggcgataccagcagcggggaggatatttactctgtgcacccggccactgggtgctttgaacttgaaggggaacggcgagagttctccgtggtggaactcagagtgctcgtctccgccatggtgagacgcggattcattcggaagaacgctatcccgtgcgtcgaagctagctttgggcgactcgggattgactattgaccgatgcggttggtggctctggcttccagaaaccatcgaatcggactcgtggtccattgacagccagaacttgttccaagctggcccttcatcatcttgggtcgacattgagttgatctaaaaagcagtttcagtggcagccctatagagacatgcgcggagtgtccacatacctgctctagggtagcgtatgtaagtttgagcacatctaccatgcccacaatctcgcccccctcgttcattacaggcagattcaggtagtgcccgtctgcaaatctagttaactctaatcggatctacaagcaggtggatactgaccatgcatcttgcggagcgcagcttgaatactcatatcgcttggagcaaaatcgggatggggggtcatgaccctaacgacactacaggttgcaggatcaaggcccggggcgattacacggaggacgatatccttgctggtaaaaatacctgtgatggatccttgatcttgcacgagcagagcagtcgtgtgatgttccttcatcaatgcggcagctctttcacagtggtccggacggaaactgtggtgggcggcataccgtctagtacggattcgagtgtaggaccagacatctttgaacgaagggcctcaacatattggataatctgttggggttggctagagccaagttctgactggacaccctccagcgcatcgtaaagcttgcgggaggagctgtaggcgcgttccagtttctccatagcgtcgtagaagcacttggtgatatccaggacaccagaaatatcctggttttcgtccatgacaggtaaatgccggaatcctttccgaaccatcaaatcgagggcatctgtagcgctagtatccgtcctcgcacatagtgggttcttcgtcatgatctcagagaccgtgatatctcgagccttgagaccagctcctactaccctaaatgcaaggtccttggcggtaaaga

SEQ ID NO: 2282 - DNA, 3722 bp, Emericella nidulans
ggaaaaccaatctcaaaccacagctccaacttcggaaaccaagtcagaacaagaacaacaagaacaaagccagaaacccaagcacgccttcctcccttaaaccaccccaacagctaccttctcccttttcctcaaagaagacttccgcggccacttttgccgctgcccgacctgctatcccaaccttgcaccacatccgcaactccgcgaagaagaagaaacatacgagccccctctctctgaagatggcgacggcgacagaagtacaggtacaggtagccttcttgaccgtggggaagcggcgctcagcaatattgaccgcgtgcgtgccatagagggggcaatggtctataatcacctgcgcgaaaaggtgaaggagtttctgaagccgtttgcggagagcgggacggctgttggcgctgatgatatcaaagcttattttgagaagctgaggggtgacgagcagcaaatcaaggatgctgcggcggcgggaaaggcctctgcagatgggggagggaatgaagacgataaagacgaaagtggggatggggttgggagacgagaacagagtggtatgtagcccaagtggtagattgcatggggggacctgcgcttctgtgttctttgtttcgctgatatataacaggttactgagtactctcatgtgctgaagggatatttactgattaatgggctgatgttatgacttaaaatttgggaaggcgtttaggagctcttgaacccaaatgcgagatacacaccaaataataatccatctttgagaacccgttgacaccaacaatgacaccggatcatgaggagttcgagaacgagagagcctgataatagatatctgcaatactagggagaatcttacatggtcggcctaagatcatcagaagtgcacaggcaggtcggactgaaagcgggtgaaggtgattatagaagcctatgtactcggatggcccgaagtgcacaaggctgggcatgtttcgcctctgagctcgttaggcgatgggtcagtctatgctgtgcttcttatagctgtaattattagagaggtgtagcgctagcagataggagctcctcaccacagtggatgcagcgaacgcgaatgtctggctggctgaagttggccgcggacaaatgtaaaagctgttcattggccataatcgtaagatatcttggagtatcactggctgaatcaattcgagtcgaccggaaggctcaacgaacaagtaccaggtaggcgttacgagattagggagaccaatagcttttgaccatgtgtgtagaagagtgatgagtggaaaaagaaaaaatgagaccatgtaaagaatgttgtattgggatccacgatctatgatagataggcaagtccaaagaacagtatacgccagaaaacccggtttgcaactccaccgaacgccggtgacctctagatcaatataaaaaaataaaaataaaataaaatttacgggctctgttagtgtcactccttcattcgctttgccgcacggctcatcaagctatcgtcaggtagcccactccgtttagttcccggaagactcccactgcggatatcattgtcgtcgtgggtaatgcgccggtgggggtatttgccctcgaatccctcaaagcaattggccgagatcggcccgccattcttgaaatatggatgttccagggcttcctttgctgttatccgtgaggttggatcgtaatccagcaatcgggaaaggaggtcgaagccgtcatcgccaggggtgccaacgctggagttgacagagtacccgccgtttttcaagcaattctggtaccagcttccaagattcgaggttcggctaatatggtttggggcgcgggacattgccagagattgaagctgagaatattctggcatgtggacgatgccaggccagttatctctgtgaggtagccccattatatcgataattttcatcatttggttgcgctgaaacggaactgtcttcttgctgtccatcttggcttcttcacctttgaatattggacgaagcgagagcaattccgcgaatatgcaaccaacagcccatagatccacagcaggggtgtaatgccgactgcccatgagaagttctggggcacgataccaaatggtaacgacgaccttatcgccggaaaagagcgaattgagaggcttgtagaaaagacgcgcgaggcctaggtctcctatgcgaattgcgccactggacgttaccagaatatttgctggtttcaggtctcgatgcaaaacccagttcgtgtgcaggtatagtaagccgttaagaagctggaaaagaattgatcttaccatcgctgcggggattgggtgtctctggggctgagtatggtgatgaatgatctgaagtaaatcatgctctgtgtactcgaagaccataaagatgcacttgtcttctaagatgatctcggcgagctgcactacgttggcatggtcaagttcggaacaaagcgccatttctcggatagcagactgcgagaggccagtatactgaatgatatcaccttctttatcgggtttgaatctattgaatgtcagtgacaatataagactctaaccgggattctgacttcttgatggcaaattccccaccctggccatttcggccaacagctttgtatactcgaccataagtaccactgctgataaagccgacgatgtggtatttgtcccgaacacggaccttgctggtatatccagttccaggttgtctcctcgagttttcttcgcacgggcgacaagtcagcatcacagggtcagcaattcgcgaacaacacaaacgattatgttcaaaaagaatataagtgaaaaacaaaagccgaactggaacctaaaagcgaacgaacaagaaacaacaatgttggagccctctcaagctaagcagctacgagggtttaagggaaagccattaccacgtgaataaaacccgccgacagagttgaagtacgggaaattccttccaagcatgatgaaagagaaatacaggaagttgcaatcgaaaaaaccgccgttaagcgttatgagtccgtagaggatagaaataacagatcggtccccttcagtcagtgtacatgctgatacacgcaaccagataagcaacgtggcaatagagggtcgtttaaaaagagtcaaaaggggcagaaatatcgattagagtagactaatcggtattaccctcaacagctttcctgcagacctatttttgaagacagactctttctttctgtgtctcctgccggcctggtggttgcattcagtgtacccgtttatttaagttttttacttaagatttaattattaataaactcttatgttcacatataattttctatttattataagtcatctttactattctcttattcttctatctcaatctttttactatttcaccattttcttttttccttcatttttttatctcttttattttctttatttttttttctttcatctaattattatctacttctataaataattattttctcctttttctcttttttatatattaccattttatttctaatattatatcttatctctttttctctattacttattttttatactatcattttttattttcttctaattattccatttctactttatatcttcattttctttcctctatatcatatctatttacattatttttactctatcttattatatattt

SEQ ID NO: 2283 - DNA, 2467 bp, Emericella nidulans
  unsure (1)..(2467): unsure at all n locations
cgtccatttcggacccgaacatggtgcgctggagtcatggtttctccgaccaaatttgaaggatgctctccgctttaactttggctctgctggtctccttggttttgtccctaccatctcgcttccagagctgatgagctgtttttgcatctcctacgtacgagagatggtcggctttcctagcgcttctacgtcacaccagcggtgaaattcgacgttttcattttttcttttctaccggcgtccagcgacaatttgcaagaccaacctcagccacgcttccctttttgtacgaccacaccccaagcttttttgcttgagcttctttgccgacctagcatcgtaattgtcttccagactttcttccacccctgatttccaacggccgcaccgatcgactgtatagcgatccttctggtccacttattgttcttccccgttgtcttgcattttgatccccgcacagcggcagcagcacgtgcccgtccaccggaatggagtcacgaaatacgatgtgaccacagatccggcgcaacaccgaaacattcgcaaatttctgtactacgagtgtcaaagctgggatttcttttcgttgatcccccgtctggggcggtcgatccgccgttgcgatgcattcaatactccaaccgcgaggaatctattcggcggttcctccagatgcccgcacaagacttcaagataatcctacgcttctagtgagctggtgggcgaaaagcgtttcgctcgccatcatcgtcacccgagtgtgtggccggtatgttcgtattgagcgtcttttccgcgaagacaagattatgatggcgagcatcattcctttgctggcgaggatggcgtttgtgcatgttattttgatatggggcaccaacaacacaaaggtggatggtttgacagacgaagatattcggcatagggagatcggaagcaggctagtccttgcggcccgcatcttctatgcgattttgtgagactgccctatctttattttctggattggctatgctgacgcgagcagtatctgggctgctaagctcaccgtatgtgaatttctcaaccgaatcgctggggtcacatggagaagatccgtccgaatatttctcatctttgtatactacttcctaggatcgaccttgctggcggtagtgattgcgacgcttgccgaatgccagccgttcagccataactggcaagttgtaccagacccgggccccaagtgtcgcacaggattcgccaacgtcatcactatgggtgcctgcgatatcatcaccgatctacttctcgtcgcatttcctatttttattattttaaggacgagaatgtctttaaaacgaaaaattgctctcgttatcctgttcgctctatccctgatattggtcgctatcaccagttaccgggtaccgtccgtgattcagcacaaaggctctcagcagtatcgatcccttctggcttcattggagatattagcagctactgcggtcgcaaacgttgtcgtcattagctctttcgtcagagacaagggcgtcaagaaagttaagtacaaggatattctaggctctgcctcagtcaacgagggtctcgaccatagctctactcgccgtacaactatcacgcatcaccaatggggcagcgactccgaccttgctcgcgatctcggcattcgcctcgaccctgacctctactcccacgaccctatagaaccgcgtccagcccctatggccactggaggcctcaatccaaactggtccttcagccaacgagctattgaatttgacgacgaccaatcctccggaaacagcctcgacattaaagttagcccgcacgaataccttcgctcaaacaaaacaacccatagcccgcctgaaaactctcccgatcagcctgcaatttttgacgtcggcggcctccttactcagccctcaccttcgcccaccagccataaccacaatactcaaatacccaaccgccctggtggccaaagcactaatgttacagccgaccccgtccttcgagacgtaggaggattacttgccaactctggtgacatatcgccattgacttcaccaccttcccaacaccatacacaatcgtcactcaacacgcctcgtccaggcggtctccgacgtggctctcaacaaggtcggcgacactcaagtgtccatttcagcgattccaatgactccccagttccgtcatcacgaacacaatcgggcatttccgcgactatagttgaaaatgcggacgagttcgaacttcaggatgtagggggcttgctctcgaagagacaggatcgcgcgtgatattattatgatgtacacgtctgtcttcatggataaatctatgggtggattggtctttatgtggctatataactttgtttaaacagtttggcttagcgacggcgttctggattaataggttcgacttggatgctggtagcaacatntcgatt

SEQ ID NO: 2284 - DNA, 1499 bp, Emericella nidulans
accatcttcattgcattccgccttttgcccgcactttctgccgtcagatatagcagtagactgttgttgctctgtttccacaggctcttatcgatattggctcacgtgaggcggtcgcgtctcgtcgcgttcagatatcgaggcgcctgtcgcctacagcctgccaggcagtcatttcatggtccaaggccaccagcatgcttggttatttgcttatatttcatgcacagtgccgcacaaattgacaacctatgcttcagcctgcaactttgcagtttcaatcgctcttcttcaattgtcgatgacccaatgcccgtttcgcagcaaagccttattcgctttacgtgcttgccctaacctctgcgtcatccattttcaatacattcagctacgaaacattgcgtgcacttcagcgcatttgaatagacttgtacctgcggtattccaaccttccaatcagttctcaaaaatgccagaccccaaggaaggaaagcaggcaaccctggggtacgtcaaagaccggcaatcgactctcgggtatgtcttacgagactatattcgggcttcttatatccctaatgccgtttaattgtgcttattagatatacaggaggttttttggatccaataccaacgcaccgaagaagcagacaatccttagttttggcggcaatcgaagcaagtcaacttctgcaagtcggccgaacagggaaccctcttccttaaacggaaataccaaaaatgcatcagctgttacaagaggcgacgatgtcaatacgggggacgcttttgaggttaagcctgagatgagagcgggtgcagatcaaaacccgctgaaacgggacaagagcgaggacgtaagcgatagcgatgagagcgaaaaagtacagcccagcaacaagaggcggcgaaaatcatcgggcaaaactccggccaaaccgcaaattgattcttctcctgaaagcacgaaaggccgaaaatcccaagtcaaagagcctacaccagaaattgtggtaaaagcatctggagaggaaacaccagaggatcctgacgtttcagaagcggaagaagaaggactatctgctagcgaagatgaaacggataagaaacctgaattgaagaaaaaggagattgaaaaagttcaagcaactataaagggtagcgggaacgatccgtatcctgactggcagcctggggagcctgttccatacgctgctctatgcactacattctctctcatcgaaatgacaacgaagcgacttcagatccttgctcactgctcccttttcctccgacaagtccttcgtcttactcctcaggattttcttcctacggtacaattaatgatcaataagcttgccgctgactacgctggcatcgagctgggcattggtgaatccttgatcatgaaggcaattggcgaaagtactggccgtagcttggctgctgatcaaagcagaccagcatgaaatcggagatctgggcctggttgcggcaaa

SEQ ID NO: 2285 - DNA, 2252 bp, Emericella nidulans
ccccaccttgtcccattaaccactgtcagacatgtccatttccacgtccttttacgtctagaacaaccccaagcccgaggcccgaattgtgtacaagctaggaacaggcgatcatcggcgcccgcccccgcgcccccgcgccggatctggaaggtaccgtcggcttgcaatccggcttgctgtcctggcccactctgaggtgtggttgacaaggaggaggccaatctttcggctgcattgggatgttttttaacaccgatacccttgcctccactcgtggaaagagtcgctcggagaccgtcgccgcccatggaaccagggtctaggacgcgtggctgaaatcggcagacaaatcggttgtggcttcggcattagtacaattctttgaccgttcttttgttcttcatggaaccatggttgtagccaactttgcctttgccagacccaggcttctcgcgtggatggacgacggaatgcgacgcacaaagactgagcataggtggctttctccacgagcatccaggtactcccgggtctttccactatcagctcattcctatcgccacggccgacttagaatctccagccggagaaaggccgaggccccgattcgacagtctccgctaccatacatcgacatagtggggtcgtgccctcctccctatgtatcattgtggcgtcaaacgtcaggtacctgccaggggctctacgcaagactcacgtcggtttggtcagggtctggatccatgtggagttcttttcctcttccttttgcagcccagtttgccatcgaaatgccgcacatctcagcggaacggtggagaaagaccctatgtcaggctgggttctcaggtataaatagggctgaggatccggcctagtttcattccttctgcatcaacattctcttgatcaatttggtctatcagtcagtcttttgacagtcattctcttgtcttcggacacattacattctcttgagtacatactcaacccaccacgatctcttatttcaagacttcgttattgtacttgtcagtcttttttcaagatgatgttcaccaaggctctcgttgctgctactctggccaccctcaccgcggccctcccccagcccaccgttgtccgtcgtgagggcggcgatgccggcgtcaccatcgtcaacaacatggactccgacgtctacgcgtggtccgttacggacggtgttagcaaaatgcacaccctcagctctggaggcggctcgtacaccgagaacttccaggcgaaccccaacggcggcggtgtctcgatcaagctgtccacccaccaggaccagaccgatgtcctgcagttcgagtacaccaagtccggagagactatcttctgggacatgtcttgcattgacatggaccgtgccgcttccaccttcaccaagaacggcttcgatgtctctcccagccagacctccggtgactgccccgctgtcaactgtcacgccggggacacctcttgcgctgaggcctacctccagcccaaggacgaccacgctacccacggctgccccattgacaccagcttcaccctgactctcggcgcgtaagcttaacccatgacggggggctgcgctttttacttcttacgctcttttgcgcaactttttcatgacacacgctcgtttttattttggctttcttcatgatactccgccacggtttacgctttacgcttcgacgggtttaggatggggttaaggataacggcatggtttgggtctggttttgggtaacggcaaaagtcttgcgcgtgacgcagcttgaaatagattgttcatgttcatagatcatttgtctctctttgcttcgcgggttgggtatttactcctcgctgcaattaaaaatacatgtatctacttcacatgatggagaccacgagttatgtatagacttctatagactttatagacattatagaccttcggaatttcttttcgcagtactcatccaagaatattcctatatcttccccatcagtgtcacaatctgtcctcaatcgtctcccttccttgccacttacctcccacttttcaaatcagcctaattttcttccctcgttccctcactaactttagttctctcctacttttctcccgtacatacgtccaatttgtggactttctaactcatcttcccattccgcattcatacatcatccttacttccacactaaaaatcgccttgccaccataccccaattttttaaccgagtcgatc

SEQ ID NO: 2286 - DNA, 1378 bp, Emericella nidulans
ctcattccgagcaatcttccgcagaccatctaaggtagacgtaaaggtcctgcgttgggtttcctccaccgcacactcggcaactgactgggaggtggcccccagagcactcccgctcggtccaaccatacatatttccgagttttgacctccccagaaaacttctcggcagcaagcagtgactccaaggttgggaggggcattttttagggtaggcgtcgtgtgtgacgtaaatggtgaagtgtttttgataggtgactgagattgtaatcgaacgcgaacgacatctaggggagtcactagaaaacggttagctcttctcaaaaaggcatttatcaaagctgcaggtcaaaaccaagcgtggttgcctacctaagaggccggttaggacactgccacaggttgcagagaccattttctgagtgatagagacttcgcctgccgggctagcctctactgtagaaaccgaccctgtcccagaagtagccgccatgtctgtatcttctgcggcccaattccatgtctctgccgagtggccgtccaattcaatgctggtcaaattgttggagcgatatcggtcccaggaagtaccttgagtgcccggagaggacattcattcaacgaggtcgttcagagccgccgagaatccaaaaggccgagtagaggtactaattcctatcttaattcatccagcgcattgggtagttgaggaagtagaggacaatcagtgagtaagagacgtagtgatgatgccgcaagaaaagaatgttccggctcggtcggtggcggtcgctagccggagataagcatcaacctcgtcgagtcatacctccatgcttttagtcactcctcatacttgcatgttgatcgtctttgcagttgctgatgatatgatgacattcctgacctcaacctgattacttctgctgtctctatcattattttcctcttcgaccttcttgctggcgctggtgctcgcccacgccccactgaagctcgcttatcgaccggtggacctctatctagactgcttgccagagcctctatcgagcaaatcaatggaggacaacgcggaacttgagtcttttcgtcgccagtggcgtgaggaagtctcacgaaaaactcaaactactattgcacccggtccgtcacggacgactccgagcagagctgccatttctcaaccccgacaatttccccctactcgccatgaagcatcagcgcgcaaagatgacgaagacgaggaaggaccggcatcatatagtcagaacgagataacccaggggcttgatcggttatcactggcaaaacggagaagaagacgtgttccacgcgcgcaagccccgggcagaaccttggtcggcttctgagcatttcg

SEQ ID NO: 2287 - DNA, 2108 bp, Emericella nidulans
tatttcgagtatgtttactatgtttatgctttggactcttcgttatattatatacgttgccctatcacttaggctgtccccagcaaagataggcttgactgaatttcacccttggcccgtgaataagtgaattggtctcgccgcggccagttactgtacagctacacctgcagaatagatcatttcaagcttcgagactcaaaataactcatctattggtataataaaatagaataaagtaccacattgcccgctagccctgagaatttcgattcgtgaaattatggccatctttacttctgctcttcgtattgatatacctggtacgccatctcagtggcgtcccccttcgcagcaacagccctgcacgttaagaacgtactaccgtcaatcttctcgacagcccagacctacactccatgtcaatcactgttgccgacaaaacccagccgcaggcataacgcatgctgttttggagatagacctacttgctcagccgtccacccgccagactcgcaaacaatgtaatcctgcacgaacggcttctccttcgcctcttcgccgccagtctcaggaatcgaaactgcagcaccaaggaaagtctcgatatcagctttccccttctcgccagttactgacgtctctacttggagagcaggcttcaccttactcccgtctccctcctcaatgccccgtacataccggctgcggactgttatagcggctccggagacagcgtcgacatgctcgtgtgtgctccaatccactgatcgtgtttgctcaacaccgggaaagatcccgcgaagcccctgttgcatcatgagacgtgtaatgggctgctcctcattatgagcttctgtggtgtgcgcggttttaagggttattgtgcctgacgtgactgctttgcgtcggagccagccaatcccttgctgtgttaagctcgtcaggattccaaggcctacttcaataggtgctggcgaggaagacataccagtttcagagcaccgtctatattggtggatttagatttgtcctgcagttgcattcatgtcaggtacagagcgacccagaggcctagaggatcgagaatgcactcacgatggcccagtcaccggtcaagctccggatgctcacttctgctgcggacatatcttgtgcgtttctatggctcaatgactttgaatatcgaaatgagttggacaggtctggtcggatcacgtcgcgattttataacctgatccacggcatatgctgtgactgccgaggcgtcgtctgaaacaatcggcgatctgccgaaattttggacccattctgagtgtttcgagagttttaaaattgctatgaatctggttgtcagcgtcgaactcccaaatgtttcaggatttgaacttagtctacaattagatcacgcggctggaaattagggctgcttgattgtcgatccttgatttttggaacttggagatgacatagtaaattctctagaatctatctaagaaagtcagaaccatagcaatgaaaactaagaaataagaataaaaatgaatcataaatgtatttgactcagacttagaaccatacgtcctatcttgcctgtttcagccaagctgtagcgtatagcctcaggtcaccacctcggtatactcgcatcaaacttcggctcaaaccgcctcatataggaggtatcatctcgttcccgaatgccacactccagatactgccgatgcaatctccacaactgccctcgatcaagctcaatgcccaaccccggtgcccgcggcacttcaatgcccccgttcacccacctcagcgccctttccggatcgacgatgacgtcctcgtccctccttttccacggccagtgcgtatcgcacgcgtagtccaggttgggcgtcgctgcggccaagtgtgtcattgctgccagactgatccctagatggctgttgctgtgcatggacagtctcatcccccaaatcgtgcagatagatgccagggtttgcgacttgcgcagcccaccccagaaatggtggtcagacaggatcacttgtacagctttttgcagtatcgatggggggaggtggtcaaaggcaacgacagccatgttagtc

SEQ ID NO: 2288 - DNA, 950 bp, Emericella nidulans
cgtgcttatgcaactcctttgccttgcgcttcgtcggcactaggaaatcgggtagcttttgcagcaatggaaaaaagtccaagaaggccgccgcaccggcctggttgatctccgcaaactcggagaagccgtcgaagagctgcttcatctttggatcttcataggtaggagtacgccacccgaagaccatggttgttgtcagcgcattggagtaccgtcggatatgcttgagaaagtcatctggctcggtgaggaattggtagagcatctgtttattctcgagcatttgataaggaatgtagttgcggcttgttgacacattaaggagcccgtgaaccattttgcgcatgattcgccaggttggtccataaccctgaaatcaccttgttagcaggccctaattgtaaagtgaccaattgagacaataccatcataagcatccgcagccctccgctgcacagctgctgcccagtatacatctcctgtctgtgcgagtagattccactccgtcggtcgaggagctctttgactgcctcatcgctggagaggatgatcaggcattgtgtgcccagcataagactgtatatcggcccgtactccttggcccattttgcgaattgtagatgggcgtcgcgggagggcatctgttcgcagtgcttgttagccagcaagcctatatgatttgaccggcatgctatgcctgccgtgttgctgaaatgaggctatccgacctgatggatgttgcccagcagagggagcgttggagggcccggtgggtagtttttgggccgacggccgatgagggagagccggaagatgagagccaggaggccggcgatagccaggattggtgtcaatgggagcatcgtgagagccgcatgtatcgggcaaaggagtatagaaaagagagatgaatatatgaactcgtgagggaggagtagagtgggtga

SEQ ID NO: 2289 - DNA, 2599 bp, Emericella nidulans
ggtggagttttcttaccttgggatcttatcgataagattaggtatttaccttccccaccaagctgaggcgcacgcgcgattttgatcttttagcactcaactcgcatcacttgtttgctcttcatctcttgagctcttagttaagatacattccatgatactgaaatatgcagggtaacaacagatccaaaaaaaatatactcggataggcactgcctacagctgcagatgcaagatcggcagaacgttcattgctctcgcatccaccaattccccgggatattctcagtgcacctgccgatactttgcttcatgagaccgcttggattactccctggtctaggaggacttccattattgaagacgcacatggcgaccgtggattacctggttgtttcctggcgggaagctaaccgacccgcaaagctaaccggatgtaaccgcagtgtcaaaaaaggagaacgaatgcagttacaatcgagcagacatcgagggctttctactatgacttaaagcgaaaggaaacaccttgctgaccacacagctggctgccctgtgctatggaccttgatgctagtgccgctattgccgtccctcgtattcccgcagccacataatgctcgtcgacatccgcatttagaagcttcatctgtcgaaaaaataatgagtaagaggaccctggccttgacagaggcttcaaggaacatggcaaagggcatttattgtgatatgctgcgcgggattttgggtttggccctgctgctacccagcgtaggagtcaatatagggccatggggtaagtcccttcgcgatatctctttcacaaaatgggctgaatttcccaattgccttcaaaagaatcattgaccaattcaaggcaaaagcactgaatggttcattgatcacacgaccagaagttgcaagtcaatatgcgcaccagagagtaatgaatactgttgagcccaggaaaatattgggcacatgaaaaagagcggtgagtgcagcccaggtctagtgttccctcgaaaatgcttaggttagggccgttaggatagggttggcaaagttaacaaaatggagaggatacgttgcagttattctttacaactattctgctacgcacgatctttgatagtcaaccttcatttaggtttattcttgatagtgttgcctcattatcggtgacctggcagttaggtgatgcatgaaactaatagccagatataatggcacatgctcggcgacagcttactcactcgttgaatgttacgtcgactacatctttgattctaatgattttcttacaacgttgagaataaaaacaaattgtaagttgatggcatatctcatttcaagtctcgcttttaggtagacggatcaacatgggtagactacaccgacagacatggaccaaaactccgcaactccaaactctaaggaacgatcaaacgccagtgtgctaagtttcagaccctaaagtgggacaatgtggagcgggaaacaaaaaaaaaaacagatcacgccgcatccgctgtgggaatgggttctgggatcttggttggctgctcgccggcacggatgacgcgctggccagagccatcacgcacgtactccacgttctccttctgggcacgcttccagatttcgacttcacagccgccgcggataacaccaacacgcatggtagagaggaggttgtgtgcggcgttggagtggtagtagacaccaccgttgaacatggcggtggcgtccttcccaataccggagctgatcatggccttgccaccggggtggtctttgatgaagtccgtgacatcgtggacaacaccggcaatagccacgagaccgcggccgttcttagcctgctcgacgtagtcgtcccactccatgacggggagctggtcaagaggagtaccccaatcgagagtggcacgcttacggtcaagcttcttctggagctgctggacacgacccttctcaatctcgttggcacggaacttcttcaggtcgtaggcaagaccaagctgccttccaggcccagatggaccacttggtgggatcatactggtgccattcgatggcgttacggtagtccgaggggaactcgtggtggaagttgtggtagccctctccaagggtgacgagagcggtgataacgtggtcacgaggtgagttgcggtcatcgaagggctggtcaccgagccagtgggccaaagagttgacgcagaaagtcgcctgctggacgaagaagatacgcagaatgccggcatacacgaagccgcccaaccagtcaccccatccaagaccagcaacaagcatagcacagccaatcccatcgtgaaaacgaccttgaggtagttgcggtgctgccagacaacgacggggtcctcgttcaggtcggaaatatcggtacggccaatacgcttagggttctgcttcatcaccatccagccaaggtgagagtagagcagacccttgcgaacggagtacgggtctttgtcggtatcggtgtagcggtggtgagcgcggtggtcacgagcccaccagcggatagaaccttcgacggcaccaccaccaacggcagcgagccagatacgca

SEQ ID NO: 2290 - DNA, 1310 bp, Emericella nidulans
ctgggcgttcgtgtacccatgtcgttgaggacggccacggtgaaggaccgcttgtcgccgtgggcgcgcgccgtcgtgaagctgaggatgtcggattcagtcgtcccgttggcagcgggaatccggtaataataggtggtctcgggcttcaaatggggaaggctgacttcgtgaaagaactggctgcattgggtcacggctttgacttgggcgcaggagggggtgcggtcgtagctttccaaccaacgttagttcacctgtccagtaagggcacacagatagacggagaatcgaaacatacgtatgtgaccagccatgggccaccttgttcaaattcgctggactggttccccagcgaacggacggggcctcgcccagcccaaaaggcgtctggtagtggatgtgcatgccgtcggggaggtaggagagcgaaatgacattgacattgttttttggatgcgcagatctcggcttcacggctggagcttctaccagacgagggaatcctttgccattgccattgatggttggattgacccagtcgccaattgggacatcagggccgttgtaggggtaggtcgtgtcgaccgttggacgagcctcgaccgtagcgagggcgaggagcacggctacgagcttcatcttggctgccagccatgcattcatgatcatcgcgcatgcacggtacctggcagggcgtggagaagggctttatggccctcgccccaggcttatcgccgatcgtcccgcgaagagatagtgaggttgtatcggctgctgaacgaagcaatgctgattggctgtgtggtggatccagggggagactgttaaaattgtttatttagcccgtcgaattaggacctgcctaactcgccttaaagcagtctataaagagtctaagagggttacgagtcggaggtctccgtatgtacagacaccagtctctccatccactctcgccacgcctgatcccgtccaatctcattctccccaggcagctctatggtctcttgcgggatctcatagaattcatggctctggcacgctctggcggggccttctccttgcaaagaacggtctctacagctccagcacagctgcgtcctagcacacgctaggcatacaaaccaagacccgccctcgacacgatcttgacaccccgtacaaaccggtttcgcatgctcctcgatttgcgttcccatctcaccatcatacgcgtacaaaagacgcgctgcgtctccttctcctaggtagaccagtgctctggcgacgatacacgagtcaaacccgtggctgtggcgcggccgttc

SEQ ID NO: 2291 - DNA, 2598 bp, Emericella nidulans
  unsure (1)..(2598): unsure at all n locations
tgtgagtaagttgacctaggagaagaattaaaataaaggtcgttgaaagtttatttcaaattcgatacctcggaaaaataagggaggaaagttaattaaaacatatccatgaattactttgagaagggtggggcgatcttcacaaaagactttccgtacaagttattctcgtgtcacgcagtaacaaattaattttccttattcttcctcaaaaaaaatccgggcccccgggaaagttgtgaacttatccaaaatgtttggaaaccgggggcttgattgctacggactcaaagcacaacatttttcggtctagccttcatctagttaagctcaagcggtcctcgctaccggtcttctcaagttggaccctctctggggggatatggccagttgtaccgggttgaggcgaaccgttgccgcaggctgtcgtttagcttttcgtgtcgggcatctttgttcgctcgaatgactttgcgctaagcctggtttcgggccagggctgtccggcgtacgactttctgcattctgaggatggcccggtctggcaatggcgagcgtgtggtgcggattgcggacccttcgagtgtttgcgtcggggagggaaatttgcggacgtaggtcacgtgccaatttagtgagtgactcgacttcaaagagagcagtcggtccatgcctatacggcggattaccgctactttaatagtataaaaaatatccttctctctataatcaattatgctattctaagcgatgctgataagcgtattgcagaagctgcgacacgggtttctggcaaaagaacataattgatttgggatcgaacagcccagtaacagtaaatagttccatgcattctctttaaccaagaataattaaggcaaaggaaaaaggcgaatagactttggcggggaatccgaaaggcacaggaatcttctatcagatcacgaaattccaacttgcttgatcaaaccctccagctcgaactgctgaagcgaagacaccgtcggtctacactatccctactaggtagtggtgcagacctgctgtcagtgaacagagcgtctctttgccggagggaatcgagctgcctcgggggcgctatggagaacggttcaagagaaaacgaaaagcccacaaggttatgacaacgcctccctagaaaaagaagtctgcaaaagaagaaagtcgaccaactgcacagccagataattccatgaagctcatgtgcccagtgcttgaatattaaccacactcgcatcaggcaccctccggcactttcaccaaaccaaatccatctccccttgtaagataagaaaaacataaacagccaaatattcgagacgcttatccgttcgtataatctccgcatgaaaagaccttttgcgaaggcgaggggaatagactaatttacaggatgctgcacttcttcttgctcttgtgggtcttggtcaagagggcagcacgcgtggcagcctcaaagacctcacggacaccctcgttggttcgagcagagcactcgaggtacttgtaggcgccaatcttcttgcggacttcctcaccctacagaatatgtcagttgtgttccaaacaatcacattttccctcgagatcttacctgttcgggggtgacaggcttctgagaggtcttgttcagctcctcgatcgtcttggggtcatggcgaagatccttcttgcatccgacgaggatgatggggagaccctggcagaagtgtaggacttcagagatccacttgttcaagggtcagcatagtgtccgcgagtattattttatttataagataaaaaaagctcaccttctcttgaacgttgtcaagggaatccggtgagtcgacagcgaacgaaatcaggatgacatgcgagtcagggtaggagagagggcggagacggtcgtaatcttcttgaccagccgtatcccagagagcgagctcgacgtgcttgccatcaacctcaacatcggcaacgtagttctcaaagacggtggggacgtagacctgagaggatcgccgttagtttgcgtaaaagagaacacccaggtcatagacagagttcgacggcgctgggcggcacgaactgaatgtggaagctaacctcagggaaagtgccctttgagaagacgctgcacgggaagaatagagtaagtaaatgatgctgaaaggatacttcagatgacctggaggaagacttacatcaacagacaggtcttaccgcaggcaccatcaccaacgataacaagcttgcggcggatctcagccatcttggtagaaaaatcagctagccgatcgaaatgaaaattgtttgagacccaaagagaatgaagtcaaaagcaaaagggaagaaataacaatctcgtgtgcagtggaagggcggttgttgaaagtggatggttgagaaaggaaagggacaagtcagacgcccgagggaaaagggtcaccacgtacggtgtagaaactgggcgcacagccangattaaaatagaagagttggggagacagacggttcagagagtgaaataaaagtctagcgagtagacagggtcaaaagcgaagttaagcaggtggaagcccaggggaaggaaga

SEQ ID NO: 2292 - DNA, 2329 bp, Emericella nidulans
acacccagactggcatgtttatggccaatgcgcgagactgcagtagcaagagcctcggggtgatcaatgttactagcataggcccagacagcatgagcaagagcggcaggctgcacgccggtcgcttggtgcgaggagttgaagatattattcagctcagggtgcctctccagcatctctttgtagaagagagtcgttatcgtgacgccgtgctgttcgagcgctgggattgttgccttgacaatctgcttttgctggggggtgagagcactggtcgcatacgatgcgcgttgacgcaccagacgcagtgcaccgcgtcgcaacacattcttcagcattttgaactgtctaattatgaagaagtgcaaaaaaccgtattgtctcaagagacaaggagcagcgggtgaggcgtcttatgaagtcatagctgcgtcttgcgtaatcccccagagctgtaactgattccgccagtcacctggccaggcaagcgatttaccgatattatagttttctactagtaatgaaggcttccaaaatccgctaaatgttattttctattcgctttacttgtgcgatccggcgccagcaaaacagcctaacatatctactcctcctactataggtagttcagaaaatagtatagaataggcactctagtactacctttacttctttcaggataaccctcatcagtattaagtgtcgcgaatggaatggccgggcaccaatattgcgtagagacctttgatcctggcaaaataagtagggtggttctcgtgccaactatgtctcctcccactcatgctcagcagatgcatgcgtcctgtgtagctgcaagtcgacgattaatcagcggagctgggctgtctacccttcagtctctactacagactcgtcaggcaggttgagtcctaaaatgctccgattgttaatgtgaccaatcatctcccggatgcactgactatatttgctgcctggttttcaatactctaaagatagtcactttgtcttttaatgcttccccgaactctttctatttcgttgatcagcagcacagaacgcgcttgtagtcaaaggaatatttctccaaatccaccataatatttggtagtctatttaactgggcagcgatatcaggtgagccctgttagctgcgtctataatgtcaagacagcagcaaacgcccgaaactgcataatctcttgggctgtcctatactctcgcttgccactgattaagacgtgatctgttcctgtcaatcgcttttctgaagtcacagtctgaagaattcttctaagatgtttaggaagtttactgtaaatgatcgaccttgtcatttgtacactgtgaatgattctgctggttctgtgcaagcaccaaaatggcattacttatcgtcagttctgtaaggctcatgcctatgcttttgtagacaataagccttgttagataaaccactgtgtctgcttaatctgccggtcattgacaaatccaatcttccagttcatcagggcaagtatctggtcgagctcaaccatgttttcggccttgagcttgctctgaaccgcctctcctgaattttgaagagcgtagtggcggtcgtcaaccagcaccacccccgtgtcctcgccgctgatcgggttgtagccaccatcggcagcgataatatgatgcagtattttgggatccagctcgatcatgttcgattgccaggagccgaaggcctagatgaaaggtagacggccgttattcctccgctcagtcaagtagctggcggggaaaagtggttctcgggaaggggtggtgcagaagacgcaatcagttgcgctgaggagggttttaatctgttcctggtaatctaacgcaggtgtcgataaagcgaaaagagcagtcagatttccagcgggctacgtttctctggacaccgttccaatgagtgcatccacccggtcccgagaaggattcgcaaaggtaatggttctgacctcagagcctcttaaggtcaggataaggcgcgtgtgcctcagggcctgcatgccagcaccaaaaatgacaatattttcaacattgactctccaagtgaaaggcaccatggcattcatggaagttcggtagccagtcacttcttcggaatctaatatgcccgtgagatggccctatccgatcatcaggattaggattccaagcaatggatccttcttgccgtcgggtctaagagaaggctcgacaaggagcttgacaccgacgctcgagtctaaagtaaagggcctgaaaagagtgcgttgtccagttgggcgagtaatggcactaggatcgagctggtacagac

SEQ ID NO: 2293 - DNA, 2935 bp, Emericella nidulans
cagacccaccggacaatatgtgtcgttgatagacagaattaacgtacggtcaccgatgttatcggtggccaacaacacaaacagtatcatggccctgaacatcagacaggtcaggtcgatgggtgataatacgtacttcagctctcagagtctgggactacgagctagagcgacaggttaagtggccgatggaaaggtggcggaatgttcgacaacgtcaaggtaccgacatatcgtccaggctccagcgcatttagtacttgcagggtggagcaatgatggcacggcaatgcaagtagcaataaggatgcgcgtatacacatatattattgtcaagataagatccggcgatccctgttcgacatcaaggtaaccatcacaaatctgctaccttcaaacgacatcggcagtttaggaagggcgcaaggtaggttgaccgtttggcaggctgctgctattgccgagctgtcccttgagatgacaccgcaagaccgtttatcagtgtctaccaccgcccagtcttcacagcctcaaaagtggacgctcttcgttgttcgaacctccgtgcgtttctcctagtacagctgtcataaatcaaagctcagcttagatacgtgccagggttggagcatctggtgccaagcttgggccatgggcaccctaaacggtagggcagacgggctgtcagattgcgttcttgcctactccagatttcgttggtcatcaacatccaagcatcaccgagagtccgacatcgtcagtttgacggtgagaacgtcgattccgcagccgcttgaccgctccttttcttgaagttcccatgacattcagaaggatagattcccgacgacattctgagcatttgttattggatctgagcgcaactcgagcgacagtgacagtcatgtgtgaggagataagaaattattgatgaaaatcggcccacgatctaccagttagtgttcagatcagagtttcagattccttaccgctccggtttggtcacttgtcatggacaattggccccgtttctcgctgtcctgtcggccgctccgcgcgcaccgcctcagctgcgaatccactgccacagcccagtactgccacagtcttgaaacaacacggtgtccgccttgctggataccttctccactgtgcgttgtgggctcgtaactcgtaaggctgtttgctgtaaggagaagtcggagatttaggaaaccgtggcccatggaaagggggtcccggaactgctggatatctttactggtggctttttatcacttctctctttgtactctaatatagaatcagtcgacaagttcgaagttcgacaagctcagtaatacgtgccgcttgagccaattgaccgctaaggaatgcagatatggagaaaggttaccgctggcctttggatcgccaaactccccttttgcccggctcagctttgttctcctgatgatttcagataacccagaccaatagctgacaaaatgtgtgaggggctatttcctgctccgtcctgaatggtctatatccttagccaaccgtcgacaagacagcgcatcatcgatgtcaggtgacgtatttctaagaattcatccgacatcatcctggatccatgccacctccggcaatgtggtttgagaatgtccttcactggtcgcagcacctcggtatttaaaagcatttgggttgccatggccgatggctttgtgagtcactattgaccaaataacggaactgaaatcagacaatacaaccttgctgcatcccgtaagatagccccatagcgaatccacatagttaaactaaccccagagaaccatgatgttggtgcgtagaagattctgtaacatgaataaattcttgtcacagaaaaacttgtcattattcgctacagtgtgcatccttcattcttaccatatgtcatgcattttctcctttagcagacaaagatgcgcatccatatgttcccattagatagcttgtcattggaagaatggaaggagtgagttttggctttcgggttgattatgatgaacaaaagattttctgtggggtattttccttgtgtcccttgactctaccgtgtggagtaggtagctcagggactcgggatgcgaaatgtaaatcttatcaacaaaaggtaaagagtgctgatatcgtccctcctaacaacctgaaacgcattccacagtgttgattcagcgtattgctggcggaatagtcagccctgtacgatatacatgtttcatgacgaacgatgcgattatcagggaatagacacattcgagcgaatgtttgcttctctagtgagcgtggcacggtcaatctttacgtagagttgggtcagtcgtggccagtcacaatgcataggcattgaaacggtgagcaagaaactcccatgaagtgtctgattagtccgtcttgcttttgggccgccatttctggcacagtaaaatgtgctgctacttgctatcgccctcgtaagcctcactacgaagacaccttgtgataatgacccggtttagtatttaactagaccgtaattcaatggataaaggcagaccccatacatgccgacctaaaccatcatccctttctcagcctaacatcgcgaagtacggggtatataggcgcctaccacccttcactctccggcctttcccctcgctaccatatttcccatcactcctctcctttcagactttctctgtaaaccaaagaaagacccggacaaaggcccactcggtgtgatcgaatctactctcgagtctggcacttcttctgacgccactaccgctgagcgaccatccctaaggtcttgagactatatcacaattgcttaagactcggcacactctggagtatatccggagacagtataactaacttcgcagcagctgtttttttccttttgcttttttccttttgatgg

SEQ ID NO: 2294 - DNA, 2328 bp, Emericella nidulans
gaaagtgaagagattgtaatagtaggacaaaaagggaagagaaaaggtaaaatagcaattgtataagaaggaatgaaagtggaaagaaaaagataggattagaaagaaagagacgcagaaaaaactagaaagtgttagagaggaaggagtaaacgcatataacagagaaatcggtgtagaacaagataaggtagggtacaaaattgtgaataccccaaagaacttggaccaagagccgtggaataaagaaccctctaattaaagggggttaacgccccaaaagttaataggcttgatagaaataacattttgtccaagaaaaacgaggttttcacccattgtcttcacaatgctcctccccgagtaatcacccaccgtggacaaagtcaaggcgcaaataaagaattgctaacgtgactttccctcccaggcgttaaaaaggccctggactgaccaacaagttagtttctgggcacgttgttttattaaaaattgcgaaaaattacaaaggccggccgaagaagtcgcaaaatgatggaaacaatgctcctacatcctcggaccgccctccctccaaacgcctatttgttggtaacctcagtttcgacacgactaaagagtttcttgaggagcacttttcgcaatgtggaaccgtgaccaacgtccatgtcgctacttttcaagattccgggaaatgcaaaggttatgcttgggtggagtttgaggacttggaagcggctaaaacggcagagagagggtataaatatatcactgaagacaacgaggatgaagacgattcggctcaaaaaccgcagcggagaaaaatatggctgaaccaagttctgggccggcgcatgagactcgagttcgctgaagacgcaacgactcgctataacaaacggttcggtaagaacggggaggggaaaaagggagctacaggcaacgacggggatgcagagcccggtgatttcgaggaggtcgcggctgaaaagcctcaacagaagaaggccaagaacgcaaagccggattatacccgctacgacgagtccaccgtgcagaagctgagcggcgctattgttgagggtcagggcaggaagacaacgtttgactgaagtcggaacaataaagagtcccctttcaatgatatgagaagatatatactgggtctactcctgttccaatgtcgctgtttggaaatggatcgtgtaaggacgagagcgatatttgctatctaatcctgcaggagaagggcagcgtctggtaatttgacgtggcacgagatagacgtgagatcactgatacccaaggaatggatttactcaacgcagtgttaatcatcttacccgttataatctcggatcatccccaatcacgccactttttgttccgtagaaatatagagtaaccaggcatatcagaaacgccccgcggcctgaataagcagcagtctggacgctcgacagccgtcagttcgtggcatggaatcgaggaacaagtaggctccggtggttccagggaaacaatcatagatacccggcagctttgggggatggaatgatgccgtcgacccctcaacaacaacagtccatacttttacctttctttctaaaatctgtaacccgggctcttacagagttgtgctcggtgtggttctagaatcgctgagtggttcaggcggcgctaaccctggttgggatgattgacatctccttcgatgtcatgtctcaacgtcgaaaccatcaaatcttctcgactgtccctttagagggttgatttctcttttcttctccgctcttcttcttatagggtgcattataccattcagttttgttttatatactcccctttcctttcttggtgtcgccgcttccttttctgcgtggagtctgtcatcccgccttgctctttcaacccgcctgtctctccgctgctggtcggtgcacccattcctgcattctcctttgcaacgccctgccgtacttatttatcgacgaacaatatcgcttatataataacgacactcattaagttcattccgaaatggcacctcatcgtcgcaatataggtgcgagtcgccgaaaaagacgggaggacgaaggcgaggatgaaggctcgttggatggtgagatggaggacgactctctaagcgaaggctcaatcatcagccaacaggacgaagacgacgccgacggagaggggagcgacgagagcgacgacgaaaatataccggtcgaccgtccggccaggcacgagatcaatggtcgtgtgcctgaaggtccacaacgtcgtcactcaatgtcacccaacaagatcttagagaacatgccc

SEQ ID NO: 2295 - DNA, 1272 bp, Emericella nidulans
aaccccggccatcgttctcaagccgcaaagtacacggtcatcgctctaaacttttccgtggtcagtacaacaactgggaagatctctgttgcattttccttctccggctgatgggaaggtccgcaaccccctagcaatgttggtatttatacatccttaccgctgtttctatcatctggaatgtcttcgccatcattgccatcatcggcttctgtcggcccccgaagaaatctggctgcctgagacgccggggtcttgcttttcactgaatttcaatttgtggtggggatttaacaagcaggtaagcagccagggccatgtgaaaagcgtgatcgtgagcgtcacgcggcgttgacattgcccttagccttcaacgctttcgcagacctttcgttggcggtctttccagtttggatcttccggaaggtccagctgactagatacaagaagatcggaataatcatgatcctaggcgccggtatctcgtaggtcatccttaccgggagttgagatacgcagattgatcataagtccgcacagtgcggcggcagcgacgatggtaaaatgtatcctgctgagaaatctaccggagcacgcagatataacatgtcagctcacccggagtcgacccttgagaaccaagtgctaactaaatacagggtcctgggctcccatcacaacatggtattcgtaagtagacccttcttagtagctccatcattcccatcaagtcagatgtccagttgctgacgaactcagaatcgaggtagactttccccagaacttcatccctctcagcacacttctgtcacatttggatgtacgtgatcatagtctgtgcgaccctaccgacccttccgcaagcttacgctgccatcttgcacaagcgcccatcctactacgactcctcgaactaccgcagcggcaagtcggagccaaagcacccattgatccgcctccagcgactgccagttgcctcgctattcgaaactgtcgctgcagaggaacgggtatcgagccaagagaatatcatcgacaaagttgggaaagacgggatgaggatttagaagacaacagaggtcagtatcgttcaggagagcaagggctcagctgaggtggagggccatgacccgaagtatttgcctagacagaatccttttgaaagctccaggggggtgccattgtctaggaactgaaggatgtgagttgcaaaatggaagacccgccattccgcatggatatgatattctcctagttgccacgtcggagcaa

SEQ ID NO: 2296 - DNA, 1386 bp, Emericella nidulans
attagtcccagtctctgatatatccactaactgtcccgcttcgtgacggactccgcctggagactggaggctgcctcgaaatgcagcccgtccctattccgaaagcacttgtaggtctccgcggagtacttgactaattatggtcccgctatgccgtgctgatcgaaatcccggcatcattgggtgtcgtatcccgcaacatcatttgcagcgccgcaacaaatactaggtcctcttggggctgtgacccaatggaccggcttgccgtggtaaaagagtcagtgcgctgtgcttataggctgccgtaaatgcctccgtaaatgcctagtctactgtcatgatgcccctgttggcatactcgtatataggtaggtcaaggttgcaatagaagccgttaactcagcttcttgttgcactggctgcctgcacaaatgagcagtgctgttatatcagccatcattcccagactggataagaatccaggtcattctagttcaggacatgatcactccaagtgggcaagtcaaatgcagtgcgccgaagcattatgtcgaacagcagtgatggctggtctaggagaaacaattctgaacgcgggcagtggcaccaccaatgaaataaatgggcaaactgaagaatcccaatcttagtatcagcggcagacaagtcgcctaaactttatagactgtatactctttcggacgtggtttatccgggttttaatatgccttctccccgcactgccaatcctgccccgtccggacaatcacagtccgcccggtcggacttcccccgataccacattgacggtatatcaacatctgcatccacaaacacttcattcttctgggaccgtttacctactgagtcaaaatgccggaaatcttcgacgacaagtcccaacactgcattccctttctccttcagcgtctgaaagcccaccaggcgcggcacagcaacgaccccgccaataccccgcccttctttcttggactgaacggcgtccagggcgccgggaagacagtcctggtatggccctggccagatcagtaatggacttgctgagagcaaggtactaaggaatcgctaggtgtccaccctcaattcaatcctccgctctccgccctactccctcgccgtggtaacactctccctcgacgacctttacctcacacacgaagaccaagtatccctcgcaaaaagcaacccgacgaacccgcttctccagcaccgcggccagccaggaacacatgatctcccgcttgcgcaatccgtcttttcagctctacgcgctggccgtcctacggcgatcccgcagtacgataagtccgcgtttagcgggcaaggtgatcgtgtccctatggaacagtgggagactgtgaatgt

SEQ ID NO: 2297 - DNA, 2640 bp, Emericella nidulans
  unsure (1)..(2640): unsure at all n locations
ggcaattgtatacgccgccttgtctcctgacggatctcattattatgtctaccgcctagaggtacatatttctatattgagtagctctcccggcaatgcgaggggtaaggatgtctcagctcaggtaaatagctgcgatctaagcgcacaccggccaattatcgctctaggctacgataaactttgaccagcggcaggaaatcgataagccagggctcttgagcgcgaaccacatgcgcggcgtgtgccaatggttcgtggctttagctgaatctcgattgaatcgacggatgaggtcgtcaattagttcagaaccgaagatgaaccacggcgacgggatataagcgaggcaattggctacagagggtcagagcgaaatagtgactgactcgcggcagatgatttcttgaaagcgcgatgctgccttggactgagttcgatgaacatcgaccggggtttcaggtgtacttcggccaacggagtagcttgtcagagagacataatagggacggaaagcagataagctggctgcgtgtcttatagggttggcgaaatcaagatggaccgtccctgataaaacgaccgttgctgacggggcgttgtcatacgcttataccctggtccctcaatggtccagacgagctgagcgtcggatgctagttgtaggtcggcagccttgtcgttgtgttgtatctgctctgtgacccagtgacccagtgacccagtgctggatggtgccgccgatgatgtgccggcggatggcagcagattgagattgccagaccgcattccagttcttgtcctcctgaaaattggtcatgccagtcactcattccagggacgagggacgattatggacatcaggtctcggatgcgaattttttggagtccagccagttcgattccgaccgcacaaaagcaaatatgcaccgtatcttaaacggtgagatgtcaggtcgctttctccagacttcgggccaaagcagcccctttccgaccgtcgaaggttctctgcgcattcctttgcctgcctgaagtagtatagtgtattataaaagccccaattgcaacgaatgggctgtgggcccaggagggtcggcgatcagtcggggggtcgattccttctgtcaattcgatacagcgtccaccgttcagtgcccacgggtctgccagtccccgcagacgggcggaaataatccatgcgcagaaaccaaacagcatgggaggacaaccagactattggattcgacattaccagaaccgtggataagagcgcgactatgcttgcttgcccgctaatcttcggcagctcgaatcggcgggcgatggcttggctggccacgacgatcgcagcaaatgctccgcgtcctcgtgctggcagttggcccgatgctcgtggcgaaggcttggacgggcgtcttcacgagtcactagaatcagggacaacatggtgggcctcgcagcaggtcttatttgctgacggtccggctggataccaggatacgccatcgcctgctccaccgtctcctgattctgcaagactactgttagtgtgggcgacaggcgggtaccttaatggtcccaaagtaggccgctgggagaaattcagttggcaatggtttgacaatgcttgaccactcctgaatctctgccgtcttctcaggtctctctctttcacacactctgtctcaatcactcccttcatccattagccatccattctttcttttcatcatcatctactactctccttactctcccacaaccctccgacactcctcggacgaaatgaaagacggtcgctgctgattgcttcatctgtcacacagggtatgttctgaaagcagcccaactccgcatcttacgcttgtcctgcatctcgtctttgtctcccttttctttcccatctgcctggaagtcggaccgaaaaagaaaaaatatcataaagtcagggctgcaggcgaaggacgtggaaaagtgtccggcccccatctgtcttacagtcagacaatccatgtgcagcgtgaaagacggctcaccccagaggagagataagccctgttgggcaaaataacagaagaagcgcaggctgacgggcatttcttacattctacgtggtctgtttgtaactgaccttttctctgtagagaatcaccattcctaggtatccctatttgttactctttaattcatttattcttgtttctatttttttgttctttattcttttatttatcattaaatttggctgtgttttgagctccgattattatgattattttattatgaggatttagtagagaaggaggnagggagggggggggnnngnggnnnnaggccccggnnnngcccccccctgtaaactccctgtccttcacgtttttattttctgtattatttattctctcttactctcgtacacattcccctccattcttttacccagtgtagtagtcctctactttgcctccactctttcttgtatcccacatccttcttactctcttattttatcttacctacctcctttatcgttgttcttacattatattctatcataatcatattatatctacattctctttcgtctccccctttttccctcctttttaactcttatttattgttttttatacccct

SEQ ID NO: 2298 - DNA, 899 bp, Emericella nidulans
tctcgggctcggtgtcataatcttaccctaaatatccccaacgctttattcttgcctagctctcgagtactgcgtccgaacggacaaaatgaacgactattctgagaaagacagagggccgatatctcaggggaatcaccaagggcaagggcaagggcaaggacaggggtatgggtatgggtacgactattgccctcatcaatattcatatccacaacatggacctgcatataactatgctcctggtactcaagctcaaccagcacctggccctgcatacaattacaaccgtccatataacatcccattaccgagctatgagagtcacaaccagaccggctatggcaacaggccctcgcctccacacagctacggccatcaattccaaagctacagtggctccgggccacactaccaaaatacctacagcccttcgctacatggaggcagtggtcctatgccaggcttatacgcaaacaccagcgcagccgcgtcccctatgaaccaaccaaacccggtcagtaggcccgggccccaaacccttctcttccgcaaatctccctcagcggagaaggtgatttttattcacccagccggcgcgcccctcacctctccaccggtgtactgtctaagttcctcgcccgacgcagagtacgtccttgcgcgcggatcggacccaaacaaccccacagcactcgtgggaaaagagaaatcgcatacgttcagcagcagattcgacatgactgtgcgcggaaggacatgtgccctgaaggggtcgaccctggggtcgacatacaaggtcgacattcctgggacgggtagctacaaatggcacacagacgatttctcgagtaagatgtggctgaaggatgagagcaaatgtgtccttgcgacctact

SEQ ID NO: 2299 - DNA, 2645 bp, Emericella nidulans
tctggcaagtaagtacccataacatacgcataccactcacagagcgcctctcggatcttctcattcttagtgggattctgcgtgtggatatttactccccgcacgacatccggatgctcagccaggagcttttctcgcaaagagaggcgggagaggtatgttttgtccatagggatcaggtctgagaggtcgagatgggttattgctgttatcttgttagttattatgccttcaccgatttgtagctggaggctattaagggactagagagacagctcacccatagttaagtgaaactttggcttgaatggtctgaaaacaaggggctcggtcgtttcccagttgaagctggggagaggggtgacaggaggatagccaaagcggctttgttttgcttcctttcctggatatgggcttggtgactcgacgccatgattacggctggcgtttggtttacgctataggtgcgttagctggatctggacatactggcgagtagcgtcgtactcggatgtagatcacaaaaaagcatatgaaaattgtgaggaacgcgaccagcggagtccttgcgagaacgaagtccaaggttggcattgtacccacgttgagttattcttgtaccctttgttgcgatggggggttccagagggtccagatataaggtggtaatcagttggagaagtcgtatactgcaggtgacctggtgatatcgctaagcttccgattggccgttaagaccgtctcaacgccgattgatccacgctccgacagatgaagggcaccaaacagataagttcgctataagcagtggtataatgtacacagcccaacacggggaagaaggacagcgggcggcgcaacgccccgcaaaaggacagccatgtcatggcaaaagaaacccacctcgcccgttgtcacattacccaggaggaagaaaaactcattactccttaaataaacactgtcaatatgattcggactgcccgctccttctcttcagcttttcccctgcgtcaggatccgctctcatcatcacattctctttgtcgtccatctccgatgtagcgcttagaccgaatcgatccggaagctcattcagactcggcgctcttggacgctgcataccccttgcccggcccccaaccgccggagtgtaatacaccgccaggcgccaagtgtacagagccatatcgagtatgatgagggtcacccaggggaggattgtcacgacgccgaggaagaactaagatagaagaccattagcgtttgatcacagacgtgcatcaaaagtatataggaatattgtggtgccatacaaagaaccgcacgacccagctctcgaggtagatgaactctgcggggaggatggagtaccaagccatattcgctcgtataggtatcctccgtaacaaaccgtacgattgcgccgtttgataataaggttgtgctatcgaatagattattaccagcaaagtgcagtaaataatcacttcactcagccggggtttgtgggatcagaaaccattgattaactacgcagcgttgcggatatgtcggaggctcgaactcggtggcgtggcccgatcagttgaggtgttgcaccaggcagcgacgaataggctgctgattcaacttgcagagagctggcttgtataagcatcgactgttcgaaatggcaaccgcatcgtacagctcaggacgtgcaacggtggccgatgggctgcctaggctgcgactatctgtggtccgagtgttgtcgggaaagagcgatcggcccaatccggtaattggtaagcatgctcctggtgcctgaggctgctgtcgcacggccaaagtgtagttttcaggtacaatagacacaactagacactttgtcaattataaatgatatttatatacaggggtatcccagtgtgtatgtccaaaaacagcccaaatccaagggttgaagtatacacggctagatgtaatgcaagtaaactggaaaaagttctatcaacgctaaacgcaaaaatcacctcgccatacgatactgttcatatgatgtaaatgcatggtcatcctgatcaacaggaccataccctcctcccggccgacacggttgcatgctgactcccgctggctgctgcacctgtccgaggagctccgtttcactctcattctggtgctggtagagccctctgctcatcccgctacccgttctgaatggcggcggacggaacacaggatgcataccctggtttaatcgcggatcgtatgcttcgggctgcagcattggcaaacttgggacggatggtgcgggagaaggtgcccgagaggaggtgggggaccagtcgcccagcgcgctccgtggcgtgtgagagcgctcagtcatcaaatcctctggtcgcccatagatgcctccgccgaactcttcctggaagtcggcgcgatccttgtagtaagcgaaatcgaggtgatgctccgggaccacctcgaacggagccgacgtgtccggcatggtcttgccaggctgagatttcatcattggtccatgacaatgtctgaataatctccctccgcttcattacctcccagccgtccacggtaaattttgctgagcgcgttggcagccttggcgtgcacaataggcgtgatcaatggct

SEQ ID NO: 2300 - DNA, 2056 bp, Emericella nidulans
  unsure (1)..(2056): unsure at all n locations
acctggtttctgaagctgtcacagtcatcgcagtctcctgcggctaccgaagaaccagaaacacagatcgagatcctccgctatctcacgtcacgcaggattatttcggtactgagagagcaagaccgaatggcacatccgatctggcaaacaatccatcccaaaccgcctcggagatcagcctgcaagactctttagcagattcaggctccacagaagggtctccacgcaccctagcacggcctgcaaggttcgttaacaagcctggattacctgttcttgaacaatggtcagccaggttatacagcgccgcgagtcccgaggagaaccccgagctccaacaggctctcgaattcgaaacaaggaagaaagctgccattcaagaacgtcgaatgcagcttcagaaccccaaacctacaacttcaaaaaactctccccatcagagcaggtaccttgccgctcgggctgccttgagctctcagcctagacctagttctgtcacgcagcagtcgcgatcagaattgggcgagatttcatcacacggcaccggggtgtcaaagacgtttctaagcccgcaagatccaagggcatacctcatacagctccagaacagtgatgttcccggtggtccaaaactcaagcggatatcgtctgccaaattgccttttgagaaaatccccgaggaacatgacttacattctatgggccttacattacctgcagggctgccgttgatctattcatctttcaagaacttatggattaatgatctatatacgcagtctggtgagcaggtcgaggggtttgtttctcctgatataaagacggcttttgaaagctgggacgcccacttatcgagtttaattagagctcgttatagattggcgaagaactctgatatcccgaatcttcaattcgatttctccgaattgtctcgggtatctcagggcagtggttaacgacaatcggtccagtaacccagtcttttatctgcctttacaactgcgatatcctgcagttcatcctatcttatatttcggatctattagttacaagaaccaagattaattatatttcttccatagcgtattccattgaatcgagaatatggatatattctcccgggctgagtggtcgacatagagtttttgtagagtcgctcgtaagcttgtaaattccttcttacagttacagtaggagcgcactttcttggctctcaagcctctccgttctgctgctgctctgtcattataccaacttaccgtgtcttaagggcaaaagggaggcagtatgacattcggtcgactcaataccctctaccccgtttatattcattgatcaaagggagcccatctttcaccctttcgagattcccctgacaatatcaaacgaacgcacgaaatactcttgcccaagggagctgacatgcgggctaatctgcacattcggtgtatcccacaactcatgttcttccggcagagttccaggttcggtaccatccagcgcggcaccactgagttcgcctgacttcagagacgcaatcaaaagcgtcctggtcaattgacccttcccgcgcaagatattggtcaggtacgggttgcggtgcttagggttcttatttgccgcaaggatggcaaattcttgcgcaccaagcaggtgtgttgttgatggcgtgagcgggagggagacgacgatgtggtcgagacccaatgagagaaactcgtgcagagaggctttaaaagtgccatggtgccaggaatactggaagcgtcccgtcggcttcgccggtgcccgggatgatggtaggtcccgggtcacgggcgggatttcggaagttggtttttgggaggctgtgtatgcgtagacgctaaaaacagagatacggcaacccgggcaactataacagaaggattcacgaggactttcactaaaaagtgcncgtgagtcaacggctatatagaattaaaagaatattggtaaaagtaaaaggaatgaagagaaatagaaagaattaataagaaataagttatcaatataaatgatattagtagggagg

SEQ ID NO: 2301 - DNA, 1154 bp, Emericella nidulans
tccaggcgggtcagaagcagtctggcaagtccccaaagatacttgtcatcggtgctgtaagtacttcgtctgcacttcatgacgtttctgaccttatcattgtagctgggacgttgtggtaagggtgctgtgcaattggcgaaggacgtcggcattcccgagtctgatatcattcagtgggatatggaggaaaccaagaagggtttgcgctatctaccatgtgtgacttcatgcgctaacagtgcctaggtggccctttcaaggagattgttgaggatgctgacatcttcgtgaactgcatttacctgtcttccaagatccctcactgtaagtcgaccttggagaggatttctgtcaaacgaccagaaagtgcatgaatattgacacctacctcacagtcgttaatgttgagagcctttccacccctagccgtcgtttgtctgtcatttgcgacgtgagcgctgatacgtaaggcaaatcttcccaagtcttctgccgtatccactaatattgccaacagtaccaaccccaacaacccaattcctgtctacaacatcaccaccacctttgacaagcccacagtacccgttactctgcccaatggcactcaaggcacgcctctcagtgtgatcagcattgaccacctcccgtcgcttctcccgcgtgaaagctccgagatgtttagtgaagcgctgatgcccagcttgcttcagctcaaggaccgtgagaacgctcgggtctggaagcaggccgaggatctgttcaaccagaaggttgccactctgcctcaaacggcgtaaactcaaacgcaatgcatgtcaatacccggggatagtgttgcatgaagttttgtaaaaaataggctcatgatagaattggttaaacaaatcccaagataatgaacatacggatgcacctcggtgtgattgtgtctgatacagtagctattaaacattctgcctaccgtctacccgtaagagccctgtctcaccgatactttcgtgaccgttcagttacctcaacccatcgccaatgtttcatcctcatttgaagtcacgccgagatcttcaaaccccacttgcatcattcatttatcagcggccctctttagaaagggcatcaaggcaagcactcggagccatgacccagtcaca

SEQ ID NO: 2302 - DNA, 1770 bp, Emericella nidulans
ataccaattttccaattccaagttaacatggtaataatattccaatataacacaggggaagcgcctttacaagacattgaaattccatcagagcttccatggtttgctagaacctaactcgggacaaccggcactccgttcctgatacggagccctcatactagaaacacagaggagatgcttatctcgagcgctcccagtatactagagtagtttaatatgagtggtctatcatgagtattttttgtgagctgtctatcatgagttgtctccatgagcagtttcatgagtatttttcgtgagtggtcttcgtgagtggttcttcgtgagtagtctggaagcttactcagagtacggactcgtgtcgggtgttcgagcgccttaccctgcggttcttttctcctggtttaaccgagcacacctaacggacgacggagaggctcagacactagattcgatgatcagcagcctgctatctggcctactacgacttcgtagactacggtattcaagtcgttgtgatttaccccattttaagccgccagatcgaagaattctaacgtcttttcacgattagtgttatgactatatttattaacattattttattataattgtcatggttttatcttgatttatatttatttttgatttttctttgggtgcattcgactactcatcctcccagtcgagtttcatgcaggtccgatgtggagttgggcctctaatgcgggctcctctgtccaaaaacgccggtgggcccctgcagtgccgttgaacgcctcccgaacggtctcggtccaatgtccgttctggtcagactcccaagtttcccagcgccttgctcgggataagaatctacgattgtacgaaccaagggctgccgccgagtcatcgacccgtatctactcgcatctagccgtgctctgtaccaattgaacatctttcttgtcgtattcgctctaaagtcctcttacaatagtattgccgcaccctgtgctgactagacaacagtcccacgctataccgtattcggcaaggaggtcacagtccgcctccgccggttggtggaaaatggtcaattctcttccgtctcccagccctggagctgttccaccgtccaggccgctggatcaggtcaagaccaaagttggtcaacgatccttcaagcactccaggttcatccagccctggctccagctgttcctgaatcctctcatcaaacagccggcacgcaagaggtgtctttggtgtccaattcctggtgtcttgagagcggctagcctcactctcgttcagtgaggcccgaatatgatcctcgcttgactcgctcgcgcaagttcgcaccatcctgtgaggacgtcaccttgggccggctcctcttggctggctgatgccgtagaaaccggcgcgctaaccgagcttctgcgttagggccttcctaggctcgcccgacgccttttgagtcctgtctcgatttcggactctgtgtttggtggatgcccggccaaagcgccacttagtcccggaaggtcttccacatggtgtgccacggtctccatcggagcaactgacaattgacatgacagctttcgatcagcccaactcccgtggtccagcacgagtcgggtgcagaccagacacccaggcgttcaaattatcaggagaagggctctggataaccgggcaagcgcttcgtttctcctcctctgacgacttttgattagtacactgccggatagtggggatgagcctaggattgtgccccgg

SEQ ID NO: 2303 - DNA, 1957 bp, Emericella nidulans
  unsure (1)..(1957): unsure at all n locations
tgaaatcgttctgaaagggtggggataacgcatgtgtgctgtcatagagggaacaacgtattgaactgggagctcctctggccaagaaatcagatggctgagtcagacatcgacgagattctagatgaggaagaagagcttattgcaaatcttgaaaaggaaatgcttccgttgacccacaagacacttgagtgtttgaggtctgaatggatccgtatgctaaaagaaaaacacgacgaacgacttgaggcgaagcgcaaaagagagcacaataactccaagggccctacgggtgtaagttcctcatatccatgttcgtgataggcgtctgacaaggataggaaccgtatcaggttgactataagaatgatacgttttgccaaatattcaatacagaagttgatttcgacgttgtccctttggcaaattccatggctgagtacgtcatctggctagagcatcagtacattcgatctaaagacacatgggataccgcttgcgagggagaagcctggtataaaagacggatgagttggtttgtggaactcatgcaagtcatggaagttgctcccaaaacactcatcaagactatcaacaataagatcgaaacgataccatgtgaaagcgatggccttgataaggaaggtctagtcagccacttcatggcttctatacaggagacacgagaggctaaaccagatgtatagtacagttcaatacagctttgatatatttatctagtcaggaagatcttcgccattccgagattcgcactcggacggatgcacctgagtaccattatcagactaggcagctctataaacctccaagatgagccttggaagtctatgaggccgagttatacgtcaatgatatctagcaacggcggcggccactctgccctggctaatcacatcttctcagtgttaggaaactggtcagaagagttcgacgactgtgaaaacatatacatgaacttacatcttggctcctcgataagaatcaacacaatcgcagtgaaccccaaggagatttccatctcgttgaaggcaaggtacgaagcagagttggcctggcttacccctaatctcctcgctaatgggtatgccacggacaatccccctcgcagatctcgaactggtcaaccaacttcacaagtcggtccatctggtcactctcaagagccactgagacacaggccagatggtcatcttcaaatcctccccagacccaaaaccccggttgctctaccacgaactccgtctcctgcttataactcctccgcaccccaacatcattaatcgcccgctctacctcgacacaaaaagagtctcctttggcggtaagcggcgtgttgctggacttttgctggagtatatcccgctggaacgttagccgcttgtctcaagagcaccagagatatccctttggagacaaaggtcaaatggacgtgccaactaacctccgcaccggaatatgtcgtctcttcaccggtgggacactatccagacctaaagctcgataatatcctactcaagcattctcctatgggggaggggggatgggataccgtcttgatcgacttcgagcagcgaggatcatgggtgtgctggaacccaccggagatcaatcacgtcactctcttctctatctcgctacgcgaaaatcacggtatatcccacgccacgtagccgccgaataccaggctctattggataaacattgccttcgtggcacaacagcagcggcggcagtagtggtggcatcaacactagccttctctcctcggggtataacaagacctggcgttcactgagtgtggatgagcgtgaaagtgcaatggttttcatgcttggccgtgtgttatggtgtatatttgaaggtgtgggcagtagcaccggaggtaactctcggactttcctgtaagntctatcgactgccatcggccctttttttt

SEQ ID NO: 2304 - DNA, 2427 bp, Emericella nidulans
  unsure (1)..(2427): unsure at all n locations
tccgcatcactaggccgaatattgtggcgcgctgacaggttactatagccgaacatcatgtacgatgttgagcacccggcgtataaggaactgggtaaaataggcaaggaaattacaaccaaggtcaagccgcgtgccgttgtagtgttctcggcgcactggcaaggtggtgatgatacggttcaagtcaatacggctgagatgacggagttgatctacgagtacgtatacccgcccttctctatgcgcgtcaactgagaccagttgatactcgtagtttctatggattccccagccactactacaaggagaagtaccccaatgttggtagcaaggagattgccaacaaggtgctcgacgcgcttcagcaggctgggatcaaggccgagggtgtcaagaggggattggaccatggggtttgggcaagcttcaagtgcggtaggtgccagatccagcaggagccatgcgcgaatcgacaaagctaatacgagcaaagcgtttgagcctgaatcaaaccnccttaaatgttcccatcgtgcaagtgtcaatgttcgatacagaagaccctatgcagcactaccggctcggagaagcggtgtctaagctccgcgaggaaaacatcctgatcattgtgtctggaatggcagtccacaatctgcgcgatttccggttcacttttaatgatgctcggcccttgccgtataccgttagctttgacgaggcgctcaaagacgcagctaccaagcccccggccgagaggcctcaggcgttggttgatctgctgaaacggggggatgcgcgacaggcgcacccgtattttgaccaccttcttcccattcacgtgggcgctggagctgcgggggaggatcggggcgagaggttatggaccttgaaggaagggagcatgagttgggcacagtatagatttggtgaagtggcgaatgccagcgcgctgtagcgattagccgatagtaatgaatcaagcaagttcaaccgagtaaagttcttgtgagccaacgtttatttggatataggtacagtgttgacagccgggatgcggtacatgacataaaacgacgcgccagagtctatgaggattccttcaccaattgcttgaccttttcttcgatctgctggtcagagagacctgatttcgattagcgatgtccgtacctcggatggaggggtaacataccgttcagtgattcaactttctcctttccgagcgctgaaatgcaaaccacagattagaaatttgccctccaaaagtgaagtaatatatgtattatatttaaacgtaccgtatcgggcgtagactcgcggcagagtgccggcagcctcacggatgaggatgggagtgtgcgggttgtgcttcttcatggtgggataggcgcggttgataaacaacctggggaatacagtcagtcctatttcttcttccggtgatcccgcaatcgaagattgactcaccttgtcgccgcgctttgctcggaggtctggcacaaaaggaaccgcagctccttgagaccttttgtgaagacgtacttggaggacattgtgacgagcgatctgtgtaaacggcgattggagaatcacagtagttcaacggctagacgatcaatgccaatcatgcactgcaattgagaagctgtcgacgtcgggctagagatgaggtcgccggcgttgtcgttttgcactggaccaatctggtcaagcgggatgtcacaccgcttaccttagccggaagtagctgcattgctctgcgccaacgtgactaggccgacgtcggctctgactgataaagactcattcaggtgttgttgtccatcctcctctccactttttatacacgatgtcgtcgtctcgcgttggatttcgctttttccagaactcccgcgcggccttgcgcacggccttccgccggcctggtgcccagggacgccgctttcagacttccgatgctgcgtcagagcaacaaagcactttccagcgtctatggaacagccccgtcggtgtaaagaccgttcacttctggtatgtctagcatctgaggaattggatctttcaaggggtgttttgtgctaatgtagccgccgcagggctcctgttatgaaagtaccataaacccgccggttgtcccagttttcacaattgagagccattggactttgccccggagtattccccccttttaaagcgggattctaccgatggaatcagacattctaccaatttctgatatgggctctcgcattgcgttttttgactttactaccgcccnaanntnntnannaaaagggctttatggcccccgccccccttttttggggttgtattagcctaaaatacctgtgtgttcccccccgtgttaataccggtaataaacccccctcttaaaattcttgggatgggccctttccccctccc

SEQ ID NO: 2305 - DNA, 2471 bp, Emericella nidulans
gacagcttcaacatgcttcgagctccaagagaatagcacagttcggacgatggcgtcgtttggcgtacggcgcccgaattaggcgtatttattctcgactgttgcggcgggggccggagagggctcgttagggtcgcgtacgcaggatcgtgatgctggtgagacgattgaacgaccgattaggatccagaaggacgttgttgttgagcagagcttcgagtatgtaaaataactgatgggagtctcatttgtgtgttcactgtatttgtactagttcaaggtaagacggtaatgctagatgtctcactcatagttgtgttcaagggcccagtgtgctggtcataaacgtaataaacagctaataggccggtatacgaccaaggacttctgtagagaaatgtaagagaatgaggtgcgagtgtattgcagctcccacgcctctctcgctgggaacctaatgcccgtactatctgcacaagtaaatatgtccatgtctgcagcctcgttgctaagacgcgaaagaacacagctcaggctgcggctgatagtatcaactcacatgactaatcttaactctctttccctagagctactgcttggcagaaaagttaatagagattctcaggttagcgaggttacaggccgtcgatctattgagatgcgtcgtgtcaagaagtgccagtctcaagaacctttgcgaacaaaatgagacttttgtgcaggcatgctgttcatagaccttgtgattgccaatccgttcttcacgatcgttgactggcacagtcaggccgttgcacctgccaagtatacatactagcgtctaaaagccgcttcgttccagactgcaaagcgcattggaggaaactcaggctttaggccagccagatgagaggttaggccatggcattgggggtgaatcggatgtgtcgtcaaagccgcttgcaagctattacataccactggatatttacacaaatgtgtttcaccatctcaaattcgccaggctcaagctaatctgcttgtctggactgtgcaggaaataggttttcattgggcagccctaaaggatggaaggttttatacagacgtggtacttcgcagctaacctcatgcacactgatcgcttctccagttccgctagccgcagatgactctggcaccgctgattggcgttatcccaaaattgatctgaatcataacagagacgcggacgaggatggttacattttgttcctagagttcaggtgtgtctatctctcggcggattgtggaataatattgcgtagtacattatggttaccatacattcctgggagacttatctcatctgctcggtgcggaggtgtcttgaacacctaaggcaatgtttgtctgcgttgcttgtttgactgcttgtcgtatatgctcccttcatcacggttccttgtccaagatcaatcctaggagctctgccgtattggcctggtcaacttattacccgttgataataatctgtcccacaccgtgctgcgtttagaccatgttaggcgcatgagtcccctgatgcatgaattccgtttcctctcctgcaagcgaggatccaatctactcaacctatgcttctgtgcaggggatatcgtcttcctatattttccagatgtcttttgcggcgcggttggcttggcactgaaaatatttatgtcggcacctgggcagttgactggcactctacggtgtccgagtagataaacccaaatacgatcggaggaagcgaggatacccgtgtaaggccagaattctctagtagacagacctcagtctgaaacccgccaaagcagacactagcatgctggttccccgtaaaagctgcgaaaccagcgtctgcgtatgttgggatgcctttggcccgcaggcgggcgtcaaggtgcttgtaaccagcaggctgtctatataggtgcgatccaggcagatcaggccacctggactgattatagtgacctcttggtctaatttgggagttattcttgcctagacatataatctctcacactggcttcctaaccagcaatattactaatctcatcaaggtccttatcagcctccttggctactatctcctgctcctgttttgcctgcctggagattattcaggaactagctatataggtgccaaaataaaaggatttttggagcaataccccgatgattagaagttttagtaatgcgggcatgtatgccagtatcgctatcctattcttaaaaccttttatagctgcttgttggaccgctcctgaccaatatagatactatgtccttattaaaacaggacatggtgtgccagcacctttttagagataggtgttagggatctactttgtcagggcagatcatcttgttaacttgataaggataccgctaccaagaaaagccgataatggggaactaattgttgaatcttggggaaatacgaatagagcccagaaacagagtca

SEQ ID NO: 2306 - DNA, 879 bp, Emericella nidulans
caaggtattccagtaagtaggcaaataaatagacgctgcaatcgcatgcccgacaattcatacaccaaccatgggaagggagccgcagcttggtgatgttggcaagtgaaatcattcaatcatcagtcttcgagatttaaggaacggctgtagcaggtgcatcgtgaggggcgttgccagtgcccgtggcgccatggccgtgcttctctacaacgggattggcgtgctcctgacggtaggaccagagggagtagagttcgaggagcatgccaaagaaggtgaagatgctgcggcattattagttatgagagaacgaaaagggtgcaaaggaacatacaatgcgaggaagatgaaggactcgtttgctttcttcctgctgcagttcatgtagggaggagcgttcaagtaacagttgtgccagttgtagtcttgcgcggcgaagatgaatgccgtgagccagcttttgaaacgttagttagcatgcacgttgtcaaggacgaatgacagctaaggacgtacagataagagaagacgacatcaatgaagaagacaaatcggctcagcatgttgggcatgaacggggagaggaaagccgggaggaagaagacaaccgagagaacagactgtattgcattagctttgaaatccttcaccagatagcggggggacgcacaatgacttcctggtaaatgatatgctgcccacggggccctttgctaatgaagtaggatgttattcccatcacaatcacagcactagcccattggagagctcggatcaagagcatgaccggcctagcgagagcttgacgaggcatgttgactgcttgatatgaaatagtatggactggaagtatagattgggagtatggctaagtat

SEQ ID NO: 2307 - DNA, 1267 bp, Emericella nidulans
tttgtccaaccagacaacgtatcggggaccgattcaatctctctggccgcatctttcggtcataacgaataagcgtactccacagggctcatctcggcggaccgtcttattgtccgtcccagtataatgccaaccccgcactacaggagcaataagcggatgctgccactccggtgagccggtagagaagccgtcaaacgctcaatttgcgagcgatagatttcactctgggagtttgacaccaaaggtgccgagggcgatcacccggatgacaataaatctgatatttctctcaagaatatgctcaccagcttgatatcgatgaacgaacgatagcgataacttcttctgcctgttgtaccggagttatgcgagtatcgcaaccggtctcctagcggcttcggtgcgatctgcggaatggctgtggaattttgttcaacgagcgtggttttccatccgatagttttctttctagattttcgatccaaagcgaaagtatatatcccaggacatccctcgatagaatatctattcgaacgattgggtctcgagacagcgcttcctgttagaaggtggcgggtgttaacaggcgagggctcaaggcacagccttcaggggcatggccggacgtctcaaggaggtttcaaaaaacgatagaaaggaacgacgagtttacggatagagaagtgagggaaatttgagaagaagaaaagaaggtgggcacagaagaagacaaaaaagccaccgaggaggctttgaagtgtaaaagggtttgaactttgcggagaaagtaagatagcgatcaacgatcggcgatggagcaggcatgccaactgcgcgtcccaataataagcgcccgaggcaggggtattttatctttttcgtatcattacatgtagaatatatggaactgcactcgagatattcttagcggtatcttgtattaccgatccgagatactcgaaggtccagtttgaacgggacagcagttcactacgtatctcctgtcgatcaacggtggaaattttatggtaagaatagcttcgagtgctgagcctgtcaaacttgtcaggagatatagataacttgaagaactagtttgggctttgttatggtggtgctttgcgcaggcatcgcctggacagtaatcacagggagagcatcgcaacttcagcgtcgcaagtgcatcacaaagcgcttgaatggcaggtgccttggcataacaccatcatgactctaaccatgtactaaaggaggcacgtttctg

SEQ ID NO: 2308 - DNA, 1323 bp, Emericella nidulans
ttcaaactcggtgttccatgcagcatcgtctggccatccttctcgctggtgactccacgaagaacatggaagccgagaatttttcgctagacgaatagataccaagcaaccatggggccctaacggtttcttgggttggtcccttgagttaaccgatacttttggataatttcaaggaactcttctattctggagatgataagatccactattaccacaaaaggaaaatcttcaggctcagtcgcccgacaaataggagactatagccagacttattaagcaggcggtgaagaagagggcttttgggaagtgctcacttgttgagtccgaccgtggccgaactccgattttagggaccattttttctgcttctattggaatccccacacaccggtgtcttatcggccctgaattcagggcgtctttcctgggaggaacgtttgtcgacctgttggcgctattccagtttctctcccgctgattgactcatcgccgcctttacgtacctccataaatttttttgtgtccctccgcctctggctgctttcaccgtcctcctctccttgactcacccaccatctcaagccaatttttcaattccctccatcctaccccctccctcagtcttgggcgtgcggcagaaggcgggacgtcggtagggatttgtctaggccgagcgagaaggaaacagtgcccttggagctatagcggtgcgagtgtccaggccttcgtcgccgagtctcacccgagggctgagcgtatgacagttcaatggactgcatcctcttcgctttactctctttcacctacctgtcaaatagtgcgcgccgcaatggttcttgctgctcggtgcgggcaggctacgtcctccctcctgcgtcaacgatgtctcgctgagacccgtcgctctgcactggcattgcggtctttcacgtccccgagcaccacccgttccacagcatcggcacttcgattgcaacagaagactccttcgccatggcggtcgcagcagttgcgcaacttctccagcgcgctctgccgtctagctgccgagtcgtcctctgtcggcgacagtctattctctagcggaattgtcaaccctggtgctaacttggttgacgtcaagaaggtgctggttatcggtagtggtggtctgagcattggccaggctggagagttcgattactctggtaggtcaatgagtcctgtggtttattctagtagaggcagcgcagcctgttgtgtcgatcaggaggaggaccagttgcaagcgtgaaggggtctgccaacatggtctatggacgtggttgctgatacttgtgc

SEQ ID NO: 2309 - DNA, 3044 bp, Emericella nidulans
  unsure (1)..(3044): unsure at all n locations
ctcttccattccagctgacacgaccctccgcgtcatcaaagctcaagtgccagccgctttcccaggcagagcttgtaatcaacgcaccatatcaacccttccacactgaccagagagttagtctgtttacttactctgaaacgggtgaggcggatggctcaaccactgcgacgccaggaggccagtgggtatttggcggaagtatgggcatgtccaagctacatgttcgccgtgtcagcatcagtagcgaggatgaaggtgacgttgctatgcatgaacttcaacaggggccaggtggaggtatcgtgaatacgatcagcatgggaaacagcactgggaacgtggaggaagtggtaatcaccacacgacggaagaagaaacattcgtcaccgttccaggctggcggcgaggatggattcttcgaagacgactgtgaggttttggactttgccgttgaccgggtctgatccttaaccacagtgtatgcatatatcactcgctgaggtggcattggttctacgcaattttagacacttatattggttggcgttggggttggttttttattatggtctcctttttatctaaacgtcatccatcgctgttcacatggaatttcatactctaatctgcacgacagcgctgtttcgttcaacactggcctgacgagctctacattcattttgttttctttggtgcgcatgttatctacatacctgtgagaatagacgagaatagtccacgcaatctcagttagaagaaatatccccaatctcctcctcccaccaccttcgaaattccaccagcctctccgtcctggacctagccatcttcttccctgtctccgtcttcatcattccctccaatctttccaatttctcgccaaaatgccttatcgaattctccatttcccactcctcaccctcctttaacatatcccttcctttcgcacccaagaacgtaaagcaccgtccgatcccaatagcgcccagcgcatccagccgatctgcatcctgcacaatcgccagctcaaccagcccttcatccttaatcaaccgccttatagctgacgggtctttacactccgtcgtatacgagacatgcgaaacaatcgtttgtacgcgctgggccagggtcgcatcagcgccatgcttgaggaggatatactcgactagtttgtgcggggggattgtatttgcgtcctgctctgaatcttggggaagatacttcctgtcgctgatatcgtgcagtagggccgcaaggtggacggtgagtttgtctatgggcttgggcgttttggcctcttcagactggaggattggcattgcaagattcacaacgcgattgatatgcgctggattatggcttggatcgtaatctttcatgcatttcgttacaaaagctgaaattggtgcgatgagcggatcctcagacatggttctaattcttgaatgtcagcttccttgcccgcacagatggctacttaagtgtagatggttatttaccttgattttctctgtatctatgtactgaatcatgcataagcatgcggttgtcaaaagacgcgttgcggcttcaatttgacgcgtcgggagttggaccgggccagtcacgactggacctccacagcaacaggctccaaagagccaggcctaggttacagcacagcgggtggttccgctgctggatgactggttcaaggttcaagttctaagcaccctttaaagctagaaattcagcaatcaatatattgtactatatgtgctaagcacgcgaattctaagctactgtacacgaataacagtaaataactgttggtcaagacattttagagaaagaaatgacagcctgatgttcattccagtctccacactccacagatctcgtacccgggcgtcaggtggtgattatttatgggcccaccggcccacagaaacaagtcgaagagcagcgatcggcatcccagtctattctcgagtacgaagtatgcgaaatatccaggggattctatctgattctgcgacgttgtaacttgtaaatagacttggaagtttgcgaaaaacagaaagggagaagcaaggagtacagggttaattaactcaattattatggtatcgatcagtgattagtagaatagagagtagaagtaaagactatgtagataaccatcagacaacgttccaatccatccaaaccattaatgccttgcatggcccgtgaatcgtgcaatcagcaccgcacttcataccagactgaattgcttcggcaaggcccttacagagcccaagcggccatgaggagacctgccagaccagcagcagagacaccgagcctggcggcagcgttagtgccagagggctcgtcgccccgagccggtcgcggttgccctcgtcgccgttggtgctggtggcgctcgaatctaaaaataggtcaggacttgtggcgggaagagacacggtgccaaaagagagcttaccatccgagtcggagtcatcagtgctgtcagcgtcgacacccgagctagtggtcgtggcggagtccgagccagttgagctgccagtggcagcgctagcgacggacacagcgcctgggaagccagtgctgctgatgcagcaagcctggaactcagagtacgaatagatgatctgtctgaanagtaccctgtcacactgagataacagggtcgtattgacaggctgtagtcctaggcatgcacgctttacatgggacatcatatccgtcatggacaactgcgatacattaccgccggtaccaagtaaatgacaggccaacacaaaccccaaattagtcaattaccgcatatattttcaaaaacccccaaagccgtaaaagcaccggaaaaccgggacctggggtagaccaaacctttttatgcaccggagccatagattggggatgacttttttcccaaaggttgaaagggaaaaaatacgatccttttttttcccccccccctagaattttttagtatagaaaaacccctacacggtatacccccgcacaccttttcaattataaataaa

SEQ ID NO: 2310 - DNA, 1914 bp, Emericella nidulans
ctcttcctcttcagcactatcttgcacctgcggcgtgcaatcgagttcttgtcggccgataaaggcaggtgtccatgtggcactgtttggcacggaaaggttatgctcttgatctggcagagaatctcccccagtgcaggcagggcagcactcgaccgcatcttactctacgtatgaacgccaatacctcgagccatgctcattgttcatgccgcaaagctgggccgttgggtgagaatttgaattagcgttccaaatgctcgagcttgctcggccgcctcgccgtctgggctgaaagagttgcccctccaaagggaatcgtttcgagtaatagtcttcaatgacgcctagatcgattcgtagccattacgctgatctgacctctgttcttcttgagcttggcctcttcttaacctcatccatggcgaagcaaggccctgaaccttagtatgatggtgctcgtctcgggaaaagacttttgcagctgggttaacacctgatatgcccatcacgagagactatggatcaaagatagttgatgatactgtttcggcgcggcttcctgtccagagtcttatgcgttggcaacactccggaatctagggctgatctctttgcggtatttctgtacaatagctttagtccgatcagtaagatggctgagcaggggacttctttcgcgccccttgagtcgaccatcatcgtagcacagcttttcgtgcttcatggtgcagtggcccaggttgggcaatgtcaggttgaatgggaaggagctgcagagaagggcgcgcgttagttgaaattccctcaatgacacaaaaccttggtgaagccgaaatgctccgctggttagttcttgctttcgctaggtagttgcgcgctgtaagagtctgagttttcggcgttgttcttcagcatatccgctggggtatccttgttataaggaagattttaacgtccttggagtggcggaactctcttccagaccgccgtcaacgttagattgagatggaagatgggcagaaacacgcacgacgaggaccataatactcatttagaaacttttcataaaggtcatgatcatcttgctatttgtctaaacccagagtgcacttcgtccttgacaaatagatgggatcaacaatgaaaggcatatgcgaataacggcacttggcggttcgtctatatcgtggcatctggtcttccgatcaccatccaagtcgcttaaacaaaggtaaagtctgagtgcaaagcagcttttgaggattggacgatggtcaaaacaccattgctcatctaatactctaagtctcgtattctgcatcaacgcgcacaggcagcaacgtgacaagcaatagccaagaaagaagagaagatggccaagcccacacccctcacagctaagaggcatgcgccaaattatctttgaggttggtctgaccgatatttgtccgtggagataaatgccattcgggcagagacaccaagaacatcgagacgtgactggtggcagcctcatttattagagagatttgatgtgagaaacagtcagatgactgttgtcagatctacgaagtgtactacgaagtgaagaacatagatggcaatgagtttggccttaaagcttggctccgatctaattttccgctttcgcctgacctctttcacgaaaggctttccatagcttctcgaaattgatgagcccctaaatgaaccaatgaactacacaacgaattttcgcgtaggagtgcagggtttgggagccggtgggggctcggtctgtttgatacaggtaaggtcagactgaatctcagtttgagcgtaacgacggtggaaacaacgtgacttttcagtcttataagggcttcgaattcagcttcaaggctggggtttcgattaacgcaccgctggtat

SEQ ID NO: 2311 - DNA, 2298 bp, Emericella nidulans
ggcatttacggatacataagcaaccaaacaggccaggccgataatgcttacgaagggaatacgtacaagggactgcgattggtctcagatgactacagcctgtactatgctgtgtggtgcaacaacgaaaaggagttctataatcttaaggtataataccccgactgctctgattgtttggagctgctcacacacgcacaggatgatccttaccaaacagtcaatctggctgcagatatttcaaaacatgagtcctaccgcatcgccaacagacctctacctcagatattccagcgagcaaatgccctcatgatggtgctaaagtcctgtactggggattcatgccgtcatccttgggtccagctgcatcccaacggcgacgtgcacagtctcgccgatgctctcgacaagtcctacgacacgttctatgcaaatcagcccagggtttccttctctgaatgcagcctcggataccatctctgggctgaaggaccgcaaaagttcaacgtttacaagaagggcagccgcgatgttaacgatggccaagttggtgatgaggactcgtcaacctccgctttgaacctttcggacatgtaggtgccccagcaaacaagctacccgagatgtaataaactgataggtcatcaagtggcactacggttgcggccacggcctcaacagtcatgtacatactcttcatgagcctgtaaataagtacgaaaggcactcctgccaccttaatatcaaagtcggtcacttgtagattgacaatcttcccaactaatagacaaagtggaaccatttcctcaattcactaatgttgaggcacaataaagactgttattcattgattgtatcctcgcgtacattccagccttgaacgggacatccgatcgacggactactcccgaaccccgaccacggatgctccgtcactccatgacacgcttcaatctagaggcataaaagcttcgtctatttcatcgagaaaatacggttaaatttccctttgctaaaaagcaagatacaaacgcatcatccagttactctaagatatcaagctattgtcaagtcacgctccttgcacgtccacaatgtccgagccaaccgccacacagaaaatccaccacatcaacccctcagatctagagagcttcgtccaccaaatcttaactgccaataatgtacccccagcacacgccaccatcgtcgccgcttgccttgtgcaagccgatcttcgcggcgtcgacacccacggctcaaaccgcattccctcatatatgcaacgcatccgccagaacgtcctcgacccagcggcatcacctgaaatcacccaaatcacacccattgcagccctggtcgatggtaaaaacacatttggctttgtgtcagcgcacatgggtatgaagcgcgctattgaaatggcgaacgagttcggactcggtcttgtctcggtcaaacactccaatcatttcggcatgtctgcttggcttgttcaacaggctattgatgcgggaatgatgtccctcgtcttcaccaactcttcgcccgctttacccgtctggggcggcaaggaaaagcttatgggcgtgtccccaattgcatgcggcgctccagcaggcaaagaacgccccttcatccttgacatggctccatccgttgcagcgcggggcaaaatctacaaggcgctccgcagaggcgagaatatcccaacagactgggctctggaccgtgatggaaatatcaccgacgatccggcgcgcgcactggaaggcgtaatgcttcccatggtcgggccgacagggtctgcccttgcggtaatgatggacgctttgtaggcgcgcttttggtcctagtattctgcgtgtcacttttccctgggctttccgaccaggtaaaccggcgtgtctcttctcactctcttcggacttcacacccggaactcttccggcgcctgcaattcttatccggcccttcccccttcttctattcacccctttctctttcctctattcttcctcccccctcttcatcttcattctctctttcccctttctcaatcttctatctctctttctgtccttcctttcattctttcaccttcttcttctccctcctctcttgcctccctctccttacaatcatcctcacccctctcattctatacctcgcatctttcttccttccccctcttctagttcactcatccctgctattcacacttccttctacacctttcccctttcctcctcctcttcttctctttctctttcatcccccctctttcctcctcactat

SEQ ID NO: 2312 - DNA, 2389 bp, Emericella nidulans
ccgataatacgacgacttattagtgatcctcctttcgacctcctgaggaacacctcggctgcttggcgctgccacttttattgccctgctctttgagtatcgtacttcgtattttatcactgactccaaccggtaatttctagatcctttggaccatccattatatcagccgcgtcgccaacctaaccgcacttggtaggtcagcacaggagcgtacgctgaacgctagaagtacagagtacagtaacctgctcgtccagctccgccagccgtcgtctgttccctcgtctgttctgcgccgtcccgagctgtaatttaggcaccaactgcaaatggccagtcaatgccttgcaggaaacagtcgttcgaacgaaggaaaaacgcaaaaaaagcctctctcaagaaagacttcttaacgggagtttcgaatgaatccagctgtcagttcggtcggttggattacatgctttcaaaacccgtaaccgcgactgatctatgctcatttcccgcataccatgaaatcgaactgcgattcgacgaccaccttacaacttacacccactttgcaagtactatcattcttagctgacgttcgcacttggctcgcaatttgcattcgtgaatcgtcgaatttatagaaactggtgatatacctagatcacagaggtatgggcttctggcgaatgcttcgtccatggcactctgcaatgctgcctcagtgcatatatattacgtttacgagtaccctgcactcgcattcattgtcctaagcaccgctgaagccttcagataccaggatatcttgacaacatctgcgaactttggaacgaatcgcagttcggtcgcagatggtttaatatggaatatgatgactgccctggccattaattcccgaacgtataactgtatcgcgcccagatacatagacgacttacagtttatacctttgaccagacgatgaacgcggtcgttcacaatatccaaccaggatctcgacagctgaagctggttggagctattttgccctttctggacaccacgcgacacgttcacgtccacggttccgcggtttacgaaacaagatacaaccttgttgcggaacatcccccttagcggacaataaatcaagatcagttagatcatcgttctgcttcagtcaaacttcagaagaggctaacgtggctgaccggttacctgtctcgctgatctcaagaatcccactgtaccactgacttcacgaccaacctccatacataatactgtagcgacagtagtccagaccatcgttattgaacttaaatgctattccacccttgttagcccactattgcaaataattcatgtgctttattcttaccgggaggttgtcgaactcttggccttccttgctttgttgatctcaaccccagcagcagctcaaccctgaatccactccgcgggaaattgctagctttactaccatgtctgatagtgaagttctcggccccagaagaaccggcacggcaactgctagtcatgacttcaacggcattgcctgattccgctcgctgaggataccgcggaatatcccccggctcaacctcctgcgtaaaggggggcttactcatcacatactactgaactaagggcgcaggggcaacaatcaaacattcgaaagggacaaggatgtcccaagcctccaagattaatttccagttctggcgcgttagtgactcgtatttgtggatgatgtgagactgggacatgtcaggctagttagcacgaaccgaacgacgaacgcgacgccagccattccagccattattgcatgatcgcaagccttctgctgcaggggttggatatcaaacgaaggtcgccttgcgatgtcgcgactgtccctgcagtgcgcggcaatggcccaaccctagccatactattgctcctagtcttccagtgatccattgcaaccgctcttacgctgtgcttgtgtactttgcagtttgtactgcgtacggagtaccccattctcgcggtttaattgacttgagaataggccgatgtctattctatattctatatttgggttgagaaaccaatgcctgtgctacttgtccttgttccgttggtacctaaatacttgcaaggatagcggacgttcgttttgtgaatcctcatttgcgaattcgaaactcaaataccccgtccgatatcgatactgtatctactgtatatacgtatgaccggctacaccgcgttcgggcttggttgttaagtacatacaaccaacccactgcggatcctgaagatactaccattcgaactccgccaagatcctctgcgaaatttcaatgcaattttgacgtagacgaaactgcgttctcaattgccgatatctccgtatacgaacgcc

SEQ ID NO: 2313 - DNA, 9032 bp, Emericella nidulans
agcatccttacaatcacgttagaccattgcatgaactgttttctgaattatcgcatcgagcgcagcgcgtagcgtctgggattgcgacggcaccccaaggctccggtcggggcttcaacccgcacactccactgcgggcgtatgtactcggctacgccagtgtgccttgccagtccatgccgataataacctgatcccgataacgaacggtataatgatgcggtacgcgtttaaaccctataaagtaagaatatctcaagatcggtccatggatcgtatattttaattcggttggcggggtttcgaggtcatgatgatggttcccaacaccgaccagtagtggccgcgcaccgccgcgaccttggaagccagcgctgggcgggcgtgcaagccagggccctagttcgcctagtagttcggtgtgtgcgagacgactgcgaggccagcccagggatcggccatgggtagcggcagtgctcactgcggccttcgccgtagtagtaggccttgcaggtgctgaaagctgaggaagtgggtggtctgcgcttctcgggcacgaaggcacagtgtccaggttttgtgcagcttcagcctttgaggtatttagtggacaccttgcccccttttagcgcgcaaccctgcgaaaaaattcttctcccttctcgccccccccttcaccccaaacccgccagaacccgccaaaaggctccccttcggttttgtttttgggcttgcttcccttccctcccttagctaccctcttctccctccaactagcatacccattcctcgcgccacaaccggcacctcggttcaatatgcctaaaaacgattcaaagaccgtcacaatcgatgtggaggagttcactaagactcgtgacagtgtaagtcttgtcttatctgccttttcggtttgatttgcgttttcgaggcgctcgcgcgccgcgtctgtaaacaatgaagctgtcgcggcatccggtcggcgactcccccgttccagctgggcaacgctattgttctctttgtgtttattttcattgccccataacatcatctggtgaatttggccccaacatcaacttgcaacaatatacaccaataatcgcgaatctatttcgcatcttttgtctcgctcttgtttcgcgcaattacaaaagtgcatcatccacttcagcgccgttgctacagccagctcaaatcgcttgtcgcacgtcgctcttttgtcttgtcacctcttcgctttcgcatggctttgcgcgccggactgtggactcgtgctaatatgcgaacagtttctcgctaaacttgcgcagctccagtctctcacttttgagctgtcgcgcgcatacatcaaccacaccagtgcggtgcttggtcaggataacgcaaatgtagatatctcggcgatcaccaacaccctcgccgccagtcttcgggacactggcgtactcgctgcagccggcactggttccggcgccgagtctggcgagaagaagaagcgtaagcgtcgcgctgatcctaacgctccgaagcgcaccttgaccccattcttcctgtacatgcatcacaaccgggcacgcattgctgaagagctgggccccgatgcgaagccaaaggatgtctcaaacgaaggtaccagacgctgggccgaaatgcccgactcgcaaaaggaggtatgtgtttgccctctgaactgtgtctctagatgactgttgcttacgtgtggttaggtctggaagaaactctatgcggacaatcttgcggcgtaccgcgagaaggttgctgcttataaggcgggtcttccttttgatcgggatgacaatgataaggcagccgaccaactacacctagacgtcgccgccgccgaagcatcggatgaggaggaggaagaagaagaggatgagcatggagaggaagaagaggaagaggaggaggagtcgcctgagcctgctaaggaacccactccccctcctcccaagcgtcgccgtagcgagggtaagccatccaaggatgtctcctctcctgtcgttgagaagaagggccgaaacgagtcgccggagaagaagaggcgcggggcggctaagaaggacaaggaggagccgcgcaagtctcttggaggggagtcgaagcgctcgaagaagaagcgcaagagcgacgtcggtggcgatgacgagtaaattggttttcagcgcagaggatagtagttaccaggggctatttgtatagcaatattacggagttggacttggtttttgtttcgctgctgattcctgtacttagctttactctttgtttgtagtacattcctattcgcgaagagaactggtttgcgtcgcaactcacaatccttgcaaggcgaccattctacttcaagtatatcccggatataatgtttgtcaatgggatgaagcatccgctgtcttcataggccggaatgggtccttatcagttgaagcgtgaccttatctccggcaaccccaccatacaagcaccaacttccccggccttccaatcccactagagcttcgtttttaaaccttcgccgaagtccgacggggaggggcgttcctctcttttttaattcctggatgcccccgagggaagctttgaggagaggaaggtacccgaacggattatcgacgacacttctcaccgcagcgtactaccagaatatactccaacttcgccattgactgccattgattggccaatctcgtctccaatccgggtatcggcggtttggatttgcaggctgagggggtaaaaaaaaaaaaaaaagaaaaggcaggatacataggcaagcgtggcaatatgcaccttattccgaaggaagtatgtagtgcagtgcggaatctggattctgggtgtcttccatcatcaaatcgcttggccgctctttactgactgttcgttgcatgagtagctcgataagctcgccatctcacaattaggctttttggcccagcggcgtcttgcacgtggtgtgcgactcaatcatgccgaagctgcggtacgttgtgctactagaaaattggagaggagagctagaagctcggagaattcattctggaacgaatgtgtgctgatagccgaactaggcattgatttcttcgaacctgcacgaggtacgaagttcaaacttactcttgacttcgctgtactaatttccgagatagttgattcgtgatgggcaatactcggtagctgacctgatgtccatcggcaagaccatgcttggtcgccggcatgtactcccatcagtcccttcgaccctggtggagctgcaggtggaaggcactttcaccacgggcagctatttagtgactgtccaccaccccatcagttcagacgatggagacctcgaaaaggctctctacgggagtttcctaccgataccgccggctgatacatttccggaccccgatccggaggattatctacctgaaaaggtgcctggagcggttattcctgtgaagaacgcgcgcatcacattgagcgagggaaggaagcggattaagctcaaggtgatgagcaagggtgatcgaccgattcaggttggctcgcattatcattttatcgaggctaaccctcaactgcatttcgatcgatttcgcgcttatggatataggcttgatattcctgcaggcacgtctgttcggttcgagcctggtgacacgaagactgttactctggttgagattgggggccataggatcatcaagggaggcaattcccttgcatccgggccggtggaccttcgtcgggcggacgacatcatacagcgcttgcaaactgctggttttgcgcatgttcctgaacccgctgcggataacgcgctcgttgctcctttcacgattgatcgcgaagcgtatgctcggctatttgggcccactactggggatttgattcgcttgggactgacaaacctctgggtcaagattgagaaggattatactcactatggagacgagtgttcatttggcggtggcaagagtatccgcgaaggcatgggccaggcatcagggaagtcccacaaggactgtctggatacggtcatcacaaacgctgtcatcatagactggtccggtatctacaaggcagacatttgtatacaacacggcaccagggtcgggatttgcaagtcaggaaatccagacgttatggatggcgtccatccggacatgatcatcggctcgtcaacggatgtcattgcgggagaaaacaagatcgtgactgcaggaggcttcgacacgcacatccattttatctgccctcaacaagcacaggaggcactcgcttctgggaatcaccacgtttttgggaggaggaactggtccatcaaccggcacaaacgcaaccacatgcacgcccggcccaacacacatgcgccaaatgatccaagcatgtgaccagatccccatcaatgtcggcatcactgggaaggggaatgacagtggcggaattggcatcgaagagcagattatcgccggagcagccggactcaagctccatgaagactggggatctacacccgcagccatcgacacctgcctggacatttgtgagaagtacgacgtacagtgtatgattcacaccgacactctaaacgaatctggcttcgtcgaacaaactattcaagccttcaagaaccgcacaattcacacctaccacaccgaaggcgccggcggcggccatgcacccgatatcatatctgtcgttgagcaccccaatgttctccccagcagcacgaaccccacccggcccttcacaatgaacactttggacgaacatctcgatatgcttatggtctgccaccacctgtcaaagaacattccggaagacgtcgcattcgcagaaagccgcattcgcgccgagactatcgctgcggaagacgtcctccacgacctcggcgccatcagcatgatgtcctcagactctcaggccatgggacgctgtggtgaggtcatcctccgcacatggaacacagcgcacaagaacaaggaacagcgtggtcaattgccagaggacgaaaacacaggggctgataatttccgtgtcaaacgctacatcagcaagtataccatcaacccggccattgcgcagggcatgtctcatttgattgggagcgtggaggtcggcaagctcgcggatctggtgatctggtcgcctagctactttggcacgaagccgagccaggtattgaagagcggcatgattgttgcctcgatgatggtatggcgcactattttaaccctccgtccggctcattcatgcttacccagactgaccaacctcgcagggtgaccccaatggttcaatccccacaatccaacccgtgatcatgcgtccacaattcggcgtacgtccctaccccattgattttctcctttccatttacttacatatgaaaaaaaaggcctaccttcccagcacatctgtaatgttcgtctcgcaagcttcactcgacacaaacaccgtccaatcctacgggcttaagaagcgcgttgaagccgtcaaaaactgccgcaatatcggcaaggccgatatgaagttcaatgacacgatgccaaagatgaaggttgatccggagagttatcgcgttgaagcggatggaaggctctgtgatgcgcagcctgcggagacgctgccattgacgcaggattattttgtttattaagcagggtacaggtatgtaatgcttgtatagtgggttggcgatattgataattgtttgggtctaaggtgtatatgaagggtcttatatataatgattggatgattttcttatgaacgggctctaaaatagtgcaactcaagccgaacataagtagaacagccgcagtgcctaccttctggataggcacaaatctaagcacgcattttatccagttcgaaattttttcttttccatcgtgcaagtaatgaggtatacagctgaagacggcttgccaagttgtatcaaggatgtagtcacccctgaagtagctgccaaagtcttcacagaattgaggaatactgaccacaatgactctcgcttggttcttgaatgctgagtgtcttgatcgcttgccagatggattcctgtggccctctggttcccataagagtcaatggtgtctggattcttgctgcgtactacggctggtgtccttcttccggtccatctccatgtacatatgtaggtctttcctcttaaatgggcaagggttgagaaaaaaatactgaagcgacgatatgcataatgaagctgcatgaaatgcttttgcgcagcgtgatcgacaggctaggtacctacgttgagggggtactacaacagtctagttctatatacacctgcgtatccctgcgataccgttgtgccacttgaaattcatgcgcttcggctgcacgccagtctgatcgagtgacgtcgtttcttgttagttcttgcagtagtgtcagtgtcataaacctcttacaaacatataaactgacaagataaggcaagtgccgggaacatggcatactttgttcacccgtaaatggcaccagtatctaaggccaggaatattagactctattttggcgtccatagaaagcccaccctcatatctctgggccgtttgctgcttcctggggtcactatatttcctcaaccccggccacctgaacgaatgcctctttacggcaagtctgcaggtggcagatcaggaaacattagtaattatgcccatgccgaacatactgccatgtctgcttcagtttctatatccggtattattcgtagcttcagtgctagtgaagtcgcaccaagcaattccaggcccatcgctcaacagctcggctgtccatcggataaggatgaagagctcagttgcttgtagaccaagagattgaagacgccgttaaccagtataataatgcgtagaccgatggagatttctgagctttaggccaaatggccgacggccagaacatcgtcgcgctcccttgttgtgatcagcgcgagtattggctatattggagtgtgctgaaacctgggatataattggcctccagtctcgcagttagtcgcaattagtctcaatttgaggtacggctgagctaggaaccaggtgttctaccttaggcaaccacttttgctgcgggatgattagccgtgctgccaggtgtaagtggcgttcattcttccagacatgaagtaggatcttgatatatgcaaaaacaatctatactccttaatatgaaagacacgataattagtcgacactggagacacgaagaacggtagttgggcacgggagtagccgctgtaatattccgtacttgtaggtacctgtaactcaccgcttcggcgcctggtcacttcccttgtgacgtcggtagccggcatataaattcccagattcctacacccgttactcctcacagtccgatatggatgctcctcgagcgtcaccccttgtattccaccctcacggctgaggaatcttttggtccttgatatgtcgaagctcctttctttgttgcgggctgtacctggcggactggaggttcggggttaatttgaggctgtacgattgcctactgtctcttttgaccatccacaaacttacgatgcctacggtctgttcattatccccgtgcagtaaagtttgtacggtcaatcatgtcatcgacagcgtctggcgcacaggccgcatctcccaccacaaatcgcgaaaccacaagagcctcagtcaacgctgcggagaacccatcaaccaagcctcacggagctgaactgccgccccgccgtggccaccaaaagatcgtttttacagacccggtcgctctgcggtacctcgaagaagatccgtcgactgtcgtgctgcatcgtcgtttggccttggagggctatgagatatacattgttgagcaatgggcgtgttcaaggattcaccccacctttgttatcacaacattcacgggagactcgtcgcataaagtggtcgctggagtgttaggggttcctacggacgagtcgacatggtcgccccggttgaaactctacttcaatgcagttaagaggtttcagctacgagagaaagagacgcccctgggcacagtcatggtgacagatttgaactcgttcccatcgggattatccgtcatagctgtgccagatggcgacatccttaagcaccgtgaagactttgttgtgaatgagaacctgaaacggttaggctgtgctggtcgagccggtttgaagctccaagaaccagcacctgctaccgtcgctaaatttcaccaattataccggacaagcgaaagaatccccctttacagcgccgtggtggagcttgtcaaacaatgtcaaatcgctttgatgatgtttggtaagctggcaccggagtatgtggatggcttactttgcgatgtcactgaagatgctgtgggagactggtggaccgatttcggaatggacctgtataacatcgaaccaagcgatgggaagctcggtcctaccacagtagcagccttgctaggtactctgatgggggctcgcaaccggcttcatgcgagcggtgcccctgtcggcaaggatgcctttgacatcgttaacctcaaacgcggaatcgggagttttcaaaaatctcagaaaattgaacggacgcggcggctggatcgccacactttggacagattacaccgagttactgcaaaggcagccaatgctgagggctggactgacgcggtcaaatcaaccatggctgagctcagcgggcacgggggcgagatggttatgggcatggttcgcggcaaagagaaagggggcattgccgatattgaaacaattgacattgacaacttcgcccaactgatcagcggcgaaagagcaaagtggttatggcgagggaagccacgaaagagcactgttgagtccaatggacccccagctgcggatatgatgttcaccaccgacgagcaaggcgggtacgtctggactagccgcaagcgtcattcccatgaggaccttggcatggagcctctttccagcgatctgaacgctc

SEQ ID NO: 2314 - DNA, 1889 bp, Emericella nidulans
tattcccgcctctagctggaagatctcatctcaatctttccgttctgctgtgtatttcttttacttcactcgagatgtggtgctagcagccttagaagatactttgtcattatccaatcacttctatctacatagtctgccaaacgctgcaatggtgtccactgtttccgcgcttcaagcccgcctgaaagagctgtctacttctgtcgctcaaatacatccgctcgtctctcgactgcacaatttcaccacggccgttggtcagggggacgatgcccgcctagagctgggagcagtaatacactctcgattaaaggacgctgaggatgagctggaattaataaaggacgacgttgatgatctggaatccactacagatagcagaaggagaggtgcgggcttagagaaagagacggagaaggagcgggttatcgcgttggctcgacggttggcgaatgatttgaaaaggttgggtaacctccgcgataatgcgattctactctgagcatttgttgatactctgcttaggacgcgaggcgactttcgcaatgcccaattacaagccaagcgaaatgctgagcttgctaagcgtaaggagcgagaactactcttcgcaaggtcagcgggagggactgagaaacgaaatccggcaaaggagaaattaactcaggaggatattgtcaagaatgcttccaaagatgtcacggcagcgttaaggcggacacaccagcttatgcaggcagagctttcccgaagtcaattcgcccaggaaactctgggtatgctgtttcatctagcttcacaagtctcagactaaccatcttgcagaacaatctggcgctgccttatcctctctttcggaatcatatactaatcttaatacgctgctttcatcgtcgcgcaaccttgtcgggtctcttctccgttcacagaagtcagatacctggtatttggaaacggcattctacatcttggttggcactatttcatggctcgtgtttcggagacttctatacggacctctctggtggatcgtgtggatgccttttaaactcattttgcggtctgttttcggtgttgcaggggcaataggtgttacgagcaaggctgtccaatcttccgtggccattgggacggatggagtggctcaagaaacactggcactgaatcatataccggaagccaaggcccatgttgttggtgatactgttcccgatgatgttccgggcacggatgcggcagacctggactgggtaatggataagattggcgaaatagttgaagaaaacaccgaccaggaaggagcgaatcttgacgacttctcgctagaggagttgcaaagacaggaggatatgccgtctaatacaaagaataggatgtatgatgcgacggaagtactacagaaccggcgggatgaattatagaaagcaccacggcattgtaaatgaaactcaccagacttgtaacatgatgacatgcatcttaagcttttaaaaattaccccataacgttcccttaattttccagggtagaacacctcccagttttaagggtggaaggcttgtcccgtcgggttaactaacttttggcaaaccgaagggggaaccctttttttgttttgggaacttgttttaagtttcaaaattccgttttccttatatagacccatttataggccctcccttatccttttgggccactcttttaaagctgcccccccttttattcaacaaatcctaaaaagggccctcttgaccccgttaaaaatttcattatactttgggaataaatttttccccaacttaattctacacccatggtttgaacatttttttttctttaactaataagtctgtctctttttttcctcgtaataaaatcactctttt

SEQ ID NO: 2315 - DNA, 2627 bp, Emericella nidulans
ttgggggtttggttgagtgccgcccgccctggtaaaattggttctaggcaccgtggttccccttcacatgaggaattataggagcctattgttccacttgacaaggttgcgttcctggcacctgcttctgcttaatcctatgagacctcacacagcatgaaagtgatttgagttgccaaaggtgtccgtgagttatcaacaattggttatctccatgcttgagagacagttgccatgtacttggaggtgcctggcagagcactgcatcaccaaccgccatcgaaaattggtgatcctgagagccaatggaagggcggtggtgggcgtcgtatgatcgcgggaatctgcccttccggcacaaccgccggctggtgacagcgggcagtgcagcgaccagttatatttaccgcctggcagaatttgtactgtatacatgactaagctttattataacttcttgaaatatttgcataaaatcttctaaagagtcgcttcaagcttcgctatcgcgcccattacctcccggaccattttatttgccccctgcgaggctactagtacggcgtccgaggtttgaacttctactcggcgtactgaattaccgccagcttggctgagtaaatcgcagtggcatattttgacatcgcgatgccactcttacatgggctctccgccagcgcggccttctgatgcaagttcattttctcagtcaccttcccagacacatagagctcatacaccttcgacgccgtgcgcgggaagacattcgcgaaagctgcgatacatcctgctgagccaacgctgagccccccgattaggaagtctgcttggccgccgtacacagcaaactccgacgcaggaaatgttgccgcgagacgggtgatctttcccacagaagcgcaagtcaatttcacgccgaccacattcgagacaccgttggggcttgactttgcagattcgtgaacgatatctgtaatggtctcggaatcgatgtcgacaccgttgcagacgccggggaagttgtagatcacgacggggagcgggcttcgacgggctatatcggcgaagaagcgcttcacgacgttcatcgttgtagccttgccgaagtatgcgggtgggaggacaaggagatagtttgcgcctgcgctggcggcatccgccgctaattcgagcacctgctttgtcgagtgggctcctacgccggccatcagagggaagtctgggccgacggcctcacgggctgcggagattagttgtgcacgttcttcgcgggtaagcaagaaggcttctgagttcgttcctagtatgacgagaccggtgagaccagttttggataggtaggcgtaatatttcttctgcgcttccagatcgattgtatccgtcgcatggtcgaagtatgtcactgctgggcaccatacccctgcttttgggacatggggatgtgtgttgactgcagtggattgcgaacccatagccgctgtatcctactttccggtggctgaggtatcaggttattgaggattgttttgtttgcgcagcagaaagcgagtagttgaagcacttcaaagctatctccaatccatatatatgtgtacaacatcgcagagtggggtaatagatcaggataaatatccgactggtgtgggtggccgtagatttggggtaagctggccgtgcgggcttatcactctagcaggggaaatattcagattgtcggcgaacttttatagttcactgtataaaaagcttaatctatgaaggacatatcttttattcttttgatattcttacgagttatgaactaggaacatgcaagagatgaataaaggccatttgcccaaagctatataatcccagcgaacagatagccggcttgcgatgatcagtgctgtccacgatgttagcaaaaggtccatcgccaaagacaagcggcttaccgtgatatcttcccacttctcccagccccgcccgcgcacttgggcaagttcctccatagtatatgctttgccggtggtaaaatatccagcattgatctttgcatcgatctcgactctcgagtcatcagggatcatatcctcggggatgggtatacgctcgacgatcttgatacctgactcgacgatggcatcatgcttcatgttggacatcgatagcatccggtcgatcttcttgattcctaaccaatgcagaatgtcgggcatgagggcttggaatcgcatctagatcgagatcagaatgtatggtatatttgcagttggtatgttgacacttacatctcgtactcctgctatattctccgtccgagtaaagtacttatcggcagtatcgccgccacgcttgcgtgcgttgtataccaaatatttggtcacttctcccaaggcacggccctcctttcggaagtagattacaacaccactgccaccattctgtgcctctcggatggcctcgcgaatcccgaacgccaggtagggccggcacgtgcagatatccgattggaacacatcgctgccgttacactcatcatggattcgtagagccagtttgacgttctcatccgataccctctctgggggtccgaagatatagacagtcaatccgccaattgggggaagcaatactttcacgtc

SEQ ID NO: 2316 - DNA, 866 bp, Emericella nidulans
acagccttgaagtcagcgattgttgttaaggttatgggtgcgttctccgcgccctcgacgaggatagcgcggcggtggaaaaagtcaattggcatttctaagagagagatatggggcgttgtcttgtagggcgcggcgaggtagtttgtaaatagaccgggttggaaaagagtgtactcgaggatttgcttctctcggttgacctcggacaggtacgttcttatcgacgatttgtaggtgtaccaagggaggtggtcgaatgttgaactgattgtattagtaacataaagaacttggcttgagcaaaatgataagagaaagggcagggtaggatgagtaggcaagatagaggaagacttacgaagcccactcgctcggcgcaaacctcttcactccagccgcgatcgaggcgtcaataagccgtctctggacaggactcgtttcgctgtcttgttcaatcacaaaggacaacacagtgtgtacgccctttaagatatcggcgagttgttcagtctcggcgtagtctgttttgatccaggtgatggaatcggggagaatgatggacggggcgtcctggtaccgatgagtcagtggccacgagcagtccgagtgacaggataaaaggtacctttctggaaagaaggagaacctcgtgtctttttgtttcgaccagggcgtcaatgacttcttggccgacgcctagagaatattaagtgcagatcagttacccggcatcatgaagtgcacatatgagcataggttttcgcagtaccactagtgccgcccgcaattgcgattttgaccatgtcagttatagagctgccggcctttagatggtatcaggtcacgggagtgaatagatgact

SEQ ID NO: 2317 - DNA, 1235 bp, Emericella nidulans
tgtgtggtacttgtaagacttcaataatttcaggctaaactcaaagtttcagccacgggccatagaatataaggatgcagtaaactcaatacagcggtggtgccgaagcgttggtccgtcgctaccccctcgtactcagtactccagagcggtgcacggaccgcagacctaggatagccctaatcttggctcgagtctgggcccagctcacgggccacggcgcacggcccgcgagccgttttaagttcaacccgccctggaacacactccaccggcttttccactgtttagtttctagggcacagaacgctgtagtgacgaattctcaggacaaatatatcaacaatgggtcaaggcagtgatgggtatggtggaccgttagcttgatgaagcagatcatctaggaaagagcgggcgaagcaattgaattgtaatcttcagacggccgcataggaccactgtggattgcgagcttgataatggtaaatttgatgtagatagtattgtaagtatgcgaggctacagcctggactcctcctcttcttattctaagaagtcgactaccgtgctgctcgtaagccaaggaatcgatctggcctcgtcagacttcgttaaacgacgatggagacgataggtaggatctcagaatggttggctcttgagaggttgctatacatcattctcggtcttccaggctttcagctgtacattcttgatatagttcccgaaatcccattgacacctaatatgtaaccgtagctgcactcctaacgcaagcttaagcccagactcggcgtggtagcggtagtgaaatgctattatccagctctccaggcagctgatccaacaaatacccgaaatatatgtagagagtaacgagaagtgtaccgcacctaagctcagtttaacttagatcaacccgaacagaaataagtgatgccaccgaggcgttccctagaccatatcattcgacttgtacaaaacagacacttccgtagtcaaattgatttgattcttattatccacagtactcggcttgggccgcgtcaccggtagaatcatcgtttggctgctgttatcgcgaggatccgtcacttctcgatcacgatccacttgcgttgcgtatatagaggtgtcgaagcgaatattccgtttcttttcgtaactcggcggtggtggagggacatgttgtagctttcttgcgaggtcgcgaggggaatatttttgttagaaga

SEQ ID NO: 2318 - DNA, 1665 bp, Emericella nidulans
tacagccacgaggttgtgcgagctccacgcactggatacgcgcgattttgctcgcgcgcaggccaagattctgcttccggtccgcttgcgtcagggtctgcatggaagctgggtagatgcgaacgatgacgatcatcgtgtgtcgacagtgggatcttaatgaatcagtcagcttccagctcatactcagcacttactgcatcggctcaaacggagtcctgaagcgcatactcccctttagccgtccatacttattggctagaacatactgaggattggggggggaatgtgtactacatgtaaggtccaattacttaacagtactctcagtttaacctagaaaattcactctgagaagaaatcgatgcggttgattataatagcccaagttgtccacgaccttactgggctctcattctacactgcgttgagccatcttatagcctgacaaaaagaagtgttgctggtgaagactcgaatatctcttccccctgcttgcatatattaaaacacgcgatgaatatggaagactaagatagctaggccgccctttcaattgtaatccgaatataccagatttccgtcatgagtaaaaaggcaccgatgtacatacataaatagccaatgctgtatggacaacagtgttcaacaaacagttgatccgtgcatcatcctcatctctcatcaaatctttgctgtaccagatactgcctctcactgttccatattcctgactttcctggtgaaaggatgccgctcggatcgaacaagtcctttagcgcgccagtaaccttcgagaagacatggccattgaagtccaatttccctgctagattatccatatgactcacatgagtacgatacacgatatatccctgcttcactccatctcgcgccagagttttgtacagctcgtggacgcgcggttcttcagcaagggtatagacaactaattcaatggctaccacatagcgcgggtaaacatggaaatccgcgaaaaagtcaaagttggcgtcgatggtgtgctgctttgccgtgaggtaccagttgtacaactcacggccggaggggggaagaatgggtgagtagtcgatgtgcccgccgccgggctctgcacgactattgacaaggttcagaggtgacagggttgggattccactgtgagggatttcttcgctgccaatctcagcggcggtgatagcgcgtccgggagtgccagggaactctcgccactggatctggacgccagggatgacgctgaatgagcgctggacggtgctcagcagggcgggcagcatctccacggatccataaagcgagaagtacgccttccagaagccccagccttgctgcttgcggatctcctccagaaccgggtacggaacgtgggagttgggcttcgtgtgctgtgccagcttggcctgcacttccggcgcttgggagaatagcgcaatgcggaagatattggcgatggacggcgagtttaggatgacagagcgccgcatgaggtcagagaggacgcccaccaaggggatgagattctcttcctgcggaacactgaccgtgaccgttgcgtaagcttctggggctggggtaatatggatgccgattttggtgacgactcctgttccaattagcaatctttgatcccgatacctccagttc

SEQ ID NO: 2319 - DNA, 4245 bp, Emericella nidulans
  unsure (1)..(4245): unsure at all n locations
aaaaaacttgtgaaattaaatcagaagcatggcaattcaagtataccggacctcgcctgcctagagcaatcaagccaatgaccactgatatcctccacaaatgccacatgtagctgccaacatgtcccacatggtcagccagtatacccgaagtcgagtagtatcttggaaacggccatgatccagcgcgcgagattgaaagatcgacatcagcggccactccctatcagactactccatataatctgcatgatcatatccagtgatctgattggctcaccccctgaaccccctcccctgccaattcctcagaccgctgatcagggccatgtgaaccattgctcgcctactcagagtacacccacacgcctgccaaggcctcctttgatacgaaacactgaataagtggatgcgatgtaacctcggggttggtcagccttgttgttgtttagcttagatggatcggaggaggccgattgggtatgatagctagagagttcacggatacagatcctggtataaatagggtccgtctatccattctgtgtaggtaaagaccaagcgcacttctataccataaggcagatttagcaggttttcaccacatggacgcagacgagatgttccaagtcaaggtactatctgctagttcccttttatattccacttgattaaacagagtatactcacgaaaatgtccagaccctcctcacccttctcctctccacctctctcaccgtcgccctcccagcggtcgagactcgcgactgcgcctacacctgcggcagtgtgtgctactcctcatccgccgtctccgccgctgcaaatgagggctacagcctcgagcagtccggcgacgacgtcaacgactacccgcacgtctacaacaactacgagggcttcgacttcagcgtcgatcctacctactatgagtttcccatcctaagctctggacagatctacagcggtggttcgcccggtgcggaccgtgtgattttcaacgaggatggagagattgcgggcgtgattacccacacgggggccagcggaaacaactttgtttcctgctagggggcttacttctagcttattctcgaggaaaagaatggatttaatacacctgctcatgagttccgcccaatggtttaggcggtccattggagtagctgctgcagccatgaagccctggatacctactacagcatgatccatacactaccgactgtagatgaagcgggggttccccggtgcgctgaatgtatcagatatgtccaatcctgatctggcaataaattgcgtatttcgcaggatgcgcgcatcgagcatagttgaggttgttggatccctcttgagggacggtaactaaggactagagccaacgttgaagggggtttcaaggcactgtttcgttaccagtcagactgaactgttgaatgtagcagccctgctgggcgctttttgtattcgcgtatatatgtacatctagtcggattaagagcaagaacacaccatatcccctatgcaaaacgccaccgtttaccaaaacaatgtaatacaagctgagaagagaaattaaatccatcattcttcagtcaaacaaccgggcttgagggactggtagggctctggttaatagttttcccgggagaaacctcctcatagtatacgtaatcatcgtcgtcgtcttcaatcggctggccaaagatgcctccccagacaccgtcccaaaggcccttcttcgtgacgagagctccaacaaggaggattggcaattgccagatactggcccagaacaagcctctagcagtaccattggcaccctggtgcttccagaatccgtaagcctctttcgtcaaccagccgttggcaacagtgctgctaactaagaagccatgtcctacaatccctgcccaccagagaccaatggagagaggaaacatgaggactgagtagcgcagggcgacgcgagcgttgcgcgctgggtttgtccaacaaagcatcttgtatccggctcccttgtattcctcgcggatggtgtgcgataaagcgttgaaatgaggaaattgccaggcaaagaggatccccccaagaagccagccgccgagactgttttcgccgaaaagcatgtcccttcaggtgtcatgtcccgttgtgcttcttgccctgctgctgcaacccaacccatcattggaggaataccacccacgatagcaccaatccaagtatttatcacatgcattcgctttagtggcgtatatacaaacgcgtagagcgcgatattagcggcggacagtccagttaccgtggggtttgttccgaagtatagcagacccaaccccacggcggccgttgcaatggcaaagaatacggccgcacgtcgggtgacgagaccacggaccagaggcctgttgcgcgtccgtgacatttgggcgtcatatttcggttcgaaaatcatgttcaaagtgttggcgctacaggccgagaggaatgtcccggtcgtcaagtaaaggaatgtcaaggtggaggtagaaagggtaggaagcggcgcgattgtaggatcgagagcaaggatagaggataccgggtatatcccatatgccgaagttgtcgagagcaggaccaagaaggagagacggggtttagtgagcgcgaagaaggcggccaacttgcggcgcagtgacgttttggggagcgttgaagagaaattcgacagttgcgcggaggcatctggtggaatcactggttcggcgccattgttttgtgctgccgcttcctttaaccgctttcttcggcgatgaggcaactccgacagctccggtgatgtgctgggcgttgaatgtccccgattcagctggctgggagaattgctaggagaaagcgacgtgaaaagagatggttgtggagtcagatgactgtcacccttatgcgaggaaaaatacgtcttgttcacagaagaagacggtgattgcccagcaccagtagattgtaaccgcgagatcgaagcgagcttgttgactgcggggaaagaaggccggctgcggttgaggcattgtaaacataagggcgactctcgagccactcctaacctcccgagagaagaccggaggatcatgacggcagatgagcgcctgcgaattgacagcagagcacactgttgaggtcaattgccgatatgaagcctaagacggcgcgggagaaaatcgtaggtcagacgataaagaccaaaagcgcagtcattttttggaaagagccactaagagccctgggatggtcatcgtaccactctttctcttgcccgtcagcttcccctcagttcctccagacttctaaggctagctccaggcctggaacacctcgtctgtgctctagctccatcttacaccactatggacgtcattcagaagacgctcgtcgagcctctccagccttacctccggcccgtcgtcgcgtcagtaccgcaacctgtccacgatgcgattgtctccttgatcggctcaagctgccacaacacgctcgtcgtcaaccttgaccttgcccaggatccggaatgcacatctcttgcgatctctaaagctctggngattggtattgatggcgctagtggaatcgtcaaggttccccagattctcaagctcatcctgttctgctcatctgcgggtgtgtcttttgtgtcgtatgcgcttgagaccgccagcttgctcatcacgctttcctacggagtgcgcaaccaatttcctttcagtacctacggcgagtccgcattcatcgctgcgcaggatgttttggtaggggtattggtcttgacatattgccggccgatctgcatgagcggctgcgtttgttgcagttgtgggagcgagcatttattccttgcttgttgacacttctattggtgatgcttaaaacatgggcttacctttaaggcggcgccaggacctttgggtgttggccagaagggtgccccaaatcctgactttttggcaagaaaggtggaaccgtaccagttattgttttgctgttttgacattttaagacttccggtttggggaaatttgctaatgtaatcagggtgtaaaacaccctcaaaggctcttttgtccctttttttaacccccttttggggggtaaccacaagttctattttacgggtttctctcttgggtttttctaaaactataattcttgcgcccaaattgttgacctcctgaaaccccctctccaacccctaaaggataacggtgtctt

SEQ ID NO: 2320 - DNA, 6832 bp, Emericella nidulans
ctgaatggacctagcttcgtcgtccctcttatatacctccccacataccttaccactttttctcgctctcaagacaagatgatagctccacccacgctccattttcttcatctcaatcttttggagccttaaaaaggttcagggacacactgacctcatccatcaatggctgaaagccacaaaaaagccacccagcgcgttatgcgtttcatcccggatagctcgcgctcgatcattggtgcaccagtcactctctggctaatcgagcagtgtgattcgggagatttcggtggttaagtgtaacatatgacgttaagctgcagggtggctgcgggcggtgatgcgggctggtgccaatgatcgaccgggcggtggagcgtgagaagctcgttaacttcaattgagtctagctcaggcccggcggacttggcccgccgtatagaattgcggctagactggaagaagtctagagcagtggagcttagctattcgcgatttcgtctgctttgaacaccactcttctctgcagtagaggcttaatagtgtacctgcaaaacctcaattcaaacagctattcacatcatattgcgttaaatatttttttatcatgtctatcgtatcgctcgtaatcaacatctaggtatctaggtgtagaaatatacatactatactgaagctgacactcttccttcggagtactgtcctgcgagcgaatacctcaactcgccacctcgcttacctcgagtgcacgacgtgcgctagctcgctgcactccactccccttttttcttttttggtgcgcgcaaatggcgcgacaagctctgcatttaggtctagagaagtcaaagctcgtatgcagtattgttgtcccagcccagctcgaacccacttcgatattttagcgtgtaatctgccccgcgttctcctcactttcggatgcatgtgctggtgctggagaatctcgcgcggtggccacatagaaggcactggagaggatcaacgcggatccgatccaactgacagccgacaacgtactcccccagacagcagcatcataaaacagcgcaaacagcatctgggtgtagagcatggtggtagcttttgttccagatgaagagcgggcgggttttattgtttctgactttgaagcattatccgcttcgttgaaatgctgatgaagcgcagacgtatttcgaactcgcggtgggggtggtacatatgatagcccggcagttagaagaaactgtagcagaaatccgcagacaccgagcagaatgagcagagtccattccaacggcgtcccgggcagttctaaggatattgaaggaaggaacacgattgcaatggcagaaacaactgtcgtgaccagtgaaaagtatgtgaccgaaaccagcgggtggcaccgctgtccgatcattcggattgatgcatatgcggacgaggcaccaaggacccctatcattcccatagtcactgccattacgcggtggccttggtctgcttcgccaggatgttccatctttgtttcgatagactccgcattatcgtcagcggcaggctgcaagaaagcaaagggccgtgcaatcaaaacgacgcctatcaacgagatgaatccagctaactgctgcttacgggtgaaaatctcgccggggatgaaatgggagcaagcatagcagcttagaattggcgcgagaaaggtcaacacagtcgcctcggaaagtggcagatactggacagaataatagagcccgtacacgccgatgaagccactgatcgcgcggcagagaaggagagggaaagtggagtggttaccaaacggctgcggcactttcgcataccacatgtacaggtagctcgctgtaacagtgattgacatacgggcgaaaagaatctacaggagtcagtttcctgcgcgctcaagacaaccgcccaacaatctgcattccgcgccaccaagacgtacctgaaacggcttgaatccctcgccattcctcccattcagctccagctccttggtcatgcagttcatggaagctccaaagaactgcgacatcagtaccaagatcatccccttgccctggagccagatattcgtggcggtatcgtgcatcctctccgtccatggcaacgaaggcgtcggtggctgtggtgaagccagaggcaaaggtgacggcgaccttactccatttccagcttgcagcaacggcgttcgttccccagtttcaggatggggcgacccaagtgtcgatgctgtcattactgtcggaatcgagaaagtacgagttcgagagaaaaagcttgatgagagtaaaatttgttgttgctttgatagcgctactataggcagattgcagcaaaagaagcaagtcgtgactcgttatttcgtagactcatcagttttgaacaaaaaagtgattcgtagaaagctgatggtcaaaatcagataacaatcacacagatccccttggtccttgtcgtatggattaggtataataaacaagggagatgaaaaaaaatttggagagcgcttttactgcggctggaaaatattcgagggagttcggtcaaactccggttcgcggaggcgaagatggcttatgcaatgactccgtgctcctaggtcgcgtgaacccgattatcacttggtattggacacagcaataagcacagatttctcggtcggtccctatgttgattcatattgcattaaacgggcatgtgccttgcagcttgcgactttttagacatgggattcctaggctgtgaagtggacagcaaagagatccttgaaagactttaggatttgatagaggttaaatactaaggctaagataagcaagatcactgatcaccatgcaggcgatcagctagggaagtagcgctattgtagttggttgcacccgaagactcttctatacttatatgtgtgcaaaatcttctacatgaaagtaaatgtatcaccacccttctcgcgcaacatattccccaccctcttcgtcccaacaatgcgctccagcttcaacgcatcgtacttggagaacaacgcgcgaactcctccctcagcagcctcaacaacgccggccgggtccaggcctaggaaacccacaatctcgccccagaagatcgggttatcgggcataccgtacataatgatccgcttgaccccacgaatccggaaacgtcggaaatgatgcagtcgttcggtgtagagcaacaccgactgccggccagtcatgaaataagaccgtgcgcggctgatttcccggggttcggtgtattcggatatcgctccaaaggagacgttggtcgtttgctgggatgtggcaaagtagttgcgcaggcggacgaaatcgaggtaggacggaataaagataagagtgccccctgcgctggctctgttgcggctggtagtgatgttgcgtactaaagtggatagaatggtggtggtgaagtgcttgaatcgagcatctgggtctttggttggtgagaggcagtcgaagcgggtgaaggtctgcttcacgggaacagggagcggcagctctgcaatggctccgttatagatagggttcaatttaacctttccaaagacattgtgcatgtgtgtcgagaagacggagttgatctcgggggtaatgaaggaggagagtaggatcagctgtcggacatatcgagcattgttgtccaagtaccatgttcgaacgcgactgaagtcgcagccgtgagcttccttcggctgaagattgaggtgcttcaaaatgtaggaaacatggtcccagttttgcataagtagtgcatcagtatggtcaacgataaccacttcgacggaggataagaagtcgtggtctcgttttttgacactgcaaatgtcagtaaccagctgaatacctgtactaggagacgtactctgcctgatccatgatggttcgcaggcccagcggactggcaagaatcaagtccgaggtatagaattgagtaaagaacttgagcgtcttccgtgtaaacttgagaccgattcggaacatatcgtcatcgttcccgccaaaaagctcacggaaatcctgcggtttatcctcccaggacgggtcatctgatgcagaaaaggcgtcaatgaaccgtttcttgttctcttgctgttctggctggaagaaccgcgtaatagattcgactacccgaacacaggcctgcctcgtcggcaggaggtacagaactttcggcctggtgaagccttgatcgcgtagttcgaggtcgccatcttgttccttcgccacacgagcattgttcttgagcacacgatcccgcgtcttgagtacatggttcgtagcgtgcaccgctagcatgtctctcatgtcggcagattctgacgttgttcgagcgccgtataagacatcctggtagtcgaagatgtagggagatacctgttggacatttccgctgaggcttggaatacgttcggtcacagctgacttgagcttcctcttgacctgacttgtgtcagctaagacgaacagacaatggttgaaatactcaccttcacacttgacatgcttttcatcgctgcgagcaaaggcacgtcatcttgcccgcagtctggaattgcacgccagattttcaatcccccaggaagctccttctttgcatttttccacttattctctgatgcagccttgatcttctgagacagttcgctctcatctgggctagagaagtgcgactcgaaaggttcatttcctgccaagttagaagttggtccactagacacaagagtttcacttaccactctcctcgtcgtcactgtcttcttgtgcatccacatcgccgtcttccaagtcaccttcttcgtccggttcctgctgctgcagctcggcgtccagggtttcctcgccttcttcaaccgcggtcatttcagcaacattttcagcctcctcggtaccctctttattttgatggcttgttttccgcttcttgcgcgccgggcctttgctgtccgttttcgcttgcagcaattgaagcaattcattgtacggctgtccggactgttgatcgctttcgtcgctatcggagagcacatcatcgtctaacccttcagcctgcactccatcttcaaattgttcttcaggctggtcttccgcgcctgaagagctctcggtcctgagtgaagctgtcagatagtgtatactggacaatcgttgaactcaacatactctacttcgtcgacacgagctgcggtgaagccagggccttttcgcttcacagagcctctgccacgtcctttttgaccgccacccctaaaaggcatctctgtaattttagattctgcagcgcgattcacgtagcttgttcaacaagaaaaaaccgtgctggattttcggggttacttttgcttgcttatcttatcttagcgcgaaatccggagcgcgcacaacaatttgagcctcgcagaagaacctccgccgccgaagtccagcgggccggaagatttgggttaaagagaaaactccactcccagcatcggcgacagcagaggacaacaatatccagagggcttgttcgtttatttctgcttccttttgtcctacaatcatggctgagacagattctttcctgcacctttcccgtcctctaggccctgtcctggcggggtctgcacccacaactgctcccttgaacgttgtcatccagcctcaggtacaactcctttgtttgaggaaaatcaagaattacgtcgctaatttgctgttcaggcccttttctcaatcctcgaccactctcttcgccgtaacgctgatcaggaacgcgtcattggaactcttctgggaacccggtctgaggatggcaccgaggtggaaattcgtagcacgttcgctgttggacacacagagacgacagaccaggttgaggtggacatggaataccagaagcagatgcttgccctgcatctcaaggcgaatcctagggaggttcttgtgggttggtacgctacctcgtccgagctgaacaccttctccgccttgatccaaaatttctacagcggccagggcgacggcacatggcctcacccagctgttcacttgactgtctctaccgaacccggaaaagatatcgaaacccgcgcctatatctctgcgccagttggtgtgaccgccgagagggctgccgacagtgctgcctttattcccgtgccccacgagattcggtacggcgaacaggtaagagcggtttggaggccattgctgcggctcgggattcagaggagcgttccacctccctcttcaccgatattgaggccctggagcgtgcgatcgaggaggttcttggtatgattgacagggtttctcgatacgtcgagtcggtcatcgatgaggaggctcccgcctctacagcattgggccagttcctgctcaatgctcttgccttggctcccaaggttgagcctgctgatattgagcgtgacttgtatgagccacactttcctatgatattgtatcagtttactaaccatattctagtaacaaccacatccaggacgtcctggtggtttcgtacctggcaaacaccattcgtacacagatggagctttctaaccggcttgcaactgctcaactcacccttggcggcgagtctggtaacgcagagcaaggtggtgcccagcgtaatcagcgaggcaagggaggccgtggtgggcaacagcgcaaccaagagcggggtgctgaggaaggtcgcgcataggatgattagatttcactatgaagatacctttgcatttctctttcagctgttctcgggcatttcttttccctcatgcaaccactccatttcaattccttgccgttat

SEQ ID NO: 2321 - DNA, 3809 bp, Emericella nidulans
  unsure (1)..(3809): unsure at all n locations
tatctgtcgaggtttcaactgcccattgagagagcttctcaggatcagacagtgtcgaccgctcgtccagcagagagacgcgccaatggcctattgaggtgaaatcgatgcgcgtgatgttgacctctccatgtgtcggctgacaaagctggtgatatcccggaactatttccgctagccgcctgatatcttcttcgaatcctcgtctttgacttgcaaatgaggcgccttgagccatatcctgcttcgcgtttgaaggtttgaatgagtgaacacgaataccccacttttgtatcggtttctgccagcgctggaggccagtcggaccggacaaactcgggaagccgctctgcagaagtactttcgtcgcagaacaaggcacattgtgtatagaggatgtacctgagaaggaacaaattggaagaaaaaatactacccggtatagcaattatcggacggagaaccatctcggagccagaagtaagcacaacttccagaaagagaacacgcacgggactatagccgccgtcagtcctcctcgtcagtaatgagacgtaattctccacgactcaatttctgtatcgcgatcccaaatgtcactaataaaactgcgccgatcgcaccccagcctaggcccatcgctacggcacccacatccccctttatggcaccaccaaatgcagcctccgccgtcgcagcatgcgctacgactgccacgtgctgccagaggactgcaacaatcagaaccaaactcgctaacacgtcgaagctcagtacaaggtagaccacttccgtggcgggtaaaagcttgatttcgaattcgtcgccactggcgtccacatcagtgtaccggccaggaaatgtactcagcgcggagaagctaaggaatttgaggacgatggccattatgcctatttgtgcgagtcgggggggatcagtcagtggtttggccacctacttacgcgagtatccaatgaataatacattggaagctaggtcggtcggtcggtgggaaggtggacctacatgatcacggacagaataatctcgtctcggaagttgtctgcaatcgctaagatattgagagggtcgctgatggtgctgatttgtgctcccagatctctagccgttgagcgacaagcccagttcgtggttcctgaagagtttgccgctgcacatagcccaaaatatcccactcggatagtgaggtcgccagctgaactgagatttgaaaccatcgcatagaaagaaggattcagtgccgagagtctatactcaccaccgggttcccggtggtcatgttgataggacagttccaggagatatatggcacgcatccggtttgaggagcagccggcaaccagaagtgctgaatcagaatatgttagctaatatttcacccctagtgtattccgcctcaaagtgctgagaacgccgggatgcactgacatagaaataaaatagccaccagacaaaagaccatcaataaatggtggaacgaatagcgagagaaaaatcgggaccagaaaactcggaccgtttcccaggagggccaacgtcgaggcctggagtagtcgttgctgtgtatatagtcaaatggtgatggactcctcggcctgcgagacctggatctgtgctgactcaaaaggctggaatgattactctcttcctcttcttcctcttctctcccgttgttatcctcatgctcctctttttcttcggtttgcccgtgttcagtctcttctgcagtctcggccccgccctccagctgctcgctctcagttcggctgccacccctagtccatctctgcctccattcggaatgaaagcgcaacttctgcaatagtggatgcgatggcgttggcagaattctatgcatgggtgtctggagagcgtgcatattctgaaatcgtagcgggggaatctgagcgccaagtgcggtcctttcagtctcaggctgagagctgtcttccatcttcttcgttttgctttgtctcgtgtctctaagcaaatgaaagtactcgtcgcgtttaatcgtgaggttgataatcgtaacgatgaaattgttgcagccttaaccgcaggctattcgcttcgtttcgtttcgttttcgtttcgtttcgtttcgcttcgctttattatttaacgtcactcggcggatcacggggcccacgtgatctgctgcctcccagggggcatctggacgtgctacctaaacagaactgcctaggaactagctagatacaggtttgaagcagcaactatggacaatatatattagaaataagcagaagaagtacccagcgctgccctggtcaggtcttcaagggcagatgcctgttttgactacctatagattggggggaggggctggaccctttatccaggtagatgtgtagactgacacactatcaagcactccagcaggcccagttcaggcatatatccttaaagaaggatgattcttgtacaatacagctgaattcttcagccctggcagctatactgaagagccagtctattatttttaataggctgtcccttatatatctctatctatctttccagtactttctgggatatgggcagaagaagaagtatactagggtcttggtcctactgcaagagcagctttctaggtattctaagtagttgaagtactagtagtatgctgtaaagtctctgtgccctgtataggcagtaacaagtcagccaagtacccaacagggaagcttgtactcgcgggtgcggctttcctttgtatagggtctaatatccagggtcttataggcttggggtgtcttactagtatatatagtatatatctctgtacaaagctattattttatctcctattataggtatgcaggagatagggggatgttagggctgtatatagaggacctaagctttgcaagcttgtctgccagcttgttcccagcaatcccagaatagcctgggatctagtagacttgaagaggcttctatagcctggttaggattaagggagcttctaactactggatagtaagctggctaaaggactctgacagtctgtgcctatgcagagtaggcctatagcttgctagcagggaggctgctgctaggttatctaggaggataactagctatatagagtagtagattaaacaagctacagcacctatagatatattcagacttgctaagtagattagatatccagaccagcttgctgcccttcttctaaatatacaaggggcttaggttactaccctacagggtaaagtaaatacctttctcagttacctcctagagaagagggccctgcttctaaattagatagaagagggaccccctaataagcccctgggccccctatacctgctaataaaagagtactactgggctgccctctatgccctacccccctctgcccctggggaggacaggcttgctactactacttagagggagctctggcctgtcctaggagatataattatataactatactataggtatatagaggaaggctgctttctactaagcctgaagtcagcanagataataatattactaaaactaggaaagagggactatacctaacttaatgcctggcagctaattaccctcctctctatcctaggcaaaggcctagagtaccttctagcacagcagatagctggaagagtatttaggatatatattagncccctgtactttaggggcctgccagatactctgctttaacctattncaggtcttgttattgggtgagaaggccttaacaaggaaagagcttactaccccccaaattaaaagggttt

SEQ ID NO: 2322 - DNA, 2509 bp, Emericella nidulans
gacaccgcggacctctcagatagcgaggagcatacgcaggatgtcaatgtgtatggtcttgagcaacgatggagcgcttctctgcctaaatggctatggctgctgcaattcctcctcgcggctcctatcgttctcattctggtcgggcctatagccttgctgctaactggttccctccatcagacgggacaggatgggagctcttcgctgttcatttacattgccattgtggcacttacaacacttctcttgtctccgatgctaccgtttgttcatcgttgcacctatcatattccgctcttcatgctagccgtattcgccgggacgttgatctacaaccttgttgcttttccgttctccgattccaacagactcaagctattctttatccaagaggtcgatctcgatactggtctaaatactgcttcattgacgggagttcaaccgtttgtgcacgatgtcgcggttggcttacctagtgcggcaggccaaaatgtcacttgtggcccttttggcgacaggttcaagtgctcctggactggaattcctccacacgtcctcacagaagacaaacctgtagaggaatggctctcattcgaggtttcccggtctattgataaaccccgccacgctcaactccagatctccggccaaaacacccgtgcgtgcaaggtcgtctttgactctcctatcaagaactttcatgttgccggctctgcgtacgatcctcgcttcccgcatacttatgccaagggaatcaaggagattcgcctttggagccgtgtatgggataatacttggacggtggacgtggagtggtttaacccagacagctcgtcagatcacagtaaaacttctggttccctcaccgggcaagttgtctgcctctggagcgattataaccaacccggtaccattccagctctcgacgaggtgcgacagtatggtcctgcttggataggtgttagtaaattggccgacgggctcgtggagggtcgcaagtctttcgaaatcgcctagcttgccctggtgcttatttattctaacgtcgacaacggtaccatcggacggattgaatttttttaggcgtttaggatgcgagctacgatttatgtttctacctttccttgtctgttagtccgactccttgctgggagtatcttaacaatatagcggctccattacatttcatgtttgcattcggcgcggatggacgccgaaacatttgccgtccaactaggtcctgcgacagtagtaaatacccagatgccttacagctggtttgtgttaggtcacttcaatgcaaggtattgatcactctgtggtaccttggtagagtgaccactctaaattcattctcccaaacctggtttaccgtactacagtttgaatgtggagacctgtgagcgcgacgtcgaaattggccttctgaagctataaacggccgccttgtcacctatgaatcccatcagtaacccgttgattcggtcttctattacttgctccgcaccatcgttctgtatcggtgaagcattgtctagtcacctgaggtgctcaacctcagctagtggcatacgagctcaacatccgagtatatgttactaaatttacttgatgggagatgaagataataccttttcgcaagaccaactcaatgctggccggaagactctcagctgtctctaggagattatttgctgggtgtaataagtgcttaccagcagaatttcagaaggacgaactgctatctatgaatgagggcgctagaggtacaattgtgaatttcttatcaaaacggaagtatcaagaaattgagatccttccaaccgtagcaatccacgtgatcaaatataaggttgggtacgaaggtgaaatatgaatggaaagtcgaatcgagtgttggcattgagatgggagctgcagttaagaagactgggatttggtaatcaaggggtgtcggtggtgattgagcaagacagaaaactagacatgagaaagatgggaaccgtatggatgatatctgctggagaaggtctttctagttgggaaggcttggatctcgttcaaagcaggaattctacgaatgaagctgtatcttctacatcattatgtctataaatatatcttttgcggtaaaccaacagcttgcatgagaccaccccccatttaccccgggcgatattagtgatttacaaattctggacatagaagaacaaattttcctaagtgtgttaataaatattttatataagaattgcatgttatgctagaaataggaccattttggagtgttcgaggtcacggggctgtggaatgcttggtacagtgaaacattcacttggaattatgtcatactgccatcaggaggctggggaagtgtatccggccagggctccagaagacccatggatagatacattatcttgttccagactgaccggatccctgggaacaccttgactgtcagtaatactataatggtattgggtttgtagcgttcggatagagt

SEQ ID NO: 2323 - DNA, 1700 bp, Emericella nidulans
cgacagcatcgacctaggttcactgatcaatattgaggcacaattctgctgctccacctgcagttccggtcatcctgtctttgattgaacgctatcatgatctccgacgtcagcacgagcccaaccggagtccatgcctgacagtcctgctggatggcaccgtcgtaggcttaacacgtcccgcattttggcccttcatctgtacgtaaagcgggaacgtctggtgtggctgccgctgtgggtatcggtagattagaatggtcagtcttgcggatgggagcccgtattgagccgagcgcattggataccactcaatgtccttgcgcggctgcgccttgtttgcttaaaaacgactggaattgggacaaaatgtatggagtagagaatttggcacttttcgctgtagcgcagatatcataggagatatgggcgtagattcaggcaaagcactcttagaactacccacgatttcagagcaagtctcgcgcattgtattgtcccagaatgtgtctggtcaagctatggatttgtccttgggaggatctattgcgtgttctgcttgccgcatgccatatgttgttgcgcttgatatatatttgcgtgaccctcggccagcgaccatcacctagtccacctaatgggatcgtagtgcttacccacctctaaatatattgtatcttatcgatactttcctcgagccctgtgataccactatggcggcagagtaggaactaaatgtactatctacctacggacataaccctcggtaacctcatgtgcagcgtggtctatcgattctcgacagagagaaatcaaaaagagtggccaacctcactgaactgtgtcccacactccactgaaatcccatgcagcatttatgattcatcacctgcacttgtatttacagggatttcaacggcggatgccaatggagaaatcatcgcttagcatattctcgaacgttaaaacggacagatcatattcaacgttggatctatattatgcaatgtgcatatgcgcccgatgaaacttcaactgtagcacaataatcccttgtcccacacaagacaggacggatcgggtggactcgttttgtctggcggctctcgtttcaacaaagcctcacggagaatgcttgagcgggaattatgttgtttactccgcgtccagggacgcttctggcgcggaaatggacagataggaatgagcggggttcatcgccgttttaatgcagtagagactgctgaacggtagatctccagcgtaaggctaggtaaaaaaatgatacgatcctagccttaggatgatgaactcaacagtgagcgcaaaaaaaaaagaataaaaaaagaaagctggacccgccgggaattgaacccgggatttcctcaatgcaaatgaggcgtcatacccctagaccacaggcccaagttgttagtaagctcttagcttacagtatataccgtctactagtattacagaatatatacgcttttggttttctctcacttctcaattcagtccgtggtgatcttttcggaggcagagagtataagcacatatattcatcatattgacagacttctgacagtaacagttgctctgaaaacattcaccattcagccgatccagcttatacatccattacgaccttgcattgatatctggtaaatttaatgttttaaaagtgtgttgtgaggttt

SEQ ID NO: 2324 - DNA, 1417 bp, Emericella nidulans
cccagtctattcagcagatcagcttgggtgtgaccgtgggcgcgaggttgggatcatctgccatgcggtaggggacaactgagatataccaggtactttagtagagccagatatgcatttcgtggactacgaagtagtccgctttgaaatggccccgatccgtccacaggaagcaaggggaacggggaggtgaggacgtataatctatcgatggagatcaaagcacaactcctaaccgtatcaagtgacatgatgtattaacacgtaaggcaataacaccacgaattcgacctgcctctcgtaaagcagactcagaagaactacagattggatcggccttcccggaagtgggcagggagcttatggcgctgactcttcacccacatcatttcccgcgcctgggatacagtgaacggcaccagattctctgcgggcctagtttgtgcaatcaatcccttggcacggatgaagcagaaactagaaggatgcctcactccctttgcgaagcctagtatagcacgtgcccattcggcaaagaccatctttgtctgtggagcatcgcggaatgtaaaaaagaatgtatgcggcatggcttcgtattcctgaagggtaaccgagacgccctgcgaatgggctacctgtgcgattaatagtaccgcgtcgatactttgctcctgacctgaggccatccagatagggcagcacccagtccagtcacctgagccagcagggctggcgagaggatgcgcaagcatacccggctggcagtagaggttcgcgcgaggagggcttgtcggccagagctggcaggtgggatagcccggaagaaggtacgggagcgtttcgtgtggcagttggaaaatatctgtcttcgcattcgatacgaaagagggcagcgaggcggaaagatccgttgcgggactgaccacggctattccggcgggcatgacaggttcaacggtgtggccatggaagacgattgatcggccattgcgtctcagacgaaggaggatctaataaagcaggccgaaagcaaggcaagcgccagagctatcgccggcgagaacaaccgagcctggcgggaccgcggcgtgaggtgaattaggtgggggcgcgagcagtgttaggtacgcctgaaagatatcgagaagggcggctgggaaggggttctgcggtgcgagtcgctgatggaccatcagcacttttgcaccagtctctttggcgaggaacgatgttgttcgaggatagcaggatggtgtattcaaagcaaaggtgccgccgtaaatatagaggatagttagtgtaccttttgtctccgcgttgagtttatggaatttctcgctctcggagagtgaggtcggtttgggggtgctttcttcgcatcgtgacggtaaccgagccattcgaattccagcga

SEQ ID NO: 2325 - DNA, 614 bp, Emericella nidulans
  unsure (1)..(614): unsure at all n locations
ccgtggtcaatgtgagtaaagatgtatcactcttactaagctcgcgtgggccgggtgtttaacaacttttttttctgatcgatacccaatcgcctattgattgggttgtggaattatctatgaagagggtatccccaccgagggcaggttgtttaagcccttcatctaggacgttcttgcagagtacatggatgaagaggacgtgtgacacgaatgagaacacccttcaaagtggtctgacacctgaaataaatacatctatgtcagggttatcggaacgaggtacatgctcttggcggagaatcatatcaacatctcgctaagatactttggcgccgcgaaacatatattaccagacctcgtagtgatggatctcattgcttccccctctttttcagttcctctcgtacgcgcggcaagatgtagcgcccatagtcaattgcgtcgttgaagttatcgtatcctcggatggagatcagctctgcaccaagctccacataatccaagatagactctngaacaagtttccatgaaccaacaagagcntgtgacgcaccacgtgcgtttgtcgccgtcacagtcgggtaccataacgcgcggtcgtgcacctaacc

SEQ ID NO: 2326 - DNA, 2359 bp, Emericella nidulans
tccacgtcgggctcggggaatatctaccaaacggaccgcgtatctccacccgcgattggagcgggagattgagaagataattgcctagttggcccttggggtagaccttgatgattaaatccactttaggcgaattcccaacgggggagactggggtgtagcttcgctggatttttcttccgtctatctcggccaatactttgagatgctgccctagtccaatcaccaatccgtcgccctggagccgcaccttgtacacattgggggcgatgcattggcgatccactagtgtcagaaactgctgggtgttttcaccgctgataccgggtttctttggaggaagcggcaggtaatgctgctttactcgcggatactcctccagctcgcggtgtcgtagcaaaagagtctttttggctgtcaagccgacaaaagttgcggcagcagtgtttaatgttgtggcagtcaggaatccgccgagaaaccctacccatccgctcgactgaactcgtgaaacttgggcttgcgaaagatagccctgaatagattgccaggggtgttgctttagtgtaaagaacaacaatgctagccctcccgcgagcactaggctaggcagctggccatactttgacgtgtcatttccattccttgcctgtcgtttggtcggaattttgcctctatcgcttacggcaattgaaacgatacgtgaactttcttcgggttgattttccggtagggttttcgattgcagactaccgacgagcaacgtcttcagtttcacgtaggcgtcattcgagtggccggcgtcttgaaactctgtcgtggcatcctttccagcaaattggcggagaatttcatcacccccgggatggtcctcacgatattctgctacatcatagactattccatttcgttagttgagtccttctgcgctgaacggttcttaccgtttccctctatcacaatccagaggtcattcggactgctgtgccgcgcgacttcggccaaagtaatgctagccggagatgccatgatatcgcgcaaagatgcaggtttgttcctcaagcaaggccaatagaaatccgtaaggtataaaataggagcgtcttacgggaggttcgggaagttcacaaaactgaccgagcacaattgcgttataatgatatttggacgatcttcgagttgattcacaaagcccatgatccgaactcgttcaatatgacagtccagacattctaccttattggtgaaaaggaacgctcgacacgcgagctcgatgttggtgatccaaagacagtgaacgcgcttcgacagggactagcagaagtcttcaatatattgagtgcagaaggaatcgactttcatgattgtcatggcccaataagtactatcgagagtattttgcgaagtgaatcagtcggtataactgtcaacgggcatcccgtacgctatcctcagcagccccaagggatccctatatttggaaaccactttgagatctatccagatcatctaggaaatcacgaacgcctcttcaacaaatatggttccgttatccggactaataatatgggcagagtgacatacctcacaaacgacccagacattgcagcacttgcgttcagggacaatgactacttcaccaaagcaccatcgtcagcgagtcatccgctttacggaatcagggaccagacagcgctgtttctatgtgataccgaatccccggcgtggaaagaggcacacaagtttattccccccagcatgacccctcgagccgttcggcactacactcctctacttcagcagtcggtagacaccgtatttaacgtgctggataaattcgataacaacggacaggcattcaatgtctatcacttaacagcaaaactagcttcccaagtgatctgccagctggtgcttggagtcgatcttcatcatttcgacgccgtcgacagtccggtacatcctatcattgagctccttcaacgctaccttacgctcaatggccgagtgcaaacaaagggagcctggcacacctatctaccattgggtatgttcctaggtcctggacacggcatccctggctagccgatggtgatactggcttgtgcatatcagacaggagaccccggggacgttaaaaacactcgatgggaattatacggtcgtatctaggcggccagcataacgtgccaaaagaaaaacggcgggacaactggggaccctcctatacagactgctgcgctacatgccacctgactcgtaaactacctggccggacagccgatgaacatgtgaacaggcttcgtcctgagtacattactaaggacacgctcgttctaatacggggacgcttttggac

SEQ ID NO: 2327 - DNA, 1755 bp, Emericella nidulans
gggctcagcgtgattctcagagccattctctggaagatccttgtcgctttgataggctcttggggcaccttcactctttgcgtgctccggttccagggtttcaggagcttcgcccgggtgctccagaacgggtgcatcaatatcctcgacatattcatcttctaacatttctgcttcgtatattttactttcgtcttccggcttcccttcctcgaattgcatatcaatgttctggtttgtatcagggtactcgtcggcgtctatcatggagggctcggctacctcgtcaatcatatcttcatcagggaatccatcctgaccatgattttcgccatgagtgttatccatgtagtcatccgcggccgtcatatccctgtctgcattcgaagcctggtcctccattacatcgatatcgatatcaaaatcatctgcatgcccctggtaaggagatgccatctccattgtatcatccatcgtaggaacttccatcgcggaaaatgttaaggacgaggtggttgtcatggtcgaagggcgcgctgaaagttctgagggtggcgttctggcccaatgtgtttcggccctgccgtgagtgacccacgctcagttctgcacggtgaagaagcctaatctatggcctcaaagagaataatagacaaagaatgatcctactgaaatgcaaggacgtcgccgaagacttttgttcacttgcaacggttgtgtttcgggcaagttgtggtaagcgaggggatagcgcggtgcacgggccaacaggggccgaagagaacagcaagactccagcacctccgccgtcggtggaatatctacgtatctggcttcccggcagaacaactcgtgtctctaacccttgtcttcagttgccggtactatttgagctgcattcttgcccacatagctttgctcgtggtgtcttcatcatggtatgcccaccctcttccgtaaaactggccagtcgtgcctaaccagtgcacacaacctaggtcgttctggcagcgtcaatatgcacccgcggaggcaaagcggtgctctcgcgccaattccgagaaatcgcccgctctagagttgaagctttactcgcatcctttccaaaactcgcggattccggtacccagcatacgaccgtggagcaagacaatgtccgcttcgtttatcaacccctcgacgagctatacatcgtcctgatcacaaaccgccaatcgaacattctacaagacattgacagccttcacctcttcgcccaggtgaccaccagtatctgcaagagtctagacgaacgggagattctgcgcaatgcgtttgagttacttagcgcatatgatgagctggtgaccctcggttatagggagaatttgtctctgtcccaaatcaagacattcttggagatggagagtcacgaagagcgaatccaagaaattatagaaagggtatgccgtattatatggtaacgttcaaggagatactgagtgctcgcagaacaaagagctcgaggcgagcgaagaacgcaaaaggaaagccaaacaattggagatgcaacggaaagaagccgcacgcaactcacgcaatatcgcttccgtagccccgtgcaaccccaggttaactcctgcggcgtgtcctggccagccccacacgtaccacaggtatgaagcggacaaaaaagaatacctttggcaagtaccttttaattagggcccattgggggccaggccttgttgtaacaccttggttcgtactaggccg

SEQ ID NO: 2328 - DNA, 1241 bp, Emericella nidulans
ctgacgtctcggtgtttcctctccgataccagcacccttgactgtcctctctatgcgttgaacaacacagtcgtcgcaaacaacagccagcgcaccagtctacctcggaaatttcgctttaccacaagaacagcagttcatcgtgaccagattcgacctgtggttcgactaacatggttatctttcagccagtttgcccgccaacccagaaaaaagcgcaacgcgtgagttcgatactcacaacttcatgatttgcagtttatcgtttgtgacggccctggccaagctatactacatctactttgcgaagaagctcttcacctctcgatcaaatttatggccgcttcggcgctgcgcgttgtgctcaacatccgcggaggttgttagccgcacctggacaggcgcaggagaaacgggatgtactgcggcctgcgaatctggttccgtcaagtacgtgatgagagagcggttgatctatctcggtcttcagtaggctctgctccggcatcgacttcgatacgggcttgcatcgcaccaaccaaaaaatagtcttaaatgtaggctccgtgctggacccgtcataaagcgctgttgagctctactcccggtgctgagaactctacatccacctgcttgccatttttgtcctccctgcctaccactacctatgccctccaccacccagcctccagcatccccttcgcaacaaaaccgccttcctgactggctggcgagatccttagcacaggcgtcggattgtgatcatgcctagcggaaaagggtctattcgggagggtggtgttgcgggtgggatcaaaatcagttctacctatccaccacacagataatagtacattgaaggtaattgggacgtagcgaaggttagcagttcttccgtgtagtatccgccactgtatctaatgagaccgctacagataggattcccctctttttgcgtccgatattgactggtttgcagagtagagcagtactatacaggcggaatccgatgataacccacacctaggccgagggttattactggctatcctgataaaaaaggacctaatacaataggcccagactctggagcctggacctggacgtcggttgaaatactgcaccgtgtacaggttgccgaggtctaatgcacggcataatcaatccgggctttccgttttggagggtatgaaactcgtccgtataggttggtcgcacaattgcactactctcgtagctct

SEQ ID NO: 2329 - DNA, 2561 bp, Emericella nidulans
aaaaggtgggttatgaattaacgaagaatcggtgggctccttaaaacagagaaaagaggcgttgttgtgatccatgcagactgtcttcctgaaaaaaaaaaaaaaatgttgcaactcgttatagaactacgtgccgcatgcgcagaaatcgagacgttcgtgtgctgatacaaaacgggccgcttgttgtcagtcacgttctacccctgtgcagccaagatgaaaatcaaactgctgtagctgaatcagtcaagtcctcccggatacctgtggaagccgccttgcccagtctcttgcgttggggatccgacggcttgtcatgcagtagaagaataaggacgggataaagcgtctgccaatacgtcagctctcaagcttttcagcactgcagcctcactgaaacgcttgagcgcttggagggtggggaattcgtttgaggtcgcctgcactctggcgatatcaaccgtctccgcacgatcaagaccctacatggctatgaacaaatccatcttgccagctcatcagccatctggtctttccgtctcgtccccagtgtagcgatagtctaaacgaatgactgtgctttatcctcaaaagtatcctaactcggctagaaggggtgtaattggtgcagataatggcatctagagctaggttgttcgcaacgacacggtgggtgtgctgaaaacgccttctcctctgctgagcagttaatagtaatctggagcttcgcgtaggatgtctgttggggggtttgtataatccatggtcttgaagccacctaggggcttgtatctgcacacaaggctaacgataggaggaggaggaggagccgaatgctcattatactggctaatacggccagtgagtggtgaatcaattctttggcgtagtaagggaatgagaatttcttggggatttgattaccttagaaggctgaggaatattacatcctatgtttagaatagagactgcaatatgttcctccttaatctgagtaacgtctttcttggcctggtcttttgagctcaggcttagggcttggtactatatgtatgcatatgtaccagtctgcctgtaagaggtctgtgatacgagccagccgcctcgctactgcttgtcttgtgatttccctggatgtatacttactccgaggatattgggggaaaggtctgatattatatattacgcagggatgcagaagttgagatgcttgaaacactccatgaatctctgcaaggtctgcaatgtctcccaatgaccgcttgagcgaaggccctaccaaactgatccgttgcgtactttccaggggccctgatacagaataccaaaatagtgagtacgaaacagccgattgctttatcgagtacacagagcaaatcccaccagtccgtgggtcgcttgagagtggaaggaagcccaatatcaaggagtcgccgcgacggattcccatggacaggacgcttattggcgctcctgctgataatcaataagcagcaattgctttataccgtctctcgttagacactgggctcctccgaccgtccatggcaccgactggcacacaatgagaacagccttttgccagccaaacagatattgtggattaactgctggattgagaatctcactcagcgcggagaatcccgagatcatcaggaacaagcatggagggcgcggtgattccagcagagactgcaagacggcccgttccttggtggggatggaagaacgggcttccatgggttcggatccagcctagaaagcttggacagtctttgtggctatacttgcaaataccctaaaatccatcttgttcgcaaagctggtgtgtttctggctcactttagttggtgagtgtattggtccttgagccagggattgcaagacctttcgctcacagtacagttctagtttctaaagacatggcgagactgttgtctcaggaaggggtagacctgtccagcctgatgatgatgactggataccaggaccctgggccgcaaggggtagtacgacagctagcagtgaaaggaagaagtttagattggcctgatagtaagtctacataccattgttacgaggagcaaagagtggccagaagatgtggtgaggtgtgcgggcagagacagggtctgatgtggaccaactaataatcatatcagacaccagaattatgagaagcagaaaacaatggtagtagctttggtaaggctgctagcagaaaaaggggtagaaatgagtcttcgagccagtggactggctgaggttcctgaaatgcaagaagcaggcaatgttctgcagcggcttgttttaagaaaagaactatcgagtattgaactgggatacaaagtgaagaatggccgagccgtctccatatttggttgattaggtgatttgttgtttctagcatgaattccacccactcagcgggaaaaggaatactaagttgatgattcaatgctggagttgttattcagcaaactctgtcagttagttcgggtacggtatgcgattggaatagataatcagcaaaccacctactgcagagctgaacagat

SEQ ID NO: 2330 - DNA, 915 bp, Emericella nidulans
accagtttccttcagaatacccatgacctccgagaaatccgtctgaacagatcaagccggcgcggacgccgagtagccactgcactacggacaccgactccaactccaagaccccatctatccagaaacttttcaaatcacaaccgtgaacgccaaataccctgaatcgaaaaagcacagacacttccgaccatgccttcttccccgaccaattccagccacaccgcgcagccatctccagctgacctcgaatccgacctcctcgcgcacctggcctcaacacacgccctcgaagacctgcacacaaacctgctctcaacactccaacggctcggctggaccgagaaaatccggcgattgagtactgagcttctccgcgcgaaccgatgtgagcgattcgacgacgtcgttgaagcagtcgtcgcttcggcgcagggccgctcgcacccgttccttgtcgattccaactccgataataacaccggctctcgcgcaaaccatacacacaatcataacggggatgtggacggagttgaaagcaacagtgcgtactccattgaaaatgcggatttgcggattccgagcgtggtcgttgagcaaggggttcgagcaatcaaggatatattaagagaggtcgttatactggaagatgaaggggatggagccggagatagcagtagtgctactgggacggttagtaataatgctgttgatgtggttggagagactgcgacgaaacgacagggagagaaggtggttaatggtgatacaagcccggccaagaaggggggcaagaaggcgaaacagccgaagcagataagatgagttcattagacaagaaaatggggtattctatatgggtttttcgcgggacttcttgcttcgggcgttgagagttgcgattaatggtgttga

SEQ ID NO: 2331 - DNA, 1374 bp, Emericella nidulans
  unsure (1)..(1374): unsure at all n locations
tatgccccagcggtgatttgtaggtgtttctgtttttattatactgtattatactgtagtgaagagtgcctgagctttgcaatcataaaatgtactattctgttgacttataacttgatagcttgcatctctcgggaaacaggatctagacatgcagaaatatataatatggcatgcccacagatttgtgagatacgacaaagaacagggctgaatagcggcgaggaaaggcggtcagattggatgcagccaccacgtcatgctgcccgcttgcccatgtccagtcagtccccatcaacagttcttgtctagacacatccagagccatcgctttctttcaacccgtcctgatcccctttcactttcaattctcctttccccccctctcaccaagcattctctgtctttctctgcttcttgtcatttgtcccgcttatggtgcgcgcgctagcttactggccttgctgcatcctttgtttctgtcctaccctgcattagctctggtcgcggcatcgattaagtccagcccattccgcggaggggccgcacaaagcttcgagtttttggctagccgtcgctcatctatatcattagcctgggtcaggtttttctttggcctaccgactacatagcccctccctcatttatgcaagaaagatcccgccgaccgaagcattcatgaagcccgtggccatcccttccttcgccagccctagccaccgtcgccgtcccttcagccatggcggaatgcgatcgtcttcttcgtccccagcgccgctcctcctcgcaggcctcgtcgtcgtcgcgccacagccagaaagctaaggccatccgaacgaaagcccagaaacgccactccgcgtccaacgtgaccacgaccacgacaacgaccgagtccgaaaccgatttgacctccttcccgtccctgtcgcccgaccgctcgcccaacggattcttcggacagcccgccttgaaccgtgcgctgactagcgcgttactggacgggaccgaggagaacgagtccgctatggatcgtaaccgggaccgcaaagcggcgttggctaagctgaccactgctgcctcgcacagttctggccgggcggctttgtttgaggattccgtaccgattcggtatttccctggggtnntgcatttggcagtcgatgcgcatatcgagcgcttgattgcgagtaatggggccgtaaagtttgtccggcagtttgcaaggcacctggcgcagcgtcacgcggagatctctgcgttgcgccaacgtgctgacgagagggacccggccctcaagaggatgctgcgtgaggcgaaagtaaagaataaggatattgagcggcggttgtatgcgctggnnggctcggtctt

SEQ ID NO: 2332 - DNA, 2824 bp, Emericella nidulans
ttcgtgattcgatggtttttcaagcgtgatgacgacaacagcgcgctcggtggctcgcgcggccgcccgcggaaatgtcgttgacccagcacaagtcgaacaaatatcccagatgttcccgcagctcagcacgcgcgagattatgtgggatctacagcggaatggcggcaaccggctgcgacgactgagcgcgttctctcggggaggggcttagacgcggtatgttcatatcctggcgcttgtgccggctggtggccatgcgctggttcatccgtaagacaaaacgagatgctaactataactgtattgtactatagcctcctccatctttccaaccattaattgctattccgcccaccggtgtccccgcccagcctgcgccttcatccgcgccgtctaaatctgacgggcaagacttgattacacggtacaacctgtccgcgaagatcgcagaggctggcggtgctgagcctgagtctgggtctgattcgaaaccgtcagctggaggctggtcgcagaataaggaggaacggcagcgctgctacagaagcggagagatgacatgattctggctgcgcgaaggaggatggaagcgacgaacaacagcagcagagtgcccaatagcgggcaatttctatcgtacctgtctgcatcagtgggtgacttgatttagattgttttgtttggtggatctttggctcttacatctctactaccccttcgctgcgcgcctgactgctgaaactatgatagcctactccgtctgcatagttttgcggctacgtctacatgtattcatgtatttaacttaaagagacagttgacctgtgcccagccgcttcgccagttgcgaacagccctcttttatccttctttctttcttttgtatggttattctcatgtttgttatccatactggaccggactaccccatcttggactctacaacacagcgtcgcatgctcatggtgttaagttgaattagattattcaatcaactgcattcagaaaggagaggtagggcatatatacactcgaaatccatcataggcgaaagaacgctgccccatgtatttgtttttccaaactccaacccaacttgcaagagaaccatgaaagccatttcaaatcagaactccatctcatcgttatagtcctgcatgtcgtcgtattcacgattcgtcgcatccgctagctgttcccgacgagcctgctccttggaagctccaatccgtctgatatacattaacaggggccctgagcagtagatgagaacaacataccttaacccatcaactactccgctgataaaccccctcccctcaccaatttccatagccccaacccccgtaagcgccacacctcctccagggcccgccgcatcatccaacacttcaacgccggacctaatcttcgcagatctaacctctctcaacaccttcaacaaccttctcgtctgattcggatctacaagatcatcggccgcagcatccagcaacatagttgctacctccagccaatgaaacggtagtctaggcggctcgctctcgaaggcatcaaacgcctggtcttgcgcgacattctgcggcaagaacggcggggttgcgtagtacttggtaccctcgggggtgaaccgcgggcgggcggttgattttttatagctgcgttcgcgcagactcggttggcctgggaggggtggaggtggggagaacgcgtgctggtaggcctggtcacgggtttcgatatccaggatcagtgacagtgattccggatgtagccagggtggtggaaggatatttgcgcggcgttggcgcttcagcaggagggcgagccagaggggaacgtttgtacggcggggtggaatgaggggtgcgacgggaccctagattgatatcagattctggatgattataggtataagggaaacgtacacctaagagctcgaggccctctaagcgctgccgagggacgattgtaaccagctccatttcggccaggaaggagatctccgggggcgtgatgcccgcgggagggggaaggccattgaccgtcgggatagcgtccaatgggtacgagaaatcggatgaaaagattagactcagggccagtgatacatgacttcgcttgacttaattcacgtatagctgtagttgcaggccaataaagtggtagctgaaatgtcgaagtacggtttgtactgtttgcaagcggtaccataccgtcgctagcagaagcaactgtttcctcctggtggtttgccctcccactcgaaccattgcacctttgaatggtccattgagaactatgaatgctcaacctcggtcggccctggccctagcagctcgctatgccgtccccttcgggctgctcttgatccctatctggatgacccaagtcaactccgtcgtccccgagccatacctcgatgaagcattccatatcccccaagcgcaagcatactggtcgcatcaatggacacagtgggatcccaagatcactactccgcctggactctatctcttctcgtacgccgtctgtgcccttatccttctccttcgcggttcccccgaacatctagatcccccggcactccgggcgaccaacgcggcggccgcagctgtcttgctccccttgagactgcagaccgcactcgacactgtgcggaagcaacggaatacccgtccttctggcgcctggttaagccatacggtgctgaacatctgtctatttccgccgctgtttttcttctcgggattgtactacactgatgtcctagcgctgctggtggttattgaggcgtataattgggatttgagtcgcgggc

SEQ ID NO: 2333 - DNA, 2088 bp, Emericella nidulans
ccgttccccttcgccacggccacgccatctctatcgacttggcgttcagtgcgacactggccaacacaaggggcctcgtaagcgaccgcgagcatatccggcttttgaacctcttctcacgcgccggtctagctatggaccacgctctgttcacggaagaacttctcgagaaggccaccgcggctattctgaaaacccgtgacggcctcctgcgcgccgcagtcccaagtccccttggaagctgcgttttcctgaacgatgtcacccgggaagagatgggtgcggcactgcgtaggcataagagtctcatgaaggggtttccacgtgagggagccgggatcgaggcgtttgtcgatgccagtgatacgggatatacgatgaatgggactgagcatgaaggtgagaaagagaaggacggtgcaaaggtcatgaatggccaagcacatgtgaatggaaatgggaacgggcccacaaatgcgcagaagataaccagtgatgtggaaggaagcgtgcgcaatgtcttcggaaatggagtttttaatgagctgaagaagtcattgcccatggctacgcggattgcctgtgctgttgaagaggaggcctagagcgagctacatgtttacgagatgcataaaacatgctaagaaatcgcagagcaagtttgttcgatagatatataggtagaggtcgaggcatagccattgcttgatattgtttccgaacaaagtaatttgggaattatatgcacttagcactgggttaacaacgtagaccaaatgccatagaaacaaaagaagatcaatatcgaaaggcacacaaccaaacgtctagagcacccatccttcgaatcctgctctttccactttgatctgaagtcgagccttatcacggtcattaattaggtgcgccacaaacgtcagaagcaacagcagcacgaatgacgtatttcttaaatacatcagtgaatatgtggttccaagcctacagggcaaaagcagttcaaaagatggaaacgagcgtttgtacctatgggatcttcatcttctcaggtaccagtgttcgtagcatgaggctgatacaagggtggaagaagaaagtcggccacgtcgcaaagctctggaaacatattatgagcgtgactcgacgaggtaggggcgctgtgccccgctggtagggtcgtcgtactttacgggaggtgcaggcgaaagttgagagcgtctaagaatagttcgagaagggtagtttcggaaacagctgggacacgtggttagacaaattgagtagagagggatcggtagctaagtataaatagtactataggctggtttggactggacaacgaaagctggtaaaggactcccgagtcaggctacaagagcattatatagcccttggcagcagttccgaggctgcaatagcaatttgaaaggctgagagtgaatgcgagacatcggcgactatggctaaatgtaacccaggcagcattttgttggatcaggcatcgaaagacccctgcttgtaaactggctaagctgtttgctaaccagggggcggtgccgggaactagggctaggagcttattggggttaaccccctagacagtttcacactgtccagtatgccatgatccacgctgtcctgctactgacttgtacctgacgcccgtggagtggatggtataagagctggaacatagattcaagcgcatggccaccactatttcacctctccctctagcaacgttcgagcacatgaatatcagatccagggaaaacaactctaacgtgtctaaccgattgcaatgcttgcaattcaaggccgtggcccaagctccctgatactcaccaattacacacagtggcaccgatcaaacactgctcttatccatgacaacgtctcaatacaaattgctttgcatcgtctagttctggagaatgaaatgtgcacagcacaatgacgtcctgtttaaacagtaaaaattcaacatcattgctttcgctgctatctaatactcaacacgttctaccctataaagcgatattcaatatatttgcgttctgcaatgcactctaattgattatttattat

SEQ ID NO: 2334 - DNA, 1845 bp, Emericella nidulans
tgtgtaatattaagctcctttatttactcgaatagcttgctaatttaacttgtttgactgcttagcccgaggcaccgaagaccagctcgtcccctccggccggcgatacgggctggcatcgatcctcaacccgctagcctgtggcctttttctggaaaacacagcccacggagaagccctcagacggccggtttagcgaacagaatcgcaacatctgtctgatgtaccatgaccgctgcctcaaaaccgacgtgtttgatgcattgctgctattggtgcccttagtagcaaagcatggtcttaccttggtgaaggtagcgtttcgttggtgtgctgatcatttagcgctacggactacgaatggaaatgacagtattattatcgggctagcagcttgagtcaattgtgaagcaatctgaatgccgtgagaacggaccgttgccggatgagctggtcgaggctctggaacagacataacgtatggccagggctggtacctatatgatacgcagaaggtacagcctggtaaatatgctggatagactagttggatagatctattattattctgcattgtcacgggagggtgtccttatgaggataccttctacatggatatcaaaagttgacctgcgaaatcaaggctctagcatcatctataaaccagtgaaaatacgtagtaaagtgtatagcctgaatcctctagtacgaatctacagaatcgtacttaatctactctggagtaggttagtacgatagagcctttcattcctacctgctattgcccagtatactcggtgctagctagggcttctcgattagcgcttcttgatcagcgctccacacaatggtcagccacagccaatctcatgccagatgaggctgcaaatgctgaataattcgaccccgcatgattaaccactgtatcttggagtagaataccctacacctctccctatttgtcaattttcatgcagcttactcctcacacaacatgcatgcagaccttgcattgggacgttgcagacattggtatatctttccgtccacttaaacatctggaaatcacagtgagtgagcagattaggaatcaagacatgagtaaatgggtaacattaagtatatgtaaattactagacttgaaagcaagatgtatgtgatacactaaggtcactgagaccagccaagtcatatcatatttagattgtgactagtgaaaatatctccatggtttttaaaggaaaatttccttctcctaataaataatttaaaagtcttctttaagagtctgtcgtgttgctcctgctgcagggtcaccgtggggcgagtttatgtttacctgcctaaccgctaggaaaagctcttcgtttttacatcttaattttctggtatcctgattaccctaatactgtttacacctgaaaactcgcgtgatcggtacctaggtgtagccttgctagcaccatgtacagtggattggagacttatttgtggagactagcgcgggactctcagtctacgggggctgtccgaggaagataccacctccacatgactcgttgtgttccggtccttgatcattcaaagtttcatccatccgctcggctgcaatgatattgtagaggattacaggcacatcgcctcatggatcgctccagcacaagacgccgtcccaagtcccgcagagttccagacgagaagcgcaacgacgctgcccaggcgtaagttcctgcccaattgctgaatttctaccgagcctgcgactggagatttcctctcggttagatgtgaccgttgcaagccccgtaagagcaaatgtgtaggcgtcaatacaggaagatgcag

SEQ ID NO: 2335 - DNA, 610 bp, Emericella nidulans
accaggggaaagaaggcagcctctgccatgccgaggaaccagcgcacgcgaacatgccaccaaagttctttgtggacgatgcaataagggtgaaggagccaaagctaaacatcaggattggcagcaccctcgccggactgaagcgcttgcctagcatagcgattggcggcgcgaagatcacatagggaacgaagaagatcgatagcagaagattgtactgccctggtttgaaatggaggtctgacctgttagcaggggctggagctattgattttcggcggacttaccgtcgctcattccatctgtctctgcattaccgagattgcccttgtccagagcattgaaaaggtctatacgtaaagtcaactactgaacgccgtttgaagattgcacatcaccaacacataatagccaacacgggcatcaaccgcagatcaaatcgacggcagagcgcccgttcagccttatgatcaacgacgcgagcaacgttctcaaccaccccaggggcatagtcattcttgccgggagcctcatctggcaacgaatatctctcagtagaaacgggcgtatcgactgtcgaaggagatggcttgaagtccatgatttggtg

SEQ ID NO: 2336 - DNA, 3146 bp, Emericella nidulans
  unsure (1)..(3146): unsure at all n locations
acagccattgtacacagaagcggcccgatttcctgggctgcactggagccgtggcgccgtcatcgtccatccgcccgggctgtccttctgtagtgggcaaaaaggacgcagactccgatcccttgtaccatcgaacatctgaaacgacgctcttgtgtgctccaattccgcctgtattcttcacctgacgcaggtcccagcacttgacccagccgtcaccggacccggaaagcactcggtacccatctactccccagtctaggccgaaaatctccctgatatgtccctccaagatcatgacagtgcggcccgttcggaggtcccagacgcgtccaatactgtccagaccaccgctcgccaggagagaaccgtcattgttgaatgcgacagtatagacttcccgtgaatggccttcctgtagctgtagctccgccgttgtctcaacatcccatagtcgccacgttgtatcataagatgctgatgcgatgtatttccccgacgggtggaactctgttcggcacacccggccggaatggccttcaagtgtagcaagtggttgatccttatcaagagaccataagcacacattaccctccccgcctccggacacgaaattgacagctgactcagatacgttcgactcaggtagcgtagctccggggaaccaagacaaaccacccactcggtcagtatgacctttgactgaaagcttctcttccagattcggcacgcccagcaatcggataccaccaccccagttaccagtcgcaattgtctgtccgtccggcgcgaaccgacaaatactgacgggccgatcgcccgcaatctgagacccgtagagtccgaagttatgtaacttttccttgatcgccttgcgatgcttgatgtgtgttcgcagcggtatcgtcgattcctctcgttgtcgcgcaacgcgggctttagcgcgcggcagggaaaaccgcgcaattgcttttcgtgccttcaaaagctcatcggagccttctgtgtaaaactcctcttgctgctctccttcgtcctcctctcctcccgcctccgccatttcgatatcctccgctgccgccgcttcctgcttctctgcgatgtccgtcaacagctctcgcagtcgatctcgcctgtccgctggcccttctccgaatagtgtgatgggctctccaagctctcgcaatcgtgcgcggactcgagtatcatccgtcggtactgccatggcagcggctcttcgtttgcgttcaaactgggaaataatcgcagatgctttctctgccggaataccggccgcggacgagggtatcacatagtcgcggtcaacagctagtcattcatgtccaattagtgatcaagttcttgaacatcagacttgtagtctaccgaggtcgtatactcacgcaaatcagctagattgatgcccgtatccatctcctatcaacaggttcgcaaggtcagtcgagatcgcgtaaccttcaaacaagaaagttgtaaacgacattttaagaaagatcaaaatgtgggcgctggagggatgcataggaagcccttacctctgcctcttccacataggcctgtctcgctgggtgcatcatggtgggcaatgaaaggggaccagggggcccgaaaccgtggataagcaaccaactgacgtgaagacctgaaggatttgaccggactatagttccaggaagctgggatggaaaggtaacgacgagtgtctcggttgttctcgaagctgaagcctgaagagggaaaaaggcagaaagttgaaaagcggaagccgcaaaatacaacctataacagcctcaaaggacgccagcgtctggactgcctacatcagacggattatagacgaactttggccttgggagatcataagccagatcttgaattctaaggttttttaccttgacatttgagctccaagaagcttcctagtccatctacgatgagtgtctgcttctactgcgcattggacctgatccacgccatctttggcttcaaagttccagaagcggctagttacgggtagttgttgggcaatgaactggaccgactatgtcttgcacgcggctttttcgtccaaattctgtccatagtccatactctgctctgccgtatctgagaccaggcggtcggcgaatccgctgtttcgtcttcaactacgtcagtccgtgaaaaatccactgcgatcgtcagattttgtaaaaagtctagtcgcatttgagtttgccttttcccataccgccgcgctgacgggctcgattatttgaacgtcttcttttgcctttcaggcgtgccggctggaacttagcccgcgagtccatctcctcgttcgcacttggcttgtggagggtctcgaaaacgacgagcgaggccctccggtgacggtctgacagtctgctcatgatcttatcggtcaggcccagtagagcctgcggttcagccggcagtagcctacaggccatcgcgcgcgagaacttgacagggatcctttggtctcctgcagcccgatctcaatctctccggcgtctaccgcaggatcggccttcgcaaccactacagagaacacgactccccttccttcaagtacattcgtcaagagcttttccttcgacccaaaacgtgactcgtatactccgcgaatatcatatccgtttcgcggcctcgtcatcaggcaagagccgcggattcctacccacgaagaatgcctacaacttcaaccctgagcttcatgacgccctcggcgttgccgtcgacacgcaggaccccgcgaccaaacggaaacggcggccggatagcggagaggatgctttcttcgtgagcacagtaggccggcggcgtgatccatccaaggataacaccattgccttcgcagtggccgacggcgtcggcgggtgggcggagtcgcgagtcgacccagcagacttttcgcatgccctatgtgattacatggctcagacagcgctggattgggacgggcccgctgagcaactccgcgcaaaataccttctccaagctggctacaccgggttgtcgcagacgagaccatccccgcaggcggcagccccgcgtctgtaggtataggcctcgacgacggccgcattgaaacttgcaacctaggcgatcncgatctgttc

SEQ ID NO: 2337 - DNA, 1685 bp, Emericella nidulans
actcggacaaaaagttttccattgtttcatccagtaatcgttgtcgccgccaaaaggatcgaattgccacttcggattgattcgtcaaaagctctttcatggctttttcgcctcacgttcctgaaagccggtaggtatcgcctcccgaggtcgaacacggcctttgtcgcgttatgtgaaacgcgagatcctgtgacctgaagcacccattaatgcgaccgtcaatagaaccacaaccactttagccattcattttttttttaatctaataaagtactttcgagatgcgaaggcagaccaggaatcagattagtggcccgcgttcagctctcactgattttctcgctgtaagataaccgtcgggattatcgtcatgttcaacatcactcactagtttgtgttagtccaacaacatctccgcagcacaaatccatgatgactatcagcggaggttgagagaagcggagagtcaggccaatgaagggcaggaagagcgactcactgacgaagagtatgaagataatatcggcgagactcccgaggaaagaaagaagcgtaagcgaaaggaagcagccaccctcgcgaagatcaagcagagcaaggagttcgctcgccgcaaagctcggcgcattggtgagcctgatgatgaagatgagcttatcgcaagggagatgctgaaagagcgtgctcggcctatgcctggtcaacttgagaattgtgagatttgcagcaaacgattcacagttacaccatacagcaagacagggcctcagggcggtcttctctgccctaaatgttctaaggaggttggtgacaaggagaagaaattacaacccaagaaaaaaggacccagaactactcggcgccaaaatcaaagtgaccttctcgacgggatcaccagcatggtgctctcagtttggttgagatgtgcaccaaggtttgtctatgaacatttctttcaggtgttgcttagctgacactgttcagaaagtggctgataatatccaagatatcacggagtttggtgatcttccatggcaacctttacggtatgtatctatttcaaccagaagtgcggcactgctaatgtacatgccagtcgcctaagtcaaatactttcaaaacgacgggcattgacacccaggacactggatcttttcctccgacccgatttgggattcattgacatatgcgactcgggcagtatgactggtgtatcctgcttatggttttgttcatgttttaactcacctgtttagagcttgagacggacgacttcagaaagattttcacgtttatgcccgctctgaccagcgtaaaccttcggtttgctggacagttgaaagacgatgtcatagactacatgctcgatcgaaatctgagtatccgacatctgcaacttgattctgcaaatcttgtctcggatctgagatggagacaagtattccagaagctgggggataagctagagacactcaggctgtccaacctggactcttcgctagatgatgagagcattgaagtcatgtgtaaacactgcacgggactccgacggttaaagctcacccaatgttggaggatgtgtgaccgttctcttcgagccatttcaacgttaccgtctctggaacatctgtcgttggacttgatacaggaaacgaagaccgatagccttgttgaactagttt

SEQ ID NO: 2338 - DNA, 1447 bp, Emericella nidulans
aagccaccgagtgctgtcaaacctgaagggaaaatccttgcagataccttggttgagcgtaacattcccgagggaactgccacagctccagagcctgaggagttggacgaggaacttcaccggaaggaaattgctaccgagttccaccggatgaaaaacaggatggccagacaaaacggcagttcttttgatgatgaagaacaagaaatggtttccgctgacccaagagaaccgccaaagcgaatcagtaaattccgggcttctcggatggtatagctcgtataacaaattcatacagtctgaaacccgacacttccgatagatattagatatccttgtgttattttagcatctagatcgagtttcgagattgggagatgggagttctctcaaagagcatatcaggcatcggttggtatattcatcgttgagaactccaagatcaaccacgagggctctctgactggtttcctttcctgctgtattggactcggtcgagtacttacggtttggaattgatggaaatccggttacgtttcaccctcaacagcattacattcaacctttagtgggcttgaatttagatttattttgatcaattattgccgagtaaatccacgagctcgtctcagaacactaatcgtgaaggaataacttgggccgcatatcatggccgggcgttgtagccctgttcctgaaatagaactgcacggtgatcttcctgaatagttactctgagtattctgggtgcacgctttctctgcattgtcatttgctacttgattaacttgatctggatatgatagtgtaatgatgccaacgttccaatagtgcttgttgagtctggttacaaaccatgcggctaacctacgttgtagtagtatggttatgaacagaaacttggaagagaaaccatatagtatcgatgcccagtgtcaacgaatccttcaaacgaaagaatccacgtactttgtagcagggaaagtgttataaagtcaagataaaactgatttgatccttgtgagtggtgggtggatgttcccagcggcgagatgctctacagaggtataccttgattatacaaccactattactatatttatagacatccacttaccaaggcataaccactcttcgtaatccatgaccacaaccaacatacttttctcgattcaatctcgacagcggtgaattgtcactgcacgcatcgaacccggcatttccacgaagaaccaattgctttgttttccactttgttgaatgcaataatgacgtccaatttggtggataggatcaacgtgggtagtttcctgaaggaagaggtgtacgtacagagtacccagtctgacgctcaccagcgatcagaatttgtatgagatgtttgatagaaatagaaataagcaaagccgttggcgcaattcattgagctggcccaccaaagttccgg

SEQ ID NO: 2339 - DNA, 1265 bp, Emericella nidulans
  unsure (1)..(1265): unsure at all n locations
tcattcagctctgtacaaagtacttggtaagacgccacctgtctcttgataatgtatatggatattatttttttataggccatctctagccttctatcctatgaaagtttcaccagatttacctcagcaccaagctgcttctcacccacgactgatgccgctcaacttcctcaaaaacctcttgccctggggcgagagagtcatattcaatctcccgccatgtcaaatagtcgagatcgatacagcgcaggagaaagctgcaagagccctaaagcacctcctcaaactcaaccatgccaattatgcgatcctgtggaatgaacgcaaatttcacaaccatgcgcctcactcattatgctcgttttatttgcttggagccaacgcagatgacctaaatcggttatatgaggcggaattaaagccgttagaagcttggattgattcacctggtgagattagcacgtacgattggagggattatctgggaaagagagagtgagatgtctgtctttgtggcatgagaaaatgctaatagggctcgttcagataccaaagagcgtacgtcgatttcttcgaagacgagcttgtccgccacggctatgattggaagaccgtcgtgtttcaatacctcttctcaggcaaggaacctcttttcaatgctctggcctctgatcgtaagtattagcctttcttaaggaaagcctgatactcacaatgagacagttggccatcctctcatccatctcgcctacgctttcgaagtctccagccgtgaagtcgccatggaagccctttcccttgcaactgtctgctacggcaccgctcacaaatacctcgatgacccatcctactcccaagctgaatcctcctatcattccacgtccccctttgagatcctccagaaagtccgcgctgacaagcgcctaagcaacctcttcacagcgcctggagaccacaatacggaaatcgtcttccgcgatgcggaagcaacaatcctcgatcactggaatgcctggaagattacgtccaacagcgaccccgtgaaatcgttccgagaaagtcaagagcttgctgttgcattattgacagccacatcaagttctgataaccgggacgcgaaatacgacttcttcttcgtccacgtcctcacgactagtcatgccgtgcgggtcctgctcccgctgataccagcgaaattccagatccccctcgtgcggcagtggtggttaatgactctngctgtgtatatcgggcagctgaagcca

SEQ ID NO: 2340 - DNA, 1307 bp, Emericella nidulans
tgttgctcctcgtgctctctggcggtggcctccctggcccccctcccctcagtctcggttctcccctcgatcggccacggtcttgttttaggtactgagactcatcgtttatgattcatcgagcccgccagccgcgattttcttgccagcctgctttttgttcaattgactgattctgctgcggtcttcaaatatactcaagagtcgtgctcactgcatactttactctggccggggtcgcttgggatccgaaacagagaccaatacgaagcctcatcgtcgacggtcacctccgcgtagctccaaccacgaagcctagcgctgcatgcttccagtttgtcttacatcgaccgttgtctcatcttaaaccgtcctcgatgcctactctaggaggtcttttgaagaaacggcgaacgagggattcgcaagacctctccaaggagctccaggccggttccaccacgactggccacaccacgacgtcaccaatcgctgccgaagactcccagtcccagcagcaccacggccaccacggcggccaccatttcttccaccataaccaccataaccaccagccttctaacaattcggctaattcggcgaattcgcagaattcccacgccgctaaacaccaccaattcgaccagtcttcagctaccagtaaccagccttccgacgggcaaaccgcctccatgcaatcccccgcacaacagccctctagtacttccgcacactcgaattccggccaccacagcaatgccgccagcatacacaacatcatacacccgtcgcagcagaataccccgcaggtgtcgcgggcggagcgtaccaccaagggcaaatacaccctcgatgatttcgcaatccagcgcaccctcggcacaggtagttttgggcgcgtccacctcgtgcagtcgaagcacaaccaccgctactatgccatcaaagtattgaaaaaggcgcaagttgtcaagatgaagcagattgagcatacgaatgatgagcgacggatgctgaaccgtgtcaggcatcctttcctgggcaccctgagggggacttggcaggatgctcgaaacctctacatggttatggactccgtccagggtggagagttgatcagtatgcttaggaaatctcaggtgagctatgctggtccatgattactacaggagcgagctgatggtgggcaaatggaagcggttccgcaaccctggcccgaaaatctatgctggccgaggtacttcggccgtggagtatctccactcattgagtattattaggcgagagcttaagcctgagaacttgtt

SEQ ID NO: 2341 - DNA, 1308 bp, Emericella nidulans
ctctctgcgataacgtgtgatactcccaagagtctctatgcgctcttacgaaatgaccctaagccctctgagcatgcggtggaagaagcttttgacggaaacctttgtcgctgtactggatatcgaccgattttggacgctgcccaaagctttacaagcccaatcggctgtggcaaagctcgagcaaacggtggctctggatgctgtatggaagaacagaaaggcacaaatggatgttgcaaagggtcttccgaggagactaccgaagacgttaagcacaagtttgcgtctcccgactttattgagtacaaaccagacacggaactaatatttcctccgtcgctctggaaacacgagttgcgccctctcgcttttggtaacaagagaaagaagtggtatcggccggtcaccgtacagcagctcctggagatcaagagtattcatcctgatgcaaaattgataggtggcagcaccgagacgcagatcgagatcaaattcaagcagatgcgttatggagcatctgtctaccttggagacctcgctgaactccggcaatttgcctttcatgacaactacttggaaattggtgccaacatttcattaactgatcttgaatctgtctgtgatcaggccatcgagcgctacggctcagctcgcggccagccctttgccgctataaagaaacagcttcgctactttgctgggagacagatcagaaatgtggcttcgccagctgggaacctggccactgcatccccgatatccgatctcaacccagtttttgtcgctacaaacacgactcttgtcgccaggtcgttagataaggaaccgagattccaatgacacagttcttcagaggttaccgatctacggcccgttccgcagacgctatcatttcaagtctacgtatacgtacgcatctgagaaaggcgagtatttgcgggcttataaacaatctaagaggaaggatgatgacattgcaatagtgaatgccgctttgcgggtctcactctcgccatcgaacgatgtcactagcgtgagcctagattgtggcaggaaggcgcctcagacggaatctgcgcagaacgcggaggtcttcctcaccgggaagaacttactgatcacgtaactctaagaggtactactggtgctttgggagcaggattcaaccctgaagttggtggttccaggcgagatggggacttaccaaatgtcactggatcttggatttttttaccagacctactatgagcgctatgtccgaaatcgaggcctggagaagtgacctgaataacagtgtggccactg

SEQ ID NO: 2342 - DNA, 1517 bp, Emericella nidulans
gtgataaaggaattatggacttctggagaattcaacactccgagcactaaattcgctgatactttaacctagccgcttgcgtagcccagggaggacgattagtgaatgacccgcgaaagacgttcgggggctctgggctgaggcgttacgaggctttcaaatgggtttatgctagatgctggctctagttcccacctgctgagacacggtatctgcaccggtataggattggacgaccggttgtaagatgtgctctcaagcaaagcttccccttccaacatcccggctccttgggcccgaaggctagcctactcgagactctcgtcaataggcctcaattgggttagcgcgccgtctcatgagcttgatttgctgcgttatgaggaatatgccgaactcggtaatccgtgaagacgcttgtccactaggggcttgggcttggacttgggcatgggaggactatgagactctatcagcgaaaggttccctggggccggcctgcgcgattctgaaggcggaaatcaatagtctactatggggtagtgataaacagccagcaatttcttggtaggtgtcctcccacctataacccaacttcttgaaagaagcgtcctgggtagcaaaggaagctggttaaacgggaaataaaaaaccttcggcttttcgagtcgcgactccaaccagacaacggcgttatttcggatccgtccttttccttagagggatattttagaagcatctggaaagatatggaaataatgatggagctaaagatggtcaaaatcctgtatctgggagcgaactgggctgttccagatccggaactggccctgctgacctgcccagaacatttcttcttttcctctatgcttgacatgaatagagtcacgcactcacgatcaactctgctcgctctaagagcccaacactgaacaagagcacgtccagcgatgatccctactgagtctcccgaggacctgggccacgagtcttcacactaccaagggcttggccgcaactcccctccacggtcagtggtctgttcccagcttccccacaaccccgggctctcgaaaatgtcacctcctggtgcgttatgctctcttcgtgctagcgtcgcgtgctttcccgttctttttggactctcagtcgctcatctctcggaagaaatctttgcgaaagtgggttagtgtggaccctccccgaggcccccgccgcggatataaattctctatcgatccatccacgggctcctgagacggctcgcctgacgccaaaactactacttcttttacggtgtcggatgctgcggcagtccagggtttccacaaaatggagtcctccaaggctcaggatgtgatcactccggtcaagaatgaacagtcgccagattctcacgggtcgccgacgccgatggcgaagggcgttgcatacgcgagggcagctgctcacaggagcatagatgaccctttacaggggatataactctttcccaaggtgtcatgtggagcgtatta

SEQ ID NO: 2343 - DNA, 321 bp, Emericella nidulans
ccccggttaaagaaggaattgatgctaagttacgaagacagtgggttatcagttaactataggctaatcttttgcggggttgaagatagcgatgtcttgagagatgagggaataagcgaggggagtctggacgctgtgctttgcatcaaggtgcgctgtgcggtcaaggatccaaaaagtgtcatgaatgaggtgtggaagttattgaagcctggaggaaggtttattttctgggagcatggagagagcagagactggttgacgggtacagtgcaaggtatgcggctctccctttccggggaacatggacttaggaatgaa

SEQ ID NO: 2344 - DNA, 2772 bp, Emericella nidulans
gcagcgaccctacctatatgtatggatttagatctgactagcttacagcctcatccccctggaccccagcataaagtattttctcgacgcagcgaacctgctcaaagcaagcagcacactacagttcacccgggtgatcccgggcttcttcatggactactggggcatgccgcatgtgaagactcaactctcaccaatgacgatcgcagtagacatggcaaactgcgaggctgctatacctggtgacgggaacgacattattgccatgacatattcctatgatatggcgaggttcattgcgcgcttgcttgaaagcgagaaatgggaggagttcagtgttgttgttggcgatgagactacatataatcagctggtcaagattggggaacgggtaaggggtgagtttgaccctttccgatctcaaatgtttcacttgggaaataattgtaagacacttgctgatatcgataggccgcaaattcaaggtgctatatgatagtgcggacaaggtggaagagggcgctgttactgttcccactcaaccggagggaattggatatagcaaggaggagctggaggagacgactgcgctaatggatagactcgtgatcgggaaggtgtttgactttccggctgctatccggtcgagaaacgtcgagggtctggggttggttaaagtagaggatctcgtgaaggaggcgtggggggggaaagcgtagctcagcttagtcggtggataatagttctccgtataaacagggatttcagtatcgtagtgcaaagccgcaacgccgcaacggcgcaccgcgttacaatacactcgcttcgtaccgcatctgaagtccgttgcctagaacgtggcaatcagcgtcctaatttcgtccatcaatcttccatgatctttttgatcggcacaaaatagagcccgaataaccaaatgctcgctcgttacgtccgcaacatttgtcgtttaaggatccggtcccttcgaaggacgagaaccgcgtactgttgggagttctcagctgtatagttaacgtacgtcacccctaaggtgaggcgctagatcacagagttactttatgcctctactttaagaaatttgtcgtgactcatctttcatactgacaagcttgcagctcctaaggcttgttttgccgatccgacccctttggtgaagacccagaaggtctccaatgacctgcagttgggatggaactaactaaataaaggagctctatacgataatgactggtctgctcttatttctttataacagcctgactaaatattctctttttttatatgtgcctgagacgaataggattttggtttaaatttaccacaagacaaaattcgccgtgttgcattgccgttaacggcttgcagcacgttaatctgactggtcgagccgcatactcgagccccattggtcgtgaactaagatggagtaagcatcgttgtatcagcagaaacaagcgcattaagattggaagtcccaccacaaaccttagtatgacctcaagcttggtatttctagctaaccgatgtggattcaaatctcgtgctagataggtatatttgcggggtcttccgtcggcgtggtgagccctatgtccaccggagacgtcatccagcatccagcctatagaaccgttgataccatttctgccatgatttttgtttccaaggttgacacatggcgcgccttatttctgggctgctctgactcagtccccagtaagcgagcctggaaaactgaggctgcaccactgattggaaaacggtctgacgtcgcttgtgtgtccgtgcgttcctgctgtggttccgtggcaggtgcagtgcgctgtcccggactccaacgcgacacgttgaaattctttctgtcttcgttcacctcgctatattttcttctaagccttccgtcacggtctgtatgtgacgcagtgatacctacaatatttgggttggcatggggagctccaggccattacaaccttctacacctgcgatttgtcgtcgttggacaccgtatgggaatgactgaagggactaattcctagattgtgggtttccatcgagacctcactccggttgtgttcaagttcgttgctgacctccttgaatgttcctagcacctggggtctcagaataatgtgctcgcagacgatggcaagcaacaccgaacaggttgctagtccgcacgaacccaccaactgtgcgttcgccgagaaaaacacttcttgcgagtcctgtatcatctctcgactttcaaaatggctctggtcgtgccggactacgccgcctcctctcgtcgaagagaacgcgagacctgtagaggatgagagttccaagaacccattcccttgtcgcgcatgcagggcttcaaaagtgatatgtgaccgtcagacaccgcgctgcgggcactgcctcgatcagcagattctgtgcttctatgtcgagccgctgcggatcacgatgaagcgagcgaaacaagcgaggcagctggaggcccggtcggaatcggttacatcatgctcgtgaacctcgcccagatacctgatgatttattattatccggaggaactggctttttcgcttgaggttgggatcagttggactggtgttattccagctttgagttgtaatcatattctactctttccatgagaaagcagaagctcgatcgtaggcctcctgttactgactttacgctcaagatgcactgccgactattaccaatagctggctacaatgcctgctgaaatagag

SEQ ID NO: 2345 - DNA, 3189 bp, Emericella nidulans
acacaccctttatctgctataccccctgcttggccttggagtgaagccgaagccgagcaaccgaacacgaccacatatccaaaacatagcacaggctgtgctggccaatgtacagacaagtagggtggatattataaactgctcgaggagcaaggtttactgaacacagaagaccgttagataactgagaacgctctctgaatcggcaatgatagtgcaagacagacgataacaaacacaagctgagacgatcaagagcaaatgaggagagcaaggctgcgcaatgacgaagacaacaacagagtagaagcagaaacagaaccttgcaactccttgttgatgagaacaatccgcaagtactgacggggcaaggaaacacttagatgctaaaaatgccacatagatacaggactgccctgtaaagcgcgaggttttatccatcggatgccaaaacgcctttctgccatcattaacttcaccacgacactccgagtagtatcaaggcggcccgtgagtgggtcaggaactcgcgcggtgctcatatactcagaaacagacgaatctagaattaaatggctcatgccagggatgcagtcaaagcagtgcacaaatagagacaaccagaaaacgcagaaaacaaaggctcaaattcgccgttccaaagccgtagcaccataacgagtgatgggagcataatgacaagagtagatgtaaaatgttgaaggagggtcgctccgagaggtccagcccgttcagattcaactggccttgacgatcaggcagcagggggagcggtttcccagggtccatcaatgatgagaaatatagaacaaaatacccggcccttcccacagtgtccatctgccgttcgatatcttgggttcgttctgaaaaggggaaagacgcgaactatgacagtatgaaccacgaccgaccccaagccctcccgaacaagaaaatgactgaaggattgaggtccaacgtgacagagatattaagtagaattacaaattccgtaatcagaacagtagtgcgtcacaccattcaaccttgtggtagatgagcaggcatgacataggtggggacagcagaatgatcacctaccgcagcaaagtgctttcatcaccttttgcatcaaggtgggctgcggctcattgctcgcctgctggccgccaggggctggctggttcttggccggggtcgccgggctgcctatccgatgacccgagatgttcgcgttcgagttctgaaactgtgccactgtcgaggcagctggtgtcgtgtcgaatcccccgctctgacgttttggcgggatgccgcctctgacgttttgcggctcgcgcgtcttcccggctccgggcttcgcaggagacgggggcgggggctgcgcggcgtttaaacggtctgcggtcacgccgggtctttggctgttgcggatctgctggccgtggaggtccctggcagaagtatgcatggcggagttctggagagcctgctgggacgaataggacttgtattcccaccctcgaccgttgttcagtttcatccaatcgtactctccatcctcaacttccccagcgttcttgagggcctgagtaagaagatcccgcaggtaatcgtagtcaggggtgtcttcgaaaccaagattgcgcacatagctaaggtactttgtgaattcttctagacgtggtcagcacagccggggagggttcgacgatgaacaaacctggaaatccctcgcagagttccttgatggcggtggtctgcttcttctctccaatcttttcgtacttctgtttgttggtggcagccttcaggccctgccagggcaagccacctcgaaggaaatacataaaaacgtggcccaaggcctcaagatcgtctcgtcgtgactgctcgcgtcccaagtgggtgttgatactcatgtagcgcgctgtaccggacagcgactttcgctcacggtatgggatatgttgcttggttttgggatcccggtattgcttggccattccgaagtcgacgacgtggataacattggcggccttggagttcgggcgaccgatgaggaagttatcgggctttatgtcacggtagatcagattcttctcgtggattgtttgaactcgagagagctaagaaagtcaggaacgcatttctcttttctcaagtcagcatggaaaactcaccatttgtttggcgaccatgacgacggtcttcacagagaagcgtcggttgcagtgatcaaacagatcctccaaactgggaccaagcaggtcaatcacgaggatattgtgtaaaccttcctggccaaagtagtagacattaggaatgccggctagaccagtcagtgattgtttcgttgcatattggagaacactcacggcatccgaccaaaattttgtacgttcgatattcatctcgcaactggggagcgtcactcttccgaggttcctggtgtcgttagctttttttaacttccatccaatttttgggacgtgacttacgaatttaatcgcaacctgctgattgatcaggagattcgtgccctcaaagatcacaccaaaagacccttcaccaattttctttcctactctgtagtgtacacccactacattggacgatgaggaagccatgtctgcgcggacgatgcgagtcgaaaaccttaacggcggacgaacgtgcggaaactcgacgggctgcaaacacgtgaaggctagcagtcgttagcggaagacaaaacaggaactccacagcgatacaaaggaaaggtacatgagattggtggcttacagagacgcccgagattctatgctataccattcatgcaacaacggcccacgcgtagacgtacaagacccaggaacttgaagagactaagcgcagacaacagcaaaaatcggggcaggcttctcgtgaaacaaaaccgaagcaggaggacgacgatgtattagggaggaccgtagctaatcggagcgactcgatcgagatgagttctcgaatcagggtgtggacttggggtcgatatcgacggcaattcggggacggtcaatgaatataagggagaactccgtatagactcggagtggaagctcccaggaaccttgaaatcggcaccagctgccgcgcagtctggacaactgcaagctgcagtggttgaatgggtcgggcggatgggaagagagtgagtga

SEQ ID NO: 2346 - DNA, 1560 bp, Emericella nidulans
agacggcacaagaaggaatctacacatttgcccacaattatattgttccttgctttacctcaatcgggaactgcgtttactcatgtactgcgccgtgcattcccaagcgcgaagaccacctccgacgtcgccgccgacgttacgcagatttcgatttctacgacgactgggataacgaggatgtggaagatacgattctaggatgggggacggacgagctcgaccgtctgctggcagggagcgggttagcgcggggaagctctgagcagcctcgcagacaaaggaagatgagctatggtgctcgccgggccagtaggagaaaaagcggactgttgatacctgatgagcgggatgatccgactgtcattccaagttcttcgtttctgggatttctcgagcggtttccgtggagatttggtgcgcgagggttgaagtacagaccctctgctgctgacttgcaggagcacccggcggggctgcgccatgtacacgaggaaagcccactgattgagtctggtgaagaagtggacgaagagacggctaatggtggcaacgggcgttaccgaagctctacacaatcatcgcgtgaaacggcgaactcgctcagctcccgaggtgatctccttccaagcgatgaagaagatgcgataccgcttgacgatgaattcgccatggcgcttactcgccgaggaacagggctagagtcggacgaccaggagggaggtaagcctgagagcatgaggtctgcgtcgggcacattcagtatcgcacctaccacatcatcaaagagctcagggaagcagaaaaagaaaaagcgaaccagcagaatgcggtcgcctcagagttcatatgtggaggtttcacgcgacatgccagtctcaattgaggatctcaagagggaggaggagcaggctgcaagggaagaggagatggaaatcgtacggaaacggctcgctgcacgacagttagctttgagccgtggaatcagtattgaagacgttagggtatgttcgccaatatctgatagcaagtatggagtatctgagctaacttacccagatcgcttccatacctccatctccatctgcaggtgtaccttcagaagctgacgcttccgacaaccctcccaaaccgcaaattcgaaacgaagtccatcaccataatgccgtaatatccgaagaacacctaatatcggaatccgatttacgaacagaaccatttccgcctttgcccgagtctgatgaacccacttctcccttccaggttgaccaaattcgaaactcgaatgtgccgcttacgcacgtagaaccaacgcctgaactcgatgttggcgcctcaagctccacgcataatactgatacaacttgaggtatgagcgtcagggcgggcttttattcagagcacagggttgccggcaattctggagtgcgcacgttcaggaaactaattaacattcactcatgataccacttaacttactttattctacctgcctttctgtacagatcgattcggttaccgttatgattttatgatatgaagattctacttaatggagct

SEQ ID NO: 2347 - DNA, 1257 bp, Emericella nidulans
gtctctttttaccttttcggaactcctatttccctttatgccagcgactacggcttccacacaggataccttctcttccgaggccacttcaccgcaaatggccgggaaagcaacttctccatccagacccaaggcggacaagcctttggctcgtccgtctggctaagcggtacttacctaggatcctggaccggtgataatgactaccaagattacaatgcaacctatacccttccctctcttaaagcaggaaaagaatacgtgtttactgtggtggttgacaacatgggcttgaatgagaactggatcgttggtcaagacgagatgaaaaagccccgcgggatacttaactacgaactcagcggccacgaagccagcgacataacctggaaactaaccggcaactttggcggcgaggactacgtcgataaagtacgcggtccgctgaacgagggcgggctgtacgccgagcgccacggataccaccagccctacccgccgacaaaatccaaggattggaaatcatccactcccctcaccggcctctcgaagcccggaataagcttttacacagcgtcattcgacctagatatcaagtctggttgggacgttcccatatatttcgagttcggaaacagcacaacccctgccccagcgtacagagtgcagttatatgtgaacgggtggcagtacggcaagtacgtgaataatatcggaccgcagacgagattccccgttcctgaagggatattgaattataaaggaacgaactgggttgctgtgacgctttgggcgttggagggtagcggtgcgaaattggatagctttaagttggtgcatggaataccggttcggacagctttggatgttgagggtgttgagctcccacgttatcagtctaggaagggtgtctattagggtttactgtagaatttagtagtagagtgatggaatgaacggtgaagtgagagtgtattaaggccggatacgtagatcgacccgaagatagagatgaagtggtgtagagcagggatccggggccatcccagccaccgaataaaaccagcacaaaagcgcatataaccaaccacgcccccgattccaatcttagtatcaccccatcattccgagtcaaacacacttcatgtttcaaacacaataatccaagagaaaagaagctcaaacacaaaccatgccacgacatacacctgcatcaaggcagacaaaaccctaactacaaccattcgataaaaagtc

SEQ ID NO: 2348 - DNA, 1086 bp, Emericella nidulans
cttcttccatatggtcaagaagtcgctgcaggctcggtcagcatccttcggacacatagaaaatcggtatttggagctcgtacttgtactgtggctgcaagggagtatctgcatacgacagtagctttggtattagtttcatccattgcatgtagcctggcaagactcacactgccggggcctcattgttcctcccaaccgtcaagaatagaagcgagatcaattgaaaacagtcatccaatacgtaatccactgtattagaagcacataattagcacaaatcgggtcaatttgctttgggggtccatgctactaacagcgattatgggccagacgacggttttggtctttccgaacagcattgagcttttctatctccttggtcacctcttcgtaaagaggaaggacatcacgagatctaatatacgacgatttgtcttgtttcagcagataaagcgcgtcgcgaatgcgaagtacagattccaagatcggttgctctttcggatcaagcggggtttggatggcgggggattccatcacggtcgcaggaatcggaagtataggggacaaactagaaaagtgtagatcaatgggagacgagttattggagatcgacagatcaatgagaaaaaagaaaaacacggttctgcaccagctccagatattgtagcagaggtactagctacgacgtatagaagcccacctattgatcgctcccagcgctgacctactaggtatgatgtcggtatttcctattatggagtagcgtactggtcacgaggagcgtgctgcggaagaagtcacgggacttgcgctggcgctagactgcgattggaacagccctaagcgagggctcggccgccaaacacacaatttccgcgttgggtctggctgttggctgtccccgttcgacttcttcaaagccagtcgttgataaaaaaaaggtcttcccgtccttcctctctctcctcccccatccctctcgagactttgtccagtccaacgacaaccatcgacaccatgtctaccgccgagctcgcctgctcctacgcttccctcatccttgccgatgaaggcatcgagatc

SEQ ID NO: 2349 - DNA, 2369 bp, Emericella nidulans
tgaattcactccatgtaagctgccaatactggtatctcagactcacgagtcgctcgtcttcctctgaagtccatgtctctcgcgagctctttcccatcgtgctcattttcgccgttggtgcaatactgagtaagatgtaggaagtagtgaaggctaaaatttcttcttgttgtgtaaatttatagattagatgacacacgctgttcagaggctgcagatggcatgggaaattatacgaatagtatttcgagccaattcccggtgatgaaaactctgcttttttgtgctagtcagcccagcccctctactgcacacggtctgcctctgttcgaagtactttgtgctcggactcgagccacagccctgccccgggcaacacgcctcactaacaggggttgttgccggtcagtctctccccctttttttttggctggtatccggccaatcaggtcatagaatcaagaagagcacgtaatgatattgggatacttttctaacaccgcgattttccgttactgggtctagatattgatccggccgtcgaggtatcgtcagcattagagccttgaaggattaggccttgattcggcagtcagagcaactagctacattggtggtatcatttaatttccttgattgtctacagagctagaagaccaactataaaaagcaaacaatgccctcgtacctctttaacattctgaagatgtcaggaaaccgtttcactttgcaatccctatatctttattctagcctccaaattgctcaatctgtcaaatgcttttttttccccttcaccggcttgcatcttgtcaaacactcggtgagcatcaagcgacttatggagctacccctttggatccctttcttgccaaggaccgcaccaaccttttcagatacctacataagtcttgcccgagttaactgaatttacttaacgtgctctaattttaatactgtattactctatcactaggcacatgtattttcttgcttggttggtggaagggtcaaggtgagtttaaggcagaccgcgtcacgagttcttaatagctggggctcccagattttaagggctccgaattcacaaagggtcctcaaacaaatgttccctgtagtgattgatgggcacggcaaatcccgcacatctcggacaagtaaacaccgaggccaagtcacaaccgagatactcgccaatcagcttggtatatctctggggggaggaacaagtatggccggtgttccaccaatgaccgcacactacggacttcgggcttgcagattacgtgcaggtagaggatctgtgaggtatcggctaatgtggacttcgattaccccaggatataccccgcatgattgtaaattgatttcatctatggctaagtaagattgcctgacctcgggctattctagcatgggtgccgagtacgctccatgcaccccatttccttatattggccacaaactaccccaagcaccaagaatgaaggagtagccttacgtgtcggagtcaattggacaaaagaatgtttgcgtcaaccctcaggaagacatttgtcttccttggactggcaacctactcggccgcagccctaacgaccacctcaaattcaacccactataccatctccaactcccgcttctcagtcgccgttgcaaaatccaacggccatgttgtcgatgcaaatctcgacgggcaagaccttctcggccccctcagtggcaacagcggaaaaggtccctatctcgactgctcctgcacacccgagggcttctggacccccggtgccgaaccagcgctggtgaacggcacagactcaaccggaacaccctacgtgggagtgattatgaccgacacctacgagacaactaaccagacactatctcaatatctattcctccgcggtgaagaaacaggtctgcatgccttctcacgagtaacatactataacgagagtgattatttcctccgcggcctcggcgagctccggacgctgttcagaccgaatacaaatctctggacacatttttctggcagcgaagggaactacggccctatgccgctatctagcacagagaagatcaccgtccaggacgcatcaacttaccttggcgatacaactgacgacccttacgtgtcgcagtacttggactacttcaccaaatatacccttaccgagagctgccgcgatccacgatgtgcggggcccctttttaaaggggtccaccggggggggggggaaccccgtgggccgcgggttgggagcaaaccggggggaacacacacggggggccccccctctcaaacatattgggggggagcgggaccccaacaccacttctttgttccaaggccaccccggcatcat

SEQ ID NO: 2350 - DNA, 2127 bp, Emericella nidulans
aaaataaatcatgtatattcccactacatcccattcatacatgagtataaaaatccgtgattgcgtagtggcaggcaacaagacgtagcacacctcgaagacaggccggagcctggtgcggcttaacaaatcggggcgtcgtccggaactccccaccaaagtccaaaattcttaccttctcactccgccctccattctccattcttatcggataccacttcatcggggaagtgcaaagggagtttctattcaccttgctatttgactacctaattgtcgaaggctactggctttcccttggccagtttttttttttgccacgactccgcccgaccgccgcgagtctggccgaagaacctgatattgttcgtaccgcacaataagccaccgaaaattgtacaagtgtgaattagatctagctaacatctctcagtgattttcatgttcagttctttcaaactacacggataacgccttgctaaacgaagaaaccatttgttcaatatggcgccgaagaagaagggaaacaggaagcaggaggaggattgggaagccgaacttggagagagcattcctcctgcgggcggtgacagcccagctcaggaggaagctcccggcgccgatggtgacgatggggaggctggtggtggtggcttgctcgccgctttgagaaagaacaagaacaagaaggccaagaaggggaagccgacaaacgacttcgtcgagggcgaggaccctattcaagaagccaacggtgatgcagactttactagcaagcaacctgaagaaggcacgttcgacgaggatgatgtattcgctgggaagaagagcaagccgatcaaggctgcgcctccgccaccagcacctgtggatgaggattctggccctcgcgtgaaaactaagaaggagaaggagagggagaagaaagagagggaaaagcagcgaaagagggaacaggtatgcctttttttccccgctagtaggcctcggttgttttttgttgactgacatgcgttatccaggccgcgaagaagaaaactaccgaacccaaacaggctgaacaaaagaaaccagaaccgaagaaagaggaacctgttgctgcaccctccacgcctgcccctgcccctgcccctgagcctgagcctgccgccggtggcaagaagaagaagatccccgctcacctggctgcaatccagaagcagcaggaagctcttagaaagcagcgcgaggaggaagaacgccgtctagcagaagagaaggctgcagaagaggcgcggcgactccaagaggaggaagaggcgaggaagaaggaggaagctcgccaaaggaggaaggaaaaggagagggaaaagaaggaacaattgaggagggaaggaaagctgctcaccaaagctcagaaggaagccagggagcgtaatgagctccgcatgaagcagatgcttgctgcaggtgttggtacggttgctgggttgcagaaggatcaacctgagaagaagaaacccgtttacgagaacaaaaagaagaagggtccgaagaagcaggatgaagaccttgaggctgctgctgctcgtgctaaggctcagcgcgaggcagaagacgagcgacgacgaaaagaggaggaggagcggaaagcaaaggctgaagctgaagctgccgctgccgctgccgctgctggtgatgaggagagcgagctcgacgattgggagaaggctgctgatgccgaggaggtgaaggatagctgggacgcacctagtgatgatgagccagagaagcccgccgctacaaacgatgaagagataactctaccagagcgacctgcagctaagcccgccaaagaggaagcaaatgaggagtcttcagaagaggattcggacgaatctgactctgatgaagaagaaaaatccgccgcgcaaaaagcaatcgcccaacggaaggcggaggctgctgagcggaggaagaagcaacacgaggaagctttagctgctcgttcaaaggacaacttgcgatctcctatttgttgtattcttgggcacgtcgacactggtaagactaagctgctagataagattcgacagacaaacgtccaagaaggtgaagcaggtggtatacccaacagattggtgcaca

SEQ ID NO: 2351 - DNA, 4174 bp, Emericella nidulans
catacaacgttattgagtcacagcaacaaacgcgagtgtctagaacaataaggggctcgtctgtagttttaaaaccccggggtctccttgttcttaaatacctaaacatctggggattacattaattggttccccctggccacgccagactgcatgtaattgcacagtgactggaccactttcatagagagatggtggaggataaaaggcagccttggtctggaagtgcgtcaaccagtgttttcattcagcccatgtccagtaccggcaaaaatccttggtggctcttccatcggccatggccgaacctggggaaaccgtcatgggccggccattcggcagctctcctttcagaccaagtcctgtgaaagtgttgatgcccgtttcgcgcctgccgttcgcacctgccgttggcgcctaccgttttttacagtctgctagtgacgaggtcacgagtgatctggaataacacgtgataggtctagtggcgtctcttctcgaagttctctgaaacgactcgatctggaggatatgcgtgtttaacctggaattttctagtcgcatgcctacttccggagtcggtacaagcacaaagaatcagatgggctggtgtcatcggatcatgatgcgagatagacgatcacccacccgttcaccagctatgtctgccattcgcctctgtggatgcctagatggcccatgtccgtcctagtctgccgtcggctctgattgatgcctttgcccttgccaccactaggcagactcaacgtctgattgttggtatacgatacgactaatatgtacgctcgatatagacatgctggagtcttgtttgcttactgcttactactaacggcttactacttattgcttactactcgggactaccgggcaattgtgtaatgcaaatgcatagaatgatatcatctatcggtcctatctacaaccatgacatcccaactgcccaaagggtgttcgatctgacctaagtcgcctcaatatatgcacttagatgcacactcacgcctttgggcgtaaaataaacgggtgctttaacgcctcggctggcgtgcatcgcttctccggattcagactgaggcaacgatcgagcagatcgacaaacaaagctagctcctttgcctcgctatctgtcatccccgtgtgcccttgcccatcaaccgggttttgagatcgcgcgtcggcttcttgaagtccatgatgcgggtggtaaggcggccggtgatcttgtcctcttcagtgctgtggaagttggcatttcgtcgaagtggaggtgcgccagagacccgcgccgcaggagcttcggcgggtatttgccacggcactccatgatcgatttgagcatctggttgttgtttcgtcccgtgaagagaattttgcccgtgtagagctcgaacagtgtgcagccgatcgaccacatgtcaatggcgtagtcgtaggggatgcccaaaatgatttccggtgcccggtaaaatcggctgaccagatatggagtaatctcgttatccgaagccagcgacgcggaacccaagtcgcacactttcagtatgttgcgctgctcgttgacaagcatgttgtcgggcttcagatcggcatggaggatattgcacttacgcatcaagctcaatcccaggaaaatttgctgggcgtacgctcgaattgcacgcaggtttaaacctacatctcggccaaacttcttcaacacctcccgcaggttcatgctgaggttttcgaagaccatgcacaaatgacccttgtgctcgaagctccgttcgaacttgatcatatgtttcttgtcctctggatcggcttctcggagcttttccaagatgccaatctccttcaacccagccttcttcattgtgtcattctgccggataattttgattgccacaacgttacccgtctttgaatctttcgctcgaacaactgacgagaacattcccttacccagattctgttgcacatggtaacgcccgtcgatcaactcaccaattcggaggttataatatccttcaggatcatcccaattatccatcatactaacgtcgagctcccgcgcttggggcacagcaatggcggatgcgtgcgccggcttcgacgtttcctcggtatcttcagcaaacatgtcatcgtcatcctcagcaaatatatcaaatgaatcctttgcctctggctcctgttgcgacggtgcgtcaggcaaaagcacgtcctgcttggttgttttcgtttcatcatagctcgcggccgagacatcattactctgccccccgtgcctttctctttcggctttcatgtcaatagtagggtcgtagtctgcagctgaaggttcatctttgtcagcgccatccacggcaccatctttgactaaatccaagtctttgccaatgctaaagtcgggaaatgaaccgccgtccggagtagccgctgactctgtacatgttatcataccgctactattcaagagtgaagggaatgattgcttacctgctgtttcgttgttaggagttgctgcttcgctcgtgggagtagtacccctatcaccaccaagatgcagtgcttgaatgcgcaggggcgtcgcctggtctctatatttagctttgatggcttcacgccgtttgcgccgcgcctcgagctgggcagcctcatcaagaggctcttcatgccgttcagcgacatcttggccgttcatgctaaagcaatcagtataattcaatttacagccgggggacgtacctatcaccatcagaggtagggagtatagaagctgcctgaacctggtttttttgagttttagcattctgcctagaatctcgagcgacactcggggggttccccctttcgctcactgactgttcagtagaagaccttcttttgctctgcgatgctacactgccctctcgccgcgattgttgcgactcccactcgtcgccagagtactgtttgcgcttccggacttcgcggtagggcgatcgactgcgggtgcgtgggcgcttctcccttcgtcgatcatagtcatcgctgtaccgaaggtccgcaaggtggttgtcttcgcggtcgtaatcgtaataagacctagcctgtctttgtgggtacccatcatgtcgatggcaccctcgtcgcggcggtggaaacgtccgtccagagtgtctgtcgtcatcataaccataccaatagtcatcatggtcgtaatcgccggcccgtcgacgcttataccccctataatctcggtacggagagcgtgagggcgaccgcgatctcgtccttgccctagatctctgacgacgaggcgacctggtcaccgaggcggatgaactaactctggtgggacggtcaacgctgttgtcattaagaagagattgcgacgtagttgccttcgtctccgaacctgattcgataatttcgccctctgaggcggtcgatgacctgcgcgaggacatgatgagatcgtgatcaaaagacgcgatcttttttttttttttctttcaggattcgctgggcagcttcgcagatagcagaatgactccggttagcaagaatgcttctagaagcgggcgtttggagtgattgagaaagtccaaccaactgggtaagcactgcctatcttctcactatcggacaaggtagaacatggagctatcgagatgggaaggtgatgtacgttgatatttgacgatagccttgaacatggaatcgatgaggagccttggacgttgaccgtcgcgtccagctcagtcacgggaaagcccggttatagtctaagcccgtttgagaattagtctagccccgcaggggatcatcttgttcactttttccatgattcccatctccttatcatcgcaaaaaataaatacaaaaattttcacataagaaaagcccccaaactcttacgcatatcatcatggggtggtgcaagcagagaagggtgagtctcacatgatactgttgcacgacttatggacggtcttagcccactaactcttctatctaggcgcaagggtaagccccttaggcggccaaaggaaagaggaacttgcgatgccaccttgcttaagagagccaagagcgtccagacccttttggcatgccgataacatactatgggtttggttacaaactaggcaaaggactttgaaagcaagcaggcccctacacg

SEQ ID NO: 2352 - DNA, 1003 bp, Emericella nidulans
ccagagttgttgggagcatcgtagaagagcgagccggcaatcagagcctggataagggtcgagacctgtttgataatgaatgtggccttgtcaccccagaggatctggtactgtcgcgtaacgcaaatcttgacctggttcataaagtcgacggtaaatgggctgcttttgggcagctgcttcgccttttcctctgcaattgcttgcttgaaatcttcggtccgtagctttgcgtattcagagtcagggtagtcgtattcgctaatcatatctgctttcacggcggatttgttatactcttctaacatggcgtcggcatttcgggggaaacgcgcctcgaaccctgaacggatcttgcgctcggttggcacggtgacaccggtcaggaaatcagcaacgtttgaaccctcccggcaaacaaagccgagagcctccatgtagggcctggcttgagtcatgggcccgtagtagatctgtttgccctcatccaaaaccagcaccttgtcgaacagatcgtagataccattaccggcctggtacagagtgacaatcgtagataggcccagaacatcggtcatggcccggatagccttggtccactcgagcgcggtgctcgcgtccagaccgcgggtactgttgtcccagcagaagacagatgcacgagtagcaagacattcgatgatggagacacgcttgcgctcaccaccggaaacaccgcgaataaattcgttaccgacctgcattcgttaggatgacaaattaaaagagatgtaagaaattcaaagtaccttggtgtcaacagtgtgcgagatacccatggactggagcaagaactttttgtattcttcgcgataggcctcgggcgactcaactccattcggcagacggaaaggcaccttcaaccgagtcgcaaagtccatagtttcacccacggtcaagctagggaagaagagctcttcttcggtgttcatcacaatctggcccctgtcctgtaacgcaacct

SEQ ID NO: 2353 - DNA, 3110 bp, Emericella nidulans
ctgggcgggtactcggggcttgcctttgtcgggacaccggcgagcattgcagatgagatggagacctggctgatggaggagggtgccgatgggttcacggttgtctttcctttcctgcctcaggggctggatgatgtgacgcagaaggtggtgcccgagttgcagaggagggggatcttccggaaagattatacgggcaacacgctcagggagcatttaggtttgccgcggcctcataatcagttctttgcttgataagttgaagaacgaccgttgtggttgggggtgttcttatagggtctgaagataaccctaatccggacctgagctgtggacgacaacggtcaatggatcagactggagataacagtgggtcaaattcatacgatatcgatgacaatgaacatgtacatgataatgataagaccggctatcaatcaactaactggaattagtacgtctgggctggaattggagtaagcaatagccgacggagattctccgtgcggggaggagttctccctgcaactccccatctgccccagataacatattcagagaaaaatgtccgttgcaagtagaaagctctaccaaccatttcaatgcctcatctgccagagtcgcttcacccgccacgagaatctcaaacgccatgccctcctccatacccgctcccacgacgaactccagctgtcctgcgacttctgtaccgcgaccttctcgcgcccagacctgaggaagcggcatatgaagagaagacaccccgaacatgaggccagacgggcgaagaagagggttcagcggggggagtcgacgagacaatggagcgagggggacgggagggattccgtctcgccagaagggagccatgacggccgttcccagcaggcagtaaacaatcagactagagggagtgcaagtccttggggggatagacggtcgccgaacatatcagacctgatacagcaggccttggaggagccgcgaggcgataggatcgggcaggaagtggtggatctgcagatgctgctggataccgggcaaatattcaggccaccagagaacatcgagcaacacttgtcaggctttacttcctcggccagcctcgaagacggcagctggagaccctcgccgtcacagatctcgaccgcgtgcgctctcttctttgctcatgtctcgcactttgtccctttcctccatcaacccacttttgacgccgaccagacacccctccatctgttgctgagcatgctatctctcgccttccagtacggctccgatccagactcggacacgcaagccccagactctggcgctcttctctcagcccgctgcttccaccgcgcccgcgcccttctgaccagttccagcaccgcaggccctctctcaaccgtccaatcctacctcctcctccagatagcctcgatgatgtacctctgctcggaatcccaccacacgcttcagatgcactcggccagtatctcccttgcccgcacctcaggtctcatgcaacgaacagctctcgaaacgtcgacgtctacatcgctcaccaccctctggcacgcattcgtgtctgcagagtcccataaacgcaccctcttcgccctccaccagattgacgctctctggtaccagttcctctccgtgccgcgctccatctcgcatcttgagatcaagcacgatctcccatgtccgagggagcagtgggttgcggcctcggcagaggagtgggcgcatgggcagctcatccggggacagacggggccacagtcgctccagtacgttgacgcagttcgacggttcctttcccaagagtccctgctcagcctcccggtattcgacccttatggcgcaatcaatatcgcgcaatttctcatctcctctgcgcgcgagatttccggctggtcgacgatgacagggatgctaagtatcgaccgcttcggagcgctacggtcgtcgcttgagacgctgcacccgttcatctgcccagcccatccgtctctgtccccagtctcatcaagcgcccctccagcgcaggatgctttatgccccgctacctggcagacggccatgctcgagctccagatctggtcgccggctcatacatcaggcataatccagacgtcgataagctcgctcctggaacacagtacacagatccacctctccccgtcgccgcagattctgtgcgaagaaataacggctcaggctatcaagccacatattgactggttcttgacctatctggaaaacacagttgatgctgagggagaggcaccctgggtggtggtgtatgcatacaaggcgttcctcattgcgtggcagcttgttcgagggggcgtcgagggggcgatgagggttgttggggtgcatgatggggatgtcataggcgcaatggagtgggcaagagtcgtttttgctcggcggaagaggtgggaggttggacgcttagttatggggtgtttggataggttagctacggatatcaatacatgagtctaatcatgttgtacttgtcttttggctcttaataatcccgataaaatgatggagtttcgtcgcttcactttcgctgtttaagctattacaaatcaataatatccagggcgggcctatgcctcatcgcaatcaccacttattgcctacagtatacgagcaaaggactacctaatacatctcatacctccaccccaggccaaccatctcccttgtgactccattcttgatgaccttttcgatctcttcctcaactcctgaatccaggcgccgattctccctgcgcacaatccaccggtaaacagtgaccgtaatgcccaagcagacacctgccccaatcaacgccccgaacgccgccataaatctcggttcgtcgtagtaaaggtaagaggcccagatattcgatgtgcctccaatcgcattgaccagtgcagatgccgccgcccgtttactcacgggtcgagcaagatgcagattgatcgtcttgtagaggaggagctgcgggcccacggacgcaaaggggagtatcatcatgctaaagtaccgagcccccacgttcaatgtcgccatcgggatgatgtacattaccacggtgatagccacgcagatcaccc

SEQ ID NO: 2354 - DNA, 2492 bp, Emericella nidulans
  unsure (1)..(2492): unsure at all n locations
ttcctgttaagaagttgagagtagttatataattggtattggttataacatcacaatagaacaatatcttcaccttcattgcacttattctattaagaaactgtatatttttatcatataacatagatagagagaagtaaacgtcaccaaaaaaaaaagtagaaaaagaccctggagtggcggcagaaagcctgcagcaattaggcgcacagtaacaaagtcaggccactatttaatgcagcaccatatttcccagcccttcagcgatcagtgaccatctggcaccatcagggttttccattgttgcgccattgaatcattccactgtcatcatcaagccggaccattattcaagattcggcaaggcactcccgagtaccctgtaggcataactcctggaagtgtaggtaatctagtaagtggtaccaaactcgcgtcatcggtcggaatcgcaccctccaggaacttccagaacttccgaggctatgatatcaaaaatcaggagtccggcagtctggaccttgacaaattgatcggacccatcgagtcatttatgtttaggtaagaccgcagaaagctcagacgtacagctcaggtgaaaatttaggttgcgatgccgaatccgagctgctgctagggaaagcccggagcgaacccggaaaactccgtagacatgcaatgcagctcggcgatgaggcaatttggcaccattcgcgaagctgatgctgagcttagcgtcttgggcatcgtcgcatcataaagggactctacggcataatagaatatgccatatagggcaaaatacgtacgaaagtgggccgggatccggccttccgtgaaaatcgtccggtggatctcgctttgttgttctgcaacaattttttccagggccaggccgatgtaggagttccatcacctgattgggctatagtgagtcacaccatgcgctgcagtcattctgccatggggatccatcatggtttcatgctgtatataaggagctaggtctcctcagcgacctgaagctccctcccctttcccttctttacctcatctcgtcctttcaagggggtgatggtcattcccctctttactgtctagggttgttatctcttggtatttgttttgctcttcgcctatacttcctatacttccaccgtgcccttgagacagagagggaagggggaacatacaaaaagaaatacccaccgaaaagttatcgcgcttctttcgtgtatagaatgggacagaggcacaaccgacgacgaacccgccctcgatctcgaaactccgtcaataaaacgctgactccgagtgctatatctcctccagccgacttgctctgcacctcgtcctatcggtactctctcgactgtctagaaaaccgcccggcctcgacccggcactatcgggggttgacatggcagccttctgagtacctgaaaccggacatgatcatcatggagacggagcaattccggctctttggaggcgagcctggggatgacgtggatctttgctatcgcatgctcgagtattttggaggactcgattttatagatccgtgagttccctcgaactggcattaccacgcgaagctcgctctgacatcgttgcattttcagtctgcaggagttcaaaccgttgcctgggtgaagatcgttcagtgaatcttggcgaacatcttgacgatatttcgttgtgctgccgccagtggacatgaacaaatagaaaaaaagctctggaaagacgattcgactaaaaatctcgacctgattcgattatccgacaaccgccctaattcggaaaaaagtttgtgtgtgacagggagatcactcctcccttaaggcgcaagcaccagtttacatggatcacccaagtcaccgacttgtagcaatgaagattctttgagaatcggattggtctattcaaaacttggccatgtgacttctggttgagaccctctgccctagcgacattgagccgccttcagactaggcttgctcggtgggttgagttcgcggccgatcagccacggctggctgactcgttgacgcttgaattccccatggatgagtcgcgacgttggatgcatcatgtttgcgtacatagtaccatcgcagggtttaggaatctcatgcttgtagccagtcctcagcatcaggaaatcacggcgaggggtgtctgtatgaaccagcacgtcatgtggtgtacctgctcaagggacaccgttagcaggctcaaaaacgcgaacgtccacctgattagagtcgtctcgatcacatgtgtgccatatttttcatggctttattagagtaacgagtgtcttttgatgaacaaattaaatataaatagcattaaaagacaattacgtgataatgaaagattnttggaaatatgaatgggtattggattnnnggatggggacccagagaggggtcccagtaatagccttgtggccttattctggaatgaaaggccgtgagtgataa

SEQ ID NO: 2355 - DNA, 1645 bp, Emericella nidulans
tcaactaagcatatctcgtccagtccctctagatgtccggatgaggtttcccgccggacctccaggtccgatgaattgggacttcctgcagaaacagccactcttgatcgagttcatggccgatctaaggtccgctgtcgccggtaaactaatcgtcctattgaagtgcggcaactgtccctaaattttgaaggagaaaaaaaaaaaaagcacggtacacaccttggacacctgatcgacctcattcttcccctgcagaagcggctctttcgtaagaagctccccgaatatacaccccacactccacatatcaacctcaggaccgtaactctccgcacccaacagaagctccggggagcggtaccaaagcgtcacaacgagttgcgttagttttggcggagggtctccgtagtagcgtgccattccaaaatcagcgatcttgagctcgccgcggttattcaaaaggaggttggatgtcttgagatcacggtgcattatccattgcgagtgaagaaagtcgagaccagagatgaactggaggagaagggttttggtttcggacgggagaaatggttctcgcatgtcgtcgaggagggtcttgagatcgtgttcgaggaagtccattacgaggtagactctaaatatgccggagaagggggagaagcctcccccgggtttgatggttaacattatgtatctgatacttttcatggtggaggagcatgcgatgagaggagtagagggaagagggctaaagaccctcgtatggggcatgaataggccgggctatgaatcataggggttggtaatcaggcttactcgtccattttgtttcccatgacgacctcgcggaggtaaacaacgttttgatggcgcgcttcaagaagagtctggatctcccgaagtccagttacggggaacccgtcgggggaattgtctagcttgagcttcttcagggcaacgacttcgccggttgtgagctcctttgcgcggctaacccagccgtatgagccttcttcaatatggttcaggcgctcgaagttgtccacatggcgacagggtccccattccaacgcggggaattgtaacagtgtcgttggtttcccttgtttcgcagcctgctcaccgctggatcccggctgctgctcatttgagagccgtcgacgcttcttcggaggcgcttcactggggtcgccattgagcctggaatcaccggcttggcgttccgctgcagcttgagccttagcttgctcttcgagtcgctgcttctcggccttagcccgtcgcttctcctccttttcgcgcttgcgctgggcaatgagcgcttctgtctcgggatcttcgtcggcccatctggatttagaggtcgacattgcagtggatgcggatgcagagtcgagacgcgaggtggagaataacagttggtgttggaaattggagacatgacgctatcggaccggggaaacctggggcctgaaagttcaggccgtcatcggatttcaaatcatccccgcttgtcccgccattaagtacttgtactcagacaaccagcttaaacaaccgccttactcttactattctcgctgagacatcttgctctccattgttatacaccagatcataatgattgagccatttcaagtat

SEQ ID NO: 2356 - DNA, 1978 bp, Emericella nidulans
tcatgatggcattggttgaccttttcgagcatgatctgatggatgcgcgggtatcgatatggcgcacacgctttgtggatcttgccaacgcccttgtggacgccgtggactcaacttctggcgcctggtggcaggtcatgtctgcgcctgggcaggaaggcaactatatcgagtcaagtgggtctgcaatgtttgtctatgctttatacaagggtgtgagggttggtattctacctgcgccagaaaaaggcggggaggcttatatcgaagtcgcggagagggcctacagcgagcttgtaaagcgattcattgttgagaacgaggacggcacgcttagttataatggaaccgtgggtgtctgcagcttgaactcaacggcgacgtatgacgtacgtttgcaaattgactgaacattattttgtgaggcgctgactgagtgagctacagtactatatccaccaaccgcttgtctacgacagcgtcttgggctctgcggcttttattcgcgccagtacagagcacgagttgcaccttgaagcttctttgaatctctgaacgccggcatattgtccggtctcctctgccagaatcccacgagaacaagaagatggacaggcgtctgcattcacctttcgagaaatgatgcgttcgacggggtacaatttagggagtggaacagtatatatgagagcaatatgaatagcgaaaactgatgcttacgttagtgacttgattgcttcttgaaggttgcgtaacttataagaaacatgatcaagcaatattcatacttaagtaaagctcatcctctggcggcccatataagtcacttagcccattacgttgacaacaatcttcttgaggctggacagccgtgtccctagtctaccatattgccaaaaggtacaaagaacaatcatattgtgcattcttccataacgggtttaaacaattttctagtacaactacatatttgaccgtcgatatttggcgacatatgtcagaaatgcaaggatagtcgcctcgaaaaccgtagttagcgaggcaatgggtacgccagagccttcgatatgctgtagatggcaggtgcaagatgcggtcagattgcttatcaagagacgaatacagtcctggagaaacccaggatctcacgagctcatttttttattcgtccactcctggacgctttggtgagccatcaccatgtcactagtcccgcctgcctggtacgttgatacatcatcacccttgccacgccaccaattctcacagaacaactagagagccgattcattcctcttccatgaacccaaacctggttgcgtttctctacaaatgtttagctaacctagccgtaatatacctgcaaaaggatatgtaaaggacgaaaagaacctccgcggggccgaacccgtcaaaggttaagctgctgacttgtcgacataaactaataatgacagtccagaaaggagcaggcttgttatttctggtggtggaacggtcgagcatccattcaatcgcaggagatccgcatccttgagaagggggaatagccccaaaaccctgggtaagaaaccgggcttgctactttagaggaagaaaccgggtaccccttgggcaacagcaggcggtgtttgaaaatttgcaaaacatcatttagcaaagggcttaccctaacccggataaatggtagagaaggttggtttacaaaagcactgcaaagtatatgccgcgtgaaacaatttatgagctgtattcactctttggaggggctagggcctgaagttgtagtctcttcgaagcccaaccgtgtattgctgttggggaacttggaattttccttagacgaacaagttgggatccatccgtattggttttataaggccaaagagatttgggcccttgggggggtcccgggtaaagaaatcctctccggggtgtgtgggactcatttctcctacatcttcttctcacattacac

SEQ ID NO: 2357 - DNA, 996 bp, Emericella nidulans
acctaaattcttatgctctggattcctcgtcacgctacgtgatcgtgcttcgatcagcggtggacaagcttatcttgtcattttcaagctcttctacttctcatcgtctttctacactatatttctgatgatgaaagtgttcccccgaactcgagaacgagaaagggcgtggaagatgacgttaggatccgttgggatctcgttagttctcgctcccattgtgcatcttatctttggggagagacattccacacggccattgttggaagacgtaagtcgagctacctgattcactcgctgttgctctttaaagaaaaaaaatactgactgcgattactcaccgtaggtcttatggacattctctatcattttggagtcagtttgcgtccttccgcaattgttactccttcgccagacaactgtgcctactgttatcaactcatactaccttttgatgctgggctcttaccgagcgttttacatcataaactggtttgtagggcagttggatctgagcatcaagtggactggatatccatcatctttggatcgttcaaacggctttctacgccgactttgcctgggtctactatacccgacagcgagttaagctgcggaatggaggggtggtcgactcggaagattaccggaacagttatcttgtgaacaaggtgttgaacattagacggcgtagaagctaagacgaagaagagcagagactgcacgaccaggatgacggcgatgagcaccagtcgagatataaccgatggggtgcacgaggaatctccgtctccgcagacgacacattagagaatcagcggaacgggcgctcctccccggcggatcatgatgcggggggattctcagaggatgataggaactagagattgattgcctcagagcgggggatcttcctggtaatctggctgaccaggttaccaggaagatttctaatggatttgctgaacgcctcagattaatccctacattgtatac

SEQ ID NO: 2358 - DNA, 1152 bp, Emericella nidulans
gcgaatatttttggggagactgatgcgctgactgttttctatgttttttccggagatttggactcttcggtcttgtggcctgttttccggatctgaagcatatgtggcgttggtgttgtttactctctgacaaagaccttgtacaatatactactcatgtataatgcatatacataattactagaatttcaaatgctcataggacaatcttgttgcattagtttatagtagccattgcacccttttcccaccgcagcgttgacaagttggggcttcgcgaccgcctattttctgccgggaatgcgtacgtaatgggcggagcggaaagccactctagcctcagtgaaacaagcaaacaggagcagcacgaggcgcaacaaaccttcgtatctcatcgctcaaggcacaataacaaagccgtcggtgcaagctctgctctctggtagagcagctcacctatgaattggtagtgtcctcggcaagtgaaccatccagcttagcacatacaccctacatacactctgaacccagaaagaccatagcaatggccagctcaagtacaccgtactacgtccacgatgacccccgtgacgacgagtcgattctggatgatggagtgattgaggccgatgaaggtgagttgcgttcctaagtcaattgtcttctggcttttgactaacattatgcttcctgtcctcagcaattgaggccgacgaccctctccacgagacagaccgaacccccctccgcggtaacatcgaaccagactcgtcgacttcgcgcggcggcaatggcaccagtggcatttccggcggctatctgacctcccgcattcctggcgaagaccgccgcgcacctcagaacaccatcgacgagagtgtatggcagacgctttcgcgcgatctcctcgccgtgtgggagaagatgcgccaggtcctctaccccaagtacctggtcggcggtatgttgcagcgcggtgggggcggtattggggccgcggagcgcggggaagcgtcaggtttcggaggcggcgtgaggaatttacttgggcgctggccccatgctgacgttgtgttgcagggagggatgagcgaggggctaagagattgggatttatggtgagttgtcacatgcttgaaggagatgccctga

SEQ ID NO: 2359 - DNA, 2054 bp, Emericella nidulans
tgccgccgaagatacagcgacgaccgaggagtcggtagctgtcatcttgataagcacggataaagaaagcttcttcgagttgcaggccatgaagaatgcacttgtagaggtccgtatctagacgtgttcccgcttttgaacaaaaaccttgctaattcttatatccagaaactggaagagaatggcagcattaataacattaaagaagccattgacaagggccgaccaagtacaacggacatagtcccagggtcagtcctgcatcactttgtatataaatcccgcgtcaatgtccaattcatcatgtccgcgtatgacccggagttctcaaccatcacccgacgccgaaggtatgtcacgtcgaacttaagagtcaataacagcacctaactaggataaaaactagactgatatcaacatataataatctccacgcaagcgtccacgccaaacacacccatgtcaaagtccaccactgcgtcactcagtcctcaagctcctttgcatggataacgccagttttcgaactctactgtgtagctgggccgcatgcgaaccggaatgcgctggcgcaaagcgccagcaaggttgtgcaatgggtgcagaaggaagaagagcggctgtttataattagtggagcggtgagtcatgctttatttgtgatcgtatatgcaccgactgatttgttacaggtcttttgagcttgtttagccctttctagattgtatgtacatcaacccatactgcccgatagagtagataactaggtatgaacgtgtactaagaatgatctaacgttattcttgtctttatctccgagcgaagtaaacagaacgtttactgaacgcgcaactggtcaggtccatcgcatttgccatgtatgcttgacgcaatctaggaagattcgatttgcgtgactgcccagtcctcgtcttaggtacttattgcgcttgccttctcaggttggccacggcgtctaatctatcgtatcgtccctcagcgcaaaaagctgctggaagagctcagctgatttactccgaatcgcattatggtacatcgcattcgtgatgaactgcttaatacctgtgatcttcgcagcggtggtttgcgagtgatcgtagtgtacgtacatatcttctatgtatgtcgctgcgtacacggggacttcgttcttcgctagctgcgcctcgtcgtagagggcgggccagtcggtcgttgaggcgaggatctctgctgcttctctgacttggttaagttcggtgtaagagtcaaacatgtctttgtatatctattcaagtctggggttagtttgatgtttagtttggccttgatggaacgggtttgatatgtgtacgcaccatctctcccgtgaaaaggacttctggtgcatttgtgtcaaggctgaagactgggttcgatgaccggagtctgtctgcggaccagttggaggcctctctgtttcagttagcgatattagcgatattgatgcagggcagtcagagttgtaatacccctggcagtagatggactcgtggaggatagcatagatgatattgctgtcgaagccgccaaagctatcaatagccaccagagtaggatgggtgaggaagccgaaaacctccagatcgctggcggcgcgcaatataagatctacttaggttcagcagagggaccgtctatgtctttgaggcttaaataccatgaacgctatcaagcccacctacttcctgttagcggctagttctgaattattaaacaggtcatggattggccataccatgcatgccaaacatgattcccagttgctggatgcgttcaggaataagcgtcccagatggtacgctaaccttgttctgcttcaaatggtcgacgacctttttcacccgatagacgtcttccggaaacttggcatagtacgccttgtttctctcaattaccttttctactatatgtaagcagcaggaccccagagcaagtgggtggacgcaccgtaagtacgggagtagacaggatccggtcccgttgacaaggggcggaacgcccgcacgatgaat

SEQ ID NO: 2360 - DNA, 1608 bp, Emericella nidulans
gctaggggagatgtcatcaagtaagtaatgacacccatctacttttgccaggtcgccatccaacgtcaatgctcgatggctgcgtcagtatcaaacaagaggtgcagttcgccgactcgcgttaccctcaatagctcttaaattccgatacggccaaaagcgcaattagagggttttggatcggatcctgttcttcaggcagtcgctgttgcagagactatccgttgggttcagagtaatggtgttatggctacagccaaacgctacatcttggcggtatagattggcctgtgacaactgccaggatgacacgtctttacggggcggcgctatcgctcccctatgttcgtctgatatagaccgcaagatacatcatatggatgaatcatatgggctagcgtggaagccagcttggcgcttcgctcactttctgtcagcgcagtatatgaagattccagagccaacctcaggatatgggatcgagaagagaggttaccagataagcaagacgactggattgttaagagatacgagagattggatgtgcatccacgatactatgcaactctatatcaaagcaataaccagataacgctcagagaatacacagtactttctatatacagaacggaagcaggacgcctctagaccaggaaatcaggaacccataatgacaggcacggcaaggttcaggttgtcaaaccagaacatcaggcctaacaaggataagttacatccttgtgagtgtttgtctgatttccctgtccggacccgtctgtctcccagtacttaacctgcttgccactgatcaagccggcgatatcaaagggatcaatgaatgtaacataccaaggccggggatcctggaaaccagggccctcgacttcggtcaccccgtctttagcaaggtagattttgttcgaacggggcaagaaccgcatcggatgaaagatgttgagcatcgtggtgttagcatacatgatgaccacctcaaaaaaccaaaagaaccactcgttccggatgatagggttgacgtcgttcgggtcgtcccagctatgctgcccggctgcagtgaaatattcgacggtgcggaaaacggtgcgtgtggttatgaaggtgcaactgcagtataggacggtgaggacgctcttgagcttcttggtgagaagtccggcgcgatagcatttcacttggaagtaaacagcaagagacacaaatccggccatgactacaagctgcaggatcagggcagctttaagcaagccatcgccgatttcccgccgcctctgcgttgcctccacatttgctagctgtgctgccccgtttgccgtcaagacttctacaaaagcgaggaagccgagaaaggtcgagaacacgcgtccagggtgtataggtgaaaggtaagggatgtagtagagtatgcggccgagaataaagaagttggcgccctcgtatacaggcctgatgacattagcaaagcccatatcgcaatgtgtaggatttactcacggcccagccagaaggaagacagtgctcgcgatatagatcggtacattgtcccactcaccaaaggcgcctatagccctcagaataaagccgacagtaatg

SEQ ID NO: 2361 - DNA, 1194 bp, Emericella nidulans
cgggccagtttcctgagacgggtaagctaagttccaaggattagtaggaaggaatcgagaacttaccccttgagaagacctaggtggtattctgataataactagttagtcgacttatacttaagatttgccatgatatgtacgtacccgtggccttgttctctatactcgagttagttgcgggtttgctttctgatagagtagattattgaacttactctgcgtccttcgcatctcatcctcgatcctgtcagatagcaaaaatgagtaccacatcccatcaactcatcatcttacccacatactccttgatcttctctgtgatgttcaccatctcgctggttgaagagccccgcggactcagatatcggatttgaatagccgtatacaccagatgccagggtttgagtagtccaaaggcctgaggcgcactatttgaaacaagcagcaacagactacacaagttaatcggttccccggattcagtactctccaaacttgtcgcggaatctccgcagcttcaaattcgttgtgatgccaaggcctaatctggcttaagtaatcatcggcctagttctctgaaattcccgcctttatcaataacgtcaaacaacctcattcaatcaactcaaacatttagcgatggcagacacagcagtgatcgatacatcacctgcagcggccacagcagagccgtcagtcgatacaacgccgcaagatggcgaaagagaagaaataacaccaaatggagagaacgctcttgtccagcaacaatcagaaaccgccgaaacaggtatcacagacgcgaacagcacacagaagaaaacgaagaagatcattcggcggaaacgacgacctgcacggccacaggttgaccctgcgacgttaaagtccgagcctcccccacaaacaggaacggtgttcaacatctggtacaataagtggtctggcggcgatcgcgaggacaagtatctttcgaaaactgcggccccgtcacggatgcaacatcgcaagagatagtggatatacgcgcgcaaataaagtgcgggggctcttatttctgtttgttttttgctcgggggggtatggttttttcacccaaaaaaaaaacttggtctaccgcgttaaaaaaaaagctttgcttaacagggttacccggccagaatatgccccccaaaagggcccatgaaaggc

SEQ ID NO: 2362 - DNA, 556 bp, Emericella nidulans
tacgtcgtagtgcggggaattgtcgaattattctctcccatggcgggggaacgttgcctttcgtcgccggccggatcgccgatatggggctccaaactcacatatctggaaagtcagccgatgagttcctcgccgatgctaggctgttttatttcgatctggccctggtcggacatgcgatgccgcttcagcttgtgatggatttcgcttctgatgggcatgtcttgtacggcactgactacccggcggttaaagatggagacgtcgctcaacagtggatggccgtaggtgataagccgctaattgctgcaacgcgcatggctgcacagaccctttttccgcgcttggcagagtagagagcccgagactggcatgagcgagtagacggccaagccacgctctccattctaacacttgccaccacgagtgtagaggaaatttgtacggcattgaagtatgagatcaatcagtcgaaatacaactaactccatagcaaaacctaccagcggacaagaagaacaggcgaatcaaggcttatgcgatattgagctttaga

SEQ ID NO: 2363 - DNA, 1330 bp, Emericella nidulans
acagggggggtaaacgcggcgcgatttgattgccttaaagttaacctcttgggtggggaccccagccgggtaaaatttgaactcggtcactttggaacaccatctcggaccctaaaaaaaaagccgttcaactttaggcaaaaatgccttgggccctcttatttggaccaagaacgccggaatggtttaacaacggggggttccaatcccccctaacggtttaaaaacgaggggtcacagcccccaaagatcccaggccccaattaacaagggcatttacccaccctcccctaattttcaagttccctgttcccttcttgggcctgcccttttcatttggtagccgacataggccgtccgcacggagtctcgggtttcctgggcgttgatggatcagaagcttgacctcaggtgaggacccttaagcacggctaactcgaacgctacaatgatcttgttgtcaagactagtgtgaagtcggtgatcttgctttcgcacattgtaggtggccgctgtatatcatacagagcatattctttggagccgcttatatcatgtggcgttctcctgcttgggattggtcaggtcgtcgcggaccttaagaagctcagcacgaccgaccatctcattgatggtacgaattcccagctttgccatgatagcccgcagctcattggcgatgtagtagaagaagttgatcacgtgctccggctggccctcaaactttttgcgaagctcaggatcctgggtagctataccgacctaaagaattaattaataaatgtagataatacaacaagggtgaactgctgggggaaccaacagggcaggtatttaggtgacatttccctatacaccaaattagcggctgcaatgatacgtataccggacagggatccttactcatcataatgcaccccatggcgatcaaaggagtcgtggcgaagccaaattcttcagcaccgagaagacaagcaacagcgacatcgcgtccagtgcggatctgaccatcagtctgaacaataacacggccacggagatcgttgagcacgagggtctggtgagtctctgcgagacccaactcccaaggaagaccggcatacttgataccagtccagcgagaagcaccggtaccaccgtcgtgaccagagatgagaatgtggtccgccttggccttagccacaccagaggcgacaataccaactccgacctcggaaactagcttgacggagacgcgagcacgggggttagagcacttgagatcatagataagttgcttaagatcctcaatggagtagatgtcatggtgtggcggaggtgagatgagacg

SEQ ID NO: 2364 - DNA, 1643 bp, Emericella nidulans
  unsure (1)..(1643): unsure at all n locations
ttctgcaaactgtatgctcaccgtatacgcaagaacgcatcaagaactcgatcctctttgaaagacatctatagcttagagcctgcttgtctgcgcatagccgcctcctggtcacgaagtagccgtcgcaagatctttccgctagggctcttgggaacagtgtcgatgaatctcacaccacccttaagccatttgtgtcgcgctttatgatcctgcacatatttgacgatcgacttgactgtagcctcgtcatctggtcccgcctcaggtgacttagatacaattgctttaggtacctcaccggcagcgtcatcggggatggcgatgacagcgcaatctgccaccgctgggtgggtgaggagatgcgcttcaagctcggctggagcgacttggtgaccctagcacgcaggttagttatcggggggtcatgctttcctgtacattgctacgaaccttgactttgatcagctccttgattcggtcgacaatgaacacatgttcattgcccttggggctcttccgaatcacggcttcatcaccggtatgcatccatccatcgccaaacgtctctttggtagctttctcattgttgagatagccaagaacgacgctgggagctcggacccagagctcaccaggggtgtcatacttggtaatatcctccccttctggggtcacgatacgtgcctctacgccggggataagccaaccggaagacccaggcacgatgtcatcaaagtgtgtggccgtgacgaccgttgatgtctcggtaaggcctgtgaatcgaaatcagtaatctatcggtcatactcatgaagctgatgacctaccatatgcctgccgaatagcaaccttcggatatctcttttgaaagtcgagagcggtctcttgacccagtggtgcgcgcccagtcacgagcgccaccgccgagttaaggtcatactcagcgcatatttctgggctccgaagcatagtgataatgatcggaggaaccttgcagctcgttagataggttcgcttccggacaggataagacttaccacaaacaaaacagagatcttgaatctttggacggcggccaaacacgacctcaactcgaacttgggaagaactatgacttgatctccccggaaggtcccagcatggcagataacaaccagtccgtaaatatggctctgggggagcaggcccagcaagacgtcactatagtagctgccgtccgcattcttgcgggtatcacgccatgatttctctaaagccgtcatctgcagaacatttgcaataacattgcggtgcgcaatcattactcctttctaatgctctgtcagcgctcaagaaatgccccttatctggagggtggttacttacaggtaaccctgacgttccgctagaatagcatagataggcagttcgacgcgcgccctcgcctgccccccatttgagcttctccaacttcggaagagactttccttcctcgacgatctgtgagagtgtcttaaattccggcgggatcttcccgctaccgggcaacacatcaatcaaataaatacggtctttaggtagccctgccgcaaatgccgctttcagagcccgtgggagaagcgnaacgcaagtgaacatagcctttgctttttgatcgagta

SEQ ID NO: 2365 - DNA, 3683 bp, Emericella nidulans
tttaaggtcttcattattggccggcgggaaggtgtccttcaggaaacagccgcttctgccgtcaacggatcgatcattcctgtcactgcggatgtgacgtctaaagagtcactgcaagccgcctacgacacctttgcttctcagaccgaccacattgacctgctagttgccaacagcggaatcgcaggtcccattacaaacacagagatccagcccgattgctatcccaccctatccgagtttcgcgaccagttctggtcgatccccatggaggaattcacaaatgtgtcccatgtcaatgtcacgggagcgttctacaccatattggcattcttgccgctgcttgaagcccagaacaagaaacgaccggcgccgataccgggcactgtatcctctcccaaaccacaagtgatcattacaggctcaattgcagggtttacccgccttgcacttcccggcttcccatacaatctatccaaggcagcagtgacccatatggttaagatgcttgcgacaaccttcagtcaatacgacatgcgtgtcaatggtatcacaccaggtctttatcgtactgacatgtcgttgccgttttacaagtcgcagggtgtacgtgggaatgggaccgaggatgggtcgtttccacgatctatggttcccgtcacaaggagtggtagtgaagaagacatggccggcattatactctggatggctggtgccgcggggggatacctgaacgggaatattgtcgttagtgatggaggctcggtgagtgttgtgccctcgacttattaaggtggttggtagaggacccggtattttcctttatatatgtaatacaggatgtcaaattgaccgcgaaggattcctatcaaagttaccacaatagttggcttgttctcccagaactgtgggtctgaatcattccgttaaaatagaggcccctgctttgtgatagctccaagagccaaatcctgcaatctctacactatctccttcatataaactgtgagtggttacttattgcagtgttattagtctgaatgcctcacatgacctcagctagcgcacactgtatctcatctcatctcacgcatagcttcaatacaccttagcctccacgttcaacatcaacgtttttcaattctcgacgtcttccatgtattgatcactcaaaatgggaaagaagacatggagaatgcttggtaaggagcccaagctcccatagacaactcgtctttgagtataactcatcgctattcgcaaagaacaaccccaatgtaatgaaccagttggcgacgaagttgggtctatcgtccgagctccaattctacgacgtatattccctgaatgaacccgagcaacttgcccacattcctcgacctgcctttgctctgctggtcgttattccgcttacaccagcttgggatgaaagtcgcaaggccgaggacgctgacaaagaaccctatactggttccgggactgatgaaccggtcatctggtacaagcaaaccattggccacgcctgcggattgatcggtctgctccatagcttgtttaacggtccggccgtcgacttatcaagcttgactcctttactggtcgtcctgtactgcttaagcacaaaagcgttctcattctttcacccgtcagccttttgcattgctcaaatagctgcagataccccagtcatcatcttccgaatcagcattgttgccatcgtcctgtatttcatggtcggcttgaccatttcagcgtccgcccttttcgcatacgggcttattctttttgcaggaaccatggtaagtgcataatctgcacgcacaaccatactatatcaatgctgcgttcactcattgtcttagtgcatgacagccatgttccgcgcgattggtgctgcttttgactctttcgatgcagcttcgtaagtctcgggattttctatctctgctctggtcatgtacaccgggtatatgattcagaagccggaaatgcacccatgattcgtctggattttctggattgatccactagcgtacgccttcgaaagcctcatgggaacggaatttcatggggttgggttaaaataaattgctagatccataggcggtttactgttcaggtaaccaccccaaaacccgccccaacccgtggtttaactagtctacttaccgtcgaggtccaggacgcgattagccggacattcaaactccattagttaaaccggggtaggcagatgttaggatgaacagggacacttgaaattcttatcgaatactataatgttatcgcgcgcctagcctgccttaggctagcacgtgctactgtggaatgggatggacaattgtcattattggctggccgacgtggccgccttatatctagtttactaaataatgactaagcgagctcgaccctaaggggcaggcggtgccataggacagtatgtcctgacaagagtcctgtggaacataaaagcagccagatcctcgcaatcgtctcctcccctttatacgtcctatgtgttcgaaatatgacacttattcatcttgtacatacacctgacaataccaaacatcccgcaaataagtgaaggaatccacagcaagcacgaacttatctttgcttcactgcacccagaaaatcattattttatctttttccgttagcgaaaggcatgggtgaccggttaccttttgaggtgctgttgcacattgcggagtgcttagaggaagaccgtgactctctcgtgcagtgtactcgagtatgcacgcggtggaaggcagtctttgagagactcctttacagaagattacacgtcctcagcaatgatcttggtgtcagtgtaggagacttatctctgacacgttttcaagctctcacttcagcggctggtaccgcgcggcgctcttatataaagcacttaatttaccatattgtgttgccatatgatgtgggagcttggcccggtgacacgccagacggcgaggcaaacccttttcagaaggcaaacgatgctgtgtttggagtggctgtcatcagcctatttactgctctactttcatgggaaaacacgcggttcaaactaacgttccaattagtgggttgtctggatagttatgaactcgggatggaggaaacctctgttgacgggctagaggaagaatcaattcctccgccatatcaagctcgactcccttccattgaactctttgaactgcctgaaattgagagtatcgataaattttttgtttcagattatcttctcggctcggtggggatagggaacagaactgcaattgagatagctcattgttttcctaagcttcagtctttagagttgagtctcattacccatgacgatccagacttccaaatcaatagccgaaaaggtatgagatgaacttctctttttctccctcaagctggctactgacaaatcggatattttgccaactatgctgatgttacgtttctagaactgatacagggtatcaagaaactaccacctactctcaaaacgtttcgttattcggagcattatagcgaattcatcgatagagagcttcagtctgtcgattttctattgggcgaaagcgatatgcttacgccgactctgcgggagttctccttgcagttaagggagctaaagctgataggggtagctattgccccagaccttctat

SEQ ID NO: 2366 - DNA, 449 bp, Emericella nidulans
ttgacaagcacgggttgtaatttatgatctcaggcgaaaccgcatgaggtccttaggaggcacacgggcaacgtaaagccaaatatgcccagggtgattaaacagcactattcaagcaaattccaatctttcgcaccagtcgaatcgatcagaaatcgggagcaggatcaacctgatcaagaataaaacaggtactgagagcgacgaaggatgcaaaagacgccggaccgaaagcaagcagacttaatcaacaagggacattgagtcagaagtagcagcagtatcgtgcttgcgtgtttttgagtcggcgattgagaatccctctctttaatgtacgctgtatcggtactttcactgcccagcgctacctatgagttcggccccagggaaaagacgagccaggcaaggacggggacagagagagatggtactgtggcgacagtgaccga

SEQ ID NO: 2367 - DNA, 1457 bp, Emericella nidulans
tggctctcagcttaaggtgtgatcccaggccttggagataggcctgcactggaaagcagcggtgcaaacgttggcaatggcttggcaggcgacgatgccgaacatgatataggacattcggcggaggtacttgtcgcccaggcgggtatagaaccagcagacagaggttttgacgaagccgagacaggatagatagaacatggagctcagccagacgttctagtagtttagcatggttcgcctaaagggggaaaggagaggcttacaaacgcataggtgaccatgttgcttgggtctacatcgtcaaggtgcatgcctagaccatgcttgacggctgcagtgtgaattattcgtcagttaccaatcttccagagtcctgcagcacactctggctctcactcacccacaattgtcacagcggagaaggcccaggagaagccctacagagttaactgatcagctgtcgattgttccagagttttggccagtgttttgaccagtgtttgaccagacggtgttcgttgaagtactcacacaggcaaagataattagagcatcgtcaacatcgaatttcttgagaacatagagtcgagcaaagagacgcaggaggatgacaaagacagtgatgatggcgaaagccagcgcgataccggtcactgtcggaccctgggtttcaaccatgatggaggagcaatggggtttggcactgtagagaaagcttaacagacggcctcgaccaccaaaggggacaatataggtctgccactcagtgagagcagtcgagcccgccctgaagaaaacggtccagaggttccgccaggctggatactataaaccttgagagttggcaggccggggagcaggagccacttggggaaaccctgagaaagcctggtgaatccagagaaaaggaaaagagcgttcgtcgttgacagaccgatggggcattccccctgaacggacttggatgatggacaatattgcatgcgactggtgtctcatccttgcttgcttcttttgcgctccttggcccttgtgcctgtctctgatatggactactggtaccggttactgttcgtgtgtcccgcttcaatcgagaacaggaccgctgattgggggtccagatcgaggccgcggcacggcggagccatgcgttgtctccgtgatcgggactatattggactgctcagactatagtgctcagtaccctcagcgttctgggcacagactcggccatctctggcgctaggactcaatcggaaagcaatcggcgccacaggatcctggccgatggagacacctcggaagtcatcctgcagattggatgccgcggccgactaggccgctgaggggaagaggaacgctctggaggtcatcattattactcaagtctgtggaggcgaatcgacctggcggtgcggtagccaggagcccacggagaccaaaacggtctggtc

SEQ ID NO: 2368 - DNA, 1889 bp, Emericella nidulans
gttggtatggttggtgttaacactggtttgattagtgatgttgcgtctccgtaagttgttctttcaagttccctgtcgttcagaggtgcagtttcgggctaactatttgtctagattcggtggtgtcaagcaaagtggctttggtcgtgaaggtagcaagtatggtattgaggagttcatgacaattaagagtgttacttttggtgggatgggtgagcctttgcagtcgtgagaaaatatagatgaaggtctggcattagttaaacttatgatatcactgtataaatgaatatatatttcgttgcgaaatcaataaatactagaaatttcctactcctcaacccctagtccggcgccatgagctatgcgcatatactgacttggggtgataaataaatagctggcgatcaaaggccatgcagctaagaaaagcctaaatataggggaaaatgatattgcccaaaatctaatttacacgcaaataatacaacacagaacatatgcgccgcaaccaaccagttggtcatgtcccattgaaccgtgaaaaatgtccagacaagcgtcgagaatagtccaacccctgaggctggaagcccaagaagatgatactctcgaagttgttaaagcagtacacccatgaggtctgtttctcccgactcagaggtgaagcgcccatctcataattgaatggatatcgtcctgtcctctcctctcaaaaacacaaaacttgcattctatttcccttgacgctgcttatgtttcgggttcttcgagctacacgaaggttggctgttagcatcatatcacccaacacactagagccacgacaaccaaactcaccaaatgatataaacccggttctttctccgaacgggctatattccaagcagcgcccgttagcccatgaccttcggaacacatagcctcaatcttgacctcccacttcctgcgaacaacatttaggacaatatgcataccttgcacccttcacaaagccgcttaaccgacgaccttgtcttcatccctctcacttgctccacctgcctcacggcagaaacaccagcacctggcacaatagaccttgaccacccaaaaaaaaaccaattgttacttgtgagttgtgataattgtgaaaatggccgggcaaggactcggaagttgctgttgtgtcggggaaggaactggcggagggcggcggtcgggggaccaaggagggagcggagggagatcatcttgatgaatcgcggaggagtctccaatcgtaaatactgagaacaaggcgagacccttggaagttaaaatagtgctggattcgatccttgttgttcgcatcgaccttaggagattgtcagagtgctcggcggaaaatgtttcggattttctgtttcgccgataatccggagatgctctgcagtatgatggggtcagcaaatgctccacagagactctgcgtatgttatgaggatgataaggtaaggaaaatttgatttgtttgcgactaagtatgtacttggacaggccacatgattcaaactggctactcggcttttcgtctcgtacctttctgtcgtttccctgttagcccagagcccgttggctgtgtcgtggaagctcctggagatctacacttccaagatatctactcatgcggagtaaattgcaagccagacaggatctcgtcggcactcagccttgatcactttactgctactcatttcatgctatacctctgctattatcagttagtgcttgattttcatgggcttcggactcataatctgactccatgtcagaactgtatccaactccaattcttgagaatagagttatcggactcggtgcatcgagtccttccgaatatccatatgccttaataacgcgaagtagaa

SEQ ID NO: 2369 - DNA, 2734 bp, Emericella nidulans
tgcatcgatggtaagcgtccccgcgagttctacattgtctatactgaactggccagtttagagatgtatttgaaatgatcgaaccgtttatccgcgggagtggttccaaagccagtgccggcatcagaaggtgcaaagagctggcaaggattatcaaaacccaacggacgccgcaatggccgacgccgcccactcaggatctacctccaaaaggcgtcgctgatgagttggttgactgctatctccgtacaatcgagactacattccgggtcctgcacgtacctacattcaggtccgaatatgacgctctatgggtatctgaagcacggcccagcatcgcgttcacagtccaacttaagctggtgttggcactggggtctgtcacttacgacgagcggttttcaatgagacccagtgcggttcgttgggtatttgaggcgcacacctggctctctgatccagacttcaaacctcaacttaacatacagtgtttgcaaagcaggattctactattactagcccgcgagataatcaatgttggtggcgattcgagttggatatctgccggcggactactccgcactgctctacatatgggattacatagggatccgtctgtactgccgcctaggtcggcgctcgctgttgaaatgcgacgccgactgtggaacactatcctcgagctatcactgcagtcaagcatttcctccggtggacctccactaatttccctgggcgatttcgactgtgcgcctccagggaatttcgacgacgaacagctactggctgaggacccggtgccgaagagtgatgatgagtacactcaaacagcaatcgccagggcattgaggggaacctacccacagcgccttgcaattgtgaaattcctgaacgatctaagttcatatgggacttacgaggaaactcttcgacttgacgcagatttaagggaatcttacagggctatttgccgtatcctccgagggtatcccagcaacgggccttccccgtcacagttcgaaaaatgcatgctcgacttcatcatccacttctatgtgtgctgcctccatattccctacatcgagaagtcactgcgggcaccggcatatgcattctccaggaaagtcgcgatcgagagcgccctcaagatgtggtgcgccatttacccatcttccagattcatgagcaacacccgtcgcgagattagcggatccgttgaaaataagctgactcggttcgtggaatgcgggtttgggtttttccgcactggtgttataatcgcggccatgttcgtgaccttggagcttaaagctcagctcctggatgatgacagcctaggtcccagcccgtatcgggtagatcttttctctctgctctgtgaggcgaaagaccgttgttggaatatgattcaatgtggtgagactaatgtcaagggctacctcctcatttgtctggtaaccgcccagatcgaggggctgatgcatggagttgaaccgagcaaactccccgaactccttctccgcgcagcagaagaggcggaggaccggtgtcttgacttcatggaggagaaagccgatctgggacggagtggtggttccgttgaggtgatggacgaatctgcgaatacagcgcccttcatgggcgactgggagtttattgtaagtgtttgcaatctagaaaattgttctatgccaacagcctttagatgacagatcctttccttaattatcctgggactactgaaccactcagctgggttatgaatgaagaaacgagaccattcataatgtaactgagcaagcttagcaaacacagggcgacaccgagattttcatgtctgactttgctttccaccgaggatcgggtaaaagagcttacatatcttgctagcgctgctgcctattaaatatgactccatcgcacctgaattgagtaactcccatggccaatcggatttttcattcgactcagcctcactcaacccaattcggaagcacccccactcgatcgacttgatcaagcagtatatgaaaccacctcgcctctggcctattgaccatgaggttgctcgtgtaataatattttactacggttgatctcactcaatctgactcgtgactgtgctgtcggcagactttttgtaccccgatcatggcctcaaacacagagtattcgcagactctgcaacacattacagatgccaaactcgtggagctatccaacaagcgccgtgtcttcttgaagcgcaaagatgaagcgctgtcagaagcggaagctgttgaatctccgcgcgagaagcttcgagtactgtgcaagggggtaaaaacctgctttgacatccgtgttcaagaagatgaccgtgtgtcggatcccatacatagcaaccgccgtctcgtgatcgagcttgccaacctcgatcgctttctgaagcaagccgagcacgatccatcgatttcagtgaatacactggagcggtggcgtcggtctctgcttggcttgcttgacgtccagactctgaaatacgagtacgcgacgctgttcgcccagctcacgatggagtggctgtctgccaataagagccccaaatcgccgggcgatatctccagacgggagggtttcgaaaaagtgctagcgcgcagaagctggaatcgagaaagttgtgggaagagtttgtgttcacacctgctgatttggagaccagcgacattaaggctttcctcaataatctcttcac

SEQ ID NO: 2370 - DNA, 2860 bp, Emericella nidulans
taagatcaacaaggtatgctctagttgcacccccaattgcgtacagcttttccattgctcacacattcattcagggcatgatcaagatgtacaacgccgaagtactctctaagttcccagtagtccagcactttcccttcgggtcattgttcagctgggagcgtgaccccaacgctccttctccggcagcggatgctcatatcgccgcgacaacgcgagaacagatgaggcatctacggtatcatcctccgagggaccgggtaccagagccccatggcaagctacgaaagctccaggattaacaactaacgttccaagagctcctacctttacagtcccaagtacatcaaggcaacatcctggtcctatggctcctacaagggcgccttgggcaacatctcaaccaggtggaccggctccccctggcgattctacgtctgcaggccatatgccaacgaaagctccgtgggctaagtaacgcgcaatatttagcaaacacttgtattccaaaacatactgtccgatatcttgtaggaagctatacagacaaaaatgaccatcgggtatcatctctcaagcaaaccctcaacgccttcacaaaagataaacgtaaaggtatatcactctgaatccgagccataatcaaccaaagccacagcctgagatacgccttgctttgtcctaggcacttcctcctgaccctccactacaccattcctagcactcttagcctgagtatcagagccaccaccgttagcgccctcctctgccttctttccgtccccttccctggcgttttcctcttcttaacttcgggcttccagacatatgcactatccccggtaccgtttagaaatgggtcgacagcggcccgcgtattcccagctaacttgataggaaacgaagccgtgcgatccgcaaccaaatccgccgttttccgcttcccactgctgcctttacctttcttcttatcagcgtcactcagtcgagacatagcagcctcaaacatcggtttcgcgcgcgtacttaaacaagcactagaagcaccatcctcaaactcaaccatcccggcccttaccgcatcctcctcggcctcatccacaatttcaatgcccaaactcatcttatctttcagcgcctctttgatgccctccttcttctccagcacctttctctcagcccgaaaccccctgcgcaacctcttcgacacctcatatggatcatcccaatcccgatcctgtttctgctgcaactccagtatccgattccgcgtttcatcaacgatccgcttatcttcgaccttcccctctagtcttgcaaacggatcatctccagccgccgcccctgcagcacttctcccaccgagcaagatctctccacctcctatcaagtctgtcccatccgcttgtccggtgtctctcctcctcccaccctcagtaacaacgtatgccgtgttcttcgggtccgtccgaatctcaatccagccgccgcaaagcgtatgcttcatgcgaaaactgtagaccggcgtcgagtagtaattacccactttcttcttttctgcgttaaaccgcaccccctgcccaattatgttctccggcgaacaggtcgtgcaccataccgcgaagggcatctcgaagcgcacaattaatgcgcctttggattggaggtgccgcgcgcgcgagccgagtgggtgtttgttgtggagcttgttggcagtcgtcagaccttcttggtcgggcgggatgtaccggcccatgtctgatagaaaaattatgattagctaggctctaagtgagtgtgaggatattatatgcgtggggaagcgcgaggaatgggtacgcactgaagccctgcatcttgacggtgtttgtggtgtgatattggttgggctatgtattaaaaagtggatggtgtaggctcattcctcgggtatgagctgctttgaacatttgagtgtgatcgactaacttaagtcctgggatgatttgctgttgagcagaagtttgagtgacggaagacatcatagaggttatccgagctgattttatgcggattactaatgatgtacatagtgcccataagcacaagcaagattgaatccaaagtagataaatgtgaagataaatacataaaccaaagattattataccgagaactacaatgtaacgcaccgtccaccgacctcgcactcagttcttatatccagaacactctccccaatgtgaatcttcaccccctttccaccaacaacagtcttccaatcctgcacctcaacattccaaacactcacgtctttccttgtaacttccaatgtaaaagtttcactttgtccggtctctaggaccttcgttttctcaaactgtctcagctgcctactcggcgtgtcaagccccagcgaatcaggaagctcaacatatagttgcgcaacagcacggccagaatgttgtcctgtattggtgacagtcacttgcactgaaaatgcgacgtcccagagagcaggattgccgccttctgcgccaccggctcgtgggggaggttgtgggtctgtgctgtatccgtctgggtaggggtatgtctttgaagagttggcaacggcggcgtcagcttgcgggttgttgaggtatgggtaaatgtagcgccagatgcggttaaacttggctggccaggctgcttcggaggcgggagggatagtattggggtatgtgggtgttgggccttttgcggggcgagaaggtggatacgcgctgtctaacggggtaacgacggatagggcaggctctgagaactcgaaggttgtgtaggagagaccgtgaccaaaggcgtagcgtggtgatgatatcctctgtcgtatcacatagtc

SEQ ID NO: 2371 - DNA, 2532 bp, Emericella nidulans
gtctctcagtaatctgtccccttgtgctggatagcatccaagatgttcactcagatcagagctggaatcagccaatcccgatgatcacttacactttttcgctcgacctgactgaacggctagctgtgattattgatgtcacggctgaattttattgcgatggttcccggtctgatgagggcaaagactgcgaaatcggttattgccgggtcgacgtaagcaactagccctaggctggaagtaagtatggcgcccattttggcgggtttagcgacagactccaaacaataacttagaagttcatttatataatcaatccacggatagcctggcgcataagggttgaggaaacatttcgggactaagacattgcaggtccctgaaatgcccttgatagacatgcaggttgcgcgagcagtcacttcctaccttggtctggatatttgggcctgggcaacttatacaatagcgcattttctctgttctctacgctatacctagcgctccaatcagaatcactgcagtcccctcgacaaggagcccgactctctctctctgctagcaaacttgacaacatagccaacccttatcaggaggcacactggtaccaaccatggtatatttgtgcaaccacatacacgatgcgcttctatcgcatcctattccgactataagagtcaagagaaatctggcgcacgtacggtagagttctgttcagaaaccacccttgacagcatagatctgaaatgaacctgcatcactgtttaacaaaccctatccgcaggcatggagcgcagaaaagactcaccgacccactcattgaagtcaacatctgaaaaatttgcggccgggatttgaaccgactctttaggcgcacagcagctgtccgctggactggagtccaaggtctgtttatacaggttgatatccgcctttgtatcaacaatcaacacatctaaaaattccgtgtatcatcctgtcagtggcaccgtatctgctaccatccaggggatcgaaatcacaaacaagcccacggacatacctttaagccctgcccttcccaaccagtcctcgtactcctccaccagacttgctcccgcaacgcaacctacatacagcgcaatatcgctcacaaaggccggacttaagggcttccgtgccagtatatcactgatggcaactcggccaccgggctttaacagcctggcaatttcagcaaagacaatgggctttgcatccttgggaactaggttgataacgcagttgctgatgatgcagtcggcgctggaatcaggtaacggaattgaggtgatgggggctttgatgaattggacttggttattggggaaattagccttctttgcattggtggtcgcgagcgtaatcatttcctggagttgcgacagaggggagagacgtcagtttacgatgctgtgtttctattcaacgtgcaaaggataagtgttgttaagagattgcatcagcggaaagagggctaacctcagtcatatcaacgccaatagccctcccctccgggccgaccttacgagcagctaggaagacatcaatgccgccgccgctgcccaaatcaacaattgtctctccctagatcggtaggatcgcagttagaccgacttccagattattccaagtataggatcagatgggaattaccggcttaagatttgcgaacgcaatggggttcccacaactcaggcctagatttgccttaccggggagagaagagagctctgctgcggtgtatccgaaggcttgagcgagtttgtcttcggtgtcgtctttattttcgttggtgtctgcgtttgtttgtttcgcgatgctgccgtagcgggattgcacctcggagtaggtgtcttgaatcattctcgataaattgggattagaatgaaggctggaggtaggtatgtatgtatagatacaagtcgacttatgggacttcgcgcacgaagaaagggagtgatggggtgaaagaagaggagagggcgacgacatctcctgcttatatgccacatcaagtgtggtggctgttgagagtgggttgtcatagttttgaaagtctgctatctggttggctggtttataactggtatgtcactgttaacatgagagctttgacctcggatgaataaggtaccttatgccgggtaaaataaacaggtaaaggataggaaagaagattgtaaaatcaagctaccatctgtgctttttttatccttagaaagcggacttgagaaaaatcggactgtggacaaaatgagtcgcgccaatggtcaagacaacacgtctacagtgtttggatcttgtagtaggtttggagctgcgcacggcttattctccggatctcaaggattgaatgactttgctgttggtcacttcccagatcagcgttaatatggtgacataccgtatccacagagcttcaaccagtacctgaaaataacagaaacctccaagccgctagacggctacctggcacagccacgtcggtgttcaaccgtaatatatcgtacc

SEQ ID NO: 2372 - DNA, 1732 bp, Emericella nidulans
cagtctatgcggagcatgtttggatgatcgcgcagacagtaagcttggtttttgctgctgtagcgctaggaattttattggcgagaggaccacgagagaaggcgtgggttgggtggactgggggtgtgtattttcggagagtgcatgaggatccgagttcgagtggaagtcctgcgagtgatggaagtggtgagagtggtaggactgaggggcaggctcggtcttgagtagttgagatgtcgtttgatcattttggaccggtcctcctacaagctcatacagaacgggcgcgcttggactgtgtatacatagaataatctgattagaagagggtctcaaaataacacagcagtgatactggacctagttactgctttgaagtcgacgggaatggagctgagcctaggtaggaggcggcactgaatagcatatcagtttcagcagctctagtccttactatcaccttaccactcgcccgacatgagtcgaatcgaatctgtagctcttcttcgattcttttaggatagaaagtagcagccgttcctcaggctccctcttcgctgagccctaatctctcgtgacctgtccgcaggccatcatcgggcagaaatatgaacttcgccggtgcagccatgtgactcgctatcataaatcaccaaggggcgcaaagaagcggaatatatatatattttttcttatttcctttgggtccttttttttaatcaaagccatagaatatatgccattcttttccttttctctttttcttttctttggagttttataggcagtattagccctgggactaccacagtatctatagagtaaagtaaccgccaattaaacgataaccgattcaattgaacgatgcgtatttgaatagtatagattgcttgtacctacatgcatagattactggcaagatcaaccagataccttgccctactatatgatgttttttccctgcgacatgcttccctgttcagcgatatgaatgctctttcacccaaaacttcctcccagacatgtcatttggggcagtggcgctggccgcgttaacttttggcgtcgaggttaaacattggtagcattactgtgccggtcccaaacacccacagattgtatagtttgccacactaagctccgacctcgcctgttgggttgctgcttacttactctttctggtgagtctgaggagatgcggagtgacaagctccgtataattggtttcgaccgcgcgctgtagggctgtgtgctgctcttggctggaatctttgatgtcagaactgagacgctgaaacggacggcacacagaacagcatctctctggagtcatccgggaggtccaatggaaccggtcgcctctataccttcacccctctccctccagtagtagcagcataccctaccaagccactagccgatgacacttggcgcaaccattgcccaccagcttacgagagttgaggcacagcatctgcttcattgggagtcttccataaggagggcccgatgagaccgggaaccactggtccttgccaaacgcgacattcttaggatcgcggcagacaagcactaacgatccttccagtcgcaaaacgagcccggcctatgcatctctgtggaaaggaaatgaagagaaacatagcagagttcgcatttcctgtctcgtcgttttatcttgcagctccggattacgtgcagtgacgtcctgattctgcccctctgctta

SEQ ID NO: 2373 - DNA, 2207 bp, Emericella nidulans
aaccagatcgaagaaaggatagacatacttcaatggtgccgggcacagtgcattgaaccggattccctcccgagcatgcacgatcgccagctccctcgtcagcgccagcacagcacccttggacgccgtgtacgccagctgcggcgtggcactcccgaccagcgcaacaacactcgccgtgttgatgatactgcccttgctcttcttgtgtctccgcatgctcagtaccgcatgtttacatccaaaccacacgcccttgacgttgatgttctgcgtcaagtcccaaattttctcaggagtgtcgatggcatcggcgtcgtccgcgtgcatgattccggcattgttgaagatcacatctgtgccgccccaggagtcctgggactcgaccatagcctgaacctcggattccttggagacgtcgcacttgatggtctcaacacggggcgcgtcagggacgagctctctgaccttcgcgagggctttttcgagagccgacgcggagatgtctgccatcaggacattggcgccttcgcgggcgaataagatgctagtttcgagtccaataccgctgttgtgttgctgttagctgggttattggtatacgtgggctgtgtgtgttgtgtggggtgggttaccctgcggcaccggtgatgatggcattcttgccttggagacggcctcggggggtagccattgcgagaatatgtattcgtgaatgaaaatcggagtgtatagcgacgttgaggtcaatgctaagtattaagaaggagacttggatgaagctccaggagggccagggatcagtggtgggtgcggggcacgaggatcggggacgaacagacttatcttacgtagttatctcagataagccccatagctatagattgccctgtgcccacagggacggactctcaccgacaccgacaccactgtttgcctatcttccaccctctttctagtcgatctatattcctgttagtgagacgatccctatcataagggataaattgttactaaccagtgtttttcagtgtatttcgaccttcaacaggcacagtgaaccaataactcccgtttcactcctttccagccaccgtggaccccgctgatacctacccacctacgcttcggttcctgcttcccctgctcgcatctgttcatcgtcaaggcgcgaacgatatccagaatcattacagaaatgtccgccacagaagtcacgtccgaaaacgtcgcgcaaatcttgcagaatgacacacgggtgaagctggctggcgtcgacgccgacggcatgcttcgcggcaagctggtctccaagaagaaattcctctcggtcgtcgatgagggattcggtttctgctcggtcatttttggctgggatatgcatgatagaacatatttccgcgagcttgggatcagcaacaaagagaacggttaccgggatctcctggccaaaccggatctctccagtttccgccgcatcccctgggagaataacgtgcctttcttcctcgtcagcttctatgacccggatacgaaggagccgttgtttgcatgtcctcggagcttgctgaggatggctctgcgcaagcccgaggcgcaagggtatcgtgcgatggcgggtggtgagtcggctctggaacggttgagagagcagtgctaatactctgagtatccagcggaatatgagttttaccagttcgcaacacccaatcgcaatgcctcgtccacggcatccttcttgaaagagaacccggtcgaggcgctcccgtcgatcacagacgggatgttcggatacagtttgacgcgtccgattcataaccaagactactactacggcatctttgatgcctgcgagcaatttaactgtgagatcgaggggtggcacaccgagagcggaccgggcgtttatgaagcggtgggtgactactgaactgtggccgttcgtgtgctgacaacggatcaggccttacagttcggcgaagccaaggggatggcggataaagcaggacttttcaagtatgtcctggctgactgcggatccaaggacttgctgacaagcatagatatgtcgtcaaatccatcggcacgaaacatggcatcacgccgaccttcatggcaaagccgcgcgagggcttaccgggcaacagtggccacatgcacatttcgctggtgaacagtgatgacacgaatgcgttccaccgttcaac

SEQ ID NO: 2374 - DNA, 1370 bp, Emericella nidulans
atcgaaataatacactcctatagggagacccaagcttaggatctccacgatccaagctcattgtcgacgagccgtgcccccttctgaagcttgccagattccggatctgacaaagaagccaagaccgctcctgttccagccagtgcatcatgctggacgaatgtcaataagagacgacaccgcgacatgcaccactttctagccgccgaagtttctgaaatctgcgacaccttccaacgcagactagacagcaaaaggagactgttgggatttttgatgcctcttgtcactgtgatgaaaagaatcaagccagctccctccaactcagggcacttggttgcaaggatgtgaccatcattcggtggccgtttcgtcatggtattcgttgtgagccgccatataccgagccaagtagcgctctgactacctctaatctagttccgcagccactccgagctgagttccccatggctccattattcccctatcatgaacaaatgtggggttgctgtgctatcgcatgctccttccagcaaattagagacatccgcaatgtccaggagcctggaactcctgtacaacacatcatgaatcatcccatccacgggccccttacaagccgtagtgtagagcccctctgtcgcggctgaattcatttcgagtcccgaattcgatcgcgaggcgtgatgaaaaacattggaaaatgtttagtcttatcggcgcacccaactcttcagtcttcgttttcttgctcacgtagtcgagcgatatatgttcttaatatagactcgagtccttcgtttcggcgtgccagcatcatcacatccgatacattgatcgttgaccgacctgcgtgcctgagccaagaacctgtcagcaacacggaagacatcctgagactggctaaagataagggagctcacttcgcgaagctttcaagatcttgactcgccgtttctatacggatgacctctgtcagccactttccaacgtagaaagggcagagaatggcaataaacagccccaggcccaaattaaagccagatgccatttctgcgctccattccatatctatatgggaggtttaaaactgggaggatgtacctatctgaacccagacaagctcggtcagtgcaccaatgaactgaggtgtggcgttcacaccgagcttgattgtctcctcatccacaatctttccaatggatagccagagggcggatttcaagcgctacgaaccagtgagtcactttctccgttccacaaggcatatgcctacctttttgaggccaacattctcatttgcatccattttgctggttatgcgagcaagagtcaagccggtctgagtaccccacctagagagacttagt

SEQ ID NO: 2375 - DNA, 2378 bp, Emericella nidulans
gagtaaaggaagaagatcagtgttcgtgccattgtaaatgcagtgaatgggtgaggaaggcacggttagctgggaagtctcccttgaaggtgaggggatggtcgctctcccgccggaaaaggatccaggcattcagcaggtccggcaggacaaaaatagaaggttcaaaaagagatattctgtaactagatacccaagttttggatggcgtagtgcctcaaccacataatttacagaaataaagcccgtcagatcatggagcaaaatgaaacaaaaacgaaatcaccaaagcagagaaatgaagcaaccttacaacgccgcgagaagacgccctcccgtttcaagaaatagtgtgtttaaaccttcttctttttcttggatggctctgcatcattgtcgtgctttcgcttcttcttttccgactcgccgccctcagacttgcgcttcttcttcttctcctccttctcgcccttgtctttcttttccttcttctccttcttcttctccttcttgtctttcttctcaacattggcatccttcatttcggcgtcgctatcgtcgccatcaacgtccatgctggccaaaacagcatccatagcatttttctgataccagttagttcgctattcagggtatagatgtaaattgagggtgaacataccatggcaacctcgttcttagtaggaggagcaccggtcgcgtagaattcaagacgttcctcaacctgcttcttgagggcatcaccgtacttcgttgtcggggtgtcgctgaagttgtcaatgcgggaagcaatggagcacttgttggccaagaagcgcgagatgcgacccttattcttaggaccagccctgccgatgaaggaagagtggtacagaagaccgtacttaggagtgttacccttggtcttcaaggctcggaaaagagccttctcagcacccaaaatctggacagtggaagcgggatatttggacaggtttgtcaagcttccagcgtgggagataaggcgagcgccgacgatgtctccgataagagcagcaaggttgggggcaaccacgttcatcttggagaccaggtaggagtgaagggacttgcggtacttggaaaggctgacgacccgttgggcgaatgagatgacattctccatgtcaagatctgagatatcctgggccatacctgcgtttggcggcgtcgataatgctctgagcaacaccctcatcgtcttcaacaagggcggcaatgtcgtgcagattctcgtcagtcagggtcttcttgtccttaatgaacagggcgagctgggcgtaacgctggttgtccgacacaatcttgatgagctcggggaagtgccaagagtaccactcgcggactctcatggagaaagtgttgatggccttgtcgagctgatcaaggatagcgatagcttgaatgatgtggttgtcgtcgcgctgaaccgagaacttgacctttgcacgcgagtacgcgtgaccgagaccgagttgtgcagtatccatatcgccctcccgcaattgcttcagcaacttgctagcatgcagtcggactccacggagcatatcttggacgacctcgctggtgtcaccggtctcgcagtccacgaaagaaaacgcggacttgatgctggtagccaaattcctatccgcgagtcctagcacaatgttctttttcttgctcggtttgggcaaattcatttcgaggaaagagatcagcgtctcagaagcgacaccttctgagatatcgttgatttcgctcagagcctgcttgttgttcctacgttgggtcagtcgcggaccgcacacaagccaagggccatagagcatactcaaaaggcaagaaactggcaagctggaccatcttgccaaattttgccaaatcattcacaccctcctgaacttccttcaggttgtgtcccacagcatcccccttgtgggcgaccttgaagagcgagtaacccatagggccctcgaaaagaagatagtctgccatcgcgaatgggtggaaatctgggtactttaatatatagcacttccaatctttgtagacaatccccttcgactttgacggaacttttgaggctatgaacctgctgtcggccggtgtgggaattgacaaaagtgcctggaaggtagatttgtagagtcgaaccgccggagctctttttttttcacagccggcgcgctagtaagaatcccgaatgtgggctttttgccaaaaccacggcctcaccgcattcaacgggaaccactactacaggttgcggctacacactcgcagcaccaagctccttttcacaatagtttcggctcgtatgggctgttgctcttgagccgacaggtgcgcgtgcgacgctcttacctacagatagg

SEQ ID NO: 2376 - DNA, 2315 bp, Emericella nidulans
tacatcatgtatctgacggcttttgcagagctttgtcgttcttctttcctttctttccgccatcgtcgccgccgttatgcgaaccgctgggcttagattccgaagagctatcactcacgggaatagcagatggtgtgtctgaggaattgcctttcgcttcagcttctctctttgcgtcttcggtgacgctacgttggtctctatcggccgctttctccctccgccttgcgaagcccgatgtcggagctcctggatctacagaagaaccatgcttcccagacgaatctgcttgcttgcgacgaggatcgcgttcgacttctttatcctcggttccatcatcattatccttgttctcttttttgtttgaatcctccttctcgtctccaggtgggggcttctctttccttcgagcggtgctggaagaaaaggtacgaagggacggcggaacggagcggaaacgacgtgaagtctctaggactgatcgggggccgacattgtacccgcctggagcaaaaagaggccgaagaatcagagatcgcggtgtctggagcgcggctctccagcggagagtctggccgcggacatgctcctaacttctatgacgacagacgagacacaaaaaagttgtgagtaaacagccacaaggtattgaacaaaacagaaggtaaaactctgcgagagggccaagagaatatcacaatagtccctgtccggccaggcaatgacaaagaggaggcgatggcgagctcaggcgattgattaccgaagcaagcagttccatcattccctcggtgatcggaaaacattattccggccggggaactctggttaagccgaatgactgagaagcttcgattccgctccatcaatattcgcaacagaaaaatttggagaaattgcagcattaaactctccccttggcatgagtatactccggcttgcttcattcgctaactcagctcactcgtcgttctttctttcaaaatgaacccttcttcggctcttatgccaaaggctacggctattcccgggtgtatactgcgcacttcacgacaatgctcaaaacataaccagacatcgggaattcgagcttcgtcctcaacacgccaatatcatgttgctgccattgaatcgcctgcgaggcgtcggcgggacagcaccttcatgaaacgctcagacttcatccaagctagggtaggtaacccaactcgaaatgtctcatcgctcgaaaaatggctgaccgctgtcttatctagaattttcacgctacgaaagtacttgcggcaatccctgacccgtataaagtcctgggggtggataaaggagcctccgcgggcgacatcaaaaaggcttattatggaatggcaaagaaatatcatcccgataccaacaaggatcccggcgccaaggagaaattcgctgaggctcagtcggcttatgaacttctatcggacaaaaagaaacgtgagacctacgatcgattcggctcggctgcctttgatcagaatggcggctttgacccgagcgccggcgcaggaggcaatccgttcgctggcggcggaggcttccacgggtttggtggaggatttggtggaggattcccgggcggctttgcagcagatatcaacatcgaagatcttttcggcgctttcgcgggtggtgctcgtcgttcaggtcggggtagacggggtccgttccaagagattctagttggcgaagatatcgaagttcaaaccaatatctcgttcatggaagctgccaaaggtacttcgcaagacatcgttatcactccattgaaggagtgcggtacttgcaaaggtgacgggttgaaagagggtgcaaaacggacccaatgtcgtcaatgcaatggtactggaacccgagtccacttgatgcagggaggcttccaggtagctgctacatgtgatgcttgtggaggagctggtcttattgttccccggggttcgcactgcggcacctgcaagggagatggagtggtccgcgagcggaagacagttcgggttgatattcccggtggtgtagaagatggcatgcgtctgaggatatccggtgagggtgatgctcctcctacgggcacagcagctgcacctggcactcggacgcagcgtggtgacctctatgtgtccattcgagtgtcgcctgacgagcggttcagtcgctccggatccgacatcctcgatagggcatccattccactcaatacagcgcttcttggtggtgaagttctggttcctacattggacggccaggtaaaagtcacggttgcgaccggacctggaaccggtgacaggatc

SEQ ID NO: 2377 - DNA, 1585 bp, Emericella nidulans
gatgattggatctcttttggagtcgacatcaccgtgctctcgacggatggctttcgtgtacatttccatgtactttttgaaatttcggacgggcaaacgggttccatttagcttgactgtcacgcccgtggtaccagccaggtcgtagactcgtcgcttgataagcgcctcaaaatcgtcatcgatgccatccatgccaaacctgggaaagtcggccttgaatgttacccttgtgaagacggatcccttagcagcggtgatcttaggtttgcccacagtttgcatattgtctgtccaagtctggaggtatcgtttcttctttttcgaatcctgagtttcgactgtgaactcggtagaaaagacgttacaaagcttagcaccgaaaccgtttcgacccccagtgatcttctccttggcatcatcgtagttggaggacgtcaaaagattaccgaaaatcaactgagggatgtacattccgtgctcttcgtgcatttccaccggaatgcctttaccgttgttccaaacactgatttcattggtctcccggctgtaagttactctaatctcgtccatgttatcgtcattctgcttgttatcggccgcgttgacaacaatttcgtcgaagattttgtataaaccgggaacgtaggagacttcccgaaactccatcccgtcaatctcggaattgtacacccacatttcctgtgtggtccgctcaactgagccgatataagagtctgggcggattgtgatatgttcacggagattcaactaggtagaaccgtcagtgcacggctccttagggccttcagcacgactccttaccttttggtatttgctagacgcttttacttcctcggatgcatccacatcgtcaattgggatcgattcattttcgacatcggcgagcggtttgaagccgctcttctttgtcgcagctgcagggaccttcttcggtggtgtctgcgagacacggagtccacgtctagggggtcatcaggatccgacatctcgtcttcgctgtcgccttggccttcttcttcggcttgacagctgctttctttgctggcgcttttttgggggctgctttcttcgcggccttcttgggcttctagtagtcaatcgcaatcagcaaaaatcattgcggagcattgaggacatttatgcgtacgggagcttcgtcggtcatgaaatcggagctgccgtcatcggagaagacggagcccatcaaagagtcgtcgtcgctcattgtggctcaagggcgtaaatacgcaggagccttacggtaaaatcagatgcagggtaaccggataacaggagggcaatgagtgacaagaggaaacaaaggcaaattggagacaaaagaggtcgcgtcccacgcgaggactcctttgacgaggagggaataaagagcgagaaaaccacaacgcctcctccacggtctcgatgaatgttgtgctgacggtttgttggcgacgcgcaaagttgaaacctgcgcccgaaggcctcacaagtagtggatggtttctgcccggatcataagttacccccgtccgcacccgaaatgggaaaactcataacagac

SEQ ID NO: 2378 - DNA, 2157 bp, Emericella nidulans
  unsure (1)..(2157): unsure at all n locations
cccgctcgtagcgggtaggtctccaacgaactcccatatcttcgatacgtgtctcctggctattgacagccgcaagaacaatccagagcttcgacatgacatgatgcagcgttggctggacatgcgggcgtctcatccagaacggatgtctgaggaggatatctttggggccgccgtcgctaatgttggagcaggtgcggagacgattagttcgacggcgcaggcggtaatctactacctattgaaaaacccacagtatctggctacggtcagaaaagagcttgatgaggcccaggcgaagggagaactctcggatgttatccagtatggcgaggcgacgaagttgccattcttgcaggcttgtgtgagtcacctacttccgggctcggttttttctcgtttcttgtggctactattctgtattctatatatgatgctaatctgtctggcgtggtgggtagttgaaagaagcataccgcttccaccctggtgtttgccataatctgcctcgtatctcacccaaggggggcatgacgattgcagggcgatatttccctgaaggcgtaaggctcaaggcccataaatacgccttccatactcttgatactgaaattaagcgaaactgcaggtcattctaagcgtccacccctgggttatacaccgcaacgccgacattttcggtgctgactgcgatacctacaaccccacccgctggctgcaaggcgacactaagaggatggactatttcttgatccacgtacgttcctccctgattgcctctctcgttcacctcatatatttaatgtactgatgaatacagtggggtgccggctacaaccaatgccctggccggaacctggcgcaattcgagctctccaaggtccttgcaactgtgctgcgagactacgatatcaaactcatgaatccgaagagcgagtggcgcttcgagactcggttcctggcagtgccgtatgggtggccgtgccagattcagaggaggaagcgggggatggtgcaggtagctgcatagggtcttggttcggcgcgcagaatgggtggcaatgtctgatagcgaattgtggcgttccgagtactaatccataaatctgaacagattttcctgttccctcagcatgctattgcctgacctaggttgcgaatgggcccacgagtttcagtggcgtcgtgccatgggtgtcccaactggcgccggttgccgttacattattaactgccaggaactgtggttaaagtccattataatgcttggtatgttgagtcagagcccgtctcttctagctcgtaaggcatgtagtgtgccggagagattctttacggattatcttcagctcctcgcgctagatctgcatttacagctacctgcttggaatctaagtctcagtgacgacataaaagcctaaatcagtgccagaaatgggggttgcgtaactcgcaacggtcacggttgttaaaaaccggagaactgcactccaatgctgctccaccggtcaaagcgctcattaccgccacagtctgaagttttggcatagtgctactcgcgtttgtgacaacgtgagagagtgggttctgaggaggatcaatatttgcttccctgtgttccacaatctaagaacatacgatgtgcgatctgcggtggggacgaagggtttttaaactagaccttgaggccgcgtataaaggaatacggcggataagagttgaggtgctcggagattaactcgagcttacatttccaaacataagatgcgctagaatagtcatagcaattgatcagttgcatgagtaaggcaggcgtggaactacctaactaagcgttcgccggaaagaggtgaaagtgccgtcctacattgagacttttggggccgtgagttggacgggaggcgcttgaccatagtgacgatacttaatacatactgaccaggactccattcatctgcttcgagaaaacagggcgatggtttgtcttcgaatctgctgcaagctgggcagctntgcgtcacttagaccatgtccctatcaaccatttagggtttcaacagattccatccgtcccttctgcacatcttgatgccttcctaagactatgcanatcatcccccttgaaaagggagttttgacccggttaacaggggtata

SEQ ID NO: 2379 - DNA, 3373 bp, Emericella nidulans
ctatggctcactcaacactgatcggctaatacaaaaaagagggaaataccactccaccgggctctgaaaagaccaatgatgccaacgggccccagttcccgaaagaaatgggtccagaaactcttttatttctggcctatacgccagtgccaacggtgtcaatcctagtcctgtcccgaagatcgtcagagatgccgatgcctcgacggcatagaactcctcgactagtatcgccgcttcaacaaggctcttgctgcccccacctacggcggcggggatctgtccttttataaggccagctcccactgcggcctcgtagattggtttaagcgagcgaaaacgatcctcttgcgttggaagcgttgcgtatgtttccttcgcgggcgcaagatgtgcagctgcgaaggcgcgcgctgctgagcgagtccgctgctctgaaagagataggttgaagtcaaccattcttgcgactactcagtgataggtaacttacaaaaagtgaggtagaagtgcggagatcatggtaagctctgtgctcagctcagcccactcgccaagtaaaggttacatggatgtcggccgaatccaccaattgttagtaaccactagcactagtctgatcaggttgcaaggactcagaatgaagaagacatatgcttagaaacgcggcgatacatgcagtacaccagtcgcgggccagagagagcttttacccgctgtgtaccatgggctccaatatgagtgctttagtatcatgaagtgtgaggaatctctcagatactggtgtttactcggggtacacgctgtcgcaggctggccacactgttcagagcccctgaacgtcacacatgctcccaaacgcaggacgaatatacacaaccttgcgaacgataagagtacaagtctcaaaggtcgtcaccactgaaatggcgaaataaagtggctagacatatccctagtccgctgggggacaagacacactttgttcaatggtgttgttgcagcttcgttcacgttcaatcctgtcactcccaagctcgataagaagtcgagactacggttgagctgcctaagtagggtttctcgacgtgggctatggtgatgtgttttggggtctgaaacgctgaagcaaaggagacagttgttgttgtctagaatccaatctgcaatctagattcaattatgggacaggacagagagtgaggatgttttccagtaggtatcaacaccaccaggcaccgcaatgtaaatctcgatctctaatccggagaaaattgaccccagggacgcggacgcatcgagagcccaatcaggaaatagggcaacgatagcggggttagggcgataattatgccatgacgtcaccatctctcagcttccaagtttcaattgatgtctattatgttaaatcaccccctgctcacaaactatcctaaagtttctcaaaactcaacagttattatcaaaggagcatccggactgcagatatgtacccctccgcccgcatccgtcgcagcgacgatcttgccaaactagccgactaccatatccagcatgacctctcatcgtcggaccgcgatgcgctgaagtccgccgcaaagaccgtttccctctggacaacagtcggatcagcagttggtattggcctcggactttacgctgcgttccgcttgcgcacttcgaggaaggccttctttgatgtctttcgcgcggcagagaagccgacccaagttgtctttgcggatggacggaccggtatgtgtttcttgtcccttgcaatttcttattcatagttgcaaagaggctaatatggatcagaggcgattcctgatatcacgccgctgctcaaaccaagcacggtgggagactttgttacctatttcctcgcctccatgggcggtctctttctcggtggtgacctcggtaagccttcattccgctcctggagttcataaattactgacattgaggcacaggctttcttggtggtgcagcaagcggaagccggacgctaacaggcgatcctgagagaaagaagcggattgagaatgccttccggagcttccgtgcggacacgctgcgaaaggaagccgatgagctagagaagggcaagtcagtcacagacgagatgttctgaggtgtaaatcggagtgttgaaagcagtcttgactttctgaccgattgaggaaattgatttatgtttagccccaatattggtgacggctctgtacgattatgatgtgggggacgatcttaatcctcagtatatgtactatatctcaaagcgcacaatttgataggcctggatggcctctgttacgtttcgccatgtctccatgagcgtcaggtcacaagcaacgtccttctttcaaccgcgctttgtcgacacagttctatcaacttcatcaccagttccgcatctctaggcttgactgcaagctccgtctttccggaaatggcctcatgcacattctcgtagaaatgttgatatcctcccggtatagatccccagtcctgcgtctctatctgccctccgtcaatcacctggagtgtacctttcgattaacgtcaactggggctctttatatgtctctttatcaacataccctgactgcccccatcttccagcccgtagctttcatggccaggataaatgcctttctacagctggtcctcctggatatcgagctcgtacttgacccatcggcctttagtcccaagcacctcaaatctcttctgtctatcgctgacaacgtactgcgtcgaatgcagctcgacttgtaccagttagagaagcacaacagtaccccgcccggggctgagcttaaaacctaccttgtagacctttctcatatcccaacactattaaaaaaccattatctacaaatcccttttctctaatctccttgccgttgccctcgtcaaacagcaatcacgtcacggtctttggcgttccaaagagaacaagaacctggtcgatcaagtggcttcctagatcaaatagcattcctgctcccgggacaccgctagccaagcgccacttcttcgattcgatcgccgtccgcgagttcggcgcgcagtcaaaatgggaccgaagccggactatcgagccaagtaagttggttgggctagcgagcagagcgcgcagggtcaggaagtctgagtcccatcttctgtctgctcttgtcagctgcggatggtactgaatcatgattatcagcagaatccactgtggtaaaccgcaagctggagacctgttctctcagcgagaccggcgagctctatcgcctcagcgtagtttgttgtaaacggtttctcgacgatcactgcgccacaatctatcagttacagctctcgtctcttgtccgagcat

SEQ ID NO: 2380 - DNA, 2232 bp, Emericella nidulans
gccagggagacttgatagaaagaaatcagtccgcccgatctaccatcgatgccccgaatcacaaacctgttcatcgtccgcaagaggatcgatacttgactggagatcattcggatgctcgatgtacttcagaaaatgttccttcagtgcaacataagtgctacgcgcctccgagattttgtccggccattgcttccgattaaggtcttcaaatagcagaaatgcctagatctaagtaagcatagaatccgagcgcatacgagaggatatgtgccttccaacatattgatctcagcccatcgttgcatatactatattcttgttccgacttgagggcctttcggaggtctgagggtgtatcacggccgtcgagtaggctattccaacgctgtctggagaaatcgtcaactacaaaaacgttgtaacagaaaaagcgcactctgaaaatatacctagaatcttcaacacccctcatttctccatgtggatgtgatgcgattgatgatggtcccagggagcgagggtaaagtgaatcaatagagattaagagatactgcggaggtacaaatgacgaaggtcatgataagggcgggatcgtcatcggttttctctccgccgacaggatccaactgtcaactcacacggaacacatgtttcgatcagacatacgcctaccaaaagcgagggttcacaaattctatctccaatccgatttgaaagaaatagttaagtgattacaggctgaaatttagctgatcaaatcgaaaatcgtcgcaaattttatacccagtaaaccaacgcacgacttggtctccctacgagcccttccgaatttcttaatggtgcgtggttcggttttcgatgtcggcagacttgttcgcagagttcggatatgcagcatctgctagccagccttcacaagctgcatgtcagcaagcagttttaactcaggatgcaacactggtacccggcctggattcattcgaagacgctacaccgtcccaactctctcctcgccatccgcacgagctcaagcagccgtcatcccagccaagcttccagaatcagctcaagcaattagacgatttcggagattttgagctaccacagggcgggaataataatgatgtgctcttcgacgccaccctcgagaggtgttcggataacggcagcgatgattggggtgattttgagtccgcagaagttactgttgggcaactcgcccaaaatccgacttccgagtcagttaagagtgaaaaagctgtgagcaagccggtgcccaaggctccaccaaaccacaattcagcttcacgatcgttaggaacaccggatctcttggggcccatggaatcaattacaatacagaacaagccgatggctagtggtcatcaaggcaataaaaagcctgggggtacaataaatcgcagtaacgtacagtacaccaaaccaagactgcccgtggaagacgaacccttcgaagactggggagatttctctgatggacctacggaggctagtcaaaactccaacttggaggtccctgagtcccaagtctccggcaagaggaaaaacttggcgcagccatcaaaagccactgcaagcctaagagcgcagactagcaaacagtcgtcatcgacggtacaagttcgcccaacgaatattccacctccgtcgattttattagagctatttcctcagctttttgagcgcctgcgccaagagggcaccaaagcgaagagaaatctgcaacagaaggatactctaaattcaatagctgagtctatcacttgcactctaaagactgttgcgaggattgttgcaggccggactctacgatggaaaagggattcaatactgagtcagagtatgcgaatcggccccgcgcgttcgggcaaagcaggggggatgaaattaagcagtgtcaataggaatgaagacatcaaggagcaacaagaggccgtggatatcattaacatgtggcgggatcgtgcttccttattcaactccgtcgttcaggcagcagggaggcgaccagtgcaggttatccccaacaacactcgtgtcataatcgctacagccagtcagggagccttaaaggccccacacgcgtgtgccctttgtggactaaaaagggacgaaaggataccgaaggtggacgagaacgtggaggatagctttggcgagtggtggacagaacattggggtcatactgaatgcagacaattctgggag

SEQ ID NO: 2381 - DNA, 516 bp, Emericella nidulans
acatcagaattcgcggccgcataatacgactcactattagggatcaacttggagaagagcatgagctatcaggtcgaccacaggcaggcgagtgtctgagaacagcggccgtcttgcgcggtgcatatatgtccgaagggactggtcgaatctttaattgacctcacaggcgacgagcgtaagcagaaccctggccaggttggagctcgaacggctgggaaaagtcaaggcccctgggggagaaaatggattgctcccggcgctagggactggttttttttccctcatcctggtaggtcaacagccgtttttcatcgtgaattattaattcggattcaaggtccaatcccgacgagcgcagcacggcaattccagaatgttggtgccgacgtcaaacccacatggcgaacgaaacggcaactgtggttcgcctcatgcttgcgctcaaccttttcgaaccaagaatctgatggaactctgatggcgaggccctgacagccacagcgacggccggaa

SEQ ID NO: 2382 - DNA, 1563 bp, Emericella nidulans
gcacagacagacttgttcccatgacaatgcacaggtccgccgtctcggacagtgttcggttgtcaaagaaggccgagggcaaagcttccccgaagaaaacgatatctggcttcactagcccttgacactcggcacaattcggcacctccccctttgcgattgcttctttcatcaggtcgtccggatacgctgttttgcactcaatgcagcgctgagtcgcgaagcttccatgagcttcaatgatcatatcgcccggcacgcctgccaaccgctccaaacaatcgatattctgtgtgaagtgcttcaaaagctttcccttgtcataaagtagctttacgaatgaatgcgcgagagtaggtctgtactgtcctggagctagtcccgcgccagagcgtagaacggcttgggattctgcctgaagaagctaatgtcaaacactgcttcaggattgggcagatccaaatgaacgagattcgcgtaaatgccagtatctggtgatcgaaaatcagggataccggcggctgtactgatgccagctccgacctagtatttttagcgatggatgtgggggaggggcaggtaagacgcagacataccattacaaccacccgccgcactggcttctccttgacatattttgcgactgcctccacagtgcgagcttctaagaccgacggaggagtcttctcgtctacgagtgtagacgattcattgcccatgatgcggcgacgaccagatctgggcctggcgtgctggtgtctgtctctgcgccggcgccctattttgaccgaaactgtagcaatacgaaacgctaatataccagtagtgagcgttcagaatctgctttccaacagttcgtgttgctagagacttgggagaagatagatgatcgcctgtatgacgttttattttgccaaaatggctgtgtgtgcctaaggcatcaaggagtttttatattttgaccatggatttcccgggttgccagcatttctagttgcggactcgtatgctctcaagatttgcaatatctcatcttgagttcactgccttctgatcaagtcaattggccagaaagttgaagttgcttcagagatgcaagcaaagagctcgctccatcctcaccgccctccgtttctgccacaccagcgatttgttgtctcttcctgccgtatacctttaccccataggatttcatttgttgacgtagactgtctcggatgctgcgactgccgggagaatgttcaattccacagtcaatgttgtcaacggatactcggagacagagctaactacgcaatcttcgaactcgttttcctccgatatctacaatgctagctccgtcgccgagattaaggccaccttgacccaactgcacgagcaggaggcggcagttacagctcgcctagatgccctcgtcgcctcacagaaggatttctcgcgtgaattaggtcgattggaccttctccgcgcccaccttggctcccaaacaagcaccacacgagcgatcagcaatggcatgctcgtgggggccgccgcaaccgcagaccgcatctccagtgctgt

SEQ ID NO: 2383 - DNA, 2781 bp, Emericella nidulans
tggtcgtcggattggatatgaagggattttgaacgggggagtcttctttcttaacggtcttatgcagtccgccttctttgaatactggaggcaggaatcctggtgtgccggcgtactgtttcaaccaagggttggcctcgacacacttgtagcatatgaaggtctcgaaatcatcctcggcaggaaattggggaggcagaggcggctcatcttcgtcttcagcttgttcgttcgagtcatcgttatctagcttctccttcctgattgaattcttgtaccagtctcgtgggagcccgataagacactcagggtgccaccagtcttcaccacaaccaccagtctctgtcgtccccaacccaaggcactgaaacattgtacccttctcttcatgtgcgttgtagtcttcaccacagccgcaaaacttgttctggaagttcctattgtatcgattgccagggtgtggcttctccgaccgaaccccctttgtgccagtattgggatcgctacgcagagtgcacggggtggaggaagtgatacgagtggttccgcagtcgcacacaaagtttcttttgttgaaaagttcgacaagggtatgttcgccatggcaggatattgagcaggaatagcagacgccggcagcagtgtagggtgaatcaggagtcggggggggaggattgcaggtcaaacaagcatatagtgtctgccgtagcggtcctagatgttgtgtacacgaatcaaatgactatatagttagttgcgcgcaatttgattgcagagagtggattgcacggcatagactcacatatgggaggacttcacgggcatctgcctcgaggcgcatctgagattcgatgaatctgtgatacacattagcatacaacatgataagtactagagcaacgcaatgtcgggcccaagtaacaccaatttctcactcactctttcgcagtctgcgagttctccgagctgcagctttgacggcggctgacggtatgttgcccatcgctcgtcggagcaaccggaggggatgcgacggtctcctcgttgctcatcttccttgacagtaatcgcaacctatttgcaaacggattcacaggaattggagagatgaaatagtcaatatcagtgagagttcgatggctcacttgcgatcagttactccagatggaagccaacgcggaacgcgagacacttgtttgtcctgtttgcactttctgtattcaaagttccgcaaggtgactgagggtaacagttctcttattgatgactgctgagtttcagaagctgtactttccagacagttaggtatacttcaagacatcgtcccacagttttgcaggctagagtggttgggaaatcgtagtgtcccggctccaggcgtcaaaagctatatgtccaaatctggtataattggaaaacgcgtgtctcgcgctaaaacgcgtcaggtcgtgttgccaagcaaaactcgcaccctcgctgttcgtctcttgcaaacccagaactcgacaatacgttttgttccaactcatagcatcgagacctagctctcatattctttcaaataccaaagtacacacacaatgaggtatgccccagacctaatttccatctttattctagtttctaagaagaaaaaaaaaagttcaccgctccgtcagagcacatcggctgcaaaccgcggtttgggaaatctgaatcggcgaaagcgatccagagagcctgatgacgatgcttcgtccgtggttcccccttcaagccgtaagttctggaaggtcaattagagggaaatgtcgcagttaggctaactgaaacataagcgcccccttcttcccctcctatgttgcccttcgacgaagacgaggacgagccagatgaggaagcagaacttgacattgatgacattgaggagatggcagaggatgaggatggcattgaccttttcggagatacattcgagcgcgactatcggggcggaaaagatgaccgctaccgcggacgatacattgacgacgatgagcaagaagaaatcgacattggtgcccgacgagagttgcgaggctcgcctaggatcgaagagatcgagaacttgctcggcgccgccaagtgcccgcagccttcttgcaagatgacgaggacggtgatatcgatttgactgcacagccacgccgtcgcaggcacgcctacgacgaggaccgcgatgacatcgaaatggctgacgacggcctcgaagagctttccctggaggagctagtcgatatcaaatcatctaatatcacggactgggtgacacagcctcaagtgctgcgctctatttaccgagagttcaaggcctttttgacggagttcactgaccccactggtagctctgtctacggaaacaagatcaagactcttggtgaggttaactctgcctcgctcgaggtttcatatacacacttgagcagcaccaaggctgttcttgggtacttccttgccaacgagcccacagaagttctcaaggtttttgaccaggttgctctggacgttaccttgttccactaccctcaataccatgatatccacaatgaaattcacgtccggatcactgatcttcccattgtttacaccctccgccaattgcgccagtcccacctgaactgtcttgttcgtgtcagtggagtcgtcacccgccggacgggtgtcttcccacagcttaaatatgtgatgttcatctgccaaaagtgtaacatgacgatgggcccttaccagcaggagagcagctctgaagtgaaggtcacaatg

SEQ ID NO: 2384 - DNA, 3037 bp, Emericella nidulans
  unsure (1)..(3037): unsure at all n locations
aaaataagcgatcggaacagagatcagcgaaaggtccaacagatcacagaaatagaagcaagtattaaaaagaagctctgactgagagaagaaggagaggaaggccgaggaaagtgaagttgcgttgaattggcgaggtgaaggtctggagtcgttcgaaaggacacgatcacagttcactggtcgtatggtcacgtattgtcatatttcaattccccggccagattagccagccacgacacttgttcccgcttctagtgagtaacgatatttcactgccactggactcgcccgaagcgaattatagctttgaagtttgtcggtccttaacaagtcccgatagcaagtccaagtaaaaattaatgtgcaagcaagctagcaggtggttactacttgaaaatatgtagtcataattatttgacgtaaatgttgatagctaagataggaggcaatagaatgttcatcaagcggcgctatgggtactttgaactgacatatggacaatagagcaaaaatgtaagcaacccagactttataatgaaaagccgtaacaaaccccaataacgtaggaaaggtatcatagtgtaaatattcgaaagacgcctcaattcaatattcagtcgagacatggccaggtgggcgcatatatattgtctcatgtacagcaccggcgaaggaaacaagcatacgagatgtttttagtcgatcatcattcgggtgggcacctgaccggcaacgttcgacagctccgtagagcccttttccccatccttgcccttctttttcttgttgatgtgaggcttcagccccctgtggaagttgtgcatgcacacgcaggcattgataattgtcatcacgatcaatatcagtgtaatgatggcaaagaatgtcagagatcgtcgggcagttgaatagtcattggcggttgctggttgatacatacgaaccagcttgaagaggaagtacgccatggctgcgaaataaagaagctatcaagtgttaggataatccaacatcaaatgaacccagtgacatacaataatggcgatcattcctatcgagctctcacgcttcacgaataatgctgcacagaggaggataaggattgtaaccggtatggcggcaatggtaagggcaaattctgtgtcttttctgttcgtaacaatgacaaggaattggatcgtgaaaccgaggaagaagaaaaggtcgaacttaagcagcgcgatgtaaatctggcaagacgttaatacttcacttgaatccaagggcaagagcaaatccacgcacctggtacgttagataacgacgcttcatgcgcagatcagcgctgatgtgcttgtagatggaccatgcgaattcatcataaagcttccaggcgacgatcatcatcagcacactacccatggccacaacgatcggaataatgataaggaacggttgagtttcggcccagatgtcagggctgactgcatcattatccgttaggactgtcacagcttccttgatctgctgaacctgaactgcgccataaaccaacagtccaatattgcacaaacacaatccaataacctgaatggtatttttgaggcgcaaagcgtcgtacacgaggaatagttcgtagagaaatccgaaactgtacagtgcaaggaaagttgggattgttttagaggaggtcacaagttcggcttcggctgtgagttggagctggaagtttgcgaagatatagctgcaagtcggccgttagaaagcacgggggataagatgtccagacgcaaacataccattgcagagcaagggtgatgacggtttgaactaatgtgacgatggcaaaggaccacgtccaaagggaattcggtttgtacattttgcgtcgtttaggggccggggacacatttgtatagccttctctcccgcggaaacccccgtgatctcgtctgaacgaaggatcaaaggatccgccgaacagggacgctcgtgatgatgtgtgggaataaatcttgacaaagtgctccgtgacggagctggtatcgtctaagtattcgggctgtgggtacaatatggcggtttaccaccgacgcggtggtaagcaggcggaacgcggttcgtgaacggtcaggaggcgtggtatactttgtttcgacagtccggccctgtttgtcacacggcgtcctagacactgtttcgtctcaaggccgtttaagtattcaggaggtgaccgatctcgaccggagtcaataagcagcgacaccaaacttctcaactatcatacaacctccgacagaaacccccaggttgtagaccggtggactggggtaaaccggacgagaggagatcgcggtcgcagcgtagaaagcttggtgggtgatggcttggatctccagaaaggtggtgccaagccgcctgtgatacgctgtagtttgtcgggcggggaggctcacatcgattgttcgggcgaggtcgaaggctgagctgcaggctggagggagtcggggatggctaaggatcggtggagggtgaaagcgagtgactgggaacgaaagaatcacaaggtttggaaagaatgaaaagagatcgacagactcgactcggaaatgagggctgggacaagaggacaacgggaggagtggaagaaaaatgcagacaataattagagagattctgggggacgcgaaacagcgggagagtccggtaatttccaggccagcgagacttgctgggtgcagagccgtggttgaaggccgtttaaggggaggatcggtgggactggctgactggtacggctcacgccttacgtggttcatttgccaagaggncagattttacggccttttcctgacagttaacgcgccacttacctttttctgtacgttaccagactatccacctttttcaattaatgaagttttggccgaaagttcactctttaacaatggaccccgctgaaattagttttgacttgttccgtccttaccgaaaaaaattgccaaacggtaggtaaattttttacgccttcccttttattggggcatttctgccg

SEQ ID NO: 2385 - DNA, 1752 bp, Emericella nidulans
cgtttaggaaattaacaaaagattggaaaatgagccgtccgtctggactccggatcttgggtccattcttaaaaggccagggccttccccccatgtaattgccatcgaactgccggcagtgaagatcggctaagggctctgccgccactacgccgaaacattgggggagatgtggggaagagtcaagactagctgtcggtccgaaatcgaggtcctaaataggtctgagcgatatttgagagagcatcatttagacgattattattattgttgtttcagaaaatgggtgctgaaatcaaaatgtctcttcaactgttaagcacttttcgaaaacgtggtccgccgcgggatctcgaggactacagaagtaccagtatactctgtagcgtgagccgcatcactgatccgacatcagattatgtcagcaggtttcgggaatgcttcggaagagctcggagtttctatgaagtactccgtacatagtgtattctaagcttatggtagtggttcgaaacagtaagcgaagtgccgaacgcttgtaaactaaaactgggggtcatagggtatctagtcatgttaaaagtatcatgcactatttctctgcttatattcatcagtaatattaataagtgacagaatgtgccaaagctcctggttcccatccataaattaacagaccaaacaggaccgaactcataacgcccatgcacctgtgccatgcatccatagaaattgcgccaaacgatatgacagaagacctccgttgaaaccttgaaaccagcaggaatgtgacatggaaagtgaatcaggacttcacgatatcttgcaggatgtggctataatggccaggcactctatttcgacatctatcgcagtcggcacgataacccattgaaaataccagctttttggccggcttgattgatctgactgaacttggcgtttctgtcgagacagacgttccatgatttggtgccttcgatcttagacaatgaatcgtgtcgataacttcagctggtggttctggagtcggtcccttcgatgtcgggatgcttgaatcaatagtgaacggtgtttctgtatttgggtttggctcctctggtgataagctgtcgggcacatccacatccattaatgcatcagggccgtatgcacgcagacagtgcaagactcgttggttcgctgtagtcggattatcaaacagctcaatgtcgtcgggttcgccttcaagcccagcaggctccaaggatgggtatgcatatcccttcacggccgtatgcgggtccttgtcgcctgttggccagtccctgccctgcttgcgggggcttcgtacgggaagtggccggtgtttctagggtactggttagcttaggagttgagataagaaaaatcttgtagaatatgaaccttgttgtctctggcgctatcacctttatgaacggacagatcctcctgctcccgctgccgcttggcggaggagcaggccataattaggctaaccgatgactgcaaatataatgagtgtattcacgtgagttaacgaaaacgatattacgactcaactgagtcaaagcatacaaaaatgcaaatgactgtgcttgtgtagtaagtactggatggtctggggtcgaaagccacatctgaagctggtccaaataattaaaaatacgggcggtatagcacaaaacaggcaaccatggctggggccgggacacgggtccggggacctgccatgtgagccatgtaaagagg

SEQ ID NO: 2386 - DNA, 1768 bp, Emericella nidulans
cccgactgtgtgtttcttattacgtagaaggcttgtatagacagggtcctgttctcgaccggtcaccaccaaggtgaccaggccccgatgctgttccatcacatgacctagtacctgaaccaagttgaagacttccaaggttctttcccctactcctcaaccatcaaccagcatccatgagtccagtcctactaggaccaccaatgagaaggccagtttttccagctttaatttcgatctgttctgacaacgcctctcggcatgtcgagctcgacctccgcattaatgtccttctcctcggcttattgaggcgtcttgtgagtccccagactggggagttccaccgcaacccacacctccgcatggcctccaaatcttggcatatatcatctcgaagaaaatgctggcataggctcgttcatcctcggcagttttggccttagtactaattatttctatgtcaaggactctaggttttgattgattgaatcagccaaggagagactattggcaaaatcggctggctatgagatcataatgctaagcaattgcttaaaccatgctatgttcgacgttattagtctcatttccccgcttcctccccttattggtgctccctcaaatctcaggttataggcttgcaaggatgctgcgcaactgttggcgtgcggtgaacctcggtgaaatgtccaagcaatgtggtgggcgcctcccggcttatgcacagacaagatatctaggaacctctgcgctaaccttccctttggcatagaggattgtctgctgcgggtgaggccctaaataatgatgatattaatgtgtgtcaagtttgccaacccgagactgcttggggtgatggtaggaattctccatgttcccccaagtttgcggccttttccgctcgttgtcttcgagatttgctctctggggtgttgggggcgggtcacgtttttagcgagggagaagatcacctcgcatttcggcatcgtaccccaatcgccgacttcttcggcttctccaatggggcaaaaacaagagtttttgtggggcgcttgccaagatctaaccaataccgaatatcacaattgccgatcgcaaactagtgtgagtacgaccagcaattgccagtggttgacgggcaatgcgcgacgcgttggcattttgccagaagcaacacaaaagcttccggcgaagaggaaagtttcgatgaacgtttgctacttacatgggggatacccttgtttactttcacatgcagccgaaaagcgtgccttcggtggttcgagctcgacagctgaagttgcttaacattgtggagcaactaaaaactaatttgtgagacacctggtggtcccaccgaggcttcaagccttcacaacctacgattgttgaccccattctattgttcgatacaacgcgagatatcacaagctcaagaatgctaccttgtcagtcaacgcacaaatttgtggccagagacaagcttcctattacctcaccgtgtgtctccgatatgttgccgactccgaagaacgtagccgaagccatagagccaacaacagtcacgctgaaagcaaaaatttcagagtaggggtaatgcttccactgccaatgatcacagtacttttacgcattgataaactaagcgtatagtgggttccatagctggaacatcaagctgtgaagtgttgggctcggtggctcagggctcgggcgaggagctgccaatccttcccttttgttggtagcgtcaaactagagcacaggg

SEQ ID NO: 2387 - DNA, 1929 bp, Emericella nidulans
tctaaaagggctttctgtaggactgagcggagggcgcgtgcatggaggtggtgcggtggtgtatctgcgctcaagccgcccataccgcttcatcacaggcttctcctcactacaggaaataaattctgtcccagactaataagcaaccctcctgtcctcccgtttggatgctgcacggcatgtgcctctttgtccctaaagatcccctctggtcgtatatccttcggcgcccccaggacatcaagcatgcgccacgtgttgagttgagtgctgaggtctgtgccaatttcctgcaggacggatatcttttcgtatattgtcacggaagcggatgacagggtttgttggagggatattgcggtgttgaggcctgtaggaccggcgctttattgcgatgccgaggcttgctctgtcttcaggtattgcttttcctgggtgtgacttgcttggacgtattatgaaaggttgaagcagatggaaaggaagtgtaagtattcatggagtagatcgatggttagaggtgaaagtgagggttgttgtcgcgcaatggggttattgatcttcgtacaactattgcgagcattttatactgatacgtgtacaggacattcaccataaagaagtagcgtgagaaaagccctagaaatattccttgtaaagacggcactgctcctggacagacccagtctcgtagtcgagaccattgggtcagtcaaactttggcacgcgctcgaagaagcaatgttcctatgtaggaatcggtgaagaaacgttaaatcaggaagaaggatagacatatatgtaagtcctgtccgaccagagtattgcaaggtgacaaagcgctgtagagcaactgataatactcattcatccgctaggagacaatattcgtactattatttgatatacataatcgtggcacctccatcctcaacattacttgcggcacgctttactccttgtgggtagtagtcacctcctgcttttcagacccaatgagctcttcaccacgggtgacgtggttggctccaccaaacagagcatcaatctcttccagaggcacctgcttggtctcgggtataaaaaagaagacgaacaccgcaagcaggaagttgatgcccgcaaacatgtaaaatgcgtagaatccgcagttgtccaggaagatagggaagaactgctggaagatggcgtttgcgacattctgggtttgagaggccataccgacagcctgggctcggacgttcatggagaagatctcggatgtccagatccatactgttgcaccccaagagggtttgtctagacggatgttattagttggtgggtgacgggaagagcttagcgtacttacagaagaatatgaacaagaagagtagaaacacgatcgatatgccaacgggcgtgctctttgtatcgttgggcgatggtgtctcggtttcgacggcagacacgatgatcatgcaaatgcccataccgatgcctccgacaatcagcaagaatttgcgtccaaaccggtcgataatccacacagcattgagggtaaagaggattccgaaagtcgcgttgagggcgttgatgagagcaatctggcttgagctagggaagaccttctggtagatcttggtcgagtaagagttcagacttccctggccggtgacctgctggccagcattgataatcaaggctagtaccatacgcttgcgcagagacttatccttccagagagcagagtagttgctagagatggcttccttctcatactcaagagcttcacggattcgcaaaagttcatcctccacctcttggtcggtttctcgaacccttgcaagcgctgcacgagccttctcgatattgttgccacgctgaatgtacctgtttcatgctcagtgagaactatataccggcgctaagaaccttaccattgtcggc

SEQ ID NO: 2388 - DNA, 1550 bp, Emericella nidulans
cgtcgcacggtatcgtctgagggacactagacagtcccataaggcgcttgaacacgacatcctacagcttcaaagcgcgattcgcggctcaaaggccagagttcaggctaacttcattcgaactcaattgcgaagacaagaacttggaatcaaacgaatccaagctgccatcaggggcgcgctccagcgtaatgtcgtgtacgaccttcacgataatgtcaaggatgcagaaggtggagtacagctgctgcaggctgcgatccggggtgccttacagcgctcgaagctttcggaacaatttgaagagactcattctgaggaggacaaggttcaaagattgcaagcattgattcgcggcgcattgcttcgtcaacgcataggcgctcagtcgaaagaaatatcacaagctgaagaaagcatagatattattcaggcggccattcgaggaatgcttgtacgtcaaggtgtcgccaaaacacttgcttatctcagcgacgagacggagtctgttgtactcattcaagcacatgcccgtgccttggctgtcagaaagtctcgggcaacgttgagggagtctcttgtcaaggagcaacataagcttgttgatctccagtccatggtccgtggcggtgctcttcggaaggctcttaatctcatccgagaggcattggcggagtatacaccttcttttattgaccttcagagcgcagcacgagctaaagctacgcgatccttcttggtgtctcagcgaaaagctctattaaaagagagcgagtctgtgctcgagcttcaatcaattgctcgtggtgccattctgaggaaaagactagaagaagatgccgcgttgttgcaacaagagaaagctgctatcatcgatctacagtcgctcgcccgggcagctgtgctacgtattcaggttggtgatgtcctggagcagctggatgattgtgacgacgagatcagcgaattacaagcgcatatcagagccatgattgtgcgagtcgatgtcggtcagacattggctgatctagcggctgaagaagacatcattgcggaattccagtcctatatcagaggccacctagtacggacaaggttcgaggaaaaacgtcgctactaccaggagaacatggagaaagtggttaaggcgcaaagtttcatacggggtagaatccaaggccaagcgtacaagagtcttacaagcgggaagaaccctcctgtgggaaccgtgaaaggctttgtacaccttctcaatgacagcgaattcgattttgatgaagaaatcgagtccgagcgagcgcgaaagttagtggtgcagcaggttcggcagaacgagctcgctgagcagtacattagtcaactggatatcaagattgctcttctggtgaagaacaagatcacattagatgaggttgttaaacaccagaggcactttggtggccatgtagggaatctcctttctaacacggagatttcctccaaggacccgtttgacctgaaagctctgaacaaaacttcgaggagaaagttagagcactatcaagttttct

SEQ ID NO: 2389 - DNA, 1490 bp, Emericella nidulans
accttttcagtgggggatagcagagcatacatggggacgcagctcattcttattgtccatccagaccttcccatcggctgccagggggtgaacgaacgacgttagcagccgataacacggggatcgagctcgcaagagaggcgtactgccaaataccgagtctccaaacacgctggcaaaaacctcgtgtgtaaatttcccctttccaagtctgagaactaggggacttagggtcaaccctctttgcatagagttgagccgtacggcaacctggctgaacattattgccttgacattctcgcagtcgtccgtcagcaccaatctagcaccagccaggtgcaattcgacggttcgtccattctcttcgagcacattttgcgtccattcaacaaagttatagttcaagagctggtagacggcacggacggcgcagtcaatcccttttgcacttagagcgtcaatttgtcaatctgggggtttggcaaatgcacgtaccgaatggcagcctatatgacacaagagcggcggttgtgctgagtcgggtttgcttaatccttttcgaagagaagagccaaactgcgaggacgatcgcaacggtcagggacaaatagcttggtgcaggtgaatgagccatcttcagtgctacggacaagcccatacccgtcactacccagggtcaagcataagagtacgataaattctagctgcgtcagaaactaccacaggagaaaaaggaaggcaggataggtgtttgagtgaagaatgtggtattccccggacctgactatgtacttattgcactctcagtcgggtcccggtctaatccataaaaagatgcattgagttggccaaacatgcttcccatggcatgatacttactgatttctaattactaaaagtaaaagaatgtgcttgttctggtgataggaggatttgcaaataactctttattttaccctctaatctgtctctctcttttttttttaacctttctaatagatagttctatccctctccctaccctagtatattgtcactgaacgcactaataagaacaaatttatcagcaggcgaacagattatatcaaaccaaagagggcagatttaccaacaatagtcagtaatagaggctgctagcaaggctggcaagttaattaggctaaatcctagcagtggtttgcctcttgataacttcccttatcgttgccttgggcatgataactaaggtgtttattctactagaaagatggcgctactcttaacagacctgaaaagtaatagccctttgtcaagactcttgctactaaacttggttggttaatagttgaaaacttcaggctgggacttaatcctgcttacttgtatatctttagccttatcaggatgctgtcagactccttttgctggcccagttcatgatggaagcccgtggcatgtctcgccagtggatcgtaagttctgacggacacctgtgaaggaataggtctggg

SEQ ID NO: 2390 - DNA, 2086 bp, Emericella nidulans
  unsure (1)..(2086): unsure at all n locations
ttgcaaagcctcggcattgatggacatgtaggggacgcagcattaaaagaataaatgggtaaccctgggggaggtagttgaatgatccgacccattctctcgagcggtgggtgtacggccagaagaccagaagtgatagtaacagaggaaaggtcagaaggccggcgagtcggtaagcaaaaacgtgagggggtcgctggttaacagattgacgagtatgataccggatcaaagcgagaatgtcctgtgaagagttagtggttgcttccctgaaccctctgttgacaagtataaggcacgaggagccaacgcacaatattgttctgttggagatactgaagattggcaccccaaccccagaagcctcgaaagcgttaatcgaatgagtcctcatggcctagaggaagtactcacctgctaataataagacggccacacgagaggggaagggaagaaagagactgaagccatccaattgagcatgctgatcaggacccattttccattgaaaggagcggcgccaggctcctagcacttccacaggaggggaactaatacgagattaagaagccaaggtataataagagaaccgctccgcagaaagggaagaaataaagagaagagaaacggtgagggcactcaacacgcaaatgagcgactaggggtgagtctgacctgtgggataattgaatcttcagaaggtctgggctgcacacagactctaaaggctaagaagctcagggatgctgtcgcaagcggccagcgaggcttccggggggggtgaagcgcttgcccgcattcggattagctgcggtctaggccttgtgttccgcaattagatgcgcatatcatcacgtggctttccacgtgattacagccgaggcataggcccggcgtcttatctacatatccggggaaacatcccaggcttcttcccacccatgatctgtctgcggatgtgactgtggagtatctcctgccggaataactaactgtcttctccattgctgtcgaatattattctggtctggaatacctttagctttcgacaatggcggaccaggatctttccctctcaaccacagcacctccggcaagaccttcggccaaattctatcccttcgcgacctcaccggacattatccgttcacatgagaaagatgcgttcctcacggccaatttggccaacgaagcccagtctatcatccggacacttcgaggcgcccggtacgcgcatacctattcagaagcgatcaagcatctgacggagctcctatacttttcgctcacgacactcactggaaaccgaacgctaggagaagagtattgtgacctcgttcagttagaagatgacacactacgactaccatcaattggaagacgtgtcggatatatcctcagcagcataatggtaccatggacacttcagcgaatccttcctggcttccggcaacgtctccgcgccaaactggagcgcagcattgccaggcaacaattgaaggcacagcaggcgaaggattcgacaaaactccgttaagaacaagtcgaacagccccctttcttacgaactacgaattcagaatacattctagagcatctagattcgatcacttctctgtcgccaatatatgccctaagcatagcgaccttctacttcaccggctcatattaccatctgtcaaaacgtttctggggactccgctatgttttcacgaaaaaattagaagagaacgaacagcgcgtggggtatgaagtgttgggagtcttactcgtcctacaaatagcagttcagagtattcttcacgtcaagaaggtcagccacagcctgcagtcggaggaccaagacgtacactccgaaacctctggatccagcagtaaagaagatactttgacccgctcgatcgaacatccagccttccttcctgtcctccccgtgtctaccgcgagatatgacctctcggaagatccgaacgcaatcccttggatttcagatggacagcaggcaagtgtacactctggcttgagtcattcaggacccgagtgtactacttgtgncacgtgttttgctggcatgcttgtgtgactg

SEQ ID NO: 2391 - DNA, 1311 bp, Emericella nidulans
accgctccgtcaggagtgaccggataagaacattctcatagtccaacagaagcattgttacagtcacagcaaagagttgtgaattaagtctgagttccttctcctctctcctgcctaatagacagagtgacgtttcttggtggttggtccgccagctcgggggcacaacgaggcggtggggagtggcaggtctggtcgctgttgcgcgccgtaatattttatggccgcttttccgcacctatcgatagcagtgcaccagattttttctcaaagcaccggcgattcaccatggtgaaatcatatctgtgagttctggagttggttatttcttatatgcaaggtatattagctgacattaaggccttcagaaaattcgagcactcgaaaactttcggggttatcacctccgcatcgtcgaatgcgatctgggtgcgggacgatgcaatcgccgggatttcacgtcaaacaggcgctggacgtagtgtggttggcgcaggagaggaggttttgtgctgggatataaagaagggcgaattgctggggagatggaaagattctgcgtgcagggcgcaagtcactgtcattacccagagcaagacggatgaggatattttcgccgttgggtaagggctcaccaagtgcatctggatccggagcaatactgacatcacttttctctctgatttagctacgaagatggcagtattcgattatgggattcaaggaccgagacggtgatgatctctttcaatggccacaaatccgctattacccaactagcgttcgacaatgccggagttcgccttgcaagtggctcgcgggataccaatatcattctttgggatctaatttcagaagttggattgtttaaactgcgcgggcacacagaccaaatcacctctcttcatttcctcgtcccaacactcgagctgttgaatgaagctggattgagcgaacatgccggtttcttaatcacgaccggaaaggacgcattgatcaaggtttgggatttggcatcacaacattgcattgaaacccatattgcacagtcaaacggggaatgctggagcctgggtcttgccccagatcagagcggctgtataacgggcggaaatgatggcgagctgaaggcctggtccatcgacgagggtgcgatgattgaaatctccaaagagaaaaccggttcggagaatcgcaggatcttgcctgataggggatcattctaccgcaacggaaaggatcgaacgactggaatcagctttcacccccgagcagactatgtggctttccatggcatcagaaaaggccgta

SEQ ID NO: 2392 - DNA, 1157 bp, Emericella nidulans
gtgtctagtagcagagggctcctctacgcatcaatgcattctcgcacgaaagaaggcttatctagccgagatcaacgaaagttgcaatatcacaggtagcacaccccccatatgttccaccgcttggtacgggcctcaaactccgccctttgccttgtggatcgacggttcagaccagctagtcgatggacgcaaactcttgcatcgcctgtagagtgggcgtgagccgcatgtccacgtggttcattcaaaggttatcaaggagtacgagcatcttgatgtcctctgggcgatggatatgattgagcaggtcgcacgggaggtccggcagatcctttgggagactatgcctgcggatgagagggtgttgagtgtgacaccgaggggggtggaatgaatcacacaaggacaaattgtatatgctcatttctcttcatgtatttagctttgtacatatatacttatagatagatagaacatgacaacgatcgggatatgagtgcaagacagagaattcagtgacggattcacatggaaggcagttaattaatcttaagtaataggaaagatgtcttaattaaagattaatctagttataaaacatgcgttgagctgatccttccctttcttaccaagtttgctattgagatatgcagtcagcacccatcaatcgttccaccagggccgtatttgtcttctagttgatcactattatttatatggataggcatgcatcgaatctcagcggcactcctgtggctcccataagccacatattccaagggcttaccaaacgggtttaatataactagcacaaatccagctgcctagtctctcatccaataggagtcttcttcctgtctcaaatccctcaaatcctcccacctcagtaacattaagcccgacaaggatatacgaatctttggagcaaacattttcaattacctcacctaccaggctcactcactaaatcacaaggccacgggggtataaactgaaaggtgcaacaacaggtacatcagtcagcaaccctaaccacatttcaagtggccaagcatcaagccgtcaggatcttcctacaccagcaggccaaggctgtcatcgcagatgcaaaagcaaccccaccgtaagcctcaaggacagaagtaggatttacc

SEQ ID NO: 2393 - DNA, 1461 bp, Emericella nidulans
gctgtattttcagggaactggcgaagcaaactttcgacaacggaatgcgtctgggaggggttagaagctacctctagaaccatggagaacatgaaagaagttatcaattttatcagaaagttctgaatctattgatcttgagattgacctcaaggtgtcgtttcagccatacagacgcaaacaatagagcagactacaggaaggtctctccgagccgaagatcaaaataaagcttacggtgctgaagcctcttccggtaaaggttgcattcggcctaaacgatatataagtcgatgtcgaagaagcacccagctgttttgtgcatcggggcttgttaagggtaaagcaagaaaggtgcctcgaaaatctcaggagtcgctggatacaactctgaatgagacaggctctcttaggggctcgagagccgtaatcaaccgtgctgagctcgaagctgtcttactctgtccgtgcacccggtagatggtttatttgcctcaggctcttccgccgttacgtatgcgtaagtctaaagcggcggctggaggaccgtggggaatcatcacgatttcgataatctaatagctcacggaagacatgtccaggtgcaagaacaggagcaagtccaagcgtttaaggccaaaatcctagagatcagcctaacagccgacccgttccagaccgttacgcatctcatcttcattagcccgttccaagtgtaataaacgttctctgtcccccgcttagcgtttctcatactgctgatatcccatacgtccaaaggtctctttcgttccctggcccaggtaccaactctgaggtatcatctgccaaagatgtcgatcaagtatgtggatgagccccacttcattactcgataacctccagactgttcgtcctttgaacgcattcggcgacgccataactctggcttgcttcttatcactatcatgctgctgatgcgatcacctacttgccattttatactactcgacttggctagcaccattctaacggatgatctagttgggtaatgctcaatgagcgcagaggctttgttcacctgccgaacgaacgattgctatacaccagtccccctcgaacaggcttcgccttacaaccacccccttcatacactggcaacgacaagctatcactacgaagcagttccggtcaaatctttctcacaaaccagcgggtaattctcctttcattccgttcaaaaaatttttttttcttttttcttttttggctagaatgtgccttttgacaatcctctaggtaatctatattccagcccaacgggtagatgaactagaatcattttcagcccctctgctcaatctgcatgattctcacgtttcttcaccctttttcggacccaatgaatggaacgccgttgttcaaccggtacctggaaacggaaatcccccgtcgcaggttcaggtacatttaaagtacttc

SEQ ID NO: 2394 - DNA, 1585 bp, Emericella nidulans
cgtgcgaccacggcgaccggttgtcttcgtgtgctgaccacggacacggagaccccagtagtgacggagaccacggtgagagcggttcttcttgaggcgctcgagatcctcacggtacttgctgtcgagaccgttggaaaggacctggtagtccttgccgtcaacgatatcgcgctgtctgttcaggaaccaggtggggatcttgtactgggtggggttctggaggatggtgacaatgcgctcgagttcttcggtggtaagttcaccggcactatgagagaagttcgttagatggatatctcaaaaattgaatgcgtttgcggctgtcatggggtagaagcgctgtgtgcgtttcttccaagggagctgcaggaaaattgcccacataccgcttgttgaggtcaacatcggccttcttgcagaccaagttggagtaacggcgaccgacacccttgacctgggtcaaggcgtacatgatcttctccttgccgtcaacattggtgttgagcagacgaaggatgtactggaagttcgtcttctcgccggacacgagcgctgtgaaagaaacccagtcagcctaatttccttgccatctagtggtgttcgatgaacagatgggtgaaatccaaatcatctcgctgtctgttctgttctgttcccgctgctattcgtgaaaaccgtcctccgaagtcaccaaattctatcctcagagaacaatcgagcagagcgagcaaagcagtcgagtgggcaaatagagcaggaaagggattccagatgtagcacgtacacatgatgggcgatgggcgcgaacgggatcgcgagttgattgtcgacagcgagaggtgtgaaagaagaggttaaatcgagggctctggcggcttcaactttgctcacccgttgtgggatcggattaaccgagtcgggaatggtcgcttggagggctcgcttgacgaggtgctagagcagatcgggttagcctatcacgtgtatccgacagtcaaagtcagattcattaatgactaaccttttttatgtccgacataaagtggaactgacaacacctccggcacacgatctgactacttccatatgaactaccaatgcgcttgaatgtcttgcatatttcgctgtcattcaatctccatctttaagcattgactcactacgcatttgcttctaagaattcgccgagattgattttgactgattggaatgatactacaaacggaatgcttaaaatagtaccccggagtctcttacctgcttggccggagacttgtgtactggtttcccagaaagtgtcctgccttttataggtgtctttgccagggcccaatatcgcggtcgatgcagtattgatacagtaatgaccaagaagccggccctggacaaagcatgccacaacctctcaccatgcggtgtatacctgggacttgccattgtccagtcatgccacagtctctgcctaagttgtgggaagagaactatcaggaatcgcacttgcaacctttctttcagttcaacaagcgaggtgcgactacaggtacacaaatgctggttcttcggcggtggacattctttgtgg

SEQ ID NO: 2395 - DNA, 832 bp, Emericella nidulans
actggagctgtttaggcgaggcagctaaagaagctgctgccttggagaaacataaacatgttgagaacaaattttttactgctgagagcatttggactgaagagaatgaggtgggtggtaaatgagctgttaagtgaataacaagtgtgacacttagataccaaagcacgtgcccagcaaccttagatctctaataaataatagatgtgtttatcttacgagatttgttttttgctcgttctctgctgtaatagtgcattgtattcctcccaatacctttatatcttgtaccagaaacgaggtgttgagagtacgtttcataacaccacatttctacagtagccttcctgacagactacatagatgtagctaagataaagagcttatatggctttaaagtaacatttgattctgcatgaaaagctcttgatcctgcccataggtgccgaaatctttgaagtttgccttgaacatttgaaaatttgctaatagctcgaaaaaatgtcctgggcaaggaatcctagcataataacagatgcagcgtaatgagcacaaacatgtcacaatgtcctgaggcactggcagctgttagctactatataacgcgagccatttgacttcatagtctacagaaggagtgtgatgcttggggcatcttaataagcagtggcagatgataaacacctttacatggtaaggaagatactacagccagtgccacaatcagaagctattgatcctctcttatgtgcatgcgatgatggagtgtaaaccctcactccgaaatcgatgccttgctgccttgataacttaccttgccagcatgcatgca

SEQ ID NO: 2396 - DNA, 4153 bp, Emericella nidulans
gcatccttgtaatctcgccttcccccgtggtcttatgatcggtaccgattctcacactcctaacgctggtggttttgctattgctgctattggtgttggtggtgccgatgccgtcgatgtcatggctggccttccttgggaattgaaggctcccaaggtcatcggtgttaggctcactggtgagatgtccggctggaccgctcccaagggtaagtatcattatttacatctgacccaaggcttgaggggaattgtgcactaatactctcttagatatcatcctcaaggtcgctggtctcctgactgtcaagggtggtactggtgccatcattgaataccacggtcctggtgtcaactccctctctgccactggtatggccaccatctgtaacatgggtgctgagattggtgccaccacctttctcttccccttcaagcgacggtatgtacgactatctgaaggctaccaagcgtcagcagattggtgactttgcccgctcctacgccaaggacctacgcgaggatgagggtgctgagtacgaccagctgatcgagatcaacctgtccgagctcgagccccacatcaacggtcccttcacccctgacttggctactcccatctctcagttcaaggaggctgtcaaggccaacggctggcccgaggagctcaaggtcggtttgattggctcttgcaccaactcttcttacgaggacatgtctcgtgctgcttccatcgcccaggatgctctcgaccacggtctgaaggccaagtctatcttcactgttactcctggttccgagcagattcgcgctaccattgagcgtgacggtcagctcaagacccttgaggagttcggtggtgtcatcctggccaacgcctgcggtccttgcattggacagtgggaccgcaaggatgtcaagaagggtactcccaactccattgtctcttcttacaaccgtaacttcactggtcgtaacgatgccaaccctgctactcacgctttcgtcacttcccccgaccttgtcgttgctctgagcattgctggtactctcaacttcaaccccctcaccgacactctcaaggacaaggatggcaaggagttcaagcttaaggcccctactggtgacggtctccccagccgtggctacgaccccggccgcgacacctaccaggctcctcccaccgaccgcagcagtgtcgatgttgctgtttccccctccagtgaccgtcttcagctcctcgctggattccagccttgggacggcaaggatgccactggcattcctatcctgatcaagtgccagggcaagactactactgatcacatctccatggctggcccatggctcaagtaccgtggtcaccttgacaacatctctaacaacatgctgatcggtgccgtcaacgctgagaacggcgaggccaacaagatcaagaacgttttcactggcgagtatggtgctgtccccgccacggctcgtgactacaaggctcgtggtgttaagtgggttgttatcggtgactggaactacggtgagggtagctctcgtgagcacgctgcccttgagccccgccaccttggcggtctcgccatcatcacccgcagctttgcccgtattgtaagtctcatgcgtctcattcagactaagtagtatttggactaacaaatattctccagcacgaaaccaaccttaagaagcagggtatgcttcccctcaccttctccgaccctgccgactacgaccgcatcccccccgacgccaccgtcgacctcctctgcacggaactcgccgttgacaagcccatgaccctccgtgttcaccccaaggatggtgcctccttcgacgtcaagctcagccacaccttcaacgagtcccagattgagtggttcaaggacggttccgccctcaacaccatggcccgcaagtctggcaactaaacgacatcctgtaaattatgtcttgtgctttgatcagttagcagcgagcaagaaaaggcagtactagagctgctaatggtctttctatgattgatatcacggagtgaggtttcgaaaaattttatgaatcgctttctgctcaggggatgtatcggcaacctttgggcggactacatggatatatcacctgtttttgttacatcgtccattgtatgttagggattggatgcataccatatactatttcgtattaactgcttccttcgtgactacttccttatactgtaaactcttatcaattaggaagctctcagtgggcgatgacataagatcgcgtgctctgcggtgccgactggccgaggccaaccctttccgcgcctgccccgcctcggccgtttagcaatgagcatgtcagcgtaaccgggcgtatatgatgggccttcctctcaacataatggcatctcccttaaactagatctgtaatttaaatcggctcatacttcggcttcgaccctgctcggtgaggagaaatatagaatcccgctccgggaacagtgctgaccacgtatcatagctcaaatcaaactgaagggcattaagctatcacgataaatggctcatctagtcccattacctgaggtcgaaaggctcagtgcgtcggtggtgcgggttctgggagggaatcccgggaaggtgtgttcatctagccaatttttcccctttctcttactatggggctttggcgtgttcttgatattcgagttcgaagcattactattttgattactgacagagcgacacttgaggatagtttactctacaaggtttgtttcacttatgtcatagcagggagaaaccatagcaaatctaacacctgcaggaacaaacacttatctgatcggacaagggcctcgtcgtatccttattgacaccggcgaaggcaagcaatcctgggccgcgcatctaaaaaaagtgctgtcggatgaaaatgcgacagtccaccaggctcttataacgcactggcaccacgaccatgttggtggtattccagacttactcagactgtgccctgaagtaacaatctacaagcatcagcccggagaagggcaggtagatattcaggatgggcaagtctttcaggttgaaggagcaacgctaagagccgcccatacgccaggccatacagttgatcatatggtgtttgtatttgaggaagagaatgccattttcacgggtgatagtgagtggtcatactccttggtgatgattcttacatccaaggcgctgattcggtaatatatagatgttctaggccatggaacagcagtgtttgaggacctaaagacctacctcgatagcctgaagcgaatgcaaaatcgggtctcaggtcgaggataccccggtcatggagcagttgtcgagaatgctacagcaaagatcgcagagtatatacggcaccgacagcagcgggaggacgaggtgatccgcgtgctgcggtacggaaaactagacgtcggcgatcacgagcgctctccggagcggaagtcgtggtggactcctctcgagatagtgaagatcatctacacagatgttcctgaaaacctccatctccccgctgcaaatggggtcgtacaggtgctaagcaagttggaagccgaagggaaggtcattcacgatacggactccgaccgctggacccttaacacgggcaaatcagctttgtgatttaacatgcggatgtccgtacagtctctgcttatcgctgggatatagtcaggcagattggataggtgcccaagtggtaaccttggcataatcatgcaaatcccacctagaagccaagcgcttggactagaaagacagaagttttctgggcactgggcgcccttttttctttttggacaagggttggaaatcctggcaaaaaggttagggaatatttccatgaacaaccccgggccgggggttttgcgccccaacttaatggttggtcaaggccccacgactttttttgatttaatggtaccggaccaatttgttcctccccggttggggattcgaataactaaaaattctggaggcctgggtgccacaaaaaaaggtgggctaacaccctttcttattttgtttaaaggctttagaaagctggaattattttttcgtcaaacaagaaaagaatttgcccttgggcctccccccccccaaaaataaaa

SEQ ID NO: 2397 - DNA, 706 bp, Emericella nidulans
ctttggactaattgtccgacttgcggccaggcgccggggtcgcagtctcaccccgcagaacccacgcggcgccgggtgaaggagttggaaggccaggtacagtttctgaatgagcaggctgcgaaaatgtgtaagtttgcttctatctggatcaagattaccgcgggaacctgctccgctaactcttatgtttacagcagagaaactgctcgaatacgaagcggaattacgacgactccgtgcgcaaagcccaaaccaaggccagaaccagccgtctagcttcacctcgcgaaacggcttctcgatatcgtctacctcaacctcctcgcactcgccgtcgaactcgcagtctcaatcacccctgcaagtccagcagacccagagccggctctcatcccttgcctcgctcctcccctaccgccgtcccagcacagcgtcctcccagccgcagtcgcagtcacaaccaccggcatcgccgggagcgcaacaatgccagctggctccgttcactcaatccccgcctccgctctcacaaccgcgcaccgacactccaacaccacgcccctcctttgaagaaaccctcgagcttcagaacgcgctgaaccgcgagcagagcctccgcaaggcagcagagaccaacttacgcaggcaagcaccgagctggaagaattgacggcgcacgtgtttagccaggcgaatgaaatgg

SEQ ID NO: 2398 - DNA, 2001 bp, Emericella nidulans
gctattgcgctgctggagtagcaaactctccggtccatatcgttcgtcagtgtcgtttggctcataaaagtctccatttgttgctggtaatgttgaggatgggtgcgagttatcaaggggcccagcggctggtccggtgagacgttgctcaactgacctgtgattattagacgatgcttgttagaatctgaattccctcttacattctgaaagtagctagaaccgttgaataacagcactgcagtatcagatacgaacgagtctaatgatacggtaggtagtctgatcgactgagcagcagcagcataaaaactagcacatggcttcatgacgctgccatcggcaagtcaaccccaaaaatgcctcacaagagatggacagacaaagatgagtgatgaggtggttcatatttctgaattctctttctttcaatggcggtcattccccgcaccaaagcgcgcggctgatcgtgactaggatcagaccgctgcccaccttgagtatgggctcaggccttagaatagtcagtttctttggtgtcttgagcctacgcataaacgcaacgtagtttgtgacggttaatggatcgatttcttgaggtttgaacttagaagatagcagcagtcttgcggcgctgcaagcgcaagctgtgcctccctgtcgccgtgccctctgtggcatatgctgtccagttctgaccctgtcagactggattaactggatataattttgttatgaacaagtgtctactcattcaggccagagggtgtacatcgcgaaataccactctaccttcatgtcatcacatatatctagctgatatactctgattgtgttctatacagacagagctttaacgaggtcacaaaagacgacgcgtgaaggaggtagaacaaaaggaggtgtatcgccaaaaacacttgccagcccaatgcttcctgaatttggcgcattaacctccgaatgctgtggtttcccagataattggcgcccaaacaaaccctcccatccaaagtcggcgatctcaatcaagctgtccatgcgattgacctccaaggccttgcttgtacaaccaatttgttgtacatgggccccagcatccacaataatataattggctgaatgcgagtttgaaagcaaggccacgggctctttggcgagtttttggcgggaaagcagtctcacagtgtctatgtcaaatatctgtaccataaacccagacttgcgagactttcttgaagtagtcttcttctgcgttcgtgaagccgtagcgaacgtccgcgttctggaattcacagctagcagctggcgactgtgttgcatgtctggagactctattgtccttacagcatcattgactgtatcccatatgaacagcgaacgactagtagcaacaatcagatggcagcccagaaaagcagccgcgcaaatgtcgccagtataaagtccaaccttgctacatctgacactgcaacttcgtacatcgacaaggagagtgaggctaggatttgtggacgttggccgcagagacaccgcgaggactgatccatcctcagagaagcagactgaggcagacctcaagagacagtcagcaggcagataacctttcaaatcgagcgtatttcgacacttccaggtctccgcaggcttttttggaagactaacatgacgccaaagacgcagcagtccatctgatccagtagtcgcaaactcgtgactgtctggtcgtgaagcaatattgagaacagtcgcgggttcacctgtgggttgatgtggactgtcaatgcgggtgactaattgccaaagtaaggatggctcatcccagcgccagaatttcaggtaaacctcatgcatttggttcgttgttatgtcgagagcctcaacatcttcgggattaggactccagctatcgatagtagccatccatttcccatcttcaaaaatgctgagatgctttatgtcaggagtgaggatatgggacccatcgggacccgatgtcat

SEQ ID NO: 2399 - DNA, 3149 bp, Emericella nidulans
tatctgctgtacaaattccgcctttataaccttgccttcgacatctgtcagctctcatcgccggcagagcacgcaaaagtatctgcactagatacaagaattgtcaatgagcagcagtcccattttgttcgatttgctgcgcgacctatcacagatttagacccgtaccatcaagcccactactacatcctcgcaaactacaccaaccatctcacgctcctcctccatcgaccgtacatttcaacggccaattttagtacgcctttttcccaaagccccgagcgatgcgagcacgctgcgacgactatcctctctaacttcgaaagactcgcctccgaccccctcttccagagctaccggtggtatgttgacggtttgggctcattctacgctttcttctcgatcacgacgctgctaatccttcacggaaacgggcaactggatatacagtccggctctctaatattgaacctagttcgccgttgtgtggatatccttatgcacagagcaccgagaagctcggtttgctcaaaagctgctgcaattcttgagccgattgcgcagcgtctggatccgctgggacttagaactggccaggctaatgctgagcaaatgagtccggttattgaggaagagacgattctctctgcgtttccagagcttggagggctgttctttgacgtcccgtgcgagcaatggctgactccggcggggttcccttgggtagcgtcttgagctttggcgggcccgaccctgtatactgatcacgctggactcagctacaatcggtgctggacggccgggtactactgcaacaggacggtgtctcagcaaaaagcacacggtttcacaggcgagctaagaccttggaggaagcttaccacaaatcttactataacttgatttacgacctttgtcatcacttgttctaacttatccggtcttcaaatgttcagctcggcaccgtagtgttctagtaacatcttcaacacagctcccaaccaccacggcatcagggtagagtctaaatcacaaatatccccattataggagcatgtgattctccaaatcaccaaagagacacctcacactcgcagcgactccaatgaaaggctatcaacttatgctctggtcacttccgccacgagcgcccagtacacggctttcacaacctgacgtggcgcagctacgcactgtcttcggctgaacgctggccgtcgacgagaaacgtcaaagtgaatgtttttaagctggatattcttaagaggcattatttgacgaaatttcctcgaggagtaggagatgccatgatatgttatgtatgatataggctaaggcaaggctgctaagagggtgatcttgtatacatcgctgttttcagtaacgaggatactaagcaatccactcaacgatcccctttcaccctttcttcttcccctctccgtcgccaaggtcattgattgtatatgtatccgtaaccagatcgacctccctcgagttcacaaacgtcgtcctcttccagaccttccaaacgataaacatgcccagcataatcggcaactcgagataaaagctcacgaaactaacaccgtcaaatgtcgggctaaaacagctccacccctgtacaagcacgatgactatattcaggatcacgcagacccagggacctaccgggtacgtgaagttgcgaaacggcagcaggtgtgtcttgttttgctgtttcagtgcggcgcggaacctgatgctggttataccgatagagatccatgagagttgattggagacgccgacgatgctgaggcagtggtttgtcagtataccttgtgtagcatgaatgcgagggaatgggagcgtacttctgcaaccaagtccagagctgcccagctccgatcttactcgagccaaagcatagcccactcacggccccggtagctagaacagcaatccatggcacatggttccgattcagcttcccaaagaagcccggcgcgtgcccagcaacagagagtgtgtacagaagccggacgcccgcgaagagcgcgtggttaccggcagacaaaacagaagtgaggatcacggcgttcatgacgctcccggcggcctttgtgcccgtcatttcgaagacgagcgtgaagggagacgttttaaccgtgccgtcgttgagcgagggatagttgtggggaatgttgaggccgatgatcagggaggagaggatgctattgtccatcagtaaagcggcagaagacgattaaagtgcgtgaaaaagacagactagaatatgagaatccgccagaagacattgagaacgacttttggaatagtccgcgctgggtccttggtttctcctgcggtgatggcgatggattctgtgccgccgtctaacaatctcgacttagcagcgatcctttagaaaaaggaacggaaactctcacaggcaaacgctgccgttacaaagacagaagcgaaccccccgatccctccaacgaacggcgcatctggaatatgccaattctcgccgccgatatagcggccagattcgtttccgccgcagttgaccacgattcctaagacgatgaagacctatttccgcaatcaacacttgccgattctgctagatcagaggacaacgcccactaacgatgatagtgatcaccttgagcacgctcatccagtactcaacctgagggaaacaggattagcggagggaagatccgtggcgggtggacaacgcatacctcgccataaacttttacggcgaacaagttcagcccaatcagcacagcccagaagatcagactgaacgcccagccggggaagttgtccgattcggtccagtactgcagcacaatctgcagcgcaaccaaatcggacgccgtagataccgcgtcgttgaaccagtagttccacgttaaggcgaatccaaacgcatcatccacaaagcgactagttgcatgttagcccagtcccagattcagattcaatgttcagctcgaaacgaagttggttaggagccgtaagacatagggctggctcacccggcaaaagtacagaaactcccagcgacaggtataaacgccgccatttcaccaagactcagcatcgtcagaaagacgattccgccagagatcgcgtatgcgatgagcatcgac

SEQ ID NO: 2400 - DNA, 2020 bp, Emericella nidulans
gactggaaacaagaccagcacgatcgattatcatttgcgatctcagcgggctggccactctcctgcgcaggagctatcggcaacccgtttgcacgcctagtcaaagtggctgagtcgttcaatcgacctcacattgacttataggcacagttgcccaatggcggtgttttgggccattggacgtgcctgggacctggtttgggggccgttcagttctagcagaacctgaggggttcgtcatgaattgtgcacgagtactagatcagaagaggcaaggctcaaggcgtccgacgtctgagcacagggctaagtcgctgcgaggagatagagtccgcccaagattgcttgttccgcatttcggagagtggagccggctctggcctaatgaccataccactatacatcactatgttcacagtggtctctctctacctctcgtgttcccaggtacgccaacctggccgaagcatgaacttcagcgaaacgaaaaaggtcaatttcttgggtcagccagttgtttatctggagtcaaaatactcagtctcaatcttcaattagcttatcatgaactaaatatgggtgactaggaattgagacaaatcttacgccgaggccacatgtattgcgaccaagaaaggtcgatgtcttggttcagccctacatgggcgaacccagtggcgcaaatgctggtcttgctagtgcatgaataagaggctttgttagtgagagctgacgcaatgtgtctgagcttaattcagaaggtagatgtgggactatatggtattcggacaacaacaaacgcaagatccacagaacgaacgcatctgactcgagcaatcagcatggtataagtaatcaacatagaaagaagatgtgcaaatcagaacgcagtatacacaatcatgaacatagcaggaaccatttgccggcataatcaattgaggatatgtggtatggacacgcagacaaacgcaacgctgtttggactttaaagagagaaacaaacgatcaagaataacagaacccaagctagctggctttaccaagcattgcggtcccagttcggatctatgccaacgtcagtcaaactgctcttctacctgatggccccggaacggagtgagatgcaactaaccttgtataaaactagcaagcaccttgctccctgtctgcagaagcgggtgtccagcgacaatctgcagaaaccgctgcagaccttctcgacggtgctcaatcacatcatcgctgaaccggtttgtgaacacctttcctgggagcgggggaatcgtgactcttgtgctctcgcgctctagtatgtcgcggaagtattcaaagtccgagtagcggcggcgcacgaccgagtgtttcagcttgaaggctgggatgttggtgcggcagacgatttcatacaaggtgtacatgttgcgcgacgtgccatgggtttgggggttccggacctgtgggtttccagagcgttagctgagtctttgtataaatttccaagaccaattgcgatatggcgtcggaataggtgtctgtttgaggagttgatgagagcatgaagggagagcacgtggggtagagtatgccagaataaagttatacctctatctcaaggaaattctcgggaggtccgtagatctcctcgaaggtttgctgtcgcgactcagggacagcctgcattttgaggaattttcgcttgcgaggttggtcgttacagagccgggggagcctgggaggtgggggggtatcgcggggaagtcgggcttgtctgtgctcaggaatgcagtagcggagttgatatatgattgttggagcgctgaaacgactgtatgtggactaaactcgaatctccgtaatatatagtcgggaagctgagaaagccggtttgctcgtagggacaaagtagcgggcttacgcgggtaggagttgcagtgggccactctcgactgtcgacagaaagacgcgtattaagttgcgatcaatacagaacacccgtagacttcatttatcatgaggt

SEQ ID NO: 2401 - DNA, 3198 bp, Emericella nidulans
gtcttctggccatcgttgtgattgtgcttgtcatcccacacttcttccactgtctcggtgtctatctcgggcctctcgcaatcagacggtacgggtatcggactgtggacgagcgccatggcagcacactagtcgaccataatctcctatgacctgttcgtcttctcttccttcgtctcaagccgattcttaagctgacgcgagatcgcgaacacagcagatgatgcgggtggcacggcgcatcataagagtgcagtcaaagggaggggcacgtagaaaggagttttccctaggatccgggggtctgagtagagaaagccatcaaaggggcactgttgggaagtcaactcttcacttgacagttgatgcaagcaccgagagggatatcgcttgtcggacaactcagaaaagcagtgaatgaggcacaaaacactggcgttgcccagtgcttatcatgtgataggtcaccacgaattgctttctctttgctttttactagactgttctactagaatattgtcagcctttatctagattttttgtagtctattcagcaaatcacacacttttaatcatataactattagtgactgcactgtaggagtaattgtgcccatttagcagccgaatgctcaagttttccctcagtccgaacctgagataagaatcgaattttcaggccaacagtccagggccaatctagtgcctgtctattgaatcccccactgtatatccccttgcaatgcccttgcgcccttgcacaaccagggtactgtcattctcctcgtcatcatactcaacattcgccgcactattgaaatcgctccccagccccgtccacgtccgctgagatcgcaagaattccgcccctggcgagaaagtgttgccgaccatagccaggtcgccttttgcccttcgagcaagcgctcgtgctgcagacggcccatcagccgcacctgtctgcgcagatattgctgcagtggcgccttgggaagcggagacgcggggcgcggaatcgcgcatcggtcgcgagtaggagacgtaccgaccggtgcggaggtcgaactctggtggtgcagattcgggttccgacatagcatcctcgtcctcgtccctggcatgatccccgaattcgggtccctcgtttgccttctggctgtttccaggggaattggaacttggtggtggctggtcaaggatgctctggaagtcgctctgccaggcccctgtccagacccgctcctcgtcccccttgagtgcaacttccaactcaaacggggtgatgacgggtttccagaaatccttgctgtcgactagcgaactttcccagcacccgatgacaacccaaccaccaatctcgctgaagttggctaccttggctgcgttcaacttgcccacgacgaacatgtaacttttcttccctgcagctgcgatcttgtctctgacatgatccacgatatggaggtagttctttacgctcagtgtgttgaccaaaattccgaaaataggcaccgtgcttaaccgtgtcaagatagcgtagcgacgacgcaggaccatcgcagtcgatgcgggtagaggctttacgtctgtgccagccggcccatcagtagggtagatgtggattgctgccacgcgagatgctagcgtcagaagcagcgctgtaggcggttcggagatgtggaagagctgccaattccctagcgactctggagcctctttgaccgagtctggaacggtgcggttaggtatgacagacgacggatcgtgaaccaacgccgtggcaaacagactgctgtacccctcctgcaccagccgcgagtatacttccgggatatggtcagagtaggttacatcggcagcgaggatcacctttgtttctgggtccgggtaggtctctttgaacgccttgagaactgggtcgagaggcaactccttgtgcgtgaaaacgtagatgactggaagtctagcagtcggggataggcatgaacgtccgtagtgcacgacaacgtccgcgtcgacatgttctgccgcgacctcgtcaacacagcaagtcccgtaagatgtgtcggccagaatatagagcttcggtgaccactcgtccgcatctttaaggtcaaggcgagacgcgaatccactaagcggcgggtaggctcagtctcggtgtttgccttcggaaccccatcccacaatatcccgtgcctccaggccccgactcagcagctgaaacacccttggtgcatctggaagcatctcatccggaaactgaagcgcaatccgcttgtaccgcgcctggcggatttccttcaacgtgcgttcgatgtcatacgtgatggcgagttcctcttccgagagaatgcggttggtttgtggtacaaccgggtcggtctcttcgaggatgcgatcatctggggttgagagaacgggcgccgccgctaattctgtggtcattttgactgtcaatctagagaggcgttgatcgtgttgtgagaaggggcagttgtgggatgattattttttctgcgagcaaactccgtatccccacctaccccgcggccaattactgaggggccatttaagcaagcaacaactcgtgaaatgcgatgaactgctgacctatgtagacttctaaatttacgggtttatatcaacttatgtacaggcataaccagctctacaaatcagctttcgctggctctccggcccacactcgtcgaatcaattcccgaatgggctcgcgctcgatctccctcgggttccaataaggattgccaacagcaatatcagccgccttatcgatatcctcctccttcataccaaaggccttaacaccacgcttaaccttcagcttagtgagcaagacattcaagccctggatcgcatcgccgttgctctcaggcagcacctcagccaacttcttcatcgcctcagggatcttcggcgcattgtatgatatcgcatgcggcaagacggccgtgtgcgtctccgcatgcggaaggttgaagctaccgccaagggtgtggcagagcttgtggtggatagacatgcccacgctgcccaggcaggttccgcagagccaggcgccgtagagggcgagcgagcgagcggattgggaggaggggttctcgacaatctcgggtagggctgaggccagcgcgcgagtgccttcgacagccataaggttgattacggggttggtgt

SEQ ID NO: 2402 - DNA, 1282 bp, Emericella nidulans
ctattccaatttgtactagggcgtccggagctctatacgcagggcgtcacggcgatgaactattttacccagttacgcgaggataagcgtcctgattctgtagaaacagaagtccagtatagtccactgtgctctctttagattcagcatcgataacaaggtctcgttatttcatgtatactttcacagttctcaatcgtgcctcaacaatgcctgctccccacttgattagtggaagcacgtgatttcgcggctccttttttgtttctttcgtgcgcttcaattttctcctcgctttttctcaaacatcgttttgtcctcggaccaggcagccaccacaaatgggttgcaggactctacaaaggcgccaatcactaagcctgcctacgtgatgatagcggggccatctatactgcgcagcaagctacactaaaatcggccctgatactaggcctcgacgagtagccagtacaatggagtctctggaggaaacacagtgggatgtgaccatctccggcactggggttgcccagtcacttctagctttgtatgtttattccctgacttcatgctgctccttattctaatatataagcagagccctttctcggtcaggtaaaaaggtcctccatgttgataagaatccttattacggaggttcagaagccgcgctgagtcttcaggaagctgtagagtgggcttcagaagtaaataaaggtgggaacacagttggccggtgattccgaacctccccgctgactcatgttcctccaaggtagagaccgcttgtcttccttttgaggacgccacggtgcttactccgggctcttctgagtctggatctgatctagcaccttccagggcctatacgctgtccttgtcaccgcaactcatctactccaggtcccaactattgccaaccttggtatcatccaaggtctaccggcagcttgaatttcaggcagttgggagctggtggatatataaatcagccactggcggagacaaggaactatacagggttccaagcagtcgtgaggatgttttcgctgatgacttcataagtatgaaatccaagagaaccctcatgaggtttcttcgtcacctgagtcagaacgctgcgactcaagaggcatcaggtgaactgagttcaaagcttgaggaggaagattcagccaagcctcttccagaataccttaccgccaagttccacgtcccacctgagctctataaccctcttctatcactttctctgtcgcaggcgcctgctcagagcaccatg

SEQ ID NO: 2403 - DNA, 1226 bp, Emericella nidulans
tgattttccgacagtgagcaagagggcgaagattgctcgggaggcgagagacgcgagagcaagggcaaaattgtcggagattgcagtctagcttacttagcgagtatgcctatgctagtctatgaaagaagctcaaggattggttttagtataaaaacatacgttggtggtcggtgaacctagatatatatacataacagacccaaatactgactgcttcatctgccacgaaataggaagtcaagtataaagataaaagaaaagaaataaagggatgatcgcgctgtataattggcaaaaaaattcttgttaactcaccctgtaacaaagcgtatgtatatcatttaacaagaaaggaaaaaggccgtcttaatttctaatgaacagttgaagattgaaagggactagtagtaaggagctgatcatcgaagagctgcaagacttcctggcccaggttactgaatctcttcagattccgcatggcctcggtgatatcctgaagttgcttcgtaaagacgtctccaggcttgtgatacaggatcaagaactcgacacagagcgaaagaggaatgggcgttagagggtgcacctggagataacaaagcacagattaagacgaggactgggaactatatatgtaacgcattgggtgcacttaccttcaacgagttcaaatgcgataatttgtttgtcaagtccacaatttcctgcgcggctgcggatgatcgcttcttatattccgtgacaagatccctcttctcgtcgtgtgacgggattacacaagccattgtctggtaaaggtgtagaatgattgtccgccacatgagactaataaagaggagcatgggatcggtctgctgctgcatgtctaaggggtatttcgctgagaaggcctccatgcgttgtgttaggatggcgttgatccattgatggcgattccaaaaatcatcgacggcactgaaatataaatccccagctagacactggtttcgatgggacagcgcccggccgctgatcgttgcaacgacgatgcactctgtgaaagtggatgtgatggaagtgtcagcggcgagggcgtcggaaagaaatcccatcaaaatgggctggtcattttgaaagttggcttcaggacaaggaagccggatcgctacctgtggctagctatcagcaagacgttagatccaattactagggaagacaggcataccctctcgctgaaagttggc

SEQ ID NO: 2404 - DNA, 1044 bp, Emericella nidulans
gacaccgaagggcatactgcgtttcatgcgtgtcatttgactgtatgaaggaaactgatgtaaactgatgtggctcgtacgcctgtacttaatttagttaggattaccatctgctatacgctactcgtaccgtagtccaatcctgctgcctggtggctgtgcatttccacttccaagtcttcactccctgcggccagcggctctgtccgcaagtgcaggcctggtagtctaacggagccagaaaccacgggcaatttcaaggtacatcgctcgctcttctcggacagctggcaaggtttggctcgctcgctttcccgcaataggtgtgtgcatggatgcccggtcttgctgtccgatatcgctggcctgaggcctttccataccaactgcctccgccttttcaggggtgtcagattgcctgccaagattcaaccgcttgaggcccgggagccgcagggtagggtcaaagttgatgaggacaatcgcttggtcagtggaattgcgatcatcctggttgacagaatatacaattgaacgatcgtcagcataggcgtgaacctggccggtccgtttcgaaggacagagtaagtggttcagctcttgtggagcgtcatccgggggccagagatggatgcctcgagtttcaaagcgctcttcgctgttctctactaagcgtccgtctggttcgctgagttcacgcttgaacaggagccccggtttctcctcaagaccttcctcgtcgatgggacactttcgcttccgagataccacgcgtacccttattcgatcccgaggtacaaggccgccgccgccaacgcttctggggagcgggtcatttacgaggtcaatatagctggatgcggagatattgtatgaacggaatttcgttttggctagtatgaaatcgcgcctcggtttcggttcaacacctccgtcgtactctgagtgatagtgtctgcggagtcgtttccgtggaggctcatagttaggcttggatgacgggtcctagagttttggtgaggggctcgtcaggtagaggcgttt

SEQ ID NO: 2405 - DNA, 2220 bp, Emericella nidulans
atggaggaaaagagagataatgcggaggcacacgccccgtactgtcaacaaatgcaagttctggatgacggggcatatacgacagtttcccccaaaactattggaattagcgtgaacgaaccaacagcgacaacaacaacagggcaatatggaagcactactcaaacggcaaaggcgcaatatcaaagcatttgttattgtgtttcattgaccgactagtctggcttgtccgaaataaacatcaaccaacaacggcttatatcgtggcgtcggcgttatcaaggcatacttacctatgagcgatggcctcttctcgtgtggtctacatgatttctctttcggcgtgatggttttgttccttgtccattaagaatggcatgtattttgtctgattgactactacctttgttttggcttttcagtttatgatatcacttgttttcatccttgtgacgctctgccatgcctcggttggatctcgactctcgtttactgttatttgtctagttacgcgtacggcgttcagtggtatatcacggtgcatatggtcctcggattccgcccagtcgcttcttatttctgctcgactttggatcttaccacatcatttcgatagctatgtgcccggtgtgaatgatgtccttgggcatgaagacaaccctatgttcagacatcttgagaaatcaatacaattactgatgtacattctgggaaaatatcactccgtgacagaacgacctaaactagtagcttctcactgcttcgtaaatttagatgtctccctcgccttaggagcgaagatccggaagtatgacggccaacaacgtcatatgctcgtcgacaaccaaccatacttttatgcacgccttcatataaattggacgaggtttatccgtcgtctccaaactttttgatttagtcacatacccgcgtatatcttgattcaaaaacataagcattgccagccatgacctccctcctccgctacagccgctcaatcagagccgtcaaccctaggacctcccgattccctgtcttccttcaacaacgattctacgggcagagcacctacggagatggtgaaacaaaccctggagaagacaggaacgcaccgacccgtgacatggagcatccaggtgcgtgcaatttgtcagctctgccacccactgctaacacttactaggagcaccacccccaaacgtcagcaaagagaactccaccaagtcccaaccttcatacaagcaggacgaatccaggagcggcgtgctcgaagaggatattccaaagaaacagtccgacaaggctagaccggtcatcaatgatggccgtcagacatcgaatgtgaaagaagacggaaacacgaagtctgacgtgcccgaggatgtgaaaaagcataatgaagagattgatcagaggcacgacaagccttataatcgaattgacgatgggggaaaggttgggaagggattctgggggaagctggatggggcagagggttattaatccagtatatgtgtcctcacttctatcatgatcgccggttttaaaatcgatagaagtcggcttatcttgtattatattatatgttaagatgaatataaaatgagaatataaagcgattgactttttaaatgcgtagattgctgtaggttgactgcaggaatcgcgaaccagccagatttaccctgaagctctttagcgaccactgcggatctctcgtgtcttgaagcaacgtaaccccgacttgagctctcgatcaactccgtctccacgttctgcaattgcgtcgcatcgcaaaacaaatcagtcactcatttaaaattctggacttcaaaatggccaaggacaataaatactccgtcatccttccgacctacaatgaacggaggaacctccctatcatatgttggctcctggaacggacatttcgcgagaagtgagcggcgtccatacccatacagttactgatcaaatgaatcaaacagtttgaaaaaggaggggaaaaaaaagctaatatgttgttaaacagcaagctggactgggaagtaatcatcgtcgacgactgctccccggacggtacgctcgacgtcgccaaacagctccagaatgtctggggcgccgaccatatcgtcttaaaacctagcgctggaaagctcggcctcggaactgactacgtgcacaggctgctcttaacaaccggacaccttatgatcatcatga

SEQ ID NO: 2406 - DNA, 1027 bp, Emericella nidulans
gactgcgtgcaggctcttctagcaaagaaaggaagttatgaagatgctctagaatgcctagccagcaccgaggatcaaaatggccatgctgactcttcagaggatgagctaagcacgattaagaagacgtcgccagtggccccagcgaagcaaaatatcaaggcccgggggagaatccaggataaatggacggcaccaaacctgccgaaaagtacattacaaaagcagccagaagaggattcaagaccgcggaaacggttgattcgaggaccaaaaacccgggtgtccccgataccgtcaagccccactcagaacgaaacacctccaaagaagagcttcggtcggctggtccaagggcgcaggcgcccttcacctacacgatcagagtctcctgaggctcctcttgtgacctccgatgattctgactctgcatttgatgcgcaagatggcgcggatctggagacgaaagttcttggtttctttaacggatgcaccgcaccggctcttgcggacctagccgcgattactgaggaccttgctgagtacataattgcaaggcggccattctcatcccttgatgaagtccgcgtgattcctgctccggaaaccgaacaaactgcaaccaagactggaaggaaacgcaaggcacccaagccggtcggagaccgtatcgttgacaaatgtcttgatatgtgggtaggctacgaagccgtggattcgttagtcgctcgatgcgaggcgctaggaaagccggttgcgaccgagatgaagaaatggggagttgacatatttggcaagcgagagggtgaactggacctagtttcgatggagccttcaggatctcacgactctggtataggaactcccgctagtcaaccatctgatgaagatagtgatggtcctgggtcaaggtctcgaaaagctcggttcatttcgcagcctggaataatggctgaggatctcaaaatgaagaattatcagattgttggtattaactggctgtctttgctttttgagaatgaactaa

SEQ ID NO: 2407 - DNA, 3180 bp, Emericella nidulans
gctccacacttgtgctatcctggtcactgaagaagcaaaaatttgctggacagctgtcatgatgtagatggccaaagctacggccatgtaattggtttagttcttcgttgccagcttgtcgtaaaaggataggtatgtctttaacgtagcctgtagcaactgacaggttccagagacgattttcgcaaatccccagagaacgcgctgtccccaaggcctcgaagactgcgttgtcaggtaaatttctccttatatcgatactctgcacctggtcgacctgtgcaagccagctgagaacatcatagatttctgattctagttcggtcaaaggttcctttcttgactggagggcaaagttagtaaagttgagtgccatcgtaattgctgtggagttgtcgctctttgttttggatggtgccaatcgacaagtgagtattgtgagagcccattcccggaagctcgcccagttacacgtaggggcgtttttcgccttagccttcatagcataacaatcttcgtttgagcacctcttgacattagcgtcgagacaaacccgttgcaacccctccaagaatgggccagtgggccacctgtatgtaagtgcctccgatccgaacgcaaacaagagcccaggctcaggtgtggtcgtatgtgactcgttcttagccagactatcacgttgcgaaagaacattactgagaccttcccactggtcagctctaaagtgtgaaacatttaaattacaggcttattttacctttacaatcgttagtggcagtgagctgaattgttctccgtgaaacacagcaacgactctgttaagtccagagagtgtgtccagttggacattgcgatatttgtcacactttggttgtgaaatattctatagaagtggatatcctgaacatagatcaaaagattttcatatcagatataccgttgacaatgagcacggtatttgaggggccagaggatgcgtgcccaacaagtgaggcgaaagcagccaatccgaaagcgctgtgtttattctcaagatatacgaaattatcccatctagatcagacgtgtgtcccaaacttttgaaaggtgatatctcttgtctgctactgtgctcaccggttggttatcctcatactcaccgaccgggagccaatcatgatggagccttcaaaggttatttcatattggatacaggctggtcaggcttataggctgcaccttgatatcttactaatgagtagagtccaagaacacttactatctatgtcgtttgggtcactgtttgcagcctgtaaagccgttgctaggtcatcattcccggttaggaacatggtccacgtaactgaaagactggatgataaggccaagtcgtcaatccggtcttaaattccacaatatacaatgctacttgacatgaaatgtttcacgacaatcgagtcttcaaccgactttgtggaagaaaaatctcgagaaacacgagccctttatttgagcttttcaccagtcttccccatggtctcaataagtcgtccccgaatatgctccccgacaatcgtttccacccccgacccgtcaagtgcagtgcacttcaacttcagctggccattgaggaaaaaagggacgctgtacctatgcttctcggtgaaggtgatcacccgatgacgggcgctgcggtagtatccacccgtgaacttttggatcatgtcgccgatgttgatcacataggcattttcctgtggagggactggaatccaggtttccgtgggtggataccagacctctagaccctcggtgcccatttcttgtaggaggatggtgatgcatccaaaatcagtgtgatcgccgactgctgacagttaggattggttttccctttgtctatgaggggtctagggatagaagaggactcaccaccaaactgtctctcgtctctgactggctgaggagcgtaatgcagaagtcgcataggaatcgagggctcgttctcagccagcgcgtccagcgcgtccggcgggcaattccactctgagggtaaaccccttgcaaggattttgagcagcactttcaccagctggaccatgcgagcttggtatttcataatggggatccggaactggtcctccgggagtgacttcggccacagattgggacccgtggagaacgtaccgctgtcaggatggtcctcgggcacctcatggccgataatgaagcacttcccaatatctcaacatcagcacatcacctctctagagcaaaagaacttacctccttggtatctggaaggagaccttcctggtggacctggatgccgggaggctcatatccgcggaacgacctccccttactcttaccgatccatacgtccatcttctcctcctcggacagggtgaagaagagcttcgcgcagtccatcgcctgcttttgctcttctagcgagactccatggcctacgaggctcaggaatccgtaagtagtacatgcgtggcgcatcgcgttgacgacattctggcggtcctcctccgctgaagacggatcaagccaggcgctgatgtcgacggttgggatcgtctcgacactgcccattttgatttactgaagttttgatgctgtaaacgtgatagtattggcaaagctacttgctgatcatttactgctttgaagactggagagctattttataaaagtgatctcatactggagattatggatgatggtatggtcagactctgggccagcctcatcctgactatctggcatcccgaagctaccaatccaatcaatgctcaagtctgtcctatctggctgagttcatgcagacgagtggaaagtccgattacgttgctgattgcgagtatcgccgagtaattgcggcggcaccgttccagttgtaggcgtgaaactccgggccgagggcatggtgtcagaagaaccccatgttctccgattaagccttgtttatctttcaatacaccatgacagtttctgtgtcaaccggctgacagcagttctaattctcataggatcggagtatcgttatatgttagcaagtgttagtatgcggagtatctcgccgtcgttgctgcatcggcatgtctgcccagaacaacaggacaaagaacaatggattatgataatcaagccaaaacacaaaaatataatgagaacgattagacgaagggt

SEQ ID NO: 2408 - DNA, 1291 bp, Emericella nidulans
aacccctgagactggtttaagaatagagagcacatgtcgagccaaataggaagtggatcttgaagcctcacgtctggagcaacaccggctctttcttaacgcaacacatcttccaccgaactgtctcatccaaaataaccatgattagccactcttcggttagatcctgatactccaatagtcgctgtcagggtagagttgcatgtgatctggggtcgcaccactcagcctcataaagtctatccccaaccacttttctaccgccctatacaaaggacaacgatcagagtttccacccagtcaccccaccccgtctggcgaaatggataaacaggcgggatactgatgcaatgcgatgattgtctggagcatggggcgtataaaccgggtgagcagccagcactttctcattgtcttcaaccacatccagttttgactgtaggagaacaagcagaatggctcctttcatgcagaatggctccgatgctgacgatctctcctcctctaagtccaaacagtccacgcttacctcactccttagctccgtgcacgcagatcttctaagccaagctcaccgtatccccgctgacattcgcaccctgcgcgagctctcccaagctgggctgcagggcggtctgatcgatgacaagaagtaccttgtatgtcttgagcctggtgcttaatgggagatcgataagtattgtaggactgatctttgtatctgcaagaccgagaacatcatccagctcctcgcaagcctgcccaacacctccacactgaggaccaaaatcacagatacgtttgtcaagacgctctgggataacttgcagcatccgcccttgtcttatataggagatgaattccggtataggagggctgacggaagtctcaatgtgacccgctctcttgaaaagaaagaagagaaaagagacatacactaacggtccgtagaacatcatgtaccctcatcttggggcatcgggaagccactatgcgcggacagtgactccgaagcatccacgacctgcggtcttgccagacccggggctcatattcgactgtatgtcattgcactcttctagtcatcccgttcagttgctgatacagtgaatgcagcgctactggcccgtgaaggtcccgcaaaggaacatccagccgagatctcgagcaatttgttctattttgccatcatcatcatacacggtgactttcagttccgctcctatagtgtgcagtaaaactcatgtgcgtatagatctcttccgcaccgacgaggcggacccaacgcgca

SEQ ID NO: 2409 - DNA, 1021 bp, Emericella nidulans
tcccacgggtactgatatttgcaaccatggggttcagtagccagaagctggcatactttaacgcacgctccgcgctcatcccatgcgttagggtcagcgatttcgcgacaagccagcctgccacaacatcggacagcgcgaagagtgccttgccaaaggagaagaatcctgggatggcccaggtcgtggggaggagcatccacgctagcaatggtgtgtagcggtaagtgtctcgggcgtaaggggagtccccttgagatacgtagcgcgaggcgtcagtgaagaccatgtagtcgatatctgtgtatttgacagctgagtgggcatcttgccaggccccgtaaaagagaagaactgtgcggaggccagcagccaagccgtagaccatgaatggtcttttgaagagtgattccattgttttcaaattgaatttttcttgtaaataagccttttggtgattttgatggaccgggtcagtcatctgagacttgtcccactgcccgcctgaattggtaacaagcgggttcagcagttgggaaatccaatcactagcgaagaagcttccttaaatattaaatgagcacatttagacattcgcgcccaaagtttcactcaaacaggggtcgggtattgccgtcgtgtagttgttagaaatgcaggaaactcggggtatcttggcatcttcaaactattgatgactcagcaatcatggctgatcagcgttccccaatcgatgcaatatcgggtatagttctactgcagctggcgatatgacagactgttcatcatcatgatgtctggtcaaagaccacaggaatggattgctattggcttttatagtaggtttcagaagaccaactgaaatagcggacatagtagtccgggtatagaaacaaaaaacaatatatatatatatcaaagcgagggtttacgcctcgtgagacgaaggggtattacatgagaagtagggaagccaagcggttgtcaaaataaaaagatatggtatccacataagcctgac

SEQ ID NO: 2410 - DNA, 2569 bp, Emericella nidulans
atatcggggggtatagaggggccgctctgagcggttcccatgtctcgagggcctagtggtcgtctagaaggtgaacttagtgttgacccatgtgttggcccatgagagatataagaggatggccggggagatcggttttcaacgtgtcctagttcattgtcaccccaactggctgaacctgaactgacgccatttgctgtaggtgatgttgtcttcagcttggcaaggcgctgcgcaagtgcatctggaggtgccgaatatctattgggttggtcttgcaagccgaaggactggaactgcgaaggactaggcattcgcgttgacgagtctcccgcattgctctggcggccgcgttgacttgaaggtaaatatgttccagcaggtaatatctgcgatactggtcgtcgagagattggtgaggattggcccgccggcttggccatactcttgagattattctccacaatttgttgcttgattgagtccgcggtcccctgcttggttcgtacggcctagcgaaagatatagttagcgaagagaagcgcgatcgcaaaacaggtccgccgagaaggacttgccatcatcaagtccgaaaactgcttatgccaaccagggatctgcgtggaggcggaccgatagtcagggtgattagggataagatttatggtgatttccgaagcgcgaacatattgtacgtatgccctatcgatttgatcactgtctgcgaaccctcgaaacttcgtaattgcgtcttgagccgtggccaacaaatcggtgatctatattccaaactaatggtcaggacggtcgttttcagcatagcacaagccacaagccacttaccgtcgtggattcgttcacatctaatgctgctgcctcgtcctgaagggcttttatatttggaaagcgcggcgagagcccatcctgatgccccccacccggagccgtgccacctaggttgtgccggctgggagcatcctccggagcgaaactcggcggtgaaggaagcgccgcagcatctggggccattgtacaattctagcgctaggaattcatcgaagttgaaggacggtcaagcaaggcggaggaaaggccgatggcgggactcgatgtggcggcaacagagcaggcagccgtaaaaaggaatccgacaacgaatgaattgaggggatacaaggactcggagtaaaagagcatctatgtgcaactgaaagagggacagcatgcaggggcggatggaggatatagagagagcaggtcaataatcagcgcatcctgtcgctgtctgacagacaggtttgcgggataattctggggtaaaattatgtatgaatttatgcaacgtatacatgccacttggtgattattgaccgctctatattctgcctgcactactgggcggttctgcagacgaccgcctttgcctatgacgccacacggcacatgctttggtgctgagtcaaccagtggttaggcatccaggccaatggggcgcatcgcaagcaatacatggaaacctgggagctcaagtcaaccttggagctctcttgctgtttactgctgtctctcgcttgattcaccctcgccaacttctcctgtgctgttcctgcgtgtcatctgttaataagcaattttattcctcaactgacgctgtacacttgtcccctccgtgcgtcttattcctccccgcatccatcatggcgggctggttctcctctgcctcaccgctcgatgagcagatcgagcgcgctaccgcgtcttctcttgaagatatcgctctgaatctcgaaatatctgatcttattcgatcaaagggtgtacagccgaaagatgctatgcgatctttgaagcgacgattagagaacaagaaccctaacattcagatagcgactttgaaggtttgtttccttggtctgtcctttactcgactgttctgacaaaattaatctcttagctaacggatacctgtgtcaaaaatggcggaacccatttcctggccgagattttatcaaaagagttcatggacaaccttgtctcgctcctgaaagcggaaggtgtcccgctgaactcgagtgtgagggacttgatgttagcgctgatacaggactgggctatggctgcgcaaggacgcatggacttgagctatcttggggagacataccggaagctgcaaatggaaggcttccagttcccgcccaagagtgcgattagtgggagtatgctggaaagcagtgcggtaggccggaacagtaccgttccatctcaagctagtctaacgtgatttttatagcctccggaatggatcgactccgacgtttgtatgcgctgccggacgcccttcagttttatgaatcgcaaacaccactgcaggaactgcggaaacgtctttgatgcgcaatgttccagcaagaccctgccattaccccatcttggaatcctacagcccgttcgcgtcgatgacgggtgctacgcgaagctaacttcaaagccgtttaatcaaggctctttggcggatcgatcgactttcaagaacaactcgatcacaaaatccaatgtgttggaaccccgt

SEQ ID NO: 2411 - DNA, 3318 bp, Emericella nidulans
  unsure (1)..(3318): unsure at all n locations
cgtagatctttcaacagggacagcttgaccggagacttatctcccatctctttctcagcttccagcaaaactgaatacaaaggctagcggattcttccatcaacatcaggggcatcataaagcgttcccagctcctacttgccaggaaagatgtttcccccaactggacaccaggctccgtcaccttcagccggcagcaacgccgacggcgccgctgttgactaacaaggcacccgatcatctaaaagaagattctactcagctcgctagtctcagtatcccaactgcaaaggatgaaaatctcactgcaaccgtccgaggcactgacataccaacacacgatgcacaatttgccgtttgttagcgatgtctaggtttccgtatcatcacatccgtggagatctcacgcagaaagtggcaagtaggtgctttgataagggtcagttctggaataggacatgggacatgtaagatctcccgcacgtcagccctgaagtctagcaactaccaacgcactaagatactatatctatgtgcctcaacgtttaggcgggtgtcctctgctgcttatccctccgacccaggtccggactctgttccgtcaaatcaacaaggcgcttgactgctccttacatcttccaaccgaggaactcaggggcatagttctcaatttcaaccgcgagggctttcctcaacctaccttcctacgacaatcggacagccgtaacatgaaagaccgcttggaggcaactattcccccaaaactagatattcgagatggttccggagatatggacaagcaggagatgattgtctctgaaaagatgatggaagcagctgtatcatcgacaaaatttcaagtccaaagccaagaagcagcgtctccgtattcagcgtaaaaaggatactagtgatgccatcagacgttcattgtgctaccttggtctgcttgctgacttgacggaccatatcgacaacgaatggtataaacagctggagtccaaacagccccgtgtcgatgtcaacaagcccgttccttatccattctggaacgaggccgttttcattagcgttgatgtctaggtgcacgaagtcagccattcgcaggtcacggaaatcggtatctcagcgctggatactcgcgatcttatcggcgttgcaccagacacgaacggcgaagagtggcaatcgcgcattaagtctcgccacctacgagtgaaagaatacggaaatcatgccaaacatctgtacgtccgggggtgtccagccaactgtgaattcggcactagtgaatgggttgcatcggatgacctatcaagcgcagtccaagcctgcttcacccttccttcatccctctatggagccgacaagaaacaacttcgccccgttagtgtttgttggacacagtctagactccgacattcagtatctcaagcttgcgaacgtccnacttcaggggcactctggaatctctcagttcgttgatcgtattgacgtagcagcatccttccagcttctccggggcgaaaaggagcaacgctcactgggcacagtcgtccgggagatgggaatgactgggtggaatctgcacaatgccggaaatgacgcccgctacaccttgcaggctctggtagccatgctgataaaccacggcgttggcgggctaacaggcggatcgaacgttggagaaacgcctcatatctgtgtcgaaatgggtgattaagtgcaccgttcatcattcagcacctgtgtactgtcagggattctaaggaataaggcggaatttgcaggtgtggctgttctatgctcggcaagagctcgagaataagggcagttgcctgttacgtacaatgatccatatctgatcttagcattaccaaacggataaattcaccgcagcccaagccagataacatctttgcatagtatacccataatccatggagatttgaacatgggagacagattatggcaacataaataggagcccaagctgctggcaaggcggaaaaaaaactatttctccatttacggagcagaatacaaaagcacgccattgcgaaaccaaccgtcacgggcacgtaataataattccgctgttcagcccaagagaagagtcttagctgagatcatccagaagcggcccggaaaagtgcaaagctgactcagatctgagccaagcacaaccggtacatgacttcggccaaaacggataaactcaaggcacatctgacggactaggacggcccgttatggggcgtttaggatattttgaatgacaaggtggccaacaaagtatgattgagcatggcctcatagtaaccctactcggtcctacctgagttgaagccaagcatagaaatacgcagagatttcagtgcgcaaccgtcgcgccatcacttgacattcctttgttccgaatctcgcattgatggcacccccgaccgtggtctcgcagaacgcaggaccatatagcgccaatatcgcggggcttggctgatgcttgaacgaatggagtatcgcacagcaccctcggggtgttgagttcgaccagagccggacacgagcaggccaggcagcatgatttagctaacaacggctaagcgaagggctcttgggcttggactgcggatgaatgggttatctgactaagataagatggtttgcctgcctgggcattaccaagagccaagagcggacgggctgggctgccaagttcagtttcgacgctgagtgatacagaccttggctgtggggaatgatataatgtctgttatctagctaaggaaggaggcatattttctcgtccctcatgagaagaatgtgatctagagagtgtgtccaaggaagcaaaggccagtacgatcggggattgaacctctttcagttcaggtactcgtacggtaataattggtatggccggaatgtttggcgtccgactttcgaaagggttcgcggccccctatgcgcttcagcttaacaagcttactttcctcctatgctgagactgggtgaacttgaggtgcggaataatagacaagggcaactcgggctctgaataagatcaggtgcacgttcgtactcgaaaccgttgtaggatttggagtaagccggcggctacagacagagtacgtggtctcggctgccatacctgatgggagccagtggttgcttcattcttggcgttatttcgttgtaataccttcgtcacgtgaaatagaggttgtacacatagttacttgcccaatccagctgctccatacatctcatgggataaacacatcataataagcagtaggcaagaggccttcgagctgt

SEQ ID NO: 2412 - DNA, 1172 bp, Emericella nidulans
gtaaagaggtctaagcctcgctcgtatactttgaatgactcttcaaagtatttgtgctcctcgaggagattggcatagttgactacagtctgaggagtcgcaatgcgtagctcgaaaatcctttcatacactttcttagtctcctcgatcgatgagacactttccaccagatcgacgtagaaactccacagcttccaactcttgtggatgcgctgttgaggagaaagagtctcatcgaaatagtcaactgttgacttcttgggggcctgcgttgctttggccatgatctcaaccgctttatcgaagttttcactgcgcaactccatctctgcccactcacaccatgtttcggcaagctcattcactgatttgaaaggaaccttaacagctttctcgaaaatgatacgtgcagtgtccaagtctcctccgcgctcgtagaacttcgcatagtttacccagagctcagaaaatttgccaacggccttctttgggtttatagctgcaatcgcagctgtgtatgtattgacaatttcgacgttgttgtcaccccagagagccactctcttctcccattcgatgacattattgggattctgcctgagcaatacgtcattgacgaggaatggccgccggtccatgagttgctcaaacctaagcatccgcaaatcaaggtcgaaatcggcttcctcgtcggctttgccattatcggctcgaacggctgcagcctccatcaagctgcctataatagattcttcgaattcgacataggagtcgaatataagagtgaaatcacgaactgtcatgactgtcgtaatgccctcctcgaaaacatctcgtgctttctcgaagttgcctttggtgatccagtatgttgccaatccagcccataatttgcctctttggtcggcaaatcgatcaatgccgctgcgaaggatagcatccacatcaatgccagtctgaggacctgtttcgatcttctttgcctttgaaactaataagtcaaccatctcagtccacagctggaagttgctctttccttcccgagactgaaatcgcggattgtcgagaatctccatgtatcgcttgatggcatcggtgtaatggcccatttccacaagcaggttgatgtactcttctgcattctccggatgtactcgcatgtagcgcgccca

SEQ ID NO: 2413 - DNA, 1710 bp, Emericella nidulans
ctacccaatgcgacggggatcccggatgacttcaccccgtatggaccagtggtgtaactcttgtcgacttaaacgacctgatgacttagtaacctggcgacctggggattatcctttgtggcttcaaccaaatggttagtgttcctgcgcctctgccctgcggaagttgaaactaataaacatttaggaatcttgatatggaccctgagcgctacctcggacgcatgatttcttgttctttctgtcgttttgcgcttttgatgtagatttactgactcggcattcgttctagtcgctgcatttctcccagcacactggatcacaaacttacaatggcctcaggcgccaagaccgactcggagcacctttctctatcccaaacaatgcttcacatggaccactcacaatcaaggcatatccaaggacatttggcctcaagatcccaggatgatgaacttttgagccaggatagcttctccttgtgttcaagtactgcccaaagcgacaagccgtggtcgatgaatgatgtggactgccttgatagcaactctattgcgtcaagcaaacccgactctccagcagtccagatgctttctttttcattatcacaacatgccctgctccactccggggtaggcgccagcgacatcatgtactcggccggttccgaatttcatggtctgcctgacgttggcgaacaagccgaaatggatttctccaagcaggattttaacccttacaattccctgtttgatttttctgcctttgagaatgatgtcaacggccagaatgggactcatccatcatgcactcctgatcacggctctcctgccggagacaactggaaccctattgtctcggacagccgatataaccagggatccatggaacatttctctggcaatgtttttaacatgcctgtttcccctccactgacggaagcgagcaatgatatcgccgttacctcttcctgctcccaatctggataccccgcttttatgtcgcatgaggatgccatgttgaaagacatcacgacgaccccagttggaacccacgggataaacctaggagacccgattttcccgttgacaccgcctctcaatgagcaggaccccaacaggttagttacactcggcagcctaggtcgtccaagctacattctgacctgcagcaggacaatccgcccttcgaaaggtgcacgcaggccagcactgcaggtgtccccaacccgaccacaggttaaacaggatgccgagtttttcccacctcttcccgtcaaagagccactcagatcgaggtccaaggatggtagtgaatcgcgcaacccgcgtgaccacccatactactctctgccaccgcactctgattcaaaatattactgcccatttgccactggagacaagccgtgcaatcaccctcccactactcagaagtgtgcttaccagtgagtcaaacatggcccggcatatctgaatctaaactaatatcaccagcaaatacctggattcccacttgaagccatatcgttgccgggtccccagctgcatggatgcccagcttcacttttcctcaaatgcatgcctattccgtcatgagcgcgaagcccacggtcttcatggccactgggacaacccccactttgtctctttgaaggatgtgaccgttccatcccaggatatggattcccccgtcgctggaacctttttgacc

SEQ ID NO: 2414 - DNA, 2120 bp, Emericella nidulans
gcacctcctcaaccgtgttaagaacgtttatattaatgctaaatgccactaactaggccctaattaaacctctccaattcttgcgggatatctggatactcaccctctatctttatgcttacacaccacaactctatataagaacaaatactccgtctccaggaaggttcctgtcactgttaccattatatgctacaacatttcaaaccctaaatgaacctttgaatatcctacgaccaagccgatgtcgttataggtaaacagagataaatcttcctatctaagcgtgccgtatgaataaggaatagctaagagacaggaagctaggagggtcgaaagtcataaatagggaaaggtggcatgtgccagccgaatgaactactcgcggagactacaagttccagcgaggcctaccgagccccagccagtaggtttgtagaaggtaaacttgctaaacctaccaccacccgccaagcattaggttggtttaggcctttaggtaatctattgattctggatattatcgcccccatgggtagtttattcccaagcaaccaccccgtgaaacgcccgggcccatcagctaagcctaaaacccgccccaatctgttgtgtaagtctactgatgctagcaggccactttgaaatattgcgggcttatttaatatgtgaggtcagtttaagcataagattacttctgtaaagacttaaatcataaggcttgcatcaatacttgacctattaataaacatcacataaacccaagtccctgggtacttagggtgtagcgccggatattacaatgattcgtcagagactggactgcagagcttgatatacaggatttaccagacctttgacgcttcctctgatcaggttgtgctgcagctgcttttatgaaacctggctagaaaagggctaggaaagcactgaagaacatacctagctgtgggtttattctatcacaggaatctacgaatgcagagagtaaaataatttggatagtctatgaaaaaatttagtgttataaagattgaagttgtgaaagtagccgacctgtgaacagcagttgttcatcctatgaaagtacgagcggccactgggtactatgtgactagatccggaagatttgacactgacagctggcgggaaacggcaaacatgacagacggactgagggcaatagctcagtgagtggcagatttgtggacctgagcagacgcgagacatcctgatatcgagcagcggagctgcagggcacggcgaaggcccaatgagtacggacaaagccgaagtcgtgggtaagaaagagtcagacgtccgttgttcctttccccttcttttagcccaactagctcaccgcagcccactatttcggcccacgccagagtctgccagaagaattgaagcggacaggctgaccaaaagattacccttagtgccagatcacctcttgttccttttgtgcgattgaaaccgtgcagaatcaccgccacaaggagccaggttcttcctgcgcaacccggtcctccgcgactgggtctccttcaacctggatgaggtctgtaaagccgatacgaagctggtggagaccctgagaacctgcggggacagagaggagcctgccgactcggccattgggcgtgcctttggattcgcccctggcaagacctattgggattttattgccaacgatggcgagggcgaggacaagggctggcggcagagacggtttgcccagggcataaagtgccgcgcggccgggaatccccagacgcaccaccacttgcactcggcgtttgactgggcagggctgggagaagctacggtcattgacgtaagtattgtgcgctgtgtgtctcgctttttggatcaggctaactcgggcgtgcacaggtgggtggctccgcgggcatgtatcgatcgagctggccaaggcgttcccggacctggaattcgtcgtccaagactttgagggcctcaagtctttccacgatggcgttccggatgagctcaagtcgcggattagcttcgaagcgcaggatatcctgcagccgaatgcgcaccctaacgccgatgtctaccttctgcgctcgatttgcatgactggtcagacaaat

SEQ ID NO: 2415 - DNA, 2041 bp, Emericella nidulans
cgataccttttgcctttgctggtagtcatagataacttccgaatatgctgacatagattgctcctaaatcgtctgaactggatttcttgctttcagggccgagatttcgtatcgatgtgcgcttagcaaagctttcgatattctctaaaactgcatctttgtgcttctcacgctgttcggtgatggtctgatgagtgatttgagagaactctttgaaagcgaccaccatcaactcctggaaccgcgtgatagctctgagctttggattctcggaccgtggatgagccgactcgtcaaggcgtgaaaagtaggattttaagactgaaataaaagacccgtcatcctgaacgtcaagaagttcctccccgttgatgcggagaattgctaatccgacctggaagagcactttcggtccttccaagaagaaaacatcgaggactctaaaggcaaacaccaggggcatggagttgatatacaaagaaaggaaccagggaagagagaccacagacagctggacatcagatttgttcagatggtcccaaagaatcggcatagtcttctcaacaagcgactcaaacaccttctggtcaagcaatgtgccatacatggtggtcgagtaatatcccggcactaaacggtcgcacagaacagagagtagaaagaaggcttgggcttctgacatgtatctagtctggttagacttcggtctgacaagggatgcggcatcttacatcaataatgctgcgacaacaatgttcattgcttgacagtagccaatctcagcgttcgtccaactgtaggcagtcaagactcttcgaagacgacctatgccttcctcgctctggaagcccgcatactcgggtaagctgcgattcaagtctttctctatctcgtcgatcgccaacgactcctggccttcgaatttcgctaaagtctgctcgtaaagtttcggcgaccgcagccgcaggttcagtgaaccggaggccacctcccagatctcgccccgaagccggttggggagaccaacgcgtatgagtttatggaaggtaggttgccggattaacgtagcattgcggccattttctacaatcttagttcatgcccaagatgacacaaaaggacgcgtacctcggaaatattctccccagagcctcatcttgctccgatccctgagtttgcgggcatcacccggatagcgaaacagcattcccagtccggcatccgggggtggcctcgcttcagggtcatcagctgactgggcctttgacttggcgcccgacaggagatactcggaatagcagtcatttaccaccaaacgcaggttctcaatctccttcatagattcgcgtaagttcttcttcaaaccatcgcagaatcgttcgcaggcctgcctgctcccgaccagctcgatggtaaacctctggggtgtgaatccaggcgcctgctgtttgcccagcgctccattccaggtggtcaaggctagagaaaaaatatggctctgactgttcaaccgctccacccggcgaatcgaacacagagggattgtaaatccattgccagacggcccggtaccgttcgtctggccagcccaatatgtcgaagtggctagagtggcagaaggaaggaagctggtgggctgtgtcgagaagcagagaaatcgttcgctcagatgcagtctacccgcatatcgattgccaccgcggtcgatgttcttcgattgggcgccggaagcagaagacgatgtgtgcgatacagggagtatgagctcagctgtaatttcttgcaacggattttgcgagtcaggaagtcggaattgctggcggaagagggatgatttcgaagggtttcggtcggaggatgaggtgaggtttgggatggtgaagttggccgggtcaatgaaggactgagctttctgaaccagcgacgtccactgcatcatcttagcaggagtatggatacggcgttggccggtcagtagagagaacgcaggacatgcaagtaaactcaggatcgccgtacaaatgacgatcgtcattttttt

SEQ ID NO: 2416 - DNA, 1038 bp, Emericella nidulans
agatcatgcattcgttgagtcattgatctgtgcctgtgaggcagcatcattgtagcaaaaaccagcaatcagtcgctccaggtccatcagtctataaggcttcgtcatgtaacccttcatgccgactttggtggcgcgattaagcgcctcatctgtaacgtctgcgctgacggcgagaacagtgggtggttgcgataggggaagtccgggacgatgcaactgtgattgcgatggaatcggattctggtaacgctcgttgatcatctcgaatatctttgatgtggcttcgtacccgtccatttcgggcatccaaagatccattagtatgacatccactggctttgctctcttctgtcggtgcggtggcccgggcacgagaaattcatccgccgtggtctggcaatttaacggcttttgttcttgtgcagcgtcatgctcagaattctgcgcgtcgagaatattctgcatggtgcgcacagcctctttcccgttgccggcttcataaatttcttggtagccgagtcttttcaacatatgaaccagaacccgccgattgatcttattgtcttctgctaccaggaaggtaagaggatgtctttccccaggcttgacatctaaattctgccctttcgcgagggttgttttgggtgccgaacgggcggggatcggtgtggaagactcatctgtaagagtcgacgttggctcttgggtaggtgtcggtgtaggtggtagcacgggtatcagtggcgataataaagtagtgtctggaggtgtattgctagccctgctgagtctcgatgggtcattagtctttggtggggttaactgcattgataaagccactgggcgagcggcttcgggtgcggtcacgggaaccctaatctcgaattctgagccacggtcaggcccagacgtcgacgagcgaacgcaaactaggtcaccgcccatcttccttgctaagccctttgctacaagcagccctaatcctagcccgtccttgcttcgggtaattgacgcatcttcccgggcaaacggttt

SEQ ID NO: 2417 - DNA, 8917 bp, Emericella nidulans
agtgatacggcgtgtaaagcgacctacggttgtataggcaagatgagagcccaacttgaatttaatcgaacgccagcttcaaagccagtggtgagttagatatttaagcgtgtaatagctgtgggaatgacaagaaagagggaattggacatccgagccagtacgggtttcaagaggatggaagggggcaggatttaaaaggtggcacttacagaatagcctgagatcatggtcaattaggggccttgatagggaggaaaccagcctttcatccccgagaatgtggcgtttggggaaggttgacggcctacatgaatgcgcttgtctggagtagagctaaattaagtatccgcaacgctatggtatatttccgatgtgcatgcatcatgtgactccagtccgaatagaactccagtacactgacttgggagagaggtgctcgcaattctggttcaggctgtttagggaagggatcaaggtacccctagcatgtaaggtagatggacgaagtccaccaaaagtggcgggcaaatgagtaggcaaaacattcgagcttgcagttactcttgtgcctactagctgattaggtctgaaacttattgataattcatgcaaggggactttgaatatcgacctgtgatactggacaataatgcagcctccaataaagacaggataatacaaagcagttttcaattgttccttatattgatgccttattcagaacatggttccagtttcctaggtacttccaggttaattaaacataacaaatccaagttgttcctccaatattaagaacgctttcatacagggtatctcaagacaacgttaagtgtgaagcgcggcacatccaagttcatccttcacgatgagctctccatccatcttttgagcatcagcttacagccaactgctgcacatacaataaacaaaaaaagctgctcaatagttgcaaaggagcccctgcttttgcatggccctctttgctgccgctttcttcttttcgataagatagtgcatcttcttctcttcctcagacggaaagaggacgacgggcgcctgaatcttcctaggcatcaccttgtcttcaatagccatccagttcaggccagctacgcccggtctattcctcagcttcaccatatggcaccaattctctggcgtgatgcgctggaatgtcttcagaacaagagcaaccgtcttccagcccatgatacgctccgccggcagaagcagctcaagatgctgctcgaaccaattgcaggaatagaagtcattgtacagtctactctcgagtcggttcggtgagaatccttggtatttctccttgtacgtcatccgacccttacccgtcgcagtgcagaacgaaggctgcattcgaaaagacagaaggagtgaatcatcagacaggccctgcaagttcacgaaatctatcatctttgacttgagaagaaacgcaatcgagtaggaggctttagcgacggtagggtccccgatcgtctctcgcagggtcaggccgtttccaataaggtcgaacacaacatcgagttgcgcgcccacttggtcaagtcgacgggactcttcaggctttgagcccctgatgacgagctcaagctttgggaatggcttttttgggcgtggatgacagaggcatttggggtcgtcgctgtgttgcagcgccttcgtcagtgtccgggtgtaggtttgtggagctggggcctcaccacaacatcttgcgaactctattccgaacggttcaataattgcaccttcaactgcaactagtagaagctctcctgcagcttcgaaagagcttgagagggagaagctgaatcaaaatgaccctttgctgtggtgaatggctggctttcgcacattcacttgagcaagtttcaacatcagaacatactcaactataccctcgagagcctccttgtcagtttgaaaactactttctcatgtgttatgcctaattcctgatgtagtcaacaccgggctatagagagcttgagcaatgaacgtttcgtgagcttctatgtctacgaacatagattcaatctctcggaacaaatagcctgacgtaagaagatgggcctttgactacctggatgactctaattaggagactctgcatttttatggtttggtttcctggaatctactcctgcactggaccataaatagagcacacaagctacttactttccaccatcacccttttcacggcccttggttatgaacagtggaactcaggtgcatactcactagctatttgtgcacattgcgtgtacttatttctcaattgtttactgctgggggatgtcgtaggattatcttttgtcttcagatactgtaacgtggattctgctgtgttaggatggggaagattcaaatgataactgacaatataccctacagaactgctggctgccactagtgttatctacttcagaggcaggttccttgggttaacgggcagcctagtgcaacatgtgtcttgtataaggatcggtagcctgggacccttaaatagtctatatcagtaaccagcataccagaacaacctactacctctgtctcgagacacaagataaacaatccatgatacgcttaggagtctaaatgcacacacatagcctggaccttcagcccttagccctttattttatgcagactatagtgttctttttgatatggaagataagttgtggtctggttatatccttgattatataatcacaccgaagcgggttgacctaactcaactctcaatctatcgcgactcgacattcacaagctttgccttgccgccgattccccgtcatctcttttttgccgcgcccctttcaacgaaaaggaatttgctttctcatttggcataatgtctggagaaatggaaatcgaccctccggtctcgcaagagcaagccgagccgcagacaagcaacagtggcaccgatgctcgaacacacgacggcgctgttgccgtgcgcagtatcgaaggatggattataatagcgacgaacattcacgaagaagcttccgaagaagacgtgacggatctctttgcggagtatggcgagatcaagaacttcagcctaaaccttgaccgccgaacgggttacgtgaaggtagacttatgcaaccctctgtttctgaagcttttagcattttggtttggttctgcccgggtattaatatttctcttgtatagggatatgcattgattgaatattcgacgctaccagaagcagctgaagctatcaaggaattgaacggcaccaagttgctcgatcagacaattgaagtcgactacgcatttgtccggccaccgccatccaacaaagggaagtccggtggaaggggcggtcgtggggggagaaaccgcagcaggagccgtgaccgaagccgcagccccggagctgagaacgagagggattaagataccatatatgtttttttctattgtcgctctggaatgaactcgccctgctgtccttttcgcatgtcactatcagcaaatgaggcatggaacactggtaggcgttcagtacgatacagaggctctaccgggaacaagcgatcatggccggcagtgtcccttagctcccttgaacaccatcgatattccaactcggaacgatgctcgggattacctgccggcgtcgttttttatgattggtgtggtatggacaacccgacagaatccttcactgctaccgctgacacagaactagacgccaatatctcaatatcgccagatatcaaatcgtgcacagattacaactattagttcactagaggattccgcgtgatattctcgacaatacaaatgtcgtgtgaccaggaacatggctctcactttccaaaccccgcactctgcatataaactctataccataaactctgtagtgcatccgatgtaactggtgattgttctacatttgatgcgtgtcatggatgcactacagcgcctgcgagcgaataaggcaacgtactggaataccccaatatttgcggcgcacatgggggactgggggagctcccgcgtgatgttatcgccatctgccaagaatagtggttgtaaagtgtagacaatagagcgaacaggtctcgacgtctgaaattgaacatggatttaggtagaatacagcctataaggtcaatgaacatgcaccgtgcgtcgtatcaggcggagcatttcctctgacgtcggggaagggacggggcgaccgtctccccgcttctagcatttcgatcctgcccacctcacccagacacttgaatgcacgacggtcccaggggaatacactcagttatgtgagattcccctgagctcaccattggaccgggttccttctccatcccattacttattatatcctttaccgaacctttttaagtccgttcttatcggactaaggttctctgatcctcgctgacgacattggtcttcttccccagttgcaggtcagatttggggagcaaagtcaccacacaatgccgtctttactccttacgctatggagcgctctgtcgctaggttgtctgctcgagggatccgcgcgcgtgctcgtacaatacgcacagccgcagacccaggtctaccagtaccaggacaaagacacgttgcaacagccgcttgccacgaataaatacaaggagactctacgcgatctgatagacgccctcgatgtcatgcaggacagctacttcgtcctatacgagggcacttggccgaccggcaatgattggactagggccgtccatggaacgcacgtgtcagctactctagctgcgttgaccgcatatacggacgacaagctacttggggtcctcttgagcaacagaggtgaaaacagtgatgaacgtgggaaggatgacggagacgaagcagaagatgaaggagatgaaggagatgaaggagatgaaggagatgaaggagatgaaggagacgaccccgaagaagacgaagaagacgaagacgaaggagataaaggagataaaggagacgactccgaagaagatgcacaggacaatatcattgagaactccctagctctcgagaatcttgtcagccatttcttcgggcaagtcacgacgtactactttggagaaaacgcactcggcctcagggatcaggcttacgacgatatgttgtgggttgtgctggggtggttagagaatatcaagtttcagaggctgcattctgatctgcattacgatacggagagctcgtccaaaactggtgggagaccgtggcatgggacacagtttcagactccggccgcgcatcgggcacggatattctacgagcttgcgtcggaaggttgggatacgattgtgtgtggaggcggcatgatctggaacccgcatttgggcgcgtataaaaatgccattacgaatgagttatatatatcgtcgagtattgggatgtacctttacttccctggcgaccagattgacgccccgtttgctggtgccgaagagtcagaggacggtctgcctcatgatcccgcctaccttaaaacggcgcagaaggcgtacaggtggcttaagaactcgaacatgacagggatctatgacctgtatgccgacgggttccatgttcgcgggtaccggggtcctaatcatccaggaacacgcaagtgcgacgtgctcaacaccatggtatacacctacaaccagggcgtgatcctcagcggactccgtggcctctggctagctaccggttcccaagaatacctagccgacggacacgagcttgtccagaatgttcagcgggcaactgggtggccgaatatttacgaccaacactggaaaggcctaggtcgcgcaggaattatggaagatgcatgcgattccaatggtgactgctcccaagacggccagacctttaaaggaatattctggcaccactttgccgagttctgccgaccattacgtccacaagaggagcgcttcctccggacccagtcgtaccacgactcgagcttcaaagacacctacgattggcatcaagagctatgcagcacgtaccgcccttggatagagcacaacgccgaggcagcactcgtcacaaggaacgaagagggcaaattcggcatgtggtgggggagacgataccgcgtgattgacgaatctgcctctaccagcgatacgtctctgccggatggtgcagttgactaccgcaaccatccagaatcaatgccgccgtcctggtatgcgaacgagacgaacccgattgcctcgaaggcggcagcgggcgttgaggataatggtccggaatacaatgatcgtggcagggggcggacggtggaaacacagtcggggggtgtagcggtgctcagggctttataccagtggaagatggcggagtctttggcgagtgatgtatgacagctgcaacttcttgtacccacatggtactcgaaactggcagtttgtgcgcaagtgtacagagtactactattattgatattgtttaaaccaatatacctagagaggtatccttaaccatcagtctatgactacaccagctgcactccacaagctagtcaacacagacactgccgttcccgctcgcaaattccctaatgattaggtgcggacgccattacaataaattcggctgccgaggtggattagatacccagacagacacatatattatccttaccaagtaccggcgcatcggaccacggcactactacagtagcgcctaatctcacatactattaccagggccgtatattagcctcatcgaactcctgaattttcatctcctcgttgggccggaattttcgtccaagcaatccgcccagctggttggttgtcttcgggcgatccttcgaccatatgctaggaagaactggggttagttataataatgcggtctttatgggggggggggggggggaactgcagacaggatatgtggatccttgtcgttactccctagactagtaatacggagtaactgtgctactggtatgagtgtgctgtacgagggactgggctgatttgcagtatatgagaactcgaagcatgggcaaacatgggctacaaacccatgaccatcccagtcttagatattccgcgtgatcgtttagacccatcacgaacgctgcgggttggagacgcgtataccttgaaatttcgtggcagtttttaggtagaccatagactctgtatatatataaagtggatggcgtagggcgagcattaaatgtaacaggataggataagacatccttacgagaggaacacaggtcacaactacgatcaatcggtgttgcactctttattggttcaatatggaggtcctcggactgtatgggagacgcctccaatcatccagtgtgggtgcgtggcctgtcagccgtcgcactgacattgccatgccatgtcaatcacgttcacgggcccacagcatacagggtaatagcgccagcaactctgcagactggtggtcagactgagaatgcagacaaacaatcagttcaattactgaatcactcagtcactcagtcgctcagtgagtctacctcggcaccaactgacatcagcgacagctcttgtgctactctgtaccatgggcgcaccgctaatccacggttagtactccataaaacaacaccaagcattgcgggtagcgactcgaggtccctcgagtcggcttgttggttgatcggtggtggagggaccaggaaagggcgactgcatctatcgcatccggcttgggttccgcaaggtacgcagccgaggcgatttgacagtgattttgatagtggactattctgacactttgtcaggtctatcggtacctgacgaccctgcgaaggctcattcagcccacgaaggtctagcatggcatctgctagtggagaatcaggatgagggcgagctagaagacgggagaaggaaaaggagaatgatgtgaatcccacgctagaactctcgagcttccttggttgggtgggaatcgagcttgtaagggccaatgatataagccttttaagatgatatcgcttcgcgcgtcttagatatcttttgattgcttgttcattgtcagtgcactttgatcaaagatcagggatcattgtctaggcggttttgctttgtcttgtgctttttcacctgtgtgatgacggagtatttcatccgcaggttccgtactgttaccttgataattcactaggatgatgggttggatcgaaggggatgtctagtaaaagcgttgacggtcgccacttgcccacagctaggacacaatatcgtagacacctgcttcttggttttggggttacatcccgaccatgctgtagatgacattatatgtactcaagagtatactactcggtcgatcaagataagaaccaagaagctgggcgttaaaactgaagaggaacaaagaaaccatatgcggcacagggaggttgtggagccctccttgagcggttccaaggcaatatcacagtcctgagctggttatctgtggggttcgctgaatgcggcgtcttgtgactcagtgtttgtagtaatgtagtggatgtacttggtgaattaaccttgtaggtgtatacttagacgtaggtagtgtaggctgagtaggctgagaggttgagtagttgagtagattgagtgaatataagatataaagatcgagattcgaccgaaactcggtcgtttcacaagatgcagactgattaatgattattattgataatatgcgcctgctccagcctccagctcaagctgagatagagtactgccgcgctcggagagctccgtcgcacacatttcattggacggtcagccttatgagcactgtatgcatggaagtcatggacagttggtcggacatgggctgaagattgaacatgcttgcgatccaaactctccgctttgtctgt

SEQ ID NO: 2418 - DNA, 5608 bp, Emericella nidulans
  unsure (1)..(5608): unsure at all n locations
gctcgccgagctccgctatctctgtccaatgaccatggatgagcttgtctggtcttcttcaacaacttgttctggctttgctgccagaatactcgattatacgctcgataatcccgcagctatcgttcgctggctgccgtcggcaaacttgtcttcagggtagccatcgccggtgctgatcgttcttctatatctgacaggcttgaagatggccttgcgggactcaggaggctcatgcctcaaatgccgaacaaggaaggtgcgctgtgatcgagctttgccgcaatgctctcagtgcaagcagaggtctctggactgcttctttcctgaagcccatccacgcctgctttggctccctgtcagaacacaggtggatttcagtttggatcaggagcaaattgagctggatatgcatgttaggcgacaacctttgtttaaaggtctgttgatcactctgtggttgaagaaggctcatcagatcgtggactaataatttgctcaataggaaaacagcaagctcgatatgctgccgatttgctttccctaacatcaggtcatcaatcagagctactttggaacagcttgactattcagcggagggaatagatgatggaatgagcacctccagcggacctttccacgccttccgctgtgaacgcaccacgggcaaatcgaccctgtccacaaccacatccccgaatttcccagggcttgagctgtggcggctgttgtcagataacttgggtgacgcactgaacgaagaggacataattaccgcgccttggtcgaaagaactttgcttcccggacgagctgctcgaaatcaatcaacaaccagaggaagcctatcctcctcttcagctgtctcagcaagagcagtacctgccagagtcatcgatatccgggacacttttcacatcaggccatcagtcatatccccacctgacctcgaagagtttgcaatgtctactgcgaagctcttgctcgatcactaccagaatattacggcaacgctctatacaccagcctcagtcgagtccaaaacaccttgggaagtctgttatgtgccgaatgttctaagcactctcggcgaaattgcgcttaccggcactagcagcgacgccaaagcatcattattgttcgccgtcctcgctaatagtgcgtttagattggacattctcggttatccttgtcgccctcgagccaaagactggcgctacgccacgtatccgctgggctaccaaagaaagagaagtacaagaatatacttatgcctctattaagtatggtacgatatgtgcaagaacaaactcgaaacgcgtattggctcacagactgacactgctgaaccagactgtcagcggagagatgaaaaatgcagcgcattacctgcgcgatattaacagattatcgctctttatgggatccccaaagcgcagaagtcgcgcaaaatccagatgttgcacagtatatatgtctacctgcgagtcttaacagaaggtccccaagttcataaaacaagcctccgtcatgagacatgtgagaactaccaatccggcgcagattcttggtcaagttcaagtcataaaacgtggggtatactgctacaggagctattcagcacatttgatacaatgaacctggacattatgcaatgtttggcaccgccaaagtccactttcgaagagatatattcaataccggattcgttgtcaaattaatactggagacgactcaactggccaaagaagtagagcaactttgccaccgaagagcgaagaaaacaaactacgacgaatttgcggaaagggtcaaagagcatgaaaataaaatttgcgaatgggaccaattctataaggcaaccacctatccagcagaccccattggcactccaccattgaaggaacgcttccctaatcatctcacaagngctgtatacactngctttgatcattttatttctaaccgctctgtaggggacgtcaaccgtcataacattgtaaccaatatgtttaacaaactatataccacctaacggagtatgacaagcataaaaaaaggcacaaagatcggtcctcagacatatgttggcctgcaatcatcgcaggctgcgaagccacgacacctcgattcagacagcagatcaccgactgactagaaaagtccaccaactcgagtggcatactcatgttcagagtggctctcaaagccatccaaaaggttgggccgctcgagcgaccccaggcaaccagaatatttcctggagtgtagtcctgggagagttgagtgacatgagagtcttggtccttagttagaaactgggaattgacaacacgttacaaggccttataaccgtcatgagaatcgccgctctcaaactgcaagtagacctggaattcagcatgcaaactctcctagtcgaattcagtcggcatgttgagcaacaagtcggtgtgtactcacagcttcgctggtattttcgaatgtgaacctagcgaattcgtcgcagatgtagaccttctcacggcctgcagcagcggcagcgtctgccgcgagttgaatttgacagcttttccacatcaacaaaaacagatacgcggcctcgtcgacggtgctccccacagtaagcagtccatggttcttaagaatcatgcctatcccttctttaccaagagcacttgctaaagctgctgattcgtcctcttctagcacgacaccaccaaattctttatacacactctgagccttgacgtagaatattgcaacatcttgattcagcatttcaaggggctgcacaaaggtagaccacgccttgccgtaggtggaatgaaagtgacttgcagcattaacgtccggtcgagatttatggagcgcagaatgaatcagaaatccagctgcgttggcaggccgtgtcctgtttcctccaacggcgatgcccgtctcgtcgactagaattatatcagacggcttgatgataccgaaatgaaggccgagactagacattaagatgggctactcttgccaactgaagtcagaacgcgaattgtgggctaccatacgggttagtccaaaacctgtcagggaaccctgggtcccgcagtgagatatgaccactcattccttcgacaaagccatgtctcgcaaataccctgaattctccggccatgtgattcaacatgtattgtctctgcagctcggtgtcggtggacctgggaattccaggaggggagtgccctgagaaatcttctccaaagctgtcccttttcgcttttgctcgccattctgtgcgaggatttggtgatcaattgaaggcacaattatgcgtgcttgcaagtattcttgaactcaagctcacctgaatgtcgctttttagctagagagatatacacgaatgttgttgaacgccaggcgaaagaagcaggtctctgtccacctagcacacctcggtgttgccttctcgatatagaacaagggaggcggctctgaatcagcagacctatcacttgtctcggtaggccgtttcgatagtccttctcgtggagaccccatctccggaatgataagacattccacggcagctctatcttatgcccatccagcgttccatcacccggaagacattcttatcactaaaagtagtatctatctgggatttcgcagattatataacattattcggcaatggtcagttcttgactatgggtgcaagccataattcatcagtgaaccgtctcgccttggatcgaccattctcaagtcttttcattggcatagatttccataatgaatgacgagaagaagtcattgggcccttccgaaagcaatacagacttggagccgacatatagccttggtgtgggcgttgtcaagaaccatggagatctacaccgatctttcacccctagacagatccatgttagtatcaccgatcctggaaccaaggaagcccgcttacattgacaggtcatcgcgctgggttccaacgtcggaagtggcttgtgtattggtacaggcaaggcctttgctaatggagggccggcaaatatgatattgccatactctactgtctgcatcgctatctgggctcatctacaaacatttagcggaaatgaccatcgtctctccaacttcgggaagctacatcgactacgctgaccgatgggtcgacccggctctggcttttggtgccggtctagctgagtggctgggtatattcatccaaccctattccacaaagagctaatagttggatctcaggttggacggccgtcttcgcatccgaggctacattctttgcctttctggtagactactggacaaaagacgttataccagaagctgctttacgtatgtctttccccgcacctatatgtgtaggtaatctcacaccggtctagtatccatcttcatcgtgatatgtctagcggtattctttctgccaaacacctacttcgcctggcttcattattttgggcccctggtaaaagttattcttttcgttttcttcggtataatctctctggccattagtggggggtgcagggctaactggctcggtcaaggatggcagcacttggacggacctcccagcattcaaaatggcttcgaagtatgcacccgtatataaactccatttcagtggaccggaaacttagttattgcggtttagggctttgctagtgcagctcttcttgccgtctgggccgtcggtgatcatatctatattggcgtattgggtggaggagcacggtcgccgcgctattcatggcacatgcggccaatgcggttccctggcgcgtgactgtcttttatatggtcttgattacctttgtctctgtgattgtgccattatcagaagccagactgctcggtggctctggctcgcagcctctccattcgtgatcgccatcgacaatgccggcatcaaggtggctccggacctggtcaacgcctgcatgatcattcgtatcgtggtcattgcgctagagtgtatcttcttgacttctcgcatgttgcgaacaatggccctacaaaagctcataccatcgttcatcgccgaggtcgataaaagggccgaccccgctgggcgctcatgattactggcgtggttggagttgttttgacctacatcagcctaagcggtaggtagtcgagctcacagcaataaaacggacagtgctaatctagagcagggaagggaaccgagttgctcaactgatttatcgctattactagtgcatccttcttcatcaactttgccatcgtagctcttacctccttccgcttccgcgcagccgtcaaggcacagaaaggggaccttctttacagagagctacagctggaaatcccctctttggccactgactccgatcattgttctcgtgctctccgccctactccttgtcagcctactatacatcagtataaaaccagtggtatacctctttctgctgatatcttttctttctaaggtacatacacaccaattatgcttcacaggatggcaccggtttcacggagtacaatttcttctcaaacatccttggtatcctggtcatactgataccgacagcgctgtatagggttatcatgcggaccaaatgggggga

SEQ ID NO: 2419 - DNA, 5058 bp, Emericella nidulans
cgtttaccttcatttcaacgcgatgaattgacccagcccgggcgatgcaacacctcaactcgacaaagagactgctgggctcagcgattctgatcaatcagccacttttctttttcctaaatggattccactgtaatttctttttctctgctttgttggtttgcgatgctaacgatcgaaaaatttcccttcggaccgaggaacctgcatgggatattatctgaccacaaaacgagttaacatacaggtagacaagaccattgtgagcagattacgagtcttccgttctttcatcttttcgtttttccaattttcctctttgcatctacctcaatttatggaatggaggctctagaagtttgaactcaggaaagctggtcagcgcactctatgcagaaggaagcaataaagctgctcaacagcagtggaggatgcttggtccggatcaatcattgtaagggattggcatggtatcggtccagttggaaatgtctttcaaataatgaataatgaaataatggattattgacttacccctcttgctccttactctgtcagttcaaaaaactcttaatcagggcttaaagctagaaatccatgagaccgcgtaatcgagatagcaaacccgctgcgatgagaatgcccagatcctataccgggtgtttgtgccccttttccagctccagcccgtggtcgcttcttcgtgttcggcttctttgttgtcatttcttcgacactccgccttggcttggttccttccctcttcccacttctctcctttccctttcaactccatcctaattcccacaaactcgctacttctccctgtccttcgttcaatgaagattccatgctctgcgaattgatgtaattactatcgacattggaagatcagaggatgcacccaacgtggtggatccgcaacgacgccatcctgcgctcgagagtcaaggatcgaccgagcgtacattagactgccgttttaagtctcctcccaagaatatagcccagactcggtctgtcatctcaacctataagcgcccttcttccttgctgacagtttctacgtccgcactagcttgctgttagccgagttcgttcctcgctagttccattggtctcttcggcacgttccgtgacccccaatatgatgttccatagtcgcggtctagcttgaattccaacggataatgacacttcacaaatgggggaggcgggttgaaacatgcacgttcttctgttatgacgctatccaatggagagacagcttcgacgatgtcgatgaacaacctccggtctaggtatagctgtctgatccccaccgcttcagcattttattgattactactccgtacgcggatataccttccacagcctgtacctggttgggcatctcaccctctgtctcctgatttcccgtccaagctcccctccaatgcaccctgaatcctcaaagcagctatcgccgagatttcgattcttcgaactctattaggaaacgaggcttcggccggagtttacgctttgtccgctgagtccccgaggcggcgcggcaacccagtcgtatgcgcgtgggcattgggcaaattactcgtttatcgctcatttgccaaccctgaatctccacactagcacggccactaagcatgcgtttctgcgcttggtggttcttgccttgaacagttcacctctaatctgatctatcgagtctacaccttgcgcgcccatgacagttgtcacagtcaaccagtcagcggctaacatttgtttactactaggcaaaggagagaaacccgtgacgcagcatgcttctactaagtcagcccgttatgcacgtcgtacaaggggactgacaaagacccaggtggaagaatcaggcgcgcgactcgcagcccgccgactgtcaaaggagagcattgcttgatcaaattggccaacagcgacacggcactgccgttggatgattttcaaaccaaacccaaccccaggaatcgtcaacctgctgtgtaacggttcgatccagtcgctgtccattccggtacaccgaaagttgattccaacgccatgcctaaacaataacagagggccagtttcttacacatcttctacaagtggccaggcccaagctgagtgatctgacccctagcagtgccccacccctctactctctcctatctgcgaatcagattcagctctcactccgacgcgacgagatactgacgcttgcgtctcaagcggacgcagcctagggggaggaaggatttagatcccggaagaacccatctttcaaagtgtcaagttgtcgatcccggtctaagacgccttaagatcgtcatgaaggcccgaaccccgagctgtctggcctacggaagccgatgcgcgaagaccggtcaatcacgtgaaggcctttcattgtagcctgccgtatcgcagtaaggggtcatctgccgcctcgtcttgctgtattttgaaattcagttactgtattaaaatccttcgtattcatagttatggggatccgagggaatagcaaaaatacttcgacggttcagttgtgattcttcaaaagctctctgcgagattaggctactttgtccgacaagtcgtgtatcctcagccttctgttccacaaacggttattcccggacgctgtgttgcgccaacaatactccgattaggcagggacggcggggggcaaagctctccgcagaaccgggacaaaggacgacgacttcgccttcctagagtttcagactgtcacctcgtgtcgattgctcgacaatccacctccccattagcgagaaattcgagcaggtaggctagctcttaggcgagccgttgaagccgggttctcaaagacacctgtgatagcctgcccatcacatcttgagaccaagccagaaagtcttcccaaatgagatttgacaaacactgacccagcatccaagctccagagacactttcatcatcttccactcgcaagcagcagtagtctccccgtcaacccacacttccctactctctctttcttccttcccaagattttatgtccataacatgaaacccaacccaaccatctcagctcaactctttcgcgagcggctcctttgacggtcccggagaaaatcagtctcaatccttctccactctggaaacccgaatcgccagcttccggtcaagcgccgccttctcctcctccgtaggaaccattcccatcgcctgctcgacttgggaggatgtccaaagcccaatcgacgcccacaccatgactccgacaccaaatatcgcgcgcgtcttgggcgagagggatttgtaggagctgtatataaagttgctcaatcagtcagtcgaatcaatacaagatttcttttttgcaaagtgcttgttcgtactgagacacgcaagagcgagaggcgaatcggaaattgggggaaagtgcgggagtcagctggagcttgaacagggcatactgacttccagagagacatcttgtattgtgtaatcaggctgcgtccgccagaaatcttgtagtcctaggttccagaaaacagcccttgtaggggaatataaacctgaacgtacttcgtaatccaggtgaaagcggcttaggtcgatgttccttaatcgttggttgtactcaatagtgccggtctcctccgccttcttgttagagcttgatacaacatcccattaccgactcatcctatgattattatgatcgctgtatatgctatgtgactggctagcttacataaatgtaaaagggttgtatagaggatatgtatatcaatgctatcagccaaacaacctagcgtaccgcgtaaagaaggtacctaatctgatgtccaatggacaagactgaactgggcataggttttataccgagacagcgcgacaggagtcatgatactgagataacaatcatagcagtacaggggcatagcatacagagcgcaggaaacagagcaggacagtctcgagaagaggataagaattggaaccatacattgtaactaataggagaaatagacaaagaggtatatcgaagacggtaagcagggatcagttcatggcgtgcgtgggcacatcatggcaacgttagtaatcgtcaacatcaacatatgctcgcacgctcactgtttcgcttgctggcatgataggcaaatcgagggtatattcaacggaaagaatcgccacaattatttctttccataagcacggtcaatgtccttgtggtacctgttgataatcttcttgcgttggagcttttgagcggcggtcatgaagccctgttggatgttagttacgtcctgaaacaaagcgagagaagaaaagacgtacgttctgaggagtccactcctcatcagaaaggacaacaccgttgataatctcaatgcccttgaggccgctagcacgaccggcagtctggagctgcttgaggacaatagacttgagcttctcgttgtgcacgagggtttctacagagtcaccctcaataccgttctcgctcgcaatcttcttcaaagcaatttccactggaacaatgatggcaataggcttgtcctggtcttcggctgcgtagacgcagatgttgccaacgataggagaagatcggtagacggactcgagcttctcgagagcaatgtactcgccattttgcgttttcacaaggtttttcttgcggtcgatgattttgaggtggccattcttgtcaaattcaccgatatcaccggtcatgaaccatcctccctcggcatatgctgccttggtctcctcctcattcttgaaatagtgtgttgacacactgcctccccggatccagatctctccctgaggaggattgttctttgtgaagtacccggcatccgcgaagtcaaccagtttgacttcaatgcaggcggggatttcaccaagagcattcgggttccacgctccagggtcattcaaggcgcccatggccgaagtctcagtcagaccatagccgctaatcataggagcaaagaccatggacaggaacttctgcgtctccttggacacaggaccaccaggggtcattcc

SEQ ID NO: 2420 - DNA, 1863 bp, Emericella nidulans
tctgaaaagtgggttcagcgacatacgtaacgaggaagcaggacaaacgctataagcgcaacgaatatggtgcagacaccctagaaactgttagtagggtctctaaaatagcgcataagactctcgcataaatgataaaagcccagcgccatccagcccgacctaatgactcgtcaagattcgtggccaacgacgcctggatcgcaccggacatcatcgcgtcagcaggttgagcaatgttatataaactcatacgcagagctagctcttccagtaggtaccattggctatgctgtctatttagcaactttcctacctggctcaagggctggcttcaggcaaaccgacctgataatagtgtagtagcctggccaagtaacaccttcgaaaaacccaatgaggaagcggcgccgtagacctatctgataagctacccgcgttggtcttgtacaagagcccagtctacttacctgcttctcattcgtcacggttgacaagcaacaggtaaacacgttccagagaacctggttcgttgttgagatactggatataaattacatcccagcacttaactcgcacgcaggcaaccatatagaaggaccgatataggaaacaagaatgcaggacgggaagagcatgaccatatacccaatactatgatccaggttaacctgatttattggacttcgcatggggaccatacttgaagtatgtcgtaaagtaacctaattcattgctatagagcttcaagttgtcctgcatgccagagacatacgcgttgctctgaatcagcgttagcataaagagagaaagaatggatataagctaggcacacaacgtacaatattgatttgatcgagatatttaaagacatagcccaagaagccgattgtcaggaatccgagatcgagtctccttagctgaaggcttctttagttagacttatagagaggagaatgcgcttcatggtgcaaattctctttctttcctggcatcaatcgtgccattgccatcgtcactagcattggaatcgccgtcgaccaaagccgtattcaccgtgctgctggccgtcttgtccagaagcccattgatggtatctgcagttgtttttgtcgttctcatcgtgactcgattctggggtgcaatcaaagaaacgactggtggtagatgcagctttttgtattggagaacgcttagcttgttataagtattgcgccatggaatggcgtcagctacagcgtatacgggtgcttatcatggtgcttataaaatcatacacaatctctgaatggcagaggaactcaaaaagctactcgtgctacttagcagagcatcgagtgattagcattaaccagagtttttctgagttctaccttctccagagtattatcagtggtcaaggttaaatagtgcaatttatacaccttaatagtgcagtttggctatttcccctctcacgaaatctatccaagagaaggcgtgatgcagctgatagccgtggttggggtaggttggtaaccctatctagaacgtttctacgtcaacgtccagtaagatcccaatttgcgtcattttagccaaggcttgatattgtctaagtctattagctaggaagctattggaggaatatactactctttagcacacttatcttacatgtcatgatttttgtctcaactctttatgctggccccaaccggcctctagacgctgtgttgaagagagtcatcaagtaggcgatgcggtacttctgtgccattatctggcacgcttgttccagaaaaaaaatggcccgcgcccattcaaaactgtaggaacgggcagccgaacttgagtcctttggcaaattgatattatagtttg

SEQ ID NO: 2421 - DNA, 1564 bp, Emericella nidulans
aagggaaaggtggaagaaatcaggtcctaaaagtacatgggtatggactgtaaacctaaaagccaaagagaccccagcaacagagccgggttaaagggggtttcaattcatgttggcaagggagaggacaagcctgttagcttaggcggttcaaaagccccaagcccttaaaaaggattggaggccggtaaagctagaccataacggtggaaatcggatcccgggtcaagggaggatgccactggacctccaatagatgtcccatcaatcaaggggatccagacacgccctcaatagactttgtacggtcggcatggtggcctgtccgcaggctggtgcccaggcaaaggcggcgctagttgagtcggtagacaaaatgcggattttgaacccttgggacggaatgagccaacagcacggaactgatttgatggcgtgtcacacatcttgactgtaagatgtttgtctgacgctgacgttgactgatctgtgacacctacctaatgaagcatagatctgtgttcaaacgttatttgagtttaagcaacgatatttatgttacatatggctgtccatggcctcggttatccgccccaaagcctgcccgacaacgatataagaaatctaagccaacaaatgagttattacaataaaactttaagcgtcttcatgttttaggcagtattttagctgataaggggacttaatattcacttctagattatggtatacactcttataactaatacggtactaagatatagtaatataatatatatataaagagtgagtattttagccacatacagtaacttcacctatccagatctctttcaaaccaacgggctgccccgccgggctttaagcagccaatcatctatctccaagggccttatggaccatttcattgtccaacgcaactgaattcggggcggattggggcgggttcagcaagtctatcattgtggctgaaagcttcctggtcacattcggtaccacgtgattatatgtaaagttggtgccatggctagattctgttgtctagaaagtgaagatgcggtccccagtggaccgtttaagcttgccaatggatttaggtctcagtaagtccgatacatgaattgaggcttggtttgttgctagtacagaataccggctttctgggcggtaaacgtggagataaggttgcattatacaataaagaggcagtgatctatatgcgtgcttaacagggtcggtagtacgcagtatagagacaaaaaaagtttctcgaaccaagaattttcttgagttgttaatggtgcaggataagtagatcacaccggctaccagggttgtaatccttacttgcctgtttgagttggcaaactggccgctgataagtttttcctgcaaatgaaaatgtacttgggataattggtccactttgcagggttccgctggtacattaaacacctttttgaggaggttaattcttcaactaccatcacttatttagaaccgcttcgcccttattgctttaacttttattacctgggaaagggcaaaacagttttaacggccc

SEQ ID NO: 2422 - DNA, 712 bp, Emericella nidulans
cgagcggccattcgttggtatccgacacaaatccaaccacattcatgagtttctggtttgcaacggggaaggtgaggaggtgtgcgtttggcccgccgtacatgtgttggttcagcgcgagggacttgccgagtcgcgagatggcgagcggcatggggatcagggcccgataggcgattttgtgggtgtaatggggatatgagacgggattgtctacgccgaaaaggagctggcgtacacgggactttagcccgtcagtgccaatcactgcccggtatgttagagtcaatagaatataggacgttgcgtagagggttggggagaggggtagccctaattagggctagacggggggaagaccaatgcataccaatatcagcttcagcactcgaaccatcactgaacatcatctgcaatttccctttcttccccttctcttgctctagtacactatactcctccaatcgctttcccagcacgactacatcatcattcaagtgttccagcacacccctcagaaactcctgccgatgacagccctcaaagccccttctcccagcatgcagccggtacaccttcttgcccaccaagtgcttgtcctacttcgacatcttcttggcgatgagtgtacccatccacaaattgcatatagttgtttggccgttccggatcctcaccgttggctgttccaacgctagtcgcacactcctcc

SEQ ID NO: 2423 - DNA, 1315 bp, Emericella nidulans
cttcggggtaagagaaccactcagggatgtgagcaccggtacggagacggttacggagttcagttccggagatgtcgagggtcttggtgcccgcaggaacctcgtccttgggcatgtactcatcggtgtcggggaggtaggtgacttgctggaattcaacgacctcgataccgagctccgcgcggtacttctcgaccgcgtgctgagcatcgtaggggccgtagaactcctgacccttggagttcttaccaggaccggcgtggtcacggccaacaatgaagtgggtggcaccgtggttcttacggatgatagcgtgccagacagcctcacggggaccgcccatgcgcatagcaaggggcaagagagcaagagccgccattccgttggggtagcggggaagaagggcctggtaggcacggacacgggtgaagtggtcaatgtcaccgggcttggtgagaccgacgacagggtggataaggacattagcttggcgggcgcgaccggcacggacggtcaattcacggtgagctctgtgcatagggttaattaggtctgttagccatgacatcccagtctcgagtcaagtaaccagaacgaaccgtgtctggaaggcaacaactcgggtccagccgagcttgtcgaagtgaatacggagttccgcgggggtgtctaaaatcgcgttagatttatctttcttgatttatgcaggctcctgttgtgttctcaaacgtacagcggaggccgacataatcgtagtggttaagcttgttgactgcctcgagctttccaccgatgtagtactcctcgaccttggtgttcaggtacttgatggcggggtgctctgggtcaccgccgaagacgagcttggcctccttctccctggaataagcaaagatgttagaaattgcgcaatcctcgtttagataaatgccacgtccttggcaaatccgcagcgcccgctagtcccgccatccggaagaccaagcgaacgcggagtaccaatgacgaggcagttgcccaaggtcatgaaaacaactcacttgtcagggcggtagatgtcgtcaattgtaagaatagcaaggttgcggtcgtcacggaagtcacgcagggtgacacgggagccaggcttaaggccggcctgttcaatgactgccttggaagcatccagagtaatgggcatagagaagaggttgccgtcggcaagacgagactcggcgacgacgctagaaaacccccaccattagcaaaattggcctatttgcgaatatcattcccgttatgcactattttcgcggtctgcctcacaaaagcgaag

SEQ ID NO: 2424 - DNA, 1101 bp, Emericella nidulans
ccccctgtgtctcgaattccctgtattcactcttacgaacaagcctgttgcacacggcctccagtctattataacagtcagtgcccgctttaaaggggcacacatttggttgcacgacttttgagtagacttcaacctgcgagttagggtcccttctacgatgtcttgccttgggcttgtagctcagctttaagatatcggacggatactctttcaggtagttactgtacctgcatatgaacctgcaaggatgcttttaggaacggaaaggtcgctacgccacccgtgcccatatgtacttggactacacagtaatgggcgatcacgtgcaagatgcggagaacccgcttcaactccgcaggactgagctggagggcaagtattaacattggaatcatcgagataaagcacgatggacccggaagccgccagtccagtttcagaccaacctccagttttcaactacattctctcgtttctacttgtcggcgtggcctggggtttcaccacacctttcatccgtcgcgccgctgcggactttcaagcgcgccaggagaagcagcaacagcttcagcagaccgaactccagcctacaggagcacaatctcgagcccacgatgacgacaatgcggacgatagtgctactgggagcgacgaggatcaacccttaccttcccaaccttccgatcgctcaacaacgcggcagccggcctggatgaaccaatccacatcctcgtcctcatggataagaacgaaagtcgtctctctattttggacagttgtcaatcttttgcgcacgccggcatactccgtgccactaataattaacctgacagggagtgtctggttttttctcctggttggaaagcatggtgcgcccaccctccgcggaatatatcagtaagactgaggcagctaatagtctcgcagaactctccttgactgtgcccctagcgaactctagtgcattcatcatcacggtctgggaagagtggtccgtaggaacgacggtcattgcgcggcagacatggctagtgatggcactgttccacggttgaattgcgatttgcgtgcagtcgacctcgtagcggtcaatctgtc

SEQ ID NO: 2425 - DNA, 1516 bp, Emericella nidulans
aagatcaaagcaaggcattacccatgaccataacggcgctaagacgagagaggtaatgacctgggtgttttcggatgtaggcaggtggtactccgcttcccctctcttctaccatttctctttcttccttccttcgtgaacagtgggagtcaaagaatatcagttttcttgctcaggctttctgttctctagtattctccgtgcttcttacctaaactggcgtgcttttcgccctccaagaacacatggctctcgtcgcaaagttggcctacgggctctgcgtgctcgggaacctatctcgaggcattctggctactcctctgatgagcctgacgaacgaggaatataaccaagctccgctcgctgaatctcatgactcgccggtagacgccccaagcgatgatgctgtattcgttaactcggatgcagagtcgatcctcccgccttcttggtggacctcaactcttatggcacgacgacttctcgctctctccacctcgggcgtggcctcaacaatattccccgaccacttaccaccctatagccgtactccagacaccgttgccggccactcggtaagtctgaaagaatacttcgccgactgtgacgaagcactccctgccgggtctggcaacggcggcgacggcaatccaaccttccttgctctgcacgtcgcaacgactttccgcaacaccgctgctgggtccaacatctcgctatcgatcgactggtgggatcatcttaaccagacaacgcccgtctttcctggcttcccgctcagcgcagcgggtcttccgcgggccacgctgttcgggtatattgagcccttcgagacgccgatcccatcggaaacggagaaagcactgacggactgctatgtcgctgctcacccagattcgaaggtctggctacctgggcggctggggtcgccgcattcgagcttctgggccaagatggtcgttacgcaggtatactggattgggggttttggtggtctgcagcagattgggtggatagatatggatcagtggaaaggcattcgacgtaaggggagtctgcctggcgttggagatggacggggatgggaggacgtgaggcttccaggggagaattagcggagtactccgcaatggcctgatacacttccaggtgaagtttgtgcgaatggtggcgggtggcttgaacagcggggattggcatatgctagcgaccaagaatttatttccacttgtctgtccgtatattatgatagacagttatagcaggaaattccactgcaccaggataacgagataaggcgtccaatggccgtgggcgccgaatctcgtatctggaggtctcctatctgtgcttatctctccttatctccatgcagtggcatacaatactggtctgtccttcactggatttcccatggcttccagccgcaattgactgtttgcctgttgctggctcttcatcgagaaatacccaagatgcgtttcggtcgctttcacctccgcgttgagcagtccgg

SEQ ID NO: 2426 - DNA, 5047 bp, Emericella nidulans
ctagcatgttaccagcgatgtctggaactggtatgcagggctctctatcattcctcacaatctaattgccatacaacagcattcagcaagacaatccatcctgaggctgacgatacaaatagcactgcccgcgagaactcggagtgtagaagtcggaccggcctattcttaatgatgacacgtagcggtcggccacgtttataccaacagcagctaccggttcatgcagctgaccttttaagcttggtactgccacacttatggcagtatacggtcaccaccttacttttgagtccttatattcaagagttgatcgctcggcttagaactcaatccctcagtctccgagttgttcttcacgaccaagctcaaaaatatagggtatattgaagtcggcctggagccatgatctggccgccttcccatcagaggcgaaggcctgtattcagaaaaccttttcaagccttatcttgatatgcaaatctgcaactgacttctgttcagaaacggacattttttcatctttatcggtcatagcatcaagacctccctgatcatcgtgccgttcaaacacgtccgtcgtcgccatccacgctgctcacctgccttgtgcagggatcgtgaactatgatagagctgaaattagaataaaccaggcgtatttttaagaaaagccaataaatgcagccctccaccttgatttcatgatctcatcactgctgtggcacaaatcaggagcgttgcatgaaattaagcaaccccaccgttgccgccaccggctttagcctcggatggatcataaagagtgccttcaaatcccaaagtttccgtgtgatcggccatgccagtaagatactgtagaagtacagaaagctgaaccttcccgcaaacgagagcaagccacgcagccaggataaaaacaagattgttgtcttgacggtccgcatctgacgtagaaggggatttgtcaagggctacaggtggctgctatttctttttcttctcccctgaacccgagttgttgtgatccgggttttgggaggtcctaggccccgcatcttagaactgtctagatagatgcagatgactgcttcactttgataggattctaagggctcgagtctcggagagtacgccagaacccaaaaaaccaacacagtctgccactgccgacttgcatacgcaaagtaaataggtaaacaggtcgactagtcggttgtttactctgggagtctcgtgaacgtcgctgtcagtcggtcggccgtccagcttccagcatctagatcttgatcttgatctccataattgatacatagccccgttccatggtctttaaatccgcttgttttgcaacggatccgttgatggcgtggactcccacgtcaatcctggccagaccaggaccactagtatattattgcgtatcactgtattgtttgcagaccgcaaccgtacactgtattattgaggtgctcggcctgattctcggtggcgggtatcgcccgagtctacctagggatgccgacattcttccgtcagccagaatctacctgacagccatcgccaggaacttgtcccttgagttctcagtgacgctctcagacacaatacctgtcactcaggctcattcgggttctgggtgaaagaccgagcaccgtgcgtacttaatccaagagaatctgcaaatacgctttccggggtaatccggcctgtaagcaaaaaggcagagggtgtgaaattgaagtggtaatgatcagttgagttcagtgctcattggcggatcagggcatttcattgtttcatatgcagaccttggaccagtcccgaaacgtgggtggcgggctggtggcgtggactttgagtacgtacataactaccggtggtcgcgatccatgggccggctggaaaggggctgcgaacagtaaacatcccatgatactggccaataatggtaacaggacgtattttcaagtcgccctaaagatagctgcggttccaaggttcgaatgtagtcgcattgagaataaactaaaccatctatgcctcgagcggtattatcacgtgcttcattcatgcataacatagaaagacttatgcagcggttgaatttgacagtcacaagtcgtggtatctcggcatggtccatgtttaataacctcccaagtacatgggttattgaatgtcacggggatcctggttatttggagccccttttcgcgctcatgcaggtcttaagcagtttgagcgactgaagaccagttgtacgtgaaacgatatggaatgattccccaaacaagctcgtcctgagtggcttacctcgccggcccggctgtccaagccattctctaaactgtggtctcagccgcagccaaattgccatagggcctaaccctgaaggcacagacatgattatggtgcagtctcaccaggaacaatggtggggagccaacttctgagtggagcagctggagctgtttcaggtcgatccctgagtctggagtcagggatgctacatcaaggctacaatgtatactctggagtactccaagtattcactgagagcagtcaagcatcgaatgtcccgtctagaaaacgcggagcttttctctacttcagataccaagagcgcatctggccgggtattgatgccataatgcatcgagcctgagacaggaagctgaaccaacaggtatcttgcgttgcaattcacgtaaattcgcattcctgccctcttataccatcctgatcatcttgaacagtccgatgattttcctcctacgaggagtctagaccttactgtccagatggctatggacgcctggagtcggctgtgaacgcgagagcctaacggcaatcccagtcccgagcctgcgatgaactgactatcccaatgacctatttatatacgccagcgaggataaataagctttgcttggacccttctcccctgaatctcgaagcccgtgggaccagcttgcgcgttgttgtgcctcttgatatcagcgcatcccgtcgtggagaagtctcaccgtggtttgccaaatgataacctccagagatgcacatcaccgaaaatcccttgcgatcaacctcgcgaaattccactacaagcctacaagcacgcaagagtggacatggctcacagtgatctagcaaattcgccgtcgaatggagcggcctcttgaggcttaccctgtagcctggggtcctccgtccatgaagtatgaattccctctctgccctggcgcccggtcccgatctctcttttctcgccattctctcaagaatcaacattcattcttttgctcgcttgattgttctatctgacttttagtgctattgcaccttttcactcacttccgcttactgtccttcgcaccttccattcctttgttagtaaagctggtcttgcgcgccactctttccatcagttacaggcataccacaacgagttcggaccctacggtcgcatcttcacttgagccttgcatgcttaacagtgtcccaacatgaagttctccagcatccttgcgggcgctgccttctttgccagcagcgttgtcaccgctgacctggaccctatcgttatcaaggtacgagacggcagaatgccacgacaaactaagctaggatgaggcagtatctaaccttgtgcagggctctaaattcttctacaagagcaatgacacccaattgtacgatcttctttccatgagtatcgacggagacttgtactgacgtgaagcgcacgtatatccgcggtgtcgcctaccaacgtgagccctcctgacttggccgttgatgccataaccgagcttctatggctgacctatacagaggaatattccggtccaaagtctgatacaaacaactacaaggaccccctggccgatgtggaggcatgcaaacgtgatgtcccttacctccagaagctcaatgccaacactatccgtgtctacgcagtcgaccctaaggcggaccacaaggagtgcatgagcctcctcagtgatgctggaatctacgtcattgcggacttgtcttctccttcagagtctatcatccgtaacgaccccaagtgggactttgatctctaccagcgctacgcatctgttgtggacgaactgtcccagtacagcaacgttattggtttctttgcaggcaacgaagtatccaacgaccccgagacaactgatgcgagtgcctttgtcaaggccgctgtgcgtgacatgaagcggtatatcaaggccaagaactaccgcccgatgggggttggatatgctaccaatgacgactcatctattcgtgtggatatggccgattacttcaactgcggtgaagaggaagacagcattgacttttggggttacaacgtttactcgtggtgtggcgactccaactacgagaagtctggctacaagtcccgcaccgaggagttcaaggactactccattcctgtcttcttcgccgaatatggttgcaatgcagtcactccgcgcaagttcactgaagtcgaggcactctatggcgacaagatggccgaggtctggtccggcggtattgtctacatgtacttccaggaggataacaactacggtatgtccctctggcacatctgcatctactttctaacagaaactaggtctggtctctatcaacaacggaaacgccaagacccttgaagacttcagctatctctccaagcaacttgcctctgcaacaccctccggtaccaagaaggccgactacaaccccacaaacaccgcgcttgagtcttgcccaaccaccggaaagaaatggctcgccgccgcctctcctctccctccttcgcccaactcggatctctgcagctgcatggaaaagagcctctcttgtgtcgccaagtctgacatctctggcaagaagctctcctccaccttcagcactgtctgcggctaccagggcggcaagttctgtgaaggcgtttcgggcaatgccaccacaggcaaatatggtgcttacagtgtctgcactcccaagcagcagctttcttttgccatgaaccaatact

SEQ ID NO: 2427 - DNA, 1851 bp, Emericella nidulans
aggagtgctgtctatagcattatggtggtgtcggcgcccatcgtggccctcactagccgacagcttccgtggatagttctcctcctcgagctcctggagaacccgatcatgagacttctgactgcgctcaaaactgccccgttgctggcggcctgcgttgtggcgaaggcaaactaccctgccatcccggtagatacgaccactcctgttcagcagcgccttgccatctacggtcccaattgtaagataacgcccctgctcgctcgttggtcttttgttaatccctgctagcaatttcgatcgggtggaacacgtacgaaaagctgaacgagtcctgtgtcgagtatggaacgtcgagcgagaagcttgaccggcgggcgtgcgcattggtcgagccaaccacgtacccaacatctcggacatacgagaatgtggttatcctgaccgatctgacggctggcaccacatactactacaagattgtgtcgaccaactccaccgtagatcattttctgagccctcgcgttcccggcgatgagaccccgttcagcatcaacgcggtcatcgatctcggtgtctacggcgaggacggctacacgatcaaaggcgataagtccaagaaggacactattcccaccatcaacccagccctgaaccacaccaccatcggccgtctcgccagcaccgtagatgactacgaattcgtcatccaccctggcgatttcgcctatgcagatgactggttcctctcactagacaatctactggacggcgagaacgcttatcaggccattcttgagaacttctacgagcagctggccccgatctccggtcgaaagccgtacatggccagtcccggcaaccacgaggcggcatgccaggagatacccttcacgacgggtctctgccccgacgggcagaagaacttcaccgatttcatgcaccggtttggccgaaccatgccgtccagtttcacctcggtctccaccaacgactcagcgaaagtgttcgccaaccaagcgcgcgaactggcgcagccgccattctggtactcttttgagtacggcatggcgcacatcgtcatgataaacaccgaaactgatttcgaagacgcgcccagcggaaaaggcggttcggctcatctaaacggcgggcctttcggcgcaaagaaccagcaactcgagttccttgaagccgacctggcgagtgtcgaccgcgatgttacaccgtgggtcatcgtcgccggccatcggccgtggtacacggccggcagcgcatgcacaccgtgccaagaggcattcgaggatctgctgtatacctacggcgtcgacctaggtgtcttcgggcacgtacacaacgcgcaacgcttcttgccggtctacaacagcgtcgcggaccctaacggaatgcaggaccccaaggcgcccatgtatattgtcgctggaggcgcggggaatatcgagggcttgagctctataaccaagcagttggatttcaccgagttcgcaaatgatgaggattatacctattcaacaatcaggtttttggatcggaatcacctccaagtggactttatcaactcggtctctggggaggtgttggatacgagcacgctgtataagagtcatgaggcgcggtttgtgaggcagtgacgggccgggttctgtatatagcagaaacatcactcgggtatatacgcttgtggattgtacatagttggtgatgcggcaatggccttctcttgcgttttcagctctctgcctggtctctcagccccgccggatatcccccagcttgtttagccggaccccgtgggggcctcactttctatctccaatccccaccactctt

SEQ ID NO: 2428 - DNA, 433 bp, Emericella nidulans
aagcacaaattacatcaagaacgtctatttctgtatcatccatgtacgactcaactcgagctttaactcattgaggaaacggatcgtcagcattatgcaatcttcttaataccaagactgcattgaaaataaccaagttttgtacatcgttcgggctccagcacataaacgatgcgaataaaacgaccacaaaaccacctaggtcttgcgccaatgcagaaatctaggtacgtccacacgcgtcatgctctcccagcatctgttgaactacctcgggatatccaatcgcaaagatccagaggcctcgccatctatgggtgcatctcgcttgaatgatcggcactgagtatctatgctgcagccaactatgtcttgtctcggtagtcgagtcaagactgtccgtaccagatattcggctctggaaccacattga

SEQ ID NO: 2429 - DNA, 762 bp, Emericella nidulans
aagatcgatagaatcgtggacggggttcgagagagcttggacttcatcaagacactggacccggccattgcaagaatagttcgcgactgctatggatgggcgacaaacaagggatttgctttcttgattggcgtggtgttcctcgccttcgtgagcagcttattcattcgcgaacggagcttgtcacgctgaacacgcacccttgtcaaggagtaggatgacatcgtcctttgatatatatggaaatacctgtgtttagcgttattatataaaaagtagtgtattctgtataaaatttcagtcacatggatgttgatttgccttggctccaatctcacctactacggaaggcggcgatcccgatcatcttcatactgccgccgattcgatgttctttgaccaccaacactactcgtgctttctcagcgattcttcctggcttgttttcttctgacaagttgtaataatggtgaatcattttgtctagtatttccacatatcttcaccatgtccgactcgcaggctaagttgaccttcgctcgctaccgtcctctcgtttaccttctctccggtgttgctgcggcgtatgcgctcgttcttcttcgaaaccatctcttctcgtcttccccgtcaccaatcctctcttcgcccggggaaagccgttccgccgtcaaagaagaaatgagcccgaagaagttgcagctggcgacacgccggcggtcttgccatcggccattggaggttctagaacgccagaacggg

SEQ ID NO: 2430 - DNA, 4717 bp, Emericella nidulans
  unsure (1)..(4717): unsure at all n locations
accccagagtctggaagaacccttccccagtagactcggaaggcgtgacggtccagttgtctgagagaatgtatttgtaaccaaagccctggccatctcgcgtctcgccgtgagggcgtctaacggagacacgacatacggagctggtgagtagctgccacctccagtgatgaggtgtccatcataggtatcgcctgcgaagttagaaaagtccgactgcggcgtcggtcccgtggcgagattggccgcgtctttgccaaagatccccagcgacatcgggctgcggagggggagggtgttgtttttgttcttgagcaggacgattgactcggacccggctctgcggatgaagtctttgctgctggggtctcggacgttgaggtcggccgtctcaacaggaaatgcgtactcctcaggtggctgaaggaggttcaactgcgtggccacgattctcaacgcatgttcagtcatgacgctttctgggatacttccgttcttgacagcagccatgatctccgagacggagtaccctgagttccagccaagcccctccaagcaggccggcagccttgtccacaggcgcagtgacatcagggacgatgaaacctgtgatttcagcagtgtccagagtgaagaaataagaagactatcacaatggggtaatacctctaaaaccggtctcattcttcaaaatgccgttcataatgtgatcattttcacagccaatgattccattgacgcggttcatgacacacataacggaacccagtccattcgcaacaccgtctatccagggccagaggtagagctcatgtagggttcggtcgtctagattgctggaggtccgcatcgcagggttgtcgctattgtacgaagtgcgattggtttcttgttcattcgctactgtagtcagctactatacttgaactctgggggtatgagaaggcgtgcaaacccaagtaatgcttgccgcaagagatcatatcttgttcctgaatggcggctacgcctagaccgaacctgcgtcatgttgagccattatattccccaaaacttggaatttcgagtctttacattttcccattcaggtacggatctgagccctaagcctgagcgttagaggtgcggtcgccataatgatatatgcagccgcttactagtccttcccagagccttgaaccgagcggactcctaccaagaggtccagttgaaggccctagaagcatgttgtatccctttttgcggaactcgacagccattcgtgaatagtggtccgcaatcagagatcggttccaggagctggtgatcgtctggccgccaacccagccagagacacctttccctccagagagaccggttggacctgaaagactttagcatcagtggtggaaggctgaaacgaagtgcaactgcaagagggctggaaatactcaccgtcactcggctcaaacggcacaaagcccggcgccgtgccatccctgacagagatattggcttgctgctctaatgtccagggcagcacaagtgtctctgctgcttcatatgcctttgcccagtcacgatacggctgctggctctgaccttggacaaggcctagcagcgtcgctacgctagtcaagacggggagaatatttgaatgcattctgaggtttgatgagacgaaggccacgagatttccgccactgcccagtgaactaaaacaatcaggagcggctacatctgtcttttgtaccctttatttgctcctcgtgcccccgtccggcttctccggatgtccaagcagaaactgaatttgcagcaggcgttggcaccgtaggcgagctcacccagctcgggcgaacatggcccgagttcagcagctccaaccttggcttgtataagccattcattatttcctcagctctctgtgaggtgcccggggagattaagtcttggctcctttagcacgagtcctggggtgttgccaggattccccgtacaatgcggggtggaggcgaggactaagccgcagccacggcgtaggatatcccggtttagggccttccatctggcctgctgagtggtcacttattgatctagtctggtcatgatcatgttgtaaatgtcattggacttttcttcagctagatgcggattgtatgatagagatcatcgactagtatagcactacacctttgaccgagggaatttggtaattatgggctgttgatcttgaaagacctacagacacgattattgatagttctggagcattcctggtcatagtggactgaatatatggcaaggcaccggcactcgttctcatacctgcgttagggctatgcttcggctgaacttcggaacatcgaattacagcgcaagttcgccgctaagctagggaaaaacaggaatagcatccgcagttcaattctccaagatattgacggagtagaaagtgcggagtcgagggtgagtgatgtttaatatggcctgacgagggtcttactggatctccatgtccaagaattcctgtacgacgaatatctgcttgtctttgactctagtcattcctcagttatcattatttaggattcaaggcccgaaaaaagaacagttccaaatcaagttgttaggctttcaataccggattcagtataattagcctgtttggccaggcagtcatcatggtggcgcaaagttgtcaataagaatccagtcccaaactccttgaacagccaagaaaccttcatttcacaagtacttcgacgcactactcaagatatccaaaactcatcagcaggctcgccaaagacagtacgactaatctggctgtactcctatacctccaatgtcctgcaatgcggtatactcccggagacggaagaaccactactgtatatgccgaaactcctatttgtgacatagataggcgagtctagcgatatcaacgccgaaccaatgttcaccaagagcgtctagcgtcttattaatcctctgagtcgctgcaggcgactgcaattttcccagcctttggaaagctgcgtagctaccgatgattgcagcagctcataagtcgctgtcaatctggcaaggctgaatgagggagcgagatttctggactgttgtctattggtgtcatggaaagctgtacgttcggcacatggtcagtctcatatgttgcctcatatgtgtccatcgaacatgtattcgcgcctttgatccaattactcaggcggctagttctagcattatctaccgacaaactcgacggtgatcgacggacaaaaatacctgactactgataagaaggtcagcaggacggccaacgaagttgaagcggacaagttaaccacactgcattattcggtgtcggcagcgagcagagtgggaaaggacgagcggtaaaggaatgaccagcttgagtagggctgtgtgactactagatcatagaggagtaacctgcctcgcacgtccatttgagatacgcacacctagctcaggcttaggagggactgtctgaggagccagttacaaagacggggttatcctccgtgttagagagcgatgttcaaatacgttagggtctgaattctctagtggaggcggcacaagcaaaagagcaagcaaaagagaagagagctgcacatcgtcggacaaggtcggatctaggacaatgtcttctactacttggttgtagtcaagatatttacaatggtaactgggaaacgaactgcggaactacagcaatgctgactgacgcttcagataatagatgggtatttcctatatataaccagaaacccactattattatctccatacgttgcgacaacatgcgacaactctccgtgggtaaccaatgaaacaatatggtatctctcatataaaccaaatatctataccggccgttattgcgacctgcgggagttccgattcggtgatgccattaaccagaatatcctccgggtatttgcgattttaacgctgatgtagcagatgcgacttgggcgtaaatactagaatagacaaagtgcggtgacacggtcgcagcaaagatgcattatgtgcgccaatgtcaacagcctgcggaactcgggatttctcaatgactctgcgcgggagatcctcgtcctgaggaagactgggtagtatcattcgagctcaagttgtgtccggctttctggagttcatcctccatggagactatgattggtggcgctgaccttaaaggtgatggaccagggactagaggcgaatgggtcgacccgcggccgtgatcgctcaagtttgtagtgctgatcgtgagcgcgttaatattgtggctgggtccagcggtcaacgcagggaacgagcgcccagcgtttaatccatgaggatgaacgtcgagactctcaggaatttcggacgtttcagggttagcaacttgctgataatcaccttgtcgtcttggagcagagtcgcattccgaatccgagttcggattggagtcccaattgttgtgttgggcttccgctcgcattttcgataccttcatgtagttgtaagaggcaatactgccaatggtgacaataagaccggtcacattgacggccgtgagtttgtcgtggaaaatcacgcccgccgcagtaattgtgactacctccttgaatatgccgcaaatactcaaggtaacaaccgaggatcgcttgagcaaagcgaattcggncgggatcgtgcagaatgctaaaacaactagaac

SEQ ID NO: 2431 - DNA, 2788 bp, Emericella nidulans
catccggattgatgccccagacattcacctgcccgacggcaggccactccgaggtgaaatggtacttccagtatccgtcgccgccggcgcccgcgtccagcttgatctggttgtccagaccgccgtcgtacccgtactggttgtagggcccattgaaaaaggcatgtgggaagcgacgtggcgtcttgtacttccagccggaatcgccttcctggacgtggctactgctgccagtccagcgggaccagtactcgacgcggatgtgatgtccctcccattcctgcgccttagtgccattccatggaagcatggtaatcgtgtcgttacctcccttgtacgttttccagtcagagaacgtggtgccccaattcgtcgaatagcggtacttgtcagcaccggcagcgtggtgttggatatagaacgtgccgtcctccttctcatgcagcaaactgctggagtagttggcagaggtaaagaccatggggttgtcaatctgcccaatccggaagaggaagtggtcgactgcgtgggtggagtcgtccccgtcggcgttgctggcgttgttgacagtgacccggtggatgccgttgtacacccctctcagatctgcagcccactgccacttaccggggatgtgcccggtagcgttgctgttggcgacttcagtgatgttcccacactggacggtggaggcgtcgatggatggaatcttgccggtttccgtggaagagttaaatgagatggagtctgtgacagaatcgcatcccatcgcctcagaaaactgcagcgtcagtcgcaccgtctcggacgcatctggtgcgacggtcgaacgcagcgggctgtcggtgcgttggcctcatcgtcgccgggctggaacttggtgatcatcggccggggctttttccagagctcgttcttgacataggcacggaactcgtaccggctaagcgtcaggttcggtaagcagcctaccagctcagtcgagttgccatagaccatttcctttggcccgtcgcctagggtcagcgtgtcgtacgggtgaaagaggttcctgaccttggtgcctgaggggaaggcggcaatgagtgccgtctcattgtcagagcaatcaaatgtgtagtcgtgcgtgcggttcatgttgctatagactagccagatgggttcgttgtcgtcactcgagccaaagtcctgggtctcttcgttccggtcacggcggaccgaccacatgcctgtctcggtctcggtcccgttggaaccggggtagtagacaggttccgtctggttagaaagggtctcgatgatgaacccatcgttgagcattgggtactgctcgcgcatctggtacatgtgcttgatgatgttgcgcaccgggtggctcgggtcccggtggtcgtaggtgaccgtctcgtcgttgcaaccgtcgagtgcggccaccaggggccactggtagtactggctcgattcgagtgagaagcagccgtgcgtcttccacgcggtcgcagacgacatggcctgtcgtccatatatgtagtttgacgccgtcgcatcgagcacgtagaacgcttgctcctctccccaaagcagcagcgggatgcccggcagcatcagcgtggtgataaacgagcccagcatctgcctctcaacaccccactcgattgccggccaacggaaaacatcctggtttgtcacgccgtacatgtgccggggatcgaacttgcccgtgttggcgttaatcaggtcgttggtcacggtcatgtttccccatgcctgcacccagtcaagagggacgtcataaccggcctccagctgcccgtccattcccaggaagcgggtcagggcacggtaagtcgagtaatggaaggcaccggcgtcgatagcctcgtggccgacctcgcgcaggaaaagctgcggatccgactcgtttgtcagtttcatggcgtcgtagatattccccaccgaatcgacctggttcgactgccgtcctcgtccgagatagatagacccaaaagtattgcctcctgtgatctcacccgcaatgaaaaagttctccttgccgacagcccgcgcgcattcccgatacgctttggacatgtcccccaacgcatcgacagtcgcctgggtcgccttgtcgtaccgaataccgtcgatatcaaaggaggcaatgatcatgcatgtgtgtcggatcagccgttcccgtacaggtgggtaccattctctcaaccgatcctggacggacgcaaacttcgccagttgacgcttccagtctggccagacaccgaacgcttcgatgtcaccgtactggtcaaagtcactatcataacacccgaccaggcccgcggtcagggactcattgactggcatcccgtcctcgtaccagaagcgcggataatcacaggtggcgttgtaggtgttgccaatatcgaaatcgacgtaccgtctgttggacttccaaagggccttgtgttctttctcggagaagggcgtggtgtcgttgagatgaccttcaaaaccaatgagatcaccgaggctgcagtaatctagtgtcaggcccaagttttttacaaaccgatggcaaaacgcagggaggcgaggtactcacgtagcgattgtattgtcgaacagaacgtacatcccccgtttgaggatttcggtgatggcgtcgcgccgacctggatcgtctaaagtgcttgtcgagaaggtgtgtcagcgccaatcccatcgagcccaggctgttatgagcgagttcgcaggacgtcctatcgaatgtagatcactttttttccaaaat

SEQ ID NO: 2432 - DNA, 1076 bp, Emericella nidulans
ccctcgtctggggcggtccttccctggctgcgcacccaaaggccgctggagaggaccttgcaattgttgggagcgtgatgtgtattcgcgctggaagtgaagaagaagtgcgcgagatgattcgcaatgatccctatgcgaaggttggtttctggtatccagagaaagcggtgatcacgccgatgagatgcgtgattaggaagcctttgtagctatttttgatatcccggttatagcttgggcaggtatcaataagaatgtccgtgaaatgatatgttacttcgtgacttaagatttcccgaagctgggtaatcatgccgaatatgaaaagtatttgagaagtcactacaagacaaatatatctttatttagattctttagacggctatacaaatgctacattgcaaaattaggctgtctcgtaaatataagggaaagaagaaggctagaagctttcggttcgtaatactgttcagtctatttggaacatcaggaagctaacaaaatagcgaaatcaatatgaactttttccattaaacactcgatcacgccttcactttgagcttgaatccatacagactaactcgtagcccaacatacataaaacctgctaccagggaagtcacgcctccatatacccagaggccagtccagttggaatggtgggaatgagagaggatagcaccgccggccgggccaccggccaggacaccgaggccgaccatgccgaaacccatgccgattcgagtaccgatttttgtcttatccttggtcaaggcaacaaagcagagcggtggcaggccgattagagcaccgccgaagaaacccgagagcagcgcgatgacgatcaagccagcttcggtggtcacggctaacaagcacagaatgagaacgccgacagcgagacagcacggtgcgataaggttaaaagggcctatcttgtctgccatagcgttcggaatagttcgaccgaaacaggaggcggcgttgagaatcgggacaatatagaaagccatgcgggtgtcggtgatgggtttggcggctccgaagtaagagatgtagaagagaagggcaaa

SEQ ID NO: 2433 - DNA, 1946 bp, Emericella nidulans
ggctggaatcggtgttctgttggcccatgaattgggatgggacccacggattcaggatatgaagttcagtccgctttttgtgatgttactctgtagggtacgtgtctacgtacgtaagtgtacatagtctattatggtttaaggatgtaactacgccgtggccggcaatatgatgatccccaggatttgaaaagcgataataagatgaggcgcgtattctgaagaaattgataggctgaaccaagtagtatagcgcgcttggctcatcaacgtgatactgaatggatagcgtagggctcaagagatatcaataattaagagaactcttgggctcggctgcgggagcgagacagccgagatgctcacacctggaatcaatatcgatctgctgtgagaggctggtggtgtcgacagcttctgtggttctccctagtgtgagcgatgggtcaagtacaaaggcccgcccttggcattaattttggaccctttccgtcagtcagattagggtaataaacaagacgtcaggttggggtttgaaacagaggcgttctcttgctcggtgaatttgatgcggaaatctgctcacgcgtcgtatatcctggagggtagagtacgcattaatgtccgggtacccagagtacttagtacggtatacggcgtattctgcgcggcatcaaagtcactgcttcatttccatgaccatcgtcgaggagattcaacggcacgcctcacgcgcaagcaagaattctggacatgatccatacgaagttacgtatgtggctctgtgggccatgattggatcgccggggtcgaacgtcttgcgcgtcgacagctgaaccatgctgatcgccatcctatggcacccactgccggggaccgcggagggtgacatttggcatctgagtcaggagcaagcaccaccatctgacggcctgaccctggcgctgaccagatgataaacatggagtctggaaccctggctggttaggaactctatgtgttctgtcttaacagaaccagcagcgtgtatccatactatagaaaaaagggcgagaagtagaacagtgtacgacatctgatgccgaggcgcggacgcgctgctgtccaacaagcctatactcacctcagtccaagtcacctcagtccaaggaccaattccttttgagcggtagtgtaagtgaggagtgcgaatctagggcacggaacccccttcaacagtcaagaaagcttagaagagacgcaatcgaaccttgctggtgagattcggtcagcagcgtttcgggttgatttcgacggcgtctcagcttcaggaggcgccatgcagtcagggacacgcggcccgtggggatcgcagcgagctgactggcccaaccgggcggaaggccgcgctgatccaacttcaactttcgtgctctcaagggtcgcaccaccaggttttcgcaccttccttttttttatttcggtatttttcgcttgcagagatcgaatatccggatgagtctgacgctgtcgtagacctctttagattaaccgccccatctccgttaatggcaaacaacaaaaatagaagaagccgccacttcactggagcattccatgggcaataatagcgattgtctctccccaccaccttctcgcgctagtacgattgccgtaattttcatgccgtttgcagttggaggcatgacgatcatcggtttgaagagtctgaaacaagttcaacaatgacatatctgagatgcatgcatacctcacacaactttgcaatatctgtttgttgcctaaatgaatgacaaaagcatgcgttgtcctgcagtttacgcgcgagaagaatttagtctggggttgcagctgccctgatctggggttaccttgagacttgtgccttgtgctcgacaattactggatgtctgagagcatatagtattgcgcacgctctgtaggtt

SEQ ID NO: 2434 - DNA, 956 bp, Emericella nidulans
aggcaggatgagcgacgcccgccatggagaggattgagggcgctagatccatcaccgttgcgaattgatctgtgattgccccattagaagcctggggagccgtcttcgttgacgaagggaaccgtgctaaaaacggaacgcgaacgcccccctccgttgtgtacgctttgtacaacctgctcggcgccgtggcagcttgtgcccagcgtggcccgtaccaaatgaaactatccccgttcccgagattctcgtagctgttattgtagtattttagtaggtgtggaagaacaccgctctgcacgaggggatatgcctcgtacgcagctccttcagcgccgttatcggacataaagcagacgaatgtgttgtccagctcaccgatgctgtccaagtaatcgacgatcttgcccacgttggcgtcaatacactcgaccatccctgcaaagacttccatcgcgcggcaggagagtttcttttcctccggcgtgagttcttcccagggtttaccttcgccttcgtcgacgacaacgggatgaggctgtacatcctcccgaatcatgccaagtttcttgaggcttgcaaggcgtttgagacgtagtgcgtcgggtccgtcgtcgtacacgccgcggtagtggtcgatatattcccggggtgcttgcagcggccagtgcggcgctgtaaagggcaggtatgcgaagaagggcttgtcttcgtcctctttcttgttcttgtgccagtcgaccagatactcgcgcattttatccccatacccattagaggagtaccacccgctccggcagactgcggacatacttgtcgtcttccatatgcagcgctatatagctagcttcaaggaaagttggcgtctcatcttgatcgcggagctgcggctcgtacgcataatggttcgagcaagcggggagatgggcaagagaacgatcgaatccccgcttata

SEQ ID NO: 2435 - DNA, 1523 bp, Emericella nidulans
atacaacctgccccaaaatgctcaggaatggttcagcaaggtatcatgactcaatggcttctaattgttccaggatactgattattatttgctctataggccattcacaccaacgtccctggcggcaagctcaaccgcggtctctctgtccccgacaccggcgtggccctcctgcagaaggaactgagcgaggagcaatacaaggaccttgctacacttgggtggctgaccgagctgctccaggccttcttcctcgtcagcgatgaccttatggatggttcaatcacccgtcgcggccagccctgctggtaccgccaccagggggtcggtctcattgccatcaacgacgctttcctccttgagtccggtatctacgttatcctgaagaagcaattccgttcacaccctgcctacgtcgactttattgagctgttccatgagaccacctggcagacggaattgggccagctgtgtgatctgatcacggcgcccgaggacaaggtcgatctcaacaacttctccatggagaagtacatgttcattgtcacctacaagaccgcctactatagcttctacctcccggttgccctggccctccactgccttcagcttgctacccccgaaaacctccgtcaggctcacgacatcctcattccgctcggccaatacttccaggtccaggatgactacctcgatgcgtacggcgacccctaggtcattggcaagatcggaacagatatccaggacaacaagtgctcttggttagtgaaccaggctctgcagcgctgcagtgccgagcagcgcaaggtgctcgacgctgcctatggtcgtaaggacgctgagcaagaggccaaggtcaaggctattttccgggaattggacctcgaatccgtctacaaggagtacgaggagaagatcgtgggtgagctgaagacgaagatcgcggctgtcaacgagtcggaggggttgaagaaggaggtttttgaggcattcctcgggaagatctacaagcgcagtaaataagcgataggcagcatagtatgccattttgagatacctcgcaatagactaaagacattaattcggattccatgaatgtttttgagcaaaaagtggatttgtacacagattatgtatccctccaagaatgagtcgtgatattttgtagcttgaatttgcgcgcaaaaaattatttctggtttatcattaaaaaccaaaggttctgaatgtccaaagcttaaccccaggggcccaggctttgcgccgtccagggttcaggagtcgctggaaggtttcacgtttcaaccctgtcgatcccctattctgtcggccttagcaagtcgctctaactaaaaaaaatcgcgttgacatcccgttacgtatacttctgtgacaagtatatgaacctccagcactcaatccaatggctaaaattttctttgctttgcccacccttttggttcaccctaaatgtggtccaagttttataatgtggcccccatttttagccatagccacttttc

SEQ ID NO: 2436 - DNA, 5167 bp, Emericella nidulans
cccagcatgagagttcgcggccgcataatacgactcactatagggatctatgaaggcgtcgatatttgcgctgtggaggctgtggaaggatattaaggaccctgagcccacgatggctagccttcctagaaacgaagagaatgggggtatatacattccataaatatgatcccgtaccatcctttatatattgcttcgagcattctctgatggggctattctcctctcaacactctcagtgcctaggtgaaagttcgtccttgaccgagaaacaactaacgtcttataccctagtctcttatgtatgcatagccaagtagttaatagagagatttaggttaagtagcctgatatatccacaatagcttgaagatataatctacatatctgttctctgtcactgaacatacttggagtagtaccacttaaagatgcacagcgataacctctgtaatcattttaaatttgaagtaaatcataacaactcctcctttcacctaatactcacttcctcttataggatatctagcttccttgaagaacatcaatattatatatattccatacgtatgagggttcaaatctgaacgtagttggataaattcctcctcccagtagcgtgtagggaagtctaaagcacaattcagtaagagttctctcgtcaataataaaacgttttccgtgcgtcaagctattacatcaaatccatcacaccgccacatgatagcgagatttcaagcggatcctcttgccgtaagagtagattactgctggcactggtaacaaaccaaggcgacagacccaagcaatggattcccccatcccaaccctagtgtagcatacattgaaggaccagcaagcggcaagaaggctccgacaatggaccgtaccactgtattggccgctatggccgaggcggcatatatgccaaaagcgtcaaagaggtacgcttgaatggggagaagggtggcaatcatcccacagccaacccagcccagtctgatgatgggcatcatccaatgaacccgcatctgggcggaccagccgtactaaaagagacctatcgggatcaggaggcttcctggaatgagtggcggaagtcgaaattcgggctctgcctggccgttatttcttgcaataagccggttctggattttgtcggagagagcaccaaagcaagatataccaatgagggctccgacgccaatgccgatggaaacgaatccggtggcactttgccagaaataataggtggcttcgtataattcggtgacggtggtgaagagtaagtaggggtatccagaaaccactcctattattgacaaacaattgttacaatcgtgtcttacccaagattggagagctacttacctgtatagcgagaacaaggcgacatttgaggtgaagaggagaagcttcgtcggtctggttattgcttgggtggaaaccttccttgagtctggctttagggcttgtgcagcgttcacctgggatctagtctcgtgtctgatgcgattcgcttttcgtcgcaatagaactggttcataggattcagataggacagagaaaacaagaatgaccgcgatcccggactacgatggtaaactagtgagcttggggcacaggagaggcggattgaaggggatacgaaccacaatggccagcagctagaaaatctaacgccagccctgtgcttcagagaggtatccacctgcgatcggcccgacgacagggtcaagtagggggcccagcccatagatggacatggcgactccacgctcctgtcgagcaaacatatccgcaacagagcctgcccccagtgtgaccggactgctcccagaaatcccggcaaacaggcgaaagaccagcagcgcgccgatgttaggggcgagagcaccggcgatattacagatcgtaaatgtcaacgtgcccacctgatagatgcgcagtcgaccgaacatttcggagaatggcgcgagaaacagcggtccgatgaggtggatggagacaacgaaggaggctagagtcctgttggctgactggaagtctcccatcacgagcccttgtgccggtgcgtcaatggacgaggtcaagggagtaaggaaggtaagatacgagataatgcccatattccaccattttttcttcctccgccagttcgctggtcgcgcaggatccataggtccatcccagcctacctcctcagtcaatgtttctgatgccttttccgccgaactcccttcttgttcgtgcccgctgggcgttttgtgcagctgggcgttttgtcgatccgtgacagctcttcctggtgatccatgttcctatccgggatctataaattctggcacattagtcaggcaaaatagcttcggtgagtttgtttatcggagagacttactgaggccatagcggatggttaagggacttagggctgtgtttagggggaaacaaccggggaagtagccatcgatgacattccacgtgcggcctgttagtgctcactcgcctccccctcttgctttaaaaatagataacaaaccaaacagagagagacaaagaaagccacttgggccgtaagaatttgtgaggtactgtgtatgaacctaacctgactacttgcctattgtgcagtaatagagtaatcctatgaagcaacatgacttttgcgtgcatagcacaaatacgaagaacaatccagagactgaggataggaatagtactaagtaagaatgaatggcctgggtattttcctttaagaagctctcttacacgaactgtaattccatacaccgtgtccccccgattcagagtattgtttaaggggaatcgttccatgagtaccagactccaaccattccggacaccagaatatcctaaggtagaaatatgatcgaaggtactacacaaattaccgttgagtggcttcatattttcaatataggtctcagtaagatcctccatggtcgcagtctccgacccttgagcaaccatgaacatgcaagccaaacacgctgttaagtgaacagggtctaggaatttagatgcacataccagaccacatgatcgaattcttgcatgccctagttatgaatcagtaataaagccaaagaagaaaacagatgttcagcaaaccaggaactggtgaaccagaactagggagcgtactatgataagttcgtccgtcggcccgatcaagagcggtttctcgtagtgatcctgaaagtacgacaatctggtcatctcggagacatacgggccaatattgcggattgctccaggtgaggtgcttttcacctcgagtagtgcatgggatgacatctatggtgcgcggcccgggaagcccgagatggacaaggttctacaagggtcctattgctcctcactctatcgtggcggtggatggcgagcttcatcgcttcttgcgccgtctgcttgccagggagttctcggatgttaaattgagagagcaggagccagtgaaccaacgcagcatcaatctactgatcgagaagctgcatgatgaagtcgcagctggaaagacacctgaaatgacggcaatgttcaatctaagtccatgtaagctctctgcgtgactgaagcgcacctaatctgagggttgttccagtatgcgacattcgacctgatcggggagcttgcattcggcgagacctatggatggagaactggcgttaccacccctgggtgaaaatgattttctatgtgatgaaactgcgtgccttgacgcatgctgttgggtactgttcatgggtcttccctatcctatgttgttcgtcctcaggttttgcgcgattaattcgtcgtacacaggaagtacaccacctatgacaaagtacagcgtcgaaaggaccgaaaaatccactactgggaattgaccaccaacttgttcgatccacagaccgggctcgaacgttatgagatccaccgctcttagcgcgacgctatacttcttgactcagaacgaagatgccaagcgcaaggtgatcggcgaaacctgacgcgctttccaaagctgttggggacattaaatcgatcagcgtgactcaagatgaagtacctgcacacgcgtgtgaatgagacgctccagatcttccctccgcgctcagccgtattcccccgccgagtccctctagggggtgattggatccttggtggtaccaaagtgggaagcgtgcactgctgcatcagttgttgccgctggaactttgtcgatccagacaagttcattcctgaacgatggcttagtgcccccgcgtactagaacgacgatcgccgcgccatgcaggcgtttaaatcctcaagcctgcatttctcgtaatctctccggctgaagatgcgtctcgtcctggctcggctgatctgcgagtttgatttggagttagctcctggatcggagtgatgggaaggggcgttggtcttcaatgtctggggtacgaagccattcaagatcaattcaccccagtattatgctgaagtgaggagatagaaaaagggcgaggcaatttaactgttcattgacatggtcttgtctttacatcccagtaatattgtatcatgtttgctttgtgtgtaccgtatcagaaaccctaaatagtttctaagattacgtactgtagcgctaggatatgaacgatgtccgaataacaggatagaagcttaatcgcaatgcctcgcctgacaagaatggaaggatacttggacttcaagaaagtatgaatcattgcggaggagatcgctactcttgcgacatcccggttcaccagccgttcgactacagcatcgtgtacaccctctggggtgtcgttttactaccattccagcaatatcaaggtgcccctgaagagttttaaagaatatatggtagcagtacatgatcgatcctgccaagagctcagattgcgcgagtggaactccttgcattagagcaaggtatcgaaccacttattcctgggttgttctaagtgtgtctgtatctgtccgcatagctagttcagtatagtttgcagattcatctaatttgctttgggcctgcctagtaagcattgcgttcgaggtatttatggccacatccttgtggctttgtgccagcagcgccatcaacagcgctcagccaggtccgattgacccgtgttgcttttgcgtaacgggg

SEQ ID NO: 2437 - DNA, 2572 bp, Emericella nidulans
accgtcgccaggcagtcgcgagggtggcagtggtgtctcggtgcaatatgcacgccccttcgcggacgactcgccgcacgacttgattcttgagattggtggcgaaaacacagttattgacctcgccacgatgcgcccaacatttttgaattccacacaagcacgggtctcgagccttcttcaggtaatccttgacaggaagaacagccaggaccggagcagcagctcagcggtagcagtaaccgcacattcgatctgcgctcaaatcgacgaggagacagacctgaccatagacggcgcgcaacaggccagcaaccaccaataccatatcccagacccggcctcagcagggccagcgccaaaacgcagacgggtaaaagtagaagggccggaggcggcgtcgcaatatgaagaacaggacgggagtagtaacggtttctgggttgtgcgcaatggccagtggcgcatttcaatacgccctggggcaagttcgggtgacgaggtgcagtttgcgttcgtgggtgttaagctggatgtttatactagggagagagtacggaatcggaagcaggcatttttggggtcctaattggactgagataaagatgcattgtacctacgtatatacgcagcatatcgaattataaatacaccatggataaaacatgtcattatctttgaagatattctataggagaagagtggtggtttaatcggagaatccctcccattcctcatcctcatcttcattctcttgttcaatgctatcctggtcctcactctcgttctcggcatctaccattgaaccatcatcatctccctccctcacaaaccccgcaacaaagaacccgcctgtcccctcctcatccccaggccaacatctcaaacaaccccctaactcctcatccgacaaattcacctcaccaccctcaatggcaccatccgcactcggctcctctcgcttcacaccgcgatgaatccacttcttcaagccttcaggctgctcatcccgcctgagaactctccatcctctccgcttcgcaatatcactttccagtatccgttgcacgacggcctcgttctcgagaagatggattgagcacgtgctgtatgtcaccttcctagcggcggggaaggcgagtgcatgtgtgacgattcggaactgaaggtttgagagtttgaggaggcgatcttgagttatttcggaaatgggagtgtcgttttcggatgttgacggcgttgctgctgatgttaatgatgagggtgtggagggttggttggaggaggatccagatgagtcgttgcgcttgcgtttttaccttgggtttggttcttcgatcctgatgctggggtgggtctcccaggcgcagggaggacgagctgggggacatcgtcgcggccgatgatgccgctccctgagcaggaagggtcaagaaaaaggcctgtgacatccttaaagcgagggtcttgcggggtcaagtgcgagaaagtcctgtccttgaaggacgctggtaaagctatctgcgtcatcgatagagaccattttcttgagggtctttgcccggatttagtaggcatccatggatatgatgcgggatgactccgccttcttcttggacttagctttgcggagcaacgaagccatatgcgtagtcttattgcctggcgcggcgcatccatctaccaaatcaccttgcccatcccagtcatcgccaagcaacagataggcagggaaacaagatgccttatcttgcaggataatctctccattcttgtacgccggcgtactcgagaactcaacaccaggcgcaacagccacaaggtccgggatatgcgggtctaaccgcattctcttctgcttatcgtctccaccaaccactagaccgtccagtgactcgacattctcgaacgccgcaaaggtggtcttcaactgcgcctccatcgttgtccgtacattgttgacccgaacccagcgtggatagaccgcgccactactacccttggcccccagcgcagctaatttttctttccgaacagcctccttcagttccggaattgtcgcgcaggcgcgccgcacgcgcgcttttgtgaattcccccttcagtcgaatcttgtgcctttcaactgcttgacggagcgggtgggatgcgggcgcggcgatgccattctttgcgaggagatggtcgtggacgaggagaagagcaagcaatggggtgagctggatcagatattcttggtcagtcagcaggactctccatggtggacatatccacaatcctgatataccaggacagggcaatggtgagggacaaccttgggttcaagtttcagaattccagcctggtcgattacttccttgagcaggatgtcccatttggctgcttcggtgatgagcgcgtaaacctgtgcgggagaagctttaaggttgcgggagttgtagagccgagacttaaatgaaccaccagcagtggagggcgtcgtgagaattgacgcggcgtcgtagtatagcgacatgtctcgcctagagaattgtgaccacttctgactgtaaaaaagttcggaggtcggaata

SEQ ID NO: 2438 - DNA, 1988 bp, Emericella nidulans
atctcagcgttgactcggataatcgaaggttcgccggattagagagaagaatagaggtggaggatgttgcaaagaagagtctgtttaggcgcgaacgcgagacgaggaaagaagggaatgcgaaacgaggttaggtgacgaactatataacctcacttctgcttccgaggcaggctaatttcgcctctcagccgcaacagcaaggcggcagagtgacctccagttgtgagataaaataggtatctcagcaatagcaggggaagtaataagatcagcttctagcgtcaaggcggggggatagcgcggcagtgttggacgaagaaagccaagatcgagagagaagcacgagaggggcagaagaggggcgcgggaggcgaccgagcatcactcaatgtgttaccagaatgcatgaagccagcaaaagacgccgagccagccgcttgccagcaacccagacacaggtaaagcgaacgtggatgagttttagaagggaaacatgccagtgcagaaagcgagtatgcatcacgtgagcgggcagataagcgccctttatcgcgtcgagccccaggagcgtcatcagacaactcacccccttcacttgtcccttccatcctactaagatctgctcactgtcatttgccgttctttttcccatcgctgccgctgttcggctccttgcattctgtgtgccgcgtatcgtttgttttagatccactcacctccacattcgcccggtatagtcctccagtctccgccttccccatcccatcgccaaatcggctaagaactaacgacacttgcacttccgttccataggatggtacgtaaggaatataccattttccattccagggcccatatccttcataccagttcgtaggttagctagtcagccctccatgtgttgacttcttgtccatccttatctagtcggggaattacgaccatcctcccgcttctcgccgtgtcgtccgaggaagcagatccggcgatagatcttatcgaccaaacacgaaccgcctgcagcacctacgcaacctattgaatactgaacgcaacagaaatacctccgcgcgagcactagagacactcgaccaagagctggaggagttccgttccgaacgggcgagagatcgatcttcctttgagcgcacccgagcagtcgtgcatcagcagattcggagtatacgaggagagagcggatctcgggaggatcctatccatggtgcgagctcaagttcagggaatcggttgcagagactgcaagatcttgatgcaataagctatcgtggttcaaggcccagcaatcgacttggccgaggtagggggagtcaagagtctatccttgaccggtccgttcctcctttagaaacgccgtccgcaatgcctctggagctgggtcacgatcatgaattggacaggttgagagtcaagcgcaggaagcttgattcggatgataatcgagaaggactacaaaacttaaggtatggtcaatttggccaagtcgtgccggggactctgaaaatggagttggccagttgtgatggaggcacatatccgcccgtttgcgaaacgtcggggccggagaacattcttcgggatgactcgtccgtgtattgtacaaaatcagaccgctgtaatctgattctaaaacactgcggggaggcaccgttctgtttgaggaagcttgttatcaaagcgccaaagtccggctatgacgctccgtatgttcggcctctgatggttatcgctgctttactaacctatgcctctactaggattcaagcagggatggtctttatctctatgtcagctgatgaacttctcgctcgcaccgctcaatatcagattcaatacgctagttcccggagccgccgcggccgtcgacgcagcggaatgcaaccttccgaagaatatttgaactcatatcgaactccgttacaaactcttgagcgggcgaccttggccggatttgactgcccttctga

SEQ ID NO: 2439 - DNA, 1767 bp, Emericella nidulans
acggttgagacaacgcaccatgaaacgcctcgtttcgatcggctcccttcttcgagagctcgaagacgcccagtcccagtgcagctccctacatgacacaacccgcagccgtatcaacgacctccagcattaccttgacaggcttatgtactccaaaaactcatactcctactcctcgacgatgggatatggcagctacagtactcctggacttgactcaggcggtggtgctgcattgggtgttgggaaagccgaggaagatgccatctcaaattttagggctgagattcgaggtgtcaagggggctctgcttagtgcaaggaactttccttcgggcaggagcgtgggtttgaggtcttcgtttgtgagatgatgcattggtagatggccacggctatggacaaggctgtgctcgttttatcatttttatactcccgactcgatgtctaacgattacgcgtgtttctggtttcaaacacagcctggtatagtccgataacacaatagtatctaattcgacgctgtctgccgttatccttgattttgtcctagtagcattcttatcgacgagtaggcattccatattctcccatctcatgcagcaataatagggctattatttgaatatcgcaatattccactcgctgatctgtgcgccatataggggtgatgcccctcctcatagcatatttatttgttcgtgggtgagtatattacgtcgacagtgtcgtttcatccgcgtaattcctcgggagcgcgcatttttatattgacgggatgtaaagctgcggagccttacacaactgatggcgacatgctaccttcatttcaaatattcataccttagcagcctggaccaccacactgcgtccaccccactaatcaagccaaccatttatttctgcttatatcatgtagtgaaaaacgagaaaagcgaagcattaatataacattgacaagtgaagtagatatgtaaagaaaagatccgggcaattattcaccagttgcccatcaatacatttaccagagaatgcgaagaatagccgcccctaatacattcctcacgcatggatactggcactggtataattcactaatctaaggagtcactttactcatgctaatgagacgcttcacaccgacctgtagatataagattagcataagatgtttagcaaacgataggaaagtactataccatccagttaccgcactcatcagtcctgttcgtcatgatatcaatgtggattgtacgagccgtctcgtagtcacgtgcctggatggcgcgggcgagctgcaccatgtcctgaacggtattgggcttgagaaggtcttcattgttgaggtggtcgaagaggaagtttagcctccgctctgcgtcatcgacctgagctttgaaggaggatggggcccgagatttgacgcgctgcatgtcctcggagaggatctcaaagataggccgtgcctcggcagggatgtgggagcggtcaccgggagctatgaagatcagagatataactcgaataaggaagtcaagttcttggactcacggtattttggaggcgcagggctggccttctttacagaagaggctgtgcttggccgagatcccgcgctctgaggcggtggtacttgctggagtggcggctgcatgggtggcggcgtgctgggagcataagggttggctgctagaggctgtgcaggtggataaaagggcatagggagaagcagcagcctggggagggggaggaacaggagcgcgcgcct

SEQ ID NO: 2440 - DNA, 1153 bp, Emericella nidulans
aaacctcaatcccggtctaggccactggataagaccataccagcgacgtgttctggtcgcccggattgtctgatcgatgacttcctgacacgcctgcaggtgtctacatgagcaagtacatccctccgaaagagttcttcctcttcactttcacggagcggtgggaggagaatggactgaccgagcactaccgctgcaacatgagcccagacggcctgctctgcagtgctcatgcttggtctctcctgcgcccatctatgtacaaattgatgtattgagtaggtgccgattaaatcgccatgtgtgattagagacattcgagcaagctctctaagcgcgtatcacactctcgactcgtcaaagtcagcagctgacgtctcgcgcaaacacagtggcagagcaggcgggctgcgacctctcatggcaaacgtcaggatggagagacgcaggtctctacacctctggaaccaggttaatgattgctacaggttttcctggccttgggcttctcgtgcttctttctcaattgataggttgagtacagaccttttgagaatgtcgaagcgaatgaccttggaggaatagacgtaaacgcaggtaccggttggtaggtaattaaccacggtacgggttctgactcttggcccgtcactggctttatattgtctacaagaagcagacaaaaacagccatctccaccctattgcacatgtaagagagctgggttcgcctcttacttaataggtttatttctcaagatctatataatggctaagttgaattttactctttcacctccgccaaggtagcgacagttgagagcaaaggctaattggtgctatggaaggttgcctaacgagtcaattgaagcggatagaagagaatggcatgcagaaacaagttggggcagactaggactatcgtctatgccccaaaccccagaactagcgacccctgcctcaacaatcccagccaaggatgatgcaatgctattatggagatgaggcaaagtttaagttacttgattgagtgcagcagccaaggccatatttaggcagtgcattgtatgcccctatttgctgctgtcggtcgcgcacgccatcccgttgtcggatttgctctctcttgatctaatctcttgcaccgttggagc

SEQ ID NO: 2441 - DNA, 3257 bp, Emericella nidulans
tctgccggggagacggtagtggttcgttattcgtagagttgctcgagaccccggttgtttgggacgcttccggccggtccattcccggggatgtttccattgcggaacaccaacgaggcaacggggaatttcaaggaatttaagaagacaatagcggcaagatcatggcattcctgcaagcaacgggggcagccgagtaacgaaggacgaacgaatcgaggcgaaaacgaggggacgatagacaagagcgagaaaagagcgtgggcgtaacgaggtacgaatgggaaacggtgatgggaatatgaaataataaaagaaaagcagtcaggagaacgagaattagaattgctctcgctgtcgtcgtcggagcccagaccgtcgttaaattagtgttggtgcagccacgcgtatccttaccgtttcagctagttcaggggccgatcggcagagagcaaggcggaaatatcaatgtgacaagcggcggtaatttgcgacagttatccatccaggagataaaggtatgggatgttcgcaagcaatctggtgtgttgtgggctggagttggtgatgatgagaaagcaaggggaccgatgaagttacggttgggagtctaagcactgttcagctgaagctccgactatcaaattaatataattccggcagatcaaagatactgaagaattatctgtgttaaattggtctgtcaactttataacatggtgaggtcctatttaaatgtacaagaatcaaatcgcagtcctataaacaccgacaccaatgtacctcacaatataaacagtagtccaaaatgagcaatgaagggaaatgaggatgccctgtttatcagaaacagcggcagataatcactcaaaatagaaattcaggagaacaaatcatagaatccacccagaacccagttcgggggatgcactccaaaacaggggcaagtcaactggtgttgtggtgcagacgtggcatgaatggcagtcagctattatcctcccagtcgccgaggatgcgaagacttcgagtaaagacagtggcggaacgagggtattatgatagagaaaatgagcgacgaaagcgacgaaagcgacgaactggttataacgcctaggaccgttttgtacagcaaaagaaaggccgtctcaaatcccgggccatcggttgcgaaggccttcagaccaccgctggtagagtacatcggacagttgcttgacatgttccatgcctggtactgactggccggggagattcgcgagctgtggctgtggattcggctcggctactgcagcagactgacgccgccggtggcttttcaggtgtgggttgttctgtgcaagaaccagacgaggcctttgtggggattcgggtggtggaccctgtgggacgagacttgacagcttgggatcgctgacccaagatccgttagcacatgcagtccagagaattaggggcagttcgtttaccttagcagtttctcattagtggctcggaggatgtggtataggccttctggatccaccatttctaggtcactccaagcctcagcaagacgagaaatcgcttcccgcttctcttggtctccagtagttcccagaacctcctggcaagcgtgacctacagccttgctgtatgctcgacgtcccagttgagcttctttgctgttggtttctgagtatatagacttaggactcgcattttcgtctccggtaagctggtatgaggagaatggatcctcgcttggcgatttatcagacacgcgacggaattgacggaccgtggaagggctattgccaaatgtcaagtccactcctagtggttgcttaacaccgctggaccgtcgcttcggtcgccgcagagacgggctgcggtcgggtgctggaatacggcggacggcagtaccgtttgcgtacttctgggttggtgggctagagatgcgaagattttccaccatctccgcagactcatcatatggagggtcatgaatgatggatccgctgtctgagacatcagagtcctctcggaaaccatggtaggtgctttgactgtgtcaacacccagccgtcatcgtctgtgaaatgtgtaattgtattcctgaatgagttagctcgcaggctttgcaacatatgaaagacacatacaaagattccgcatagtatttcacattccttgaaacaccacgtccactgtcccagtcctgcttccggtgaataagctcctgcagagcctccgtcttcccagcgttgcggatgaacttgtgccttagaagttcctttgcgctgggcctgcgttccgggtctttggtcaagcactgcgcgataaagtcttttaaagcactgctgtagccgtcaccctgtaaccgaggagctggttctttggggatcaggaagagcaccttcatcgggtgaatagcagcatgcggcggttctccattgatcatctccatagcggtaatgcccagagaccagatatccgccttgtaatcgtacccagactgttgaatcacctctggtgccatccagaacggagttccaacgaacgtattgcgttgagatttgatgttggtgagctgtgccgcaacgccaaagtcccccagcttcactttaccagtgtgagaaaggagaacattggccgctttgacgtcccgatgtattttgccttcactgtgcaggtaatccaacccaagtaacagctgttgacagacgatagcaacatgcgcttcgttaaaaacgcccggttttagctacatctcggtcagccggcatcttcccaagccagagtcggtcggttattaccaagtcaagacacgatccgccgcccagatactccatcacaatccacagtttatgtccccggaggaagctagcatgataccgagtaacgtaggggctcgcgcacgtcgccaggacggagatctcctgctgaatctcttgtatatcatcttcgctcgactcgagatcgatctggacgagcgtaaatcgtcaattggaatgcatcagtaggcaagattcactcaaaactcacatgcttgatcgcaacaatttccccggtagacttgtcaatcgccttgtagacggtaccaaaacttccgcctatgcgacgaacggttagagaaagtaattggtccaattgtgtcctctccactcacttccaagctcctccatcatctggtactggctcgccatgttatcggccatggttcgcgacatatctgccgaccctgaatttttttggaattgaagctttggatggaa

SEQ ID NO: 2442 - DNA, 3483 bp, Emericella nidulans
gttcactcgctgtttttcccaagacaacaaattaaccccgtctcggtgacccgtcaaggagggttcagtaccgagcgaaacgttattttatggcttgaccaccgcgcagtcaaggagactgagctgatcaatgctacagggcacaaggtgctcaagtatgtcggcggcaccatgtcgcctgagatggaaatgcccaagatcctatggctcaagaaccagatgccgccagaagtgtttgccgactgcaagttctatgacctggttgatgcgctaacacatattgcgacgggcgaggagacgagaagctactgtagtttggtgtgtaagcaggggtatctgccgagccaggtggaagggagtacgactgggtggcaaggggactttctagaaagcattggacttggagagcttgctgcggatgggtttgcgcgtattgggggcgtgaatggggaggtgagtctctcacccgatctatgcatggatgaacatgttcgttaaggtagctttgctgatatcttccagaccggccagcacctcagcgcaggcgagcgtgctgggagactctccgcacgcgcagcgaaggagctcggtctgccccctgggattgccgtcggggctggggtgatcgatgcctatgcagggtggattggcactgtcggcaccaagatcgatggcgttgacgtagtgggcaatcacaacagggcagacgctttcaatcgtctcgccgcagtagcagggacatcaacctgccacatcgccatgtcttccaatccggttttcgtccccggcgtatggggtccatatcgcgataccgtcttccgtgggtgctggatggccgaaggaggccagtctgccacgggtcagctgctgaaacatgttctcgacacccatcccgcatcgaaatctgcctttgccgttgctgctgaccgcgggttggatattttttcgtttctagacggccatctcgctgcactagctgcgaaacagaacctaccgtgtatcgccgctctcgcccgacacttcttcttctacggcgacttcttcgggaacagatcacccctggcggacccgaacatgaccgggtccgtcgttggtctcactgccgatacctcgattgacagcctggccatacattactacggcacgctcgagttcatcgcactgcagacgagacaaatcgtcgagacgatgaacaaggctgggcatgctattacctcgatctttatgtctggatcgcagtgtaagaataggactctagtcaaactcatcgccacgggtgcaacatgcccgttattgtcccgcgagccgccacgtcgaggccgcggtgtgtcatggagcagccatgttgggcgtcaaggtttcttttctggatgccccggggaagactgtggacttgtgggatgtaattgaacagacgagcaaacccggggatgtctgtcatccaacaacggcggaatacgaaagggcactgcttgctgcaaagtatcaagtgtttctggaccaatgtacacggcagcgcgagtatcgagagatggtggacagggtagcctttccgaatcaagtgtaggcatctatattccacgacgtcgtgaaacgtgcctgtctggccgagtacacccgggtactcgtggataggtagggtactacaataccctggaggagcatttcttcacctcccacctgccaatcctctttcttgtctcagtctcaccaggcaaagcctagttccctctatttcatcatcaagcgggctcatattgccttcaatatccgagatttcagttctttcttcgacagtctagcctccactcactaagctggcccgactacagtcaggtttcccgcgctaaatatttccgcgggtcttcttgctgggcttcatcaaaacctatgagcaccactttgagctcagaagcattctcacttgtatgtcacagcccctgttgagttgaggctctcaacaccttctggcttctcaaaccggccaagcaaggatctatctgcgctgatgccaatcaaggaatatactcttgagtactagcgctctctcctccggagaactctcttcaagctcaggtgcctgagctttactgagcttggtttgggttgtcaaaatatacgccatgcttcgaggtgcgtctaacacgtaccacagaaaacaatctgaaagtaagccatgatgggtcatgaacgcaactcatcagtcggcagtcgcagcactgggcacctttttagaggtacatctcctttcaggctcttaagtccatgttgaagctcgcatgctgaggagcacagtgtaccaaattgaccacggttgggaaccagcatcgaacggcacttgtctggcgacgacgggttgagttccatatttacgcgccttccaattctactacctatatttatagtatcatcatatgggcaggcctctactgggcgcaaacaacctcaccgatatgtctttgtcatcttcatcgttccgaacctttaacactcttagtgcagtgggctatcagagtgcttgtatgacgtcttcgtccatagaggaatgacagacttagctgctagcaatcctatcttgtggccttgagtcgatcacgctgccaaacctccaggggcatctcttgctcaaattcgtagaaccatttggcctttccttacaacgttttcaggtcaaccagtacctgttaagattcttcccgcacaaatttcagcgtctgatgcaggcgccgatggtaatatatacgggaggaccttatctaggcatgtcaagatacgatacggtcagatactggcaaaattcacgcaactttatgcattatgtactggcactggaccgtctatcccaatatgttatccctcccttaaaccgactatattgacccctagatattcagactgccataacgccgtggtcgtggcatgaccgaaaacattgactctagcactttccaagagcagctacaaccaccgtcagttctctgcccacaattcagcctggactgaaatacataccaacagtgcatttgctatcagtgtagtagccattgacatagcaggtcttgccatcccagttaatacgctgccaggtgctaaacagccattagcatgtcatatccaacgcattcaaagataatagacccagtaagcttattaaatgtacgtaccagttgccgttatagcagtctccagacttgtagcacctaaactcgtagtacttgccggggatcacagagtacgaggctggatagtcaaagcccggtccggtgcggcagttgaccttggaggaactcgagttgacgatcttgcacacagtattggcgcgcttttcaaggcccaaagcttcaggggagatgtcgacggggacaggggcctcgagggcctctgcctccgccacggcccctgcctcaggggcaggcatggcgagggccagaaaggcgagggcaagaactccggcgacagtgaatttcatggtgatcggattat

SEQ ID NO: 2443 - DNA, 2237 bp, Emericella nidulans
  unsure (1)..(2237): unsure at all n locations
gcttgttcgagagcttttatgctccaggaatgcgggagctgtgccatgctgtatactaagcacttgggaagcgatatccacgacgtcatcgggtccgccgtgatgtcattgttcttcaaccaactttaccccgagtaacttcatcaatggcccaattgggttcaaaaaagtgatcctctctcgaagtttgaccgtgagattattgatccgccatcttctacttcttcagttgagattacgctacaattcagggatatggtaatatacacagtagtatcttctgagtctggttgagtgtctggacatgctctttagtaaatgaaacagtacccttgattctagattcgatcccttctgagctactctgtatggcagctaagcttaattcgaataagtctatcgcattcatgcgccgatcctccgttcagatcatagcgcttggcaaatgataccatgtaactgtgacgaacggtgggtctaggtcatagtatccagccatccaagccattattacataaaccaagtcttatcttcatgtctttgcttccttccggcctcgtctcttcttggccgtcgcaccgtcattctctctactaccctggccgttctctgcagcctcttctggttcagcaccccgcttggcgcctttgcgcgtccccttgcccttccgccgggctggtaaagcagacagatcctgagagctaggatcggtttccacatcaactagctctgcgtcctgatcagctccagcctcccgtcgaaggcggctaaaagccttttccatcctgctctggccaccggaccggacgcgtggtgcgaatgctcctgctccttgaggtccactgaagaaactggtgatattactctgggtcccctcctgttctctctgattgatgtcacgaatcacgggcacgaggacttcatcagttcgttcctgactccagccaatagtcgccatcaggaagtttcggagtccatgtagatcaggcacgccccactgaaagggtgaagggtccctgtccgcttccggctcgaggtaagctgcatcgactcgcgcgtccgggaaggtaggcggtagaaaaatcttcgtagcctgtttcctgaactttttgtagaaagccgcatggctgctgttcgacatatctgcccctgtctgtacctgcgtccaccagtcccggaattcctcaaggctggagaattcggtcagaatctccagcgctgtcactggtcctatgccgggaattccttctgtatagtcgctcccaagaagatgtgcgaagctaatcagtttccgtcgatggagagcatactccttctccagatccgcagtgagataacactcaacgtatttgctctggttgaacatatttttgtagactcgggtgccaccgaacaggaagatatcactgtcatccgtgataatgccgtccacaagtcctaacgagaccagttccgcgcattgtggcctccgcctccatgggcgctgtgatatacggtagtccgaacaatctcaaaagctgctgacactctgtaatcatgatttgcgtaacctcgtcggcgtctctgcggtctttcttctgctgcgagcgcagctgtttgagttcttgttcgtagtcgaatgtgccttcactatgtggggctgagttcaaggttgctgcaaacctaacatgttcctcgcttcggcagcgagctgtctcatgagctcttcgtcttccggatccgagaagccttcatcgtcgatatcaacagcttgagcgagcccaacctcatgaagcgcactgggcacttgctgtattggaacatcttcgaattctggcgataatcgtccagtcttctcgccatcaccgacgtgttcttccgctggcaggtgcacgtcttcaaactctagtgatcgttccctttctgcagcggggacggcttccaccggttgcacagtgacgtcttcaaattccggagaactagaccgcacggattcctcaccgtcagtctgcaccgattcggctacgtctccatcctttgcaactttggcttcaagagctacagaggctctgtgatccggcgactctggttttggtggctcgggaggtgtttgaatctctttcagttcagctggttgggccggcgcagtttccttatcagcctcaggcgctgggtcaagatcgatgaccttgctctcggggaatttgtcacgtctattaactaggtgatcgatgattancaaaaataaatggcctggt

SEQ ID NO: 2444 - DNA, 1858 bp, Emericella nidulans
atcgcaacacggaatttggtaaaacgatgcaggagacattaagctgttaaaggacgctgttgcactggtggttttcgggccgtatgagccttggctgctgccgcagaccgagaggttctttcctctcgctgagcagggtggattcacggtgacgaaggtgtttgagaagctgacggagaagctcttgtttgagaatgatcctggggtatgtgtctattgactattgaaagagcatattgctaacaggctgaaggatgagagattgcgaagaacagtctttggttacgagcttcgatggaaggatgaattacgatagacatgataccttagattcgcttggctggatagacatcgtcaattacataaatattccctcccgtctgacttgaccatttcgaagtgtcgttaaatatgtcacggataaaccacgtgcgcagattagacatcagatagatagaaggaatgacctcatattattcaaatctctgccagttcagttggcaaagtccaagagcctctataaatcacacggaaggcggtcaaacatcaaaactccgccatccccgctcaaaagttacagcaaaatatcccagcccctcattcaaaatattcatcagcaatcatgccagtacgtcgcaacccaataagatccacactcatcaatactaacaaagtgcctttttttctcagctcatagttttaacggctaccctgctcgggcctcagctacccgcccaacaacttgcaacgcgccttgaagaaatccaacccaactagtcgccaacgcgataatccctccttcgaaatcgaaatacaagatccacattgtctcaacgcacgataatgtcaactacccgcggacagtatacgacaccgcgcgcacagagaaggaggcgcgcggagttgcatatacaaaggctaaacgcatgttgggaagagatagttttgtgattctagatggaatgaactatatcaaggggtaccgataccaactttggtgtgaggcaaaggcgttgggtacaacgtgctgtgttgtatgctcccgcttttcccaatttcgatatgaggttggtcaaagtgctgacggcttcttgctaggtccacgttgggacgccggttgatcaatgtattgcgatcaacgaagcgcgactgcggaaaaagaacgcctcccgaccggacggctccgcgaaagagagtagagacgagaacccaaagccagccactaacccttcatcctcacccgactccacctcatccacagaaagcaaagatgaaagcgacccctaccctccggacctcctcaacaacctcatcttccgctacgaagaaccttccatgaacagtcgttgggacaagcctctcttcacggtcccctacaccgacgctgagccaccaatcgccgaaatctggaccgcgctgaccggcatcccgcacccagaaacacaggagaaagaaaacacaatatcagaactcgcagcctccctaacctcaacaacaatctccccttcctccgccgccagtacaacaacgacaaccccaggggcgtcacgaggcggactctccagtagaccgcgcgtcgcgataaagccgcaccaggccaccgtcgcccccgcaacagcggactcctcagccctctacaatatggaaaaacgcacgtcagcaatcgttcaagcaatccgttcctttccgctcgccaacccctccgcaaaagctgccctcgcatcctccaaaacacacacagcctccgcccttgacaacgaagatttcacccgccaagaagaaggaatctgcatccccgttccagactcctcaacagccggtattcgtaccggcacacatcgcctcgggcaggttaccg

SEQ ID NO: 2445 - DNA, 468 bp, Emericella nidulans
tgacattcgccatactacaaggggaacgtactcttgcgtgaagacattgccagcaacgaaacacgccagcaggtcgtctgttccaatcagtccgcacgtacctacgataaagagctaaaaagggtcagtctcatcctgtgggctcgtgacgtagttacttaccgcaagagcaatggcaaagacaaggaagctctctcggtccacgtagtgcttctcttccgcccagtgaagcaattccctagaaacccagccaacagtgactccgtagccaacactcagcaaaatcgtgtaggcccaagtctcataaaaccacaaacccatggctttccctgcacctccactgaaaccctcgccatccatgccaatatactggatgaggtagagggcaaagaaaagaaacggatagccaagcccgtcattcgcccccgactcagcaatgatgatgcgctgaacggctgaggaacattt

SEQ ID NO: 2446 - DNA, 754 bp, Emericella nidulans
aaactcctgccaatattcgactatgtagcgggcgaccgagccctcctcccgcgccgaagcatacatcagcggcttcaaagccaagggcaccgaaaatcaacaagagagttgtcaaagaagatgttttcagtgccgtaaaccatcaccgaagcatgggaccaccaagtttccaccatgagcattacgacgtaaacactggattggacgaagacgagtcgatcgagcaggcaaccctagagtcttcatctatgatagccgatgaagacatgatctcaatgtcccaaaatggtccatactcgtcaagaaaacgcaagcgcggaatcaacgaagtagctgccatgtcgcttagcgagcaggaacacattctctatggagatcaacttctagactatttcatgactgtcggagagcaccagaggcaacgcgcattccacctccccagcctcccgctaacttccaggtggatcgcccgattgccaattcaggtaatccggccttgcattgggcatgcgcaatgggtgcccttgaaattgtcaaagatttgctgcgaaggggaccaaatatgaaagccctgtctattcatgaagagaccccactggtccggcttgtgctttttcgaacaactatgagaagaggacgtttccagcactgttagacctgcttctagacacgatctccctcacggattggtttggtgctacattgttccaaaacataacgctagcgacgaaaagcaagggataatggaaaagct

SEQ ID NO: 2447 - DNA, 1949 bp, Emericella nidulans
ggcggtatgagcttcgcaagacttgtgacacatctgcgtggccctatctacaagattcttggagtgatcaagacagattcaagtttcaaaaggacatagaaggaacgtatgacaggatcaggatgcagatcgcgcaactaaaacagaaatcccgggaacttatttatctggtaactcaaaccctcactcttatgcctaccttgggagctaataatttggccaggaatttagcctgacatcaatcgccgaggctcagaagtctacatccatgaatcgcagtatgaagcgccttagttggattactgtaagaccgccctctggttcatcttgcttcgctttctaatagagccgacagtttgtgtttctcccgctgatgtttgttgcggtattatctcaccgtaggcggctttcaattgatatgagctgactttcggtccagactatttttggaatgaacgtggatcttcttgagtctaatcctgcttggtggttatacatgttcttcgcactcggcaccgctgctgtgacgatttctgtgtggatactcttcaagaggaacccaaaggtatggtgtgacttgaaaaccatgatcgaatctcggctgacatttggtgcttttagttagatagcgtagaaagccactttcaatggttactccgcaagcaaaaacttcgggatgaagagttaggtattgcggagaggagaaggagaaccaggcaattcccaggttctgggaaaaagcggtcatgagcatctccagctatgccgctctgggtgtacaaaagcaggataaaccgaaataaatgcacttaaagctaccaggcacctcttgtgtatgccgcgagatagagcgttggtcgagctaggctcccgctgcattgacgactgattcttgagattaggcgatatttgtagtcagaatattgtggcttattgaaacgggaagttgaacagaaggtcaggggaagatatgcttgttataagctatacccttctatttgtgcaaggtttgttgtgaaggagaatggtgtagttagtgtgtgcaggtagaattagggagcacgttaagcaagtgtgtgcctgtgcaaggcctttaattagccatgttcttaagaaggatatcttccacaaggaacttataataagtccgtgaaggtaagtatcctctctagaagtaatatatgggccagagcggaacgcctagtttatgctataggcatcgaattattaatcttgatatagtataccgccacgtctatatacagctagcaagttaagacaagagccgcacggatggaaatcaacttctgacagtagactcattacttacattgattaccgacacttcttctgttgcctgtcattctatcttcgatggttcggtaagtcttcactcccttcccttataatactggcctgctgcgctgggatcaagccgtctacccgcggcaatccgatatgacgcatgtcttggagcatcatcagccacatcacgatgctatcaccaggaccttaaggggccccctgggcccagggcccattcgagaacgttccgactgcgggcgcctccacatcgtggccggattgccgaaacatccccagtgatctatctggactccagactgcccggcattacggttctcctttcccctcttctgcttcaattacggtccatagattttctgcaccatataaatatattttagtcacgaatatcaagcagtcgcgctcgcctgaacatctcattcagcactcattggcggtgcaatcaacgcgaaaccagcttggacaactgtgggtacaaatatgggccgatgacctggagacatgcatggcctccgacagaggtctcagatgcagctccagctgatatgcggtgtggaagacacgaggtgcctgctgtcaaaggggcgcatgcctagtcacgttgttgcttgcctacctgtcga

SEQ ID NO: 2448 - DNA, 1842 bp, Emericella nidulans
cattgattagctgtacaatgggaggtgacctacatagcagctctgttggccaagctgcggagagcagagggcaggcggccccgagtctgtgaaagaagcattgtcgtgggtccgataacagctgactgtttttgggaatacggaccacgccaggagcttatgtaggagaagaaaacaagaaaactctcggagttcgaagcgagcaaagagtcagaaaagaagacaggaagtgccggacatctgaagttctccgcaggctcgcagcgaagtcggggccggagttggccatcacttccccggtggccaatcacaccccgatgttagtaagaggatccacacagagcttatggcttgtttagggtcgatcttatatatgctagactatgctggactctagcgtatagggctatatatacttgaatgtcagaggagttataattctaagggtataacatctgatctagccaagcctcataaagcattcggcattctcgccgatctggtaatcatgcatgcgtcatacgtagcataaacacaggaaacaagtaaaaaagaaaagtcagagcaaaagaagtaagttacagaaagaagacagagagaccagctcagggcacttctttatcgcctcgcttcaacccgccaggcacgtcaatggcgtccttcacccactccatggccgcgatctcttcaaggctcttgcgttttgtgtttcgtttcaggagcgactcaacacactcccgcgcgccttcaagaccacggcccttctcgggatcccactcaccgtcgctgtctgcgtaccggtaccaggaccattcgcaccgtgctatacggtgaggagttcgggctcggagtttcgcaggatcgcctcgggttccagggagggcgtcgaaaggaagtctgctctccatcatcgcatacagcaaaactccaagcgcccagccgtcggtggagcggccatcgtactgctggcccatcagaatctctggtgctgcgtagtcctcgcttccgcagcgggtttggagaagagggctctcaggaggttcaggtatacgtcgtgagaggcccaggtcgctcaaggtcacaactgcacggtcataagtacgccaatcggtaatcttttgcagagcttctttgggaagattgacgagaacgtctggtagccatcagtcagctttgttctagcaggaaggcgcggggagcttactctcgagtttgagatcacgatgcactacataatgctcgtgcaaatagcgtacagcagccaccagctcggcaaaaattcgtcggatgagccccggagtcaggggtctggtattgttcgagacgacttcgaacaagtcgccgcctgggcagtagtcaagaaccaggagagcgcgtttttcgtcgctgccaaaagccttgagttgtacaagggatggatgattcaaagacttgaggatttcgacctcacgtttcagggacacctccagtcgctcctcatcggctccacccgctggcccgtgttcaatgatctttattgcaactagcttctgggtcgaggatacggcgtcagagtgaccatgatcagagtccgccccttccggttcgacacgaacagccaacgatacctggctgaaagtaccatgaccgagttgtcggagtttgcgatacagtcggggttgctgggtccgaatggagcgcaccgaatagtactcctccgtaccatgcgcgtcggaatgatggatgacgacaggttcattttcgcttacaccgaacccacgtgttcgcggaggcgaaggcgggcgaaccgtaggtaaagcaattcctcgatggatcgcgagatattgctcccgatgcaggttg

SEQ ID NO: 2449 - DNA, 1856 bp, Emericella nidulans
cgagaagaatcttatcctgatcgggtcctagctataatgagaagttgaggagctacaaaaatggattggcagaagatagacgacacgctgagaagtgtgacctctgcatcaaacaatattacatgggaaaaatctggcttatggaacaactcaaggagaactacgacgatgaagacatcgaaaagttctctcgcatgctagacgagtgtgatattaaacgaataacgaggaacctggcgactgcgacggctaccttaagagcattaccagcggatcagattgggctgcatgtgcttgaccgagcgtcactactgtctatttttgagactctgagttgcgacgctatgctgcgcaatgacagcttgttgacggaacacttcgacgagcctttcaggttgattcagacaaaacgtactctcaaggtttcagattacatcccagctgtcacccggtttctctttagtacaaatcatagtcgcagtcactgggccgttcattcttggatgcggtaccagcgagctcctactgcggcggagtttgactgggcaatcaaagagggactccttgatgcacttagggcagcatctcagcagccggtacagatagctgccattcagcgactttggcgtggcatgcagttcattgccaaaagattggacaaggaacaaataacacacaacttacgtgctttggaaatcgacccctgtcgcctgtctgtcgaacacctcgcgttccaaacagctagtctgcgatggactctcaacaccattcagatctttctagaaaagactcctggagatttctgggatgcgatgcaaacaatatcgccacaggcaattgttgaggttgttttctataacccccaactcgagtccttcctcatggaagctaccgaaggtcaggcatatgagaaattggctatgaaggatatgctctcatgggtcaacccgtttatgtcgtcgttgaaagggccgcaccaacctacagcatgcaggtcgctagtctatcaactcattgatcgactgcaggatacacgttttccaaacttagcgaggtaccactgctttgaggtcggtttggttagcctgctccatacgcttcgcagttttaccgaccatgaatcgtcaagagaatcagtagcacgtgtcgttctctctgagacattaggagttgtgagcgaatacattaacacaatcctgaagcctccgcagttcaatgtcgagcaggggcgacagcgtgcaataaaatcactctgcatggatgtcattcgcaacacattagctcttgagtgtcagtctctgaagagtgattatgaagttatcctcaagcatggttccctccagcatggtgtgagcacatattcctcttctatttgggatgccgttatcatgcacctccatgagaatgatttagctctttcgacatccgcccttctaggaattctaccgctggtcggtctagagaaattctccttgaaagaggggacaaagccggaaaagacacactttaacactatatacggtcatcttactcacatctcgtgccagatcattgaaaggttggccgatttcaaaccagaacatcttgatgaacttttcaagagtcaggatactggcagtgctcttgtgtctactctcttcgcagcggaccacaatacctatcaagccgctgtagacctcatcaagaatgttagcggccagtctgctcggagagacgcgatctcccacttgctacagtctttcttcactaccacgttgtacgggctcagctggtccttccgacggatttctaatatgaagacgtttgcctcggcaccgagaatgatacacaccggtactgatattgtggatcataga

SEQ ID NO: 2450 - DNA, 1378 bp, Emericella nidulans
cttccagattctggcaggctatacccggcgaaatttgagtcagtatttttttccaaacttggcgataatttttttttatctaaccaatctcttctcgcacaggaccaagcctccatttgaccgacatgactggtacgtgatgcgcgaaacgccgtcaggccccaaggagatccgctatgtgattgactactactctgggcccccagagccgaccggagagcctgttttctaccttgacattcggcctgctttggattcgcccaccgccgctgccgaacgactgctgagatggggatctgacgtctggtatcgcgcaagcggaggcgctgtccgtgacaatgacaaaaaataacgaaaatcgcaccgtctgaccagtgtgcacggctgctcaggaactaaatacactgggagctggatagctcttcttggtttcaatggtcccgaagtagcccttcagtccgccgttggaatttgcattctccactcttgacgccgggaatatacgaaaaacatggacatctgactagctactgtttatattaaaaggttccctcgtgtttcgcatttggcattaacattgtccacttcccggctgcgatggttttatcggcatatgtgtttggagtcgaggttccagtttgtggtgcttcttaattagtcgaagcggttcattaccttcatatatgtataatagatgtacgatataccattagcttcatctcgcatcttcgagcctaattctatggcgtgtatagggttatgggggctgtgcttgccgtgtggattggggagtcaccaaaatctattacagagtacctgtaaaccgttaaatgcaattattagcactttgttatcaattcgcatcgtttgggcattgaaccaagtgatcatggcccgcaacaccactaaccaactgtagatcctttacacagcaatcacctgcctaatcatactaaacggcgacacccaagacagagcccccctgccaaacaagttcgctgttctcaatggatcctcagccgtcccgacgacttgactcaaactagctagttcccgaggatcttcctcaacttattcagtccgaacatcctcgtcatgacggcatgtgcgagaccagaccaggcccagccacccatgaacaaccagataatccagcttttgttcccctcccaaatccagctctttcgccccttggcccaagggcagagccaacgccacggggcaaaccccgataaaacttggtccaccaccctcttggcataagcagagtgaggcatggcttcgtcctggctgtgtgtgacccgaccaggatactggtcttcaatcggagcatagatcgagttgggtgccacaatgcgctgtgtgcgtgcaatgcgtg

SEQ ID NO: 2451 - DNA, 2387 bp, Emericella nidulans
aaccaagctgtagccgcctcttgttcgatcatttcttggcactgtctcaacgcaaacgtgcagctgcggacgagcttgcactgttcctggacgatccgcatttaaacgttccaggtgcagggaattatcttcgactagctgagcgttcttcgtctacaatggtcccattccaaacacggcctgcgcagtttcacctcattatacgagccttggaacttggggttgttcctccggaagagatcggtgcgatcatagcccgctggtcagattggagaaaatcctgttcggattctcaaaaagccaaacgcaagctgttaaaaatatatcgcgcgatgtgggacgccattggcaagtgtgctgtttatggacatcgagatatggaccagtctcttgttcagacttggcttggtgtctgcttagaagagggcactgtgggctatcttcgactagccacgagtattttattggctaccgaatatgggatgtcattatgcagttcatggctgcccaagttcgtcgctagattacttcgcgactccaactattcactcccggcgcctgacagggacgtcatcatagaaagcttaaagcccttcgatatcgacatcatctcgaattcgctgatttgcggcactgaggttttaatctcttcccagaacacgcgccttctcagaagatgggggaagtgcttagctaagcttcatgatgcatctagaattaccttgtctaaagcctgggttcaaatacgagagcagcctgattcattggcgaagcgtcaactgattttgcagcgtctttggatgctgcacacaatgaggagattctcccagagacgtgcttcccaagtcactaaatcagtcaccaagcgtctatatagactttacgagtcctcaagaagagttccgagaagaaatggccaaatcaaaatcgacctctggaccagcctagtccagcacatatctcgtttgaagatacctttcaacctggaagcaatggccgacgacctgcgaactggaaagcccatgaccaacactatgaggaaacgcctccgacagttccaaaatgaaccactatctttctccgacttattcgcaaatacacaaacttacaacgcctcccgccacctcttcttcaacaatttcgacaaccaaatccgccaagtcgacgtcgcaagccccgacttccgcctctgggccattcaaatcgccagaaccggcaactccccagccatctggtctgtcctccgtcttctgcgcgcccatacccccctcaagattgccttatctagagcatggccacttcccggccccgcagatggagttattgtccgctacaacccacgtcccaggtcagcaggaacgccggacccccacgatgcgttggacatggtccattctctagctgcttcctttgcgtgtgcaaaacaactttcgccccagcgggcgtatcggcttgtccgttggctttacctctttcttctcagacacggtgcgcctattcagacgcctattgcgcgcgctttgtatcacgcgggtgttgtgagatttcgccaggagaaggggtatatctctccaattcagtatgactatatttggggtattgtggagcagacggaggggcgggaatatgtgcgggctttgagatctcgaacactgtacgaatgagccagtgtgaaggtccacagaatttcagttgtttgtatcatatagagggagcgacacttattggctctcgatatcctacatttctatataaatttggacggtaactacgcttgaatagagacattatgtacttgataacagtttcccatggtcattcaatagtagggaagttcttgcggtactccattagaaaaggttcgctcgattatcaaatgtcagctctatctaggggtccacttccatcaaattagggtcaccagagatcttcttaacgggcacatatttcctcagatcctccttggaaaacactttttcgttcaagtatgcgggaatgcccttggggaagccggaggtccttttcttttgaccaccttggtgggcctatgttgttccgagaagtagcgtgtcttattcttttaatacccaacccttgcattgtttccagaaccagtcgttaaaatcccgccttgatggttctaccccaggggatggcttccttttgtaaaattggtttccgttaatctaacaacattttggtggggtcctttctctttccatagggggcttgtttactgcgccttaacgggaagcctatctggggcccccccactcccttgcccatcccctttggaaaggtttattatgcacttctcctgggccgctaaagattaattcttttatgtctcatatttttcatctccctcactacctccttaaacttat

SEQ ID NO: 2452 - DNA, 1600 bp, Emericella nidulans
tctccttgattttctctggttgaggcatgagatcccaaatcttgatggagttaagcatctcggcggccttcttccagtcaccggcagcaaggaacttagcactcataatgacgccatcacgggtgttctctgcagggccagtgaagacctggcgctcattgtagtcgagcatgcggcggaaggtcttggaaatgacgcgacgtttcatttcgggagacgatgaggtttgggccatcagaggaacctcgaggaacatactagaagtgaggtagatgcactcgagcagctcgaggttgatgtgcatgtggaaggggagttggcgttggcgctcgagacgctcctgttcaggggagacggtggagtaacgctgcaggatgataccctgggcgagaagctccttttggcgaccgtgccgcaaatttccgagagggtgttctgagcctcgtaaatgagaccagcgcggaaagcacacaaaccaatctgaaccaacgtcctgttgaagaggatctgagagctcacgtcgaaattggcaatgttctcggacaagtgggacatgagcatcaggtcgcgagcacggtagtactggtcgtggagagcaaggaagtagatctgggcgagcatagcacgcgctcgaaggataccgtcgctgttcctgaacaggtagttgcaaagcgtctgcacgagggtctgggcatcactgttgccgcgagttgtgatagaggtctccagctcggagggaagggccttatcggtgccctcttccagaattgtaataacctgggaaggcttgaagtagatatgctcgagtctcctcatcaccactcggttaagactatcctggcgtagttccgtcttttccagctttgtgaggccttcaacgtagatctgggtccgcacaaggttggtatacagctgtttctcatcacttaggcgttcaatgtactcggcggtgtgggggtcaatatgttgtagagacctcgtgagctcatcatccagtctctcaacgtaagaaacgatactgccagggatatagaaagtctcgccagcagcaacctgaggctgcttctcatcgtcctcccattcctcggcaccttcactgacaacatagttgcgctccttctcgagaacggaaagcagggtagacaattcttgctcagctgccttccattgctcgacgctcatgtacgcagcggtagatgtggtagaaaggtcgaaacgtgtggagatgagagtgaggtagacacggatgcgctggtaaggcgtctgggccacctccaggagcttctccatggtcttaatctgctcgagacggtcggtattcttctttcctcgcgactcgacgataacacgcagatgcttcagaatactctcgggcgtgtactgaagggtctttcctcggacaacggtctcaaaaccatcgtcgtctccagcaacagcgacaggcgcctcgacgcgctccaacttgctcagccgaggggcagcgatggcaggcttcttctcttcctcttcatcgctctccatgtagctatccttgtccgctcgatatttctcaatctgcgcacgatattccttgttgttcttcttgatcttctgcttgatg

SEQ ID NO: 2453 - DNA, 1873 bp, Emericella nidulans
attgttaaacgtgtagagagcatgttccgagcataagcaagcggcattgtgtcgccccttctcaaggatttgcgcacatgcggggttttgttttctgggctggcgcgttcgcccacggtgacagcggggagggagattggcgggccacgatactgatgatcggagcggtctgcccttgaacaggcggatccagattcctagactgtagtcaatattcaaaattcttaagaacgagagaaggcattactaccgtatctgtcgacgcgtattcgcggcatcgtcacggtcgagagaagacagaaaaagtgctgccttgtcacagagacatgggcttggcgccaaggaacggctgagagcagccctatgtgggaggagtggagagaatgagggggtcggcatggcggtatgatcaagtggaatcaagcataaatatatgaatggacccgggaataccatctcgagggcgggtttagtttaccggtctagcgcagatggggtgaatgttatggaagggaggcggtatagacaagatatacttctgcccgtcggaacagtaacgtatataatagaagagatcccaatcataacagatacttatctctttctctgcggctacaccgtgtatatgatgccagtcgaccccttgagacactgtctaaggctaagaatactaaaatgttgaaaactccagtcgctagctagcgtgtaatcagttctatgctacagatgcacgttttcagcatcccaatctccaccttcatcacccacgccacacaagattcaaggaatcaaccgccccatgatcaacctcttcaccaccaggcagttgactgaggacctctacggggctctccagcttcagatggaccctcgtctcttgatcaccggcggcctcccactggacacttgcaagattatctttgcccaaggctaccttggcagagacactttcactcagcctcaacctaggcttgaagcggattttcgcacaccccggcttgacgggcgttagaccgaccagctcggcacagtactcgtagatcggcacgctcccccacgcatggcagtccgagcgctggcggacgtcgtcctcttcccacgtagtgagattctccgctaacatcttgcggtacgggttccaggcctcgtttctccaaaaggattcgtacatctcgtctccggctgcggagaaggcacgcagcgcgtagaagcgcatcatgtagctgcatctggagaatcgttcgtccgcgaacgactgcttgagcagtcgggagcattcgtctggaagagcggtcccggagaggatggcgaacacttgagtgtgctgcgagtatgcatcgtcacctgatagatcggccgtggagtctgtgaaataatgcccgtcgtagcaatggcgccggactgccgtctgcaacgagaccgcgcgcgcctcatattccgcagcgtaaccaggccttccgagatcccgtactaacttcgctgttctctgtaggacgtatgcatacagaagactgaaataagtatgccgatttgatcttctgccggacgtcggcactcccttatctgggtgctcgtctgttgcaccccaggtagtgacccagtcaacgtactgccatacatcttcgggaagtccgctgacgagaccgagctgatccacattgctctcaaagaattcgaggacaccgtcgatcctcggtaggaacgaacgcgtgtacgctctgtccccaaagaagaggaaatggtctgcaacttgcaggatccagtacagagagaagcccgctataatttgcgggacgtgcgaggggaaccgcgactgcgtgagcccctcagatgttatcgacgctgcatagtttgtgattgcctgccgccttta

SEQ ID NO: 2454 - DNA, 1571 bp, Emericella nidulans
  unsure (1)..(1571): unsure at all n locations
ggtctatacggaggaagaagaccgattccttcttgtcatgttagacaagtatggcgttgaaggcgaaggctgtacgaaaagattcgcgaggaagtccgcgagtcccctctcttccgctttgattggttcttcctcagccggactcctgtggaaattggccgccgctgtacgacgctcctcaacacaatcgccaaagagttcgaaccggacggcaagaatggtgatggaaagggacgcggccgcgaccgagaggacgacgaacttgacaatgaagacgacgttccagctaagaagaagaccaagggcgccgtggtaagtgatgtttgtctaaagttgtttcgctcatgttcaactaataaacaaatagaacaagcaagtcaaagccgtcaagggcagcaaaggaaactccgcctccacgtctcgagcctcttcagccaaccctcccaagtcgcgcgggcgaaagaagtgaaatcccactccagcgtgagagcacagtgcgctaagcactcaatcaactaccttagcataacataacatctatcttgtactattgtatggtgattttggcgaaatttgtagaggcatgatgaaagaccaagagcctggagtgtttgttctggtcctgggtccgtcctggatggtggtttgcgttggcttgttattatgaatatcggttgcggcgttgactacggttagaaagtcactggctactttaatctacttattttcagttcttgataattggggctaccaactagcttgttttcgtatgggtttttcggagtccaatcggttcggcctaatgtcacggaatactatcataacaattttattgaatatacatgagcgttgaaacctaaatattcatttcgcctaaatatcacactagatgatgataatacagaactcatgagccaaaaattagggtcgcctgaagagagccactgtgcctactaaccggtttagtaatagaacaatgtacattgatgatttggcatatatacgtaacaatttgatccagaaacccgtgtgagaagatccccaacaattggtacacattagtcatatgtcgatagaggtgaaaccaactgaatcatgattttagggagcgacgccgactgtccactccaacttccgaggtaaccaaacctcacatcgactaattcatagtttggagcgccgttcaatgatcttcatcacgaagtatgccactgtgacaaaaagaggttagtgcgtgtccatcatttgcagatcaaacaccaacgattatccagggaattggagtaggagacgaaaagagaatattagagactagctagtggtgggtatatatagccgtagatattacaatcatatatggtatcaaatcaagcagaggtatgtatgtcaaggagagaaccaggagcgaagaacgcatatagccaaaatttatgactcaccagcagcaacgacaggagcccttacagcaccggccttagctgaaccccgcncagtgtgaggatatatcgaacccatctagatggacctacngcagaacgtcaaagtcggggcggaaacctcgccgcttgact

SEQ ID NO: 2455 - DNA, 913 bp, Emericella nidulans
taatatcgagattctgaaaggggctctccggcactggccgcccgagggagacagcggttttacccggctgtggaatgtacagaggagactgggaattagtcctttctggaatagatcgaataactacttcgtgcggggacgcatgcagtggcatgcagaggcatccaagcgacgaatcctgagtgcagatggctggagaattcgcgccctggatggagtcttgagcttgcattgcaacggagtatgctagtggtatcccttttgatggaggacttcttcagtctttgaatgattagtaatcctacgcctctagattcgactggtctgtgccacattagtggtggccagtattggtaggtacgtgatattggattctgagattgagctgaagctgttgagaagcctggaaattagtttgccgctcaggaaagataggtagtatgcatctttgggatagcaattgtattttctgctcgtatcattgacaggctttgtctgaattgtcgactgcggggttgagtcctgcatgtaaggttcatctgataaagtgatagtacacgagatcgccacttccgcattgggctgtcaatcaaacctcgacctatccatgacaataaccgtcaatccttcacaatcccgacaatgaaccgtccacattccctatgtttccatcgccattcgtccttgccctgcgctcccatcatgctaatcgggtccagccatggcgccatccggtggggatcctccgttctctcggctggagatttagtcaaaagaccaaaatattttgccccgaggcttcccttaataatcgtgaatttttcgccctcccttctgtttcacatatccgcgagatttccatatagcgatgctagcaccgtgcactctttccaatacctttctacccttgtgt

SEQ ID NO: 2456 - DNA, 1742 bp, Emericella nidulans
aattctaaattgataataccatttactcaacgacatctgtatcattatctctgtcctctcgcattgattccaaacaatatgtttagtatatggacccaggtcagcaggtgctgatttccggggtaggattcccaatcaactcgattccatcaccgtcgcgtggggtgggatctggggaagtccacgctcctaggacattcgaataagaaactggtgattaatatcccaaagtcatatcagtttctagatatcgaaggggtaacggagctggtaccctattatccgcatgcagatgcttgactagcccatctgcttggtgtagtcagtagtactatggagtagcccgggtttgcagtactagcgtttcgtgccttacagtaggccatgaggtcgggcatgcattttgccgaacatcgaatattttcaacccagcttgattctcgaaactgcgaggttactccgtagtatacagagttggaatggactgaggccaaagatagaaaataaaagaggcgtagcgtaatctaaaaacgtggcgatacagacactgtggttttgtctctcaacaatgctgcgcctttttcctgaaacaaagaatggatcgaaaaggtggctgccaaaatggaccgaaaatagcgaaaatagcgggcaggaacgggtggcggtaattttcactgtaagttaccggcaagaggcaaaaaaagcaggcgcaagtgatttaaatggtcccccacccacagtactctgttcctcctctctcttctccatccctccgtcttctcgctctctgagtctttataaaccccatttcatcctccattcaactctctcttgctattcggaaccagcagactattttgtgttgtgcgcatttgtccatcgttgaccgtacatccaccactttttagcacttccacacatattcaaaatggtgagtcattattctgtcatgcccttttctcgtggacaattgctaacctatattgtccagactgactcaactaatgtctccaatacggagaatgtgcgtgtttaccacgatcgacttgaggactttatgtctcgatagtcgtactctgtactaattttacctgcagcttatgaagtacatgagcctcgaccagcgagggtcggtcatggctgagtacatttggatcgacgcccacggcggtactcgaagtaagacaaaggtatgcacctgattcgctctgcttccccgaatcggcgacggaaacggactgcgctttttgtatacgtctgccaagcagataaaacatgatgcgcatcggtgccgcctgcatatacgcgttccacgtgactttttttgtcttggttccaaaaactaactctacctgcagactctttctaaggccccttctagcgttgatgagctccccgaatggaatttcgacggttcatcaacagctcaggcccccggtgacaactcagatgtctaccttcgccctgtcgctatgtaccccgatcctttccgtcgcggcgataacatcctcgttctctggagacatgtgactctgatggaagccccaacaggttaactaccgtcacgactgccccgtttgatggaacgcatgccaagaagagttttgtttgtcttgacaaaaacaccctttggccttaggttggcttaggtggccaaggcggttcccggcccaggaccgctctgggggcgtcccgaagggttagccgaactttgggccctcgcctgttttcccgttaaaatt

SEQ ID NO: 2457 - DNA, 696 bp, Emericella nidulans
cacccttgcacatgaacttcctgtgatcgaaacaccaatcgggtagtttgactttatgtgagaacaagacacagccagtcatgacgtgaacaagtcgaaatttcgattgaatagtccgtaatcgcttcttcgcctcttcgccatccgataaggatttgacaatctcgacacgccagtaatcgtttgcatcgccaggaaaaccttcgtatccatatgccgagacttcgaattgccaatcgacatcagtcactggaggacgctcgttatgtgaatgaaccctgcggtgggtcatcaaatggtgtagcctgatgactgcaccatcttcgatatagtttgtcgtgagattatcccaagcaaaaggaccggggatttctgctccattggcgtcgagaggctgagtctggttctcggcgatgaaaaggttattgtcatctttatgagggtaaagggtgatctgctgctgcttgcttccggtggggtacatatgactgtgagagtgcaaatatccgccttgcgtgttatggtggcgaatactaagacgagaaccgaagacaacgtctgcgggaacggctgccatgccttttgaattgagagtagcctgaaactcggaggacatgaaaccgtcgccctctcccggattgaccaagcaccggaagtgaattgcaaacatagagcaatagaacgctagggggatca

SEQ ID NO: 2458 - DNA, 810 bp, Emericella nidulans
gactcataagagtgtggagatttcaagggagaagagggaatatagaaatgtacagaaggacgacagttaggtactaggaatgcaaaaaacgagcgggttattgaggttaaggagtaacaataagggaatacgaacaaggtgttatataaaaagtgaagtttagaggagggttaccgagttgcaagaggattgggccagcttgacgacgagagtattgtcgtgcataagataggtttcgaagggtcgggtcctagtaggtcgttttttcaatgtggtcaaaaggccagctgtgaataatacggaaagcattattacgcccagccaggtcattttggatcggggcggccttttgagggggcaacctacaggtggtcatgggttgcaaggtttaccatggccacagttagcacgcgaggggtagacgagcacagccgatgtgatcagctatatggagcgtcgtccccagaagagtccatgcagcgtctttgaccgtgtttgagggcataaatgagccgaacgagagtctgcacggggcaaagattgttccgaaacatgaagttatccgccaccaggcaccgcattgccgctccccgatacttcgccgacaggctacgaatgttctcgccaggtgtcgggtcacggcctaagttcctgagcagggggttgtcgtcatctaatgcagtaacggaaaggctaagagtgccgtagagcagagcgacccaggacaaacttaaaagatcaccggatcctgtttgaactcttcatatctggcgtgaaaggtgggatcgtgaagaacgtggaaaagcggcc

SEQ ID NO: 2459 - DNA, 531 bp, Emericella nidulans
atgaatgagacatgtcttgtcgtcgatcatatcccgcggcgccgattcattggagcatagcctggaaacacatagcggcacgatagtttatatttttgttgtgggtgcagctaagatagagagaaaagtctcttgtcgacaaggttcgtagccacatatagcatgtcaatcagctagctgttcggcaatagtatgccacagcaatgccgacctgattttgatgactttacgacggcgtcgcatcagtttaaaacaaaagaaatcacctttggagagttctagaattgccagttacctaaccaatcgttgttgacaatggcacgtgcctgatgttggctgcgggctaaggttgggatgcagcttagcctaaccaggcgcagaaatagcgcttggccaggagcgacggggccgggttagggcctttgtctcgaggatccaaactccaagacgagtcaagcgttggtgttgtgttggtgttggtgtttagcttgacgcgctgacagcccgtggtgtacttatttgacatcggac

SEQ ID NO: 2460 - DNA, 1482 bp, Emericella nidulans
aaaattcagtcgataagttgctgccgcgtgggggcataaatcaaaggcccatttgatgtccaagccagcggcttcagcgccgcacgagaccccacccgcaccacagaatccgtcaccgaaggtatacttccgctgcgccttctgttttaatattgtatcctgaaagtcattgtcatcatctaacacaatcaccggcgtctcagcttcctctttgctgccgaaaggagcggtttccccccgccaaccatggcgcaagcttgccgagggcgcgcggaacccggcatcggcttcctcgaatgtcaggtattcaattgaagtagtctctttctgaataaccctcttcaagcggcagaataggccatcaggattattattcttctgacagtcttgaccaatgggacaaacgttgctgaagtgtactgagacaaaacgtcgaacgaaccagagaggaatctccgcagtttcatcggcaacccaaatcagctcattgcgccattggggaaggtatttgtctgggtggtctttgaatttgagcaaccggcggccggtcaatattatattgcctttcaatgcttgccgtatagagcaaattcggaagaatgcgccatcgtggagctcgacggaattgcccggcttgtagacaattccgtcagcatcacagacctcttctagcagctgcccttccggaagctccggcgagagaggactggaagcacacgcggaagcaagccagtcctcgcgcagtacctcgaaacactcgtcggttatgtattcgccatcatgcgtcgtctcatcctcagtaagatcaataaattccctggttgctgtgtcagagtcttcgcgcaaaaagtacaaccgatctgggtcgtggtcgattgtgacactgctggcgtcgctagcgtcatcgacaatcacactgggacggtagaaattgtgcatgtcgcgagagcaagaaggcaacgagaggcgagtgaggaatgtatacagcaaaagttcacagacagtgcaagaagaaacaaaggttaggtaaatataggctgactgtctcatgaaatacagtctcagagaagataatctgagacaagatggccttagagaatatagacgcaggggagtagaccaatatacgaggagaaaaggctggtcagtaggtagtgaaagtgttgaaacaggccggctgcggaatagagaagagagtcttatatgagattacggacttggagcaagagggttttgagacatcaatacgaaatgaataaaacattcattgtttgactagatggaatatttgatcaaacgaggaaacgaatactgcagattgcaggttttgctggaagccaggcttagcagataaaacatctgcatacaaccggtcattttctaagcactatgctcaacaaagaaagaagagtaacatctgaccccaaggttctacgctgatcagatgtctttcccgactgagtataagtgaagccccatatc

SEQ ID NO: 2461 - DNA, 1313 bp, Emericella nidulans
gacgcttttacatttttagcatttgctcaccatccaggaattagtattgcttaaatgtattgcaatatcttactgttatgttccaactgtatggctacgtgctacatgaaacaaacaccgaaccacttcagtaccatccgccgctccaaaaatcctggacatcaagtttcatttctgcttaattctttttcaaaccccattcattgccacttaaatagcttctctttggtacttgtcccccaccaagtcaacttgaagctggacaacaatcttgcgattagacttggccgccaatatatatctagctctgccaaaatggaacaggcaacggccgaacaatcatacttcatggaccaggcatttgaaatggtgctggactgcgttctcacttcatgtattagaacaatactgaccctcgagcaggctcgaaaagcgctcgatacaggtgaaactcctgtaggctgcgttctggtgtacgagaacgaaatagttggtcgtgggatgaacgacaccaacagatcaatgaacgtgggtccattatatattttttttcattagacacctcgaagttcggaatacactacttcaaatatcaatccttctggtttcttttctagcagggaacaacttttgaactaggcaacgatctattgaaacttgccctctgacatgtcagcatagggaacaagacacgccgaattccttgcaatccaggaaatgcttcgcacatacccgaaatctgcattacgctcgacggacctatatgtgaccgttgagccttgcgtcatgtgtgccgcggctcttcgccaatatcgaatacggcgtgtgtattatggttgtgggaatgagagatttggaggaactggaagcatcctgtccttacattccgagtttgttgcccattcatgaagtactgttagcttttcagatgctgacctgcttcagttctgccattgatccgccttaccctgtccatggtgggctgcagcgcaaagaagccattatgcttttaaggcgcttttacattcaagaaaatgaaaagggtatggtgattatatgcgttgctatactcaaagaaactgctgctgaccttgacagctcccaagcctcgtcccaagaaacaccgagagctgaataccaaatttgaggatgatgccgacttttgacaccacatcatgagaaacaaaaaactgcagtactactgagcgagtaatgaccttgacaacttaattatacaattgttgtagctggcttgctaacatacattatcgaaggagatggcttcacggtcagtgacgcgattgacaagatat

SEQ ID NO: 2462 - DNA, 794 bp, Emericella nidulans
tttgctggcaatccttctgatcgttgaggatgacatggcactcgtcgatgacaatgcggtcgagccgtcgcatctgccgttggcggttcaggaacgtgtggaaatccgggttctcagtcgactcaggcgtcacaagcacgatcgctgcctcgtcagggggccggcggctctcccacgacacgcacgagatgcccagggcctgacagcgcatcatcaggtccgcgcgcagcgacagcaggggcaccaccatgattgtgcatccccctggggccgcatacgcaggcaacatgaacagcatgctcttgccactgcctgtgggcatgattgcaactacagggctggcaccgtcctggatcgccttcagcgctggtgcctgcaccccgcgcaactgcagcgcgggccgtcctgtcatgcgctgcaatgcctgcgccatgtctgtctgggccagctgctgttgctgttgctcctgatggtcgacagcctgctcctcccacgggttagcgcgcttgcccagcaccgtgttgactggtagcgggtctggaaaccccagaaagcgatgccagtcagtgctcgacgctcgaaaccgcagccggcgcgtcgtcgtgctgccagcgagcttgctgctcttgcgcccatacaccatcgctgccacatggggcgagtgccctgcctgctcgtccgcgatattgcccatctcatcgagatcctcgtctgcctccagggcggccatcgcctctcgcgctcggcctggatgttgtttgggaacacgctcgacgcgcgcaggaatcgacggc

SEQ ID NO: 2463 - DNA, 1514 bp, Emericella nidulans
tattatcttttctgggactcaccctaggttgaaggttccgcagcaatttgtccgcaaaggcgtgtctcgcaacccgcctgcgccaacaacgcctcaaaataaggcggacaagaaggaggtttcgccttccaaggctgcgtctcaccatattgcgtctacagtgaagcctgtcggctccccgagaacaaatttcacaaatggcccctcgaatacaacggcctcccgtatccttcccaatcctgcctcggaaattgatccgatcttcctggaaaagtcagaagacttagtgagggcagagctgcaactgcagagacaaagagttgaaagggagatacgggaacaagttgagctgaagagacaggagtcaaaacagaaagtatccatacaggacgcgacccctgattttgacgtctctgaagttctcacacgggcgcatgaaatagtcaaaccctccccagcacctgagactgcagcgcctagtgactctattgacgagaactccttctactctagcagggccccagactccccgcagcacggtgaccataagtcgtcttcggcgtcatcgtctgtacctggggagcttggcactggggccatcggaagaagatactcagatgagttgcatcggcttgaagccctcaaccgtcccgactcggatcagtcaatgcaagatacttactccattgcagagccccgaccttcgtctcaaaggcagccgcactactcggaaacgtacaggacacacatgcgccaaccggctgagccgtcggatgaacctgaatactcccctccagctcctggagtggcgccaatggaaagggtagagacttacgaacccccaagagccgttccgaacggccctaaacgccaggtagttgatccacgagaccggtacgatagacggtcgatctctccggcagatggagtacgagttgtacggaatcatatcacatcccccgcagctccccagccgtctagggtctcccctctcgccattgccaaggttccatctgttaaccagcatcatgaatcgcgctcagagtatgagccagagcgccggggcagccctgaggtgcccgctcaacttccagtccctagaaagcgtaggcgattacatgatgacaggccggtgtataaaactcaaggtggtggttcggttaaacccttcatcaaagaggagcctgtttcccctcctccttttgcagatacgccacctttttaccgaccacgtgctcaggaagggcctgtttacattgatgtcccttcaccccgctatacgccagtggttgaccgacgggagccgggcgttaagaacttcaggatatggaatggaaccttacgatgaggctcttggcgatcaggtgataccccgtacagctttacggctggctgctcagcggccaatgcggatgaccagtactgatagagtgcgagtttgacaagcgcgatagcctgatgggggccgaatatctgagcacaggccctaccttgtcgaacggccggttacatgt

SEQ ID NO: 2464 - DNA, 1927 bp, Emericella nidulans
ccgcctgccgccggcgggcattccactgccctgggggatactactcttgtttcgagaatggcgtggagtcttgccgcttttacgtgcctgcgcctgccgccccaacgctgccgttgcatctatataagcccggcctccctccctcgaacgaccacgcactcttctcttccacttttccctttccctcttcccgtcccacggcgcccagtgcactgcccccccctttttttttctcaagatgccgcgttatccggacacgctccttttccagcacggcgccatctccaccttcctcgcttcgcccccttcaactacggcgtcgaggacgggttatttggacgattgagacgtgaagtccttgtgaccattacttcgattggttgatgagcccatccaccttcttttattctgtccagtcactgactcttgtgacttgggggcctttcgcgcggcgttcagcaaccttggagtcttctggccgacactgcatgtcagcccgttttatctttccctcgcgccgttttcgaatttccttctacctcgatgcagtcttcaatatgaggaacctggctcactgcttgccatgggcttccgagatccgacatggggagggcagtttcttgatcgtccagctaccacccctgtcccgcagcctgccggtgccgctcgggtgaacagggtcacatttcccccctccacggccatattccggaccccactgggatctgatcacatatccttgccttgttccaccaaccaatggcaaaattgccgcatccgtttcatttccgtgtcttgggcatgcgacgcttggaattgcagtgaagagatgcgattggggccgggcaccagatcttggtttcagcccagcgtacgcaggtgagcttaggcgcgtcagcggaccgatcatgatcttgcgggcaaggggattttgccttgccgcttctgccgatgctggacagtaacggacccagggggagatataaggggacgattggggcccacgagactttcgggcatctcacgttgattcttccacagcctgcccttcctcctccaattccgttctttctctcgtccttcaaatcgcatctctgccgccgtgttatacctccaaaactaccccgattcccataatatgcttcctgcatttcagataaataatttcaagccatggaccccccttcccgcgaaaccgtgtccaccacacagaacactcaatgcgtgctccccacaaacttcatatcctcctaaccctgagccctgtcatgttctacttccaggcactttgccgcctcccaaacatcaccttccggcgcgaccaccggccgaagtctgcgtgcatgtcagtgccaacacccagctggagtcagagacattcgggcgtagtaccgcgtctcgacagagttctgtaccccatgttcctgctccggatctgatccgcccctgctatcctcaggacgagactagaacccctaccaagccgcctggattccaggaagatgacgcagcggctaatgtcccgtccccgagtacatctagctcgaccgatagtctagaggacttcttcaggatgccagactcgccccaagacaacatccccattgatccggtaattcttgccaatctcgggccatgggagagtgacgacctccagctacatgcccccccagcagacggcataacaaatccggagacaacctgcctgtatcctgaacctccggccattctcggcagtccaactagccgttttgaagtgcctggcgaaagggatggtagtgataatggcggtattcagggaagtcgttatggctgccaacaaatgaaccctccctcgcccggcaccggaccagaccaatcttctcctgatagccatgggaagcaccatattaagcgaaaaacacgaaaatcagacggcggaattcgc

SEQ ID NO: 2465 - DNA, 1086 bp, Emericella nidulans
  unsure (1)..(1086): unsure at all n locations
gctccctgtgccgcaatctgagggggggaaggctcgaaagatcgctatcccgcgcgctacagcggcgagaacgactttccagcggcgtcggtcagcgcgagcctgcgagccatgtcggcagcgaaaggtaaaatgcgacgcggcgcggccagtatgtcagaaatgccgcgagcatggattggaatgttcgtatatggatataaaacggatccgggatcagaaacagttgggtctactgaatgagaaagttgagcgatacgagaagttgttgaaacagctagagacggaggttgatccaacaactgcaagaataatcagaaggactttatcggtgcgtgatccgagtacatttaatggcaaaactaatgaagtaggtttctgggcagccctcgtcagatgatggagggggagaaaatgatagtgacgccgattcgaccacatcgcaaggatctttggaagatatagacttggtcaaagaggatttgaatcgcagtgacaaaacggttgcagttggattcttcgggaagaattccgagattgcgtggatgcagaagcttgaggatgtatcagaccaacgagagcacggcctgtcgaacggagagaagcctactagcaaagatatccccatcaattcgatgagtaccatcttgatgacctctccattccatttcccgacacggtcaacccctacgcagtgccggggaaggaattggctgataagtacttcaatgcgtacatggagtcggtacatccatcatttaccgttgttcggaagcgaactttcagggcgcagtacgaacagttctataagaagaaacattttcgtccgccgcggaagtggttggctgtgctgaacatgattttggcgttgggctgtcggtactgtaggctgactagcaaggttgtggcaggtgagagggatacggacgacacggtgtttctgaatcgtgctagaatactgtgtctgagcgggaatgtgctgttcgatcatgacgatccccaccagatccaaataatcctctagttgcggtctatcttgttgcgtttattcaggtnnncgagtatgacatgcgcccnctgatgcaa

SEQ ID NO: 2466 - DNA, 1340 bp, Emericella nidulans
gtagttagtcaactcaacgacatcaaaggacccaatgggctctgtttaaatgattgaaaaggattggcagctttcattgcagcagatgcttgtcaccttgaccatcaattatcacaagtctgtataacatcaacttcggagggcacgcttcagtccttgcatagggtaagtctatggaaatccttctgtatagtcagcgtacagaaaacaaaatacattgtgttacgtgttggagtagtattataactgaaagaggtaatccacaggcagctcctggcagctttgaaacattgtctaatctgggtctcttctagatactccagcacgccgcgaggaaaacatcctgctatccttgtacgtcctgctttgagctaatacgtggtcttagttgttatctagtactctgtgctctggattcgctatcgaatatggctcacacatttgcagacccacttaaagacctcgagatcgctattgtaaatttatgccgcttatgtagtgttgaaaacatgcaaggggtgctatggtatcttgaagtacatggcagaggtattatcagcatctgaacaatatcaaccaagcaagttatgaagatgagcatctaccaatatccatttttataaaatgatgtttccattgctatacgtgccatgtgggctgtttgaatttgaaagaatatacttgtgtaaagccccatacaaagcaaccaaagaaatcaaagcactttatgtgcattgctatataactgctatgaaatacagcagtagctaagctggttagcgatacgagaccttgagatctttcattatgatgtacatcagactaccataggagataccaactaatagaaagcaccagaattgacacagtgagctctcgaccattccagatgtcttcacaaggagacctctacaacatctccgagacgagaagcaggtcaggcctctttcaataagcaatcagcaggagtacgctcagccaggagacgaggtgtccataatgtctagaaaacaaccattcatggcgcctgcgaacggcgataacgaggactcgctgcggtctctatccatccgcagacggggcagagacggtcgctcattatcgcgagacgaatcgaacatccatccagcattccgcgacaaaccctactttagtccgtcctcgtcgcaccacgagaccggagccgagtcactaggccagggcggaacagagacgacgatatcagacttaggcacgaactcgcggaaatgcagctcaatagattcactgtgcagcgagtgtcgtaatgtcctaaaagccatccggcctaacgtgagtgacaagtacctcgagtgcccacc

SEQ ID NO: 2467 - DNA, 1602 bp, Emericella nidulans
agaagatacagggcagtttcagtgccaataacataatttattctgtgttgaatgatcgccctagacccggccaggccatccgtaccctcttgaacctagccattgggctaggccacgaccgaagatttatcgtttcgatgagtcaagatcatttttccaccacttcacgggacggtcagatggtctggatctacaacgtaagacgttattctgcggggtagattagagaaaactgaggggcgagaggcgactttgctcttgataggtgtttcgcgccgatggctgtcacacagatgcgtttctgaatcatgatcttttaaaataggactatactttatgaatgctcaggactatgtcaggatgcgttcggagtcttccctctagagaagcaacgacaaagcaatatcatggttgctagaatgcaatgcattttcgcattaggccagtctcaaaatacatcttatcgaggaagccacataattaccccacaaaataccacagtctgtcaataaccttgttgagtggaacgatgatttgcgccagggttgatcttgacttttcctctgggtcgaccactgggagaacgatgcgatatcgagccacccatcaggcgactcagcccgcagacggtcaggagattccaaccatgatctcgaaaaaaaacatggcgattgctgtcagcccatccggcgaccataagcatatgcaaagaccatttgtagacgcccatataaattgaacagtgtcaagagcacttcttccacactatttgaatcaaaaaccaggcgtaaaaaaaaaaatcactgtcaaaatcaccattatctaatatgacgaacacgcatgacttttcccgcgatcccaacaatgtccaagcctggcttgttggtagcggtattgcttcgctcactgcagcagtgcacctgatcagggaagccaaagtccccgggcccaatgtccatctcatagatacgcacaagggaaccggcggagggatgagcatgcagggaaccgaagacagcggttatttcctcccttatgaatgcacaccgcactttcatggcagctgtgtcgagcggctcttagcactaataccgagcccagaaaactctgaaaaatctatcttgcaggctgttcacgatagggaggccggtggccgctcgacagtggcggcaaatgtgactaggacctacgactatggctacatatacccgttcgaagccagcactaatcgccatggaaaccttgctgaaggtctatttgtggctggaggcattggcggttcctcaaaagatcccaggaagcatcatactctgccggcaaggttcgtcaccaaaggcctctcagggccggaggtgtctcatcacaagggcgttcagattgggataactcagcggatggcacttgttgggtttttgctagaacacgagagtgcaatagatagcaaaagcatcaaggatatttttgatgcagcgtttttcgaaactgagttctggatgctctggtcgacgacgtgagttctccaatcatcacatctctacccattttcacttgataatgatgaaccttctgacaaaaacctactcgcagatttgggcttcacac

SEQ ID NO: 2468 - DNA, 1108 bp, Emericella nidulans
ttactttgtggatacgatgaaccatctgtaggtttgaaccatcacaaggtgggctaattgctaacagctacagtctggactttgcaaaaatcaacaacctcgcttccattaatcagactgcctcgtcagtcaccagtctacttacctcgttcgaccttgacgtcctgattgaggaagtagttagcagtgtcttttccggaatgtgccatgcggccattgcgttaacgcctccggagagtcctagcaaccccgacactgcctacaaacagggtgtgtctgttgtcttacgattcgagaaccaagatcggtggaaggtgacatccatgaccggggcatggcgacgaattgtcatgaatatctttggaaatgcacttaaatatacagacagtggttttgttgaaatctcggtgtcgctgctggatccgccagtgaaaaccgacccagattctgccgttgcacacttgcgcttcactgataccgggtgtggaatgtctcaggaattcctgaggaataagctgtattcgcctttcgcgcaagaggacgccctagccgaaggtgctggccttggtctgagcattgtgaagcaacttgtctcttttttcaaggggtcaatagacgtgaagagcgagattgatgttggaactcaagttgatatccaaatccccgtccaactggcccccgatgatttcgctacaggtgcatttggtccggaattaggcatgggtttgcgggaaaccacattctctctcatcggccttgatgcgtaccctgaactttgcgaagagcctactggaagcttgagctcagaagcgaagcgaagaatttgcttacagagcttctttaccaacctactttccgggaagcccaattggaagatctcctcgacagccacgttggccgaggcagacggcgagattgcaattgtcagcgaagcctctctgaaacaactgttcgtagacgaggcactgcgtcgtcgtgcggagaaaaatcagacctagtttggatgccattgtgatggctagccgtatctaaacgccgaaggaccagggcgggcccaaggtagctcgtctatacgacggccgggacacgattacagcggggccattag

SEQ ID NO: 2469 - DNA, 2669 bp, Emericella nidulans
cagatgcgcgactcagccgctggcaggcaagacgtttactctgtttgcaaagaagtggacctacttggcctacgtggctatctttgaggcgggcagcttggtatctgcattagcgccctcgtccgcagttttcatagttggtcgagccatagctggtgtcggggcatctggtatcttcgctggcggccttgtcatcctgactaccgtgatccccctccacaagcgcgctatttggactggcacaatgaacgcgacattcgtcgtggctagtgtcattggtcctgtagttggcggtactctaacgcaacatgttacatggcgctggtgcttctacatcaatctcccgattggaggcttctctattgcggtcttcatgctattctttcacatcaagccggcagcaacggagaatgcacgcccactgcagaagctcaagaagctagacggcatcggattcatccttttcgccggtgcagttacgatgctccttttggccctgcagctcgggggaacaagtgctcagtatgcatgggactcatctcagattatcggaatgttcgccggctgtggtgctacaatggcagtattcgtggcctggcaggtccacctccaggattcggcactgataccacctaggctgtttgtcaatcgtaacgccccgcttatcttcgcgtctgcggtcttctcaaacgggccttttcaatgcattgtttactggctgccaatatggttccaggctgtgcttgaagtatccccgacagcgagtggagtcaggtatctccccactgtcattgcagacgttgtgacatcaatctttggttctgcactcgtcacatactgggggtggtggaaccccttcctgacatttggaatggcgatgatctctctcggcggcgggcttctgtcaaccattcaccccggtatctcaaacggtcattggataggctatcagattctggctggaatcgggtactccctcgccgtcaacatggtcagtctactgctgctactaactagtaactttgattctgatgtcacacttattaggctcatatcggcgtccaagcttcactaccacccagcctcgttcccctcggcgcaacgactctcttatttgtgatctcagcgagctgtgcaatattccttgcatccagccaagctatttttcaagcgcgactcaaaaccatccttgtgggagctgtgtcccaagatacaatagaccgaatcctagccgtgggcgccaccaacatccggtccgtggtcggcccggacgaccaggtcttggtcttggatgcctacagtaaaaccataaaccaaatatttgtaagctatgctgacactgaactctctgtacttgctgtgcatgttccttgctgctgttgtcctgggcaactcgagctgacgttaccgtattagtatctcccggcaggggccgcggcgttgtcgtttatgtttgtctgtgcgacgaggtggatctcagtcaaaaaggcagtgtcgaaggagacatctagtgcttagataagtctttggtggtatttctttggtctcctccatgccaccttctactaccgaatctcgagcactagtactgagagctttaagaaagcgaacttgaatctggggcgtagatagaagatggaagacagattttagtgccatcatatctgcttagcagtgtgctatcgggtcgttactacttactgcaggggcggttcgtagtctcctttctgtacctatcgtacattgtttaaggtggtggtatccgatatgccaaatgcatatacccacgatgccaacgctgagtatgatgagctgcgctcacttaaagccacagtgcaatatcttccagactggaaattctatacctcttcatctaagagcatcttaaaagtgctacaaaaactactgagttgcgagcgcagggactgcataacttaagcgaactgccaccgacgcacccataatatcccactacacgcttacttcccctccctctctttcgcctgccttgacatcaattcctcatattccttcatgtttgatacccccttcggcattccgttcggcatcagcccctgttcgtccatcagccgatctctcgtacgcatcgcctcacgccacgactcgcgcatttccatgcggcgctgccaggcctggacattcgggtacggcgcaagagggtcttcgccctcaggcgtcagaagcaccatgttgacgcgggcattccaggggaggaaggccaaatcagcgaacgtgcatttatcgccgacgagccagttgcggccttctagtgctgtgttgagcacgccgaggatgcgatgaacttcattctcgtaccgctcaattgcggaaggaagtttttcagcatgcaagacgttgaacctaggtaggtagaacagttgttagcggttgcgcttgtgttgtctgctgcgtgctgggtacatgaagaagtagtaggtagacactagggtgagagatgaaagtcaacacgcaatcttaccatccggcctgtccgaaataaggtccctgcccgctcatctggaaatggagccactgattcagaaggtgttttccttcaaggaggtgtaggttagctttttctccgtgtcgtacacacctcgagatactggaggattgcccggattccacagggtcaaatcagtgtttgg

SEQ ID NO: 2470 - DNA, 2110 bp, Emericella nidulans
tcagccgattgtatggaccaagaccacagtaggtcttaccaacgaccccaacacaaagcatcgtcgctaccatctaccggaatcagcagtcgtcccaactgaagaaattcaaccaaacacagtaaagtactatgtaaggagaactcacagcatcagcaggttcccgcccatcaggataatatccgtgccatgcctactgcaaatcgcgctctcactcgcgacggcacccctctttccatcatgagcctctgcagatcgctcatatttatgggcgcgagtgtaacgatcgtacgagtccaacggtgacggaaggacactgggcacgtggaaaacgaccagcactagacagagcgtggtacagacggataacctcaaaaggcgcgataacgacagcgatggcgacggcgacatcgttgaacctgaattgcgcgtctggttctggagtgaaaatgaaacttgcagctcgttgtcaagactcgggagaagcggctggttgcaccattatagcttaagattagcattgcttgggtctccaaacaaagcgggcattaaagtaacagtaacagccgcgcgaggctgattttgtgcccgttcgtacctgtttctccacatcctgagcgttgccgtcatacccctgcagttgcatcgccttttactggacagcctcgtcttctactggccttgcaaggtgacgagccagataaggaagaaggatggggataaaaaactggagcgaaagacggccattttggagaataatctgcatcgcctcgaagactctgacagacactcgtggacattgataagcaaagggcaagcgacaatgtgagtggttgataaggccgcgaaactagcactcgagtcgctgcgtgaccgtctccaatcttgaggaccgccgatacgagatctgggttcctgttgcaaggcagataagaccaccatcagcatcactaaccgtttccctcaacctcaggtggtcaagattggacccgacagactcgacctgtcatcctgagggtcacgggtcggggtcactgtagatccccccgcatagtgcagtctacgctatactcgtagtactcagagtgtacagtcattacgtacaacaaaccgtcctcgttaccttaaccccatctcactcttctccttctgtctctccccgtcatatggcaccgtataggcaactgcctgcctcgcccactggaccgtctcctgccaaacctcaggtacctcctcctgtggcccaagccccgtcgcaaccaggcggcgaccccaggttcccacataccacttattactaagaagatgcatcccaacgccgtagtgcaagaatagaatccgcgctatccagtctccctcctgcagtcgcgccataaattccttgctgatgtggatcgggaacgccagaattccgccttgattcctcccgcgcggccattccttgaccatttcttgcagcgtgtcccaggtgctgaggtatatcgctttgtgcggggactctgtcgaatctattgagctgcggagatgattgagtgacttgagcaggtccctgtgcggttcagaaatttgtcgcgaggtgtagagttctaggttgatgcgaacttaccgttgtaactgctctagaccagggtcttcctgcgcgctgcacgtattgtcagcaatgccggtcaggtgcagtgcagtgttgaagcaaaactcactcctctacctgcccctgtttcagaagcaccactctccgtttatagataaaccacgccttgatctcctctggctgctccacgctgtctagctgctcaaagaggaacgcgcatccggtaagtagccggttgatttccagcacttgcagaagcggatcgaacgtatcccggttttgcgacacacacgggtacgcaaatgcacagagcatgatgaagatcgagcaaatgaacgccggccccagagtctcgggcgcaaggtcggccagcacccgactaaaggctgagcatgcacgactctggtacttgagtgcaatctcgagccatttgctatcgccaagctcgaggaacgccaggtgcagggctgcaaatgcgagcaaaatgtccagcgagaagggatttgtagttgcgaggcg

SEQ ID NO: 2471 - DNA, 878 bp, Emericella nidulans
atattgtcggaatgttttcgtcaatcttttacaacggttctttcttgtggtatcccaaacattatagaaactacccctactaaccaatcgtactgagcaggagtttccgattggaactaaaagcaccggcggccgagttagtggattcgccagtttatggcgaacttatgacaccattcgaagatcattcagcacagacaagaacccaagagacatttgtcaggattcattaggaactacgaactcgaacctcagacacgatgttgcgcgtgcttacgagattctagctgccgttgacgatcaagcacgcaatgcaatactggggactgctgcgatcgcttcgatcgctgaaaagctccctttcgagagttctccaactagaggatttgtgactcaccggctcgatcggctcgttgcgcacggccttgggttgctgttggaacacggatgcgcttccagagaccatgcactgcttgactacgtaccgagactacgtactgacgcctcagatttagctcgagcgtctccaaggtcctgcatctaaaagggcgaattgacggtgtacgcatgattcatacacagtcggcgaaatgctgcgactatgatctgtcataattgtaggcgaacatacgttggccagggataggagcaggtgacggatgagagcagtctcaatgcgggttagaacaagaaacgttgtaggctgagtactcccgagtataggagaaatcgagccttgactctgtcgagatatctagaatctcctcggagcgacgatgccaagccagaggcgccgtcacgtcacgtacgaaacagacgcaggaaacaagggcccactatgatgtctttcttccaggcagccccaccagcgagtgctt

SEQ ID NO: 2472 - DNA, 1480 bp, Emericella nidulans
aacacatttcctatggacgaccgggggtcctgacgcaagaggcaaaatcactcgttacccgggctttatgcgttgctgtgatatcgacaagtgagggagtttccctggcacatggggtaatccaatctattgtggcctcaaatccagccactgaactccctcatttagtaacttcccagtacctacaggccgactccctgcccccgtccagcataacaatctcctcagatccagttccaaacatgaacatggccgctttggtgatcttcacaagcggtaccactggaccacccaagggcgccgtccagcgaagaagctacatcacctctgccgccgaggacgtggcggatcactaccgactcacggaatcggatacagttctgcacatgttaccagttcaccatgcgaccgggataggggtgacgtttcttccgtttttggtggttgggggatgcattgagtttcgcagtggaggatttgacccggaatggacgtgggagcggtttagacaaaacgccaacccaactggggccaaggcgttgagtgtgttctctggcgtgcctacgatatatacgcgtcttaagcggtacttcgaaatacacatttcccctttaccgagcatagagcaagagcagtatattgccggggtcaggagaataagggtctttctatgtgggacttcggcgctcccaagaccaatccaagaattctggacgagaatcttagacggaaagatgatattgacacggtatggtgggacagaattccatactactctgaaagctgatctcgatgggtcatcaccggcaaacagcgtcggaagggtgtctccgggggttgatttgaggttatcagatgaaggagagatcttggtgaaggggcccaatatgttttccaagtacctccatgatacaaacgcaacatcaaaggcacatgacaaggatgggtattttaagacaggtgatatcgcatcctgcatgggggagagctactttattcaggggcgggcttcgcttgacattatcaagagtggcgggtacaaaatctcggctcttgatattgagcgggagatactaggccttgattatgtctctgaggtgatgattgtcggcgtcgaggacgaggagtttgggcaacgggttgcggccgttgttacgctaaaagatgaacacagagcaagcgggttgtctctagagaagctgaggggggatctaaggggggtgctagcgggttataagatgccgactgtcttgagggtagcggggggcgagattcccaaaggagcgacgggaaaggtacagaagaaggtgctggggccaagatatttccctgatggatggcgagggttggaggaggtgcaagtctgggatccacaaaagatgcagcctaagtcgaagttataattggtatattgtcaattgctcagtgcatgagttttataagagttattggtagtaacatagagtccgagtattatcct

SEQ ID NO: 2473 - DNA, 1747 bp, Emericella nidulans
tcaaggtcgtgaacaagcgagaagagtaccgagtctacaggaaacctattcccctagaactcttggtaataccccaaatggacgaggtcatcccaaagcctggcattgcgaagaggccatcgtcagggttacttgccaacaagactgctgcgaatccaccggccgcgaaagataccctaccgataactttcaggcatcttggtaaaggtggatacgagcagacgctatatgcctcatcctcacaacaacgaaagaagttcctggagctagtggacgagcaacagacaaagctccgagaacgcaacagtaacttctacaacaaaaacatcatttgcgaaaaattcttcaattcagtgaacagggtgaactgccttgtcccaattggtatgaatcgttgcgaccctgcttagatattagctaactcgatgctgaagatggtggtccgaaacttgtatatggcacagatagctgcatatacgtgtcggaccgaaacccacgggaccagtccgcgaagccaagaaaagtgctagatgtcagtcaagtgactcagattgacacgctggaggagtatcagctactcttggttcttgcgaataagactttgtactcttatccgatggatgctcttgaggtcaccgaagccaaaacccagcggctaagagaccgaagaagatccagggtcatgcgaacttcttcaaatccggaatcggtcttggacgtcacctggtgtgttcagtcaagacttcggctctctcaacgaccatcaaagtatatgagcccatggacaatctagccaagggtaagaagaagtctactgtcagcaagatgttccagagcgggcaagataccttaaaaccgttcaaggttagtttagcccccacatcagtcctgatttctgagctaatcaatctacaggaattctacatcccggcagaatcatcgtcgatccattacctccgatcaaccctttgcgttggttgtgctcgtggcttcgaggttgtcagtctggaaacgacagagactcaatctcttctggaccaagcagacacatctctggactttgtcgcacgcaaagagaacgtaaaacccattcatatcgaacggttgaatggagaattcctactgaactacagcgacttttcattcttcgttaaccgcaatggttggcgtgcgcgggcggattggaagatctcctgggaagggaatcccaattcttttgcactctcattgccttacatactagcatttgaaccgaactttatcgagttcagacacatcgacacgagcgaactgatccatatcatgactggaaagaatattcgcatgctacattcttccacacgagaggtatgctcgatcttctccctttgaaaagacgggttactaacggcacagattctttacgcctatgaggatgattcaggcgaagatgttgtggctagcttggatttctggaagcacaagccgctggcacagcattaggcttctgcacagaactggcgcctgcttttgatcgctttttagaccagattctatttctgctcattgaagaagcatttcgactccatctcttcccacttctttttcttctttactcatttgcttcctttttgagctgcctcaaagattttctaatacctcgacgtttatttggtccgtcccagatcgagcctgctttgctctcaaattatcttccgttggccatttacttccatcgtgctgtgtacaatgaagcgcaaataccatg

SEQ ID NO: 2474 - DNA, 1452 bp, Emericella nidulans
gcctaagcatgcccaccattccttcggcagaatcatcgtccttgaggcccttttcttccagccacgaggcccacttattcatgttgggcacaaagtagctgacgagggtaggttcttcgaacttgtcacgacgcaccagcgtcacgttctctcttacaagagggtgacgggagagatgggtatcgatttcacccagctcaatacggaaaccacggatcttcacctggtcatcggcacgaccagagcactcgacgtctccggaaggagtgtatcgaccaaggtcaccgcttcggtagagacggtccctgggtccaacatagaactctctccagggctcattcgcaccctgcgactctgcggcatctttctcgacccacgtcttagggtcaacaaaccagttcgtaaggaacttcttctggttcagttccggtgaaccaaggtatccttccgcaagtccagctgcacgaacgtaaatctcacccacttcgccaatagcgcagatgcggctaggctcgaagcggttgacgaccagcatctgcacgtcgagcattccccgacccgccgggataacgtccttcatggtgtccaggtacccaccgttgctcgagtagctggggatttcgaagtagctgacagcacgctgtgtctcggtcgttccgtacatgttgacaatgttgacattcggggccagcccttgcaatgagcggcaatctctcttgatcaagatatcttcgacgaagaaagcgtggtgaagggtagggaactgggcagaggcgccttcaacgaggatttgacccatagcaggtgtaaggtgagtgacagtggcaccgtaatcccgcatccattcagcaagcttttcgttctgaatatcttcgcgtgccggaaccagaagttgggcaccgaggaacagaggagtaaaaatatctctctgaatcgggtcgtgagcgatcccgctaagcatggtaaatttgtcgttgggagtaagcttgaatgtttcagacatccatgggaaatagtacgccaaatagaagtgacgacctttgacacccttgtgtctaccctcggagcctgtagttaaccatagattttgagtagagttaggactcactacaactcccactctcttggactataattgtatcttgtttagcttgtaccttcctcggccttagtcttgaatcctgcccaattagctacaccccttacgtctcaactctccattgtcatagctgtcctctttttctcaattccttgtaatctctctacacatcatttccattatattataaaatgtattgcatattaactatgtattctactgtcgctttatacccttgttctactcttattgttgtatctcttcattccacattgcatttctattgtaacatgtatatccttctctcagtcgtcctattgttcttgagttatcacttctcttgctctatacct

SEQ ID NO: 2475 - DNA, 1570 bp, Emericella nidulans
caggtgttcagttataagacgagtgatgagcctggcagtgcgtgcgagaaattgtcgaggcacttgaagggtattcaaaaaggcgacgagaaggatacgtttggtgggctgaagagagttgaggaggtgactgtctagtatatagtatatttctttcacaaccacgtcttaagctctgttattgctttcaaaatcggtagcatagtcatttcaagatcgcggcaaggagtttgacaccaatctagatttccgctttactttataaccccctaacatttatatcgtctaaggatattcagtttcttcatatatttgcagcacctactgaaataatgataacaagttcgaagagaaattgcagaggatatcccatgccatgaactaaccaaataacactagcagaaacactccatcacggcctcacctcattcccacgattgtcataccacgtcctctggttctctccctgatatccatgccctccaggagccggccgcgaagtcggagcggagcccctctcctgcgcatctagcagatcaacgccaatgcttccatgctttctcctcctcttcctctccttcttcgcctctttctctgcaatcttggcctccttcttctctctcttcctttgcttcttctccttccgactcacccttgggaactcgctatcgggccccaccaacactctccccggatgcgccacgttcaatatagccaagcaaataaaaatgggtgccgcatcccatacatactcaaaccactcgttccgaagcgctgggttatcgatattcgttccgtccgcatactgcgccaaccgaaagatgatacgcaccgtgatcaggaacagcgaggcataaatggcgtaaaacagccaccgccacggcatcgaccctctaccgaccttctcggcatctaaagttccatgccgctccatctcgcccatcttccgctgcaggtggatgaacagcccggtgaaaatcaagatgaatagctcctgcacgccaataccacccatgtagatatgcaccccgcgcatgatcgtctcctgcgatgcctctgtgtccgtcgtgaatgccgcgccaacaagctggatgatgaaggccaggatctccagccagacgaatatgtgtccgaagcgttttgcaccgatgccgccgagacggccgctggggaggaagaagtagatgaggcggccgagcgtcatgtagaggaaggcgttaacccagattggagcgaggagaaagaaaattgtgaagggagtgttgtaggcgtcgctgctttggttttttgcgaagagggaccgcataatgaaggcgatgagttcccatagtgagctcatgattacaacccaagcatagcgctgaatccgttagctttccttcattgtctttttccttatctcttcttttttgtttttctcttttatttgtcttcagtacaatgtggacgtaccttcttaaacatgattgcctgaacaatatggatgatcgtcgtaaggccgaacaacactgaaaacaagaccggcgccgcaaagctggcgtcgtacatgtggaaattgccacacccgagc

SEQ ID NO: 2476 - DNA, 1266 bp, Emericella nidulans
gactattgatctttcctttgcgtacgccacagcacggggccttgactcttatgatgacccagagcttcctgcgctccttgtggcaattgcatatatgaatgccgttgaaggacctctttgggttgcggttcgcggcaagggactggcgtatggtacgactttcgcctacaacatagatacgggtttcgtcaactttgacgtttaccgatcgcccaatgcccacaaggccttcgagtcaagcaaggatattgtacaagcacatctttctggggaggccccctttgacccgttgatgtttgagggcgcaatcagcagcattgtggtcactttcgcaaatgaacaagtaaccaccgccaatgcagctcagggaagcttcattcgtcaggttgtgcgctccttgccaagtgattacaaggagagaatcctccgggaggtccgtgataccagcgttgaggatgtcaagagagcactgcgcgagataatccttcctcttttctcatctgacacggcgaacattgtgattacgtgcacaactgtgcttcgagaggtatacttgtttttcttatgggatttgaaaatcagattactgaccttcacaatagacgatagagagtggtctcaaggaatccggtttctctccaaaggtccagccgctcaaggaatttgaggacgactatggactcaaagtcggagacggcagcgatgcagacgacgacgatgatgacgatgacgacgatgatgatgatgaggaggaaggtgaggaagacgagtcagaatcggaggaggaatctgacaataacgatgacgagtgatactattgtaacacggagcgaggctggatggtacggtctaagactaaggactgtcgtctgtatagagcaaaactatttcagtagaggtgcacgtctagacgagctcatctggagtgactgtgatttccaccagtttgtcagatatagtcgtcagtttataaacccacgtcgccggccaatcggttctcatggcatacacattgctgacacgaaacataaaactggtataagtagcaatcttcatcgtgtgtggtttctatatcgacatatgttacaaaaagctcaaaatgagaagccctcgtctcctctaggattacaaaggacttgtcatatcactgaccacgaaagacgcgtgtcggtgaccatgaccgcctcaaaccataaatatacaaaccgacaatcctatagtctaaggcacaaggctcaatagaaaagcgaatgaagagaagggaaa

SEQ ID NO: 2477 - DNA, 2209 bp, Emericella nidulans
ccggcgcaagaaacatcagcagcaccggggcgaacaacatgcagtacagtaacatacaaacgagaatatgccggccagtatgagcaatatgcaaggcaccaccaatatgcctggtagtgggggtcaccctcatatatgccagagtatgtctggccaggagagggaatgctggttacgaacccgatgttgaagggtgtcaatctgaacaccgagggcgacatggcgagggaggagggcaaagatgcggatatgggggatgcgaggcgagaactgatttacaactgggaaagcctacatataagtaacaaagggacacatggagacttgacagattcgtagtagaatttagactcatccagaatcctcttttggcaattgtaggttaatctcgaagatttgataatggataagaagcctagtgtaagccatgatatttaatagtagacgtaaaaggtattgagacatcaatgcgggtatttgacagctatattaaaaactagtgttgagagagaaaacatgggcacgaaaaccaaccgggcctgttctggcttcagtctttgggacgaatattccagccatggtcatcgccgcccacattcacttgtagggctagaatcgaggtctatttcaggtgtgatctaatccgcaattctagactccttgacatcacccttacctcctattttcagagattgtggaggtataagatggagcccgtcatccccttcaagcatgaaggtagtcacaccccaatataaccaaagggtcctcacggtctcaaagtcctcggatacctgggagtcattcgtgcttcattattacttattataataaccgatcgagtccttctcaggatgtccgactacccggcgaatacggcatatgcgcagcgacatatctacaccaatccgtggttgcgtaaaaagacatctctgagccagagccagacacttactgttgatgccgatcttgatgccgacgccgatgccgacgccgatgcagacgcagaatctgaatctgaagagcagtctgtctctgggacatctgcatccaagggagacaaggtgggggaggacctcgacttcgatgatgtgaacacaggcgaggctgatgatgactttgggtcaaggtagagggtatataaatttcactggtataaatgaaagatcgaggttcaacctgtataggcagagtcctaaatcgatcaggcgaagagtatagcctgtctcgcttatcaggaggggtcatccggattacagaacctcttcaaaccatagaatgagtcttaaccataacaagattgagttacgagtcctgtttctgacaacgatgtccgttagagctacgacctaggccgcgagaaaaagccctgcgacgccggcctaatgtaaaagtccggtgacgagctcctgacatcggtttgccttttgacatcaaggttacctgtatcagccaacgtaataggccgtattattgatagtagagtgacagaccaaatcatatatctaggctctaggcattcctctctctatcctgcgactgaagatatctatgacatgatatatagcgcccgcctttgtctaaatacatatatcatcacctgaaaaatagtgttattctccagtattcactctatcaccagagtcactcaatggatcaggacgagctagacctttccgaccacactgcaaggtccaacagattcgagaaataccattttaaaccacccgcatcgctaaatccaggacacggccaagtcagcaacattcaaaatagcagcagtgacggcctccaagaatcctattactctggaaacattcagggcagcgatccacgagcgagcaacatgcaaggccaccgccaacctcagactacggcccagggacggtatttctcagcatctccagctgaggagattgatgactttgatgatgaatacgacccagagagtctagatatcggagctggcggaaatggaagtggtatgagggagtggagtgagagggattaagtagctagtctagactggtttggataaaagcgtaattaatcatggtgcttcattctatgggtttccatttatgatgagcgtattattcaaagattttagagccgtgaggcaggtagaaaccgtaaaagagggcttgataatcctaggtttatatggctagagccatgggcaaagactgtcagataactgtccctggtt

SEQ ID NO: 2478 - DNA, 1362 bp, Emericella nidulans
atctatgccaaagtaccatggttcccataaatcatggtacgacaaatgaagaacccaggacggcgataccggcttgaactctttccagctcgagtaagactaggccacagaatgattgggcgcttggtgtattggcaaagttgaaggcgatagttgtgctttggcctcttcctttcatccctctgctggtgtagccgtgggaagaactcgacataccatacgatggttggtcgaatacgtgatagctgtttgccgtcactgggacaaacaaaggagaacccgcctacgtaaccttcttcaatcaccacaaagcaaacctctggaatcaaaggccggaaagggcttccgccccccggtcattggtgctttcattccagattcatggaacgccgttcgttgtgagcttatttgtcaacgtgagcgccaacgccaaactcacgcactgacttgcggctgtcaatagacaggggcgcagactcggatagggtaagctcgagcgcagaacaaactcagacaaagaacctgcaagcgtggtcaacttgagcttttgcagtttctggaggtgaagaattggatctagggctgggttctttgttgaccacgggatcacagattcggtgtgcaccaaagcaccaagtagagttatgagtatcgagctattgaatgcagatgatttgtcagctcgaaacttggcttaacgggcaatccgcctccatgtgagcgtcagttgtcacaaacctgaggtcctatggagcagaaatcgatagcttggttgagctttgggctctccaccggtcctggaagtctgggacgaccttgcccggtgcccttttgccctcagcactggagagcagtgaagagaggcgcgctcaaggctggtagcacgaaacccggtcatactcgggctcctccagatccctattcgtgacagatcggggtctatgatgcttatggaaccatcaatgtggtgttgactcgacagacagcaaggtaagaataaaggtcacataattatgcacataatagtgctgtacggtcacggtcacgtattactaccgtcgtaaaaagtaaaacacgcacgttaaacgcctcaggcacccaggctatgcggcgggcacaccacggccgagcgatcgggaaccacagagctgaaggtccccgaacgggcagattgaagccgatcgggaggcatccaatcacaaccatgcaattaaaggccggagtttctcgacgtcgcaaccaaggccaagggttcggctcagtacgacctgcagttcatcgcgaggatggaattggcaacgtaatggccgccgccggttcacactgcagactttcagctgctagtggtacggcttttgtctg

SEQ ID NO: 2479 - DNA, 3704 bp, Emericella nidulans
gaccaaatttttgcccccagcttgctggataatcgtgaatttctcgccctccccttctgttttcacatatccggcgagatttctcatcatagcgagtgcatagcaccgctgccactccttttcccaaataccttttctacccctttgctgcttccgcaatggccggcaacaccccccgcgttccgttatcggcgaccctcccgccgctgataatgggcaccgcgaccttcaactcgcagtacaacgaagacccctacgcccttccgacgacggaactggtgcaccgcgcgttcgccagtggcgttcgtgctttcgatacttctccctactatggccccgcagaagacctcctcggccgcgccctggccacagacttcgtacagtcgaattttccccgaagttcgtatcaccttctcaccaaggtcggacggatcgccggctcgtcgtttgattattctccgaaatgggtcagaaaaagcgttgccaggagtctgcgtcgtcttcacactgagtacctggacgtagtatactgccatgatgttgaatctgcctctccgagagaggctctggcggcatgtcgcgagtagcgccggattcgtgatgcagagggtacgattcgctacgtgggtatctccgggtacccagttgatgtgctgtgtgacctgaccgaattggtgttgcgcgagaccggcgacccgcttgatgtagtcatgtcttacgccaactttaccctgcaaaacacacgacttctgacgcagggtctaccccgtcttgtcgcagctggtgtggacgttgtcccgaacgcatcccctctcggcatgggtctattgcgaagaaagggcgtgccaattggcagtatgggcgatttccacccagcaccaaatggccttcggacagccatccgcaacgccgcagagtgggcagatacccaaggcgaaaagattgaagttattgcaatccgcttcgcgctcgagtcttggctgcgcgacggtgcaaaggcaggcgctctcggtccccctctcgcgcgcagccctgactcagacccgagcttcctctccgctgcaaacatgggcacaggcgaacgtttgggcgtgagtgtcatgggcgtcagtaacattgaggaattaaccgagactcttcgtgtttggcatagtattgtcgacggcctcgagaacaaagacgacgacgctgaggatcttgaactggtggcaaatgcatccactgtcccctctgcacccagcgcaccagccatcctcacaccctccgatggtatcatcacagaccgcgtgtggtcccgcgagcgccgcagccgtatcctatatcttgcaaaggagatccagtctatcctctcccctatgtgggtggattatacatggcccagccctggtccagacttcgtaaataccttaccagccgaccatattgccgcactgaatgagcaaccagagaaaccggacaaaaacaatgctatgatgacccctcccttggatgcgcaacgggagatcgagatacccgcggacaatgttccgtcactatgagttttaacgatttatctcatgtttatagagcatttggcgggttcgatttcttcacggttaagtcatcgaacacaaaaccctatccagagccaagatattttatgtttaatacccaattgtatcaggttcagccgtgtcaggttcttctattatttctagttaaatagctaccctacctttggacgcagaatgccggctcaaacgtcccggacaagtcgcgctgcagcccatgcgtaaggataatttcgttgataccagttcacactacatctgtattagccttttccaggaactgaatacgataatgggacttacaacgtcgtcctcccaacaatccgcggatgagtcgcccacgaaccaccgaggattatattatgctttccgtcgaagaagtcggctaggaagagaataagtcagtgaatgatgcagacgagtgtgcctagaaggaaaactaacaagtatagcctgggtaaatctccatggctttgaacccatcatggggctccaaaggtgacgaagtccactcccaaacgccgccgagctctgcgtggccagccagtttatcgccattctggatcacgggcatgggatgccagttcttgaaaccgacattgcaagtcgtgaggtcgagaaaaacaggtggagaggatgcggatgcagagggcgggaggacgggttgggctgtagaaggagcaattttgacggtgccgtttctaagatgcggtttgtggtagccgtttttgagtccgttgctagctgcatccgcggagccgtctgtaagagttttctttagacgagctgagtgtgcatagatgcttttggcctcctcgaacgtcggcaggcggcaattcatccatgaagcgtattgttgaagctcgtcgtaggatgcaatgactggccagtcctgagctagctcaagtggaacggggccgaagaccgtgcgaacagagaagtcagttagaaaatcctcagttgcggtgctaccgttcgcaactccatctgcttgattggtcataatccaggaggcaggccacctgtgaatttggttcttctgaaggtaccgggcatattcaccattggtaacgggcctcccttgcgcttcaaatggttgtaccgttacattgcgcttaggtatttcgttatcccaaccgaatgttgacgttggcatcaagtcctctgaagagtcaagccctatagatagggtttgttctggtatagcgaaccattcgttcggcttcgcattttctcttgcgtcaagaaatatcttcttgaaatccggcgcctggatacccggcggaggaaggactctctcactctggatcagcatgtagaggaaggtctccaagtgcattgcctcgtgctcaaacccgatccaaagggcttcacccagcgttctgttcttggacaggccgggtatctcgagtgtggatcgtatcctgtttctgacccggtcttggtaatctaggatttctgaacgagatggccactcgtccggaatttcactgtgagaatggcacttttccggatcgtcaacgtcggggtcgatgccgcgctcaaatatcagttgatatgatttagggtctgtaggcttgccacccaaagcacgggtcaagtgaatatctgaaagcttgagtaagcaatagcccaattgaagtccgtctgcgatagaacttaccagcgaacgtgggaatatgtcctaggtaaaatatcagggaatttcgtagtttaatcggctttgaaagcagctcttcttgtgggatcattgctttggtgactatatcccatgcggtccactgtgcctgaaaatctttcagactgggaataggaccagcagcatactgggagggccgcaacggtaagtctaaagctgccggctgcaggagatgtaaatctgttcccatgagttaatatggttttgttacatgatcatatgtacgtacggtagtcctcggaaccgcttccaaactcagcggcttctatcaggccagcgtcgtgccacagcttctcgcgtgcttgacacccgtacttgaaagcctcctcgaagatgatcttttcaccaggcctgagcagcacatcacagaaggacacgtccttccttggtacatagaatgcctggtgcaaaccataaacggcatcgtattcggtaacaacttcccattcatgggt

SEQ ID NO: 2480 - DNA, 1237 bp, Emericella nidulans
cagtgccgatgatgagaactggaacgtccatggtgatatttgagaggacaagacgcaataatcttgtactgctgatgcttttgacgatgtgtgcgttggcgtcgattgcaaataaaaacagaggaaaaagctatccctgtcttccgacgacgagactttatttagcaatgaaaccactcatatgataaaatttcatttgtatgctcacctttctttgctttggtacagttgacctcaccaccagattggaccatcgaatgccacattatccggtagggagggggaagatgctgtgatcatcttgttgcggagaatataattgtgacatcaaggggagtctacccgggttagtggatggatagcctgcgcttataagtccctgcattctgtgagaatagaggtggaaagttattcgaatcccacagctgccgccaacatgatcttcgctcaacttccaacccttacagcacaggttgttcattttatgcagagtcgtcttttgctctgtatcactgcctttgtcgtattatgcattattcacaccgtaagttcacatcaacgtcttccaaagtggttcattctgacttggcttttagtttctttatgccttcctgctgtctcctgtcagacatgtccctgggccatggtgggctcgtgtgtcaagaattcctctcttgtacgccacatggcagcgacgtcgatcaagatacgcctcagacctgcttcgcaaatatggtcgtcttgtggtcattgccccggaccagattcacacgagcgacgagactgcgatgaagacaatctacgcaaagtcctccatcaagacgcgtttctacgccggcatggggtcctggaaaggcgtaaagtcaacccttggctttgtggactaccgcagcgctgcaccaacccgcaataatcttattcaatgtttccaaaatcggaatctcgacactcttgttgatagcatggcttgccatatcactgagttctgcgacatgctcaagcctaaaagtgtccaacacaaagccgttgatggagtcgtgattttccgcctgctggccttggacattgtcaccgatattctctggggtgagaaagacactttgctatcgaaagcttcgatcagcgcctgtgttcctcgtcgttcatgcgtcagctcttggatgctctaaaagcttaattctgggttgacacccacgtcgttcttaggtctcgaacagcgtaattggaggcgatgacc

SEQ ID NO: 2481 - DNA, 796 bp, Emericella nidulans
tttccgccaccgtttgattcgcaaaacagtcgatcattagttcattgggaattaattgatcttcttttgatgcaggaaatcttacagctgttgcttggctctgagacccaatgactcgcggatttttgcaatttgcacacaactcggggccccgaagtcggcctgatccgatgggattttttcgacttttcggtgtgccaagttgtagtagtcattgctcaccatcacatattcaaccacctaattaagccggattgcttgagagagcattcgctacgacgtctctcttcttcaagaacatttctcccgattccaaaacagtttgttcagcaattgacttgtgtcgcattctgcttcgtttattcgggcccctccgacttttgagtctccgattctttggcttgttttccccgcaataatgtcttcaaaatcgttcgtcattcggaccccctgctcgtccgcaaatattggccctggattcgatgtcatcggtcttgcattgtccctctacctcgagctacaggtgaccatcgactcttccaggacgtcgtcgcagcagccactcaattgtgtcatcacgtacgatgatcaaagcaacagctccgagaagatcagcctggacccggaggttaatctgatcacacgcgtagcctgtacgtacttagatgccatgaccaaagagctttccccgttgagacccgggttcatattgtaaatcccatcccgctgggtcggggactaggttcgtcaggaaccgctgtggttgccggtgttatgctggggaatgaagtaggtc

SEQ ID NO: 2482 - DNA, 2144 bp, Emericella nidulans
ggccacggacctgcgtccgaccctttgcgccggctttgccgtaacttgcttttccgcttgtgcttgatcctgttctcattgccagaacctgacgcggatgttgaagttgaggtcgccagcgaggtccacttgctcttcgcagcaacatgccaccccagcacgctcaagaaacaattcaacgtcttcacccacccccccgcaacgccgacgacttcatcccccgcaatagagacgagccagcccaaaacctcaacgctagagaccctcacctcagccgccaagtgcgtcataccggctcttatatacggcatgagtgttcccacatggtcttttacgtcatgttgcgggagtgcacggaggagcttaagcagatttgcgcggactgaggcattggagtctaggatgaggggaaggagagacggtaggatcacacttactggttgcgggggtgggaggtgggtaggttggctggtgagagtcgttgttaggtgtgcaagggagtcgcggcgctgagagtctgattttgaggagagcctaaattgggggtggctgaactgggttgtttgcggatggggccgctagggttagagaatgttggtcagggttattgcttttgatcattagtacacgccctaagatgagggtgatgtttgtgactggagtaggcgagagctagacagcagctaggcatgtagcattatgccgtactatgctcttccacctgtccagtacagtcgatccagcccggatatgggaaagagcctcagaaggcgagcatacctttcgacttgaaacttgtatctgtaaaattgtcaggcttggcctttgccttgccgaccttcaactttggtttctgcggtgcgttagaaacgagttccatagatgggtaacacaacgtacctggaagtccttctgtttctccttctttctcttggtgctggcgcccattttggctagcttttctgagtatttctgttagctaaaatccacaaactccgcagattcacgtataatagaccaatataatggttatggagctgattgttctattaaagcgtacttgaattttgtgttggtaggtcaatgatttcttcagtctgagatgccggaaatttttatactgtcacgtgacccacatgactaagcatctgccgccagtcctacaaaactacacagtactattgattcagaggatgatcgatacataaacatcataatctattagactaaagcaaggagatgcgcacttctgcccggcctgacctcgaatgcaacaacaaacataacacatgaaacacaaacaaaaaaagcagacagacgaaggccaggtaccggacagacgcggttgtatcaagcaaaaatcacaagtcaagcacaaaacatagacgtgacgatcctgacaaacgttgcatatctcgaatcgtcagtcagattaagacgtaaataagacccgaagaaccgaagacaaagacgaagaccgagaaccgtagaccgtagaccgtagaccatagacgaaaccgaaccgaaagcgcgtcactcgtaaccatcaattagcatcgtgaagccatttgaccggctgtcccgctcgatcaccaaacgcctgctccagcgagaaacccagctcagtggtagtcatcaggtctatgtcgtataaaatatcatcgcaaaagaaaagggttaggaaagagatcacacacgtgagttggcccctttagaagcctacaaactcatcgtcaaccactcccattcctggcttgcgccctgaccagcagcgatactgtggttggctgggttgacggccgctggaggcatagccggcgccaatggaacaaccttggatcgtccaccggacgaggtactggacgggctttccgccatatcaacatcagaggccttttccagcctacgctgacgtttaggagccacctgtaccgcaccacaaccgttgtttgtgcccggagacgtagtcgccgctgagctagatttaggcggggcagccgcaataggaacgactccagagcctcggccggagctacccggcattgctgggggagactcggatgtcgtattgctttgggcccggctcgaggtaggcgccatagtagtgccctgctgagccgagttcctgcgggctgacttttgga

SEQ ID NO: 2483 - DNA, 2123 bp, Emericella nidulans
  unsure (1)..(2123): unsure at all n locations
ctcttactgtctttcgactcctgtcacgagttcttcgccaccctgggtcattcaaaccccgagctcaacatcctcgaagtcggggctgcactgggagtgccacggcgcggtttctggactatctgcacgcgccagatggaagtcggatgtacgcgcggtacacattcactgatgtctctgctgggtttctagcagcagccaaggagcagttttcgcgatacgatacaatggaatacgctgtgctcaatatcagtcaggatcccgcgcaacaagggtttgagctgagcagttacgatctaatcatcgcctccaatgtaatactggtcctgtggtatgcggttatgtaccctgttaatcatataattcctaggtcgtccatgcaacacccagtctgagctgctccctggccaacctcaagtcccttcttgcccctggtggccgcttgctccttcaggagataaccgagggtacgtctcattcatccccggagcgtttcttagagttctaatgttgacactgcaaaagaatgtatattggctgagtacatattcgtatgttaaacttcttcagcctttctcttgtttatgctgatgtgatgtagggtctgctgcccgggtggtgggtaggcgaacacgaccagcgaatcgagagaccgtacgtactagtcgatcgctggagagaggaactcacaggagttggtttcaacggcatcgactttgccatccacgaacaaaacagcccggtcgtgaatctggtagcgacctaccccacgacgccgctgggagcaaatgctgtaagcctactcgtacaggagccgcgatgccagtgggtattagatgttgagaagatcttccaaaagcaagggtataaagtcgagatatactcactagaccaaccgccaccggctgaaggagaggtggtatccctccttgacgcatcgggaccattcctattcaatatgacggagggggatttccagcagttgaagaactctatactcagtgcctcggttaagcacatcctctgggttagcaaaatgtcgcagtttacttcaagcgatcctcgatacgggctaatccacggatttctgcgagccttacatttcgaatgtcattctgaaggcaagagcttctcaacatttgacattgaagaattcgacgaacggtccatccatagtctgttgaaggtccacgatcattggcgccgggcagcaccgtctgaggagtctagaagagacgaatatgcccttgtcgacggcgttgtccaggtcagcaggttcgaggcaaccgatattgagaaagagcttcaaatccccgtggaagatacggctcctagaaggctttgcattgaaaccactggtctcataaattccttgtattggaagcaagaccaacacattatgcctggaaagggtgaagttcggatcagagtcgcatatgttggattaaatttcaaggcaagtcctcagacatccatggcgatgctaatgggctgacacaaatcaaggacattatcaccgccctaggactaattgcgtctcctgaccagctagggctggagggcagcggggtggtcgagagtgttggcactggtgttaccaatgtcagcaagggagatagggtcatcttcttgggcccagggtgttttgcaacccacgttactgtgccagctgcaaaagctataccactcccaggcaattggtcgctggaggagggggcaacgtcgccgattgtctctttgacggcggctcagtgtctcttacgactaggaaatctacgacgagggcaggtaggttgatatgctatggccgatgtatagagttctgacacgctggttcagtctgtattgatccacgctgcggccggaggcgttggaattgcggctattaggatctgcaaaggtgtgggagcgaaggtagagattttttctgaagcgtcgtcaattcacactgacagacaatagatctacacaacggttggcaacgacgagaaagcacagtatttggtcgacacattcggtatcccacgtgcgcacatctttcattcccgcaatgcatcattctatgatgacctcatgcgtgaaaccggtcgccngggggcgnatatcgttctcagctctctcag

SEQ ID NO: 2484 - DNA, 1460 bp, Emericella nidulans
tcctggagctggttcttgactttttctgaggtgcatcaagaacaatacgccgtcactatctaggccttgcaggagcagcgaacaggcctgggaatagagcgaaagggtctcattaccgactgagagtgaccttggcacagacacaaaattgtcggtggtccctggacactttcgactctgttgagaattcgcatctgacagggtaggcctccggcttcgtgaagcagggttatgtgccgcttcattgcgcgaggtcttcggactcggaggactatccgatcgagtcgtatccgatagagagagtcgcgcgatatcgaactcgctcgagggaacaccgttggcagttctgtccggctttctgaatgtccagtccgtcgctctaagccgcgtttgatccttgacaaatctcaacaacgcatcgagctgccgttgggccttgaggccatcttgcagtgcccagaaaccatcagagccctcgacagactcgggcgagagtagagattccatataaaatctgcaagcgtttgccacagcctttctatgatgtttcctgggcgtctgataaagggattggtggcatttcacgcgaccgtggggtgaggaggggaagcttgtgctatgatcattcatcggcactgtgattgtagattatagcatcgcaaattgaggaattttcagcgaggcaatgtgcacaatcgactccgcatcgcctggcaagtctaaatagtcccggaaacatcagacgatatggaaccatggcacaagccgcgaggcggaagagggtccagaccatgcaccatggtttaaacttgatgtcgattctcaatgaaatctggttcaccagtcaaaatacagcattgccatcgccacggcaaaggagctcttgaggctacttgcgcctggctcccggaggccgcctattggttcttggtggtaataatattgagtattatcaagatcgttggagaatcatcgttgacaggtaaacattctatcactgtgaggagatggagtccaattgacatgattgctgggtgcttgaatcaagatagtggatgatggcacgagggggtcagcgactttcccttatcggtcccgtgactttcattggtgtggagtatatttccagctcttcgatttcgtcaacatttggtctggctcgagtttattcttgatatataatcaaccggggaaggtgattggccttgttgcctgttaaccaaaagtcaaatagcagaacgttgacgcagaggatatgcctacacccgagctgccgccgtccttgcagtaggctcttctcagaaatgcttaacgcctatagaaccacatgcttgagtcaatcaatcctcttgaaatagaatttctgactagcggtggttgcaccactatcactatcgatgtggttatactaatgtggagttgtcagactcaagactccaagcacttaggaatccatccaa

SEQ ID NO: 2485 - DNA, 1954 bp, Emericella nidulans
tgtaggcggaggtggagatggaggtgatgatcgcacacgcgtggaatccgagttgacgccgaccgggcgtcgagagtgtcgcgtcccggcgaccgcgcttcggattaatcggttccggtcttccggtacaccgccttttcctcgtacgtcagtcacccactgctgatcaactacatcgtatgattcgagtattcattatttgattgatcattcatctaatttatttaattattcagttcaaaattggcgcagctcgcatgattttgtctcagctctgtctgatatcttcatctgtagagtactctgcaccggccactgcgatactttgactcgaccttgaatccacatgtgttgctactaatatgatcacgtgcaagggacaccatgtgccccatcccaatggcatgatcgcactctgcccgcgcaacctcacggaggcagaccaggtacaacgtgtcggtctcccgtcaagcactacaatcagcaacattctgcgctttaccgtcgcccgttccatcaggaacgaatcgcttcggcaggggtatgcggctttggctctgctccagcacgtgatctggtgtctcaatatattgaacatgcctctaagccgaaaagggctaacccctttggagaggtaggttctgactaatatactggttgccgcaatatctgtcttggcaaggcctcacgaagaaaggcgccggtcgacaatgccgtatacgaatctctaccggcgagcgcatagccccggtagatggtcggcagctctccggctcgcgatgctcatgactgtcgcgcctgcggtttccttctttcgcccctcgcgcgggatggcaggcagtttataccgtaccagacttgcctaccaacgttatagactggcttccctgttcggtcgagaggatgttctcgtagtataggtgtctcagtacggaattgtccgtaaactgcacgagatccaatagagattcacacgccgtcgtcatttttctcctatacacattcacagtatggaattgaagaaagcaggactggcaaacgttgctatgaaacctctgcctcggcgccttcgatcaccagccgcttggcatgagctcggggtcatgagcgcgtcgataatgttcacctccagaggcccagtggagtgcagcggtcgggtgcatagtacgatatagtcttcgccaggagaagcgagtgcagtaagccgccttcaggccagagctgatcgtggtgatactttgggtcttcaatgtacccgccggcgttgctagtcgcggtaggtgggcgagcgccgaaatccaggttgaacgggtcgctcgtttcggcgtcggatcctgcgtgcgcacaggatattggtccctatcccgccaactttttgaaactacccggtaccgtcagtatagacgaggacaaaccttcagcttaggatacagcccttttgcgtcgtgacgccgacaggctccaaatccaggtactggatccggttcgaaaatgacaacgccgtgatcgagtcgcggtagccccggtaaattaaaccgcaccgtaactacccgcatttgcagccccggacgatcgctctcttttgttgcgtccgcttgtagggggctttggaaggagtcgccttctgatacgtcttgacagcatgttgtagaagtatcgttggtgaaggcgatagctgcacgatccggctggtgaagactgaaatgacaactctgtcataggtatgcctttctcataagggtgcagccagattaaatatatacgcagggcctcattcgcgtagcgctgtgctgcaggtgcctacccggattcttccaatacaacccaaatgacgacctttttcagcctcatcccctgctgaacctcaaccccggatctcagcttggcgagagagtacaatcagttttgcggaggatcagccgggctgttaaggccgcgacaaaagccatggcga

SEQ ID NO: 2486 - DNA, 1108 bp, Emericella nidulans
gcaacctcaaatatagggcttgttccgggctagccttaccgtactaggttagtacctaactgatttttagtaaagccgtctgctgactgtttaacgttcgattgcatgccaattaccatgttcccgctcccgcgcccaggcgtcgaacccaatagagcagttctggcgacctctgtaagacagctgagtatgggcgcagagcagactgtggccagatccacgagaacggctgcctgattgactactagatgattgaaagcattgcgtgtcgtgatgtacggtctccaaaaggtcgaaagcagaatctggtaagatattcaggactcctatcgtgaagtatatggaattacattcaagagaaagggcgatcaatctgtcctgatcacaacgtcatgaagatattaaaaacattggccagttcatcgagagaaaccttctccgtgcagtcgtagagatctcgtcttcgctgactttcacccccgaaagcctgggtaaccgttccaaagggggatttcgtggacggcccgtagcgccttgctgtaaagccttctgtcacagttgctcgagtgatagcgggccaaggagcctgcccgtggcagaatttgaaaaagtcttcagcaaacgcagttccaactgcttgctgttctgccgacaagaactcgcggaaattctggaagaggtacgaaacgtcgagaatgtggtttgttcggcctttccactgtccttcccatgggtttccctcgttgaagtagtaaacgtacgcgtttcctttccatccttgcgcgaatgacagaacaggggtgaagaacaagacgtcattgatatagttcagaacggcagggtaagcgtcatcatcgctggcactttcatcagtaatgccgtacgatttcaggattttcgtcgaccacggccggttgagactggagcgcggtcttcagagccataatgaactttctggcgcacccaatcttggtatgcgggaataagaatgcgatgatgcttgcctagaacgtgattaagtcagatttggtacatatatgatgcacttacatccatctgagaatctccaatcatgaggtcgatgcaccagttcttcccttttgggacg

SEQ ID NO: 2487 - DNA, 983 bp, Emericella nidulans
gtgacctgcttgaagggacggtccattgagaggggttccccacagcaacaaatggaattcagggtctccatatcacggcggccagatccattccaagcacaagggttgtaacatgtctgctttgcaatatcttggccaccattccactggtgtgggggaggaaaataaagcattagggtgagctcattgttaaaagaatcaggaccaatggaccctgttgtcgaaccccatcttagcataaaacgccgcatataccaaaaagcactcgagtgtatattgtgtttcgtgcagcggaaaacctagggcatgagccgatgaagcgtgaagtaaaacagatctagcccgctacatctgccaccacgccgagactccaagatcaaagcatttacccgcaaaggaacctctctctatatccgtccgaagaagccataaaggacgacgcgagagaagaaacggaagcaaacagggtatgtataactaaaggataaaaaggcggttatcgggagaaaaggagaaaaatacgacgtggcggcatctaggatgccctggggaaacagttgcaacatcagcggtatatctgcattccaattcccgaaccgtactgggctcggtacacagaaatgataaggggtatcggcaatgtcgcccatccaggaaaccaagctcatccaccacgctaaagaagagaaaacaaaaaaaagagtctcaaaccatgggcacatcatacatgcaatcctgacatagtgaggatcatgaaggtaatatcagacatcataccagcataacaatataaacagacatgaatggaacgaaggaaaaaagatacacattttccaaagccagccacccagaagaaatcaaaaagacgatcgcgcaaaactcagccatcttcatccgagggaccgccggactctgcctcgctttcgtcggcattgttactggctttctgggcgccggtctttgctttcttcgcagagttaggg

SEQ ID NO: 2488 - DNA, 2453 bp, Emericella nidulans
tctagtgccttctgttatagagtatatcctacctatgctagagacagggccattgcacaagacacgtaaattagtttctctatcaaggatgaaaccgcttttgaagaccaaaaatgtacatatacaactataaaccgggcaggacctgggaattgagacaaagattctaggtaggaggtatatccaagatgaggttctaaatctttatcacattcgttttcaggcgtggcgaataggtggaggagttagttgaggtggtcggtggcttagaaccgcaaatcccagccaatctgaggacctaacttgggaagagactcggcaacactttcaacgtctttatcacctctaccactaacagtaagaacgatgtccttaccctttcccatggtcttggcaagctcgatagcaccccaaatggcgtgcgaggactcaagagctgggatgataccttctgtctgagccatggtgcggaaccagagagagcctgggcgtccgtagcggcaataaagtgcgcgcggtcgctgtctttccaattgctgagctcggggccaacgccgggatagtcaagaccagcggaaatggagtgcgtctcagagacctggccgtgctcgtcttgcaggatgtaggtgcggacaccgtgaagaacacccttgctaccgccggagagggtggcggagtggcgatttgtgtcgataccgtcaccaccggcttcgacaccaagaagcttgacgctagtatccttggagaatgggtagaagctgccgacagcgttgctaccaccaccaacacaggcgacgacggcgtcaggcaactttccaatctgttcttgcagttgctgtttggtctcttcaccgataactgactggaaagtgcgcacgatcgttgggaatggatgaggaccgatagcagagccgatgatgtagtgggtcgtatcaaggtcaacaacccacgcacgcaaagcctcgttcacagcgtcacgcagagttcgactgcctgcatcaacggcgaccacggacgcgccaaggcgcttcatacggaaaacattcagggcctgacgacgcacatcctctgcacccatgtagacaacacacttcatgccaaacttagcgcaaacagtcgcagtggcaacaccgtgttgacctgcaccagtctctgcgatgattcttgtctttccgagtcttcgagcaagcagaatctgacccagagcattgttgatcttgtgactaccggtgtggttgagatcctcacgcttcagccagatattggcacctcccacatgctcagtcagacgggttgcgaggtgaaggctactggggcgtcccatgtaaggatagtatgagcgatattcctcccaaaatgaagggtccttgagggcgctatcgaagcctcgctccaactcggccagacaatccatcaaagactcggggacatactgtccaccgaattcgccgaaacgtgcaggtgttgcgctagaacttccaccaccgttcagagcctcaagttggtctccaagaccaggacccgaaggcgtatccttctccgtaatgacatcagtaggctgtgacataggaggggtttcgatcttcaaaacaggctccagcacgttcacctcacgagtcaacgctcccgaggtatccctttctagtttgcggccagtaacactagacaagtactcctccgctttttgagccgcctgacctgcaggggcttctccaagaacggtgataatctggctaccgatgacgacaccttcagaaatctcctgaacagaaaggaagtgctcgcgggtgctgacaccgaaaccaagcgctgttggcacgttcccggaccatttgtggacacgagcgagcagttcggggatgttcgagctaagggtcccggtagcaccggtcacacccattcttgagacgacgtagatgaaggaatcggcaatcttgcaaaggagtttcatgcgagactcggaggtagcgggagcgattagtgggacataagaaagactaccacaatattagtgttattgaatgtgcaaagcgtcgaagtgagtaggcataccctgtactggtgcaaagatctctgaagcgaacggcctcctctgggggaagatcgaccatgatgaaaccattgacgccaacctccttgcagtcccggagcatacgttcttcgccatagctgagcatggggttatagtatcccatcagcataataggagccttgaggcctcgattcctcgcggaggactcatctccagtactgtcgagaccgtgacaccattggcaagagccttagtgttagctttttggatggtcggtccatcagcaataggatcggtgaatggaacacccagttcaataatatctatccaatcatgtcaacatcgttagttccttgtctgtagaaagcgacacccgacaactgagtctcaaagagtcaattgaagttttgagaagaagtac

SEQ ID NO: 2489 - DNA, 842 bp, Emericella nidulans
gatctctttttctactcttgcgctatgttgtcggagaggcttcagttgtctctctcgcagttgtatttttagatttaagacttcctcctggatgctgggaatcgaatgtgaactgagtttaggaggccaaaaatattttgtctcggccaacgtttaggtctttgtagttgcccacaacaaacgaaggaaccctgtccctttcctcgtatatccagaattgccaattatatttgctccataccaatatgagatacaagtacacggagaggctgaaacgcaatcgagcggcacaatgagacggttgtcaaaatacctacattcaccgactgtggctagcttcacagaacagacagaaacaataagccaggtaagaagcctcacctcaaaccaaggagaaaatggcacattgcaagatggaaccatctgcataaccaaaatctaacatacgggttcggtgatagataagagacctcttgcggttcgcgatcaacgccagccgatacctaagccatgaaatagtgtagggaaaaaaaaagtaaaatatgtaaaatcagcagtacaaatgatgacgagaaggagaatatgatttcgactgcaaaatgttcatagctccaagccttgcttctatttcttcttagatggcactcaagatctgcattcgtaatatgtttgttgcttgctcatgtactgtcgctcgaacccggcttgttcggctgattgagtgtagccgctggggcatttggcgaggcagataatatggactccggtacttcaactggtgtgcattcttctgcctcatcgtgaactttcttgagcgtttcgattattgcttacagtagccg

SEQ ID NO: 2490 - DNA, 4413 bp, Emericella nidulans
gctacatatgctcccgccattgatcgattctttaagactagatggttctcagaaaaggcgttgagctaccttctagcgaacgcccagctaatggccgaatattccgcattaatcgaagcatttaccggcaatctgagtgatcctaacgtccttgcgcggttggagagcttcgaggcatcggttgtctggagcacaatgacattatgtcgccatgtgatgaatgtatcaagtggaagccaaccagattatgatctcttagccacctccaaacgactggacgttatagaagccatgatcaccggtgaccacctggactctaatccgcttgcgcaatttccaaccaggcaacccgccgccaatccgccctcattacccgatcaactcatgcagcgccagctagacttctggagtgcaatcggtcactttttgactctacatgacaacgaggccagcgccgcgaaagaaattgatgacacgctcggccgttgccgcacgctcctggatacgtacgaaaatcgagacgtcatctattcaatcgcaatcgcgcgccatctaggccaacggtgggccgacttcccgcacagcttcccgcagcctattaccacgaacgagaaagacgccggggccaagctttatgtcgctcagaaattccttgaacaggaagctgggggcaagggcacgacgcaggtcataaagcgcctgtgcggcatggtcgtccgctcctggtatgtttcgcgggaatgaaggcatctttgccgtatgttctctccgttgtgacgaatcttcttacttgtaatatgagaaaattggtgtgctggcaggtttctgtgttacgaccgtttactagaccatgttcatttgactgtctggcattttttgtggtatgctttgccgtggagttcgctcatatatcccgtctcgacgttctcccgcgtttatttggtcgatttatcagggagatgtcctattcacggacaaggagtttttttttttttttttcccccatcatttctgcagctgggcaaggcagcacaatggcgtttggctgttatttagatagcttcatttttcttccacatattttaaccgactcattttttgatgtgccgggaatgtgagtcggttcatctagccaattctatatacatcgaaaccgcttgatacatatatagttctttagtggatctcgcttaaccaaatcacgttaatctccaactacaaatcagcctgctcggggacaggggtcttcaacttgcccgtctccaaggccattcgcacattctcaatagcccattcctccatcgcagtttgcgtctgcattcgagttaacttctgaccaatgcatatgcatattggcaggaatgagaggaacatacctcaacagtccaagtacccatgtgcggcacaagcaaaacattcggattctccacaagaccagggtgaattttaggttcgtcctcgaagacatccaagccggccgagtagaccttcccattgtcgagggccttgacaagggcgtcttcgtccataacggcaccacgagccgtgttaacgatcacgacaccgtccttcatctggttgaattgctcggtgctgatgatgtggcgggtatttttctacgcacacccatcagtttaccagtccagagtcaacatgacgagagggaaggaataagggacgcacattcaacggcaaattcaaactaatcacgtcggattgtttcaagagctcctcaaacgaaacgtatttcgcgccccctgcgagttcagcactcagttcgcggcggttatgatagattactttcatgccgaacgactctgccttgcgcttcaggttgcgtcctattccacccatgcctaggatgccgaggactttattctcagggtcgtggccaaggcgcggcggtgtaaggccacgccagtgaccctggcggagggcgtgcatgcctgcgttgaaattccggagtgcgccgatgatcaagaacatgtttacgtctgcggttgcgtcgtcgaccgctgtagggacgttggagactcgtaacggaggattgcgcgctgtgcaggcttgtgtggagatttggtcatagccggcgcctgcattcctatatcagtatctgcccccaaagaaggaagcgggaagaaattaccgcaatgcgctagatataccagcgaagaaggaagagcgttgacgagttcctcatcgaagagaccggtgatggagacggagtcgaaggtgcggtacgcgacaacgacgccgtccagagcgccagatttgcattcggcaataaagtcggcgcggttcgtggccttgggagtgactaggtctgcgagggaggagagcgagttccaggttgagtgggcgctgagagggttagttgctgggccggggctgatagaggggcgcgttggagtatccatactgcacaatgctgccgaggagtagaacaattagcttagaagacatcttgtagagagtcctgggtatacctataatgatattaggacagaaagtggttcaatagggctgcgtgaggcagggaatggggatctataacggtacctgaggaggggtaatgcggggtcacttgcggccccagcaggttgacttgaggcggctggggatatataaagcctaaagagattctccacgattgaaggcctcaaaggaaggactgtctagagaagaaaggaaatgcgatggaagaagaaaaagagagagaggaaagttggagttggagaagaatcccccacgttgtgccccacctttatcaactcaggctccgtctcgcgttatctctttccgaaggaataactgtggagttttagagacgacaggcgaaaacagccaggaaatttgtagtcccgatgtaaacattaatctatcgggcatagtgactattgaagcgcagtggccaaaccgttccctcagccatgggggtgcacctcgggctttctccgagcctcttctctagcatattcacagcgctaccgagctgcgctagacagtgatctatggccgtactcggtggtattctctttgtcctatctgtggaattgcgcagtgttgtgagggcttgccccggttgtctaccttgggctctgccatgggtgtttccattgtagaagcagtaggctacacctcaggagcgttctgggctgatgcaagagccttctcggaggactatccggaaaaaatgacggatatgcaagagaaaagaagatatagagtggtgcctacagagcgtgaatcagtttacgaagtttggagcagaatatggccgctgtaaaccgtaaagagatcagcgagatgtaggtgctgctgaaagatttgcagagaagaggcatatgcgtccatgaggaaggtcacaccaagcttggatgctcaagaaaaccctgctcaaggctgttgggcgataaatatcacgtctgctgaggcatagtactacgaactgcagcaacccatgtgtccactgctgtaggaatgacaggaatctcaagtatcataagtagcgccagtaagcggcaaactatattgtttcagagagggcctgtattcaggctggaacgggttatttccagttcttactggaatacagagctcagccctcaacaagcaccctcgtccagtcaaacttcctccaccggctctggaacccgccaactcgccggtctcctcctcgtgtccagcgtccctgtttcttaatcacctcggggccaacatctaacatgcctccaatgacctcgcgcgcaaagagatcgcctttcggccaccgattggcatcttcaacaatatggcccaatccgccgtcaagctggaaccaaacgtggaagtagggcatttccttggcaagggagcggcggaaggcgtttcggccgagaccctgcttggacttggtgagcgtatcgatgagcttgcggtgttgcgtccactcctcatcagaagagagtatggcctctttgaaaaatgccggtgaagtttctcctaggctgtaggggagggggacggcctccatagatgcgtggcgcttccggtggggtgccgcagcgttttcgtagaagatgacatcgcggccttggtcatgatacatgcgagtgaggctcttcatgaagttgcgaatctcctcccattcgtcgtcgtcgcattctaggaggttggtgcgatgctgtattgggacaatggtggcgctgccggggctgatttcgggctcggttgggagtgtcaggtagactcgtgtcgcaagagacacgactggggcgactgggggggtgttcgtgtcttcgtgatggcatagtgggcagttgtccaggatcttgttcatcttttgtagctcgttaattgtggtattcctgaggtcgatctcggagcgatgaacccggcgagccagtatggaagcattgtcgtccatgtactcta

SEQ ID NO: 2491 - DNA, 1340 bp, Emericella nidulans
gcagcggcgaatcgtactcactcaccctccccatgaagctatagagcacgcttgacctcctccatctcctcatcctaggccatattctgtctctcaaaattgccggaggcccctaccactttccgtccttcccgaggtctaactatcctagatccccacgagtcatacatcgccgactatcgggaccgcccgacccgcgtcgcggaccacggcatcagtgcgaatatgcacctgctcgccacacgggccccgaaattgagtacgggtttgcgggctgttgcagtcctgcacgcctggctaaagtatgtgggctttcatagctcgacgtctgcggcgcctttggctctgaatgtgctggtggagcggtctggaggggtggaggtggaaatgcgaatgcgatcagtttgcaggtctgaggaaccctaggttgatcgtctcgatcaggatggggacatcttgttatcacactgtccatgggttgtggaccatctggtatgggtagaagacgagcgcgtctgctccagcctatggctgcatctcagatgatttgtatatacgatgcgattgcggaatctcccttccataactgcgtttcaatcttcagatccaccagacaagtcccgatagactgatggcgttgcctgcgcagatggattatttctatatatgcatctattcttccaacggctatccggaaccgataatctcagtcgcctgcgctcgattaactgaagcaaagatcgttatcaggcgcaatttggattatagggtctcaattgaacactacccagtagtcttgctatttttcaagtattacgcaagtgctgggtactggttgtggctggatataataggaaactctaggcagaacactagccatacagtatattagggcaccaaagacacagctcagtcaaccttttcttgcatagtagcataacagcaatagcaaaattatctcgacaaacacctcccattaccatatccaatcaaacctccctaactccaacctcgatccggactcccttctcagtttgctcatctacgctgcccctaatgccagccctaattgcgtccacactctcgccctcgaggaacccctcacatctcgccatctcctcaaagcccatccccttccctccattatcactaaatcccctctccaggattctcaccggccagaacaatgtcaacacgtaataaagcaaacaacccattccgaagctcaacaagaaccccagcttatacatattcttactcccctgcgcaacagctcctccgtctcctaagctccctgcaataccatgcaccgtaaatgccacgcccccagcccatgccgc

SEQ ID NO: 2492 - DNA, 769 bp, Emericella nidulans
tggctaaagatcttgggtgccaagggggccgcccgggaccggggattcatcccggttgctaaaaacggttaggcccgggctcacttaataatgtgggcaagccaccgaattcccaacgcctctgcggcagcgaactctcacaacggggttttccaaccaggcacccatctacggccggcgataccgacatttttattctccgcgaaagtcgacacgtccttttttctggccacccgcaactatgtcgcgctttttctacggcaacgacagcgacagcgacagcagcggctccgatgaggaggagctctacagcgatgaggaggtcgagcagtccgaggaggaatccagcgaggaggatgcctcttcggaggaggagtcttccgaggatgaggacgctggaaaggccggtgccagtcgtttcatgaaggatgtgagcgacagtgaggagagcgaggaggaagatgtggtcaaggtcgtgaagagtgcgaagaataagaggttggaggaactcgagagcacgatcaaactgattgataatgctcagaagatcaacgactgggcagttatttcgtcaggtgcgtgaatatcctgagctcgggttttacatgttttgcgcttttcgagccatgcgaaggaatgataaagtgaactctggtactgatacggtgttttagagttcgataagatgaaccgtcaggtagtcaaggtcctccagtctggccccgttcccaaaatctatgtcaagaccgttgcggacctcgaggatttc

SEQ ID NO: 2493 - DNA, 961 bp, Emericella nidulans
ctgctacctctccgctggattgagtcccaatgccaatgccacagacttcaagctttctcagtggaataagctaggtacaatgcagggctttcttctagccttcgcatagcctccgggaatcgaccgtcgctttgccctgcggcatgttagccctagtttgggggaccgcttactgggccgtttctagatgagtttcagggcagtagatattaaatcataaggacgagttggaaatgagagtgctaaggtgaggcgataggagttgaagaatgagggaggggtgtatggtgagatggagcttctctaagcgttcagtgaggttacctattacgtgtcattgggcatagaggaatggatggagtccctggaaccctaataggtttggtgcgtgggatatgtatcttactctctaactcgcggtgaggcggacgggccaaactcgcccaagatatagcatagaagaatatgatatctatacctctgaagtactttagggagacaggaatggcagcgggaaatataactcacctcgtagcaaataagaagtagccggctcgtatagccatagatgaactcttcgagtcatttgtaccggtagacttttcctcgtacggtaactcatcggctaattgcggttccattctttagtcaaagaacaggctagactctgctaaatctacttggatcttactcttgtggggcagatgaaacacaagaccagctgtgttgctgcttggcacggagacactcctatatcgagttggatataggactaaatatatgaactccatatagtgccaagatacccgtctattcatttgtctgccgccgtgttagctgtattctggtgataaagaaatatcgtgtgttgaacagtgttcgagccggatttccgtcaatttattatatcgaccacgtatctattccacagcttgtacgctgttttgtgtatactacgaga

SEQ ID NO: 2494 - DNA, 1471 bp, Emericella nidulans
acagagcccttcaaagccgtagcggtccgcgaatctggtaacatcaatctgtcaatatccagtcccatagccatgtagtcttcaccccactacctgtcgcccaaaggtaaatgcgcgagaagcattgctggaagcgtacataccatgctctccaggaaacacgtcgtcccgcttttcaacatctctgcaatactcaaccgcgccgccgcatatccatcgtcctttgtaaagttcccctgcagaacccagattcgctcacagagccacgagacaagctcgaggtcatccgccgtcccgcgaagcagtgtctgcgccgtgtgcatgtgcgtggataccagcccagggatcacgatccgaccggtgaggtcatatttctcttcatcggggtattgcgcaagcagcgccgctgtcttgccgagcgaggaaatgcgattcgaaccgcgggggacgtaaatggcaccgtcggtaatgattcgccgggttgagtcaagggtcaggattgttgcgtgagtgaagagcattttatctgcataccgctctgcctcttattggagctgttttatttatcgcgtgggtgtggtttctttgcgatgttctgcagattgatgttatatactttgcgagctgggtgaatcgggatgtcggcgacctccgagactgtagataagaatggagagcatttggagtctagttggagtagggagattggcccggccagctggagctctccgaaactgaatctgtcccacttaatgtctgagagctggatttgttgatcctcctccttggtatgggctgggtttagctaatgggcagattggcgctcagttgtctagggctagggttaaagctgttggagctagctcagcgcgtcgcatctgacagagctcaagcgacgctatctatcacatagaataagcgagacagctatagtatttgacgtcgtcttcatcgtagtgcatgactgggtaatgtgcgtcggctgttggtggccatcctcaactatccattgccctcagcctccccttggcaggtatcatagaggcgttggcccactcaaggctgttacgaatgaagtataaacacatggactacgaaattggaatcgcgttttacagcaatgtgtgctgaagtcaagcatgagtgcatgttatatagtcatggaagcgggaaaaaacaggacaaggtatcatctaggacactaagcaaaccatacagtgcccttcccaggtagatcaattgaatcccaaattccaagccttcaaatttctactccataatccaattattaactcgcaagccaaagtagcatagtaagtaggtgcgtaggtaagccaagcaggtcatgagaaagacaaaacacacaccacttagtagatatacctgaaatataagttctcctgatcagtgcggtcctcgaacgcatgcgctagattctgctcatttggatcaaggcctgcctcacggagga

SEQ ID NO: 2495 - DNA, 1432 bp, Emericella nidulans
ttcccacttttcttgactataaatatcagcccagtggagactcgagtggctgaaacgacataagcgagttctaattggcaaactaagctccactgccgttatgatagtcaaaattcgccggcatttcagcacgcatggcaaaagccacaaacttgcttccatacaagtgacaaaatcggctgctgattccctaccccccgtccagatggacgcgcagatgtctcgagttagctaccaatggattacagagacctattcatctggctcttgctgatattttgcgcccaagcagcgtttatccgacgcctgccatgcagcctggaagaggatggatcgactgatccgctattcgagcctctttccctgagcggctcgctggacagcagggatgatggcgctgccctgtccatcaagcttttgggcgactttatcgatgaaagatgcgaagaattggacggggcatcagccgtgctcacactcgacgcccgactattgggccgtttgggcataagtggaaagccgtgggctccagaggggagatgccctacactgtcgccaaaggataatccaaggtacgtagcggcttgaaaggtcaacaatgggtcagatgaccgacatttcgagcagatatgaccgacggacgtatgcgatatacgaagcctcgtttccgttagaacgtgagctccgcttcaggagtctggatacaacgatccagctaagcttgaacaatacgaatatagcctgtatgagggctcatatcacgccatatctcggctcaataccttcccgtatacttatgggcgtcccattgacaatcatgttactctcaggcatcgtcacaggcgcgctgagaagctaccagagacgacgccagagtacctttaggtacgagctcggagacggcatgcaagacccggcagagtcaaccatgcctggacttggcccctgcatccactacctccagttcattttcttaacggggtgtctgaccttgtcctatccgggcttcttccgcgcggtagtgagcagcctcagctggtcgtccctgatcttcaggaactggcccgtcacccaccagttcacctacccgggcgtcgaagacgggatttactcggtgaatgcgacatacggcctggaggagatggcccaataccttggcagtactgcgacgagcgatctctggaccaactcgatcgtcaatcttgccctgctgatggtgggcgtcgtcgtgaccattttgtcgatcggtctctatcgctggctacggcagctctacgaatctcagcgcaacccggatcaagcagtcgacctgcagatcgagatgcagaccctcctccaccgcattggatggagtttcgcgcgcctcgtgctcgactatttcctccacccgctcatcgccctgtctctcttccagacgaacaacgcgcgatgg

SEQ ID NO: 2496 - DNA, 1224 bp, Emericella nidulans
ctgcagctttggatacattgagagacgatgcgagacttatgatggatgcgcttatcgagaagggggtcgatgtgaggtatgatgcgtacccggggcttgcgcattacttctggagttatccagcgaaggctctggaaggggtgtctggggtattccacgcgaatatgtatcgggcgctgcagtggatacatgagtaggaactgaagttgaggattcctgcgtgtgcgggattgatgcaagataggttaggggtgaattagcatctgaacctgcaatgcttcttcgtctccagtttgtatggacgcaagtagtgtgcctgatgaatatggatgctttgttctcgcaaaaaataaactctgacgcttgtcggttatactcctccttcttgcggccgtgcgctttgccctgctcgctgagttctttggctgctgcgccgtcgccggacgcgtatgcttcttgggactggtagcatcactattttagcattttgaagaggtttgtggttgttggtgttaaggtaaggtggtgggtttgcggtggacgtacgcgctggaaacaggagttgcgcttcgaggcttcttgtcttgcgaggtcgcgaagacgatcgttcggattcggcatcgttgctttgggagtggttgaaggctttcacgagggtggtcgtaagaatgtgcagaagtgggtggtgcgatgtgttgtttacttaccccgaggacccatgtaagaaagttcgtgctcgtgcatgtgtatataatagcattactgtaagtatgccaaaagcacagtatatattctcccaactagtacggggccgacccagatctccagtctatctaataattagcacttaattactgcattccagagctgaatcccctatgcatggaagcctgatgtacatgccgaacaacaggtagaagacagcattacttggtcagtatagtctagttgctatagtaaacacaatgtgtataaataagcatgctcgcatccattgagcaccttttcccatgaattgtcttaagcacaggcggtacaagccctgtatatcaatacatttcagatagtatgagcgaaaaggtattagcacacctttgttctgcccagtataactacggttgagagcatactgcgcaatcagacatgtacatacaaaacaacgagacccataacataagcccaagaacagcgtccatgagcagggtattgccgtactaatggtga

SEQ ID NO: 2497 - DNA, 891 bp, Emericella nidulans
gcatgtcctgtactactttcttgagtccgacaccgcacggggtgatggccggtctggactgggcgttggcggacatctcgatggcgccggcgaggaaggtcgaggggtggttccagagatagtggtcaacgtgcacgccgccggaagagtggccgcccaggactatgtgcgatttgtttccaccaaaggctgcaggtcgtgttagaagttaaaccttagcaaacgtggaggtaaacaagtatcaggagaagactagatctcgtaccttcaatgttgtcgtagacccattgcagcgccagctcgacgtccatgatgccaaagttctggctctgcccctccagttcgggcgcattcggcgaggcgtacaaactttcgcggtagttgaagttgacatagatgacatccttgcgcgcgaagttgtagccctgccactgggcattactgctgcctccagtaaccatcgcaccgccatagatgtagacaaacacgggcagttcctggttaccgcttgcagcatgcggggtccagatgttcaggctcaggcagtcctcgctctgcgccgtaatggccgtgccagacatcgcctgcgcgcacgacgggccgtacgcggtcgcgtcgaagcttccgccggggaacgaggtcagcgggacaggcgccttccagcggttctggccggcagtcgactcagcaaagggtatgcccaggtagacgttggtgtcgttctgggtgaagcccttgaccttgccctggttcagctggatggttggcgtgcaggcgcatgcataaacagcgcccagcagagccgccgtcacgctgaaaataacgcggatgaagcccatggtaactggcacagactgacgatctgcgggaaggtaacaagaaacagggcag

SEQ ID NO: 2498 - DNA, 579 bp, Emericella nidulans
ttttctgccagcatgctaattaagaaattaaatagtactgcgtgcatcaaagtcttcctgaaccattgtatacaaagtatgttcatcacaaagggtaccgccacgaggttgaggtaggtggaggtgcgtactttgcacccctcaaatactatgcggcggagctgcaatcagagcagagcgcagcacacgtggctctctatgacctgctcgtgagggaggattatgggagtgccgataccgaagaccctcgagcttgaaaaagtccaatgaggcacaacgaggctctgttgactgccattccccaggaccatcatcgtaagtctaccgagcgaatagggccggagtgtccttcgaataggaaaaggtcttttgaggcgctcctggatgaatctgctcaggattacctttgttcgtctattggcaaacgtgctccggcgaggaaattggaagactacaaacatttaggaagagcgagagggcacggcggcaaaaaccagtcgccgccaacttcttcgcaggccaaacctgccccaggcgacgctaatctgcagccattgaaaaactgcaggttagcagtag

SEQ ID NO: 2499 - DNA, 1186 bp, Emericella nidulans
gtgtcgatgtacgggtaggccatcttcggagggaaaacgcgtaataagatgctgtactttagtagctcagtaatagtccaaaagtctccagcgtgcaaacatccccaacaccgcgaaagaatgcgttatgctctatagcctgaaggaagacgcattgaagatggacgtgttttgggcggtgagaatagttggccagccgcgctgcgagcttgttgatatctaaccgatcttggcttagtataaacggactgccaatgtttatatcggaccggtgattttccgtgtcctttgtatgaagtcataccgaatggtaattttagcttgacttttttagttgccgcaaaatagaactgtgaatagcttctgtgcgaagagaaagcttatgacgcgcaaatcatggcgcctatgtcgcaggaggatatcgaatggtttaaatccacctttcgccccatcccaaaacctgaactgcccgacgactgtgtcgaatactccttacactacatctcttcaaaccccgcccccgcccttgtcgacgaagccacagatactcgggcgcgcttgactgaggtgcagaagtctgcagccgaattgtcgaaacagttactaaaggattatatctggcaaagagaggcatttcgtcttgaagccacaaagaaagacggtacgcacttgatgcggctttctcccaagtcatgtctaatgaaatcatttttagggacaacgatcctgagcgggcgaacgaactttggggactcagttgaggatgaatgggtaatcgtgtatctgttgcgcgaattgacaaagaagcataaagacatttgggctacggtgacagacaatgatgggcagtttctccttgcagaggcggcgggcgcattgccctcctggcttgagccagaagttgcagacaatagagtaggttctcagtatgatatttactattctagggtatattctaaggaaaacaggtatggatacatcaaggagacctcgccataataaagccgaagaacgaaaagcgcacgagagtgacggaaaccatatcactgctggaggcgagaagcataatcaaagacgaacccaatcgactgatgcactcaaccatgatacaagaggaggcgttctactggttgcgaaattatccgaagcaaatcagcgagaacatgcattcagctctagtaattat

SEQ ID NO: 2500 - DNA, 706 bp, Emericella nidulans
taaccctcactataaagggatcgctcccgccgccccgttcgtgtaaaaccggaagtctgtgcgtcttaagcataccctgtggaggttcctcgtgtgatgtggcagctccagacgtagatagagcatcggacgaatgcgggaaagggcaaagctcaatgacaccatcgcttaatatctccatccaccgcacaaggccagaagaccgcgggaagagggaaagtggaattgtcatcattagggttatgcgactgctaggcgagctcgctaaagcccttagagagtgaaggaacggcagcacgttttcaggctcgctgacttctggtgggtataacgtggggtttaggaaggaaggaatgacaatgcggtggactatgtgcggaggactggaggcgatgacggtttgaagcttcttcaggatggaaacaagcaaaggctcttttgttggtatgaggggtatatatgtgatgttgccaatagacggatgtgtgaggcgtttggtgaggtcgaatgtgtgacaaaatgccggtttagctgtgccatcgtcaacagaagataggctttgatcacttggacctgctgtggagttaactgggtcagcgtgagacaactgagccaaactatgctcgggtacctaccttttgcgccagcgacgcccgctccgaatcaccaagacgctcgtacctcatgcatctcatgcgctcccttt

SEQ ID NO: 2501 - DNA, 1581 bp, Emericella nidulans
atctgctttagcccattccaccgactttgcccacccgggacgttggggggagcttgtgacgacatcccatcgtggttctccagaccgactatccattgagaaattagaaacgcagaccacgtctctgtggagcggaagtgcgcttacctgatcgaagttacagaccagcctcttgcgactgctgatttgcatattcttgagcctgcgcacgccaaagtccattagtacagtctatctcaatggccgtgatgcaaatacctaggaacccatttccaccggcgacaacaagcttttttgacgccatagttttgtgtgaaatattgataaccggttcacttgttcagcggccaagttagatccatagacttaatggcagtagttagcgcattctcatgaagtcggtatgaggcggaacccactgcggaagaagctctgccggagctcaatcgcaccaccacttccaggctgccttatcaggtccttatcactactgtcacgtgctttactcttgcccgttgaaaaagaacgcgctcggccagctttgtcgccttcaactttgcgtcatccaaatttgctttaaaatccacgtacctgagagtcacccttcgagatctcaccatatactcacgctcattactactatatacttcagtatgccctccgcaacaggtaccaagcgtgtcagggtgagtaccagcgaatacaacacaggaagccaagactgaccaaaactgatcagggagtctcgatatttagacctttcggtgcgtcatctgcttctagttgactgactatggtgtaggtattaacaacctcattacagttttcggtagcgaagcgcaacccttcgacccagccacgaaaccaagcaatgtatcctcagatcatactcaccaatggcgtgtttacgtccgcggggtcaacggcgaagacatttcctactggattaaaaaagtccagtttaagctacacgaaacatacgtgcagaacgtccgcacagttgagcatccgccctacgaggtgacggaaaccggatggggtgaattcgagatccagattaagatctacttcgtcccggaatccatggagaagccacagaccctctggcacagtctcaaactacacccgtacgggcctgatgcggaggggaagaaggagcggagagaagtggtggtcagccagaactatgaggaggtcgtgttcaatgaaccagtggaacagttctatgactatcttactggaggctccggaacgcagcagatgcagaaggggaagagtgggaagaatgccaaacaggcacaacaacagcgcggtggcaggacggctgaaattccgtttaacgagacgccggagaacccttacagtcggacggccgaaaacaaggagcttgatcgattagctgaggcaaataagaccgtggagcagatgattaaggatgagaaggagcggcttattgctcgggagaaacgattggcggagttgcgcgcgagtgaaggtgttcccgcacagccattgaagaaaaggtaactggcatcaggaaagacgcctctggcgcctgaaaggacccttaatcaatttctg

SEQ ID NO: 2502 - DNA, 1636 bp, Emericella nidulans
cgtgcaggattgtggccgcccagccgatatcggtaagttttcaaacgtgtgtgctgaagctccctttaagcttggttgtggctctgcaagtgatgaacaatggatagtataatttgaggcatatacaaccaaatgtactaggctggaactccagctttgttcgaagcaatatgaacagacaggacattacaagtatgctgacatgcgagtgcgaacaaagaataaactccatgctagctggattgacccccgtttatggatatccggtcaagaggtgaagacggtcggtcggacttcttcgtccgaagggtgagagggtaaaagtggtcttccgcatcatcttcctcgcttgttctgatgctgaattagctcgagcttcctaggtagatgtgcaggacttacggaaggcgccatgcaacatagtcttcggtcgagagaccctccttgacttcttgcagtgatgcgaaatcaccgggtgtcatcataccagagcgatcgcgtggtgatccgggaaccgacaatggtcgcgatatcttctgctctgtcccgccaataacgtcaaagtaatcttcctggttgtcgaaagacgaggggtatgctgcacgtagtcagtaagcaaacaaagaataacccgggctgcgagaaatacctcgtcgaagagccaactgccgagctttgacatattccaagcccatgcgcttccagtccagcaggtcgctgagacgttccgtacggttacgctggttgatgcgttgccgtcggctcttgagggtgaagttgtacatgaaatcggtcagctggttgactgaatcgtctacgcccttcatccggcggtccacaatataaatgccgtagtccgaggagttctcaataagctcctccatatagcatccgaagcccgagagattggttgtaatgctgggaactcccatgactgtacattccgcgggagtgtaaccccagggctcatagtaagacgggaagactccaaggtgtgtaccacgaacaaagtcatcgtagtccaaaggcaacactgggttagatgagttgaggaattctggatggaaaacgattttgacgcgatcagaagattgattgaagagctggacacgccggatctggttaaggatcggatcctcggagtcattgatcatgttatgagtaacgattggaggaagagtatgacgtttcatggcgaaaagcctacgtcgcaggaggacgcggtcttggctggtgataaggtctttctcatccggcatattgtcaccctccttccaggctagacaccgctcgtacatgcgctttccaatgccttgctcgatcatatgaatcgtgtcgcgaagcgacttgacaaccgcttggccttttagtgactcgacagtgagtgacgaggtctgcgctggcatgatgatgaatgctacaaccgtggtcttcgatccgctggacttgagacgatgattgagacgcgccagcccttcgataaacatgtcaacacccttgttgcgaaattcgtaccgaccggatgtaaatacgtaaagagtatcgtcaaaatcaaagtcattgtgtccatagaaatgccctctgacaaattcattgatcttctcttttgactgggagtgcaggttttggactcatg

SEQ ID NO: 2503 - DNA, 932 bp, Emericella nidulans
gggcagcgcgtggttataggagcggactcactggctcacggagccaaatttgtaggtcggaatagtcaaacccagagcgggagcctcggcgaggtctctgatccaagaaaagacagattagctttcaataacagaaaacggcgtagtatatatattgatgacctacatgatcctgaggcacggaagcaaggggtggtgtggctcctccgtaatgatgctggtacatcccctggggtggtgggagcgttgtctccggccccgcttgaggttgttgctgggtaggcaggggttgaccatgagcaccgtaaagtacaacgggttctccaggacgtccgttttggccattcctcaaatgtgggtatgcggcttgaacagggacgaaagcttgggcttgagacgagacgggagtaaacacgcattgctggctgaagcgaacgcagttggtgcaacgtccatctgagctatgctcgaaaccagagcatcggatctgcgacgccgactcatcagctatttattcctgcataacagttccggtgtaccgtacctttcgtctccgacagtagcgacacgcaatagcagttctctgtcgaggagcagcctggtagacgacacctcccggtgctggtgcgcctgaaggcggaggttgctggccgtatgggggcggcggaggcgggggctgctgaccgtatgcgacatctggacgataggcccccgggggaggaggaagttggtaaggcggttgctgggggtgcatgggatgcacggaagccatgttggattgaggcggtgggtattgagactgaggaggatactgcgactgagggggagggtaatgcgctggcgggggcggatactgatgagcctccgcgggcgaggatacgacgctggagggtaggatgatggagggtactggacgatcgaagtcatgatta

SEQ ID NO: 2504 - DNA, 914 bp, Emericella nidulans
  unsure (1)..(914): unsure at all n locations
ttcttacctgggtttttcaaaaacttcgccgctccttttaatgtcgaggtctttcgtgacttagcttcaagagtgaagaaatctggagcgcattccgtcagcaacgaaaaaccagaaccaatgtcctaataacatactgtcccatctcttcgcctttggtttggtgtaacaggcctgtcatatccacaagtcagccccagaatttatgagcggctgcaagcactgcgggctcaccggactcttgaacatatcactactggtagcaggagcaaccccagcaggcattggggcgctcttcgccctcacagcagcaattccatcgacagtcaacggcttaggagcgccaatgccgttggtatccatgtccaaagctgccggcggagacatcgcagtgctctcgatcagatctcaatgtgaaggccgaggtaatgtaacggtgatgggacagaggttgccccgtattcagtgtcgctgatttgtattgtctgaagaggtttttacgttaagttgatgcagatcaattaatacgatacctgcgtcataattgattatttgacgtggtttgatggcctccacgcacgttgtgatatgtagatgataatcattatcactttacgggtcctttccggtgatccgacaggttacggggcggcgacctcgcgggttttcgctatttatgaaaattttccggtttaaggcgtttccgttcttcttcgtcataacttaatgtttttatttaaaataccctctgaaaagaaaggaaacgacaggtgctgaaagcgagctttttggcctctgtcgtttcctttctctgtttttgtccgtggaatgaacaatgnaaacccctttctaatttttttttgcacccttggtaacatcaattgcccggatcaaatcggtttcacaaattgatc

SEQ ID NO: 2505 - DNA, 2927 bp, Emericella nidulans
  unsure (1)..(2927): unsure at all n locations
agtggtacagggaacaaatttaaagctagaatggggggcttctgcctttcgtttaccctgggcaaaaccttaaagtttccttgccgcccttttaaatggtttttgaacctcgccaatttgaaaccgataggatataaacggcactaaaattgcttaatccctattaccaaaggcgatcccaacattgaatcattccccgggaagtccaagattcttcccatttttcggtcctccacccaacttcgcctgggtcatgttggagttagccaaaagacgtctcctacaatccaaagccgagtcaaaaccggctcccgcccatcccactttagttccgcaccttgtcacccgctcgtcaggaatcttcccgtggggcacagaaccacatgttgtcgaggagaatgcggcgtctgaggtcctggtgcttcccacgccgccgccgtttgcgcgttcgtatggatgtgaacatcaaagtcgacagagcgtaatttaggagaaaggtgaagttgcgctatagacgattttatgagtatacccatgaatataatgtatgtttataatgctgtatggattagactgtcagcttatattttcaaggcaaggcgcagcctagcccagaagcctgagagcgcgcaatttcagcttgcaatctagtatgaacttctccattcagcagtggcctgcgatccttaccaaacctgggtgaattgcattaatgcgcctattattattggcgatccatacatactcgaaactacatatttcacagcactggatagcgtgatcttgaacacgtaagacgggaatgaagacaggcacaagacgcagtttggtgactgaggcaatagttggtcttattgctctatcgaagcgacctctgggtgatgatcagccttacctatgttgtttgaacatcggcaggtaggggttccctcactatctcaaccattccgtcaatcattatgttatactataagaaacttaaatatacgagacttctcgctccgcgaattgagtatcccagggttcctaaattgcgatttcacagctttatagttccatttgtattcctatttaaaaggaacagaccttccgtaagtcaagatgcaaaaccggaaacattcctcgcgcctctggctatcggcaagcaaggcagcagcgcaatcaccaataccatttagcaagatgtctatatcgaaatcttagcctactctatcaactccctcagcgcgcaaaaaattgcaagcagtcgctaaagatcacttagtctaaaacaaaccagacattcagccattcctgttctcaagatggttcactcaggtcttaagggcttccggctcgattagtgatataagagaggatgttattgaggcgtgtaatggttatcgactatgcaccgagggtgcataataatgatgcataataacggactgaaatttgagagaggatgtataagaagtggccagtctttttgtcctgatctgacccacaaatacaaactctggtcttggcacaatatattcacccatcatagtcacaacacagataaccctctggaaggcaagcagtatccctctcgaagcacacattaaataagaaaatattgttgtcaagccaattcccagttcgaccactggcattcgtgccttccccattcgcacacagccggcaacaccagacgccataggtcaagtaaaccacaacccactgctgttctgcgacctgccaaatgacctactagcgagaaacatatgaaggcaaccgtaaggcaaaatgctggattctgcagccgctcggttagacgactcgcgagattgttctctagccctacgcggtcgaccataggcatagtagtaccaggtattaggtatcaatagctatctagtgcaagtaaaacttgccggcctttttagactcaaaattgaaaagtctttatgtagctcactcatctcgccgtcctagttgtcataggagatgagcgggaagggctcagtgtagctgacgttgtctaacagacctgcctccgcagagatggggttgggcaatattatggagatatggagatcaccgagatctggccctgggccctgaggagcccgaagatcagtctcagaaaagtggctgtgctaagcttgttgaggcggccacgttttatcacgattgtagtcggcgcgggcctttccgcaggggaagcaatcggaaatgtcgaggaagatgggaattgctgaggctacttcgctagaattagcaaccgcatcttgttataagcaggcaaaattggcaaagcttggggcaaaagtataggtttcggatgaactagtcgggtttgtcctatatctcccggtatgcttgattctgcggcgctacataggacaaggatgacggagatcttttcctaggggctagatggtcatcctttcagtacaagacccgcaaggtctagggattgatccggtcaagggtttgtgcactcagggctgttcgccggctggtggtatgggcagcaacgtcactaataccctttaactcagatttaaagatcaaagcttatggaccggcgttgagtgtctcatgatgttcgagagatagcatgaaatatttattggcagcactatttgtgtatcctagaagcagacgcggtagtcgttggatatgtttataaccttgtgctgccaatgaccattcctgggtatcatcaacgacctggtgacgagctgcaaaagttctgcggtgaaagaacgatctggctttgccatctataccccantatggtattagcatattcctcggactattggggtcatgcattaggttcttgcacgacgaaccatcatatggcaccccagggtcataaaccatttgtgaatacccgaaagctctggtaagatacccgagcaaagagcaaattagcaccttgctctagggaactc

SEQ ID NO: 2506 - DNA, 1256 bp, Emericella nidulans
tatgattattataattctaccccgcgcatgacgtcgacaggctacgatccatacttgatacggcacgccgatcgatagatgccaggtatatttatagaacaattatccacacagaatctcgtcaagagacgcgcttgcgtcctcaatgagtctgacactttgcagcacgctcggcgagaccccctggcccggcacttgcatccaccgcagcaggtgcttggtcagattgggcccgatctcggtcacatcctctgggagacatacgcgtagagagctatctgctgcagtcgcaagcgcaatcagcatcacggacgccatactaggtatgagtattcagtgttagcatattctcgccctgtgcagagagaaatgacatacgagagcgagcaaatccacgtgtcgatcataaccgtctgcggaaacgcattcaggttctgcgcgtggagacaacaggcctccaggcaggtcttacatccttcatagaccatcggcgagatggggtccgctcgcgtggtgagtgagagcgccagagtgaggtacggccggtagatcacgcttttacaggtcagatagcgttggcggaggaaacccgcctccatggatccggcgggagcgcggctaagatcgaagtggaatgcagacggcagcaagtccctccatttattgagctggtggtccagttcggcgacgaccggcgggaactggttgatatcggaggcgacgccgttgttgcgtgcgtacaggagatcatgcacgcggttgagcagacggcgcatcgagatgcaggcgaggaagtagagcgaggattcctcttctgtgctggaggaagcgtgtgtgtggtattgtcccggtagggggatagaggattcgatttctgcgatcccagtatgcggaagcgcggcgagctcggcgaggtagtcgcttagcaattagctggaagacagaccttaaggtaaatctgaggctctaaaataaagacacacctttccaggatatagcaagaccagaagatgcggcgaaggcattcgagtttctcgctaggggtgtcggatgtggaatacgagagcagcaagcggcacttggttgcggccgcgctgatgaacgaccaggcctggattggccgttgcaaaaaggcgaagaagagcctgaattgacgccattagggtcatggttgacccgcaccgaggaagacacttacgctgtgtagaagagacactgcaccgcctccgtgcaggactcggcctgggcgagataga

SEQ ID NO: 2507 - DNA, 2805 bp, Emericella nidulans
tcttctatcgatttcgaccacattctacttgaactgagttttgctaaggaattagcaccttggctagacattatgtacaatacgggtggtagggatggttgagtgtgcaagggtgctggtgagcaaggggggtattggtaatgacgttataaaccaggagtctggacagtatacacattcgtcttagatagttaaacagtcgggtgatatttcgtagctaactagataagggacggacacggtttgttagaggcaccattcatcgacattgtcggttgcagttatgaaaggcttgtcgatttgtttgatcgcgtggtcaccgcataggatactaagtgctagcaattagccttggctagatcaaacctgttccatgaaacagaaggtacttaccaagcttccgctatctacccgtccagttccttcacaacctcctcacgctgggacgaggtgagtgcgccttcattcagctgagactgtagatctcgtatatacttcttctctcctccggcgccctcgagcacctcacgacctaggcaatcgctgtggaacgcgtgctgacatgggaaaacgaagaactgccggctaagtactggaagcgagcaagtccagcacttctcgccaggctcaacaatcgcgtaccgtgtgtcgagggcggcgatttccgaccggatctggcgcgcggtttgggccgagctgtccatctcctgtcggagcgcatcaatgtgccgggagtagtcctctagggcactgcagatttcatctttgaagtcgtcaatgacaacgaagtccgggaaaaatgggatgagatcctcaatccgaagcagctcgcatctacgaagaaactcgatagcgtctttgatgcctgtgtctgattgccggatttttttctccgcaaccaagagccaaagcttcttccgtagcttattgtttccttctggtcggtcagcaatgatggccgccagctcaatgtcatcgtgctgtaaagccagctcaacagcctggagatactgtcccatagcgctgtaaatatggatacatgactggaaccgctggtgttgtatgcaaaggcgaagcgcaaagtcggcatcatatggaggcggggatgatggctgtgactgaaggtatgtaagaagtccagcttcagaggacgagcggcttgaagcatgaattgatatgagcgtgttatgcactgcagccgtgggtctagggtggttgacgatgataaagttaagataacgcaccgcttggttttgactcagcggcaccgtcactgtgctgttatagttgagcaacgcggtatgagcttctcgggctcaaggttggtctgtcgcatcaagatgttgactagtccggtcgctgcgtgagtcatcaagacactgctgtgtttgtagaacacttcagggtcactctgcctctgcagcacattgagcgcttcggaccagttttcccgttggatccagtacgacagaacgtagttgtgatcgtttaccacagtggcaaagaataacaattccttctcacgtccatgactgctgatgatgtcgtatgctgtcttctgatccaggtcagacttgtatttggtcacaaactcttgaaactcatttcgaacggcctgcagttcgtgctcgatctcttcagtgcttgacccctcggcaagttccgctttcgttgtgatattgtcgtcaagactattcagcttggtcataaagacttctataagccaacttgccaccatggtcctttgcatcgaggaggactttttataaaccgagagctgcgaaagcaggtactttcgtagggcgtcgtgctggccacgcttgatgagtgttagacacacatcttcaaatgctttactgctcttgccccaaaccccggcggcttctatatagcgacctttgctcgcgaggaaatcgccggaagcagtagaaacagcatctttctgggagcttgtacgggcatatcgaagagcctcctcaaacttttgcttgcgcaagaagattttccacacgtctcggtcctcatcctggacacatatctcaaaaatgtcctgactggtgaaaagccagtaagtgcctttcattgcgtctgtcacaagacccagagcagcttggcctggctccaggacctcttgatcaaatacaatttcatcgttcatgcgattgacagcaagcactcgcccttctaccaggactagtatgtgccactctgataacgtcatggcggttagtgggttctgaatcagcttcttgcctcctcttgcggattcggttgccgggaaaatagaccgcggaagcatacttgagctctcgaagggcttgtgcaacatgtctaatgaatatggaagttgtccatggtatacaccttcagaactaagccatgcaaactctttgtcacgatgaccatttagatggtgagcattcgagctagatggcgaaacaaccaaatttgacggcgcggaactagacggttgtccaatctagtggataacgggagtttctcgtaacagcaggtcggcgtatatagtacccgcaccttctttcgggatgaccggttcgccccaagaaaccgatagtttccatgcgtagccaccaatatccgtctttgttggcttttggggcaccgtctccgcccatataccagtcatgtagacccatccgacgttatgtatatcagtggcatatctctcctccgacggtaaatcagtagatggctcaatatacgtttccagactgcccacaccgtgccaatattcttgggtaaatgcaaacggagggagggactccatggcactccgataggagt

SEQ ID NO: 2508 - DNA, 2173 bp, Emericella nidulans
atatgaaagagtctgcgcaattcagcgaaccgtgtgaaaccccagtcgccctcgtcctggttgaatctatgagtggcggctataatatatttagtgaaacagttctgcaataaatatttgtagactcactatggctgatctgaatggttggatcgttcgggttccagagaaccagggcgaactgcacacatgcgtaccaattctccggcacctcgtcttcccacgcatgctctaggtagaaggaagcgtgttcgacgtggttcccgtacggaaagaaaagtatccgcctgcaatgagtaagcaagccactcgagcggcaatgcctacataaactcaccatggtgaacctccgcactgaaagatcggtccatgctccttcttgcttagcttccgccagttgctgatagaccaggtatgccaagtttcatccgcagtttcaagatccgggtctttcgggagaacgcgagccatcatagccgggactgccaaacaatcatattttagaacaatccttgtaaattatttgagcgcatttataggtcgccagcatatgactgttgcggggacttgtcggagcagccataaattctggcaggatagatgtgcattcgccgcgacgagaaaggtgtggtgggaaggcccttacagtcatccgcggagggttctgcgtttagctcctcagagccggactgcgagacaacgacatcatcggccctgtcattctggtactgttcgtattcatcaaccagcattttactatctgcgagctagacgtatttaggcatcctgtcagcaaaggctctcccaacacacagatttaaacttcggtattgccgcagcaagaaaatagtcgaggactcacgttggccatgagggcagaaaagtgcgctcgagcactcgaactacaggaagttcgctgctcgagaatggggtatagaggacaagatctaagacaaaagaaagattgttctatcccaccggtcggggcaatgaaaagatcggagggagagagcggagatgcaaagaatatctggttctgacgttccaggtcaagggagttgcctactcagaccaatgatagcgcatatacggcctgcgggacaaagagattattaagagcgccagcccggcaaaggaaactgtaagaacagacctcctacttgatattgctctatcctttattgctcttccttttcccagcctaacaaagtacctgagtgggcctcccctttcctgctttgatctcttcgttagaacgagaatccagggcacgcacagtgatatcataatattttggcccatggtccacccgcaattatgaacaccaaccgtgggcataactatacaatgccaatttgtgaaccataccatcaattagggctacttagggtccttatctggatttcatagtaccagtatcgcttcaacatttgctgaggccagtttactgtccttaaaacataatactgaagctctcgagataccaccatccagtagtggtgggatatgcagagagattggctgatacagaacggtcggacggtcacatgtcagaccgggaggtctcaccgcccagtgaactgccatgactcctcttgcgttcagccatcatgcgagcagcaaacaactcctcagcaaccaccagggagatgtgcgagactcatcatacgagcctagtttctcatccggcttcccgagactcttgtcatcccggaacaccccccttcaatccatgaagtgcccttgatacaatccggacgagatgctgcggagttggccaaaccgatgtcggcgcaacctgcggactcaacgaggtcatctctcagtacgagttctgcattcggagagctttgtgcataatcctccgccgtggagacctgtatcagctctggacgagtatgtttcttgctctatcggatgacattgttgctaatggctgtagatacgttgaacgccagattcgaccgatcagtttacgacaactgactttctttgggcggacgttgaccgagtcaagacttttaagctcggccaactatgtgcgcacagagcttccaacgaggtcagtcgttcatcccgcgtcttagcttctgctaacagttatatttgcagactagcacaccgtctccgggacatacaaaagctgccttacgctgtggttgctaaccctcac

SEQ ID NO: 2509 - DNA, 971 bp, Emericella nidulans
tctcccttggcggtataggattttccagagcgtccacaatccaaggtcatcgtctggcgattattcccgaagtgagacgctgggtgccggaccgagttggcgctgggttcccccccttttttgggagctgatgagtatcggcgcgaacagggccttgtctcaagccttaggctaataggagttttcttaggaaacttgtctgttcactctccagattccagcatttgtctccgctcaatctcagcctctacctcttcaacatccagcggaacggtgcgacccttccacctctccatttctgctcgcgcaaacccttccatactctgcattccaacaaccaggaacccaaggtcctcccggtccacatcaaacacttcccaccactctccatcaacaagttttactcctctctctcgcgccgctaagtagatggaggctaccgcaagggcatttggctgatgcgtgacaaaaagaagttgcggggagagaaggctcgagttgagatgctcgaaggctcttcgtgcaacctccgttgaagagacacctagcgtctgaaggtaggttagggtgatggtgtgaggtaaagccacgtgcgtattgaatcccagtgtgcgtaagataactgactcgatacggaggaggatttgacgttgggattggtatccgccttcggtaaggtgatagcgcgtaggaatgggttcattcggcgatcctttcgggttcacgaaccatagaggagaggcctcttttgctagaagaaacgcgtagacagtcaaaacagaacgcggagaagtcggttggaatgagagcttcgctgtcaagtaaagggcggcggcagagacgtcctactcacaaatcaagatcagcgacggcttcttctcgcataccacgagaatattatacctttgcagaatatatccggagacttcctccctctggacccagccagaaacgggtgaaggcaccaatgg

SEQ ID NO: 2510 - DNA, 3151 bp, Emericella nidulans
  unsure (1)..(3151): unsure at all n locations
aagctcagattggccattgcatggaaccaaaaaagtgttggtacattctagtgctcacggtcctcgggaggttgggggtaagacggagggtcttgtcggtcatgagcttcttggtgctggagtaaatggcagctccaacggcgacgctagagttgaggtgttagtgagagataagccacgacattgcggatgtgacggaatcgtgttcgcttcatgggagacagtggaggtcatatatcagagaacatacccaagaacgagacctgtaaataattaatgtaatgtccaatactgcgacgcaatggtagatggaaattacataccaagagggagcaactctggagggatcttcttcagagtacgcagacgctgggagatggtgtgagctagcaagcgcgtcagtccagttacaccagcaaagtcgtatatcaattgtcaatttcgattccgaagggagttcataccgctctggccttccttctattatgtccagttagcaactgccaagcctttttttcacatcatgcaactagggattggaaacaggtacgcacaggaagagcaaaagagggccgagtaggctgcatcctcaaaataggggaagggtacatggcggacgaagagtggtgatgggagccgtagactcaagaacagccctggagtgggatgaggtcgaagtcgagaatcggatgtggtgacggagctctggcgatgcaagtgacttccaagtcgatggcttcggatgttggcttggaaatctcggcttttgagtggctcgtttactaggcggtcacacccggcatgggacttcacgggtcgttccaccctcgctcttaccacctcctctgtcaacgactcgaacctctcccactccatctccacgagtttacatccactgccttccaattctattttcttaatcaagcttcgttgcttggacgactgccgcaaaaatgggtgccattccggaagccgaccctgatgagcccgttgagaccaagcccttcaagttcgtactggtgagtttcttcttccgagcccaattttgttcaattgcgcttcgatagattcaattgctaaccactctctagccggtacgttcttcacagctatccgaaccgattgaatcgcttttcaatcatttccgcaaggtaaccgaggttactggagctgacaatctcgtttaatcgttgctaggctatgacgcccgtttccctcaacagaaccagtacgttatctcaccaaattacttccgggtcaatatagtaacactttcctaggaccaagcactgctggcaaaactacgttgactaccacaagtgcgtgaacgccaagggcgaggacttccgcccatgccgccaggtaaactcccccaaacagctctcaaatttatcaggcatgctctaacaggaatcatagttctacctcgctttccgttctctctgccccaaaccttggactgatcggtgggatgaacaacgcggtacgttccatttccccgtaaattcgctaagcaaacatatactgatagcaatcacagaggctggtaacttccctgcccgcctggaccggtaaattatataagatagcacctagaactcaagcgttgatttaaccttgaatggttgttcttttgtcaacatgtatactagctggtctgcggggatcctgataaagccccattattctcttcttcctccccattccgtgagctagttgaggatgaaggtgtctatagactcgccgtagtacgaaatgtgcgcattctcgtgttgatttattatgatttagatagtctgtagactaataacttacggcgtgttggtattggcaatccctgctatctgtaatagcgtctcattcgcatcaaactggagcggacaataaatattaggttcccattattgctgttcggccgctgcagtatagaacttcctccccatgctagcttttcattttatcaggctggccctttataatctctaagcccatctatgaatcaaatctagcgtagtgctgctaaaaagcgcccgtatatacactaaggtcacaaaaccaagaaaggaagcaaagtaggaaaaccaaagaacaagatgcggtatccccaaagggtaaacaataaaaaaagcagctacccgcgctctcgcgctgtgcggtaacccaagccaatgtatgaaatctatctgcgctgagtaagttcgtgatagtgatgggctgagagtaagggtagaattggagagagggtatctcggtgcggtccacgccatgatcatggatctgtagaagggagtggaaaaggctgtctatcgccggtagaagaacaaccatacccaatgctatgtacaggaacatctgaaggcaagccaaatatcgtatcgtaggtaggtcgtccaaatgctgacgagatcaagatatctaatatctctgttaagtatcttggtttcgggcgtaacgtatgccgacaagacatattgcatcaatagagacgaagtttagttggcgttattagatgttgatcagaggtttaaatacccttcaggtaccgataaagcttcttgtgctcctcaaggaagataaatgtggcaatcgtgtgcggacccaggcgaataaaactaggtacccaaccccgaaaagcccacgcaagtccctctttccgagaaatttcacggagaagaccgacgatattgtgaccacgggtcttcactaggcgaagcactcatgacccttgtcttgatgacgtcaacaggactgcagaccgttgttgtgacaaaccccgcagcgaaagacgcgcttgattgcgtaacaccattgtccttcattactaaatttttaagacacaagcgctngaagactttatatgagacacgctgtaggatggcattgggactgcgccatgaggttcgtcccacgccacggagagactcaaaatcctcttggcagtcattggccaggcatgattgcatgtgtagtccccttggcggcgaacccgatcgatttatcgacttaccctgctgttttttaccttctttacctgtgtaccttcctggttaatatttttttccttcgcactttatttaattcccactcttacttttcttaatctcaatcattatattttaatttatatcttttattcctatattattcttta

SEQ ID NO: 2511 - DNA, 688 bp, Emericella nidulans
catgcggggtttgttttaagcgaggcccgggtgtggatcgcttatactggtcagctgcagtttgcagctgtatgtggcggtactgcgaaagcaagtcttgatgcggcagccggtttgtggataggtggctattcatccttgatactcgaaaacttcgtggttttgaggaggaaggaataagatgaggccaattgcaagtcctgtgcagagaagcgtatgaaaccagaagactgagtggcatacgaacgaccatagaataaagtcatagtcagtttacatttgagggaggcttatatagaccaagttttgaatcttcctgaatataatgtaataacactggttattcctcgacaaccgtccaagcaacctccaggacccgcggaggcgtctcagccgttgcattaaacacatagatttgcctcacctcctctctgtctgcctccgtctcctcggcaacacctctcagatagaatgagaccttatcctcgtctttcctccttagcggccccagactatatgcaaatggatcgtcacccttgtatttactcttttgccatgtctgctccataggtcggggctcattccacagcgtccgatcctgaatgacgctgtacccattaacaaggaaccagtccttcgtctctgaccttgctaggtagaacctgcgaagcaaacactcatcaccgca

SEQ ID NO: 2512 - DNA, 785 bp, Emericella nidulans
gcaccaaagatcttgcacattttccatattcctagaagctacaaaatgtcctcttccagcctgaaagtggctttagtcaccgcctcgtccgccggcttgggggcggccatcgcgaaggtcttagcagctaatatgcgagtcattatcaattactcgtcagacgcccaacgtgctgagctggtacaagaagagatgagcagtattgctggtagcgaaagtgtccttaacgatcagggggagaaacagcctcgcttcgctgcaatacgcgcagacctggcaaaccgagcggacatcaagaagttagttgccgagacagtgagcatgatgggcaggctggacgttgtcgtttcgaatggcggttggactcgcattaggaaattcgatgatttggaccagaacgtggatgaggaagactgggaccggtgctatgagatcaacgtcaagagccatctatatctcctgcacgaagctcgggtacaccttgatgcagcgcagggatcgttcgtgaccgttgccagtgttgctggagtaaaaccaaatggtagttcaatagtaggttgtggtgctacgcctacctgggcgcagtttatttttccttcttttttcttaaccgtcaactaacataattcccagccgtactctgtaacaaaagcggcccagatccacatggttaagtgtttagcacatgcagttgggcctaacatcagagtcaactctgtgtcgcctggtatcctgctgacagtaagagagtcctaagcgagcgtccatcgatactttgtatacgt

SEQ ID NO: 2513 - DNA, 1514 bp, Emericella nidulans
taccctacccctctccaaacctagggcttcccccgtttcgtgactccctcgtgtgggggtactgcaggacctctatcagacacaactagaatcaactccaagtcatccctgccaccgctatccactcctgccaactgcagctgcatctgttcaagtgacaacccattaggtcagcccagtttgttcgacattcaacaggtccctacagcaccatttcgaagctatatttagagccccttctctcttcttccctctgaactcgactggcaccataacctctgggtttagaatagacccaaaacagatccaagacaatgagcactcagcacttccttcgccccatatcccaagcaggccggctcagacccattaaattctggaagagtagcactattccctccaggcaaatcggcaactacgctggaaagacatttaccgttaatacgggtgcccagatccccgccattgggtgtaggacattccaagatgaagagcaacaagagggtgccgtacttgaagcgctgaaggctggtgtgaggctcattgcgagagtgtatgctcttctacatttccttcttattttctgctcctacatgccaaggtataatactaatccccatttcagctatgacacagagtctttcatcggcaccgcaattaagagatcctcgattccacgagatgagatcttcctcaccacaaaactctgatgcaactccttccacccagacgacgttgattctgcactatatgaaactctgagagacctgcaaaccgagtaggttgatctatatctgcttcaccacccatgcacgtttgcgcgtgggaaagaccgctttcccaagggtgaagatggactcatgcgtatgggagagacgacctacgtcgatacatggaaagcactgcaggagatcatgaagaggaccaggaaggccagggcaatcggagtctcaaacttcagtagggatgagactaagaatcttatcaatgctgaaatggtgagcttcttcttggtcccactcagccaggcatacgatggaggttagggctaatgtcgttcgatgggcgcagaccccagcagtccatcagatggaactccacccgttcctctctcaaaaattcttcgcagtctggcacaaaagtcttgaaatccacgcgcagcagttcagtcctataggtaatatgaactcgttctaccgcgatgtctactggagcaacaggcgcgccaacctcggccgcctcctcgacgagcccgtcctctccgaaataggcgcaatgtattccaagaaccctgcacacgtggtattagcctggagcgtgaatcatgggcgctctgtgatcccgaagagtacgattccttggcagatcaggcagaatgttgagagtgattttgtgcttgaggaggatatggagaggattgatgagctgaatgcggatttgaggttcaatacgccgcaagaaacttaccgctggctgctatatgaaggactggattgagtctaatttgataacac

SEQ ID NO: 2514 - DNA, 2031 bp, Emericella nidulans
gaacgtcaagaagactgaagaggaggaggatgatgagatctccgaggacgaggaccccatgatgctgcagagagatgccaaggactggaaggtatgtttgtgtcttcgatctccataacacgataagcagactgttaactatggatatagagccaagaccactacgcagtcctcggcctgagcaagtaccgctggcgcgcaactcccgaccagattaagcgtgctcaccgcaagaaggtcctccgtcaccatcccgacaagaaggctgctctcggcgaccgtgatgagaacgatagcttcttcaagtgtatccagaaggctaccgagatcctgtcagaccccgtcaagcgccggcagttcgactccgtggacgaggctgccgatgttgaaccccccagcaagaaggagactcagaagggtaacttctacaagctgtggcgccctgtatttgagagcgaggcccgcttctctaagatccagcctgttcctcaactaggtgacgagaacagcaccttcgaggaagttaacgagttctacaacttctggtacaacttcgacagctggcgtactttcgagtacctcgacgaggatgttcccgacgacaacgagaaccgtgaccagaagcgtcatgtcgaaaagaagaacgccaacgcccgccgcaagcgcaagaccgaggacactgcccgtctccgccgccttgtcgacgactgcgctgctctagacgagcgtatcaagaaattccgcaaggccgctcgtgccgataaggacaagaagcgtctcgagaaggaggccgaggcaagcgcattgccgaggagaaggagaaggcccgtctcgaagaagagcagcgcaagaaggaggccgaggaggccgccaaggccgaccgtgagaaggcgaagaaggccaaggaggcgctaagaacgccgctaagaagaacaagcgtgtgctcaagggctccgtcaaggatgttaactacttcgccgaatccggcgagccctctgccgcccaggtcgactccgtcctgactgatgttgacctcatcaacagcaagatcgacaacgaggagcttgcttccctcgctgaacgtctcactgctgcaggcaaggatgctgcagctgtcaagaacgtctacactgaagagattaagcgtcttgttgccgctggcaaagctaaggagggtgaggtcaagttctttgtttagtgtgacggcatattgcgctttcagtacataaaaccacctacagaggtggatagagatagagtagattgtcatgagtggtatgaaatttacgattcataataatacattgcgtttattgtagtctatgagcatcccatgccttcaacccatggacaattcatggataatcggtattttgggtttggcccgtgataagcatcgccagcccgtcttgactgcgtatgcttgggaagcttgtcaatgcgtcctggtgccggagggtcagaaagtgtggactagagactcgagtcgaagctcagcagcctgccagacccgcacgtgctcagctgcccccacactccacttcctgttcctctatcatactacactctcttgtccactcatggccaattgatatgcaacgtgcgagcatacaagctacgcgaggtggaacctcgattcttcgcgaagcccatcttgatgctcgaacgccgcgatgtaaccaatcgcgatggcgatattggttggatctcgagccgcctgcctcgacagcggcgatgagcgacgatggcacaaagctgcagctttaggctatctgccgtgactggcaagctatataagagagaaaatcccacgtcgatctctgtcctcgctcagctcactggtcctgactgccaccgaacatcaccttacccaatagtggtcaactttgccggtgccagccatgtatacgaagaccctcactgtccttcttggaggcctgtctctggccttagcccagacttcgtcggagcagaccccgtcggcacctgagattgcagctgcccgggctaccgtcatgcccgattcccctg

SEQ ID NO: 2515 - DNA, 3488 bp, Emericella nidulans
gatagaacctataaccgacagtcagagctggtataggtagagtcacaggcgccttacatataaatatctcgtctatctcatcgccactcagagtgacgccgcctagggtgcgcggtagcgtgcgatccgggtcaactccagccatggcaaggttcttcttcttcgacacgacgggtcccatgccgacgggcggctgcaatggctggagacgtgtctgcccactggctgtgttcttgtagatggatcccggcaccatctctggaagcttcgacccgttagagctaggactctcagacgtagcggcagtgaggtgaggtagcccgtcggaagcgatgtcttgaaacagcagctgcagactctcagctccgttagagcaactaatctccgcatcgttcgcatcaatgcagacaccggttgctttattgcgcttgacgttgtccgcgggattgggcctgggcatcattgtagtagcggattcgcggatctggtgtaggctggctgtgtgggcgttgagctgctttctcaactcatcagtttccttctccaacctctcgtacttcctattcgctgattaacactgctcatgtcggtagcggcgtgggcgtactggcgtttgtgttccctacggaacgcttccgataacacacactcgattcctagcttctcacagcgcgaacaaggctgcttttggtacgcgtcgcagcgcgcctaaacgcagaggaagtgttagcaggcgactacctaagctcgcgtccaggtgtgagattttaccttctgctggcgacactgggtacaggccttcttgctcctcttcgaaacgctagtcggtcgcgagtcatcagcatcgggtattcccccaccagaatcaagcatctcataaagagacaacatcttcacagaaattccaacgcagaacgaagtgattgagggcttacgggagtgggtggaagtcctccatcacgaggaaaccgcttgacgccagcagtgttatgcaggacacaactgagagaacatcttctgacagtccagccaatagtatagtggtatagtggttttgttcactcgcagtgggacccagaggacattaagtacatcaaagatggcagtgggcagtgaggctggagctgcagagaacaagcttttgggtggccactcactgtctcggctcaccacgcacagccaggaatcttccggtctgatggaatagaggagtatcaccctgcggacagttgcctagagctggtctttgagtatctttgaggccccgtaagacagatctagccacagttagcgcttaaagtccagttgggaattcaagaggagttctttcaatactcaggagctctttaatccaaactctttgatccaagctctttgatccagcaagtccctcaaactagggatgtccatttagccaagtacaaccatcaatagatattggagaacgtaaaatccaaccagattgatcgcgtacttccaggtctgaccgccccaacagaacatcctagggagtgcggaaagtagccacagtggttaccgtagaagtcgcagtgcaaggcaggatggggaattctggaccggtaccggtgctgtatcgctgtgatcaggcaatagaccggaagggccggcgtcttttgcttatcttcagtaattatgagtacagctaagagtgagagtgcaagggtttcgtcgtcgatgaggtgagccgatcgttcatcttagcccaaatatgtcgccggcgtcagaatgtgcattggcagtaagcatatatatacagcgtctggcctcaggagtagcaccaccagtataatcctctaccaagtttgattgactaatttttgtcagctcattttctatatgagatccagccgaccgatagacagcgccctgcttgtcagccccctcctcctccttgtgtcagacctctagctcaccgtggcagccccattcctcaggctgacaggctgcaccacgaagaactgacattcgaaggccttccatgtcattgcaacaatctcgcagacttagcccctgttcagtcacatgtgccgagcccagtcacacaaggccgctggcgggaacactcctatgcgtctcacaacggtgcacctcagacaagtcaatgaacctgatcacgacgcccagagacatcgcatccaagtgaagcggcactgatgctacagtaccacgagcattatctgcagttacttctacctccagtgacagtgacattgaaaggtgcctccagtcgcgcgcgaccttcccaggatatggttcctctcccggtacaagggttgtaaccgggcggttgacagcccatcttacgttcgtggactggcggacggagtgtgcttggcctgtttctgcagttgctggtccaagacatacgattcatctcgtatccagcctcttttctgtcggacagcacctgctcgtcgtcagcgaactcctgtgccgatgtaacacggggatatgaccacggcatatggcggttcgcaaggcctgcgactactgctggaaatcgagggtgtagtcgtcgaacagtaaaaatcatgtttcgcttttttcaaagtcaatgcggtggtgtctgcccaggtcctgtttgagtataattttgctggcggctagaaagggtcgctatagcacgctttctcctcatgcgtaggcttcaggacactcccatacttctctctcgaaatcggcgtcttagttcatacgcacaatcagactcagcaattcaggaatctgcctctcaaaagttttcaatccctcaatgcacagatctctgcagactgggggttaagaaaagatgtcatttaacttcgaatttgattttcgtgttaggcgatactgacatcacccttgccacgacaaagacaaacatatcaccaacgttcatttatgtctcaaattcagagttttattgaaacaagaagacgaaagcataccatcatgtcttctcctgaattttccacgatcgcggacctcaagcgcgcagtcgaatgcggccaacgcatcacgccagaagacgtttcggtaattggccagatcgaacgcgaactgagtggtgaagcaggaccaatgcaagagactgcgcagacacttgcacacgacagatgaattttgatgcgaaacttgatgagttgcggggaaaccccaagccatttaccgtggagatgcgcaggagatgaagagatggaggtcactcttattctataaaggttgcttttattggtttatgaagacctcggttcaatagctccgtggttgctcttgcgacaggaggcattgcggtgaatattcttcgttcttcgtatcttctgctgggttctcttttcaaggcataaggtagcctctttctatatccttcgaggcttatctgtggcatcttcattccttctctcttgcgcttctgcttgtggattatactccaccttctctctctcttagttctttctcttactctctgtaatgtctacttctctctc

SEQ ID NO: 2516 - DNA, 4387 bp, Emericella nidulans
tgtcattttccgggctcgaaattaatgcttctcagaatcctggctgccagatattaagtgccttccagctaagtgaattaacccgtatgtacaagacaaaatacgacagaacagaactgagtggaatgggtaagctctcgacactctttaacagctccggctcgtttctctaagtgagctcaccattgagtcgcgagtagtctccatactatttggacgtggctgttgacgtcgctgtttaatgtcaaattaggtaagtcaaattagttaactaggtaagtcaaattaagaagtcaatcgagacgcttgcagagcttatgacagagtttccagggttgggagagcttgagaggtcaaccttcgcttactgaaggctacagccaagatctagatataaggtatgctctgtagcccaaacacgatctatcctatacattactttgccaaaatttacatgggctaattgctatgaatacggcgaacgcttggagttggattatatattccactagcaaggacctatacaagaaacacgtgtaatcgtctgtctgttcttaaattgagtcgatgagctcgctcactgagtcagcattcagtaaatttaatcacggattctgctacaacttaaggagactattgagatagaaaatctcacctggattggacttccaaccttagtacgcagaccagacttggtggtccacgtctcttctcagtgcatgcatgcagagaaaatgaagctgctaggatggacatattgaccgagattggtttgcatgaggcacgtcaggactgagcgtccagtcaatcgagtgaaactccggcctgacctgacacgtacactttcaggtccaccatgggtgcttagccttaagcagactgatgcctattcgacgaattgtgacccaggtgcgtatatgtaatctagccccggtcaaggtccgcacgattattctccgggtgttggtggagttattctcgatcatgattggcgtcgaggtctaatccttcgctcgtagaagacaaggttgagctaattcctcatagcgagtgctcacctaagattatagcgcagcgatccggtatacaagcaagctattcccggtcgattcaaagccccgtcaaacgtctcttcgtaccctagatcatttcaattgacgcgagctctcgtctaaagtgtgcaccaactaggactctgctcgagcgttgttaacacgaaagaggatgtttgccttcagtccaatccccgcgtactccctcggatctcttctcaccggcattgggctacacagtttcctgcgtccgttagaggagtacgagcggttcggtctccctcgcgagtcgtcgccgttgatgtacctcaaggcgatccgggaatcgacatacggccttactctggtcgcgttgcagcatcaaggccatgccaacgcgctgtccacaattgcggcggttatattacttgccggtctcgcagatgggttcgtaatcagggcacatggtggaccgttgaagtggaaggcttctggccattgggcctttttcgtggtagtagcggggtgggcgcggtggaggtcgtcgtttgcttgacgggcggagtctggaagagaagcggacagtgttaattccgatgtttgcaagagccaggtggaagaagactgggcaggtgaagcataggtaagtaaagaggtactgggtgagagccttgcggcggccaaacgaacgatcgcttgtcatggcaagtgaatttggaatatcctcagaaagaaaatttagtgaggcttatttttgaaattaatctagctagttccaaatagttatactagtaagcaaagaagcccagctgcagcttctctggttattgattgatagaaccatggtcaccctcctgtccctcttgacttacagccctaatagaacgccctcaatatggcagactaaacagtccatcgctctagtaacgaaaatatttctgcttgtatcccacttcctgcatattttgagaagattattctatacaaccaaagaggggttaggctacggactctagcgcatatctctcttattgagttcaactatgcgaatagggacaataaagctttctggttccacacgcgtcttgtgacagttgtgcatgaatagttcgaaaacgagggttagggaagtagtcgccacgatgtcgggtggagcatacggttaccccttgacaggagccggatggtatttcacatttaaacatgtaaaccgaaccaagccatggccgatcagtgtcgagtttactatttccagaggttatcctgaatgtattatcctcgttgagacagatataagccgctgcacctcttccccaactgagctatgcctggagtttgatatcgaccatcgaatctgttccctctttaagcctatcagtacagttttacgtcaacaataactccaatctgttcttggaaaacatgcttcatgctttcttcgcaacgggaatagccaagccgcggaatacaggacttgaagacagcaatagtaggcttatctttattacctactaaattcatagttaggaacatttcttctcagagctgttgtatttctgtgatcgtttttcaatctgtctcgagcggcagtggttatttttgttgttcagggctcgtggagcactctatatttaagttagactgctaatacggcccactgtctcaaatttcagacatctctgtatatcttgcaagttagagatcatcagcaactgccgcgctagccagtcgcctgactcataataaggcttctctagcaggactgggtattaaatatgggctgactttcggcgtttgagctgcggccactgacctgtgttcgtacgtctaggttctctgctacgacgaaacgactcggtcttagactgaaagcattgcttgggatcaactgcaaatcatgataatcgccgccgtttgccgcctgcagtttttaattctgatgcaccttgttcaccggcataagactgcggcagtgctagggaagaggaagtgtctgctaaagtctgttgtttctgaccttttgtgagctgttccgcttcagattcccattcgttaagggtactgagcgagagtatagcctgcggatgatttgagcctaacaccttgttgcagaggcccgcataacccttaataagccgcagggcatctaggttatttcccagattcttgaatgtaaaggcaaggttgagcatgctggttagcgtgtgaggatgctctggccctagcacctgtttccgagtctccattacctgcacctgtagcttttctgctttgttccattgtccttgattatagtataatgatgcaaggttggccatgctgattagtgtatcgggatgctctggccctaggacctgtgtccacgtctccatcacctgtacctgcaactcttctgcttcattccatcgtccttgcttccggtatgtggttgccaggttgtccatactggttaaggtggaaggatgcttggaccctaccacctgtttccaggcctccatcactcgtacctgcaactcttctgcttcctccaatcgtccctggttctggtatgctgatgccaggttgtgcatacaggtcaatgtagaaggatgtgctggtcctaatacctgtttcctggtctccattacctgcgccacagaccctccgcttccttccagtgccctatatccaggtaccttgatgccaggttgtgcaggctggaaagagtgtcaggatgctctggccctagaacccgtttacgggtctcaatcacctccgtcagcagctcttctgcttccttccatcgcccttggcaccaaaatatcgaggctagattgtgcatgctggttagagtggaaggatgctcggaccccatcacccgtttccaggcctccagtatgtgcgtcaataactcttctgcttccttccatcgcccttggttccggtatgttgatgccaggttgtgcatgctggttagagtgtcgggatgctctaaccccaccacctgttttcgggtctctactagctgcacaaataactcttctgcttccttccatcgccctctatccaggtatgttgctgctaggttgtgcacgctggcgagagtgtcaggatgcaccagcccaagtacctgtttccgattctccatcacctgcgccagcagctcttctgcttccttccaccgtcctcgattccagtatattaaggccaagttgcccatgctggtcagcgtaaaaggatgctttagcccaagcacctgtttccaggtctttatcacctgttcctgcagctcttctgcttcgctcaaaagtccttggttccgatatgttgatgcaaggttgtgcacactggtcagagtagaaggatgatcaggccca

SEQ ID NO: 2517 - DNA, 2442 bp, Emericella nidulans
gccattcgaaatgcaggaggagccttcgtggcagctttgtggaacgttggtaccggttaccagcgccttagtttgcgggcaaacggagtcagaaatgggctgcagttgagaaagaccttttctacatcccgaaggttcgcccccggcggagggcaaaatgggttcgggaggtcaccggcggccgcagccgcagaatctggggttctcgttttcaggtcgtaacttggaaggccggagcggggaacccgacttggacagacagagaagcagacggcgtctagagcgaggcagaaatggcaatgatatgtatgcgggctgcagcgaatttcaaatcaggctcgtacaagagtcgtaacaggtcgtagcaggtcgttgagcgggcgagtctagaaagcgagcaaagcacgagtgagttgggaggtcattagtcgtagcgggcacaggcaaaggtacaggcacattgaagggacgaaaaaggatgagcgacgaagaccagacggaaccgacgcgaatatgtataaaaggcgtcacgtcaaacgaaagggatgacggagcagagggagaggagaaggaggaggtcggtggagaaggcgaagggaagggaaagggaaaatagaagaccgagaaaaaatgggaggggagggaaaaagaaaaaacagtgacggtgaaatcgcaaaaaggtaagtaggtatgcaggcggtaacagagagagacattacgcagtagcattgaagaagattcatgctaagcaggcgggacttgcagcagatcatcggggtggagaggaggctgggaggctggagcaaacgcaggctaaggtaaagaggggaagctgttgagggatgggatgaactctgaaggctggcgccggcgcccttgacttacctacgatgtactgagcactgtcttggtcgtcttggtcgttttggtcgttttggtcgtcttgctcgtcttgtctgtaaaggcacgtgtgctgctctgcgtcctgagtctgtctgagacggatgtagctgcaaggcaaggcaaggcaatttcctgccagactgacttgagtcttgactgtctctgccgctgctctttaagaccgggggaggcgaaagagaaaaaggaaagaagcctgccataacatcggtcgagctcttgacttattattatgtcttatggatggtcggagtcagcatcccagcgggaattcaaaatcccaaaaatccacgtccacccgttcagacgcggtaccggtaaatgaaaattgcagcggagcgtgcacagactatactccattgctcagtattgtcgccacgaagcaaggaccagccccgccacgatgtgcaaacactaaacactaaacactagacactgatctgattaggacaaataataattttgactgctatcgaaccatggatgcctctgagctaaagagagctaaagcactgctggcaggtttggccccgatccagctgtaagtcatcgatcggtggatcgacgggatatggcgatgctggatttatggaggagcagtactcagagtatgctcgcccgactctccagagtccttccttccagaaacgtcgttccagtcatgcttatcttctcaccaactttatcatgacaccgtaccaattgccagatccagggcgactccactgccctgagaggaaccacggaccagcgaagtatacagtcactgtatgttccgtacgagaaatggcggtgactggacagggagcttcaagatgacagggagaggaatcgtcctgtaataataccgctcactaagcgactccagatcggtgttttctctcgacgcgattcattttttcgagaatggcccgattcgatgatcctgtttgatcgccggactacggagttccttcatccttcatctacactgacacttggagatcgttattctacgcagcgagtattctaggagtcaaaacaacgctccggcatccccgtcgtcgagcaaatgccacgcccaccgatcaggaatattgccaaaaggaccaatgcaagcacgcgggaaccacccaaggaggttacacggccagaagactggcagggatgcgcacagcagcaaagaaatccagtggtccagaatgctccacgaaaccagtggcggcgatcttagccagctggccagtagcggtccagtcgacggtggctgaagaagacaggattgcagaacactgaagccaggacgttgattcttcacggcagattcgaccctgtactgttgaatctgaggttgagcttctccctttctcggcgtctatctaggcgccgggggcgccgcccagatacgctagacctgtcatattgacggccaaccaccgctggccagcctcagtctgagcagcgaccgcgtcagttcagcctctcgtgtgtatgtactgcacatagatctgaccgcgcccaccggctgattggcctgctgcg

SEQ ID NO: 2518 - DNA, 2147 bp, Emericella nidulans
aagtatttgtacctaaaactatggagtggtcctcatcacctctggacgatcgatagcctactttctatttatggaatttgccttttcgcatttctggagccgcctgtaagagtgaaatgaaggaccatgggtggaaaaatctaccatgaccttttggagtaatggtaaacatgccacggggatcatcgggaggtgattgttttcttccagtggacttttggcctcaataaccctgtctaaagagttctgtcacaaattggggcaattcgtggtactcatttctaaatagattcccaatccagtaacatccgaggattgagatacgcctcgaagtataacgtcacgcccttcctgcagttccatggcgtgctttcgcctaccgaccaaactgacttcattattgaagggcccgaaacgatacttacaaggaaatctcgcttctcactcatggcaaatccataatgtagatcgctgcgtcatgtgatcacagatcagtgggagcttttctcattacatgaggaaagtccgaagattgcccgtccccaaactcaagcttacttgctccaacctcccaaaggcccatctagacgggtgggggtgatagtggatatttgccagctttcgtgatgtctaaccgcaccgggaccctcgtattcggcatctaccgccatgcccgatatagaaagcgactgggttagtatcctctaacctattttggctagatttgaaaattaatgcaaacaggacaaatagaacaaacatttgccccaatgtcatcacatcgtcgcaaacttgtttacagagcatgtgtctagatagccaagctatacagctcagcacttcaaaccaggaaaatggcggacactgctggctggagcacaattgagtctgatgaggtgcgcccagatcttggtgtaatcggttaagaggatggactggctgatgtgcttccgtttcgcagggtgtcttcacctctctagtcgagaacctcggcgtcaagggcgtgcagttcgaggagctgatctcgcttgatcctgataccatacgctcactggggtgcatactcaacctacacttacttcctctccagaagactaatttcacactgcaacagaacagtttacggtgtaatctttcttttcaaatacctccgccaaacacccgacattaacacatcctcatccgccgacggcaccccaaccgacccttccacgctcccaccctccttcttcttcgctaaccaaactatccaaaacgcctgcggcacacaagcgattctctccgtcctgctaaaccacgacaccccttcgccagagaacaacaatgaccccatcaccctcggccctgagctttcctccttcaaggatttcacgacgggatttccctcggacctgcgcggcgaggcgctttcaaactctgaagcaattcgtaccgcgcataatgcgtttgcgcgcgcgagccccttcgtcgatgagacggtgcggccgcgcgacgaagacgaggaaggcgacgtgtaccactttattgcgtatacgcctgtgaacgggacgctgtatgaattggacggattgcaggcgagcccgatatcccatgggccgtgtgatgcgagcatttttccggagaaggtgattgaggttctacagaagcgaatcgcgcggtatcctgagacggaaacgaggttcaacctcatggctgttgtgaaggatttgaggatccgggctgcggagatgggggaccaggaagcacttaatacggaggagagaaagagagctggttgggcttgggagaattctttgcgcaggagtaattttgttgggtttattggagaggtgctgaagggggttactaaggtgaaggaggaggagggaagtgtggaggagtgggttaagagggctgaggcggagacggcaaggagattgaggcgttacgagctttcctctattttcagtatggacgatttggatcatggatgaatggtctttgtattatactctgcagtccctggcaagtagtctcttgcattttcgggttcatgccgctctttcttcgcatagggggcactgcctcatggaccgcaacatagtcatccgattcgaagaatggctttgagtattaacgatgccatccatgaatcaaaaaagccaagt

SEQ ID NO: 2519 - DNA, 874 bp, Emericella nidulans
agtgtcacttaaagactgcgggaggtcacaaagcgggtgaaccgctcgccgctcggtaccggtgcgctcgcgggtaaccccttccacattgaccgagaggctatggctaaggagctgggctttgaggggctcctgtacaactcgatgaatgccgttggcgatcgagactttgcgatggagacgatgcagtggggaagctcgtttatgcttaagatctcgcgctgggcggaggatctgatcatctactccagtctggagtttgggttcgtccgcttgtcggatgcgtactcgactgggtcgtcgttgatgcctcagaagaagaacgctggtgcgttttccccatgttctgcgttatgattctctaatcattgtatagacagcctcgaactcctccgtggcaaagccggccgcgccttcggccacatggccggcctaatgtgcacgatcaagggtctccctacaacatacaacaaagatctgcaagagagtgtcgagcccctcctcgatcacatcaagaccgtcggcgatagcatccagattgcgactggcgtgctgtccacgctgaccactatcccagagaagatggccgccgccttggcacctgaaatgctcgccaccgagttcgccgactaccttgttcgcaagggcgtgcccttccgcgagggccaccacatttccggccgcgtcgtccagctcgctgagaagcacggcgttcccatggaccagcttagcctggagcagctcaagagcgtggatgacaggtttggcgatgatatccaggagtgcctggactacgagcgggcggttgagttgaaggatgctattggtgggtgcagtaagagggcagtgctggagcagacttcggtgctcaaga

SEQ ID NO: 2520 - DNA, 1419 bp, Emericella nidulans
tcctcagcctttttgttattcgagccaggtcatcattaagctgtgcaccaactcatcagtcccagcatcagtttccgaagaccccctctctgacgattgatacgctgaccggttggacatatcgaaggcttgaatgcacgtaaatcaatagcctcggcctgcaaagaaaaaatgcatagaataggggcaaaagaagttttaaaaacggctcctttgcgaggagtctggcggatattgttttccctgtcacataagagactatcctagctattcagatgtcgctttcatccaagggctcacaatgtaacattaatttctagaagacgagtgaagacaagaaaagttggaatcatgtcaaaaacgccgccgttgacccgattcagagaggtacatagaaactgactgatgaacgtcgaataaatgctgcctgaggcttcaagtctcttcgaagggtcggtagccttaatttccggtagtatattagtcatcaacactaagctaaccacgataggcatcaatgagcttcatgcatttccacagcccctccaaaagaccttggcttgttgagactccagcgtgccacttcagggaccacttttgaattcacagacccgtggtacttgatatacgagatcccagtataggcgccagtgtgtgtcgtgtcgtttcaatcgggatgaaatcataagatctcgttagctacacctatcctccctcgctccactggcagtcatgcttagctggagccttcacggtttgatatagattcctctttcttgtcaagcctgagatctcagaattaaaggagcttaaccgacattttgtaaggcatcgtcgtatgtctattcactctgttcctgttcctttccatccgccgtaagtcatacttgtgggaaatcatggcatgggtgcagtgtactgacggcttctagacatttaactgcaaaaaaaaaaaaatctttgcccatagcaactggttctataaggcataactgcctagtgcataatcgccgatactcttcaggacctcaacccttaactttggaacagaaatgacacctgctcctccatcgaaccaagcatgacgcgaacaattagtccgaacctctaacatcccgcaactcgtcgtggtcatagacctttcttttgaatcatttacttggactttctcttccgctgtattcgtacttgtgacttaagcaccgttcgaggttgacataagaaatgaacggagaagtctccccttgtgaggacctattgagctaatttgtgcttatcctacacgttggtttctcacgtttggtctaaaaacgtgcaaggcccttgactaaatctgtcggttccatcaacgggtttaattggaatccatatttgcattcatacatacacttgcaagaatgccttctgacagtgagatgg

SEQ ID NO: 2521 - DNA, 1217 bp, Emericella nidulans
gataaggagcagcgaattcggcgagttaagcaagtaatattgcagttatacagatcctattgcgcgtttgaccactatccccaatctgagttaagttctcaagagtagctcatggttctcacagattcctgtgaactgggctgtattttcaggggtaaatgatttgggagccaaatactggcctctccgctttcgtgggcccttgcgggtcacccgctgagcatgactaatgccttcctgcctgaggctggagactcctccagagctatgaactgacctccggatgaaagcaaatcagcggtaaactcagcggtatagtcactattatgcattctagacgcaaactcagtgctaacaggcttacagcagaagaaatacgagtacgcttgaacactgtactccaacctgtattggtccagtcgtactagtggcatagaatttgaagcgtaccctacgaagaaaaaccaacaggaccgtagacagtgagtctacagaccaacagggtcaaagagcaaagtgcccaatttatagtaatagacgaaaacctcataagagaattttgaggctcgcggggcagaagcagatgatgccatggaaggcttagcgccatgtggatccgggacgacaagtccgaataaggtcagcggagcggtcgatctccttgatatctccagactcctaacctcttatccaacttggacatctaccaactctgcgtcctacataccccaccattaagatgaatacgaggcaaatcatcgatgactcaaaaggcccggggtccctgtcggcgagcttcaatagtgacaatacttgcttctcagtcggcctcgataccgggttctgcggtaggttgagctacgacctatatatatgggatctcaaccccaatactgaggccatgaagtctatagggccaacccatgcgagctcaaggtgtctaggagtatgcacatctctaccaacgttgctttcttacaactaccgagcgcattgacactgaccgcggagctttctagacttcggcgccgggataggccttgctgtcatgcttggacagtcaaactacctcgcacttgttggcggcggcaggcaaccgaagtttccacagaacaaggtgcgctggccttctagtacacatacgggctctgctgacggcataatcacagctggttatctgggacgacgcaaagcaaaaggtcgtcatcactctcgag

SEQ ID NO: 2522 - DNA, 1886 bp, Emericella nidulans
cccccgttgaatatcctgcccctgcaccctcaccgtcaaagcctgcaactaaagctgttccttccaagcgtacgctcccaacaccgggcggtgcactgaaaaagaaacttggtgggccaggaggtttagcttcgcctcaaaaacgagttatttcaccaccttctgaagagcaacctcagcaacctcctgtctcaaagttcggcctcgggagaggccttgcgggtcgcccaattgctagaccgccagctcctgccgaaccagccccagcacctgccgctcctgctgtgagtggacttactgctatagaacgggctgagctcgaggagctccggcttgaaaaggaacgacttgtccgcctaaatgaagagttgaggtccgagaaagcgaaattgagtacaacaataggagagcttcaaaaccaaaatgcgcagctcattgaagatcatacgagagatgttctgagcatcaaggccaaagagacacagctcacccgagcacgaagtgacgcagaggcagccgatcagaacgtccagaagcaaaagcgggagattgaacgtttgaagcgtgagctatcaagagcccttcgttccggatcgatgagttctccaactgctattcctgatcagtttggcatggcgatgcctgacccgggctccttataccaagatccgaacaatgctcattccgcagtggcgcgaagtggtctgcatatgggtcctcggttcgaaagtacgcggccacggagctatgcctctgctagccctagcgaggagaaggaaaatggccttgaatcaccggggcttggtcgacggaagttcagccctacgtttggaaatccttactcgggtatggctagtcctacaaggtcatcccttgtcggatcgggcagcgcctcaggcgaggaacagccgactcgaagtacagaaccggcagaaaactggaggagagccgctgaagtcacaagccaattgaaagctcgaatcgaacagatgaaggtacgcatttgtataccctcagtttactacagggtgccagcaacatgaacatgactaacccttatcataggttaaacaaggccttattggacgacaaccagcccaacgctaacgatctaacgcccgtcctttaaagtttttgcgtttctcttgtttcagcctagcgagttttcacccttcctgtacggtcaactttaggaatgtgcctgattttgattcccatcttctgtctagaatgtattatgcccaggagactgtgagttttcgcttgtgtctcttttctatgttttgcttttccattgggggtcaaaaatgggattcttttatgggatgatttcttaatatctccctggtttgcatatggtcgggtttcttcatttcgttttcttctgtcaggcttcggagctacttcgttagctattacttctgcaagcgctgatactgattggtatttcttgatacattttctatgctgtgatcatgtattatcggtgctcctttggccttgtcgtaggcggggttaatacttaattggctggcagtgacggactactgggtaaaggggtgtagggagggaccctatgttccgtaggaggtattcggggcctgaggctggtataaaacgaaccgaggtcttgagagtcttgttttaaagggaccgtttatcaaacagccccagcctctactatgtaatgttatagaggcggtcatttaaatacacaagtagtcacacgacttacaacgtataggactggtatgcacagcgaccgcaattttaactcctagaaagttatgggctttactcagcatctacgcagtacgccaatttaactatagcgggcagaggactcatgaatgctagtcgtacagattcattacagaggcgcatcc

SEQ ID NO: 2523 - DNA, 1044 bp, Emericella nidulans
tctgatggaccgcggaatggaatgtgattctggttgaggggtcatgtctagtagcgtagtgagggggaccagctggagaatgcgcgaggatgacaggatcccatctgagacgcctacagtacgaacaatatggcaattgtcttcaccgtcatgtagaagcccgaggtacggttgggtatcctgtacagaaccgagcgaagcacagatgtcaaggatccgaacagcgtcttttggaatgctggaagacgcctctgcttcttttcgactgctaacaatcgaaaccttccgcccgcgtttctcatgctgtggatctgtggtgcttttcgagcggacgctgactgccgttgaagtgtcgtcgaagcctggctcccatgcctggttttcggaagaaggagcacacgccatttccacttccgcggcgtacctcatgctgctagtactggaatgactggccgtgtgagcccagcgtccggaaatcaaagggaagtagacgtgtagttttaccccctggatagaactgctgagcccagactcgatattctcactgcccctggagagaagtagctcaaccgagtggggagcacggcatgtgcaccgcagtgccctcgctattgccttatgaagacttgctgcttgtaggcgaaattgatggaagaccctgggtaggttggccgttcgtttctttctcatcggttccaaccggtcactgtttccgagcagccttttcgtgtcttcattggatttttcgagctcacccatcagcttctggcgacgcttcttgcccaacgtgtacgtgaaccttcgaaattcgaattctaatcgaacgaagcttacccctgccacttgcagccgttggtggttctggctattattagttccacgattctttacctaacggttgactcttttcttcgatatcacgcacctggtcacctgtaatatgcaacctgctctctaacttcccaagcacagtgtgaataaacaagatgatatccatacaacaatcatactcgtgtgcgccagagaacctctctataacttcca

SEQ ID NO: 2524 - DNA, 3110 bp, Emericella nidulans
tcctcagaccgaaacgcctgcagcttattcaccagcatacggtattcctccgtccgccctctgaatttgtttagaccgaaatggtctgtttccataagcaaagattgcacgccatccagtgtagcagaatctcggggtaccagtctttccttcacaaattagatgagttccccaccataaaatcgcagaaaaagataaacctaaccttttctcggttcatgttcactattttccagacattagaacactgcgtctcataacaacaaaccatttgcggcatcagttcatgatcgattgccagaaaatcagtcatcagactgaaaagcatctcgtttccaggtctgaggatttccagtatgcgctttataatatgggcttcacgtcgttcgttctcgttttccaggctatcaatttgctgttgagcggcggataagatttgcctgtttgctaacgctccgtgggcgcctcgaaatggcacacccataaagactatacctaaggtggcgctaaaaatccgagcccatttattttggtgaagctcgtcgtggtatgctgtcaacaggctctggccgacccgatcaataggctgtcaatagcagcagggcagaggcatgcctacccttgctagaaccagcccaccgacacagtgcgcaatgaataggataggtcggtcttcaacaccctgggggttctttagtacgaggtcatgatcgggtgattcgcatgtcagaatttcctctcacctttcgagcccttgccagactgtccaacaacctattggcgacttcagcagaagtcacatcgctcggtcgctgtcccttccattcggaccgataaccaaatatcatgacacgggccggagaaaggtccgtcaatagcatatcttcatctctcagccagttcacgatgctttttctattagggtcccagtatgaccacgggtgaaatgggtgggatccgatgccgtggatcgccactatgcttttcaggatatgagaaaccatgctcttggagatgcaagtgattgtgattcttactctactgggtctgagcatagaacttccgggacttccaaaatatcagtgcccctgtgtccatctcgaatgtcgtggagaacattcaaggcgaggatgtccaccgagtcatctgtcatcctctgcccttactgattccctctttcgttagaaggattttattcagtgcattcaacaaccactatgaatcaatttacttacattattgacccagacggggaggtggtaataatactgcgccatgcaaattctccttttgcacaactggacgaggctagagatgttggcagggtctcacatcctcttccaaaaaattatgggataatgtccaatgtcctgccgaaagttttgaatacccaacaataagaatcgaagaacctgccccagaggtcgtcgatgagccagtcccagaggccgccgacgaaccggtcccaaaggccatcgatgagtcagtccgagagactgcagaggaaccaaccccgtaggctgccgaagaagaacctgccgcagccaaagaacaaccatccaagaacctagtcgatcctgaacttatttgtagaccgctgaacaaaaactgcttccgcatcaaagtctccgcgaagcatttaataccagcctcagcagtgttcaagcaatgctcactggtggttgggtagagagcattacatatctgctaaaggacttagttgattactcggagagttgggatatcaacgcgttcatgatcctacttcaaattatctattgccaatcccacgatataccgcggcaactcgaccttgagttacttgcggaagttgctgttctagccgactactatgactgcggggaaactgtagacatgctggcgggaacatgtattgaggctctgaagaaaggtattcccacagcatattgccgggatttattattttggttatgggtttcctggtatttccggctcccttctcagttcaaagaagctacttcaattgccatgttatggtgtgacaatgggattagcaatctagggcttccaatcccggaatatgtcacaagtaaggattaggaaactgttcatccttcccgtgatttgctagtagcattgtagaatcgaagaatgtccgtagggaggaagccatcgataatctcgttaaccaacatcatgatacatgtaacaccctcctaagcagcgatggaggacgtagctatatgtgcagctcgatcatgcatggcgcacttacaccttaaataggtcctccacgcctcgcaactcggtcttttgaagggactcgagatagcatgctggtactctcatggagtgagagtagttattccagataggactgctttttttttcttggaggaaaggaacggctttagctttattccctgggctaagaaatctgagacttcaagtcattgtcaaggagcgtaactacaaatccagcgctgacgacaaagacatacgaatacaaatccgagtcaaatgagaggatatcatccctcctcgtaccttgccagaattctctgcaagccttgtgccacatcgtcgtacaccgcttgccgaaactctgcgttgttaaggtcctgactcgctgcattgaaagcgcaatatatgcaccgccttgttatgttatgcagctctacgcccccctcttcgagagtctgctcctgccatttctgcgcggtattgaaatccgtaaactcattattcatgccgtccggacctaggaactggttgcggaatggcagggtctcgatgcccttcccaaaccaaagctccatgatgatgattccgagggaaagcagcgaagtcctggactcttgatatgaagcaatccccgtgacggcctttggagtgttggttagcgtctccgacgggcctgcaggctgctcgatggcgaaatggctgataagcacggggtgttgagtttcgatagtgccctgtttcgtctgaaataggtagacgtcgttcttgctccacgtgtgtttcagccacggacccggctggagctgtagaacagcgcgagcgagagtaagcgcaatgcagagcctctcttgacgaggaatgatagccaacggcggagcggagat

SEQ ID NO: 2525 - DNA, 2405 bp, Emericella nidulans
aattggaagaggctggcattcaggtcacctggcaccaatacgaaaccctgtgccatgggctttctgcagatggtcccttggagctctactgccatgaaagcgctgcttcaagttgcacaggatttaagagatacaatcaagagtggtcagaaatagacactcaagacattgcgtagtcagtgtagacgtcaactttgaagggccaacactcttttgattggagctaatgatagtccgaatatacattaaaaatgtttaataatagaggaacgacgaggcttgatctaatcgcaaagcgtagaacaaggcatcatgttcagagaagaatcttcttggctacctcgagttcctcaatctccttcatgagttgtaaccgctgccttttgataactggatcatcccccacgatgcctgccagctcttgctcggataggcgatacacaaacgtaggtgacaaaagtttcagcggactgctcgggccactcagcaaaaagtagtttgcagactgcatgcagacgttgtcaatgaagcggctcatggcgacgttgtaatatgagtgcaagatatcgtgaatctgctggaccatgtactcccgattgcctatccccgggagcgccgctttgatatcctcgacccggaccactttgcccagggcagcattgccggcactaaaggtcttgtctgctatgcacttttgcatctttgagtccggactggagaccattagtccactctagcacttacagggtaagacttaccaggtttgcaaagtctccacaaacgatgggtgtagcgatatcagagtatcatttcgttcattctccagcagaaattgagtatgggcaatcgcattcgtgtacttcttctgcagatcatccatcatgatggccagcaggccacgagacatccgtccatcttggcagagatcagtcagcacgctgacgatgcaggcgttgacaagggcaatgatatcgctgatataacccagcgcgatgctcccccacttttttgactgccttttcatgacagtcggtagaagggagctgttgagtgtaccaagctcaaacccacgagaaccaagatactcggcctcaagccatgaatagatgtcgtcttccacaggagggctaataagctcagggccataaagaacgtcattcagttcgactgtactgtcgatcttgcgggtgctgaccatgttctcctcatttccctcgtcggtccggacccttgctctcgacaacagagattgactgctctcggtcccggtgcggaaattgtagacatggccgagattcatcatgtcggacctaaactgctcattgcgctcgatgacagtcgtggcgaggcggaaacgtttgaccttgtcaaagatactgtttgcaccgtagttaccgcgcaaggcattggacatgacttcctggtattttgctacgagatccaggaggaagtcaatttgctggcttcggttcaatctttcctggccaagtgccagcagagaggcctgagtctctttcaactttttattgatatccacacgtatctaggcgccatcagcaaaaatcataggcagggcgaagatcgattctcaccctggggaattcccgtcgggcattctctgtgacagtttcctgtagccgctgcctgagcgattcaataccaaatcgatctgcgggcacaaggccccatcccggtctcgatctgagctctgcctctatgtccgcgcgagtcttgtctccagtagcgagctcgctcttcccaagactgcggactagaacccagccgtgtctgagaggcatggtcttgcccgtaatcaagtccaacacattgtgctcagctccgcgatcgaccagatcaggctttgtgagcacgccaagggtgcgttgtccttcaggatcgacttcgcgagctctttcaattacttcctgcgttgcagcgtcgacgttggcgggaacgacagccaggataattgaacgtgggttgcccatgtgctcctgcaccataccgcggaccatatcgatatcgtgcttggttgtcacaccaggtgtcacacttttgaagattcctggaacgtcaatgacagccagatggtcctcatttgggccgctgatctccagacgaaagatgtgtcgggaaaatgttggcttcgacttgtcatcgaggctgcgaatgcccatcaccgtatgtacctatcattgtcagcgacctcgcacgacagactcaagaaagcctacctcgtttatcatatcggagaacgccttcggatctaggtaagccgattcgcacctcgaccatgctttcagtctggcaacgcactcagggtcagactgcggtgccggcttgatggacgcccggatactgcgaccaacatgaccggaggctgggcggaagatgtatgggtacga

SEQ ID NO: 2526 - DNA, 2165 bp, Emericella nidulans
ccgcagtcctgatgctcggatagaaaggatgcgacaagaggaagaagacagccaaaaaggtaacactcagaatgatgatcgttttaagctgtttgcgacgctggaaggtgaggaatgaggtgcgagcgtagggtgcagggctaaagccctttctaggtggaacggcaaattgcatggtgcttaacttgtcaactaatgatcgcatcctgttttatcctttgttgaaagagtctagaggaagtgggagtcagaagtgaagcaaagcttcagccgacatgatactactaccggatgcggataacaaggctcagtcccgctgggatcatccttggaccgaaaggctggatgactaccaacgctgaggaaaagcgcttgaacgtgcagattgcgaggattcagaagtattggtgaaagataatatggccctgtagagtataaatacagcagaaaagcaaagtgaagaggagtcccgcaaagtcccttcagagaatctaagttcccatagattcgggattaatgtccggcaatcatcatataatacaaatactcaacggtaattcgcgctagaattgtcatgcgaattgacgttaatggttcttttcgttgtaggttggcttcgtgagttcggcaatgttggtatgttcctccacttgcgccttgacttcaccctccttctgtttcaaccactcctcaaatgacggcggttctggcagtcccaaacgctttcgctcttgcttaaattgctcttggattttatcagtctgcatcacctgccatcgaagcttccatccaaaaacacccaactccttgattcgcgcaggccgatcgtccaacaagtattgatcaaggcccccagcctttcgaatcgttcgcaaagcctttcttgtaaccttgatgaaaaggaactgttgaagtgcttcactccatagcttctttcgtcgcacgttgggcttccagaaccgacgcgttttcccttcgttccggccctgggagatcttatttccaaattgaatcgttgcgccaccgtagagaccggtgttggattgacgaaacatgtaattcgggccataaggatatggcggaatgtagtccggtactttcgggagcttctgggcaggtcgtgttgtcgagaacgatcgtttcgaggctgtcaaggacaggctccggaaagccgtgtagagagaggattggaaagacatggtgaatggtcaggggcctgccaatgcttctgaatagagtctcaaacaagctggagcatggcaaggtcaggaggcaggacgagtagtgctgttgatgaggctagagacaatttggttggaagaatttggagttgctgaccgccttggcataatagcgaacggatttcagcaacagctgcattctagactcctcattatcaataattcgtttcttcttttccatattgggttcgttgtctttgaattggctacctagtatattctgatcttccccgtgtcttttgaaagaactctcttcccgcattcgtcatggtccaaatcagcgaggtcaagggcaattcgcgcgacaacagaacagctgcccacacgcatatcaagggcctcggcttacgtccagatggtactgcggaagtctccggcgatggctgggtaggacaggccgccgctcgagaggtacgcgacgcaatggctccctgcctgacgcccttttgagctctgtacgagagctgcaaaagaagtaaacggactggctaacgtaaattcacaggcatgcggggtcgtggtagacttaatcaaggctaaaaagatggcgggccgggcggttcttcttgctggtggcccagggactggaaagaccgctcttgcccttgctgtgtctcaggaacttgggacgaaggttcctttctgcccgatcgttggtagtgaaatctactccgctgaggtcaagaaaaccgaagcgcttatggaaaactttcggagagcaattggtatggagtggttgtatgacattttgggagctcaaacgctaacatcttggctaggactccgtgtgcgggaaacgaaagaggtatatgaaggcgaagtcacagagctcacaccccaggaggctgagaatccactggggggctatggtcgcacaataagccatcttattatcggattgaagtctgctaagggcacaaagaa

SEQ ID NO: 2527 - DNA, 941 bp, Emericella nidulans
ggactatctcctcggggtataagtgcggggagggggaggggaagcgcagtcactaggactccctcttattgtggcgtctcctagccgggctcaacgattttgtacacagtgagagatttacccgtatcctgatcttcttaattacctgcgttccagccagggcgatgttggcaagccacctgagaacccccattctggccactgactcgtcggttctgaccagcaggaacccctagaatatctgacagtggacatgtccaaccatccagcctcagatatctctagccataagtaaatctcaacaccacggcgctgactaccaagccagtacaacggtttggagacatgcataaaaagagcattcttccgctgatcattgaggtccgaggtttgggagctgcagcaacttgaagcgaagtacttgcggggaatgaatgagagtttccactagtcatataccaggactagctgtatctccgcaagggtgtcggtaaccacaaagctctaatttgccgtactagtccaaagctccatctgcaggtcttaagtccccttacagggtcctaggctctttcaatgactcccgcatttctaaggatgcgcactagagctgactttcacttttggaacggtatagccatgaatgcaccacgcagcgagtgctttttggtgtgctgtatagaagagctgacaaagtgatagacaatccattcagcctaaagacagcccagatcttccactgggcataccttatagttccttaaaagcgattagcgtaaattacagtggtcagtcaccatcatcgttgtcatttagaatgcatagtgtaactacaggccgtgaggggtgccttcaggccggagtataaatctattgaagatgtagacaagaaacagctgctactctgatctgtacaaggtgttaatgagcttgagtgagcc

SEQ ID NO: 2528 - DNA, 5992 bp, Emericella nidulans
gaatggagtgcaaaggcaatctaaacgatctaaacgacattaatttattccacttccggcaacgtccgccccgtactacgacgcgatggcagtgcttatgaacatgtgcattatgggacatgattttatttccacccgtcgctatcgagtttgcattcaatgcatttcatgcattctcttctgatggctgttatggttgttgcatatatcatgggtggcatcctgatttgttcggtttgttttcctcttgcggggttgctttgtacacggatatggaagcgcgatgataccccctatttgaatagatataacgtgatcaatcgattcatgaatagaaaccatttgtttttctttttgggcatgtacacgtacatactccgtaataagtagattatacggtgacctgtgcacgcgctaggatctgcccgggtagtgactccgtggcccacgctcgtagattatacctatttgggtgtctctagctcgtggaactgtacagctgcagactgaggctgtaaagctgagataggaacccggcctttcgtcggctgatcaattgtgtcatctcgattttcttttgcgatcgtcgctggtcctactttgagctgcctgatcgagtaagacggtaagccacgaggtctccccattcatcttttctcctgcctcttcacttcaacttctcccacctcccatcccgatcttcaacatccttcttttcattacaattctttaacactgcgttttctgggggggtttattttgttgtcgagaattgtcctttagtttgctggttcatcgccatggccactctctcttcactccgtcatctcatccaaacacatccactcatcgacaaccatgctcacaacctcctctctcagtcagcggcctgcaaatatgccaaatatccctttgagcagatcatatctgaggcgcaaggagttgctctagcaaacgccccttcaacgctatcctttcaccgcgcggccagccagctcgctaccctataccaaagctcgtcatccgactgggacagcgtccgcgctgctcgagaccagtcagtccagcgtgactatgagggtctaattcgcaaatgcttggagggaacacaagtacttcttcttgacgatcttttaacggaaaatgacgttgaactttttgactggcatgatcgcttcaccgcatcagccactaagcgcattgtccgtatcgaagctctggccgccagtgtcctgtcacagattgtccacggagggcccgttccccaggattcttctgacctctcagctttccaaaccctttgggagtcgttctcgcggaacttcagcgctctggtctccgatgccattgccgaccccgctgtggtggggttcaagtcggtgatatgttaccgcactgggttagatgtccagccaaccgatgaccgtgatacagaacgattaatccggtcctttgctcgtacaatctcgcaagcggccgtctccaccccccgggtagaggataagccactgaacgactggctggtgcgccaaacactcaatttacttaaggcagccaaggttactcaaccaaacaaacccttgcagctgcatactggtttgggagataacgacatcaatctgctgaaatccaaccctgctcatctgcaatctcttattgcgcaataccctgaagtcgactttgttttgctgcattcatcttacccatatacacgcgaggctggatatctggcctgcgtctaccctaatgtttatttggatctcggggaggtctttcccatggtcagccgggacgcgcaggaatcgatcttgagagagagtctagaaattgtccccagcactcggttgttatggagtaccgatgggcattttttcccagaaacattttggctggccaatagacagttccgagatgcgctggaaaaggtccggcccctgcattctgctgatgaaagtactctgactaatctggaataggttttcgtggactatgtccagaatggtgattataccattgagcaagccatgcaggccgcagcagatatccttttccacaattcaaaccggctttatgagttaaatgaacaaccgccatctgccgctttatcgtctgggcaccagacggtctcccgtatctcgtcaactgatctgcttgagaagttcattcgaagcaacccaggcgtcaaatatgtctggacgcaattcattgactacactgccacagttagagtccgcatgttcccagtaatggagttcgccaagatcgtccgcaagcaacgccggctcggtattagtatggccaccttctggatgttgcaagacgatgaagttgttggcggctcgactacgggccaattctaccttataccagacctatccacactcagcccaaatgttggaatcgactccaagagtgccaccgtgatgacctggtggaagagcgaacaaggcgagtccttggaggaatgtccgcgcacgaatttgctcaacataaacaacaaactcaaagacgagtttggtattcaagctacctgcggctttgagattgaagtcgttttcttgaagccaaccaccgacccatcaacaggagaggaagactgggctccttctgtgaccaaccattcctggtctcaaatgactcgcgagacgcgccgcatgctccccctactcgaagaaatcgccgaaacgctcgcctccatcggcatccatcttcaacaattccatgccgagtccgcccctggccaattcgaattcatcctcccacctgacaatcccgtcgctgcagtcgacaccctcatcaaatcccgacaagtcatagccaacattgtcgagaaacacggcctccgcgcaacactctatccacggccttatccatccgccgccggcacggcgtcccacgcgcacgtttccatctccccttcaacaaaagaagaatcattcctggccggtgtgcttcagcactaccccgccgtactggcattcaccctttccggcgacgcaagctacgaccgcgttaagtcgggtatttgggccggaagcgaatgggtcacctggggcacccagaaccgtgaggcgcctattcgcaagatctcaccaggccattgggaaatcaagtctcttgacggcttggcaaacatgtatttggccatggctgctttcctggctgcgggatatacgggagtaaaagaaaatctcccgctcactatcaaggattgtccatgtcagtttattgatcccattactcgtataaatagctaacgttgaacttacagatgacgcggcatcgctcccagaaagcgaacgcgccgcactcggcataactacgaaactccccaacaccctcgctaaaagtcttgccgcgttagaatctgacgagattcttaggagtcttctgggcgagaacctggttgaagactacatcatcgtgaaacgagctgagagcaagaaactcagtgccatggatgaaaaggcgcgcaggaagtggcttgtggagaggtattgagtctaatctttctcctgagcgtattcacaatatttccacggcctttatgaataagataatatgatgaacactataaacttgactatgctagcacttcatgagaggataccaatttgattgaaaggagcaatcttacaagctcgagccttgaagcatataaacagtacctgctcacgttttggattcgtctccaggcagcaggctagtaccgtgagccgttcaaagagtggagacggacaacctagtactgcccatcaatcgttagagtacctgtcttggtaatcaggtactcattcacggcaacttcctttccgctctcctttccataacccgattccttgattcctccaaacggcgactcagccgcagacgagtttcctgtgttcatgccgatcatgcccgcttccaagttctccagcagtcgccacatacggtcaatgttcttcgagaacgcataactagccaggcccatgctggtgtcgttcgccagcttgacggcttcttcctcagtctcaaagcgatagagagcagcgatcggagcaaaggactcctcgcgcgacaccaacatgtccttggtcatgttttttaagattgtcggctcgaagaagtaaccctgtgttccttggacacggctcccgccaagaatcacgtctgcgcccagccgtcgcgcgtcttcgacttggctaatggccttgtcgatactgcgcggggtcgtgagcggtcccagagtcgtgccttctttagcaccatggccgatcaccaatttggccgtgcgctccttgagcagctgcgcgaatttgtcgtagattccagcctgcacgtaaatccggtttgcagtaatacaagcctgaccagcgtggcgccatttgagagccatcagctggtccagcgcttggtcaaggtccgcgtcgtcaaacacaaggaatggacaatttccgcccagttccaatgtgaccttcttcaacccgtgtgcacagtgagaggcaatcagcttgccaacccgagttgagccagtgaacgtaaccttcttcacgagcgggtgcttgcacagcgcttcgcttagcggcggcgtgttttccagatccgtcgtaagcacattgaacactccggcggggaagcctgccttctccgctaggtgcgctaataccaaggctgtgaggggagtctcgggactgggcttgacaatcatcgtgcaaccggcagcgagagctgcaccggccttccgtaacaccatagcaatagggaaattccacggcacaagggcagcagcgacaccgatcggttgcttgacagtgaagacgcgccggttaggcgcggcaggcacggcgattgacccttgtatacgttctgcctcacccgcaaaccaccaggtgaaaccggtcgcgtagtcgatctcgccataggattcggcgattggcttgcctgtttcatgggtgaggatcttcgccaggtcggatctggcctcacggatgagcgagtcccatttcaacagccactgggcacgttggcgggggttgaccttcttaaacttcacaaaggcgtcgtgcgcgatctggacggaaaaaacgacgtcttcagcagagtttgtagggcaacttgcccaggggagatcggtaccagggtctaacccgcattaatcacgaaaatgagcatgaaactgtggttcttcagcttaccgacgacttcgaatcgcgcaccgctttttgctgtaacccaagcgttcccgacgtaggaatcaaagtggagcaagtcagggttgtccagctaatacggagcaatcagtaccagtagatggctggttcggaatgacgtacctcgaaaggaagcttatattgctgagccatatttagccactcttactggatggaattattcgaagggagatggtagagacgaaggagatggagacgagaagaagtgacgcaggcaggatagttattgggattgaccccgcaacccctcatcttatcggcacctcggtctccacggtgaagtgagtagcgattggagactctccaattgatggagtaatgcgaagatcaaagtaggaagtagtgctaaaatgaaagtgctggctaatacatgtgctaaaagtaaacggatggctccgactctgccagaagctctgctcgtccttctcttgggtgtcctgtagaagggcccgcatcaacatgcctgctgttgagattaactggactggttggcgcagggatacccttatccctcgtcggcagaccccattcagagaatgcatcgcgtgcggcggttccatacatcggcgtcttttccgcccaccagagctccaagtcgtccgcattgcgcagcgggagccgtgaccattcgttgacggcagccgttcgcgacgggcctggttgagacgagttggcaatcctgaaggaccgcggcgaggaggtccgaaagatatgaactacgaactataaagagcgcgttctgttgctgcgagccggcgtgctaggtgtgaacatagcct

SEQ ID NO: 2529 - DNA, 1229 bp, Emericella nidulans
gatccgccgcaattaaccctactaaagggatctcggtcctcataagtctggccgttgttggtgtcaatgacacccataacaaccgaggtggttgcggcgtgagtcctggcgtgctgggcaaggttatcactccgggagaatttctttccacattcaccacactcgaatggcttgtcctgagtgtgcagggaacggtagtggcgcttgagatgttcctgtcggcggaagcggcgggagcaaagattgcagacgaatgtcttggaagggtcgtctgtcaaagactgcttgcgaccgcggcgattgaccgagacaggagcagatgttgtctctgagccagacgcgctgaccaccgagttctgacgagcttggcaatctgcgtgatcgcgagaggtgggctcaattgcattgtcaatggacatctgagcctgcactcctgtgaaagcctctgagccgttctccgacttcctgatggacttgcggtttccgcgcttcttagatgccatgtcctcctgactctcactgctatcaagctgaatggtaggaagaccaggaagtgccatttctagatcctcggactcatccattccgtgctcgctgaggaactcatcctcatccaatgaataagttccaaggcgctgtcgcttaccgccgagatagaatgtgctaccgctagggtggaagtccaacaggcggttcacaaactccatcatgggagccaagatccgtgaagctgtcaaaagtaggcagtgtgctgagcgggtcctcgttggtagaggtgaaagatggagtgggattctcatgcacgggcagagtcacggcctcgctaccgagaaccacctttggttcctcatcatcacacgacaaagaaggcaaaggaggaagctcagcaggagcgtggtgtgccgactctacggtaagttcccgaggatcgcagaaagatgtggcgtgttcaagctggagtgaagattgtgattggccgaacatggaagaaactggggaaggcgatggggaaagagacgggcatgagcttgccgagaggagatctgagccctgacttgagattgaaggattgtgaatgaacactaaagaaattagtactgtccacctcttgactatcgttctgagcacaatccacatataacttaccaggtgtcatcgcaggcgaggccgagcgctgccagtcaacgctggctaggatccctatagtgagtcgtattatgcggccggga

SEQ ID NO: 2530 - DNA, 1897 bp, Emericella nidulans
atgccaccgtagcggtgatcagaggatcgacttgctgctcggcggccatgatcacgacgtattaaggaggtttgcttgtgacacggattttactgcaggaaacgtcgagcagggacgcaaagtcaccgaggtggaagtagatggaagagtccctgatgcagagggaagtataaggctcgtaaaaagcgggaccgactggagaggcttgtcgctggtacggttgattgtgcaacgagccgagaatggaaccgtagtagcatcaacagtgaagtgtgagtaccgcatattgcccagacttcagccttcacacggctgacgggaaagtgcgccaatacaccgatatccaagtcgcagttgcaacaccacagccaccaacgcatgttgtcgaaactctgcaggccattcacgatcaagtcggaaagctggttcaaagaccgctcctgcacgcagctaccccaatagatggacgcaatgccatgatccgcagccaagagactaacatgggaaatatgctggccgatgccgttcgagcattctatgacgcagacattggattctttaacagcggcgcagttagaagtgactgcatcttgggcgcagccgacccggacggagagcccctgctagtcagagatatcatcagtaagccaattcttgcttgcaaccgacaagcactgacaagaatcgcaagatatctgtccgttcggaaattccgttctcgttaagaagatgcccggctcgatcatccggcttgcactcgagaattctgtctccgacatgcatactgacggccgatttttgcaagtgtcaggattgcgagttgtggcgagctggcaccaacctgaatggtctcgagttgtagacgtcttttttcagaggtctgatggtagcctcgagccgctggacccggatcgcacatataccgtcgcgatgccgtcattcatagcgcgcgggtatgacggattctcttggttcgcgcaactggagaccctcgtaggtgaagaggcagccgtaacagatgctggcctgctccttgccattttcgggcatgaacagtcatccgatggtgacatgcatgctataggtatcgagcgagcccgagcggtgaccatagtcggtcagaatccgaccgactctttgcctatcgtgaaacctgttgtagaggatagaatcaaattcgtatagagtcgtctagcgtgccaaatagatctcgattgctgccagagaagtctcagagagtgttgatgccttgacctcgttgacatatagcctgcgagattatgatctcagtacctttgtccttgacgtctggtgttgcacataccactgataattgtccagattccgagtgcagcagtgcaactatgtgaggtcatcctggacctggggttaagccggtggatgccttgagacccatctaaaaatcttgtctatcgcagtggagcactgctgcactggagaccgtcctgtttgttgacagcagccgaggcctggttatttggttatcgacgtcctccaacttgccaaccgcctgcggatcgttgaggattcgaggaccattcgcaacactatcctggaaatgagcctgcgaagaatgagcatgccagtgacgcaagatctcgccagattgagttgaagattgacaaacaaacagagagacgatcgccggataattatccagaaacatgatgctcgacctcggctaccaccaagtggaccgccggcttatctgggtctatgacccaactgcaacgattccgactggaggatcggttggaacggcatcgcaagagaaactcagctctctggagttttcgagggacctcaaaggcagaaacgcggattggacgagaattacgaagacaaggagaggaaagtcgggaggttgaagggaaga

SEQ ID NO: 2531 - DNA, 1025 bp, Emericella nidulans
aagggcgcgtcaggattatactgtccgcggtaaggaaggatgtttaagaacgtccgaacaagctccagattctctccagtcacgttagaaacctgaaagatagggcatatccgttgagagacaaactgcgtggcagtgttgattgtctcctccatgtccttcacaaatatagggattttccgagctccaggcgacttgaggatcttagtcaactgggagatagtctcttgcaaaatctgaggggggcagatatcgattttggtgattatgaccataaccggcacgttcagagccagggctatgcccagatgttccttgctcataccaataaggccattgttggccgcaaccattagaaggcaataattaggattgctgctcagcatgccaaagactgtcgtccgcaggtaacgttcgtgaccggcgaggtcagagaaggagatgactttagcggaccgtttgccaatctcttcccaagaaagcttgcggccctgcgagctgctcacgatctctccttggctatcaaagcccataatctctagaccgaccgagctggtcctcccgctctcaatctcgtgcttgtggcggaagagattcactcgtgctttaccacgcccgtcatccaagcctcctttcacgaggacaccgagcatggtactctttccagcatcaacattccctaccactgccatccgaatctccgccatttcctctattgtttccgcaggctgccgaatgagaatcttaccccacgaaccctttatccggtaatttgtagtttttgcctcttcgggaccgccaacattgtaggttaggagaatgcggcaatgtgcggagagagttgttgcagcttctcgcagccggttcaaggctatattccactgatcgaggctgaaggacatggactctcccccatccttaaccccgagatcgaaaattgtctccccatggccttcatcaatgccgctttgcaataactctggccgggcccttgaggttttctttaaaatttgctgtctgtaccg

SEQ ID NO: 2532 - DNA, 2309 bp, Emericella nidulans
gatcctttaagacgctcatgcatgaaacaaatcgttcattcatatgacggcgccccatgtgttcagtcctctcccagcctcgcaatagctatcttccgatctgaccccgccgtccctcgaacgcacatggcttacagcacttcatccaaccctccctctcgtcgcaacttgcagctctgacaagacggttcgcgtttattccctggttaactttcgcctcctttcgacaatttctggcggccataagcgaagcatccgcacttgtgcctggaaacctaacgtctcaggcgaaagcgtccttgcgacgggaagcttcgacgcaacggtaggcatttggagacgatgggatgactatggagaggaggaaaccttagcgcaaggaaataagaacacaaaaaactttggagctgaagaagaccgcgaagaagacgaagacgacgaatggcgttttgccgtcctactcgacggacacgacagcgaagtcaaatccgtctcgtggtctgcatcaggcatgcttcttgctacgtgctcacgggacaaatctatctggatctgggaggacctcgaagatggagacaacaatttcgagaccgtagctgtgatgcaggagcatgagggagacgtcaaatgcgttgcctggcaccccgcagaggaatgtcttgccagtggtagttacgatgatactatccgaatctggcgtgaggatatcgatgactggggtcaggtcgcctgtatcaaaggccacacgggaacggtctggggcattgactgggaggatgctgagaatgtgcctttcccttcaacttccaatggcgtatccggacaggaggaagagtggaaaacgtggcatgctctttcggggcctcgtcttgtgtcttgctcgcatgatcaatctgtccgcgtttggcgacgacagccaaaagcgcaattgaacaccgctggagctagctcgataccgagtattatccggccgtccggcacggatgaaacgtgggaggaggatgttgttctcccgcatgcgcatgagcttccgatatacgctgtcgcttggagtcgacgaacgggcttgttagcctctgtcggcgctgacggacgtcttgtggtctacgaagagcgatttgtttcgtctcatacgaaacctcaggccatgaatactgatgaagtctcgccgaatcttggcgagggagtatgtgcgccgcacccatcaacggaatggagcatcgttgcggtcgtttatggtgcacatggtatttatgagatcaaccatgttgcgtgggcaaaacgtgccgacagaggtcgtgatgggaacaaggaggaagaggtgttaataactaccgcggatgatgggagtatcaaagtgtggacgttgacaaggtgacctctgcacccggtggacgttccgtgatacagttatgttgtataataatgtgcttgatgaggtatgggaacacggtataggcaatagagcaaaagcacagatcttacgcaagaggcggccaattcataaaatatgtctggttaaactgtattccacgcttatgttgcttgacctgggcttgtatatggcggcgacaaaacaaatcttatcaaacatccaaaaaaaaaagacaagcgaaattacgttacaagattattctcgcttttcgatgaagattcttgggcgcgtggtagatcctgtcgatgcgcttcgtcatcactgtcttccccgacagcataattttcccggtccaggcctggcgagtgtaagtcatccaactcagcctcatcaaagtcaccggcctctacgtctgcgccgttactatgattgttatggaaacggcccatgatagaggttctacttggggatttaatggcaattccgctgtagccattgtgtcgccggcgactgcgccagatgagaaaaccccagaccagcacaccgataataacaacgacaaggacggcttcaccggactttgcgtaggcgtttcactcggtttctttaatcttttgctgctcttcctcttggtgaactgtgctgttgggctgaccgcccacaaaagtttggggcaacggttcgccattgatgcggaaatccaaggtgcaccgccgatgctggcgatacaacgtgcatgaagcggccaccagtcttggtgcggggaaaaaaccagggggcctggactgcattgtaaggaaacctagtaagttctgctacgtagaaccggccgttattcgacgtcagtggtgggagcctacccgggtggtaaagcgacccctgccattagtgtatagtgctacccactgatgaatattttatccctaagagtttt

SEQ ID NO: 2533 - DNA, 1744 bp, Emericella nidulans
ccaggacaatcccgctatatctcccacgagccatggtttgatgatgggtgcatatacctggttttcgcataggcgcacgtacactgtcgtgcgaggctagaactcatgccatgatcgcaggttggcacagccaggagactgtctgaaacttccgcattgagttcgtatattatggaattagtggtccaagcatgtataatggcccaagattcctatatttttgcgggcctgtcggtcactatcccacctggaccccagtgggagtaagaggagcaggtttgtaggctctctttaagggtagagtgcgccacacatactctttaatagaatgaccccaggcgcccgccaacattgagtcatccaaaagcatatactcagatgagagcaagtagtggtgagtattttagtacgcgctggctagatgatatcgcaaaaagcgtctgtcctctaggttccgtataggtcttgacctcttgcatagtctcacaagcgccgttaaattcatatgagccagtttattctccttctcccagctagctcttatctacatcaccaactgcaataacaccaaaactgggctacttcaaacggaggcaccatcatgccgtctgcaatccaccttccacatttcgtgtcctatagttgacccatcaagctacaaccagacaacctcaggtccccttccagcctgcagaagccggacgggaagaaatgggacggtctcaaggcaatatttcttgaactggatatgggatgccagcctttcctggccattcagctaatccagctcttaatgctctaggagcgccatagctaccgcttgtttccttctaatggccaatataattaggatgctacaagtatctgcttgattgttccaaaagctcgacggacaataccgtttcgcagccagtttatcctgtctgatccatcggaagcatatccgagccgatcggatgttatgccgacagttatctcatattctccagcgctacaaagtaagtgcattattttaggttgtatcattgaagactgcactcatgataccgaactgttcatgcctggggaatactgatgctagaggctagatacgaagaggtcgcgggtagactacatctattgttgtccaggtgcttatgcgggggagtaacctgtattggagtaattattacctttccatactagtcttattagggtataccgtagttcaatatgtgtctattgtgataatgcagggctgaaacggctgtgatagggaacttattgaactggtctaggaatgtcatcatcccattttcagatgttgagcttgtacgcagatcataacatactgtagagaggaccttggaggtagactggaggcacgagcggagttattgaaggtgcaggtccatctcaacaaggtctgtatgaggaaaagatatcctaggaatctaacacagtgcaagtgtccacagcttgatggttactgctatcgcgattgtggtcgaatccagaataattaaagcatggtggcatttctgtagggtcggttgaaaagtatgtaaccctcagtgacatgtcagtagccaatgtcgttgaggtggcctgaggaccttgcggattcagccacatatattagacctctgtatcctatccagcccagaaatccaaccatcccttctttctcagaattaaacacacacttgttatagcttcatataattcataacttattcaactacaagcaaattttataaggtat

SEQ ID NO: 2534 - DNA, 844 bp, Emericella nidulans
cgggggttcatggccaggagatggatgagtttaatctatctagcttagctgcccatttcactgcagctacctgaattaatatgctgttctcaggaatatggagcgaaatcataagtagttgaaaggtcgctgggtttgtgaaggaggggaatctacgctgaaaaccgcgcagcaacccgtcactgggtcatatcaagtaaaatctacctaggtcttctctaggcgtgaagtaacttgatacaggaatgccgatgtagacgaggagcgcagacaaatgccactggcagcaagacggaacttccagacgggacttttgaggagctctgactctagcgtgattacaatatggatatacccattccaataaagagaaattaattatcgcctttccgttcctgcagtgccgctgaatcctcgagttgggagcatacccaacagctagcgagagcagcataatctgattgtactctactcactaagagacatacatacagctcttgcttgtgttctcgaaagtatctcagtacttataattagactcaagcgacaagtaaactcgtgttctcggtatattatattggtatctcatcagggtatccaggcaagctagaagggctccgtccatctggattcgcgaacattatatacaaagtccttcgaggaacccttagaatgcaaacggatgatggtacaaagcaaagtagagtagacgttcaaggctgtctatccggacaatacaacgcggtgcaagctgaatcaaatcctgccagagacgctgagaatacgacgggaacgcaatgcatgccatgcaaacgacagagcaggatgagccataacgccgatg

SEQ ID NO: 2535 - DNA, 4401 bp, Emericella nidulans
tgagaagctggacttcggcggggtgtttgaggcgccaaggcagtgtcatctttactggatggacgctcttctccagtggtgggagaaagcgatacggaaggtcttgaagcgtcggatagagaccgagttttgggtgaagggcgcaatgatgggccaaacaagctggctttttctcctgcagagtcggtctgggtgcctgactgactcaaatcaggccgttccgatttagaccgctgagacaactgttcgctgaggttgctcgcgaatggaagcgaaggggcgctatgagaagctgtcgatggagtcatggatggtgccatactttcgctcgtcggcctcgtactatgcagtcatggtgtaattggactcggtttaggttgtatgcaggattgcaaaggcggttgaggtggagggcaagtcgcgaaggtccctaagacttcgaagcgcgtcggtaagcgccgaatcgcgtcaaaggaaagggctgtctcaacctcaacggggatcgaagtaacagaataaacgaggctaccggaatgtcagcagggaaaagctatgttttcacagacgcattacgcgcaaccaacaacgatgggttcgagatggtttgacgtctggtccatagcacattaaaccagccccgcactcggaattacttctttctcattggctttaacttgacaatcaaggattactaattattacatatgagttccccaacgggaagtacaactataatgtgcgggcgccaccatgtggtcccagagatgcgattggactggtggaaggagcaggcaggtgcgctgattgctatgcatacaataatcgattaattcatatcatttcaattcattaagatattaccactatgctaggctcattgcattgctgaaaggagcaacatagcactcccaatcattatccgaggaatcgcccaatgacggggtcagcacattatcacgaacttgccataccttcacaatcacagctctggtacgagctacacttaggacgttgtattctgacatggcagccagtgcgcggaggatcaacggccgcccgcacacttcatccccgttcgcatctttccagagctcatcgttgagcggatcaagttcaacggcagcaacgaaaacaggccatgccaggcctacataggttcccgcatcaagcatatccgagacaagcctcagtatctttcggacatactcaaccacgagcggcgtggtgggcgaggcgtcattcagtgcgcagtgcagatatagtacagcagcaagccgtttcatttcagcaatggcttgaagggctgcatcctcttcttccacgtcctggatcaattcttcaagttgtcgacatagagctgccgactttgttgaaagcgccgcatgatctgaattcgaagccagttgtcgccttgtcctacttagctcggtaatgtctgacagtattgaaaccaattctggactgcatcccatccaaggatcaattttgcgctcattgtgctgccagtgatcggtaccaaagaggggctgttcgccacaagcggtacggcccatgatatcctgaaaggcaaaaaaccgttcggcgaaggtagcaacttcttgctggcgtggtgttgaagcagcttgctgccttctgaagcggatgagctcctttgcgccctttaagtgaacaatccagcgctggtcgcaatgatcaacaagttcatagagacatagcagcatcataacaaccagaatctcgggatccgaggtggaaacgagcgatccaggagcggtcaacctatagcggagacctttcaagacttcggatttgagacgaagtcccagagcacagtacttcggatcgtctagcgagagggcgcatgctcctaaggccaatatcgcatttgagactgtctcggatgctgtcgtgctaaatggtatgattatcgatgcgagtggtgatggggtgttggcacttgcaattgtccgagggcatatccgttggacataataatcgaacaagtgccctcgaattgatccagagaactgcgggaggactgataaagatggcagcggtgtggctaactgtatcgtcgataatccgagtccataggacgaagaagatttcattcgattcctccgagtactaacaagagcatgatcatcctctgtaggcgtgacctggtacggctgccgaaaagcatccgttaaactgtttatgaagttccaagcctccacccggggaattagacaccattcttgctcgcgaaacgaaaaagcgttcgagctggaaggcgacggtgtggatagattttcggcagctttggatttgctccaaaccccagcccttccaaaagcctggccgcgactggcaaattctgactcccacttcagaaccaccttggtcgaacaggttagtcctcgcttctggcatttggtcaagcctggcttttgttgtcacaacgctctcgacttgcgcgacactgggagcatctgtcgcgactgccggtcttctctgaacccgtcaggtcgttggcctttttcctaggcattcaacagaatgtgcaggaatatgcgggttcattgcagactttgaacgcaggatacctcagcctagactgatctcggttgaggaagttgaagatgctcaggattgctaatccggtggcgaagagatgggtgggtcctccaggcctgaggcaccagtggcatcttcaggccactgctcgtatctacctcacttagtgctgttgtcttctgctaataatcctgagatgcaatgagtgggatatgacgcgctataaagatgctttgtatggtagttgcggaaacagatgttgcctacgtggttgggatctgtaagcatgttggggttcgtctgatcaagcatactacatataatatgcagatgagccataattcgttatcttcgcgccataattccatatacagttgatatacatatattcagaataactatacttcaaaattcctagcagtgaacttcgtcttaaagttatactgcctcacaaaccaagcattccacaactcccactcttgatccgcatgcgcaagttgtatctaatgaatgtcagcatcacgataaccactttagatgttcaggggtaataaaaaaatggaagagagaacgcacatcaaacctcctcaaaaagctcggcacgagcttataaatttccatgagagatatattctttccaatgcacgtccgcgccccagccccaaactgcagcatcgtgccgttcatcgtcttcaacctctccgcgctcacgttcaaccaccgatctggaatgaagctatcgacatcaggtccgaagatttcttcgcgcctgtgtaacacccatgcactgcaccctactattgtacctccagggataaaatgcccggcgatatcaataccggaagcaggaacaacgcgttcgagggagagacctgcagctggatggatacggaaggcttccttgatgcaggcgtcaaggaaggggagtttctgagactcggaccaggtaactaaacctgaggaccggttttccactattccgtgagccacggcgttgtccagttcgcctcggagacgcgccatgtactcgggattcttgagcaggtaatagaaaacagcggcgagactgatagctgtcgtctcggagccggcaaaggccatagagacggccattgtgagaacgcgtttctccgtcatgaagtccgggcggtctttgccggcttggataaatttcgtgagcaggtcttgctgttgctcggcctctgttctggtgccattatcagccatcaaacgctcattcatgcgctgtcgcgcaaatatagccacagggtgcgagttatccgcaatcccccatctctgcaaaacatcataaatcggattcttccagagccatttatcaagccagggcatttgaccgacggggcctgcgtagtcaaagatccgagcgagtgatttcagaatcccgtcgatgtcttcgttcttctctataaaaccgtgccgtttgctatacgtaatgctgccgatgacgtcgaacgcaaaaaactggagccagcgtgcaaaatcgcatgtcttgccagaattagcgaataaagctgctgtttgatctaaaaagagctcgactgtttggttgaccattggctcgtattgaacgagggaggacattgagaaggcgtggttgacggatcggcgaagattggcgtggaagctctcatccaaggtcgagaaaagggatggaagaggctcgccttttgagacagtcatctggacggggtagaattctgactgggacttgttagcctggaaggtatagtaaaatggctggggaaacagaccttggtaaatcccttgttcagcccgtaaatgactttgatagcactcggagacgcaaaggacaatgtgtgg

SEQ ID NO: 2536 - DNA, 1761 bp, Emericella nidulans
ctgtctactggaaccggtgccaaaaccagaaggcccagcattcgtactcgatcctgcactcccacttgctgctgcgcttgcagcggcagcctggctttccaacctccttctcaaaccctcaaaccgggcctcatttctgccacttctagcagaaaacactactccttcctccccaacgacccagcctggaaccctccacccggaactcccactccccgccgctagaggcaacacctctgctctccatgcaacgcctacaatccaaccaattgcggacggaagaagcatgtatgggaattgtgacaatgagagctgcgcggcgattaggtatgttgttgacttgtcggtcagagaaagcgttagcggggagaatttgtgcgctgcgtttcgtggctgggaagacggcgaaataggtgtgggtgtagacgtagacgtagacgttgagatcgtgtaccggtatgtcgagggtatggaggcgtggtactgcgccaacaaggcgaatatagtcgctgttgggccagagggtagataatttactttgccgaatgagagcggtttcagggcgagtgttagaaggagtggagggaggagcgtcgtgtaggggagtgttgaaattatgaatgtctgttccatcgctaccagtcagccatcatctatcccatttcatatccattttcaaatcctatccagcaaaggaaggatgggtaacaagtatgagaacgtacagcaaccttccgagcaccccacccccgctcaacaacccggcaatgataaacgagcagcgcggcgaacagggcctccgtagagtttgcgaacccggcagcctgccataccaggcagcgccagaactgcccgtagggaaagagatggggggagatgtaaatggaggcgaaatgtttgatgtcgaagatggagagcgcgattgaggaagcgattgtgtagatgagcagggccttggtgagaggagtatttgtgaaaccgctagtttgcattttggaaagaatggatggaatgtcctaaccgcgcaaggtggcgccgggttagctgggttgttgctagtatatcagtagttgttgtcttaagcaggatgataatggagacacgttgcggagagagcgactgtgtaagtgcaggagggttgttgttccagagtattcagggacctcggcatgccgagatctacaatcttactactagaacaaaagtccacttcataatatattcttgcatttgcgcatgtaagtcctcgatgcctaatttattgctcaagtattgctaggttctatatttttcatctcctcagccaaagcctctttataccgcatcaaggctgtgtccaatgcccgaatcgtcggccctaatagacgtttcaccgcttgctcgccacccggtatactatccagattgacacgcagccttttccctgtagcctgtaacacctcgcgcgcatgctgcttcaccttttccacctcaacttgacgctctttctctgcgtccgtcgcaacggcgttgatacgctccatggcgcgattgagtgattctactagtgacgctacttcgctcgcacggtctggattgccggatagaaatgcctgccagaattgatgcagaaattccgtggtggtcgcgtgcgtaagtgtcaggcggtcgtacagagctgacgtcagtccatatgtgtctgagtttgacgcaacctgtgtctgggtacgcctgtccttgatcacgttgaggatttgcgtggaagcgaggtggcggtaatgc

SEQ ID NO: 2537 - DNA, 2012 bp, Emericella nidulans
ctctatgtgaactatgggtatgatgcgcttcgactcggcaggaccgactctaggtcggattacccctttactgttccttcaactgccttcccttcctccacacctgtgaatgtccccctcgccagcaccgtgtctacaactccgcaaatgatcccccaagccccattcaacatggtcgatccatcaatatctttgccatactcttgttctgcccctcctgctacctcaatgagcttcctccctccctccccagtgagcgaggtaaaagcttcggcgcctacagagggggacgccgcgtcaaatacgccttcttctagggctgctcgaagggcacaggagcagattgtgcatagcgcaaggcctattgctcccaagacagagacactcaaggccacgccgccgaaagtggcagagcataagatgatccgtatatcatcgtctgacggcacttccaaagaggtcgctgccattcccaaagcctcaatccagcgtccacctaggcaaaaaacatactgcaccatgtgtaacgaccagcccgacggctttcacggagaacatgagcttcgtcgtcacattgagcgtgttcatgccgtcgtacgaaaagtctgggtgtgcgttgatatctctcctgacaaaaagttgcatacctcttgctacgcttgtcggaccggataacggtttggatggttaagcaatgctgctgctcgccttcgtcgtacccatctcaatgcatgccaacgtggccgcggtgggcgcggaaaagacagtgagaaacgtggtggcaaagggggtggcactcatccacctatggacatcttgaagcattggatggtccagaaagaggagattgttgttgaaaatgcacagatgtatcctctcgatgcggacggactagttgatgatattgtgcctgttccaaccaatccgctagacgacacttcattcgaatcgctagcctctgaggacttgtcttcacagggcacggaagcaaccggcatgaacagttacgattcatttacttcatttcctacgacgaattcgtatccgtcgtttgagaacacctgctacctcgattctcaacctctagttcctgaagtaacctcgtacgtctgatgcctctattctaggaatgttcgatgatttcccgatctatattcgcaccttgtgtttaccaagtacgtcgtcggagttggtgcttatgccttttcgcctttaagcatgctttctccttactttatctttcatcttcactttttttctcgtctcataattccacaagcttgtggaacttgttttcttattcacttttattttcacattctcttttttttttatctatttacgggcaactggtttccgacttttacctcattgggggcttacaggtcgaatcgcgacctcgtaatccccctcaaagagggatacgacataatgtgtgatgatgagcagcgaagcagtccacgagactatacatccagaatatactgattcggcgagcacgcctaagaacaacaactcaactaaacccagaccgcatcaacggtgggaaaacaagatgagctactaattttcccaatgcaccactgcagggactttggtaacctccaatcttcactacactactatactagctgcaggcaagcttgtcctgtaggctacatctattactaagcgcgcaggaactgaactgaaactcggtgagataacgagcaagggcagtagcaagccagcagagttggttgacttgatcaacttgagtcctcattatcgacatgtgcaatgcgcattcattgcggcattcctggttcccaggtgcctagcaggaactgacgactgctagctcgctatcatcccctcgtttctttgagccacgcaagcagtcgggctatgctgctgagcagccagtctgaattatttttattatagatcaaacatgcgcgtatgtggcgcagttgagctgggcgtaggacttgtggactgttgtggctgagacgcgggctgtaaacgttgtc

SEQ ID NO: 2538 - DNA, 1082 bp, Emericella nidulans
aaaggaagcggtggtatttaccacataagaagattgacacgctgtccagcgtgaatctgtacggagcgttcttttctggggcgtccggcggcaaaggcgtttatcaagcagggttattaacgggagtgtggtgtttacgggcgagtatggctagctatagacccaataaggtaccttctcccaatttaccgttaccgccgtactcttgcacgcgacgagggggaagaaagactaaccgtacatgatgcagcgcgttccttcagccccatacggtgcctccaaagccggcgttcgcaacatgacccacacccttgcgatggaatgggcgcagtacgggatccgagtcaacagtgtctcgccgggccttgtgcagactgctatgacgtattgggtgccgcagcagccggattgggagcagcagctgaaatattacggaggtattccgcgcctggcgcaggtgcaggagttaggaggtgcgtatgtgtacctgcttagtgatgcagcaagttatacgacgagtattgatatcccggtaaatggggtgattggaagtaagttctctaatggagagagtgcgcgtgcggtgctgatatttttgtagtttgttaaagatggcccgatagggttcgcggaataccgtcagtggtcctagctgtgttggttgttgccatgatggacttaatattgtgtttgctcgattagtggttgaacaattgccaaagctaaatagattcaatgtcaaaattgatctttccaagcccccgctgccactgactgacctatatgggcattgggatggactcccatcaaacgaggagctaaagtactcagttcgatggacacagagtgagattaccacccatccaatggcgtcagcctcgctacgaccccatcaacaggcgagattgtcgcagtccttctaactgcaagcttcttccccggatctgccagctccatctcgaacctccccaccattgcagcaaccaggcaagccaactccgcctttgcaaacccctgtccaatacagctacgtggtccatgcagaaaagtcatcagggcgtagttctaccgactccagcgga

SEQ ID NO: 2539 - DNA, 1689 bp, Emericella nidulans
ggcagggctttcatagtaaaggtactcgcgtacgttaaagctttcacagaaaacctggattgtatgatcacttgaaatcattcttcagataaatacagtagtactcgctttgacttcgtaggtctatttgacttcgctgtctgctggaatataccgttgactctatactcaccgctactacacagacgtgcgatgcctgcgtagaccaggaaagcaggtttgagtgggagtccaggcgaagggaaagcagtaactggtatcgtaggattcggggcgagttgttctagacaatgacacagcaacgttggacagcctatggcctcaatgcccccaacgcccatttcacccggcctgcctcactgcctgatactagaacattgactacatgatactcagagcatcggtatttagattctgacgatgttttaagacgttcaggatacacctacgtacatctaccagtagctgggcatacagcaccatggagacttttaatcaagacgacatccgcctactggcgaaatgccaaagataatcaagcgggagaggagagtaggtcctgccacttacggaatgcattgtatgggtcgtagatcttcttcagctgctgcagtcgaggcaggttgggtccaaagaggtacctggcagcgaaatcgtgccctaaccgggagagaagttttagcaatctatgctatgccatgtcactgtaatataagcaaagtgaccaggaccggcctcccactcacctgcataatttggatacgcggccacacctccaccagcaacctgggcccagtattgcgagttctggatcttggccagcgtagcgtgtcggtatcgatcaatgaagacgtcgaggcgcggatcctgccagcacagcagcagaccgacgttgtagaggtggtctcgattcgcgcacgcagtcgcttccaccgggacgctcatcagtttggagaaaggcagcagctcgatggcgagcacgctgtcccccatctgtggaaactcctgcatgacctggtcaaagtcgcgccagagcacggggataaggtccttgtctggtgggaagcgcagcttggtgccaccgccgctctttcgactgcggcgacggtcgaaccggacgttggcctgacgcgccagttgccagtagggcatcatgcctgtgtggttgatgaccgggtccagggcgagcaggggcgcaaagaaggtcgtcgcccgttcctggcacccgttgtagaagagcacggccatgatcaccgattcgtctgcagactttggcgcggccctgaacccaaagaagaggccgctgtcctcgtcctgctgctcgtggaaccagttggcgaagtcgatgaccttgaacagcttgctggctttgaagtagagcagcccgccaaacacctggtccggcagcctatgtgcccggaactccagctcggtcaccgcgccaaatgcctggcctgcaccgcggatcgcccagaagaggtctcgatgggcctcgtccgatgcttcgaggacgctgccgttagcgagcaccaccgttgcgcgcagcagactgtcgacgatcagcccgtatcgccctgtgagccagccgtaccctccccccagcgtcgagccgcctacacccgtctggctgtgtcgcccccaccacggcgacccgtaggcgcagtcgccctgttgacgtcgtcccagcgc

SEQ ID NO: 2540 - DNA, 3137 bp, Emericella nidulans
gccaggcaccgtgaagctcccacacagctcccaatccatgcgccgtgcacaatgccaacttcttcttaagtgtgatctgaagtcgtgccagcacgaccgtgggatatatggcaaggtatagatcggcgaaaccggacattgctattcatccgtcgcgatgagcgaatggtacgaatgaccttagctaagccgtgacttaccccctgtgaatatagcgtatcccaccaggatcctgttcggacggcacgttcctgcccctccggcgacgagctgtggtttccacatggcctctggtgggtcacacatggtgaagaggacgacaatgcaaatcgacgatgagacaaagaccaaagccgtcagcacccacagccagatccgatggaatctgccggggttcatgacgcggtttagaagggcagagatggcgagtttcggcattgtgaacgagaggatcccgaaggcgaaatcgatatagttaatcagcagaactcttgtcaacagatccgtcccaccctctgctgtgatggccggagtatgcttgccgaatccgaaggcaacattgacagtagttattacagtgtagctggtgaccatgatctgtttcattagccgcctactatatcactgacgagggcgagcggtggagcctaccattgagactgtgataatatagtcatcaagcccgatatttcgcagccatcgcgcccgtatgtacagtcgcgctgacaccataatcacgctgacggcgaagaaggcccagaagacgccgaggatcatgggtcctttggtctgggtgagattcaccaagtccattgcgtcgaaactgctcggcagcccgtgaagatcgacgaatgcacccagccagctcaacccttctcggctaccacctttatgggcagcctgaccgcatgatcaggagaggtcagacaattagttaccccggtgtctcggtggattggcgtcgccacggcttctcgcactagaaaaggaccgttccaatgtgatttaatcgaggcgccaatcatccctaatggtgtcacaacacgaaatttaatcagaaactccgccgactgttgtggtaacgcggtggaccataacagtggagacatccacttcaacgatcgtcctctccccccggacgggccgaaaggatcaggaccccggtccatctaatcgttttagtgtctcactagaacaacccactcggcgagacggactgtcaacatctagagtggactgctgggctagactgcccgcgccgtcgagtaaagccgtgggactctcgtctagcccggtttatgtgttccctgtcaggggctcctgacctctccgcaaactgcaactctactgtcactcctgcgaatctctcaaacagtacagtcatattcgtctagcttgcaggatcactgtcaagatgcctcacaccgaaaataccacgaatgcgtgtgccaatggccatggcaatgggtacaacgagaacggcataacggtcaatgttgaagaactcgcggtgtcacctaacctcccagaccaggtccccggactgctcgacaagattgctgcgttcagtaagcagtatcttggggcagagcctcaggccaggttgaaattgctcgaaacagccaggtcactggtgtacgctcttgagactccccgggaggccattatccgccactgctgggcagaggtacgtgtcgcgctgatcgagatccagttgctgctatatatttatctttctggaggacgtgctaagagatatgccagtcaaccagttacgccgcgctcgaaacagctgttgctcttaacctctttaccgcgttgggaacacacgagtccaaaaccgtcgcggagttggcagaagcaacgggcgcagagccagcactgctgagtcagttagagactggtccgtatgtgatacgactgtgccatcgctgatcatcataatccgtatgcaggtcgtctgatgaaacatctcgctgccatgggcgtgatcaccgagaccggatgcgatgagtaccgcccgactagtttctccaaggtcctgacagtggaaaagtacagtgatgccttcccactcatgtatgcgacggccgaatccaggagcgagtgaattctgcaggctgatcatgcggcaggacatcgcgattcaccatgggtatcctcgccctcccagccttcctcgagaagaccaagtaccgcaacccgacgagcgcgacagatacagcattccagctgggatacaatacagacaagggcttcttcggtcttctccagcaggaacccatcacggcaaagcgtttcaacaatcacatgggagtctatgcgcaaggccgcgctcgctggatggatcccggcttctatcccgtgcgagagcggctcatcgacggtgttgcaatcaatcaagaggatgtactcctggtcgatgtagggggcagctttgggcacgatctacttgacttccgccgaaagtggccggacattcctggccgcctcgtgctccaggacctcccggaggtcatatcagccgtcaaggacctgcatccctcgatcgatatcacagcccacgacttcttcaccgaacagccggtgaaggcagctcgggcctattatctgcactctgtcctacatgattggcccgacgacctctgcagcaagatcctcgcgaatcttgcggcggccatgaaacccaggtacagcaaactgctggtgaatgaaaatgtgatccccgacaagggcgcgtactgggagaccaccagcctggatctgatcatgatgcagctgggctctggggagcgaactgagaggcattggcgttccctgctcgagtcagccgggctgcggattgtcggcttttggactgcccaccgcagcgtagagtcgttgattgaatgtgagctggcttgaagccaggtgatgatccttagacaggtggtgtatcaataagaatggcaattattggctcattattcaactagaacccctccgcctacactttaccctttctccctttatcccggcgttgtagcattcggacaagcaaaggcgagtcaatggcttttcctcagtatagtcccttttacgtataatgtattcagaataatggatgaatatcgggaggggaatatttggaggaaaat

SEQ ID NO: 2541 - DNA, 2287 bp, Emericella nidulans
gctgaagttggcgcgtctaattatagccgacacaacgacttctggttcaccgttgaaggatgcgtctcctgagtcgtacaacagtcagacttatgactcctgtcttgactagatctccaagtctagtccacccaaggctcacccaaggctagtccagatgggcgcatttggagattttggctcatacgatatccgcggggcgaattcagacggtaccccgtagcatcccctctttacaaggaaaactatatccaatagtccagtacatcacttgcagtaaccaccagcaaccatgcctacggtgcctcggcacctatcttggcgcggacgacgatatcggcatacgaggcaggcatagcgcattgcggagtcggcgtaaacacatgaccggattcagctgcgcaataggactattactgctgcctcggaaccctcatgcgtggtttcggctatcaaaaccgaacaaacagacacattagaataccatcagtctatccaccagtccactcagagtactttggagtagtctgacagtctgacagtctgcaatctgactgcagtctgcgggcgtcacggagcgccttaatcgggaagagatccccctgcgagtgggctggtcgctgtggtcggactattgaatttgaaataatacagattactggatccactatctatggtcagtcccctccactactagcctgggctggcgatcagcaggggctcgcgggacctccattggctggtaacgagttcatcctacgtgggaaggatggtgatggatcgttttctctttcttgttactcatttcgcgttctcgatcaagagattcgagagtgtaagtgcaagctcagctggagctcgaacccttgaactaaccccttttctcgggttggtccgtttcatgtgctgagtgagagattgggacttctccaggtcgggcagcagggattctaagtgttacagtaaatctccggtcgcttgccgtatgcagctcggtcttcaacggtacggtggctcaattttggtaaacaggggtacgtaccttgctgtgtcgcgtggctgggcacacggcacacgtgtttgagtacgtcgacccgcggtggtatgtagagttgtaccacgaagtttggcaagccccgacaacccggttgaaactgggagggggcagtctagaaaaggttcaagtcgaatgaagaaattactctgattagacagccagcggaaaaaagcaattatcgattggtggcgtttcatgctggtccttctattttggtgcaagtctgcaggagagcctggagagcgaagagcaaatcagccaccgtcaggtctgacaaacatgaagccattcttgtttcggtaggctaaactctacagtgtacggagtatagacttttggattggtgcaacgaaaccagttcatcccgcgtctctctgaaacgcgcgctgtgtatccatggatacgctccacgacatcctggggaactactgtgggcaactctgagcaagtctgcaccaaaccgtgcccgcgtctcagggaccacggctcctggacgccgattgtcgtaggagggtcaccacttggactacaactcgtcgactgcaattctgatctccagaaccgtccctggcgacgtagtcagagtacggttcagtccggagactacaggacaggattcaggcacgcagcacaacctacgcctctaagggtgaagatcgctatccaccggctagcctattgatagatcagccaatgtggtttctgatctggtgttggctgcaaagcctttgcaaccgggtcatcggagtctgatcgccccttaaaacatgacatccactatgtcagtcaaaaatcatcgggtgggcataccccttgcctacctaggcagtccgtatgccgtgcagcagcatcctgtacactggatctggatattgtaatgggcgaatctggtaaagtattggacgtggttagaatgtgatgggtgtgcaattaccgagaacgtcagaagttttgccaaaccgccagagagtgggctgagtgttcagtgcacgggcggatcgggttcgattttaaattgcatatttcgtctcgacccgaagattaatcttccccctcccagtccccagtgattgtcacgtattattattatcgttaaaagcgcttgcgttgccgctggtgctgtcttctggcatttcacctattttccctcgcatatgcaccttactggtacctggccagcctcccacctcgtcactcttttatgttcgctcactcacccaatagcattga

SEQ ID NO: 2542 - DNA, 2560 bp, Emericella nidulans
gcaactgatcgacgatccccaggtcttcaggaacgttgtgacagactaccatgccgatcctactggagcatccgattccactgccgccatccaggccgccataaacgacggcaatcggtgcggtgcaaggtgcaatggttcgacccgaaaaaacgccattgtatacttccctccagggacatacctggtttccagcaccatcgaagtactatttgcaacacaaatcataggcgatgcaagttttaaccgcatcccagtatttgttcccgcatgtgactaacatacttggctcaggcaaacaattggccgaccattaaggcagcaagcagtttcgttggtcttggtgttctctctactaaccagtatgtcggtggtaccgggcctgatggcggggatgggcagtactatgtcaacaccgcgcgattctacagccagattcgcaacctccgcatcgatattaccgccaccgctcgagacgcctacgtctgtgctattcactaccaaatagcacaagcaaccagtctgcaggacgttgaactgattgccacaacagggaccacacagcaaggaatttgtaggttttcctttggatatatcagaaatattactgacgtcagcgaagtttctgagaatggcagtggtggtataatgtccgatgttacgtttcggggtggtaacttcggtttctgtgagttactaacttcggagcaaattcaatctaaatatgctttggctaacaaagacagacggcgggaaccagcagtttagtgcccatcgaatgacctttatcggttgtgcaaccgctgtgcagattatatgggactggacctgggtctggaaatcacttgatattcagggcgccgaagttgggcttcgtctggtcagcaacgacggcagtggtaatgttggttcagtcgccttgatcgattccaaactcaccagtgtgaacactgctatcatcatagcccctgcgtcttcaactccagggaccggtacgactgggttggttctagataataccagaatcgacggccccattgtggataccgctggtaaggtttatttaggagcaggctactatgataactgggtgcttggccctacatacaggggtaccacccgaacctggtcttcagcgcccttctcatcgtatccgcgggagcagtcactacttggaaatagggttgatggcctcaacaatgcgccgtattttgagcgcaaaaaaaatcaatatgcggataggcctgtcggagattttgtccagctcaagtcactaggtgccagaggtgagaacattttcgttgcgccattagtcggctagctaacccagctcaggggacggagttactgatgatactgccgccgtccaacgggcgtttaacgagcacgggagcggaaacaagattatcttcgtggattctggcacgtacatcctgactgacacggtggtggtccctaaagatgccaaaatccatggggaagcatggtcacaattcgctgcttctggcagcgcattctctgatgcaaagtacgtagtagctacccactcgcgataggctttgctaatgctgcgctcttagtaaccctcgtgtcatgcttcagatcggaaacagggcagatgttggatccgttaagctacaatacttgatagtggcatcaaaagcaggcacagctggggcggtcctgatgcagtggaatgtcaaggcagctagccctggtgaggctgccctctggggtatgttgagtcagacctttggcattctaaaggcgtatacttacagatgtctcttatcatagacgtccatgcccggattggtggcgctattgggacggccttgacgcagacagaatgtccaccactgactactggcactaagccgacctcctgtcaggcagcaagcctcatgctgcatctaacaccggaggcttcaggctattttgaaaatatgtggctttgggtagctgatcatttgatagagtaggttcattttccattgccgtatctttcaggtggtctggtatttattttttgctcgatttggatcaagtactaaaactcagctcagtgacctcgatctgaatgatgcttacaatgatatggtttgttctccgctaggaacccattaattagtattgttttgactgacgagattgcagccacaattgagtgtctacgttgctcgtggaatgttgatcgaaagtacctctgctacttggctatatggcacatcctcggaacactgtgtcttctatcagtacaatttccaccatgcacagaatatcttcactacagtgatccagacagagccaccctactaccaacctaatcctaggccacctgcacctttcaacaatcaagtcgggaaatacagttcagatccagcctataactgtaatgatgcaaattttaatggctgcgacgaggcctgggcagtcatcatcacagagagtcaaaatatccatatcggcagcgcgggcacctactcctggtttagtgcatatactcaagactgcatcgaccgccattcttgccagcaagcgttgtggcgtcttagaaata

SEQ ID NO: 2543 - DNA, 901 bp, Emericella nidulans
gcccttacattgtggcccccgagccaggctacgacttttcggtcttgatcgacttgaagagccttcccgatgatcatacagcgcgagaggacctcatcacacgactagctttgctgaagcgcaacgcaatggccgctccgttcgagaaggcgttcgatgagttcgcgcagctggcggaggaagcttcaaagtacacttcggaggctgcgccagcgggtgttgcggagggagtcgaagtcatggcgattcattatcgggaagaagaggcaatttatatcaaggctagtcatgatcgagtgactgtgatctttagcacggtcttagaggaggagacagaccgtattttcggcaaggtcttcctacaagagttcgtcgatgcccgacgacgtgtagcgaccttgcaaaatgcgcctcaagtccttttccgcaacgaccctccgctcgaactggctggcgttcctggtctacaggacgctggtgacggcaagatcagttacatcacatttggtatgagctctctcaacgtctgaaattgtcccgatgactgactggagacagttctcttccctcgtcatttaacaccgcagcgacgtcaagaaaatatctcacacatccagaccttccgcgactatttccactaccacatcaaagcatctaaggtgaaatacctgctcttacataaatagcatcttgctgatggtctgataaaggcatacatccacactcgaatgcgcaagcgaactgccgactttctccagggtacgttttggttcaattttagttgcctgtgtttcaactaaccaaagatagtcctcaaccgagcaagacctgagaacgaggagcgagaaaggaagacggcgagcggacgcactttccgagttcagggataggaatatactgg

SEQ ID NO: 2544 - DNA, 1896 bp, Emericella nidulans
gttggcttatttacgacggcccgccatgtcagaccaagatgaatcgcgtagatctccaggcatgaagtaattttggtcggctgaggcaccaggaagaggtggaactggcgggacgaggggggtgtctggtggggatcggttcgttacgccaggaatataagcgatttggatgacatttgaggcgcgagtcaagacagtcgatgcaatggagtgggtagatttcctcgattgtgcagcgctggaagccggggcccgagcggcgtacgagctggctttttccgattcttctgctcgctgctggttgcgcttcttacgaatgacaaaccaccagatgaggaagacgatgattcctaccgccgcaagtcctccgataactccacccgctatagcgcccgcgttggttcctccaccacccgacgaactgtcctctgaatctgacgagctgctagtggatgttttgacacattgtatagttgcacattcggtgcaggattgggcggtcatcacacatttcgtacccgacgggcagtcgcatgaaggcgatttttgcggacattgtttacactcggcgcgagcgaacaaagctgcgttatgttagtttcgcttgtagtaagcggttgatggacaatcagtacgcaccgtgcggggagagtgggtcgagattgtgaggcgacatgtttgaatgttataaacagagatggatgaagaacaaaagcaattgtcgtgacaaggataaggcttcgatgggtatgagataaacaagttaaaggataaaagagcggctgccgatcaacggcgtagagagcgtgatcttagtggtataaacgagtgtgataatactccagacgtcaagtcgtgagttataatcggttcatgaagcagtcaatgttcagtggcaggaaatgagcgtatatctcgagggctggcagactagagcaggagactataagcagcgatagtcatagtgcggcgtctattggatgcgggatattcaatatatcgagattcgaggccggaccctcccacttaaagcgttttgttgcgtgatacggccttgaggatcgccgtcaagaggttgacgtcgtggacacgcgttacggtagttaagtacgagcgcaagttatggatcaggggaaatagagcggcctatgaaaaataacccccctggatgcgaagaatggaggacgaagaaattgagcaagtcggagggttggaagggagaaatgaaggaaagaataatggcaataatatgaggcagagaaggaggtgaaagagaaaaggtccagtgtctttcaactggggggttggcggttgggtggagttgagaggagatagtaatcaaaggcacctggcacagcccaaaggttgcgcattatgcccacccacttcgactatcgccacggacgctccacaaacgtatcacaaatgtactctgagtatgtacttacatttccaacgaatatgtcgtgatttccttgagtttatcttctacactaagtattgaagctgagaactggaagctgagaaccgtccttgacagaattcaaatggctacaaaattcattgtcaactggggagagaaaccttgaaccgtacgaagccaacttgaaatagtatagagccaacactgacaatgattttcccctagcttctctatagtgagttcaatgtgctacaacatttctagcatgagcgagagacgatcacacaacgcaatagccatttcgccccgtccaggcaaatccaggcccctagcatgatgtttcgccagcccgttgtctcatccgtctgttgtccttactgattccggctgggaaagccgtgtgcgagaagacatcgaggccgtgtccgaaggctggttcaagtggttctggaccatcccacgttcctccggca

SEQ ID NO: 2545 - DNA, 1605 bp, Emericella nidulans
aaaaccgggaatgaaattgggacataggcccatggcgtgaacccctagaccttaaaaaaaccctttgggaagaaaccaatgggtttaaataaaaagtggcagggagatttaattagaggagacgttgccaacccatagaacgtcagccctttctaggaagggaataccttttataggcgggaagcaaagtaaagcaccccttattgccaaaaccacaaatgggcccggccaaacggccacggggttaaacgccacagtgaaggtctcttcaggattcatccccactggccttggcctgtaagggcgttagtggattgcgtactaaccctttcgggatttacggggtcgaaaatccctggaaacacattgatgatccgatcgatccaccatgacatcgtgagagcaaggtttacgctggaagtcgggtgacatcacccactgtagggtactccggagtataaccagcagcccgaatattggaatccatcaaagcctaatcctttaatttcctggagcaaaaccgttaatcaaacaatcattattatgtgcagcaagccttgatagggctgtaggcagccaaatttcgggtccaaatttaggagcaaaaaagtgggctaagcttccaataagctttgcaggtggggctcgttcgctgaattttgggggaatattggacaccaaactgccaaactgccaagttcagtgtcagcaatttcaagaataacgaagctgtttcgtgaggggtagtccagtactaaaactaaacaacagtagatttgcagccgcgattgtggatcaagctcaggggtaaaattaccattggtcctgtcaaaacgtcgagtctgctaatatccggaaaaaacccgagattgggggagccaagccatctaggcagaacattcttttgatcttctttgccgtcagcagctggacttggtgatgtagtgatgaagatctgaggcttagttgtggatacaaagcgcggggctccaattgcttatagaaaactgctaataatagaattaatatgtacaataggctgattggtcttgttcatcaaccgtctccttacgcctttgacatcaaaaatctgcggagtcctcaaccacgctcctcactagcatgctctttttgaccctgtgactgcctgactcggtcttacaactgaagggttatccttcaccattagccggtctatggatcgggtccgtctacatacgttagtgtatgagcggccagttcacggcatcttttttttttttttggaccaacgtaactctttgttaggggcaaacgggcgttcatgtagccagggcttgttgaggacactgggcacatgcaattcccattccctcccaagagtccgactctcaggcggatggctgtccagtgtcatgaagggtaagggcgtaataggaatgtatcttgaagctaccgtcagcagcgtttggtgttacagccccttatcataccgtccccggtaatggtgagattgaaaatagaggctgtctgttcccagcccctagcccactggcatgcaagaaagatagtacccttggatgtcactggtcttgttattccactcacgcaaactggcttgagtct

SEQ ID NO: 2546 - DNA, 2311 bp, Emericella nidulans
gactataaattgaagggaggggcttggctaatttattgaggtcccaataaccagtaatcaccaagattattcgaatcgtaggttgagtttcgagggcataatcaccgatcttttgctccttcgacaggttcccccggcttcgtttcgttgctgtgagggccagatacgccagtggttgcggccacggtaagactgaagaactccagctatcgtattaataaagtatttgtccaagccgaggaacgtgacgataaggtgaggaatgtaggcaatcaggtgaaacagtcatgtcataggcttggtattgtccgaataatgctgtgcagtcacattcgtgaatccagcaccttcaagcatacgctggaatacccctgggtgcgagaaaatgtttgtcgggatcgtagcgaatccgctgatcttgcgcatagactgtcccatcacatcttggttttttcgtccagctcatggtcatactcaaacaatgatagacgacctcctggttttagggtacgggaagtccctgctaggacagcctcaggctccgttgctacgaaattttccatagtgtagatgccggcctgggaatttctagatggtgataatccattctctgcacagagattcgaccttggaaagacctgatcgagaggtatttcgccttgctttgagtaggtgatgctcgacaatgccaataccctcaactctaaggccatgcttgctcgctaattgaaaagcaacgtggccaatgccacatccagcatcaataacataagagccaggtctaaggtctaacgatgctgctaacttatcttccatatttcgcaaagccttgcttagtggaaccaccaggtgtcatttttcatagtaaccaaaatgtcgtgtcccatttagaagcagccggtacccaatcttgattcaaggctgttatagtaagtcagaatgtggggttgttgttgatcaatggttctcggtcgaattccagagccatgacgtgattgagttaagaatacgtgagtataatcacaatgcagcgaacgagcagggcaggtaaaatgattccgaaggagttgtgaggacaaatagcttagaataggtattccaatatctttatcttgtagtctttgctgaattttcctcaatatgatattatttgcaggaatctcctctagcttgttctcttgcttgctacatatttaagaccttcgcggactagtactctaaaaccccgttggtagtcgagcctgatttttagtaattcaacatcttggcgaagtcaatatagattgaagagaaagctatagcttcatatgagaaagagttgatagagaccaggcttataactatgaagcattagactagacataattaccagcattaaacgcagtgatataaaagatgtctgattcttccagtctagctctattgggcggtttaaatgcaaagaaataataagcaacctggtctaatacagcagttggaagagatataactttgggccatgaaaaaggcggaaatctctgcacaagcatcggctagccagagcttgcagttccaatatctgaaataggaaacttcccttatacgactagctgtcacatacggtcgacatattcctactaagatccctataatgtctgaattggtctgttcggcgtcacccgacactgataactgatcgaaaaagataaattttctcaataaagctcatgctcactgaactactcgtatgtctttgagaccagaatataattggtcaatcttgcctcgccgcataaggaagagaattagtagtaagccgtaatccgcatggaacaaagagtgcaataatatgaagaaaggtggtggtagccattgactgcgcaatggcgcccaggcgtcggccatacaccgctagctcgtccagcggaaataccaaaagctcccacttcggtcctggctctaccagtcccgctaccatggaacaggcctcgactcgctctctactatggctaaatgagctgcagctggtgaatcctgtgccattcgcgccaatgagctgcgaaagctaaaacctggtgagttaaaaaagccacgctaattgctgacaggaagcccaaccccgggctaaagcctcagctaaggatccgtactgacaagtgagaacttataaatatcccacattcagactcgatcagcattccatcttaccattttccagacacagtcctgcagaaatgtccctaataaacttcagattccagacgaataccgcgatcagctcgaacgaacagagcccgtggaaacaaaaccaacgagcagattatctcctccc

SEQ ID NO: 2547 - DNA, 1236 bp, Emericella nidulans
aagagtctagcctgtcttaagatccttgtcggcatttgtcccatatgcacttttttggttcctagctcgagcatagccatagcgcttgctcgattcgaagcgtttgtgcgcatccggcagcggcggccctgggagggggcgtacccaacgcaaaacggttcattttctgggtaaagtgagatgatctcagagaggtgaggggccgacgggaactgcaaatatgaaaatgtatacggcatggttgctgtgacacagaacaaagatgagcgaatgtggctggatcaaccatattcaggagaatccagggccgtatatatacctttgggcagttgggtcagattcgaactgaattcatgtcttcgcatagggctaagtatgagaatggctatacccgctccatgattccgtggctgagcgcttcaagggttgaactgggttcacaacgcgatggcacgacagcaaggttagcccatgaatggtaaggcttggggcggtgtctgcgggtgctgaaactagcctaacaacgaacaatctgtagtgctatcagagggcactgcgccattggcaggggctgtttcccatgacgtagatggacaggggttatgatcgtcggcggttattatgctggcctaactggtcaaagcggtaggctaaggctgtaccttgataaggcgcagtaccttgttggcttctaagcatgtaagttcaactgtagacgtaatagcgcaacaggataacgatgaggtaggcagcccatagtacaaaaatagaaaccgccatgccggacctcatatctggataattcttacaaaaaagaagccttatggtctatcagttcttttctcaggcgggggatgcaagacagttacgcatagaaagtttttcgtgagctggacatctatgtctatatacaataacaccacttggaagctcttcgtaatcagtttcattgaacccggctctttgtatttagcgtactcagactgatagtaaacaaattggatttatgtatcaagagaaatattgtcgtatggccaatacagatagccgttttgataaacatggagatccaccataagctatattgggtagacctgagggcccacaaatttcggtgggcaactcaggggaaatggaaataggtacccacactggaaaataatattcatttatgctgcgaaccaatttttaatcgtttaggggaaaggtggttaatcaccaagcatgttaattatt

SEQ ID NO: 2548 - DNA, 1872 bp, Emericella nidulans
ttcaagcccccaaagtgcgtaagcggcagccaagagctgctgcagctgatgatcgattttttagatttcctggcctcttaaccgtttgtggtggggttccaaagaaacgactcggcggcagatcgttgatggaattgaaaatttctccgatcatcaagatgaggtgagaacgacgagtgtagaatcgttggcgtccctacaaaataagtttttctacgcataaatggctctgcttattggattcaaggcctggaggtccagagtcacgttcttggcaccatgtgaaaaggcagaaatatataacttataatggtccattcgcgcggaggtgttaaggcagaggtttaaaccgaggataaaacagtgggggcatctataaaaggtatcttccaatgacctttctggctatagcttctaaacaacagtttgattgaagacttatgatggtttggcagatcaagtttcaaatatcttgttatgctctggcacggttccagagccatgggtcgactaatacaaaaagaagaacctcggcaattttacgttgatctctaaccacggcatttcgctgacagctcgtcatctttttaagaccagaactacagctgctcttgaaaccaaagcatcaaagactctagacaaccaccagttcagtcaaaatgggccagaaaaagatcgagtgctatattgacattggtgcgcccgccccccgtcccgggtccaaaacaatcaagtaacatcgggggcagtctcaacatacagcttctatgccttcacctatctccagtctaaccgagccgctcttgaagcgctagacgttgaagtcgagtaggccgcaccattacttacaccctatccacgaccagaagtcctgacaagccaggttcatccccgtctttctcggcggaatcaacgtcggtagcggttcgtctgagcccactgtcgcccttattacttgagttcatttggagctgacagagttctaatcaaaaggaaataaacccccatggactctccctgccaaagccgcatacagtcgatacgacgtcaaacgagctcagcgctacttcgggcacgattttgaggtcccgagtttcttcccgatcttgtcgctgctcgtcagtgtcctctctgttcacgactacagtgaaacgttctcttgtgtgaagtgagtactgacggagagatagccacaacgcgccctcacatatataaaacaaatgtacccaaaggacaaatacgaagcgacctttaactcctgttttgagtcgttctggtaccgacatattgacatctcgaatcccgaaaacctcgccatcgcactgggaaacgtctttgataagacccagatccaagagatcctagctggtgcgaacaagccagagacaaaacaggcgcttaccgacgtaacgaccaaagctgtcaaggagcttggagcgttcgggtgtccgtggttcatggtgcatgatgggaaaggcaatgtggagccgttctttggaagcgaccggtttcattttatgtgggattatcttggactgccgcatggggatctagaactgaaggttcaagacagagagaaggggaagctttaggtaaattagggcttctgatcgcgagggagggaggctgtctcgagttacggagtctgcagtgcaccaatataggcgcaattacggccggcctgggtttattcaaagatcgttgagatgataccgcgacaggagagcggtgacgtatagtgccagcggtagcatgccaaccgctaaagagggtttacttgatcataagctaaacctgccattggctatatagtctcctcaatattttgcgggcgattttgttcgggcactttcttatcaatattgcatttgt

SEQ ID NO: 2549 - DNA, 1037 bp, Emericella nidulans
tgatatcacatacgatttaggtgacactatagaatactaggatctgccacgcttatttcgggattcccagagtaactttagtatcccactggatgccgttactattatggcgctcttcagtcagaacaatgtctcttgcacaacagaaaacgcgcttgtgtcattcaaaggcttgtcctcaaatgataacaagcgccgcgcactcaacgcggatctattggtggctgatcctgaaaagctagagccatcttcttccacggatgagcctaccgccactatccccgttcgcagggaagttgctacgaagaacggcattttgttcgaggactcaggaacaaacgaaagccctgcagcggcagagactagttctgcttcgacgagcgaagcgacgccagctcccacttcggccgtcaccggcgaagcgctcgatttctctcggatcttcggtctctacaattctgagaaagaccgcacgctagatgcggccatgttctctgcggatgttatcaagaaacacttggaacattcttactccaactcctctgacgagagttttgtaattaaccttgttccttctgggataaagggcaacatcactctggactatggagggttcaccatcactgatttcgacggtaatacggttggggggtcctaaaaacaaagagttgcacatgccttcgtctatgcgtattcgtcttgttctctaacctggatgtttcttgttctttgggccattgggttttttcttctcgcactccttcatctctgctttattgattggtgcttttattacacgagagtcgggcccgctctcatgcttcttcggcgtcttctggtatgcatatacacctcgtttctcagctcttcttagccttgttcagcctagttcttagctagatgatccggggcgattatagctgatagcgttaatcatgttaatatacgcctgtttattggcattttgagaaatgcaaagccaaatctagtagccaacaaatacagtttcatattcgtaaggctttcgtgacaaatat

SEQ ID NO: 2550 - DNA, 5466 bp, Emericella nidulans
cgtccaccccggcggaaccaggactttcggctgtttcgtcaggcgcatcaacccccagccgaaggctatctactacatccgctgtgtcccctaatattatgcatcagctcaacgagagccgtccttcgcatcccacggtggataatcgggatgagagccttccacacaatacgactcatcagcgacgccgaagtgactcggaatttgcgcgccatcgtgagcagctaggctctggggcggccaggcgtaatggggttgtagaacctgataatcataacgcagcaccaggaagaagctggctgatttacgttgtcggaactaacctttccgagaatcaccctgcatttgccgcgccaagtttattcactgatgtaagtactccaaagtctgaagacgggccacaatcgctaaccctgcgtttagaacccaacatacgaggatatggtattactgtcatcacttcttggtcctgtgaagccaccagtcgctacccaggaagacctgatttctgcgggaggcctgtaccgtgtggtaaagtgcggtgactctatgtctgcagccgctgttgatggcactcgtactatccaaatttccgaaggcgagcgctgtttgatctgcctcagcgagtacgaagtggctgaggagcttcgacagttgacaaaatgcgagcatctttatcaccgtgactgtattgaccaggtacgtcaaattgcacgttgatcttaccttgtaagcatagagctaactaattaagtggttaactacgggccgcaattcttgtccgctgtgtcggggccagggtgtcgccgacaaatccggcgctgaaccgccacgaccatcagatgcgccacgcgcagcagccgcttaatattttgtatcacggctgttattatttatacgattcccaactctctattactgttagaagtatttagcatggcgctttccccagcagcttcaccatctcttcgcatctttcgctcttcgcttcagatatccattgctgcatcgcgacattttggttttggttgtggggtcagtatgcagttcaagtcagatcattgtttcatggccgggtttcaagtcatggtggtatcacttgatgtgcatgaacatgattggactcagcgagattttcgcatgggatatacactaactttctgtatactgtcatgaggttcggagaatgtgtttttcgcatgagctgtattattcccctagtagcatagagcgctctgttcatgtcaataggcagccggaagatcatgaaattcattacttatagaattaaggttgactatctgcctacatcacatactaccttcattgtatgtatcagatactttattatacccctccaaaaaagatgcccgaaagtaactaggcactgactgattactcagcttgcctgccccgcgttcaaagtgatcggagcttgatcgcgatcacatcgcccctcgaccatactgaaatttcaggaacaagcacttttcgaccgttccaccatcactcgaatatcagagggcaattgttgggatcagaggcaaccttgctcagtaacttgaagagtccctgattagcctatctatcccgctcagaaattcgcattaaaatacaacccgactacgaaggtagactgaaagttccaagcggggaacaaaggacccacaaatggattcaattcgcctaacagtcctcatctccggctctggaacaaatcttcaagctgtgatcgatgacaccacccttcccgcaaaaatcgtccgggtaatctccaaccgcaaaagacgcttttggcctggaacgtgcccgacgtgccaacatctcccacacagtatcacaacctcgtgaagtacaagaagcaacatcccgcgacaccggagggtgtgcagcgcgcaagagaggagtacgatgcagagcttgcacgactggtcttagaggataagccggacttggtcgcctgtttggggttcatgcatgtgctttcggagggtttcttggggcctcttgaggccaagggtgttagaattgtgaacttgcatccggcgttgccgggggagttcaatggagcggtaagttgttaccttgtgagccatactgagctctgttcggcctttggtgctgactggttttcctacagaatgccatcgaaagagctcatcaggcatggctcgacggtaagattgagaggacgggagtcatgatccataatgtcatctcggaagtggatatgggaaaaccgattcttgtcaaagagatcccatttgtgaagggagctgatgaggatctgcacgcattcgagcagaaggtgcacgagattgagtggaaggttgtcattgaggggttacagaagaccatcgaggaaattcggtcgacgaagtcataggctatgggttgagggttgggatgtttttggctgaaaaaaaaaagatttgggtgacgagcattatgataccattttgtagtatagcttgctagggtacgttttatagaggagtataacatgctgatattaaagcacggcacagatggtcaatcttagtcaaaggtatgcttgcggctacccacggtgcataatgaacaagtccactacgcagctgactggtgctgtgcaacaagaagtgccgcaagcccatccaccagttcaactccccaagtcaatgatcatatcgaggcggactcgaacttcctccgcctcccaggctctcacagtattaatcttgagctgaggggttttcatcctgattgacggtctggactaactctcccattgtcagccagtcaagcaactgttcgcctgctgcaactgcaaagcaacgccacccttctctatgtcagcttgacacaggcagcttgagatattttcaaagtgaggtgagagcctggccaaagtaccaagaacggagttgatatgctgtcaccgactaatgcaagcacgaaccttagatcctcttggagctacctaccgatctccgacgccgtccagacagcgacgttgctgtgattgtgtggcctactgaaatgacagatacgataatcccagccggtaatcggcttcctgccatgtgcccctccaagtcagtaggcggaatgcgtcttgaatatccaccaggatacagatcctgtggtcgtgttatggatccccaggatgatgccgccgattatgaagattcgacgcttgagtcactacggttctaatggacaggtgataatttggattcgaattccttttatcaatcacattctggatttgacagcgagccgttcagcccctgaatgggaaaagacggagacctctcgtttcatgaaccgcccttgagaagcttaagaagccacgatccgaggcccaagctcgaaatcagcaagcccattaaacggcgctaaactaggcctcggcgttaagagttgaaaaccgcgtggaacaccagtacagagtatagccaaccatcatattcaatcattgacaagaattggttcctctgggagcgggcagggatttccaaactagacaggtagttcttcttctgtctcactgtgcgcagcaatgtctgtcctactgcccaagtcgtcatgaagcattagcgctgggcgcatccaacttgacggcagcgctgcatgagtgcactcagtgacccaataatatgcgccccctgcgttcctttggtattaccaggtattccttttaattcaccatgccattggacactgacatgcttagacaaggccagtcatcttagactggaagacctgtcacggtctcccaggagttgcattctgatcatgaacgtgaatcctaatttcccatccaaaagacacccctccactttcgttgagtgacaatcgaggagagtccaggaatccacaaatatagcgcgaacagagaacggaccaaggtaatagtttccacctgctatgcgccttggtctgtgctgctcgcggcttgtttgcttgaagggaagattatctatttttttttttcctgagttcctggagatccagttgtcaatacagaggagtaggccaactaaccaaggtatcggcgttgctatggtatatacgaactgtctgacggaaaattattcctgagagctgcagatcccttcatcgatccagacggtgcgcaggtgtcaaatttcgcgcgccatctgccaactgcttacgaacttccactacatactgaagtccttttcgtgatgggtttcttatccgtaaatctcggtggtaagggtacagctgcagagcactcatcattggaatcagacctagaggctcaggtcctttccggatccactggctgcacaaattctcggcaacgtgaaccatatcgactgaccggcaacaacagaagtgggagcccggagagctccgcaccagactcttacgatagttttcgtgttagcaagccaacccatgctctccggcttatccaacatctggtgatttgcacaaggattatgaattgcgagtcgctgtgtcaggactccagcaggtcgactggcgtgcaggagcttccagttttaggttgacatacaaatgatacaatcctcctttactccggggaacggagcaccctcgagtcctactcatggtcccaactcctttcggagtcccttggctagttttgcctaatcagatataacagctgataatccccactttgcagcgttgcattgattgcggtgcggcgtcaaattgtcgaaaactccttttttgaaagtccaacttccaagcaataaaccaagaccggcccttctggttaagccaacacagtggctcatggtccagtcaccgacctttatgatgctcttatattacaatgcgttcaagaataagggcggagatgaacagggagcccggccgcttggcttccctccgtttcatcaaacaccaaacctccgctgctgattcatgaagaggatccgaggaaatgtgtgcgagtccactctgccagcataaaagaatacggccgaggagggtaagcaccaacagtttgaccagttccacccagaagggctaccaagtgaacgggccttaactccttggggactagctgcccctccatggcagcatatctcggccctgtcggcgttttctatcaggcaccacccccggactgagcgacacaagacatccgggctacagttatgcttgcctctgcctttgaacttccttaggggggtgatttgtctcctgcactgacccagatgaccgagcacgctatgcatactcagttacttagtttgaaagagagttccacccataccccaggaatcatggcgaaggtacgacttgaatatgcagtttgaacttcagggtgtagagaaggtcacggtctacaatgacacggatccataataaagttgatcgaagaccatcctccccccctccaaaaaaaataaagcaaaaaaaagtcctaaaattcaagggccatccatgtcataattctgatcgtataagcaataatag

SEQ ID NO: 2551 - DNA, 901 bp, Emericella nidulans
ggaaataagcagccaagtcctcttcagttcacgcatgtttgctacaaggagaatggcaaccagccgctagcatagcgcccctgtgagcaagactagacttcaggaaagttgctatccaacgcagttcaagattgcagcagtacacccagtctccttcgtggccttctgcctcccaagcttctgcctctcaaggccccgagcggtcttagctgcgtgcgatggccaccaaatcctggctcgagcttctgctttagccaggctgtctgaagctccaggaattggtattcgttttcagattagtttgactcctgcggtcacgcgttatcgttcctgtcggtcaggtcagaagtttgcgttttgagattgccaaatataaccgttccctgatagggttgcagccagatgtactcggaaatgaactaatatacgagagcttgtttgcatggtcaagaatttggcctccggtattgcgcctgaagaatcagcttacgaatagcggcgatggccatatttggttgctaacatccaggtgacaaaaccaagcatttcaacatgacctgttcgggcctgcgtcaaggaccgttccgtgatctcgtacgggccctttctgccgtacgtctaaagagtcttcgatattgactaggtcatcccttcagcaaaagagattggcaagaattgatttcttatatacgtttcataaaaagagaataatctcttatttcaaattgacttagagagccggtttccgtacggagatgattatgtcccggagctcatcagctcaaggaccgggataaatggtctgattaactgtcttgaaagaatatcgaggactgatcgccgctgaagcgcctcggcgacgccatggtgatgaaagcagtctggtgctgggcggcgggaa

SEQ ID NO: 2552 - DNA, 7236 bp, Emericella nidulans
ttgtcgacgggctggcgctcgccggtacggcggtgctactgcttggcctgacctggggtggtggagagtatccgtggcaatcgtcgcatgtcattgcaaccattgtcgtcggttttgccgtctgcgttcttttcatgttatggcagtggaagggcgcagcgtacccgctcgtcccagtgcacatcttcaaatcgggtatcgtgaacggcgcctgtctgaccatgttcatcaacgggtggaacttcctcgtgcaggtgtactacatcccgagcttttaccagctggtctttggatatagcgctgtcagggcaggcgctatgcttctgccgattactttgatgcagagtacgtctttcattccgcgcgcctcttctctacgaaatttatgaatgcaaatactgatggggagacagctgcaagcagcaccctctcgggcctcgtcgtccactggatcggacggtacagggagtgcatcctcttcggatggatgatctgggctgtgggacttggtctgttttccacattagatgagcactcgggcgtaggaaagcagatcgggtatgggatcttgacgggtgtgggcgttgggaatactttgcagccgtatgctccaatcagtctgtataattcagcatcgatgctaacggatcccgtgtgccagggcccttatagccattcaagccggtgtcgagagacgcgatatggctgtcgttacctctttcagaaagtgcgtcctccctccttccgctcctctagtgcttgcagttagtccagtcaagagctaattactgcgaatcgttgcacctacagcttcgtccgaaatctggggggaacactcggtctcgcaatagcccagacaatcataaacaacctcatcctaagctccctatcgccagtccatctctctccttccgagcagaagtccttcctcgcaagcccaactgcctatatatctactcttcccgagaccgaagccacacatattcggagtctcctgataccagcctacaaacgcggcttccggatcattttcattattggggctgcgcttgcggcgttggcatttggtatcgcgttcgcgcttatgaggcaggttggattggagaagggagatgatgagaagcttaaggaggaggggagaagaagggtggaattggaaaaggggatgaaggggcatgcggaaaaggagggtggagatgttcacgttgatagcaatgacgaggggaggcgcgagtaaatatccatcacgtgcgtggtttgagctcaagacagaaaagcctttacttgtcaatctgaaggactccagatggttgttgctgatagaatgtgttttaattagcatagactcgataaaaaaggacaagctagtacagagcagcttgagccacaaactagtatcacaatagtgatcgcgttacgatgaaaaaattgaactaagaaattgctactcatttatgtacaatttagaaccataagcatagacatccatagtttacaatttagccttggcaccctccagcagctccgcaccagcacctgagatagcaggcttgcccgtctcaacaacggtagtctggaagaggacagtgttgccctccttccacatctccgtcctgagagtctggccgggcagaacaacaccagcaaagcgaaccttcaagttcttgatggggccaaatttctggaaaacgtgcttgcccgagacaccgagcgagcagaggccgtgcagaatggggatcttgaagccgccgaccttgctgaactcggggtcgatgtggagcgggttgcggtcgccgttcaggcggtacagcgcggcctggtcttcagatgtcttctcctcgacgacgacgtcagccttgcgcttgggaggtttgtaggcggcgacagcggccttggggcgaggagcagtgggcttgggagagccgccaaagccaccgctaccgcggatgaaaacggtggattcgttgtagaagaggtcttcgccggtggcgacgtccttggtggtgtagccagcgacgacgagcgcagcggcgcctttgtcgatgacatcaatgagcttggggtaggtcttggtcttggcctcagtgggaatggggaacttgcgaatctccatgtactgctctccgtggaggagcatcatgggagaaaagttcttgacaatgtcattcatgtcccagggggtggcggtgttgaaccagggaatgacagcaaatgtggggagggcctggaagtgctcgttgttctcgtagacgagagggagatcagtgcgcttggcgcccaagctgaggttgtaaaggatgacatcgcggtcagtgtagtcgaaggaggttccgtcagtagaagccttcttggccgcttcgatcgcgctcaggatctcgttgccactgccaccactctcaccgccgctgcggttgctgaagttggacatgaccttctcgttagcggcctggatgtcctcagggtggtctgcacggccatcgtcaaagttgacgatcttcgcgagctcctttgcaacagcctcgggggtcaacttgacatcaacagggaaaccgtggccgccgctgcgctgccagcgggtgctaccgaaccacccgctaccacactcgaacagacccttggtagagtacggctctggggtcatatcggagcagagcagaaccaccagaggagcaacgtagtcgggcttgaatgcctggaccatctcctcgggcatgatcgtccgagtcatattggtaccagcgttcggggcgatggtgttcaccttgatgttgtacttggcgccctcaatcgccagagcacgggagaatccgagaataccaagtttctacgacatagattagctaatgtaagatagatgacttcagggaacataccgctgccgcatagttggcctgtccgaagttgccgtagataccgctggtgctggcagtgttaacaatgcgaccatacttctgcttaagcatgtgaggccaggcggcctgggtgaccttgtaggttccgcgaaggtggatgttgaccacagggttccacaggtcatcgttcatgttggtgaatgccttgtcacgcagaataccggcgttgttgaccaggatgtcaatacgtccgtaggtgtcaatggcggtcttgacaacagcggcaccatcttcgcatgaagccttgtttcctacagcttctccgccggctttcttgatttcctggacaacaggctcagggtcaaccaggtcgttaaccacaaccttcgcaccgagtctgccgaacagaaggcagtaggcacggccaagactaataaagttagcttgagcataccctaggcttcaaataacatacccgttaccacctccagtgactagagcaaccttgcccttgaactctggctcggggccggacggggcaggaggcaacttcagaccgtcctccaacagtcccataaagtcggcaggtccagtggggtagtcgggcttggagaagtcattgacctcgttccattttctggcgatggcgcaaggcgtcagtgaagcatcggtcttcagcagagcacccttggaacgctcccagcggagcttggccacatgaccgcctccaatctcgaagattgaaccagactcggtggtgttggatgagtggaccagaacggcgacgacgggaacaacccattcgggcttgaggagttcaagaacctcagggggcatgacggtggctgtcatacgactcgcggctgttggggttagcagtgcccgtgagtgtcaacacgctaacataccaataggggcaatgacgttggcaataatgttgtacttggcgccctcctttgcaagggtctcggtgaaaccgacctggccgagtttggcagctgatttgttagcttattcgcatttgcgtcggtgtgagacataccagcatagttagcctgtccgaagttaccgaacagaccagcagcagaggcggtgttgatgatacggccatacttttgtttccggaaatgcggccacgcggctctcgcgcactgtgaaatcagcctctcatccgtcgaacgccgaagaaccggttcctaccttgtatgcaccgtatgtgtggactttgttgatgagatcccagtcttgatccttcatgttcttgaagctgacatcccgcaggataccggcgttgttgatgaggacatccactcggccgaagttcttaatggctgtgtcgataatcgcatcgccgttctcgacgctgtcgtagtttgctacagccttgccgccagcagctctgatttcgtcgacaaccacatcggcagcctaccacagaacgcgggtcagcactggggacatactgaaaagtaataattgcatgtgatgggctcaccttgcttgacttgccttcaccctggtgggagccgcccaggtcgttgaccacgacatttgcacctcttgaggcgaagaatagagcatatgccttacccaaaccaccgccagctcccgtcacgacgacggtctggttgtcaaagcgcagctcggacatgttgaaaaagaaagaatgaggggaaaagcgtggatggaggatgaaagcggaggtggaggttgaaagtagacgaagaagaggaaacaaacagagatatagatgctttaagaaggaatggggaggatgaagagtggtatggggagtcgtgggcaggagaaacaatctggggagaagtggtgacggtcgccgtgctcggcaagctgagttgcttgaaccgaggtatcttgctgacccaagctcggtggttttgtacccacgcgctagtcgctacagagaaaaatggcaaatgtcacggcttcacatgccgagctctcacgcttcacttacgataatcgagtgttactattatttactctcttactacctttgatcatacgcattctccctctggggtcgtctgcccgagtcacgggttttctttgtcttccccaaacggttagcttggttcatgtgatccgagcccgagtcgtcttatgtcatggtcacatgattttatgtggggtatgcgcctaaggaccccccgaggtcccaaaactcacgtgagatcactacggttggttggttgaactcagtatctgcgtacgtatgaacgctattatgcccatacacccttggaaaggaaatattagaccaagtcccaacccagcaattcctcaatttgaaaattatgagtttcgacaggagacgatcttgaatcttgagccgttcctagttgattgaaggcactatagaatggatccttgcaaccaatactattttcagggtgttcctgtgaacccttgtaatcgtctatatcttgaccttgtcgacttgctagaaaatgacggaggtgcagggatctcagcaaagacagggacgcgaagctcggtccagggcgtggcttttgtcccatgctcctgaacgggagtgttcgtctccagcgtgaccggatatggtttatcgatctcagaggctcaggattacccatctgctcggagccggtactagcggtggctcagtaaagtctctggatgacgcctttgctctagacaatggtctagggcacggcggatctgagcagcacgctgaggcagacagaagtctttccgtggccagctgctggacgtctcgttgacgctgcgctgaagaggccgggctataagaagatgcttcatcaactgccgcgggcattctcatggccaagggcctaataacggtgcgctctcgtccaggggctcttcagaaaccgccacttcagccacccgctgttgttgctgccgccatcgctcaaaccactccgcatattcgtctggcgaagcctcgctggactcacgaccgtacttatcgatatcaacgactaggactagctttcggacccccgttcacgtctatcatgtgttgctgaatgctcccgtaacgagtcattggtcgtgatgaatgtccagattcaggttgctgtgcacgctgcaatcctcgatcaaggactcggggttgggttgggcggccggtgccggtgtcagcttcgaaatcggacattctatggttgagcgttgtctggccgaggccttgctcgagatcgagatcgtcgtcttcctcgtaccagtattgctttcttcggatgaagaagagaatcggaacttcgcagagctgtcgagggagtgccccttacgtcacgcgctcctccattgtctgggcgtactttacctggcacatcataccgagggcgaaagtcaagaagaccaccgcacccaacatcaagatgatcgctccatcggagtctagcagatggaagtgtccggaatgtgtgttatttggggctggcatgtttcagctactgttggctacggactctggaatgtaagacgggagatacatgagcgcagacatggaaggggagagcgacgctagaaggaaaatcgaggaactcgttacgagggccgatgacctaaggatcccaagcgtctcttgaattactatctttcccattgtactttttttttcttctcttatccgcgactgaccaactatcgacgagaatgctgcacgtgcgaacgtagcactatagcggcggcagctatacatatgcagctagtcctagcggacgcctacgccgtgtaccaggcaccgaaaccggttagtagctttccagaatgcttaagacaggtccaaatagcccagcccggctttacccgggcccacgaagcggcataattcagagtcacacacaatgagattggatactacagcttatgaatacgccgcgggctttgacaagctaagactagcagatgcttctgtttcagcccgtcagataacgcctgaacgtcgggattcgacaaccgttttctcgacggataaaaaggcattctccgtttagccaatcattccaaccaatgttatattctacgtacggcgttaacaccacaatggtccaggcccttaaacacgaggaggtttctgtggatccaaaggagaagctttgcggccagatcttgaccgtagtcgaatagatgattacgccggtcttttaccgaggctggtctctcgccgtgtcagcgtcagatgtgccacaggcctatgcatggagactccctggtactcgcgactggttcggagtcagtctccaggatctagttgagaatctcatcatctcccagagtgccgtcgccatggtgggggccgccgtcggaatgcgagtcagtcagcagtcaatcgtaacaacccctctcggctggctaccttaacaagctcgca

SEQ ID NO: 2553 - DNA, 565 bp, Emericella nidulans
  unsure (1)..(565): unsure at all n locations
atcgaatcaatacgactcactatagggagacccaagcttaggatcaccacatcaccaccgctgaggagctgagagtagccgacgttggttttggggtcggtnnttttttatttttttcttaccatgacacgctagtttctgttcggattataatgcatagttgatgaccatgattcgattgtcgtatttgtgtcgggtataattttttaagattataagtttcttatgatatatagttggttaaaacatcttcttctatatagacttggtttactgatttaattagtagaattaattttctttgtttttaataactgagtttattctcatgttaatatttttatcatgtttgtaattatatgtcatcatataaatcaattagttttcatttttacatacgaatagattcttcttttattttttttttcttaatttaattcatgtttgtaccgactttttgatgatttattttattgataatatctatgtgttatatcaattccctttcttattcaaatttttttctttaatcgatatgactatatattgattactgctactacgc

SEQ ID NO: 2554 - DNA, 753 bp, Emericella nidulans
atacgtgcgctagaggtacctccaacagcattcaatagatacgacatattaccaattctgcttttctatgcctgatttctctgatctagccccctggatgcagaatacttcaaattgaatcttcattacattagcaggatatggctgaataagtctaatctctccattgcacaaatacatcatccgtccggaagcgctgcgtgcacgtagattccttgagcggcgtccggaagcctgtcttatatgcgagcataccagcctgggcaatcataatcccgttgtcaatacaaaacctctcatccgtggcatgcacactgcctccgcgatcccgcgccatgatccccatcatctcctgcagcctctcattacatccgactccgccaacaatcaaaacttccttcgacccaacatgtgccatggcgcgctctgtaatttccaccaacatcgagaataccgtctcctgcagcgaaaagcacagatctgcccgggttggtttccggctttctaaagccccgtctgaaacgggcgtaacatctgttacgtcttcctcctcatccggttgttctccgtttagtccgtacgttgcggcgagagcatcaatggctgcaagaatgcctgacatagagcagtccatgccttttactgtgtatggcaaatcgaccagttgcttgccctttttggcgagttgctcaatattgtaccccggagccgggtcattagagataggagcgttcgcgcgaatcggtccagaca

SEQ ID NO: 2555 - DNA, 1596 bp, Emericella nidulans
actacagaagatagagtacgagtgctcgacggtagtgccgttgcgtagcaaatcgctcgttgactttcatcacgtttgacaaacacttgaagatttccatcaattttttccaggtgcgatagtcctcggtaactgcctgtttctagtccatcgcccaaattaaagcgccgtgagatattctcggttgtatacactgttgcctgggagaagatttcctcgaccttgccgtaaggaaggatagagactctgctaccataatagatcgcgcatcttaatatggctcttatcagtgatgtgttcggaacagtgtatgccgtcatacttaccgaagtaaaaactgtgccctctgccgcaaatcatgtgtaagctcagctgatttatccgcattgcctgtaatgactgttgtttctctaagctgatttgatacataacgctcctggagatcgagggctgaaaagaattgtcgtaagcagcatacatcttccggggcgaagttaagaaccggaacatgggtatcgatttggagacgatcatcgtcgacgatgagaaatggatagctcactgtcgcgtagatgatattgttgaccccctttcgaacaggtagaaatctaatcatcttcagaggctcgaggtcaagtgcggtgggacgaaggctactgagctctttgagaaccaccaaaatctcgctgttgctgctgtccgacgccatcatacactggattttatcaatgtatgaacatatatccggcacgtctacgcgtagcctgtcaacgaagaggtcttccagaccaggatagaggtggcgtatggcatactgtccattagtaaatgggaagacactccacacacaatttttcgtcaatgggatccaggcatcttcgtagggaatgtagataaagtctccgcttctaaaattagccctaagcatgcgatgtcagtgctgtactttattcaaaactctgagttaattcaccgaatggtttcccaatcttgctcactccaagaaccttctacgatttccttgtagatccgacagaccgaatcttgagaaataccattttgtcctcgaagccatgacagcttcgaaaagaacgctgcatagtcctcatttcggcagctcagaactctttgaaacatctgcttcacctttggactctggaggtattgcttataagaccccaagacgtgattaccgcaaggaaaattgtcatcccagacgcagtcggctagcctaaccagcttaccatctgagtctggctgaggaagatagacaatggctggaggtgtcggactatcccttttgacaggattagcatacaccagacataacagctctaagactcaccaaaatccatcgtaataattgtcagctagcaactcgtacagcttgaagaagccatctcttgcatggctaagaggcatcattgacagcctcttagcacttcctactaagaactccgccatagttgtaccaacgccaaatcgggccagaaattcccagtccttaagatcatcgttttccctgctggaaagaatcttcaggaaggggaacttgtccttcaagtatgtaccagacaataggtttcttgtttcatc

SEQ ID NO: 2556 - DNA, 1718 bp, Emericella nidulans
caccgatcaagttcgcgtcctcaacgaaagactgcggatcagtcgcgatatttctcttgttttgatctcgcgaaacgcccagtcccgtcggtaccgccggcaactcgtccacctccgttccgcaaccgcggccgcttcccaacgcgcaggacatgcttctcctccccgcagataagctacccatgctcgttcctgcgccagtacttggggaacccgataataatgtccctgtcgactgccggtgcggagtagaccatcgctcgtactacgaatgcctcgagtactcgaccttttccatcctcctccgcgctcaccagggcctcaacacaagcctctcgaatccgacgcggcttcctcgcacgccgtctctaatacatgtctttcgcccagcgtcgaccgacaatccagtcatccagatccttggcctcgtcttcagccaagtgcgcccggcaaatgtccgtactctgtttgcttgctatgtggtgatgtatcgctttctacgagtaagctcctcctacacaactggcaaccatatattttctcccgcctaacatcctggctagtggcgcctctgccctgacgaagaaacccaacgcgatgtcccaacctggctatatccaaccgaaattcaaaagaccatcccgcatcccgtttgcatcgacttcctcccatggccgggcctccgcgatcgtttgatacacaaggcgcacgagatacaagacccccgacactcagtgatgatgtacatgcgctcaatccacttccggtggccgggggaccaggagtttatctacaccaatgagaacggggaactgatgccgacgccgagtttcgaggccggcttgtacgcgtacgagaactggcaagtgtcgcgcgagtgggcagcaacgtttccgaaattgaaaaagtacgtcaacgttggtgatgacgagggtgttctggtatgaaacgcatatatgaccatccacatcgtcgctggcgttgccgagctttcggtcatcgtggttcttatttaatgttgcccattgagcaatctgtgcaatctacttgcaggtgtacatcatgggtcaaaacaactagaatccgcaagtagcgctgctgcagagcatgtacattcctcatcaagcttaccatgttcttgtatttagctgcggcaatagcctacaaacaacatcattcttacaccttcaggaattcgtacccgggcgtttctgagcccagagtcatatagtcccgctaaccttataaagttgcatacaaactatgtaaccccattccgggcaccaacagtgccagcaattgtttcttgagtatggcgtggcaccaatagcggggttctaagtctgcaaggactagactctgcggctttgttcctcgtggtcaagtgagcgagcctgacatgcatagttgtcccgcaacggtagcaatagcggctgtactccgtttctttacaaatggacatgggttcttcgagcccgtttcctgacggccatccatgtcttgcccagccatcttagtctggttcttgagtggccactcacatcgagtgttgtctcactcatatcacagcagccatccatatcgttaccaatcatcctagccttctttccctcattggccactcacattgactgctgtcttcccttgcgcttgtcttcggatccgccagtctgatattcgagttacagcagatagcccctgcgcagaaatgatcgtat

SEQ ID NO: 2557 - DNA, 720 bp, Emericella nidulans
acagcaccccttgactctatccaggcgagctatttcacaaaggtgaacgaaacattattggataagaagacgggagagatgctggagctgctgaagtcgatggatgacattattccggcaattcttcagcatgttgataaccccatggtcatggatcttctgttgaagctgatcagcttggagagagctgagggcggccagggcatcgttgatgtaagcatctgtggtccagttctagcttgatatgtctaacaatcatccagtggctcaaatcgcaggatctgataccgagattgctctccttcctgtcgtctgagtggccggcttccgttcagacctccgcgggagattttcttaaagccatcataaccatatcggcgaatgcaacgcagaacgaccaatcttgtatcggcccaaacagtctgactcgtcaattggtttctctgccatgcgtggaaactcttgtcaacgcgatgttacaaggcggcaacactttgacagtcggtgttggaattgtaattgaagttatccggaagaacaactctgattatgacccggagcacctgaatggacctgattctattcctaccatgtacgatcctatctatctcggcacactacttcgtgttttcgccaaacatatacccgactttgtggcgttgattagcagctcaaagcatacggttgttgatggagggaagatgaagagcgtggaacgtg

SEQ ID NO: 2558 - DNA, 1159 bp, Emericella nidulans
gcattgcgcatatctggcggcatatctatacagacaattagtgctcttacgtcattctaacaacgccccagtctgcaggatctacactggctcgcagaagcccggcttcggaaacgtctcactgcaagggcctaccgttgccctatctgtcctcgacccatcaggaacgatccatggctatgcagaagtcgaaagacacgcagacaaggaccggatatacctccgcagcgggacgatatgcaatccagggggcatggcgcacctcggctggctgaggatggacgatatgagagccgcctgggacgccggacaccgatgctctcatcctattcaggaggtggacgggaaaccgaccggaatcgtaagggtgagcctgggggcaatgagcacaatagctgatattgagggttttgtcgcttggttaaagaggaactacgtggatcgatacattggcctcccctactcggagaagtcaagtgggtcgatgtccaagagttcgctggatataggcatggaagagcagaggccagctagaccgaaacgtccatgggtgaggacggtggcaggacgctttcgaatgttactctgttgaggttgattgatatattaacacgtcgagggggtggaataggatatccaattgagtatatagatggtctagagtgatacccttcgggggttgtgtataggtatattcggcctttcctcaagagctccagatatagcacgataccaaacaaacaatcatctttttcctgctattgttcgttcccagtaagcatccctaaatttgagccgatcatcaggctctattgtggtttccaggatgagataccgtcttaggctgtaggccatcagtcccagaaccaaccggcgaaaagaagcaaaaaataaggcgcagatgctggccagatcgagaattttggtgcaaccctccctcggttagctgcgtgaggattgccagggtctggtgaggagttcgttcttctctgtactctttactagatactccatactccaagctgttcttccacctcaccatacctgcgaatgctagcagagtttcactcattataagcgcaacatcttactcccaggtacactttcgtaataccatggtttgaatcttgatcaagattgtgaaagatcaggtaaagag

SEQ ID NO: 2559 - DNA, 2275 bp, Emericella nidulans
  unsure (1)..(2275): unsure at all n locations
ggttgtgggttgcatggtccaagagggagaatccatagccggcggtctgctcgggtgaagattgtcattacgcccgaggcgaagaaatactgcgatgcggttgttgtcgttaaaaaggaggaggtccagtgaccggcgacggggttggctgggctggggagcagtttttcaggaactggaacgtcgaacagaacgggaattcggggctgattccatctagttagcacgtctcaatagagaatggaactggggcccgggagcgtgcggttgagagccttcacttacgtctgtgatggaagggtcctggtcgggtgcgaagttatagcccgaacagaagggggggggtggggcttgangggcagtccacagcgcgtcatgaattttgggaaacatattatatgtgcactaacatgcaggtcttcagataaatcacaatgttggtggaggtgagagtaggcgtgggtatttatgcctgggttgcagcgcatctgggcgagaccggttgctccttcttcatggtgctcagttccgccataaacaatcccgtctaggaagtaacaagatcaatccggtaggagtcttttagggtacctattaagcttacttatgagtgggtggaagtttcccatctataccctcgacaccgtgaacctgcctccacgagttctggaaaacatcctcacggttcaatccttcgacgccgctgcaagtttcctatgctatgatggcaccctggcggtaggtcttttgcaagagacaaagctaaggtatgagtacctggcatatgtaccggttgacggggcatactcgttcggttcttcgcacgtggaccgccagctcataagacgtctcgtcggtcgctccacgcctcttagattagctctggctggaaggtaagttggatatagaagaatacatgttgagtgtgcttcgaaatattccagctagagggtgtttcggtcgccgcttaattgtgcttcgctggtcctaagaatatgtattcaccagctggtgacggtggagtcaagtgactcttccacatgttgctgttcagctaaacgcaaagacccaattcaaacatccttgatactaagagtctgccttcagtcgagcttcggtacccaaatgcacaagcaagtaagtccattcggaggtggggaagggcttcattcgtggcgatttcatgaccacacctgccagatgatctgagctatgctgatgaacattcaccaatcctgcttcaggttttttattggatatctattatagagaggcttgtggcagtggtcgggaagctgtcgaccaaaaagccttggtaaattcagtcgtttagggtggaaccagggaatctgttggctccaagctcgtcccagtggaggcttaggataggtgtcaaagactaacatgttaggccagactttctataatataccacttcgctttgccatcgagtcacagtgagatgaagttctagcgtctgtaacctgtcatggagtttctgctcagatggtccatctatgtcatactatataatcagatattgcactggttaagctctaaagtttgatatgctaacataatactccaatctgtgccacattcacagagtaaaacagccagacctaaaagagaaaaagccgaaggagtaaacaggatgatgtcatacatacagaaaagtcttaatgttctagctaggcatgatcatgtattttacagcgtcaaattctagttcaccaagcaaacaagcaaaaccttctaggaacatacagtaatcgcagatctagtatattatgcgtccaatatgagcgccataagccgagttgcctctatcggtatgttgcgaccagtaacccatgcgttcccgactgtgccgattcggaagatgaagaactaacctctgaactctcgccaacatatgagcagctcattacccaaaccaaagcaagaaaacctctagccaaagcgcaacacaggccgataagcagggtgcgggtccttgcccgcaaatccggtaactggcgcagcatcaggctcagacggggtctgcagaatagccaaaatcgcgttacgaaaggcctgcataacaatcccatacccaaacttcaaactcccgtccggagccagccagagcccatgtccaaagctgccgacccggggagtgttccgttcattggccatacgctcgagctcgaagagatcgcccatccgcatctggtagaacatgcgagcggcgaaatagtctccttcgggtttgacgaaaatagcaactttgtag

SEQ ID NO: 2560 - DNA, 1959 bp, Emericella nidulans
cttccccccaccacccccctctagtaaacaccaccacaatagttcttaaaaaatacctataaaaatcccaccgtttgtgtttttagttaccaactttagggaactttacttggcccagaacccagttggtttgtaaacgcccaatctcttctaaacaagagcccccataattctgggcacaaacaacttccggttaaacagtctaaacgcacaaacaaaacattcatccaatgcccagcaacaacctccaggcaggataagcagttagtgttttcaaggacgctggggccgtcaccagtccggcgaggtaagtagttgtgccaaaaggttgtttcgatgtcggaatcctcgaacgacatccctatacctcgcagacattctccccgcttggtctaagctcggatgacaaaagcgcgtactacctagtcatcgtggcgccaacactacttggccaaaccgccacggcacggacagaagctggagagagtgtatctattcgtgatccaccgaatctgagtaaactcagggcatttgtggcgagtggggagcacgccgttacgtatgggcctgggacctggcatgcgccaatggtagttgtgggtgaatgtaaggtggattttgtggtcacgcagtttgtcaatggagttgcggcagaggattgtcaggaggtttgctttggggaggggattgttgttgatctgagtgagaggcagcagagggcgcaagcgaagctgtaaaacttacacaaagttgcgagtcaatcggagattatggcggcccaagaaagagggggtccacccttatgttagcaggatatgtatattatatatcaaagtgcaaattatgacgcagaagaaaaggcggccgttgtcagtcgagaggcttcgccgcgtatactatcacgaacgcttcgcgccagctccagcgtctcgctaggcaatcccgccagctgcgcaactttcagagcatgtgactcccgatttatgcccttccgcaacttgtggacaaaagaaaaccgcccctcagtcgtctccttaacgtcggtgcaataccttcccagcgcaggaaactcttgcgtcatatcagccagtccgtggaaatgcgtcgcaaacagtgtccggcattgattccgataatgcaaatgatgcaggcatgcgaaactaaccgcggtgccatcctccggcgtcgtcccacgtccaacctcatccatgatcacaaatgaccttgccgtcgcttgtttgaggatcgcagctgtctccagcatctcgaccataaacgttgactgatcgcgaaagagatcgtctgctgcgccgatacgactgaaaatctgatcgacaatgccgatctcagcgtagtcagctggcacaaaggagcccacttgcgccaggatggtgataagcgcgttttggcgcagaaatgtgcttttcccggccatgttggggcctgtgataagccagatgcgctcggattcgcccaagaagcagtcattgctgacgaagcggcggccttgttcttcaaggccgagtttcacggttggatggcggccgccgatgatcttgtagtttgtgccttcagtgaggatgggacgcacgagttgttgttcggctgcgagggtggcaaatgagcaagcgacatcgagttcgtccatgactgaggcgttgcggcgaatctttaccaggttcaagataacttcgcggcgtaactgctcgaagatggcttgctcctcctgccgaatttggacctttatttgatccattcggccgccgagttcggtccaagccgggaggtagaaggaccgggttgactttgttgacgagacgttgcgcgtcacgcctatgtcttctaactgctgttgggaaacttttgcgcctttgacatggcatatgtgtcccaaaccaggcgtccatttgagcgtgatggcggaggatcctaagcttggtccccatagtagtgatatta

SEQ ID NO: 2561 - DNA, 2518 bp, Emericella nidulans
aaaaaccatcgactcgaagcaactaaagaaatatagcatgaaccccctgcttaatgtcagtttgatgcaaaacactatagtgtgatcgagaatgcgactgacagatagaaccagagcaaaagactgagtaaacagcatcagggccttagttgggagacttacgatgtcttgtcttcctgattcggccatgttagtaataagtttttccatgtaataaaggtaaacagtgaatatctctgaaagtcttcacatggttgctcacgaaccagaaagaacaagaaaacgtgaggctcgtggagaagcaagcccgggggtaaggatgctgtcacgtgatgcgatgtgggcgaattccctgaacttcccgagcttcaaatctcagattctagtcctgcaattgcgcgacggctcttgaccaacccgccattggacctctttgtttcttgcctgcgacttcccaggtctgcactctcatttctctcttctctctcttccagtggttatcaagatgcctgccacggcgacccgtgccgtgctgcggcaatcgcagttcctgacccggaccgcggtcagacactcttcttccacatctcaagccacttctaaggctactgagactgcctcttctaccgcctcaaaggcgcagcagggtctctctcgtgtctcttcctctgccggtcctgcgatctcgaacgctgcccagggcctcggcaacaccctgaagaaagttggtggaagaaccggaaaagtcgtctccttcattgaatgtgagtgaaactccgggatattaacttccacgtctgcggtttcaattctacacctttgtgactggttttcatggcgtaacgacgaattggccctccttggattcctgaaggggtcatgcctgggccatgttcatcaaacacataaaagcggatttgctgactcgttgttctataatcacagccatgataccccctactatttactactccagggttggccttgaacttggcaagctggtgttccgtggacagaacatgactcctccgtaagcgcacccgccatggcatgtcagtcgtcaacatcaaccatcccactaatcctatcttaggagctctgctaccttccagtcatacttccagcctctgatcaatgctcttcgcaaccctgcttcccttcagaacgccaacttctcgccccaaaatatcctagcccgtgtccgcaacgcgaacaagaaggaaatcgccctggccggtgttaccgctgcggaggtcatcggattctttacagtcggagagatcatcggtcgtttcaacatcgttggctaccggggtgaggctggccacggacaccactagatcgatcgcatgcaatatatctgacctgtcttttatttccgctatatctttcctttgtgagctgtactatgtatgatagacgatggaattaaactattgtctgggttaaaattacctatatgattatttcatgtctgctgttgcatatcttaagcctggtttataaatcatggtgcaatgttcctcgaatagtaagaagcagcgagcacgagaacactcagcatgtaccatatctatgaataatactcgggctcaatacaacagcatccttgcataattacgtactagacactgatcttatcgagaccttcatggcacgttccagtttgccgtatactggccggtgtggaattgcggcgacttgatcgttccgcgatctgattggtccgtgcagttagaattctggtcccaacttttttttctgtaagtttccaaatgccaacaacttaatcaagccttagctcgaccaaaatcgccgtctacaaagacagataaaccacatgcgtcaatatggacgcctttaaactgttgactcgatcaactaaattgaagtctgctaccacccagtcttcgactctcccgtctacgggaaaagcagcaaacccgcaactattccgcggtgctgcagcagagaagctcgagaaggggagtggcaagaagagaaaaagggcccatgctgcagatgatgaagcagtagtcaatgaggatgcgctgaacctggatttcttcagccagggcagaagctctattccgaagagctcggatgccgcaacgacaaagggatctggcgcgccagcaggtcaggagggagcctctgaatcggactcggatgccgatgacgagccaatggatgaagttcagcgccgaacgattttgaatgctcataagatcaaggtcactgatatgcgtgacttagaagagctcgcacccgcccaggttcaaagtgaagagccaaagaagaagaagaagcgcaagcagcaggaggaggcagagaagcagcagcctcagactcttagtaaaaaggagcagaagaaggcgcggcgcttgtttccgcagccccttgtgtcattcatggagctacgcttcgagtacaaaatctcgcgacggctggcggagaatattgccagcatgaatcactgttccacttgagtcaggtggggagcttcttgctttgggaa

SEQ ID NO: 2562 - DNA, 997 bp, Emericella nidulans
taagacgcataataaacgtccaatccaacctgagcgctttcactcaaaaattctcacagcggtatcgagagccccctagtaagtcttgctaaggggaagacttttggcgaatcatatatcctcctaaccaatatcgctggcgtctctcagggccttatggctttaacactggcatagcaagcttgacattcgctggctttgctgttagtaagggcgcaccgctcgtggtagctggtccttgaggatagtgctcatcaattgctcgtgtccatcacctctaggagggggccggagtttgttagcttggcccatgatccttctcccggcttttctctgttgactcgaacgttgcgcaggttttgtcgttcattctaagacgtttcaccgttcacccggtcccgctccgtccttatcctcgagatgaatgcatgagattatatgtcacgattgatttctgacttgctaacccaccgtcagtcatatatgtataagcttcgaatcccagcttccaagtggtctccctgtatcatatatttgtgccacaagctaatttgcgcctatctgactacgtcgaagtgacaccttaactgcaacgtggacgatgcaatcagaatccggatgtttctagtaatgtttttacattaccaagtacctttgccactgtcacaacggaccagggttgccagcagcatatgcaattcgaggccagcccgtccctgttcaacgggtgaagtctgttattatgcagttcgagcgttgtctcgtattcggcaaatttccaacatctccaacgcgtgacgaggaatccttaggacacagtacctaaatatagaatgtcgattaagtagcaacagcagtgtatttatatggatttcccataaggagggtttcgtccccaatagcacagttggacagagccgctggttgaaaggagattctgggaataccaagcttcaagaaagcaggtgtggaataagaagaacaaaatcttgagggg

SEQ ID NO: 2563 - DNA, 1662 bp, Emericella nidulans
atgggcttttccaagtttccctcagtgtcctgccagcgcccacccggcacaatatatttcgcctgagccttttttgccagcagaatagcggagagagattcgagcagccgcatttcgacaatcagtcaagacgattgaggcccagtgattcaattgccctggcgtgagcctccggcaggccgtttcgcccgcacttatactgtggggaagcaaccagggtcctggatctcatggtcggggtgaactatcccgaaaaggcggggataaatgaagctctccgcaatttctccgaaattgttcttgggatggcctgggctcctatgatgttactttgtgtcgttcttgtctgtcgatcgttgcctgatctcgtgattccttggaatttctccgtggctaagcccggtggtacccaggccagggcattgtgcattttcatttgcagagtcggtatataatccatacctgcggtcatcgtgaagctgctagacgaactattgatgatgggagtgaagagcgtgacggcctagcggttgaacagatgttgaagaagtagaagaggagccgtgttgacctgctatcgcagcctcaggcacaaaaggcacgtgatcttccccgcaccccacagtctacagtgtagactgacctgcgagcttgtcccctctgccttcttggcctatggtcctcgtcctctatcctagcctgacaaatgttgataattctttgatctactccaggaattttcaagtccttattcatgcctttatcgcttatttattaacttgccctgtctgtctccgctggacaccacttacggcctcaatttcagatcgaaattcttggtgaaagcgactaaatggcagaagaacacatggctgtcaataaatattctctatcaggtaaggatacgtcggatgctaagtgatactatctgaacgttggagtttagaaggtattatctggtgagagaagtccctcggaaccattcttcatgattgatggcatggaatcactgctctctcatcttattagaggcaagtgagtactggtctagacgtctaagctttcattgacacgtgcttctcttgcaaatgcagatctatgacgcgcacgtctcgatcaggctgtctcttctcctctcgcaccgtcaggaatgttattcccatcgtccagaaagccaatgcgattgacaccgctatcatcgcccacatgcctttcgtgaacttcggcgccatatcagccgagtagaaaaggatactccaccaagcgttgacggcgttgctgcccatgttcatggaagcaatcaccactgatcggagccgctcgtccttgtagcgcatcgcatcgttacaccacgcaaagaacgtggcctgacaggcgtacaccgcgccggcccagtagtacgcgcccattactgtagccgtggagtcaaagcaggtaagaatcattgccgaggtgacgactccagtgatggcaataaagtacccgaccaggtaccttttgccgcccatgaaatcggtcaacgtagcccaaaatagggtcgatactattcccaccgccgggatgcctgttggatagttgttcagttgtaagaaagtgtaagagtttgtcgggtgggactgtaggtatagagcgagcagtgcgttcgtcgagaaatactcggtc

SEQ ID NO: 2564 - DNA, 1138 bp, Emericella nidulans
accctggaggtctcgtcgaagcggcgaagcgatttcctcaggctcagggtgaagaaacggcaaggtcccgtaccaccggtcatcttcatgtccggccgatcttgtccagacgaggacggtccacctgtcggtctggagccgtggaactgcacgacatacttgtactcggcggctttctcggcgctgacttcctggatgttgctgccccaggggctgccaacgttgccggagtaggtgaacttattgccagtgatagactgcttagtacggccgccaaaaccgtcgaagcagaactcgccattagaggggaagttggtccaggccgagtggtcagcggaggtgctggtgggcgcttcagtggaggtaggagcgacagagctggacgtggtctcgggctccggtgctgggttctcggtcgaagcctgggtgctggtgctgggctcagcaggagcctcagtggaggtaggaacctccgtggacgacggggtttcgctagggatctcaacaaacgtggctggctgggtcggggtgatggaggacagggtgctggtggtgcagcattcccacgcggtctccgtcacggtaacgggctcggagtcatacaacccgcccacctcctgggcagcctcgttacggacgccgtgtcggtgtttgtggctaccgtgcgaacgggccagagccgacccggcagtggcgagagtaaaaacgagcgacttccactgcattgtcggtacgcgatggagcaaattcacatcaacgtccgataataaagagcgtaaacagctggtttggctggtgggaataggtgaaaagagtgactggttgggatgcgaagcgaagggaaaacaaaaacgaggggatcgcgcgataaaaggggagacggggaagaggctgagggagagcgggtgggggcccccggggcagtgtgcaggaaaaataagaagatacagagagcagcgctggcttggtccctagtgcccagatcgaatcgttagtcgcccaggtacgagctaaaaggtcgtgttaattaaatgggccggtggaaaccaattgaagtctttcttgagtcggtttgacaagaactatgtgaaacgccacgccaaacgcccaagtcctcacgctcatgggcacaagggcg

SEQ ID NO: 2565 - DNA, 1743 bp, Emericella nidulans
aagtgcttctcctacttctatttgcatctatttacagctggtctaatacaacttggttaatccacaacttgggctagtgccttagtaatttcttacctccaagagtctcctgggtttacaacaaaggcagcacgtagaggtgccatagacccgtttcagatacactagctactgcaactcgacatcttgtctaaaagaaaccttgactaacgcctatttgtatgggatttcgatattctacttatcgagtctactctccacccacgaatgattaatcaccattaatcacgattgatttaagcctatcatactttactcattttgtcttcctttcactagttcgagaataagccttgccactgaaatacgcccatcgatgacatcagactcaaaataagcctttttgtctcgaaacatgggcccagttccaccagcccctgatagctggagcattgctgaccgttaagtccgtcctgcagcacgtgtagccctggaagttgtggatacattttccgttccatgtactgcagaatggaggaaaaatatcagaaaggaacaaaaaagtcgaaaatagacttgcttccgggcccacaacgacccatttcggacttaattatggaccctagatactataccgttggttgagccagatattgaaccgtcttcgatgacattctagcgggccgatcggttctgatctgatcactcagcatgccgaagttttttgatgagccgtggcgagatgccgcgaaattgcagctataagaagtctttgacaggcaggttgaggaccttttgagaatcagttttccaattgtattccttgatacccctataagccaatcacatcacatcacatcacatcacaatgtccaccgactacaagttcgaaggatggcttggccttgatgccggttccgttgatggcaagatgcagtggaaggagtttgagccaaagccctgggaggagaccgacgtcgacatcaagatctcccactgcggtatttgcggttcagacctgcacactctgcgcagcggatgggtatgttctctccactcctgccctctttttgcctttcagagatctcgagactaacaatcgtgatcatatagggccccacaaactacccctgctgcgtgggccatgaaatcgtcggtacagctgtccgcgtcggctctcaagtgaagcacatcaaagttggcgaccgcgtcggtgttggcgcgcagacgtagtcctgcgtcggccgcaaaggcgagtgcaacgaatgcgcaacctccaacgagccctactgcaccaaacacttcgccgggacatacaacggtgttttcatgaacggaggcaagtcctacggtggctacgccctatacaaccgctctcccgcgcacttcgccatcaagatccctgacgctattccctccgcccacgcggcgcccatgatgtgtggtggtgtcaccgtctactccccgcttaagcactacggctgcggacctggaaagacggttggtattattggaatcggtggacttggccactttggtgtccttttcgctaaagccctcggtgcggaccgcgtcgttgcgatctcgcgcaaatcggataagcgcgccgatgcgctgaagctgggcgcagacgagtacgtcgcgaccgccgaggatacagagtggatggcgaacaacaagcgctcgctcgacctgattgtttgcactgtctcatcatccgagatgcccatcacgactacgcga

SEQ ID NO: 2566 - DNA, 1112 bp, Emericella nidulans
acggatgattcacaatgcgatccataataggggctagccctctttttgacagagaattccttcacccgatacccacattgacataggaactcgtcctcatcgtcgattttgacgttcttgaggttagatcgcagggacatgtcagaatcgcagactgatcacgagttcaggccatgaagcggcgaatgcatccaggagatgattatcgcggcgaacggacggtcttgtttcctggggagacgaatcgaccccattgctgcgtgatgtatcaagtgatggtggggtaacttgcagcttccgcagccactcgtttaatgcttatcttctctgcagtagggcaactgttgaagccttggagccttcttatttaccgtctcgtcttggagaatccaagggaatccaacagccgattggagacgatgaaactactggcccacggcatcaattgtcataagttggtggcaaatcattcaggtacagtgggagcggtccatgggtatagatggggcagcaaaactgcgctaaacctgacccagcagagctagcccaaataatacgctaaccgtatttgtgggcggtacatacattctgccgtcgatatcaatatcttttcaacttttttctcggacttgctttggatagccttcaagttgaattgttgcacatacccaaaatgcgccccctcacagaagaagagacgcagacgctcttcaagaagcttgcggagtactgcgggtcaggcctgaaggagcttatcagtatgtcttgtccgcaaaaatcgttctccaggtaaatctaacaacagcttagaaccgcttgattcttctcccaacgccgatcgctatgtcttccgactgtcaggcaaccgtgtctattactccctcttgtcgatagccaacgcagccaccgcatttcctcgcgatcagctcctctccctcggaatatgcatgggtatgtaccgatagactcccgtcgaaacttccgccgttccatggcccagcagacttatactaacgtcctctcgctgcaggcaaattcaccaagactggcaaattccgcctccacataaccgcgctccccatcattgctgagcacgcccgaaataagatctg

SEQ ID NO: 2567 - DNA, 543 bp, Emericella nidulans
agaaagaaggattattgttataaggaagtcttgtaggtggctcaccgccttcaggacagcgcaggccttggcgagtcactaaggtctaaggtccttgtataggcaaaggacccataacaaaaactaggtaaattattatattaactaatatatagagctaagctctaaatatatataaaaatataattattagtaaatacaatatattaatactaagctatcctagaagtagttttactgattttttagtattagtaaaaaatataggattattaagaaggatatctataatatagataagactagtttttagataggtataatattaattataaaggttatttacagagtagatactagaaatagttatactaaataatttagcctagaaacaaaaaataggctactataattattaagtaaatatatcttgataggccctactattatattatatcctggctatagacaattattaatcttagtagtataataatactaagcaactattaactcagtattaataagaataaatagatatta

SEQ ID NO: 2568 - DNA, 2560 bp, Emericella nidulans
caacactttctgaacccttccagccgtggattcggcaccacaacagacgtgatctcgtttacgatatatttctgtacgacctctgtcccgtcacgggaggaatgactattcgtgatatccacagatacgctaattgtgtcagacgctgtgacgtttgttttcgatagcgacacctcgccgtaagtgaagttcacatagctgagtccgtgtccgaaggggaaccagggttcagggctgcccaggacatattggtgtccgaagacgagggtgccattctcagcctcatatccggagtctccgattgaacggccagagttcagatagtcgtagtagatcggcaagtcaccgacgtaccggggaaacgagacagagagtttgccggaggggttatagtcgccgaacagaacgtcagccagtgcgtttccgccctgttcagaggggtaaaactgctggaccagcgcactggccgagttcgaaagccaggtctctgtgattggtttcccggaactaaagacaacgacagtcggtttgcctgtgtcgatgatggctttgatgagtggtccttgggcgccgacgagggagaggtcattaacgtcgacgtgttcgcctgttgtggcgttgaggccctgccatagctcctgctgatcgcgggaccaggttcccacgacgacaattgcgacgtcagacttctcggccgcggcgatagcctcctcgaagcccgattggtcgttgctccagcgttcgcagccttgtgcgtagtggacggttgcggagtccccaacgaacgccttgatcccgtctaggggtgtaactcctcggtattgactacggtagacgacgtagtcaccatactgctatggttagctaacagaaatggcacgagaatgaggtagacatacgttcatatagccatgtgccatagggccgataactgcaatgtttcccgttttcttcaggggaaggatgttgtcgtggttttccagcaggacaatggattctttatcgagttgtcttgccagatccacggcttctttgctatgaatgaggttatcccactcctctttgggagcaccggggtaagggttctcgaagagtcctagggcgaatttcgagcggaggacccttgaaacagccgtatcaacggtctcaatatcaagttgaccagattccacaagttgagggatggttcggaagttgctggcaagcaattagtaccgttatttatcgaacgttgagggcagatcatacaacgaaccaccacccatctccacatcgttaccagcgggaagggcttggagagttaccgattccgaatcaatgggggagctctcgcaagtgtggaaggcgttgcatagtcggtcagtcgctccggcgtcgctgatcacgaagtactcataaccccattcttctcgaagaatctcagtaagcagatggtaatccgcgacagcagggattccgtcgtagcttcagccaaacaaagttagacgacaggttcagctttgaatgggataaagaacttacgagtgataagcgctcatgacactataagcaccagcgtctatgatggctcgcttgaatggcggtaaccagctgatatgggttaactcaaatctcttaacaacgatggccaatgacatacgtggtgcgaaggtatcgctctcccccgtgaacaggagcagtgttgataccctgctccggctgactgaatccggcgtaatgcttcacctgcgctgatacattgaggctttgcagacctgtaacgtattggtatccaatttcgccggcaaggtaggggtcttccgaatatgtctcttcaacctgggctgcattagaaccgctgtacctttatgagtaagggtttggccttacccgaccaaatcggatgctcgtgggcggaggtcttcatgcggtgttcaattaggttggattatctccttaaagcctcgatcttactggtttatgagccgatcacttttcctttattcttccttgtttttgttcatgctctgtagctggtcacatttgttgctctagctactagttttttatatccactctttcttgaactataatctccttctttttttactatttgtttcttttatacctatcctttaaatttattttatctatatattattcattactatttttatattctatctatctatctctgcatattatcatttatatctctctttcatattttcctgtcatcttctttaactcacacttctcttctttatcatttacttaaactattttccctatacattctagcatgttttcatttacatttcttcctatcatttttttatatcttttatttgtccactatttataattttacatatccactcaattattctatcttcttatctatcaattcttcttttattattgttttatattcttcttttttcgatttaatttctcttttctatcattatcttccatattcttattatcactcattattatacttacattatcctctattttacttattcttttctattatacattttttatttatctcaaatctaattctatatctctc

SEQ ID NO: 2569 - DNA, 433 bp, Emericella nidulans
aaaattaaaataactaagtatatctacctagtatatttattatttattaagatatttaatcatagcaaagtactatagatttttataatttataacaataataaagttctttaaacttataagctctaatttctaagcttttaagctattaataattattaattattttttattatagattttattgttatattctgcagaagagttcttctttaaatagtagataccaaagtatattatcttattattattttattataataatattcttctagtagcctagtttatatattagctttaaaggctatttcttagtcaggaagggtttttataaatataaaaatattataaatatttattttagctatttaaactaggaggtatacttcttagtctataaaaatttaatatctttttatattaaattaataag

SEQ ID NO: 2570 - DNA, 1939 bp, Emericella nidulans
accgttctgctaaggactagttacctcagaagttgttcgccttactatgcgcggatccggctctgagatgacgttgaggcggaggagacgaaatttccagtggaaactgtctgcatcgcgcatgggcgtcccatatgagtactttatctgttctaactcggattcgtatatctcgctctgctgggcttttgatttttcttgtacgtcgaagattccgtccgcgaatttgacgcacagtttgttggcgagtacaccttcgtttagggtccaaagtcggcgcatccaggcggatagtcggatccgcatgaacgactgtgtatagtcactggacgagaacgactggatgtcgccgtctagcaccagcacgcggaatgcccgctcataaacagctttcatcgatttaatggctacagagcgtactcgcggtgctcttgggccaccggaatgcacattgtgtccatccagaatagtagcgagggcccgtggaactttttcttccagagttctctaaaagccagccggttgacaaggtcaaccgatcgaatcccagagactaactcatctagtaagctctgaatgcgaagcagctggcactgcggcagagtatttgcggagggattcccaagtccatcggaccagacatgtgagaaagcgatatacctcttcccttcggtatatttctcaacttcgactttgacgtagggtgccttctttattggtgttatggacaacagcggcacgcccccggaaccgatgatggagaccacttcatcaatcagcggcccataatgttggcattcgcagtcagaagaagtgtgagcagtacggtacgtctcctcgttaagttgtcgcgccatacacaggctcctcgtgcacaaactatggtctttttctgtcgcagacggcggactctcaagttgcgatgtatagtacgccgacgcagaggtgaatgtttcttcgaccagggcgacttcactaggacaccatccggattcctgtaagcgcttgagaggaagccatgcacagggaaattctagccccccggtgtcggaaccaaagactaaaggcattacgcctgttgagaagctccaggacagacgctgactcaacgtccttattgagagatctatctctggcggcagtggccaagtggtgagccccgggcgtgggtcatcctcgcactttgcaattcgacaaaaccgggatacggttcgaagacactgttcaatacggcgaccgatctgttgcgcagtggacttgtcctcggtctggagaatggacgagataaaagatgtgagttcgaggatacgttcttctagaccggtaacagatatgactccatttgggtgattttgttgttccttcacatagtaatgcttgcctcctttgctgatgggaccaaatacttcccaaaggaccccaaagaagagccaattctgcaagaagggcgctgcatctttatgccctgtgaagtcgccattaaacagccgggtgatgtcccaaccttcatgctccgggtaggtcaggaaatcgtgatgctcgtacggctctttgctgagacaaggcacttccagaaaggggtagggcgaatccggaggcaactctacgtagtccatggcaagacttaaacgtctgaagtatttttaggttgatgaggagaagaaagatgagctgaactggtagttgttgggcggtaccagccccgccactattcactttttaaccaggcggaggttttgtcccgggcacaacgggctgggataacccaaccaatggaaaattctcccgacttgtatgggtggggatttaggtgcataccaatttggggcgaacggtttattccacgtaggcgagggattaaaagctttttaattgatattttcacgatttggagttttagggcttttgggttccggcttttttttggtttttgggtggc

SEQ ID NO: 2571 - DNA, 1707 bp, Emericella nidulans
ggtcgagactctagttcggtatctacctctatctccaatcctatgccttaagtgctgaaaggatagtgtcggcagcctcgctggttgttctcttagcttcccgtctttttccgccccggcgccgcaaaaaaatccatttccacttcacatccaccctcacacacttgagctcctcgttgccaagcttctctttccaattcttggactacctggccggaatgtcgtcagaccagaattcagtaccttgagtatctaatagataatggcagatgaacatcgcccactcaagcgcgttcggcaagcttgtgaaccatgccggttggtgctcacattgttatgtcgcgtcgatcatgcggcttatgatgaagatgacggatgacggtagtgacgataaaataggcgaaaaaagtcgcgatgtccaggcgagaaaccagtatgctccttttgcgagcggctgggtcagcaatgtgtttatgcaccgggcgatgggcctgaattgcctgccgctgatattgtatgtcttctaactgcctctgtcgaaatgcgtctggccgatactgatgattgctgctcggtaggctaaacgactatcaagcgttgaggacaagctggaggagctagctcggaatctcaggtacattttctccaacctgcaattgcaatagatcacttcgagttagttatcaacctgttctgactcgtcaatagaccgcactccacgccggctgaagtctctatctcgcaatcagcgctcgtacagcataagctaccaaatctccagcagaatgatctctctaccgttgcgcatctgttcctaacatgctgcaactatcagcctctcccgctcttccatccagatagcttcgttgagaccctggagagtcgcgatccggagctgattctcgcgatccacgctattagtcttcggttcgggcgtagtcctgatggtagcgacttgcgtccttatatcacggactgtgcgcgccgagcgaggacccttgtcatggagcgtattggtcgagggcctctggagctgtccactttgcagacgctttgtcttttggcattgtttgattttaccggtaccaaccctgatgtgttcctctctctactcagaccatgcctgttgacgtgttaaagctggtgatacggttcaggctgggttgcatctcaatatggcgacgtatctggcgcatagcgttaatactgcgggggaaaccctaggagcattacatccggatccggatgagaagcggaggtgacattggagtatacacttatcattataaccccaattctatcattccctcctcactttcccttgtcatctctacctcttatactcttcttttcatctatttttctccttaccttcaatcttatcattatttttataattttaaactctcactcctatttcattctatatctataccatctatctctttcaccccatttattattaactctttgcatttacttttcgtagctctcttctttcaacttctacttatttatcactattattatgatattttacatcttaattttctatcttacctaatctaacttacgtacctctctatcctatttctttcccccttatagtccttcttaatactatcactctttactattttattttttctcatctaacatctcataatttgtacctcccctcatattatctccttcactacatattct

SEQ ID NO: 2572 - DNA, 1604 bp, Emericella nidulans
caattcgcatcttcgaccgtggggattggtactcagcccacggcaaagaagccgaattcatcgctcgcacagtctacaaaacaacctctgtccttcgtaatctcggccgcagcgaaacgggcggcttgccgtccgtcacaatgagcattactgtcttccgtaattttttacgtgaggctctattccggctaaataagaggattgagatctggggctccgccggcacgggcaaagggcactggaagaaggttaagcaggcgagtcccggaaatctgcaggatgtggaggaggaattaggggcaatgggtatggagggaagtaacggagcgcccattatcatggcagtgaagcttagtgcaaaggccggggaggcgcgaaatgtaggtgtttgttttgcagatgcaagtgtgcgcgagcttggtgtgagtgagttcctggacaatgatgtttactcaaactttgaggcgcttgttatccagctcggtgtgaaagagtgtctcgttgtgcaggatgtcaatcggaaggatgtggaggtggccaagatccgagcaatatgtgataactgcgggatagcgatatcggagcgcccggcatctgattttggggttaaggatattgaacaggaccttacaaggttgctgagggatgagcggtcggctgggacactgccggagacggagctgaagcttgcgatgggcggtgcggcggcgctaattcggtatttgggcgtgatgtcggatgcgacaaatttcgggcagtatcaactctaccagcatgatttggcgcagtacatgaagctcgatgcggcggcattgagagctttgaatcttatgcctgggccgagggatggatcaaaatcgatgagtttatttgggctgttgaatcattgtaaaacgcctgttgggagccggttgctggcacagtggctgaaacagccgttaatggatctggcggagattgaaaagcggcaaaggcttgttgaggcgtttgtcgtgagcacggagcttcggcagatgatgcaggaggagcatctacgatctattccggatctgtatcggcttgcgaaacgattccagcgaaaacaggcgaatctggaagatgtagtgcgtgtgtatcaggttgctattcggctgcctgggtttgtgaactctctggagaatgttatggatgaggagtaccagacgccgcttgagacagagtacacggccaagctacgcaaccattcggcgagcctggcgaaactggaggagatggtcgagacgacggttgatctggatgccctcgagaatcacgagttcatcatcaagcccgaattcgatgatagtctgcgcatcattcgcaaaaagctggatcagttgcgccatgatatgtaccttgagcataaggctgtcgcgagagacctagatcaggaaatggacaagaagctgttcctggagaaccaccgcgtgtacggatggtgtttccgtctgacgcggaatgaggcgggttgcattcgcaacaagaaggcctaccaggagtgctcaacgcagaagaacggtgtgtactttaccacatcgacgatgcaatctctccgccgcagatcatgatcagctctcctccaacta

SEQ ID NO: 2573 - DNA, 3838 bp, Emericella nidulans
ataaaagcaacgatttctgcattttcagcccgcccgaactactgtagacaacaagcttttgaccatcctcaacattgaagaaacttttaccccgattcttcttaggaaccctgcccggaaggttagagcctcataaaccaacctctctcagaaccgcagctcgtatcaatgcgacgcaaatgattaaaccactcgggcaggtcttatccagaagccaaagcatggtcgcccaattaaaaccaaagttccgctccgaagtacatttctcctcatctttcgtgccacgcgccttaaaagcgttgtactttaaacagctcacccgttaaatacgtttacgctgactaccctcagccaaaagtaagtagcaaaaagggaacgcacttaccagattctctccctttttgatcttcagactatccgcgataccgccaaggttcacacatccaacataaccgccaatcttgcggcaaatgctgcacgcgcagagctggtaggggacgggtgtcgacgagtcgaggaagaattcgacgccgccacattggcagcttccttcgagctttctactattgttagttatacagtaacttatattcagcgatgtgatgagcgtatggtactagtattggcgcgattgctagtgatgtcttcgaggtactcaagctggggtaacgcagtgggaccttggacaaaaaaacttacaaaggcatattatgattggggtagttgatgtccaagtagttaattggatcgacgagatcttattatgtccgaataacctcaacaatgctcattgaaggaagttcgatctcaaacgaagagcggagtgaaatgctcactacttatacccaatggtatggagcacagaatcggactccctctccatcccaccggctcctgctgcgtaagagaatcatacccgttctgactcccagatgaggggtcaatcgatgcagaccaccataatcctcgatcctgattggatttggttacatacatctgacgtttcggacgttgtctaggaaataagtggatgtttgcttggtttgtcagtgtttggaatgtttgtcctgtttgtttctcgacagtccgttcgatgtcttcgccgcggcctctgtcgcaatttccgaagagcaacccgaacgaatttccctcttcagctctagattattcagaatgagctttggaagtcccggtggcggcgcgacaaatgtcaaacctacaccgtaagttctttgcttctgcagtccagcccgtgtcagcccaatgcaatccagtatatttatccgcttggaatggttgatcagctaacgtttctacttgctatagtcccgaacgagggagctttccgctagatcatgacggtatatgcctccctaccagcctccaaaactttcagtcaatactttcccttgcgaaccatccgtcctaagtgcatggttaagtcgacgaatatggatgcgataaccataaccatacccaatatctaaccacttaccatccattgaccccagtcgtatgagaccgaactctaacacggctgtctgtcacaggcgaatgcaaacacctaattcaatcatacctcagatgcctcaaactccagcgcggcgtcaacgatgagcagtgccgtcggttagccaaggggtatttggcctgtcggatggacaagtgcgttcctaaccctgttctgttctactccgatgaggttgtttgcttactgaattggcgtttcctgtctgtgtaggaacctcatggcaccagatgatttcagaaatcttgggcttgtttttgagaacgacggcgatgggtcacacgcacaagcacaggcacagacacaagtacagacacaaagtgggtcgagttcgggttaatagcagatttggggttgcattgaggctttggtggaaagcttggtgcacggttgatgtttactggtactcccgctttagctcgcgccttgcatgacatggcgggctgtatgaggtcgatgaggtcgatgaggtcgatgaggtcggtttaaactgtacattacatgtatcatagggttgtttttctctgtatctcatgagttatgatatttctcctacctcctgcagtgtactaaagttacctatacggactgaaactagatgaaagttattaaggcaagataaggctctggattgtacggtgctaccggaagtagtcaaacagccgtacttccattggaatcaattggatgctatgtgaagaaatacaaaactggtcaataagtcaaaaagccaaaaggtatcgtcctgcacactgatatcgccctaagcaaaatagtagtttgcacatccctgaaccggctagttatgtctggaagcggcgtgtagaacgagtacgttgccgacagttctgttttcggtgcgcaccattgcctcagcaactgctcctagtacccaacgtgcctcaggactaacttcatcagatgacgctggatcgatgtctagtgtctgatccacgtagttgttgcgtcgtccgactacggtgacgttccccggtttttgaggccgactgggccattttgtctttaacggcgtcgattgcaatctggacagcggcagccttgtccttcgggttgacactcttgaaaaccacacgtgaggataatgcatctggtagggaatcgcggagggttgcaaagaagacaaggtctgactctgggttgaagctatcgaattgagtatccgagcgagattcgtgctgtttaggctgggcaataactttgcttgtctgattggtcgggacagggagttctatatggatgattgtagctgttacctggtcattttgcgctagctgaaggacaaactgaagcgcatatcggtcgtcgtaccctccgaaaaaaggcaggacaatgtgatgagagcgggtagctgcagggctaacccacattgcacttccaacgcttctagcgcttagggttctttgcaaatcggggcgggctttggcattgcgagtgtacatgctgcgctcgacgagaacgccaacgttgcaggaactttcgtttagtatgctagacacgaaagcagtatagggcccgttggcaaaccgatttctctcatccacgtctaacccgccttggtgctcacttaaagcaccggtctcgctccaggggatgagaaggagatcagtggtgccctcgcgcgccattccaagcacagtatctgcgtatgagtgctcgggcaccaccgacacaccagccataattgagatgtcgtgccattggccgaatgcgcggaaggtattaataaccggatcccacaaggaatgttcgtcgacctcggacactttcatcacactagagtctcgatctgttagctccattaaacgtattccatgcacttggagtgatgaatcaggctgaatgtcagctccagactcctcagctgcagcttccggcgcttttgtactctgggctttctcaggatggacctttggagttggaggtcggtttggactgaggagtgctgcaagtgtgcaaatactagaaagtccgtcgagacgcagataggccaaaagcctccgaacttggcgagactgaagttgctctttggtggcggcggcaatgctgttattatcgcttggttggattggggttccatcccagtcgatttctccgcggcgccaccgatcgactttgtcctggtaccatttggggtatatatatgtggtcaatggagtagtcgccaatgtcgtcacgagtgccataaccacaaatatggtgaaggttcgatgactcaagatttctgcttgtagaaaaatattctagccccttggtcagtaaaaggtgcataatcaccagcgttgttctcca

SEQ ID NO: 2574 - DNA, 2618 bp, Emericella nidulans
agagcggcagacaagcgccagaaggctcaagagcaacaccaactccaaggcggcgttgtccagagagatcgatcaccactcgctccggctccccaccccgatctctggtctcatctccacgcagagaacaaaacagcggccttctactgtttatcagtttactccttctagtgtttacaaattccactcatttaaagaaatcctcgttgcctagttgttccgaccagcaaccctttgctttccgccgtatctctcgtcctctccaactccccgctgccgccctttctctcgtcgcttgcctctgaaacctgcggccctggctgaagcacttcgataaaataatatacgagcgcttggataaatatagcgagaatgagcaataccgacttccttggccgagcaatcgacacggtcaagaaggccatcgagagcgacaatgaaggcgagtacgagaaggcttatcagcaatattactctgcattagagttattcatgcttgcgctgaaatgggagaagaatcccaagtccaaggagatgattcgcgctaagacgggcgagtacatggatcgcgcagagaagctgaagaatcatctagcctcgcaagatagtcggaaaaagccgagcgcggtgggcgccaatgggaaagtgtcgcaggggagtggtaaaggcgggtatgttctacttatcaatacttccaggggggtatgctcggtagcgctgatgctcttatttctttgctggcagaaaagaggatgatgacaatgaggacgctgattcgaagaaactgcgatccgcccttgctggcgctatcttgtcagagaagccgaacgtcaaatgggaggacgttgcaggtctcgagggtgcgaaggaggcgctgaaggaggctgtcatccttcctataaaatttccacatttgtttacagggcgacggcaaccgtggaagggcatcttgctttatgggccaccgggtactggaaagtcgtaccttgctaaggctgtcgcgacggaggcaaacagcacattcttcagtgtcagcagcagtgatttagtttcgaaatggatgggtgagagtgagaggtatgccgccgaatcgtcgacgacagttctgccgctaactgaaacctcataggctcgtgaaacagctcttcaatatggcccgggagaacaagcctgccatcatcttcattgacgaagttgatgcactttgcggcgctcgtggagagaacgattccgaggcctctcgccgcatcaaaactgaactgcttgtccaaatggacggagtaggcaacgactccaagggcgtccttatcttaggcgctacaaatattccttggcagctagatgcggccatccgccgaagattccaacgacgagtgcacatcagtcttccagatattaacgcacgcatgaagatgttcatgctagctgttggctcaactccctgccatatgacacaggccgactaccggtcactggcagagcagagcgaaggctactccggcagcgatatcagcatcgccgtccaagatgcacttatgcaacccattcgtaaaattcaaacagcaacacactacaaaaaggtaaccgctcttggctccaaccctatcagctcagaactaattcaggtcccaggtactgcatgaaggtcaagaaaagctaacaccatgctcccctggtgacaatggcgccatggagatgaggtgggagaacatcgaggccgaccaattactagagccttctctcgtgctcaaggatttcatcaaggccatccgcaattcacgaccgacagttagccaagaagacttgaagaggaacgcggaatggacacaagagttcggaagtgagggtgcttagccctgtgcacccttctgagggcccatcccgtaccccatgtccgcttgaatccaatagactatgtctctaaacgaagccgctgtcaaggtcccgtcttgttgaaattcgcagatgctacacgtcttcctcataacgcgcgacttaaatgaccgccatataaataccttccaccattgaccatttattctttttaaagctgttttcccgttccttcatggatgctgctcccccccccccacctttcactttacataccgattgagcgttattactgttggatgagactacttaggcaggcgaggcgttatatgtatgaccttctatctattcctactaccactgcttgtcgttccggttcgctttgtggcgcatttgaacattgtctaaaaatactggcattgacaagactttgtatacgtctctctgcctctcttaggtcatgatctcgcgattggccagatgcactccacagtgcgggttaacaccctaatgttctagatgtaaaacagcaggggcacagccgcgggcccgacttccagcaggtgttggagtcaggtaggcagtttcaaatttctcagtctatgtatacagcgaacgtccaaacaaagctcctggtaagcacccatgagctctcctgaacagaaggcagtcaccaatcatgtcatgcagtcctaaaagccgcccactctacagacaaaaaggccaaagccgacaaaccgcaaaaatcgctggggaatcacttgcaaaaaaaacaaaagaagtgt

SEQ ID NO: 2575 - DNA, 1253 bp, Emericella nidulans
caatcataccgtaaagccgggcctttctgtaagccctgaatcaacccggaagcgcttctggcgttttcagatcccttgctcgttgtgaaagtcctgcagcatatcgcacgcggtacacgagggacagaccttagacgctgggcggaaaattgacgcagagataatcgggaagccatgttgacctcaggtgcaatgataaaagaaagttcgagttcggcaggtgttgaggtattcgggtgaaaggatacagtctatagagattgggagaagtgaggtatacctgcaacagtgaagagaagctagtccagtccgggccgagaagtaccggaaattccctcagcaaggaagctcccgtctgaactcggcaagtgacggattatcattactacggaacttcggcgtgccaaagaaaccaatttagcataatctattcgtgggataccactccgcaaaggtcatatcaagccattatcctggcggtgtcgttaatccagaccggcccgttcacatttcatttcagtattgccagggaatttggctcattatgtccgtcaacgctgtcacgtaagttgccggtaaatgaatgggttcgacctgcgctgacttcgattttcatagatctctctaccggcgttcgctgaagctcgccctggactgggctgtccacagacatatctggaggggacaggcagtttatatccgatcccttttcgaggccaataagaacattcgcgacccccggcaacagaaggtacgtgacatgaccttcgcagccgctgaccgctccgtcgaggagcactcgctcaccagcactgttaggtcctactccgagagaccgaaaaattactcgaaacatggaagcatcctgatccctaccgtgcaccaacggcccctggtggtatgtttacaacaatctaagtatccgagcaaaggactaacccgcgaaacaggaagcaaatacgagagaaaccttcctgctcgtcaactaccttgtgagtgtaacctaacttacgtggacaatccagacatcgtctaacgtcatgtcagacgcctctggtggtgctggtgatcattaatgctctaggacaaaaatcaagagagattattttatgtaataggagcatgtattccagtcgtctaattaaatcaaatgcaatgtctctgcgaaactagactctcaagacgagatttaaacacatagattgccaaaagacagcactacaattgataccgataaagttggaatcagaaca

SEQ ID NO: 2576 - DNA, 2870 bp, Emericella nidulans
gaagaaggacaaatcctcgtccaaaagtagcagcagcagcaagaaggacaagagtagcagaccagataccacgacagctgctacgcctgcacccgtcccagagtctccgtacactttaactaccgcaacgctctacctgcctctttcgcccatctcaatctctcctacgcacgctctcgcctcgctacttgctgaacacctatccccgctgctccttacctactacccgcctttccagggcataattctcgcttactccaatgcttcgatatcaagtgaaccaccctcgccctcgtctccgacctccacaacctcaccaaacccgcaaccactaaccctagccaccacggccggcgaatacggcgttatgtatgtctatctcacagcgaccttccttgtcttccgcccgcagcgcggacgagaccctcgagggctgggtcaacgtgcaatcagagggctttctgggcgccgttgtcctcaacctcttctcagtcggaatcgagcgcaagcctcccttcaacctggaaatggattcctcccggtgaagaggatgagaacgagaacggaacaacgacaaaccctaactcagacgaagacgacgatagtacgccctctacacccttcgatcctgaaaaagaacacttcaaccccgtcccgctagcttcagactccaatcccttttcctatgaccaaggccaagtcgcagattccacaactggcgcaattggccaactcgaaggcgaggagggaacaaccgaccaagactccctcgaaggccacttccaatccgtctctggtcaccgcgtgcgcgggacaatcaagttccgcgttgtcgatatcgacgtcatccctggcacagagcgggaccgcggcttcctaagcatagaagggacgatgctctctgaggacgaggagagcagagttgttgaggacgagagaaatggggttatggcggctgtgccttcgagcgtgcggaaggttacggttccgatgtcgtcgggcggcattatcgttccgcaaagggaggacgttgagcttgaggagtcgccgagcaagaaggcgaggaaaagcaaaaaatagacgatgcctatgtgaccctatatgctggcatcgtatgtaattatgtttgttatgttcggcgttatacggattaaaactgcattatgcgtctatacagctttgttcttggtacataaaactttcgtctttatcaatctgttccgcacacacgctccgtttcatcatgttcgcattcatcagacattactagctagctaagatgcaggccgaattgatgattagatcctcacacccttcggcacatcaatcgacagtacatccaccccgtcctggatctccttcttacttggcatgttgttcctcctcattaattctgcacacttaaccataataggatccatacccatcgtggcaacagcaacaactgtctctcccttacagtagtaagctgcaaacttggcattctcgggctcgcccttgagcaccaggtcgtcccatcccattatcgtgtttccgcaataacgcagctgtgagccgagcgcggaccagaagattgggataaagacctttggtttgaccttttgcagggaggaggtggtgttgtggagcatgtgcaagattgaggatgcgacgctacggccggcattttgagcgacattccagtgttcgatgcgtgtgtatgtgccctttttgggatctgtgccgggcccgtggtacgggaacgtggcgatatcgccaatggcgaagacgtcattgttcagaccagggacggagaagtgctcgtcaaccttgatggagccgtccttctcaagggtgatggctgggttgccttggaggaaatcggttgcaggacggacgccgacacccaggatgacgacgtcggcgggtaaaacggtgccgtcctgcagatgcacggcgccaaccttgcgggcttcttcattggagggggtggccttcgcgacgccggcggagagcttgaacttcacgccggccttttcgaggttgcgttggaagatgtggccgacttcggtgcccattacgcgctccatgggtgcggattcttgaccaacgatggtgacctcattgtccttggacagagcgttgccaacctccctgccgatgaaggagcttccgataatgacaaccttcttgttctttccgtcgccaatggcattgagaattcgctggacgtctgttactgtgcggagtttgaagacgttctcgaggagctggaagccttccagggggagcgtgcgagggacgcctccagtggctaggacgagtttggtgtaagggaatgtcttgccagagcgcgtaacgacaatcttttggctgaagtcgactgcactaacttcgtctgagactgtctcgatgccaacgtccttgtaccactggggagagcgccactggatcttctcagggtctgggatgagagccttggagagcttcgtgcggtcgattatgagactaggctcgcgagtaatgatggtaatagcgccattgtaaccgagttctcgaatagcaaggatcacgccgagggtaccagagcctctgaatggcgaaacaggtcagctagcgctccattcatgggtacggagaatcttaccctcctataataaccaagccgccggggccagaggagctgcacttatgctccgagattcgctgaccagacttgatagcggattcttcaccgcggatgtagacagagccgttctcctcaaacaattcaaatgtattgagagcagcgggagcaggggcatcttcaatatctccactcttgacattgaagcaagctatagtgtggaagtcagcatgttatatacatatacatttaatctatatatgtt

SEQ ID NO: 2577 - DNA, 2742 bp, Emericella nidulans
tcaggttccggtagacgagtcgcacccagaagctgcggttgccagttggaccatgaacaaaggcgtacagtcactaaaatagcccccggatcccggttagcgcgactgctagcgatattgtccccgccgatactttccttctggggcttgggttcatcaaggccgttagcagatccatcttcatcgtcgcggccaagcggtgcccgtcaaaaagtccacggctcattggctggccgatcccacaccaaccttcaccaggaaagcgcgaatgggaaggatccgaagactgggagtggccaactgccgcgatggagctctccagggtaggagagtccttctctcagtaggctccgtcctcttcccgtgtcggccgatgcgctgttaatgctgcctattattatagcgtgtcgccagtttaggatctgacgccgttaacaacgtcagccccgtccggcctcctccacctgtctccacgccgaaccatgtttctcgctgcttctctcaccagtaagtgaggactctgtacggctctcgcgttgccgctctgtttcgtttctaattattcttcattcttcgcttttcagttcctcggcagttccgcagatctacgattctcgcagggtaccagattctccagccgctgctgcagcagtttggcagcacagccggccctcacacgtcgcccgtctctccgtgtttgcaggcaagcaggcaagcacagactgaccggcatagcataggtagcataggtagcatagcgtcgcgctgcgatctatcatgcatcagtttatgaggcgtgtcgcagtttaaggaatgcagaatggaagcccatcattaaattgccccatctggttgttacagatcccgtcccaggaattctgcgcggccgttagattgagcagtaatttttaatatgaggaacgtcctgctagcagttcaacgcaccgggctcgaacgttcgggaggggttgggagccgttcttttcctagtgtcccgtactccccactggaaccgtttgataatcgccgccagtcttcactttttagtcaattctaaccggtttaccgttttgttgttgtatttttcgggcagctgaggcactaacactgtcggtaactctactgagctgactacgaccaaggtacacaccccgtcctccatagatgcctttgcatgggccactgggtaactgtggctcaaagtgtatcatgcaatttaaaataaaatgaagggaaaatggtaaaacagttagtgtcaacggcttctcgaacatggtcctgggctcgcctctgggtcaacctagtgcctctacgtctgatacagagctcctcactggcccgtcttagctgctcaatcagctgtcatgagccgatgatctctctgctcccaataatgcatcttgctgcgtttcatctcatcctcccgtccaaggtccatttctccttcctcctgcttgattccacgaatctttcttttccttcatcgcccttcctttgttgcttctgctttagttccgagttcattcctcagttagacggccatctcaagatcttgtctcgtctcgtgccttcacctcacaggtcatctttccctccacggcataccataacttcatctaccattcccagttatttatttactgtatacacaaggcatcatacgcggttcacggcaccctggtgtgctaggtgtttttttcgcttcgacgtcttcctagatcatcgctgtggttggtccgtgacaggatacgctccgaagcgactcagcctccgcagggcagcttcaccaggcctaacccgacctgttctgagcgcagctccgtcactggctcaaggcgcaccagctggttctatcgccttacccgctcatcccgagattaagacaaggaactatctggcaacacttctgaacgtgccggtacttcttgtactgtctcaaggctggccgtctgtgatctacggcctgtttgtcctactcgattcggctggtctgtgagtggactacttggacgcctgttgccactgtcaagtgtcaaccgtcaagacgtgcactgcaccgcactacgcaccccatccaaaaggtcgggcatcaagggcagccgcgacagcgaagactttgaaccgttcttttcatctcggcgtatgctgctccattctcacctactatctcaccacgagcaagccttgcacgctgtgaatcgcgcatatgattgcgttacaaaaccagcctatcctaccacctcctgccaaagtggatatctcactgcttttgaagccccaagatgaagaagaagcggcctccgtgaacatgatgagcaccacctcaacccttccacctgtttcggctatgcaaccgctgccgccgatgtcctcgattgcaccaccgccaccggttggagttggacttgcgactcaatcatcagtgccttcagcgccctcggggcccccgcttactgccaaggtgccagctggtgctggtacgaagcgcctgcaacctgctcacacggcagagtcaccggcgaagaagcagtcaaagtggtctccggaagaggacgccctgatcatcgagctgcgaggcatcggcatgaagtgggaggacatcagcaaacgactaccgggacggagtgcaatcagctgccgccttcattaccaaaactatctggaacgacgaagcgaatgggacgaggacaagaaaaacaaactcgcaaggctttacgagaggtataccacgctttgaagaga

SEQ ID NO: 2578 - DNA, 1396 bp, Emericella nidulans
atctgttcgattctcacaggatggctttgtattagcgactacttcatgccaactaatgctagcgagtcttgagaattgtttgattgcttgtcatggctcattatgagagtcgcttcggcagcttcgaggcggacgatgttggtctggtctcctgatatgtttgtctggatttactaaacatgccgagtgcaacgtttttttagaggggatccttatttcgatggcgatttagtgaggtgaaagtttgtttagtgatgcagtctgctataactttagaagtcttgccaagatccggaaatgagaatagccctaactcagtagcatatgagtaacaaataatatatatatctcaattaccttacaaacagacatattggcatctagaccctgccaccgatccagtatccaattatcagcgcactataccaatacttgtatgcaaacagccagcttcaggacagaaccgtgatattcctcgacaattccgtacagttcacgagcacactgtgggcggaaaactgccgccaggcaggaaagcaagactgctataattataggtcgggctcagcattataatctgtccgacggtcgtcccgaactcttctgccagatccttgtacacgccccaggtgaacatatacggctggatagcacactgactgggctcgcacagagggactttgatgaacttgcccggcgatagacggtcattcggtccagtggtctcatcacctaatgccgcggccgtgagagactcggttgtgatattcagccttctcgcgatgatttcgtatgtgtcgccgttgacggtgtagtagttccgagggccaccgctgacgcaggttcttgtcctcgtggtgttgggaaggaggcagctgtcgttgtctgtatggcaggtttcaggtgggatgatgatttgttcgccaacgtttgggatgatggtaacgtcggccatgaggttctgtcgcccgatgtcgcagacgccgcggtttgtggctgtggcgatggagaagagcgtggtgtttggagttgttattgggcaaaggtaggatgtactgttgagtgtgctggggtcacagctcgaggagacgtttgtagccagggctgcggcgaagagcgccggtaacagggtgattaggccccccgtggatttgttcagactcacgtacaaagcagctgtaagtcaactggtttattgatatgtgagagaatgtcaagctaaatagtcaagggtccggatagtcgacgcaagcgcttgttttcttcaggggctcatcggagtcagtaccgcctcataacctgcagctgacgcagccttccacagcaggcatctttgtctcgtcatcatcgagaatctcgctatcacttttgaaccaactcttggcagtgcagttcc

SEQ ID NO: 2579 - DNA, 4313 bp, Emericella nidulans
ctccgcttctgcgggttttcctcgtctcgtcctcgttcctcggttcgatcattacctgcgataacgtgtttattcgcttgcggcgtcgcctcgttctccggtgatgggactcagagcggttacatcacgaatgcgtctcgagttacctaccctcgggacttgcggaatgcgactgtgctgagcctgacctgtccggcgcataaacggttcgagagaatcgagaatcggtgtgatattacacgtgccgtgagagccagagacttgaaagggcctcccatttttcaggtttgctaggttctggaattcggtatctgaaagtctggaagtctggcccagtatccctttgtccaacggcgtcgatctcgatagtaatgatatccgtgcgccaaagcatcttgacagttatgcatgaaagagcccgaaggagacttcccgtagacatccccggcacctctaggcagcaaaggcagcaaatataggcaaagtatagagctgcagggctggccctgatccctagtccctacagatctagcaagctctttcatgtcggacgattatacttctggaacataaatggttttcgactagacatcagccacataactccaatctcagttgaatcttctctaattcctgggaacaatgacccgcggaatggtggcccctcggaccgtggagcgcagacagcacgagcaataccagacggttggcaagacgctgtgtcttgaagcacagcagcactagtcgggatgtcgaagtcgatatgcacatgttctgatgcaggaatctgctgctcagtccttgaggcctcgaagctagctaggtatcctggcagagaacacgcaatgatgcagaccccttacccagctcgagacatgtttgaagggtttgtcagtacgatattgaattctaaaatctgccattccattcacggaatagatcccaagatgtcttaatcaacatgccatactaatttgaccgcgtcagctccggcagctgcttttgactctcttagattgagtacctcgccgagactgggcagtggcgctgcaccgcaccgcctgcggccaatgtatcatgtgacggcacgaggccgaccttgttaccttgagctccaatatttcgccactaggagtcaccctcggccccacgttcaccatccccaactcccaaaatccaactccagattccattctcctcaaactccaactccccacggtactaatcgagatggatctgccgattctctcttttttggagagctaccgcttcacttttggggccgacaccctctagtacagaatcgcgttcgacctgggatgaccacttctgccgttacgcctcggcaacttcccgctcttgccgtcattaagcagcgagctctgtgagctgcggacgcctcgttcctggtcactcctggtttgcacccctggatgccatgccacgctcccgtttgaaacctcggatcatgatcgtgatcaggaattggacatcgtactccgcgcccgcgctttcttcccaactacctgaggggtatacctgagtgacctcatgagctggcgttcagctcggtttcagctcggtgatgccgccagtttgcggtcagaggcgcatccagcacaaaaatcaacgacgaccgtttgaaaactaatcgctttcatgttcggggtatttctcggctgccagaagtctccagaaagtctccaaggagcaagaaagcgcagcgcccactatgtctcaatcagtaccggcatgagcttgtaacccagcggctccaacagcccttgtactctgtactctgtagcgctgaaggtagtagctgaattcttagtgcgattgttacctgtagactgctggctgctgactgctgtagcctcctgggcgtccctgcaggacaaactatcccgtcaaatccgtttagaggaatagtatgcagctacgtggctcttgcgtccccatcccggtggaacagacaactgcatgggggtggcagctgagcattctaacaaccacagtcgccggcgccccgttttcattatgggtatatcgataattagacgcaccataagctcgcggcgtggatactggctgctcaggacctactgatggcagctattatgtgcatggtgtcgcgcatgagcaagtgactcctgaagtatatcgtacctatgtttcgccttctcatctactatagagtacttagtacacactatcgttctagaaacaagtaccgcactttatccaaaccggctcctatctaatactccggagggaaaaatcaaaaagaaattccgacaatcataataatacggacttgcgttggtgattgtgaagaaccttgcagccacatgcggcgaccgactggctctcgcaaggctgagatccttcggctcatttgatgccgaaaacgcaagggttgaaatcatccatttctcctccattcagatagtctcatgctctaatgagaatccacccaaaggagaaggcgtacgtgagtgatcggccagaacggcttccccagagaatgagagtaaagtaccgtaagctagaccccagtctagggatcacctaatcgtctcccatcatgtgccgtaaatctgaatctggccccgaacaacgaacctcgatggagaatacagagtacagccatcatctgataggatccgattcgcatttctgtaagattggggttacatgcaagctgacaacaacaatggatgtgaagtctaaagccacgcgtttcatatcgaagcctaagaggaagagatcaaactactcgggactctattgtactcttctctctccatggcccgctcgctctatttctcgatgggggcgaggcgacactgcctcatctcgtgatggagagctgctcatctcatcgccagtaggttgaaagaagactgacagaagactgacacgtacattgtcacttgggatgtccatcgggcgatgcgatcattgattactggtgacagctggccgtcgaccgccttgtgatctcgggggtgagttgttgtgatacactcccggcctgtcggagccccttgagtccctagtctttcaggccctgctgcccggcgacgcaggtaagcttgacggattgacgggattctacgctgaaaaatgggcgattggaatgaagcttagaactgtgatattgatatcgacgccacgattcacaccgtccgcatgatgtgtggaaaggtgtacggagtacacactgagtacacgcagtagttacggatacaaccgagcgtgtttcgcccatactatacgcatcgtgataatgaagctcgccttgacgtttttccggttaagtatccggttagttattctacgatgatcatcatgaccgtcgcctcgatcgaaccgcagacctcttccttggtatgtgataacgcttgtcattgcagtggcccgggatccgttcccattccgccggttagtggcagcgggctggacggaagaacggtccatatccattagagatggatcaaacatcggcattgacacgtcgagatcaatgtagtgcccttgaccctcccttgtattgggtaaagttatacaaagtactagcacatgaagtggcagagtagattgatcaactgagcgaaaatatgagttccagtaagtgcgaaaacaaacctgagcgacagccaccaaaaaaaaaaaggcaggttcgactcgatcccacgcaagagcttgaacggagacagattcacagtcttccgaacgggctgcctaatcgagccatatccgtggcgaaaggagatgaatcgcatcgcttgatctctgtctaccccgtataccccgtataccccgtagtcagcagggcatagtctgtaggtgtttggccgcctgaaccagccatagacagcattgtctggggcagtgaaacgaagctctccaaccgcgcgatcgatgctgagctcgattgggggacggataatatgcctcagattgcacaagagataactagctcgcaaggaatctacagcggctctgagctgctacttaggctgaacagtgttatgaatatcaagcgctgcacgccaatcattggggacccattttttctggcagtcaagtgacctggccaccgactatcactttcgaatattgatgcgatgcagaactgggggctgctcctggtgttagtcagccggtcacagggcttgctgattttgtctagactcttgagtcttccatagttgctctatctctgtcagtcgctgtcggtgttggccagctggtgtattttatgagcgtttaggttcagtctcggtagtaaatggccataaggatcggat

SEQ ID NO: 2580 - DNA, 2389 bp, Emericella nidulans
atctttgatgagcgatgagggcggttgaagtagattgcctcctggcctattgagctaattagcaagatcgccaaggatgtatcctttggggcgcaaagcaacatacgccgtgtagttgaccgtgtatggggtggcactgggaaacattgagaggaggccatctctgcagacaatgttagcatgtcgttacgaaagccaacagagcactcacgcagcattctggatctcagtagcgttgacagtagcggtaacttcgtcggcgagcgcaccgatggtgctcaggagcccgagggcgatataacgaaagaaatgcataccagggctctatcacttgctgaagtgtgtagtaaatagtcacgaaagaaccttaaaggagtattgagcacgtccagcaatggtcaagacgccgaccatgtgcggaagcgatgaggtatgaccttatatcaaattgtggagatatatcgatcgggcaagccagtgctctctggggtatgctgctgaaagcacgagcgaatcaacccacagcgttctatggcaaccctggccgagtgggaactcagacatctggagccgtcgtgggccgaagccgccgtcaaacctcggggatccatcttgaggctggtatgagtaatggttgcgattggttcgtatagggcatgctgctgtctgactcggcccgtatgaatcaggatcttgcggggaaggatccaagcgaccaccgcggtgcctggctgcacatcaacccagatcataatttgagcagatttacaagccatatgttgactttatttagagttgcggctgctggatttgaccgagggtggcgtccggattctccttgtagacgagatcagagcaggctggagtgagacatcgcgccatggtaccgaccgcgaactgaagctattgtaggtaacgcagagcaacagcacttagggctgagctctataccaaaatggcccattactcgatttcatagcatgggtaagctaggagtcgcactaaacccctgagagctcaatgggtgtatcgatgtcaagcattgccatagtttcatacgagataacgttccctttcggatcagctagacccttgcagcatgccaaagctggtgaggagttaatgtttctgttgcgagtcatggcctctgagtcgcggtttactgcagaaggcacgacggggattgcatcagcatccagcacgctacgatgagaatcgccactccagcaggcccaacgcacccttggttggccgtcaaccccgcaaagtccatctccgcaaccgcagggattgcccggtaaagtgaccgatcagtatatctgacttcaagaatgtgatagccgccaaggccagcagggaagaggatgccatctataaagagctcctagacgtctctgagagggggtaccactaacccagttgccagaccagtcttcctccgcccacaaacatattacaacagtactgtctctgtcctcagcaaggtcccctcctcagtcctgaccgcaaacatgaagttcttccaatatttcaccgtcgcactactgccggcgactatattcgctatcccggccgcaaagcccaagcccaaggccgtcgccacggcggcagccattaccgcggaagactttcatgctctcgttaagcggcagtcgaacctgaccgacctcattggagacttgaccaattccttcggcgccattaaggacttgctgtcgaccgagagcttgaacaacatcaacctgattttgaccaaggctgccgagttactttcggacccaaccaccaagcagatcaagagcctcgtcaacacagcctcggacctccttggcagcgatgctatcaagaacctgctcgaccagatccccaccctgctcgatagcgtcggcggtctcctgaacaaagagactctcgacaagatcacaaatctgctgaataacgccgcccttctcctgaccaaggagttcgcagagaataccagaaacctcataaatgatattggtatttttgagcccttccacctccaagagatatgaccagcgctaacagtaactagctcctctggtgtccgcagtggcccaggttatatcagctcttctgggtgcccttctcgggtaaagacaacgattgggtgagaaggattcaggcagccgcacggtgcaggtcaattgaattgcgtcttcgataaccatgaagctgttcctgctagctgagaacccaggcgggaggatagggggacgcactaagtctgcttgttgccacgaccgtactggcgctggtaatgaacgataacgaactaatcttacttaataaacgcatcatgaaaacaaaaccgaatttatttgtcggctgtcaatttcaatcaatagtaatcgttagttgagctgaa

SEQ ID NO: 2581 - DNA, 1147 bp, Emericella nidulans
gaaagtacaagctgagcaaagccatgaggaggagccagaagaaactaagcctgacggcccctccactgaggccgtatcagccagcccacatcaagatgaggaccatcgaggagcagaagatgatggaggcgaggtagttgaagataacgaagatacggtgatctattagttatttacaatatcaagttggtcatctactcctggtcccaatggtggtcaattatgtacaacacaatcatgataattgaggagacggttaacgagggccgaggcaactcggaggattgacatcagaccccaaaatactcccaggtccacgaccttctatccttagacatttcaaaaaacattttcaaagacacttaggcaaatcatcctctcgatcaaattatcctctatcaagccctcaaattacagaggaagctcgacttcacgtgacgggagaggggttctgaagaccttctccattaaaaaaaccatcaacatcgatacagtccatttgagctgccttgtccttcccttttctgtattcgttttaataggctttggtccatgaaataaatcctgccgttcgaaaaccatggcagtggacaaaaccagggtttcgggagactcccgagtcgagcatcgctcagcgtttgtgaaggaaaacatacggtatgagtatttcctcatctttgtgatacattattgagctcgtgcacttcttgcgtgttccccttgctcgcccgacgccgagacgtgcttatgcaatggtctaacaaacaattcgttgactatatatctaggctacctctatagccagccgccatcaggccaatacaaaggcaccgtagtcttggtattcacattgacttttctctatactctttcaagttcaatactgatgcagatcctgttctgtctcagctccatggtttcccggacctgtcaatgggttggagataccagattccgctatttgtcaataaaggctaccgagtcattgcgccagattgtcttggatatggacgaacggtacactaggccatcaattttacagtctgagcaagcagctgacgggattactgtcttcttaaaccaggacgccccagcggatctagcggcatactcacacaagaactgtgccgacgacatcaaagaacta

SEQ ID NO: 2582 - DNA, 3120 bp, Emericella nidulans
accgggatgcaaagcctgtgtatagaaccagagcaagcaagatgattgaagagggggcgagggcttgttcaatcgatttcgtcagagaggcgaaaaaacggaagaacatagacatgcccatcatcatggcgaaggagatcaggtagaggaaaaagaacgctcccgcttcacgtcggaggtttcccatgaagtacaggacaaggctgttgagcagggagttgacaatcttgtatggcatatccataatcatcgaagaaatagcctcagcgctagggtggtaaagggcgtatctgctgtgtttctcgacaattgttcgtttctcgtacaacgtgatgatttcgagaacgctggaaaaggcactcaagaggaccatcatgaacagcaatgcgccacgggagaagaaggaggaggtatttccaggaagattgtaaaacacactggaaatgatcaaggcctcgaagaagtttagaatcagcatggccagtgtcacactggggtcgtttttcagccgttggaaatccctccacaagcagattcgaatctggccccagtatgacaaggtatatggagatttcggtcgctggttcttggacttctctgcatcccgcgaagacgaaaagagatcaaggtctgtggcgttaaaggggtgctcggtgttataccggtcaatgtcacgtagaagtgcctggcgttcaggactctctttccacctctgcgcaaagtcatcggctgtcctgggcactaagttctcgaatccaggccggatgacgcgctcgactgggctcgacatgaaggtcaaaaagtcaggcgtagtttgagcttcagggcaaacgaagccgagacggatgaagtagtctttagcttcctttgcaggaccgaagtaaatctgccttccctcgtagagaacggtgaccttgtcgaagagctaggaaagggtcagtacagttggcaagaaaaagacttccaacatacctcataggcggcttgaggagcctgatagattgcaacacaggaggtgatcccgaaaacgtctccttgtgtccgtagggtcttgcaaaactcgacagcattggcactatccaacccccgagtgctattgtcccaacactgcagaggagcgtagctcaatgccgcctctgcaatagtaactcgcttcctctcccctccgctaaccccccgaacgaagtcgttaccaaccttggtgttgatcgtgtggctgatgccaaaggtcgacatgatgacatcgcgtaagtgaacggcgtactcctctcggctcatgcctccagggacgtggcgaggcgtccgagcgagcgctgcaaagtatagggtgtccccgacaacaagctgaggaaaatgtgcgtccacctcggcggtataaatcgcttcgccacggaactttttggacatctgtttcggagtaatgccctggtaattgacgtacgaagagggatccacttcaaagccgtgagtttcctgtgcgatggtcttcaacagagtcgaacagcctgaccccggagcctaagcacgcagagttgttcgccgggaagcagcagcccgtccacgtcctggaggatctcagtccgttgctttttgccccctagccattgccaggcaagcgtcggcaacttgagaagcgcattccctacactcatctggtaatcgactggacttccgtagccagcaacattgagattcttgaacgcgacaccagcaactcgtggtggaggcgcgtctgtcgaactgtaccggacattgtagaaggccttggcccaggctctcgcattgaactgggcattctgggggtcgagggacgggtcttttccaaagttgaacgggagctgatgatgcgaatgcttcgaccgctcactcagtacccgcgccaagttggtcacctcgcggtcgttttcgatctgattttcatccagggtcgagttgcagctggtagctgtgctgtccctgtcgacggctttcggccgactgtctgttatgggatccatggacggtttggcaggagcctgatttgcagcatggggacaagggaaggggctcagaattttatacgagtccgcccagagctcggagagttgttgacgaatggcccgacatctcaaacacccaaatttggagcccgaagactattgacacgtattgagatgttgcccaggtcagacggagcccgcgggcggcgcgatccgtaatatgacccaagacagcggaatccggatcgagaagccaatgagtcaaaatgagtcagggatccaataagagcgcgccaagcccaaagagtccgatagtcctatagtccgagcgggtgctatatgtcaagacatcgaatcggtctcgggttcatgagaatccgtctctctcttcatcaggttatgattcctagcttgatcaaccgttacaatgcaatcttatcgcatgaagctctcggtaatggcgaatacccctttatcgtcacttgctcgttgctgacatgacggtagtgtctcaggtgcaaagatcgcaaggtgtgccgctcgaccagcactgttcgaggatgctgaccctctcagctgagatgtgaccgcggggagccacaatgcaaacgctgtcaaaacagcagcgtccaatgcttgtaccccgaaaagagaaagacacggggttcaaggtgggtcgcctcgtttgccctcccgactctggccggtctaatagttgcctaaggcaaaagtccgacatacaccgtcttgaccatcgcctggaagccttggaggaacaactcagggcagctgcggccagaaacgtgagccaggaatcaccgacccgggctcatactccagcggaaaccactcgggtgggaacgcctcaagtcgatcttgaaaatgtctccaaagatgatggtgggttcagcacatccatcctttctatgcaggcattgacacggatacctttagcttttctatatcggatggttagtggagcgacgacagcattgagacgcttaccacgcagtcttcagagcctccatatccttggtctcagtccacggtcagcagtgcaatcacgcgtctggacacggcgttggttcagttggctgctccgttccctcggccggacagtcgccacccaacgattcaaaga

SEQ ID NO: 2583 - DNA, 2192 bp, Emericella nidulans
cacacatccttggtttgcatatcgagcacgatagaactggacagggagaacccgcgggttgagaaaattgctatccttgataaaaagctgtccatcggtagtgtccagcttctccattacggaaaggtgtactgcctcgcgagacaaggtctagtaaggcaattctgtggagaacaacgctcaagctctcgtagggtaaaaacaggtcgacatcttgctggtggacgacagcggagcaaaagggacgcggaataaactaaacgaaaagaacgtcagtatcattttcccttgggagatggaaagagcactcgaagaggactcgacgtggagagggaaaactgaggttggaacgcgaccaaaatgtgctattataggctttctggcccagggaatggagggtgacaaaaacaaaaggtcgagcaggtttccacaagcccacaacaatccaatggcatttgttaccatacctgaggactcccgaagaaagaaaagaaaaaaaaagaaacagaagtcttctctattcaagcagaacagaggctgtcgcctggacaaacccgaagaaaaagaggctgttaaagctgcgaagtcgactccaaaaaaaaggagaagattggagaagcgaagggagaggaaaaaggaccgggggcagctagtaatatgcaagtagagagcagtggcgcctcgtagcgcagcggaatgatgaattgaaggaggggtggataaggatgtgcaccggagcagtgagcaatcagctgagagagggaggggcgctatcagcactcgaagggtactatcaacgcccagggtaggccgccgatgacagactaattctctagctgatcttggagctgaggtaaaaaagaacgggcgaaacgaagcgctgagagagaaaaagaaaatatacagccacagaaggggatagatacgagagacgctcttaccttaatggtagtggaaacaatatcgtcgcagacttgaagtcaaaggcgcgggcggcagggcagattagtgaagtatttatcatgtcagatctggacaaaggagtcccataattattgttatgagagtttccatgggtccttcaagttgttatcgcagtatcatacggtacagtggagacccggcatacattgaaaccattatccatgcttgagcatctgtctgctgcgaggagtcgccccatagctacagcatcacttttttcaccacgatagttttctttggaacggtcagaagcaattgatctttacttcagagttcgtcccgttaccaggtggaccgtgaacagaagcggagccgatagatttttagtttgtcaacaaaagagtcattcctctgccgtccctatcgaaagcagcagtccgtgttactactagcggggttcctacggagaacggatactcaactactgctcttcatgagtgagactcctatgtcagtcatactttatgtcctgttggcagatgctgaacatccctttcttgaccttggttgaataggtacaaatattcggtgtttcaggacatacatgccacccctgggagagactcccaattcctgattgtatcctttctgtcacctggacggaagtggagcgatggcttcgggacgcttgagacgggtatcccgatcgtgacctcgaatgcgatacgggaaaatatcattgtcgacatcgatggagtcattcatcgttacctaccgtacacgatttactccgtccacaagcgagatctgtccttaatccttagtcacagccactggatgggcgtcagtcggccccgtcatgggaagagcaaacaggcttgatgggtggtggtggtaatatttcctccgcgctcctaagcttggacttggatagcccttcccaactgtgtcatctctttgatttgacccggcctcttattgttgcttctggtataacacctcttcaccactgattcactttatgtttctctcgactctggaatattctcctatatacactaatccgtccaatcgacacctttacttttctaccctcttgatactcttctgtgggtaacacttcgataacacttccatattctaatacacctatcttactctccccttcctatctcatcacctgatctatctccttcttctatctctcttttattcccttaataaacactccattctttctttcctcgcacatcatctctttctccatg

SEQ ID NO: 2584 - DNA, 3044 bp, Emericella nidulans
cgcttcttcagcaacgctcttctccgctaaagcgacaaaagccctttctttcgagcagattgcccagcatatcggccgtaacgaggtcgctaccgccgccatcttctatggccaggctaaagcctctcccgaggacatcgagaagctttcgtctctcctcgacatcgaccatgagaccctaaaagcacagctctccggcttccccgaccgcggccgttcggttgagatgccgccaaaggagcctctcatctaccgtctttacgaaatcgtgcagaactacgggtatgcgtataagccggtactgaatgagaagtttggcgatggaatcatgagtgcgatctcgttttcgactaaggttgagaaggaaacagatgagcaggggaacaactgggcagttatcactttgaggggtaagcggctgcctttttcgaggttttagctggagaaatgaagaaggaatgatagatagagaggaaatgtattgggcaatattatgggatgtgtttgaacaggttgcaatcgctccgtgtagttatcaggcaattcaatgtctcataatgtgttaaccacttacaagtaaatccatttctcctttgctgttggtattcaggcagctggattgtttcatgatgccgtatctcaccggaattcccgcagctctcgcacagccggtatgaagtgaacaagaggagtctcacagcattctcaccttccatcatctcctcaaattccttccttctattcataatctactatttttcatattactctctattttcctcatacgttcaactcctatcttgactttcactccgtcttctcgatctggcaactatgcgcgcttgtcccaacccccagccgaagacggcagcaagcccaaggaacaagataaagactaaagcgcctccgcgtgtcaaatgtacctatctcagctgcaactttcggttccagacagataaggacatgaagaaacacaagaccgcctcgtctgagcatgaatactgcaacaaatgcgacatcgagtttgagatggaagaacacctcctcctccacaagatcaagagcaacaaacacatcgtctgtccaatatgtggtattgactttgacagcgaaggcggccgtgaccgtcatatacgtcaggtgaatgtttttcccctttcatgttaactgatgccgatagggctcatcgtggtgttagttccaccgctcagcacaaaacctcacctgcttcggatgcaaagctacataccgcagcgcttctggactcatgcatcatatcgaaaacggcgaatgcgtcaagatccgttcacatcgtctccttgtcgaacagcagaagaagctgatgcgcaaggaggctctggagttcttaatagccccagctgtcccttcgctcgtcgacatggatgaagatgacgacggcggcttagaaaaagaatacaaatatactagctgaatgcgtccagctcccaatggcccgcagcgaccttaaccgcgaggcgatacccaaccaaccggacaggataacagcgaacacgaacgggcttgtcgaccgtcactggccaagactgacagaaacgggactggagaataggatgagcgatctcatggacgtctccacccccactggcaacggaaaggagaatgagagtaataaagggaacatgccggctggatgagtaaaggacgcaccatacttttccagagttgccagcatcgaaagcatctgcatctgtatctgcagctggagctggggctgaatcgaaatttaagtccggaaccctagccgcctgtgctcttggttctcccctgttcgttgggatttctaatgctggagtcgagcttgcgaggatctacaaggactggaacccaggaaacttcatcgacgtgttcaccggagaatacgtatgtgcgtgcggaaagcgctgtctaaccaaggaggcgtttgagacgcatgtccttgctgagagccagggagcacgcagaatgcagtacgttcctactcgcctatgttataatacctttactaacgttgcgcggcaggtgccctaattgcctgaagattttcaagtctactgctgcgatcatcacgcattgggaatccccgagtctaaaatgcgaccagagcgaagctgatatgtacgcgcagattgtggacgaggtcagcggcggactgatccacattgccggctacaatgaggacggaacgataaggtatgaggctagcaacctggaattgcacaagaccaagacaattggagtggctctagataggattgactggtgaaacagcggcttgacgagggagtctagcggactaacacactccagctcaggctcgtggtgcagtgcagaatcgacatatcggtcacaggcacagccagccttgagagccatggaatcgtgaaatcatgcaatcattcgtgtttcgttgggactatcccaatatttctagcaacatgaaacagggtataaaataggtatcaaatccatcaagccaacggtgtcatgcccatggtagagctatcgtgaccaattcgtaacgcctgcctcattcttcttctgctcccttcatcatctgccgggtatatggtgtgactatcaatcgcagtcgcaacgcaacggggttcgtcatcacctaacagcagatctcgcagcactcgaagcaagcaagaccggcgcaactaccaacaaccggttagctttattccgacatgacgcggtgcaactatcttgtgacaaactcacagtccacagcagaatccacctccaccaccaccgcgcaagtgcatcgacatctcgtcttgacgagcctggaaagagagcttagcgtgattatttccacagtggaaggtaaagaatcctaaccggctgctcagtgacgacgccgttcgcgttcatggttggcgcattaggagaccccggctggatcattgtgagagtgttggggtcgaacttagggtccgcattctgggcgctggacttctggcttggaggacttgaagagagagaagaccattttcggcaggataagtcagttgggtttt

SEQ ID NO: 2585 - DNA, 2436 bp, Emericella nidulans
  unsure (1)..(2436): unsure at all n locations
agcgtgatcaacagttgctgcaagcggccgaggttgactttgtacgtatactcttctattcctgttcttccattttcctcctcatgaagcaagttcggcgggcctagtttgctaacgttgtgcccctcctttgtttcaggctggttatctcgtcaccttaggccaggaactcgcgaatgaaaactccgcttcccacattagaaccgccgccggtcttgctctgaagaacgcttttacttttagagatcgagagaggcttaacgaggttcaacaaaaatggcgccagcaaattaccccagatattaaggcgcaggtcaaggaacttgcgcttaagacgctcgcctccaaggatgggcgcgccggtcagtctgcggctcagtttattgtttctattgccgctatcgagctgccccagaatgaatggccggatttgatgcagatcctcgttcagaatgtagcgagcggatccgaccagatgaaacaggcttccctcgtcaccattggttttatttgtgaatctcaggaaatggagctccgcgagagcttggctgcgcactccaatgctatccttactgctgtcgttcagggcgcccgccgcgaggagcagaacatggacattcgattcgccgccataaaggccctcagtgactctgtggactttgtgcggtcgaacatggaaaatgagggtgagcggaattatatcatgcaggtcgtctgtgaggctacacaggcggaggaccttcgtgttcaggctggcgctttcggttgtctgaaccgtatcatgggtgcttactacgataagatgagtttctacatggagaaagctctgtttggtctgagcattatgggaatgaagagcgaagaggaagatgtagccaagcttgctattgaattctggtgtaccgtttgcgaggaagagatagctatcgaagatgataacgccgcggtatgtctgacccaacattgtcttgatgatcaattgctgattatgttttcacggcccaagctgagggtttgactgatgtccgcccaatgtacggtttcgcgcgcatcgcttgccgtgaagttgtcccggttctgttgcaggctatgtgcaaacaggacgaagatgcaggtgatgacgagtacaacatctctcgcgctgcttaccaggctctgcagctgtacgcccagtgcgtacaggccgacgtcatccagcccgtgcttgcttttgtcgaggagaacatccgaagcgaagactggcgccgcagggacgctgccgtggctgcgtttggtgccataatggacggtccggaccccaaggtcctcgagcccctggtcaagcaggccttgcacgtactggttagcatgatggaagacagctccatccaggtccgcgactccgctgcttacgcgctcggccgtgtctgcgacttctgctctgagacccttgaccctgacgtgcacctccaaccccttatctcttgccttttcaacggccttgcaagctccccgaagattgccagctcatgctgctgggcgttgatgaacgtggccgaccgttttgctggtgatgtcggcgcgcagaccaacccaatttcaaaatacttcgaggagagcgtcaagtcgctccttgccctcacagaaaggtacgtgcctcggattttcatttcttaagttaaacctaactcccgtctagatcagacgcagataatcagcttcggaccgctggctatgaagtcctcaactctttcgttaccaatgctgccaacgacagccttcccactgttgctcacctatccgacgtcgtcctccagcgtctggagcgtactattcctatgcagcaacaggtcgtcagcgtcgaggaccgcatcatgctcgaggaaatgcagaccggaatcacaagcgttgtcctggtaagtacacggaagtttccttcactaattgtttactgacttgactaggctattgttcaacgcctcgaggctgaaatcaagccgcaggccgaccgtattatgcaaatcctgctccaagtcctttctactgttcctccgaagtccagcgtgcctgacgttgtgttcgccactgttggtgccattgctaatgccttggaggaggagtttgttaagtacatggagtcttttagcccgttcctcaacggtgcccttggcaaccaggaagagcccggcctttgcgccatggccatcgggctggtcagtgatatctctcgtgcgttgaatgagaaggttttgccttactgcgacactttcatgaaccacctgatgaacaacttgagcgtaagaaacctttcttatattcaatgtacgaatcctaacatgatttccagagcgccaccaaccagctcaagccagccattctngaaacttttggggacattgaacaagcaattggagagcactttgataagtacttgaccgttgtcggtcagagtttgtc

SEQ ID NO: 2586 - DNA, 1303 bp, Emericella nidulans
tcgcacacgcgccagaatatcgtggcctggggacttgctggtgctttccttctttttgctaggtgctttggcgtctttttcgttcttactgacgtcctttgtaaatactggctcaggtacttccttgaattcaaccgtggctaggcatttctcttgcggttccaactggcccccagacaggcgtgtcaaaaatcgcgacatgccagcgatggacacctcgacaaagtgaaggcccaatatgacccagaccagttttccgttggtggcatcaaacacaaaaatatcactgacatattctttgggtgaaggctgatggtgtcgtgcatacacctcccactgctccggccgcaagtcgagtggcactgttggcgacctaatccatcgttcaacacggttggacaagtacatcttgccctcgtcacagtcggtcatgcagttcaagaaaatacctgcaacttgacagaaagtgtctccaaggcccacgcccagaatactcttgctggagtcttgcttgatgatgcgcccagccgactcgttgctcgtggctgccagtttctgcaacccacggtagccatcttctttgtaattcaccacattcgaaaacaatttgtagatgttgcgactgccctggatggtctgttcggcttcctgcccattgagcagggcaagggcacggcggtgatccaccaaacgctcgtacgcggcaaaggcttgcatggactgcttcggggtctggaacgtgattcggcctgaaacgtgctgagtggtatttccagagtcactgctggtgatgcggaagtcccaggcagatgatctgtcactgggcctctccgcaacaagccaaactgattttgacccatccagacacagtggggtgtcgttctccatgccctctagctcaggaatcatattcccgtccaccagggttgccaacgcatccctagcaataacctgctggaacatactgggacaaatcggcgccgtttgcgcaataacatgggcgctaacataattttggaattcatccgacgtgatgtggatttggaaccttgcctggcatctgtcagagtcctgatagcccacgaacgtccagagacccttttgtgcctcctgaacaggagatgcgggcacgaagaccttggtcttgagctttctgcgttccaaccagtgtcttgacttggcaaattggtacggggggaggagtaataaagggaatttcggggatgggcccacatgttcccagaccctcacttgcagccaaaccttccacaggttaaaagtcgcatctgccacgttctgacca

SEQ ID NO: 2587 - DNA, 5307 bp, Emericella nidulans
gcttgactagcaacttcgcggtggcggtctgcatagagacgaatcaccatacaggaaaggttgtcagtgctgaaccgcgcaagggcatgatcaaccagaatcttcgatgcctcctgggcatcagacacattgcgaatcaaatcgacagcctcttgatcactacatacatcccagagctgcaaagaactattagctcaatcgaaatccgtgctagaaacgcatgttgacttaccccgtcacaggccaaaatgatgaactcgtcaaggtctggctggatgacagtctctgttgtgtaaggatgcccagtaacaagatctttgatataggcatcgccaagggctctagttacagcgagaactccgttaactcgattattgagaatcaagcctcccgcgttagcaatccttctcccttcgttctcatcactacccttgtgatcgtaagacaggcgaagggctttgccgttcctacacagtatcacacgggcatcgccaacattggctgtatataggacacgctggcgaatcgccttttcgcgtaacttggggggaatagcaggaaccggggtagcggcggcttcctgggtaggggtgtcatctgcctttgaatccgctccggccttggtcgctgccacggctgccggcccgatggcggacgaaccggtcacggaacttggggtgggaattctatcttcccatctgagtaatgcgacaaccgcagtgcaaccgctattcttaaccggcagcttttccagctgctggtccacggaagtaaatgtttggtcgagaagctcgggaacaggcgcatttatgttcttgcgcattacgtcttccaagataagatgcaacttctttccacaccattgggcagcaaaagttcctgcatggccatcgaaaattgcgaagtagccattatctgtttcaacaatgggcgtcaattctccggtctttggcgaagcgtcgctaggatgcgagctctgatcagaatcatcattttgcgctgacggtacagggttaccaaggaaattataaagataggcatgggtatcttccatagtccggcgacattttttgttccggtcctctgtaacgccgactctgaaagatgatcgaggagttggtgaagattcgcccgcggaattattcagtgagccctgtggaacgttgagcgctgggtccatatttccgtatctgtgtaaggaagactctggaagcgaagaactgagcgcgctttcggttcgggggctactaaggctcagggagttttttgcgtttgcgaaaaatgatgctgcctttgagaccgtactgcttcggcgcttcttgtcgccgccagggctctgttcctcgcatgctctgcgtccgaagaaactagtggaagggggtgatttcgcttgagatccaacggtaccctcggtctgaatactgagcgacggtgtatttatgggacctgatcgggggatagtatctgatttatctttgggtgggctcgaggagccactgaacatcctgttcagcaagccaccctgaccagaaaaacttcttcgcttacttcctgccagcttgaacgacttccgatttcagttttgcaggtgcggtgagaattcgagtcagcgaagagaggacagcgggcgatttctcgagcgacaaggctgagatagtatctcagcggaagaatcgcggcggaaccgaggggaagcgctggataagaggtatacggtcagcaactagaattatgcaatgacatctgttgaaactgggggtttgactgggtgcgtagctattctgaagcctcaaatgacgctcgatcagcactgtcatcggatgatgctcgctaccatcacaacagggattaaagctcccttccggaaaacccgacaacagtaaccaactgaggccaagtaggggttcaaatggatcgccacatgcttttctgtccgtcctgggctgaatgggcggatttgtttgtttcgggcacggcgagcgatagcccaccccgctgcgcgcttggaaagatcacaagccttgcggagttggaaggattcgaggcactcacggaaacactaggtattggagagtataaccccctggactggcagaagctatagcgaccccgacttgtcagaacggcagtagacgtgaggagccttggaggcggatggggattgatcgatatttattaatagtagttgcatacactgcagtaaggtgagattgcccagaacgagatgccaccggcactgggggcttccaatcatcgccggtagcgtcggatttaacggttaacgtgaccacgaacgggtggagcccaaaacaacttataattttataagagagtcagattcgttgattactttccaatgaagaaatcaagagcatattacttttgcgtacacgagaacccgcaaaccaggggggttgtttagaatccgatgacagcttcctaacgtagtgacccattcttccgtacggttgtttaggggttcgcctcagcgtgggatggaggatggcgtcagtggatgggggcgtcacggatcggccgtactatgtaaacaactaccccgaactatcattgatctgaaagatctggtgcccagcttatactatcttttccttacctacgtcggcacccccaggtcaaagatgctactagcctcaatcagggtcctgtaccaatttgcctatttacctaagctgttcctacttcatgatattgggccggggtcgcttggcgcctaccgaaaaggcaagacgcctgtatgccacgtgatatgacgtacaaaaggactaaaagacaggactgactttccaagcggaattgagttggctgggccccaggataggcgagactcagggctgccgggccgttatgcctcattggggctcttgtcgggcattacagcaggttcaggggcccgttcaagaaggggtgtcttgtcttgcctatcccacatggagtgtcagttttgactaatagattaaaacagggccacttttcggtggaatatatagttgcggcgctcgagattccctacagcaattgaagtctttcaatctacaccgttccaagacttcaacggacaatcaccattaataggcaggggataaaacagttgaagctcataattaccctacagaaaaccagaatgatactgaatgacggagtatagagtattgtgtaaaacctctttactcaatgcagcattatcgataagataaaattccacgtgacgcgcgtaggagcgcggttggacttttgtggatgacttccgttagcatcactgctggagcacagcgctgtgtcgcttttctttacagagtatttcgttcagaacaactttcacaaactacatagtatgggatctttttagttcctggactcatcattccgttcacacgagcttgcaaccatggcttctgaattcataggctacaatgtcctggtaactctccgagcaccaccagacgctaccgtccaaggtgtggttgcggatgtcatcggccagcgcctgatgcttcgagatggtatgttgcaccgaccactactcggaaacaaatgagtcctgcgctggatattgcatagctctaacaacatttttacacttagttactttgtcgtggattggctaccgactaccaacatactccattgaagctccagacatcgccgatctttccttgggaccgtcagatagaccaagcgcgcaagcctcgcacgttttgcaagaaaagcagagccttggaactccatacgcagttcagcaaccttttgtggaccccgcaattttgagcttctcgaaaccatcgagtgaggcccacgcgagcgtacaaccccaagccggctttacagaaagttcaggcgctcggcagcttcccacgtcacaggatacgtcccaagttacgtctcaggcaacgccagccactttggccgagccattcagtaacctagagttgaacgtgggcaacaggtccacaccgcaagcagaggagctacaaggtcctctttcgcgtgtggtcgaagagtctcctgtttccgccagtcgctttggaacgacccgtggtcgccgtggggggaagcagaaagatccgagtgtctacaatgagcatgacggcgcactcaacacaaaccccaagagcaaagggtggcgccagactgcgttcgtagaaccatctaatccaagtttgttggactccccacagtcgtacaaggagacgggcacactcaatggcaaacggcggaagaagaagagcagaggctaccctgcacaagtcagtggctgggccaccgaagaagcaacagatatcagaaaatgggcgacttgattttgcaaagtaacctctccaaattcgataaaagacgtgtttttaagagatcagaaatgacgacacaaccgccgatgaagaacgattggtcagcttcaacaggagagtaccaaagcctgggaccaatggaggccggaacttacactggtccgagaacgtcctcgatgacagcctcgaagagagtgataatgaagctacgaaccatgaaccaagtgatgccaagcttagtagtggaacaatttccggacgtgacgcatcgaagctgtcaacccgcggccgagggtctcggaaagggagtgctatatttggacaaccacttattccaacacagctgaataccattgggcgcagtcaattgagcaactcccgtacgaaatcaagcagcccgcttcctacgaaaacgcacgtttcggcatcaccagttaccggtattagtgcatctagcgccacgttacggcttgctactacaaacagaagctgtccagctgtcagccctctgcagattctcgaagttgagcagctagcaatcggcgaagttggtctgactgaggatatgattacggagaatgcgggacggagtattgccgaagcggccgttggcgttctctcgagcgatgccgctgcacctactatcttggcactagttggaaaccatcggactggagcgagagtcatttcttctgctcgccatctgcggaaccgtggccatcgtgttaccgtatgcatgctgggggtggaacaagaggttgagctgcttgagagctgccgtaagcaggttgacatcttcaagaagattgggggccgcttcctcaagtgggaagagctttcttcgagactctcaacttctgaatttgcacctgatttagttctggacgctctgctcggaatacatcttcctttcaacgacctgcgaactgatgatcaagccacagcctttgagatgatatcctggattaatcgaagcggacttgacacgctatctgtggat

SEQ ID NO: 2588 - DNA, 2212 bp, Emericella nidulans
tgaacttggtcatggcctgtcagtatgttctaaagatcagctcccgctcctggttttcttctcctctcccgtctccttcaactcttgcttatttgttcacctagctgcttgctgtgcttctatacttgctttacattttgcgattttagcctctgattctcgttctgctggtcgcttgtgttgacccgatgcgatgtgaccgcaatctgtctcttgtcgcataacgatccctccacactgacagaccatctcccttggacctctatctagttaatctgtatcgtgaaacgcactggaccctgaaggacaatggactcgaagctttgagctccttcttgcccttagcccactctcacagctcgactaccttgcggactctcgtcctcctttaccccacatctcgctgacttccccgactccctgatattcccgcgctgcctccctccttccatcttcacggcatcatcaaatttccagacactatatactgtttaacaacacggcatggttacggaggagctcctggaggattgtctccagatcctccaggataaatccctggatgaagaagaccaggtcgagaaaatcgaggagttcctccgcgaaaagacctcgttatcagggacatcactcgaaaatgccgtcctcgatatcctttggcgacagcgaaaccgcacattaccggactcttctccaccaccgccccgtcacacggtcattcgtcgctcctctcctgctccttggcagatggcccgatcttccacacctttatcacctcattcgaacctagggaccagtcccgggagtagctcttggctgcaaagctccaaaggtggtatttcgcggcctcctctatcctccacagtatcgccattcacctctcctcgtccgtccccgaggctcgctctcgctcaacctataccgcattccccgaatctgaacgcatacgaattttcggaccaacaaagtcatgtgtcggacttttacggtgaccttggcagtgacagtaatgtggattggctggtggcggacgatgcgatgagtacaacttcgtctgtaggcggtttgagcatgcatggcggtctcagtgcaacagctccggaattcgttcctgatatgagtcctcacgatatattgcgcaccgtactcggagacaagcgatccaatgaggaaatagaatccgctttagaagcaaacgggtatgacttaggtgccaccattgctgctctcactcaaggagccgatgcaggtgccgctccaagcttaccagacgatagtcgcgttgtcgtgggaaagtccatgacaatggaacctcccaaaagcacgtctaccccaggtcacaaccgaagccccgttgtgtgcaagtactggctgtcaactggtcaatgtctacgcgcagattgtcgtttcagccatgacctgactagtcatctttgcaagtaagttttggagaaccaaacgctgcctttatatacggagctaacaaagtaacacagggtatagggtgatgggcaactgcctagctggcgatgggtgtccattttctcatgatccctctgcactgattgcgaatctcagtgttgacggcaattcttcggccacgtctgctggcatcgctttccaagtggataatgcgccggatgccttccctcctttgcaatctacgcccggatcttctgagcagtgggctggtcaactcggtagtaaatatccaggatatctctatggtgggcctggaggcaaaaatgcaccacatctgggaggtaaaagaagtggaagtatgacaaacctgtcgcgtcctcattcacggccaggaagccgtcaccaacaccgagaacttaatccaacagctctgtctgtcgacgacccagatgcgtttcctacgcttgctgcagtcaatgcgaagaattcaggaaagaagaatcacggaaggaagaaccgtgacaataatacaaccagagataatatgcctacgtctctggcagatgtagtacgcatgtctccagctccagcttcaggagggaagggaaaaccctcctctaagaacaaccagacaaagggtcgcgaaaacagcgccgccgcgcagtcaataccggcgccacagcatatcccttggcttgagaccggttctcgaacaaaccagcaatatatcaaatacagaacggaggcgatccgccacggcacggtgagaaacaagtttctaagaggatga

SEQ ID NO: 2589 - DNA, 1822 bp, Emericella nidulans
ggtcccgcccgatactgaagtgggtctcctgaggtgttctggatcaggctctttgcgcgaatagccgtattgtgagactcgctcaaagatgtgattagatccaatacagctaagacatgctcgaaccgttcacgcggtcgagatctacactcaacctgccgatgcatgcaaacattcgacatctcttgaagatccgcatggatagtatggaatgccagctttaacggattaacaaaccgagcgtttcgcgccaagtcttggtgtttcttagcgcctcgatgaatggaaatattcaaactatcagctcacctgcggatatttgggcctcagaggtggaggggagcgccttcaagtcattgagggactcctcggcggcctacagtttggttagctgtgagctgacacctattctatctcaggggggagagcagacgtttcgcaggtcggcattctttctttttgattcttggatgagattcagcagttctgactgcaatagttgagaggacatttccagctagatgttgcgagttacgcatggccaaggccagtccaacaacaaggtgacaatcaagacaaaagcacgagcttcatgagttgcttgttgcccacaggcgagacacgagttaaactaggtattgaaaatgcagcttcagctccattcagatgcaatatgcatgaccagcactctccagacctctcaacaggtcaaaagatggccaggtgtataaacaaaggcgagtcggccgtggcatcactgacgccaagataattatctccacgtgataggcttttatcagcacgtgtctgttcaccagctgctcacctgtagaattaggcggtgaaattgaattacacaagtatcttatcggcggataagggccgtgacgacagcccctctttttactttgtgacggaattatccaagtttcttccgcccagcgccactcacctattatttaggcttctcgtttgttgatattctacttagttaactccccccctagagcaccacttcacaatggctgcaaacgcaaaggttcccaggaacttcaggcttctagaggagcttgaaaagggcgagaagggcttgggagcaggtaagcaagaggcacaggatcatctgatgtaagagccaagctgatgtagtactgcgtttctaaacagaggcgtgctcttatggtctcgcggatggcgaggacatgatgatgagcaactggaacggaaccgtccttggcccccctcacgtatgccgcataccaatttatgtcccatgcttggaggtctagtgtactaaactggcaccacacgactatagagcgtccacgaaaacaggatatacagtcttaacattcattgcggtcccgagtatcccgatcaacctccgactctacaattcatctcgcgcgtcaacctcccttgtgtcgatgcacactctggcaaggtccgaaatccccaaagccgaagcaatagcactcgacgaagctaacggctcctaggttgacccctccaagctgccctgtcttgcccagtggaagcgcgattatactatggagacagttttgattgaacttcgaaggtaagctcccggtagtcctagaccttggcggcggtatcttaaacatccaggtacatggctttaccgcaacataaaaagcttcctcagcctcctgagggttcgactttttaagtttctgcatctgaatacatcacgagtcgaaaacggagtactctgtcggtttatgctgggtttttagcatctgctccttgacttattagagcgtgttgtagtccatgcgtgacggtaaacatcggcaaatca

SEQ ID NO: 2590 - DNA, 1279 bp, Emericella nidulans
  unsure (1)..(1279): unsure at all n locations
gtggctcgggcaggattctcatgcaccaggctgacaaaccaccctcatactcaaaacttttagtctcccacttctctgcaaggctgtccttccactcttctacccagataacttatctgtttccctccgccgagacaagcagcaccatcccattatccaccagttctgaccagcaaagaagaccccctgtataaataaatttgtgttctggactacatgtactgaacagcccggatggatgaggccctccttccagctcgtgatagcacctgcgacacagcgccttatacaggcacaagtaacaaaagtacaagaagtagacattctcaagctccctccgacagttcacacattcatccaaatagttggctaaagcctgcatattcagaccatcagcatcatcattgtcaacaccctgactttctgccttccgtcggtcaaacaagtgccttctagcaactgagggagttccagtgtcccgcccttatttgcttcctagggttgtcctactgcatcatacctgcccactacatgctcctcagcatccttaagaagatgcagggctatgtggtggtcttagcggctatctagatcagccataaatgtcttgaacagtgtcataaacacctgttgattatttaaaatattgttgttagatagtaaggcaatgtaatatttcacgcgcccctggagaacttctctagcatttgtaacatctctgtatttttggagccacattaatatgaccaaagaggccttgtttaccttattaactgtatccaatactaaagggtactgcttgcttggtagagtatctggcagctctaggtacacagatactagatatcttattaactaatctgctggtgctctaacatctgaataacttctattactactatcaaggttatctattaaacaaaacagcctggcaccacccgtcgacgccaagactaacttaacctttagagaataatactgttgtgagtagatacttcttatacagaacaaaatcctgcctctacttgtaatccctgccgagcctcttcatgactgctatagtatgttcaatattctcattatcatctaaagtaagcacttattgtaagacatgatagatactatgagaaaatcagggaaatatttgcaaaagggaaactctcaaaatcatcagtctgaagttgtcctctnctgtgttcttgtagtaatccacagcatatttaaataccaggcatagctgctggggcttgtgaggttaaggaaaaatattaaagattag

SEQ ID NO: 2591 - DNA, 1029 bp, Emericella nidulans
ctgggcgaaagggtggccccctacagaggaggcgatgcaggggttgtttgctcgggtggcttcgctccgggctaggggttttgatgtagtttgagtcgacccccgaactttggccgcctgggggggctgcttgctccggggctgcctaagttcgtggaggctctagggccgccgcttccgctgctgaatagtggcggtttctgagaggaggatttagcgtctggagaggtttgcatcgagtcaccaccaaatgccgtattttgcgcaaagggatttggcttgtccgcctccgatggcgcgaagatgttcgatgaagaagcaccagtggactggccgaagatgcttccgtttgatggagtagcaatgccagattgagccgagggtccattattagcactgctaccaaacagtccccctgcagagctgctctgctgagacccagctccaaatagccctccagacggcaaaggctgttgggcgggagactgactcccagtcgaaggcacattaaacaggttgcctttgaagccggaaaaactgctcgcgggcgcttgctgactagcaccgccagtattcatagatgcaaaaggattactgacaggtgttgatgctgttccaccgaaagaggcagagaaattgaaggccgatgaaccaccaccagagccaaaagagaattgtgatcctccgttctgagcaggcggtttaggagttgggctagccggaggaaaactttgtgattgcccaaaactgaaaccgtttgtcatcggttgttgagcaagagatggggaagagactgtgttcggatcgatcgaattgaatggcgaaccaaacgagccaccagccgaaccggacggtgtgccagcacgcggccgccttcgaacatccttgattctaaatacgtcgttagtcaatgcataagatgtgatatgtctagaagaagcatatgcaaccacggcgaacgcaagggtaaaggtactgggctacagtggaaacaaaaaacaggaaaggtaacaagacccaagaaaagag

SEQ ID NO: 2592 - DNA, 1680 bp, Emericella nidulans
  unsure (1)..(1680): unsure at all n locations
ccaagtctccaggtatctgctgacggacattccacaggccatgacttttggcatacagctcccctaccgcgcttcaacgttccctcggtcagagtgagcgatggtcccaacggcgttcgaggcaccaagttcttcgacggcgtccgcgccgcctgtcttccttgtggcaccggcctggccgccacatgggaccagtctttgcttttcgatgccggtgttctcatcggccaagagtgcctagccaaaggtgctcactgctggctaggacccacggtgtgtatccaacggtcgccccttgggggcagaggtttcgagtctttcgcggaggacccatatgccaccggcaaacttgccgccgcctacatccgaggtgcccagtccaccggcgtgatatccactatcaagcatttcgcagcaaacgaccaggagcatgagagaattagcgtcaatgccgtcatgagcgagcgagcgttgcgcgaggttcatttgttgccctttcagatcgctatcgccgatgcagctccgggcgcagtcatgacatgctacaacaagatcaacgggcaacatgtttcggagagcaaggagatgttggatggtctcttgcgcaaggaatggggctggaagggcctcatcatgagtgactggtgcgtctgcattaccacgtccgattcgggcagatcatttgcttacttggccttgacaggtttggaacgtactcgaccgccgaggctctgaatgccggccttgacctggagatgcctggccccacaaggcttcgaggaccgttactggagcttgcgatttcgagtcgcaaagtctcccgctcaacgcttgacgagcgcgccaggaccgtgctcgaattcgtgaagcgagccaacaaggccgaggtttcgacagtcgagagcacacgagactttcccgaggatcgtaggttgaaccgcaaacttgctgccgatagcattgtcctgcttaagaacgagtcggggcttttgccactaaacctgaaggcgttgaagagtgccgccttgatcgggccaaacatgaagaccgcggcgttctgcgggggaggttctgcgtccctccagccatactacagcatctcgccgtaccagggaatcatgaaccagctccctccgggcgtcgagattatctacgagacaggcgctagttcgtatgtttttatcccggagctggaggcgtcagaagtgcgcacgccggaaggcagcctgggcttcgaatgcgcttctaccgagaaccaccctccgtcaaagaacggcgcgtggttgaggaaaccatcctacaggagtcttcgtggcagctgatgggcttctccaacccacaattggaccggctcttctacgcagacattgaagccgagttgattgctcctgccactggtcctttcgaattcggccttgctgtctatggttctggcagcctctttatcgacgaccagcttataatcgataacactactgtgcaacgagggggcaatttcttcttcggcaaaggcacccgggaggaaaaggccaccgtggatcttgttaagggtcagttgtacaagattagggtggaattcgctagtggcccatcgtccaagctcatgaaaccgggggttgtgaatttcggtggcggcgctggtcgctngggaatggttcaggccatcgatccggagctggc

SEQ ID NO: 2593 - DNA, 1980 bp, Emericella nidulans
agcacaaaagtgataggctgtcaggggaaagtgtgggtcagaattacatactatggatccgttggaggatctgttatacagtgacgatgtatgggtgtgacaggaggtgttgtttgggttcttgtctgactcgtaacggcaatactgaagcttttattgtcctgaagactggtagcatacgtagactaactacgagaatctgccggtctgatgctggattctgaagccggcaacgaggatacgaattttttttccacgggttttctggccaaaggagggttactatgctgaggtgcgtgatgctgatgtacctgcgtcgtcagtggttggccaaggtggtattcgttcgttccttgaaaccttctggaatcctgcccgacgcgctacttctatagagttgcctactttagtctcgtacaacagatacttagcgtatattagttgtttcatgactgacgggatcgtgactcgatcgttctcggcaagccgaaaactttgagcttgctcttcgccttcgccttcagcttttcctattcaggctcgattcatccaccgtggcgagcattttattttcctctctacgaaagctgagcgtcaccaggttccattgtcgtttcagccccagcgtatcgacttccaaccgcccccggtcgcaattcttggccactcgagactcgaattgtccgaagtctctccggaatgaagccgcgttgtttcccctgcaccgccgcaccaaccaattgattctgatagtgtctgagcgagaataaccgggtatggccgagccgactcacagacttcaaaagtggggtatacgtacacataaaaaccagatcacgaagtcgttcagtcttgacccgctaactcatccgagaaactggtagtctaagactagtactagtagaaagacggtgtggttgaaaatcttcacgatctgccgccgttgatgcccaattgatccacagataatcataatagattttttttttcttgattctgcctggcctgtcgagactcaagttctacagagtactcagagttacgggggtctgagtcttttcgtatgtatgacccagaacggttgtcagactggcggtttggttgcaggtatttcgcgcataagcccactgtagattcgtgatactgcatgcagttgggacgggacctgtttctaccgtcaacatccactacagtacatgcagagacaaacctgcgaggtctagcagcctcacaccatcgtcctattcgggactaaccaagcagagaatgaggactctgagactgaggaacgaccgacaactcgatgaactccggggaaacgatgatccccccgctttgtgcatcacctctaaaatatggctgaaagcttgaaatgtaacggggcggatagacggagtgctctcgtccggcagttgtgctagggcgctgctagttgatgtatgtggttccgagaagggaatgattgcacgattaagtgtgagaccgctataccgctttactgaaatcgcacattgcactctccataacaggcaaccacagaaggtatccttctggtaagaggtcgaagctgaagcggggttgagcgggatttgagactagtcatggtccaaaatcgtgtgagattcttgttgtagtcacttaaaccacacctttctgcattcgaacagaggttgcgcaatttaaggttaaatatgcttggtgctgttactcctcgagtgcataaaaagcagatgaagacgtcgatatcgtaaactctgtcctaagggtacttggtgatggtcttggtggtggtcttggtgatggtgactgatagtgatgccgtcagcggtcatatgactgcctggccagttccccacatctgaggatcttggatgcggagtcccacaactgacactcattctgtcggttcctcaagcggccactgccacgcctagatgaccatgggactggtgccacagcgagtgtcgctggttctgcgaa

SEQ ID NO: 2594 - DNA, 1648 bp, Emericella nidulans
  unsure (1)..(1648): unsure at all n locations
ttaaatacagagtaatagactggtcctggtgaaaccattcacgtgctcaatgcacgggaaattgttgctgctgataaagacctggcgcttcaaaggttagatattgtgctgctctgaattcatgatcaagtgctaaactgtaaaaggatatttacaacatatttcttatttgtcaacgtgggttcatctgctgctttagcttccacaatgatcggacagaagtatgggctcttgacaatatgaccagttgcacatagggatgataacatgacagatataataatttcaactcttaccgaacaacgaagctgttggactgaaaaaatagagtgacgtgattatgttagtctatcatttagcgaaaccttacagtttcctttgcttaaagaattgattagagaggggatgtatgtacagtgagattaaaagacggtctcaataagccaataaatgtttgccggtgcccttttcaaccgtaaataaaatacaggtttcccactttaactgtgttctcttggtatttacattatcaagggctctctaacgacataggccagcttcgttacacgccatcgacgtcctacactgacagcatcaggtaaaaagaggacgtaactcttgctcccagttgaggtcttcaaacaacgtcataaaatccatctctgtatctccaagtaagccaccttcaccttctctagtttcatcggttacttgttcagacgtgtcgcctgggcgaggtgaaaggacaaaatcgaggacctgtcgaatatatgagagtcctttcatgcaagtatcgtaatcactttctctggaggaaaagaaggtttcgatatgagctgcaaacacactgagacgttgaataatctcggattgaggaaagggcttttcgcttgtcgattggtctgctgagaactgtgagcgacgcagcaatgatttcgacagcacggcagcagcgggaagaccgatgtaagaaaactaagtatcagacgagaggttataagcaccagaagagcagttacagtcttcatgtgagtacgtacgtcgaatatggttagatgattgacacgccctgtccggatctgtttggagaccagatccagaagaagtgagagaatctgctgtgacgtctctatcaaggagtcgggagtctctcctgtcctttttgcaaccgtctgatagaggagaaaatcttgataaaggaattcaagatgaagcgaagctgctagtggatgtgggttatagngcgnnnnncnaccnannnnnccaccannacncncacnctcatgcanaacatnannncccacnannnatcccctataaagcatggagacatacctttcaatttggaaatcttgtttcctttaactacttcctggatagaaggccgtatttcccattctgtcttagattaattccaaacattaaattctaacagtatttaccattagcacacgctttgttttactaatgtggacaacatacccgcaccctcgtgtattccgtccaatgcctttctctaccactaaagatagtcccattaagccatgtaccgagctcttttggtttggccgctccaaatccttttctaacaaaagctctttattgcaagggatttctagagttttttttaccccggtttttcctaaag

SEQ ID NO: 2595 - DNA, 1856 bp, Emericella nidulans
agggagagaatagagtgaaattaatatatattttctcccctaaatcaaaaaaaaataaaaacttttttattttccaacccaaaactttaaaattaaaaattatacttccccccatacttaatagagacaaaaaaaatatgtatgccagaggccggattcccttcttctttcggtggaataaaaaccaaggctcagtgttaccgggataaaaaattctttttcaactaaagccaagctagaacccacccatttccagcaacccggaccctatgttgggggacgcactttaagaccggacgaaaggctggcttgactttttgcaactttaccgtattcggctggctttaaacgcttgcatcttcgcaatggtatacttgggtcaacaaaattttaccggacagagtaagggtaagattttaaagacgggacggtcaaagggacctggacagcaagacaggccgacgggaaaggcgagatggatgtgggtaaggctgtgatacggacgaagctaactagctagatagaacctaacatatggtatggctcaatcgtgacagactactctggcgagacaacgtccggcctcaccatgaccacatgaaggagaactttctccgcttctgcccagtctctttctaaaacggacattccctttagcctgagatatctaaaaggtacaccggtagggattgctgcatggccactgcagctataaagaagttgggcatagagccgcagccggaaaggatcctttgagatcgctctttatcgcgactctcgcaagtagacacatttcgccagagggcttctcagaagaaggcgagggtcttactagcttaggataggttgagatctggttgcctgacaagacttttagaagcagagaaaacaagtggaaagagaaaagcacatttaatagcaaataaagtggcaggggtgagataccctaaatggtattgttatgattctacccaatatagagagagacatagaatagggcacgagctccacttgctatgacctcatcgatcaataaccaccatgatgacattcaacacctacgcccaaaccctttacatcctgtagtacgatgtctcgatagccctctgacaatgccatatctacaatgcaaagcactaccctcgacatttggctggtacgcatcgcccctcccttcaccaatatctaattcacttctcaacatccaaacattgacttcacttccagtctggcgcagtcgcagttgtaacagttgatttcctcgtctaccccttcgacacgctcaagactcgcgtccagtcgccacactacgcagaaatctacaaagatgcagccacgaacacgatcaagaagggtgtgctcttccgcgggctataccagggtgttgtcagcgttgtgctgagtacaattccagcttgtactgggcccccatccccaagattcaaacgagtagggatattaacagttggtgacacctcgcagcaggagcattctttacaacttacgaaaccgtaaggtctaccctcaaccgaactaagcaagcttctgccataccatttcttcaatcagtccccgcacccgcgataaacgccatctcctcatccactggtgaaatggtctcctgtctcctccttacacctgccgaagtcatcaagcaaaatgcgcaggttatcaacaactcaccaagcgccaacatctctgaaaagctaaaacaaggtggaaccagcgtaaccctccaagttctcagacgcttcaagcagcaaccttggaaattgtggagtgggtactcggcgcttgtaggacggaatttaccgttcacagggatcaatttccgatctttgaggcgatcaaggggt

SEQ ID NO: 2596 - DNA, 1991 bp, Emericella nidulans
ctaaacactaggtggacccttgagtgttaggtcgcattacatgccccaccgttagtttgtagtgaatgcaggagacgggtctgtgcatgagataagagtcaaggggtcaaatgataaatgaatttggctgtttatgtgtgtttcggggcaccccttcgttacgccggatcatagcattccaagctgcctgtgataggtacgtgcccttaaagtgataatacctttctctgtctagttaacattcaaaatcttggatcaatcagcaatgttgcagcctggaaacgtaagcctatatttaaatccatcagctcactcaatgatccatcgaagatagttgctgcaaggtatacaggcagtttgtctccagcaccatgctacatccaattctcgaaactagtgccctgaatgttatcctggtagttacatgtaagtacacgctcgttacagtctttgatcacttttatatccttttttgctgactatgcctttgatataggtctctacgtcctgataatcggtttcatttcattgaaagtcaagcaaagatggtaccttggtgaagcttgtacgtatctaacgtatctaattatcaattgcttccacctcggtgctgatatcttgtcttctagtgcctgcttttgccgttggtgctgcttttgggccatctgctgcgaatcttctgagagtgccccattatcgaagcaatgaaagcgagacacgacaagcgaagtgacatatgtatgtggtgcgaacacattagcaaggtgtgactgacaaacctaggcattggctcgacttgtgatcgggattcagttggttaaagccggctatgagctgccaaagagatatctgaagcgccgccttaaggaaatgacgttatgcctgcttcctttgatggctataggatgggtcgcatcatcagcttgcatcaagttgatggttccgcatatctcttttgtgagtccctctgcttctggtatacgctttaactaacccatgacgggatgatagcttgcactctcattatcgggtcctgcgtaacttgcacagaccccattttatcttaagctattgccaagggcccttggactgacagtgatgtccgccgacatctccgagagttcatttcctccgaggcaggcggcaatgacggctttggtttctcattcctgctgctaggcttagcactactccgatacgccgacacgcctgcaaatgccgctgtattagaggaatttgatctcaccagaggaggtgcagatcttcttggggcgactgacgtcggacgctttgggggtggggcgggcgaagctctgaagcattggtttgtcgaggggcttctgtacatgattatcctaggtggcgcttatgggactactgttggcttcatgtgccgaaaggtccttactttttcatccaagagggtattgcgcttgcccttgtgttaatgttcatggttcagtgttgatccttgagtatgatatgtcttacattccatgcttaacactgttttctgtttatttggtatctcctattcgcacttttctctgtcttgcttctacatatacttgccctgctctatacatttacattttaattctatgcttttttctttgtctttttcaatttcttttttgtcttctccctattctcttctccattttaatttttctccttatcctattttactctattcttttatcttatctttttcttttcactacatctttattattatacctttttcttcttttcttattcttcttaatcaaatcctttttactttttacatcttatttattctattttcttcttctacttttttacctttttttatattatctcattcttctatattctccttctcttcctcttaatttcatttctatccactttctttcattacatactctcttacatttttctttctacctttaccctcttctttactctcttatacctcttcctcatcaattatttatttaacttta

SEQ ID NO: 2597 - DNA, 2557 bp, Emericella nidulans
tcgtgcggcagtacgactcgtttaaaagttagcattccccgtggacttacctcagtatgtttataatcataaactgtcctcaaatttagagtgcatcgattcttctggtgaatacctctggaacgacatcgctgtattgaacaatccctgcgccgccacacccaaggcatgctgcatttctgccaaggatacgtactggtgggacatggccttcaggaacccatcttgggtgttttttagagcaaccagagccggctcatggggatcgaacttcaggcgacaaacaagcatgttgatgaatggacccacggagtcctcgatcccatcaagaggagcatcacggcccgaggtcagatacccgtagcagacagagtctgttccaataaaagcgcgcagaaccagggcccacgcggtttgaacgacgttagcaacggtgaatccccagcgttcggaaaaggcgctcagtgtctcctttgtcaagccgggaagctcaacattgatcgattccagagcctgagattggtctcggccgtcattaagaatgggaaactggcagggctgagcgtcttggaggtaatcgttccagaaattgaccgattcggccctctttgcttcttggaggaagctcacgtagtcgacgtatgcaagagggggcacgctgctgagtttcttgctgtaggcgcgcttcaagtcccgctcaatgatagccatagatgtcccatcgatcaaggcatggttgatctccaacttgcaaaacattcgaccgttctcacagtgacagattgctaattgatggagctttgctgtctgaggtaatgtgcgtaaagcatggacagggtcgtcgctacgcagctccaccacttgcgccctcaactctttcagcaccagctggtcgtaaggtcggtctgggacagcacttttaatgaaaacggtccgtagcatcgggtgccggtcaataacctgttgccaggctgcaaccaactgtgcactatcgactccctcgcgggcagtggcctccatgatggtgaagaactcgtaggcaccctcggatttcaactgactcatcaacaaacccagttgcataggcgagcaaggagaaaggctctcgatctcgtcgatcgacttgactccagcttcaggtaggatggaggtagccaggttatccaagtctttataggacaagttcaggagcgggaaatcgctaagtgtgggaattaattcggactgcctcatgagttcatcgataccagtctcgaggacttgacgataatgattgatccaagaacttattgtatcgcgatggctcattttcttgttatactcgaaagtgaactccatccgcccgttggagaccccggcggcgatctcaaacaaagagtaacgctgcatctgagggctgatctcaacacaatcagttccggtgatagaagactcttgaaacaaggcgtcgactctctgcagttgctggtaaagaccgaggtaattgaaaacaacctccatatcctgcatcccgccggccagaagagatcgcgcagtaaagtaccgccacccattgtgggcaatctttcgtcggctgtccttcaatcttttgacagcatcaagccagttgtcttcgggagtctcgtagctgacgggatacatggtcgtgaaccaacccactgtgcgtgagacatcaatggccgatgtccagggttcacggccatgtccttctaggtagacggcagggacatttcggtcagagaacgcgtgacggaaagaatgaagcagtgcagctaccatgatatcagtcggctctgtgcgcaacggaatattacagtctccgagtagcagcgcggtcctctgagaatcgatggtgaaggattcagtgacaatatctccccagttattggcttctccctgcatgttccagtaggccagatcacctgtgggtgcctcaaggtcccaggtgtctggttttgacaagtgctgggagacatattcgcgttgcaacttcgcccaattctggaaggaaatagtgggagttgagttgatacggccagtcctaagcacatcctccaaatcctgcaggataattcgccacgataccagatcaataaccagatgatgagccgccaagaacagatactggctctcgggagcaacccagatttgggctgtcaacattgggcccctttttatatcgaagagagtctcagcctcgcggaaccgggccatcattctctcccgactaccctcttctctagggaacatgaaaaaggatccagaaacatcgttggtgattttgtgactccaggatccgtcaacctgttcgaaccgggctcgaagctagagtggtgttgtacaactatttcaagcgctctttgaagctccgtctgtagaacatcttgggctagcttcaaaacaaagctttggttaaaatgattctgccctttcgctgcttcctgaagaacagctgtgaatgggagcgagctcaaaccattcgtcgatgacttcggcttctggcgcccggctttttgttgagactgctaatgtatgagctcgcccgcaagagcagccc

SEQ ID NO: 2598 - DNA, 1475 bp, Emericella nidulans
ttcccagattctcagtatgcaaatgttgttgtgagagttgtgtattgaatgcgaaagtgttcacgatgcaatccaaaacttaaccaactgttgtctcttagtataaaatgacccttatcaaccgaaagtgagaagtctcagctgtatgcaggtaaacaaacgcaacgcggcgtccaagctgggcgggagggtccacggcagcttcttaaggaaggggcgtctcagccttatgaccttacactcgcgtcaattttcattctgccgacgataatacctgaagaccttgcataaccatgacaatatgggtccactcggcatagcgtgatcgctcatcggcccgatcgacgagcgtgctgttcaatttgcacatgaaagccgagaccgccgagggggaatcccgtactcactcgaaaaccgcttcagattgcggtttgttctgcagactgttcataataatcccagttaaggatgcaagcatactttttttcagccgcatagctgtcgtggacaaccaccactatctgtgctgacgctcttacgtggccgtggcggctaacgccagacagtatggtactcgtacatacaatacagcaatttctggacatcggtttctatatgataatgagcttacatgtgggctctctatttacggatcgataaccagaaggctctatcggcaagctcgatgtcagcagaccgcgtgctatagtactcataccggtctatacactaccacgccaaccaagccctaaccgaggcacagcggaagcggtcaagctgtcaggctgttaggctgtcagcccattacccacacgtcataactgcaccctgaaccatttcgcagacggcatctattcctccgatccccgaatggtcccgacaagtcatcccgatcagccagatttctattcttggcgagacagatacaggtctaacctcttgatccctcccgacatgcccaatctcgcctatcacggccttcttcaacgaacatatccataacaacactgatcatctgaaagcctctctccgcatacgccttcccgtatgctccagtatcacaatacaccccaacggttttcctattctttttttcagcgggaacagctggatcgaattccgcagctaagaacctaatttcctaatcagcccctgaaacggccatccaatttacattggaacaagggcccaagaagagcacatggagccatcgacggccgatgggatgatacttttgggcgccctcggctcatttgatggtataaccggcctattaacactgcataccttagccggagttttattttcctcgtgcgggaacaaaattccccaggcatcttacccttttccgggaagactttttctcattccttttcactattttatcacacatctcccgcccgcttataccttcatcattcactcttacttcctccatcattccgtttacctctacctttaactacctacatccc

SEQ ID NO: 2599 - DNA, 2719 bp, Emericella nidulans
gtggcttgcagattaacccagatagggcatagcgcatttctcgttcacgggtattgacgcgcgcgggttcttacctcacgcgcacggccaacctcaaattcctcccgccaaccttttaccaagagctattcatatttcctagcaaagccgccaatcctgctcaaaaactagcttgtcaatttctttttatttccctcaattatctacccgtcggcaccaaattcgctcgtccgcgttcaacttcgctcagcatgtccctcaagcgcaaggcttcgtttccaagcatcgcatctccacaatcacctcagaccgcaattgaccgacgcttcatggacgacagcccgaaacaccttcattgccggacaagaaagcggttgagaaacgaccgccctgacgaccaagaagtatatggtgggccgccccatctgccgcccaatgctctcccaaaagcatgctgacgctagaaacagacaaaacccttcgatggctctttactgctcagcagcgcgtgcagcaagtacctaccccgcctactgaaccggaacaagacgaggacatggagcaggaagcgctgcctgcattcgaccctcgccaacaaacactgctacagttctttcgtcgcacccaaccacagccttatcgtcagccctctcaacaaccttgcccttcgattcctatagaccagttatcaggcgagccagggccctcgcgaagcggaaatgggttcttgcatggtcgcgacgtcgggagtgtctcaccgtcctctgcaagtgatagcgaaacattgacaccagcctcccagctcgctgatcgtgacatggacatggatatcaatatgaattggcacacctagtcggaaccacggatggatgggaagataattttttgctctaaatcgggcaaggcttctatttgacgatatacctgcgttttataccctggtcctatgatcgtggaccctgcgttactctgctttctgattgtgtctcttgttgcttgctcaagcgttgcatttgattctaaagggccagtgatcgctggcgatcatagtgtcccagcgaaccctgtttcacggccttgccttcattttgaagtgtttttttcgcacgttattacctctgatgccaccatatcatcggtaccggatatccgaaaaagcccacagtgtctgtataaatgataattctacatttctgaaggaatatactctatatgaacagtatatggccaagttgcatgagctaatttatttgacctctaacacagtcatcaacggcgtattctctagcgacaggtctggttcctgtatcaggggcgccgacttgagtagtctggttgtcattcgtagaactcaagcgcgaacagcaagacagacatgatacaacttgggcagagaagccagtcagataggttagacaatttcagtatagaagcctgagcagcgaaaaacgttggcctagaagatagccaaccactcaggctcattgctgtcccctactgtactccgtaccccgtgacctcccatttgtggtaaagcaatagacagaggtctagagctgacactgacagaatacagacacaattgtaatgtcgatgtctacccctgagccaaactccaaccagaaccataaactgagaaacaagaaatacgcgtctgtactccgtactacgtacgcattcgcaacttgtaggcactcgccctgtcgatcgcgggactcggctttgcgaaactaagatccgtgcacgaaggctggcccggatccgatagagccggaagcgctggcagctgacaggctggcgaagtttatttatagtatgccgggcctgtggccaatcaaactctgccactgaacgcggggaaaccccttgtcgtgtagctcaatccagctattgattgtagggcaatgccaccatgtaacagttatttcgacgatggtgttgggatgaagtcaggttaggagctggggagccgagactcaaccaggtataatggtacgtgacgctagtgcccgatcctgattcgaagccacggtaacgcagtgagacagttatgcgagtgatcgcccatcgcaatttaacctgattcagggccagggctggaattcagggtccgggtcgctccagcaccccactctcttgtcaacatttttgagctggtaatttcgcttgctgcacgtagaaaagaaagtgtcgaatgataatatatgtatttccacattaaatatggacattcacgctaagaggaaaaggtataaagcggtacaagagaaaaccaagccatcattagcggattaaaagtaaaagaaaggtatcgcaaaccgccccattccatgtaaacccccaaccataagatgaccgattagatgcatgtcgtatgccatggaaacataagttagaagtggagatccataaaagaagggaaaaaatataagaataaaaggaaagtttaataatgaggtatcatgacagaaaagaaaaaaatatagagaccgtcaagttgtagtatgttgtaaagaggaaggtcttcaaagggaaaccttcattgcgtcctgccagatgtgcggacgtctcggatccctggctgcggactgctgcttcatgtcttccaggtcatcattcccatgatgcaagaacgacatgtgcaaggcggttcctgagatgattcgtagaagtccgataatgagctgaggccagccacaagcgcgacaatcggaggata

SEQ ID NO: 2600 - DNA, 1933 bp, Emericella nidulans
gggggcctccccctggctttggacctttaggggaggctattctactctaaattttgcagggaaaatccattacaagtcctccgggacgcggggccttttatccaagaggatcagccggccgggcaagccaaattttggtcgctttttcaaacggaatgttcggagcgcgcttgtctttcctcctaaagaagccgatatgcaggcttcggctccaataaagaagggagcgggagccggtgtgcctctggggaaagctaaaggtggaactacaggttcctttaagcggtcttaaaaaggctgaagttttcgcgttacatgaagctggtcttcggtgcgagtaatagacggagaaatttgctaagtaaagagatactataattacatcccgtgtttacgttacctttgatggagtgccttctgcttcatctatagccaaccaattgcagctacacggtacaaatacatgttaaatcaccgaaaaacaccacgccattcaacccagccgggacgccgtccggttggtctgaaagtccatgcagaataagatcccagaaaagtatgaggtatgaggtaaagaagagaaaagataacgatcacgaaagcggaaaaataggaggggtatctggcgtcagatagtcacacaatatacccagcctcagagacatgcaagccagtcaaggaagataagcgccgccagcaataatcaaattcatgttggtgaatttcaccttgtagacggggctcttcttagtggggaacgcactaatctggtccggtgtgacaacaacgtccttgcccttcttcttgccgctgcccatccctggcccaacggtgccaggtgtctgcgtagaattcgcggcagcggaggaagccccgtcaatcttcgtgcctgcgccgccttctccggcaacgcggccctgcgacgggtcatgggcaggacccataacatcccatactcgaactgtgccgtctgcgccgccggagacaagcacattagattctacactccaactaagcgaccaaatgcccccctttccgtggccgcgcatacgcttgaggaggcggccgggtcccagatcccagagcaagatagacccgtggtcgtccgcggaggcgagggttttcccgtcgcggctgcacgccagggctgtgatgtttccagtgtgaccggtgaacatgcgcactgcgttgccggtagtaacggcccacatgcggtacagtgcggtctaagcttcccgtgaagacataagcggagttggggtggaagcagacgcagtcgacgtcttgctcgtggccgacaaagatgcgctgttgacggatgtgatcagttacccaaagccgggcagttttgtcatggccgccggagacgaagtagtggccgaaggggccccattgaagatcccagaccggctgatcatggcccttgtagacaaccatgcactgccagagatcaagggaccaaaggcgaatggttcggtcggcggaagatgaaaggagccatcgggcgtttgttggtgccacggcgttctcactgggggtggctgatggggcaaatgccactgcatatacaggccccgaatggccgattaagcggcgcgaattagttgggggttcatctgcactgtcgtctgaagggattttctttccatctaggctccaaacgcggatgtatgactcttgcataccagctgcaacgagcagattatcatccgagaaatcaaggcagttgatcctaacctaattagcgatcgaccctcagagacggatctaaattgactaacccgtcataagtgttgtggaaagtgaacatgcacacactaacggcaggaccaacgcctcctgtcctagattcaatccgaaacctatcacgattctccttgactttttgcacctcaatcgctacatcccgcgcagtcgatggcggatacgggat

SEQ ID NO: 2601 - DNA, 1298 bp, Emericella nidulans
gcttacttgccgcgtagcaccgtatttcgggacgcctggaggagctctgttagtatgtacaggcttttctttgggaccgaaccccactcacctgtagttgagtggatagaggccatattaacaatcgacccgccattagcgatattcttaagctccgcgcgaaggcagtacatcagccccgtgagattaacgccgagtattcgatcccactcgtcatcgtcgagctctgccacgcttttgacgccgtggtccttccccactatgcctgcgatattggcggcgcgtcaagacgctggtatttcgttaggatcgacgcgatccaacaatcgacctgttgtctgttggagacgtctacttgagtgattgtgtattggacgacgggtgtcttggagctgaaataggattctgcttcggcgagagtggtcgggttgacgtcggctatgcaaacggtgcccccgcgcgaggaaaggagcttggcggttgcgagaccgatgccgcttgcaccgccagtgatggcgtagactttgccttggagggacattgtatctaacgctggatatttgttgcttggttggagatagctgtttgaggtggtgcgaagctttgtcgtattagttggcatgcggggaactcccatagtggaggtggttgtactattctccaacttctccgtctttatcccgccaatggctggtcttttcaattagtattatttccttagtcaaaggtgtctgaaaggcttaccaggtgctcctgtgccttatagtttcctgaagccttcgtaatggcactccacaaacttgcggccatatcggccatatcggtcaagagtcatgtttccgtcctcggccgaggccgctacgaccgtactcgctctataaaatggtcattggtaactattgaatgtggcatttgaagctccgaattgttttcctcttctaagtgcaaatagtacaattatctagacatctatgccagcgatgaaaatcctcatcactggcgcggggatcgccggcacagcgctggccttctggctctcgaaactcggccacaacgtcactgtgatcgaacgcgcttcttcactgcgcgcaagcggattgcaagtcgacctccgtggccctggcatccaagtgcttcgccggatgaagctagaagaaacattccgccagcacgctgtcgcggaacaggggcttcaactcgtggatcgaagaggccgaagatgggggtactttggcgcaaataggtcggggaaggggctgcagagcttcacgactgacttcgagatcatgcggggcgat

SEQ ID NO: 2602 - DNA, 1412 bp, Emericella nidulans
gagccacccagccacaaggcaagccggaaactgcggaataatctccgagcggaaccaaatcttccaagaatgtctcacgatattcccattcaggtcctttctaattactgaccgtccccattgttcattttgcctccactcccgcctctgtctattctttcctggccctctcgccgtccagattagatatccgcgagcttcacagcgagtgagctcagctggcggaaacgtgctcctagagccccttagccacaaggggtacgaggagatgcagctctggagccaattccactgcggcaatccctcacagctcagcctcccctcgctctaaggcacattgagcctcagggccatggcccaggatgtgggcgaagttcgagtccagcctcccaacgccagcctacaccctgacgatgccttgacagagaaatcgtcagtcgcagaatggtcttcatcgcctctgaagcattctcccggcggacacattagcgataaccctcccatggaagcctcgcgcgcagagtcgacggaccaaacagcgggattgccgcaaataacgggggacgaggtggcggaaaatgctggacccagtcaagcatggggtcgcaaactgcggacattgccgggtaaacaagtccctctcagagtgcacgagacaggaggaaactgaaatgctgatttgtcttgcatctagcctggattcgatctttggaatacccagttgatgatattgaagccaccgccacttctcgactcctgccgtcgcagccgaacgaggccgtagtcgcgcagcataaccactcaccatattcgacgtcgaaaccgggtttaggtgcagatcgtgggcatagtatggatggagagccggcgcgcgaatcacggtggaagagtttttccaagactatagcctaccctcgagaaccgggcttagaggagaagcttgtaacgccagaatggctgcacgaaaaccatggcaattatgcattgccgtggcggggccagcttgagcccgacgaagacacagaagatccgcttaagaagaagcgcagacgcgaaatgtggttcaaacgctttcacaatacccttctgcaaagcccgattgtaccattggtcattcggttgacggtctggtctttttctttaacagctctggcgcttggaggctctattcagcgactttcgagcgactttccacgtcctcaacggccctcggccttgatggcaattattgtcgacgctgttgcgttggtttaccttgtctacatcacctgggatgagtacacagccaaaccgctgggactccgctcccccgctgctaaagcacgactcattcttttagatattttctttattgttttcgattcggccaatctcagtctggctttcgagtccttatcaagtgccatgtggag

SEQ ID NO: 2603 - DNA, 844 bp, Emericella nidulans
aaggacgacatccgtgcggtaattgccggcatccaaaccagtcttgaattgacctcgcacgccaaggcctcccttatttagatcttcagcaaggacgaccaggataagctgttgtaccgctttatcctctgcatgatgctccagttcttccagcaaatgtgcggaggcaacctgatttctgtatacgcttccaccatcttcgaagagaacctgggcatgagtgagagcctgtccaagatcctggcctcttgcgccttgacgtggaagttcctttgctgcttcatctctttctgggcaatcgatcgtctcggccgtcgtatttgcttcatcgttagtggttcaggaatggcctgctgcatgatggccatggccatcaccaatagtatgggcgaagacaacaagggagcctccatcgcctctgccgtcttcatcttcctcttcaactgcttttatcccatcggtttcctcggaggcaatttcttgtacgcttccgaggtggctccagcccgtctccgtgtcgccatgtctgccttctccgcggccaaccattggctgtggaattttgttgtcgtgatggtgaccccggtcgccctcgacacgatcgggtacaagtactacgtcatgtacactgtcttgtcggcctgcattccgatctccgtgtacttcttctaccctgagacgatgaaccgcaacctagagctgatcaaccaggtcttccgtgatgcgtcgtcgccgtgggagatcgtctcgatggcccgcaagctgccgcaaggagaagtcgctgaggcgcagctcgcggccatccacaagaaggacggcaccgagctggaaatgaaggaagagg

SEQ ID NO: 2604 - DNA, 2786 bp, Emericella nidulans
cacgttaatatatctaatgataaggcatttgttgcaactctagaattctaggtctataatcaatccgagaattcatttcgtatctcggtaaatatcctcaggaacatatcgctgcaacatcaatgatgcgataccactcctcattcccgaacagagccttggaaatcatgaccctatcattcttagattttctattagccccttgtggatttacttcggagtagatgtggacgtggtcatttcatagatcagcagcagcaccaagacatgccaatacatctatcctctggtttagtttcgcccggattctaacagccgaatgactatttatgcagattataccgccataagcagcttgcataaagtttaaataagcataagccttgtgcatccatggtcactactggctgaattcataatacacactgcggcactacggcgttacggcgttacggctcagccattgtgcttttattttaattcgaccagccctgtcattctcaggctggtgttcggacataccacgatcccagcccgatctccggtcaggccctgattcagctccaggctttagcctagaaggtaggtctgacactgtgccttggattcaagacactagatggtgtgaatttttatggctatcttactataccgccggcaaatccgaagatgtggctattcttggaaaggacggatggctttctctaccgccggattagcggcaatgtcatcaccacgcgaatccgtccagcggactattcaactgttacggatttttggcgggactactaactattgcgggctatgggtattgagtcaaggtcggatctgatttttggaattttttgcttagtttatttgcctctagccctatattctatcctaccatagtgcctacccccttctttctcccagttgttaatgaggtactgttcctacagttgcttggtaatgccgctcctttctcttgtgacacgtatcttgctacaatatccactgggaacgctccaacgaactcctctaaccttccctcctacagcaccgccaagatactttacggcaaccaagccctaaccctggatatatttatctcaggaccatgatttgcgagaacccacctgagccgcccgctgccccccatcgttataatcttcatcaaattcagttgcttcgcaacaaactgtatcattacgggaagccacaggtattgagaacgtggtatcaacgcctgcgtggatggtatatggtcagaatggtcaggcctgaagtatatgatatgtctcaactccaaacctacaatttttgagcacaatccggggcccataatgcagaggtgttgactattaagtcagtttccgccacctggtggataacaggccatgaccactaatcatatactataggacaagtatcgcaacctcatgtcagacagcagacaggtgcgcgccctcgaaagcagcacgcaaatgactatggcgtcgcgatgtttagaccgttttgtatgcattttgcagtttagcttagacatctactttgaccgtcgatcgacggctgatgttgtatcaatccattcttaaatactcctttccaagaatcgccgtaactcgccacgtcctcgatctatcatcggtcagcgcacgcattgcagcccactctatttccgcagtcgaacacgtgcacaacatctaacagttctcgccctcatgctgatgaataatgatgattttcattttctgaggtacgacaaagacactagaacttcgttggtttaggcctggccggcacatagacagtatgtaactgactaactgacttgcaatcagggctagtgccgtactgtgcgcaccggcttccacattccatgcaagtcttgggcacaacggctaactgtccggtctcggtgttatgttgtagctccgcccttgcaaggctgtcgcagttttcgacattgtcgcgcgcgcaatggggacagtgaaatcgatgtcagacctggtcgggtcctccatgcggattatggtgtatataaactcaaatagcgagaccgtcatcagggcgcgcggctgaaattcttaagtgggagggtgtgctgccatctaaaatacttctcactcatataaagcatgcttatcgctgcaatgcatcaaaccaatgctacagccgctgtgtggcttcataccctacgtatacttgaccttcaactgtggctggctgaacaaaacgtgaagtccacagcttgtttgctccccagcacactgagccattgactgcccaataaccagaagccaagtcctgcatgaaggaaagtcacctgtggatcttaggtctttccgtcacgataattgggccggtctggttctcatttgtttaacattgtctgatttgagtgaaatggcctgtcgatccttcaccgctgcagcttggacttgagacaggattagggctggcttgctcgggaacgccggagtgcacagcagctgaaaaagtttgctcatctcgacgctatctatatttgggatacagggtctgtgtccagcagtgattttgctgtgtatggatcaatcgagattacaatcgatgagttcagggtcttattataatgaatcgacttgctgcatgggcctggtcaaaaggcctcccgtgcaggatgcagagcctgatgaatcatgccatgatcccctgcatgatctattgccaatagtcagttcaccgatgatttttgtttccgcggtggatctttcaattcaggtgaggctgtagatcatccaagcgcagtgtagaatacatta

SEQ ID NO: 2605 - DNA, 1943 bp, Emericella nidulans
tccatttctgaagataaccaatatctctgagctatgggaaaccgcctgtcagccaaggtcggtcgaggagcattcgttggtgacccaagagtcgagagaccaccattgactcatcgggcggggaaagacatgcattcgtaaatatttatggacaaggagcaattctgcttcccaaaccccatctcccctttgtctttgagtagcacaccatgtcaacaacagcggttgaactagcttcacagggacaagagccacagagctcagtccaaacgtttgaaccgattgctgagaatgcagtcatccaagcaaagcaaaggtggaacgatcctccaatcaacaaatggcgtcttttagctacgtttgtcagtttcgcggtcgtaggggccagcgacggcgtctatggagtgagcttttcccgttcggatcccccagaaaaccggctaatgacttctctcgcaggcacttgtgccatatgtaagcgtcgaatcgaattcaaatcccgtcgccgacaaggatgctgacgttgaatagcttcgtgatgactataagctgtctaccacggtcgtctctttgattttcatgaccccgtttgccggatacacgatcgcaactctcattgtcaacaaaatccacatgacgttgggccagcgaggtattgccattattggtcccctatgccatatcatcccgttcgtaattatggccattcgcccgccctggccggtcatgttggctgtctacgtaattgtgggcttggggaatggcctcattgatgccgcatggaactcttggattgcagacatggttaatgcgaacaccatgatggggtttctcggtgccttctatgggcttgggtacgttgataatgtgcaagggctaccaatggcacactgaccacggcacagggcaaccctgagcccaacaatcgcaacgcagatgatcaaatccggcctccactggaattacttttattatacactgcttggtggctctgtcctggagttgacgacgagtgccgttttgttctggggagagaatgcggctagcttccgagagaaaacacgcaggagtgctagtagcagtggcggaaacagaactacagaggcaatgaaaagtcgcgttacctggatgatagccttctggctgtttatctacatgggtgccgaaggtgggatgctctggctttatcctaggagtgaatggttttctgacggttggatttgatagtgtctgtgggtggctgggtcgtcgattttatggtccaggctcgcaacggacagccattcgagtctggtctaattcccacgggcttctgggctggcgtcactattggccgacttttactcggctgggtgaacgactggctaggcatgttatgcactctacgtatccaatgcacgaatgctgactgagaatgaaggagaacggattgcgatcagtatctatcttgtgatctcaatagctctggaacttatattttggctcgtaccgaagtttgtcgtttctgctgttgctgtctcgctgcttggcttcttcactgggcctctctttcctgcggcaattgtagtggctgcgaagctgcttccgaagcatctacatactccaggcattggacttgcgtcagcattggctggtggtggtgcagcaatgtgagtttactctgtctgttaatactttataaaccagtgatttagacatttggctaatataatgctctctgtatctgcgcatagactgccgtttgttgccggtgctttatctggggcgcgcggagtgcaaagtctacaaccatttattcttgctttactaatcaccttaacaatcgtctgggtgcttcttccgcagaataagcatcatgctcatgcagcttgagacagcattgatactgcgttgctaggatgcattgagacaatatttgaggatgcggcatactggaggagatc

SEQ ID NO: 2606 - DNA, 1713 bp, Emericella nidulans
tcctccaccgaaacaggagagcggaagcaagaagatcctctccgcttctccgttaagcgcgatgttgccgaaggtccctcgggcgagagaaataatttgtcttcgctcgctggaaaccggctttctctttgcacaccggagaaaagactgtgactttacccgttaaccgtttcgaaaattccagccgtgctttgtaagttgcctctcatcctcctctccagcatccgaaatgcttcatggttcctcatttgatataatagctgacttaaatgacttcaagtctaaaatggtggctaaggtaagactagtttgttatatcaagtcaagaagaaactattcagctgaagcttttacaattggaagggacaactgccagtgtgacaagtgcgttcatccgagtaccagacaacggattgtcgacactttctcggtatgtaaccttcttgttctcacctacatttcaaagtctgatgaatcgcatttagattccggacgatattggtgtcaaagacatctcgaatggccggagccaggtaacagtgacatgtaggataatccctttttatgctcatataaaatgctgatctttattagggtctgatggccatgtaagttcatataatcattcttggctggctcaaggcggaagacgtgcaccaacaagtttaggcgaatatccattgcgattccggtaaagcaagtcattctatgtgatttctttcttctgacggatctatagcaaggggatgacttataacccaaagcacgaaggcaatgtaaaggaaatgccatcagtgtcctactcagaagttatggcaaatgatgctggggtcctaaagtggctggagcgtattgtaagtcttcgtgtatccactcgaggctatatactaactttgggaagtatgactggggtttctgcctggtccgagataccccaatcaaccctgaatgcacggaggctctcttgagacggatagctcacattagacacactcactatggtataatgcgattctctgattgatagtacagcgcagcaactgatgtcaaccaggtggcttctgggacttcacagccgatatgtctttcaaggataccgcgtataccaacgaggctcttggtgcacacacggacaatacatattttactgaccctgcacggcttcaactctttcatatgctatcgcacacagatggcgacggaggcgctaccttgctcgttgatggctttcgcgcagcaagaaggttgtatgctgagtccaagcaaaatcttaaccatttaagaaatattagacagccgttccacgcaagcggaaacgaagactccatttaccaacctgttgagcaacaagttgtccttcgtgcccacgcgcaattcaagcatcgcttgtatcaagtccgctggaataattacgatcgggcggtaaaatggaactggagtcttgaggagcaagaggcctggtacaaggctgcaaagcactttaacgatatcatccatcgagaggatatggaaatatggacccagcttcagccaggaacagcgttaagtaagttcaatttctatgccttatttgacaagctaaacgactaattgcgctacgaagtctttgacaactggagaatgctacacggtcgttctgcattcactgggaagcgaaggatgtgcggtggatatagtaagtatccttccgtcacaccatttgccgaatactgc

SEQ ID NO: 2607 - DNA, 1115 bp, Emericella nidulans
accatgagtgtacgatcgacttggcccggcttgccatgcattgttactggagtcccagactggttgacaatcactgttttgtgcgcagtatatctagcacgcctgatatcattttatcaatacctggaggaagatccatgtgcggacgatcgaatccctctgattcccagtcctgattcaggccagtgcagataatggcataatcggcatcttctgccgccttgacggctcgattgatcatctcctcagcgtccaggcgcagagaggcccccagatttgcagcgcccccgccaaaattcaccattccagttgtcttcatcgttgttgtgtttgctgaaccgaactcgatccggattttatatgtttggccggccgtaagcttcatcgagccaatctcctcccgggtgcctttcccaaagaagcttgtccctttagtttgcttagtcgtgttgtcaatgatcaactcatcgttgatgtacaagttcgcagttccaaaaacactcagcccaaagtcccatatgcctgattggtcgggcgtgaaatcaccgatcagcgtggaccagaaaagagccctattgagccctgcaagcttatagtccatgaattggaacgcggtggtggtgaccggttcggtccccaagcatttgcggtttggctgggtcattggctcattgtagaagtgtataactgcattgctcaacaggcgatcgatcaccggcagcatgttatgggcatgcgctcctgtctcatacaacacttctgcattcggaagagcctcacgtactgcatcgtacagggtcgaagcatagtacggcttcagcgccgcactgccgccgccagaaatcgccggcgttttgatatgggatccgatgagtgcgatcttctttacgttcttcgggagcgggaggatgttttcctcgttctttagcagcacaatgctatttgaacagagggttcgcatgagagcgcggtcttctggatggttgcgccctttctcgacctctgagactttggtccggctcgctcgctgcacaaattccaataccttgcgtgcccgcgcatccaacgtcgacgacttgatgagccgcgcttgcatagcagactcaatgtatttc

SEQ ID NO: 2608 - DNA, 715 bp, Emericella nidulans
ccttatgcctggtcgcaaactcgacgacgccgtgtggtgctgacatgaccagtggagccagcggtcaggggggtgccgggtctgctgggagaggggatggatacatatatcggacacgcgacggccaccggagtacggaaggattgcatggtatttgccccaaatgactagaacagtgaggagtcctaacatgaccaggcctgaggacatttttgggagtctggaggtagacggcgatggaaagtttgtgggtggcacaggaaattaccaagcaagcggtaggactcttccccagaagtcatggattctcattattgaccaaggcaggaacttatcgaatcgtcacgcgagacggcatgtaggtagctcccatcctttgacgggatcaacgctgataaacttgcagtctcggtttaagcccattcctcagggagaaacttattcagaaactgcgcgaacaagaagcgcaatgagtaccatcaggggctctatctgtgcaaaatcatgaaatgtaccatacagcgcgctgctggacagttgataatcattccggattcttatcacagaccgtatcatttcgttcatcaatccgtcgtggccctattctttatttagagaagaagtttgttattcgcggtgtaccagtagtcgtctttttcggctctggccttttcagcgacttctggttatgcgttgcactgcgcatttgttttgg

SEQ ID NO: 2609 - DNA, 1680 bp, Emericella nidulans
cccaaactgtgtaagacccgcagtaagatcccagtcctgacgagcaggaacgtgaactgacgttacgtagcctggcgtttacgttgtaaacagcgagtacgtcaactgtccatgtatctaagcttacacctgattctaatacagctttagagaataaaatgcgatgagacacatcctcactgcaatcagtgtacacggggagcgtacgaatgccccggctaccagcgcccgttgaagtggtcgtccaagtacgaggttgctgccaataatgacacagccgcaagggaagatgcacgctcgaaacacaccatcaatgcccaaacaccagatctggaggtagatacaataagttctatcctgtcgccctcggtgtctgtgccggggttaactccccagcatctcgcgatggcaaccgggctcgccgaacaagatgtttctctctataccgcaggctcagatgcaagtttcccagactttggtttcaataacatctcgtcaccgcagtatgaacagacatcgagctctttctttgactccgtgaaattttccgatgtctttaataccaacttgggcgaatgggcagatctcacggtgtccttgcccctgccgctggaagaccaagacgctcgaatctcccggcactactttttcaaagtctgcaggatcaatccctgctttgactccggcgcaaaccctatgcgtgtgcagatacacgaccagatggccttcagtgggctaatctaccactgcgttgtgtccatgtccgcagcgcacgaaggcagcattgattccactgcgctcacctaccgatcaaaagctgtgacctgtctgaaatcagaactcacacgactcaaggggggaactgattctgagaggccactagggtcgacggatctgtctagcgccctacttggctgtatcctgctcggaatgactgatgtaagttgcctcaacgtatgatacgcgaagaacaacgaattcacctagccttcctaggcgtggcataacccgttaatctaggaataacgcacctacatagtgcaagggcactattcaaacgatggatatcaacaaatgacacaaatggtggcgccgtgacggcatcgcctcagcgagacttcctgatcgggatcatgaatattgggagtctttggcttcattctttaccaaccagtccctggacgtgatagcctatctaaatgccttctgcgagaaggacattagcaccgggacccaaatacatcccagcccctgggcaggtgtctgtacacctctatttgtatacctcgcgaaagcaggaactctggcccgtcagcggtccttggcgaagaatctttcaaacctaacggccggaccgtcagctactagtatccagacgcagctcatcgctgatcccacaggacaagcccggcagactgaaactgcactcctagaatatgagattccggccgaggaccgcatcggagagacagccgaccacctaagccccatcagccaccttcagaaaatggctcagatctaccgtctcgcgactctgctggagatatataggaatttcccctcgctcctgcggacggagagtaataccaccccggaatcgacaaccagagacaagaacgtgaacggccctggaaaactccagcggcaaggataagctcctcaccatggcaacagcatctt

SEQ ID NO: 2610 - DNA, 1507 bp, Emericella nidulans
ctctcactctttgagctctggtccccatctgccgctgacgaaggggtggccgtcagtccccatcccgctgtccctacgacagcattcgttgcgcatccgtccagacgaggtcgataattttcgctgctccatcgaccgttttacttagcccctgccacttagcatatagcgctaagctgtgcccgccagaataatcagcttccggattttcgaatccttgcgcgccaacagtgtatgccgtcataagagcttggttatagaagtctacaccggggagattctgcccgctgcccaagggaacagagttgagtccgcgcagtagcgggtactccggggtcatgtagcctgggaggtgtatactcgcagcagagatggtcgtgatattgtagtgggtgagtgcagttacgtttgggttagggctaaggagcccccacatcggcggagctgtgtcgatatcgtgctctggtaggtcctcgacgccccaggtaggcagggaggccggggttttatactccttgggcttgaatgagctcacttttagtgcgtcgaaccccgttccgttatattggaactcgactgtcttgacaagtgcttttattgctgtggcgcaggagtacagcgggatggtccacggcgtgccaggatccaggatcctattatcgcctccatcggttcgcgtggcagcgccgagtacgagaccgcaggcaaccagcgtactgttgacgttggacgggcttgaatttgttgtgccgccgcatattgttgctcctgacagtcagcatcaagcaattatacgtacctaacaaggtgacttacatgcggttctgaaatccagagctgtaacgttatgcggattgaatgtcctgttctgtgttgcagtgaaattgaggtacgccccataattaagattggtttggattgctgaaaaggtgatactgaagttgttgttcttcccatcccctagatcgattcgctggccgtggactgagtccacccgggtttgagtctgcgagtcaccatcggtgatattcaagaataccatcgtatagtggttattcagccaagcagccctgtatgcccggtctttcagatcgagttcaccctgttcaatggcagttgcagtgctcccggggggcgctgtccgtgatagatccgcaaagccaccatcgtccacgagcgaaaagttctccagaaaccgtccgttaaagttcgacggtggtgttatcgcatgaatactcaggttcaatggcacacattccgtctctggctcgatgaagagaatatcctccgtccaggatgcgccgtactttagggttgcttttggcgcagtgtggtttcgaaacccaatccctccatcctggagatccgtaatcaagccctctaccaacttgattttgtcctcgaggatctgcacagacatagtccggtagtcgggctttgtgtaccagcccaattcgctattttggtctgtcgagttcctgtacattcggtactgcatgtcgaatat

SEQ ID NO: 2611 - DNA, 1084 bp, Emericella nidulans
caactattttcaaaaccctgaatatttcatgttctacacccttttcaacacttccctcgccgaagaccgcgcatacggcgtgcactccggtacaaatgcaaactttgcctgcgacacccgtaacgcaacaatggacctgcaggctgactaaagcgggaaagggttcggcgaaccgcagaaccctcatgcgctgggacaagcgtcataagaagtatgttagtcgccaaaacgacgaggacggatccaagggcaccaaactcgtccgtggtgagagcggcgccaagatcgcggctactttacgcagcggccggtttgatgcgtggaagaaggggaagagagtgggcaggttaccgagagtcggcgaggcggaaacgcctggtctggctgcggaccttggtggctctggtggttcttttggtgggaagagattcaggcacaagagcgagaaggcgcccaaggctgcagacccgttgagaggggattatgaaaagatgaagaagaaggctgaggctgcgagggagagggccgctagcaaggttgggggcgtgacgagtggaggaaagagcgagattaggaatacggacgatatccgcaaggcgaggaaattgaagcagaagaggagagagaagaatgctcggccgtcgaggaagaagtagacgatgaccccttccggctgtatcctgtacatagttatcatgtcaatgtcaaaagcactggaataccctcagtatgagaacgcagcaaatctctcgtcataatagtcttatcggtccatggccgtctgtatactggcaagggtctaaggctatatcatagcccctaccctagtacacctctctctatccaccctcttctgcatgtttaccagacacaacaacacaacctcaacctgaccccaattgcacaatatggttgcctcaacttgcctatcttgaatccactaacgtagacaatggcggagcgaatataggtattgaagagggcatccggaactacccaggctgtctcagacgacaaaacggagatgcatttcacagcaaagcaggtgtaagactgtcactcttgtctcttccacggtctattt

SEQ ID NO: 2612 - DNA, 1040 bp, Emericella nidulans
ttctaccacaagctgtaaggggtggcgttagtgtttcaactgctataaccaatcttccagaagtacgtagttgtatccatataggcggtagccagcgtccttgcctagccagaagcatatctagaaacagtccttagcatcgcccaaaataccagaatccaaacggcgccgtccacacaatacctatggtaacgaaagccaacacactagttccccactgatatcccaaagactggtacatatacggcgcaaagagcgggaacgcaaaacctgccagactgcgcagaattgcacatgctgccattgcgctcgcagcgtaggtctgatagctatcgacaatgtacgtctgcatcccctacaggcaagagatagtccccgcagcgaagatcgcagcgccgatatcaggcataatccaatacctggtccctatgctccagccgtaccagaagaggccgatggtactgatgatggagccaattgctagagccggcatgcggaactcgggcttgccgatattgttgttgcgcgctttgaggactctgtagatgcggtcgataaacttgaggttgaggaagaggccggtgaaggagccgagtgcgatggatacataattgacgctgctgatactgcgggtttcgtcgtagacctcagtccagatatccgggaatgttgcgagcatgaggtacgttactccgaaaatgtaggccatatagacggcaatgcaggtgacgatgggctgggttatggatagcagaaccggacgctcgaaggcgtgaaggagcttatgagtgagtgcctcagccctctcttcgacgtgaaaattctcgttgccagtttctttgacgagacaatcccgacgcattcgtagtagggttgccgggtgacactcgcgcaaccagacaaacccggccaactgaatgccaacggctgcggcagagcttgcccagaaaacccagcgccatgttgtatactcagcgataaagcctcagcaataggtccgacgacaggcccaaggagcggtccaagagtgtaaacgccca

SEQ ID NO: 2613 - DNA, 2190 bp, Emericella nidulans
atgaccggtacccctggccatatgtacaggctaagcatatgctggaacgcttgctcctgcgccaatccagctctatctccattctcattatccggcccgcagcaatcggaccagccattgcggagcctttccccttgtacggccccgacaaggcgatcccaatgcactcgctcatcctctgtttcagtgtgtccgatctaggccgcgtagcaaatatcaatcgtccattcgaagaagtccctgtcgacctcgtcgctaactgctgcctcctccaccttgcttctgggaccacgggagttgtgcactgcgcgtctgagctatacgtccgccagaccgctgtagagctgatggccaccgcgaggcagtgcattactccgctggagatagcagagctcttccgcacgccgcgagcttcgactgcaatattgtggcaaaataagtatcgcttggacaatattgacgatgtacccgttttcgaggtcgattgcagccgatcagagtggcagaagcaggttactgggcctctcgccttgcgccccgtggaccatgatccacaggcgcacctgcagcgacggatcagacggatgtatcgggctttgctgggccggaaccggagtgataatcgttatccatagtgtggctattcttggttcaagtgccggcagtacagtgcattttcgtttcccattctatggaacagacaatgatgcccgagtatcactttttcaatgttgctgtcaagcaaaggctctcgcggggctgcagtcaggcatcgcatccttgatctgatctattactactgggatagtgagataggaaaggtagcagaagcacgcatagacgatctagtagccggccgtcgataaacaggcatatcacagtagtcgatcagacatgcgcagctcgcggtgcttctccattgctaagaacctatgctcttgtcctccacgttttactctgcatctcctcgtcatctacagcagatccggtgttcaggatgctgaccgttaaatctataccctcttacactgtatagcgccagcttcccctgccaattcttgaagtcacgtgacatatatgcgcctttttcgcgttatccactgcttggattgagcttacttaaaaacaccgcaccgactctcgagactcgcaagatcttccaaaatgcgaaaacattgaccaaaaaaaatgctattcttttcgcgattgacagcaagtctcccttgtcaaccccggctgcggatgcgctttcaccgccgtataagccgtctaggtggcgattctggcgcctttccgagcgtctacgctgcagatcgcagttgtcacactgggggacagaaaacgaactcgtcttcaaaatcagcatgcaaggcacagagccagactgaccaaaatcaaaagtctgatacaagtgcactgctgacccggcgcttctggacctgccgctcgacgtggcgccgagcaggaatcaacacactccgttgcctggtaggctgcactgtgggcgactttgccgcactatggacgctccagacatattgccctgagctgggaatggggactataatggctgcttcgagtgcgtaccttccctcgtctcctgcctaacttaggcggctcagatagtccgggctgactagatcgcctccagtggcatccggtatcacaacgtccatcattctggagacggtccttctccgtcacggaccagataggcttccatggtctgcagcggtgcgcactgcaatgggaatgagtctagtctcaatggcggccatggaagctgcggagaatctggtcgactaccatcttacagggggtgttatcaatctcaacgacccggcgttctggattgctgcgggggtttcaattggtgctgggtttttggcgccgctgccatataactattggaggttgagggcgctgggtaggagttgccattgaccctgaatagacttgcatttccgtaactgtacataactatagttattacactaattcatttcagctctatacaggcggattccactggtccagcagtcgagaacccttccgagtaggctacccagctaaactgactacctaacaatttggaccttacgctcggattcttcttaacacatttcttcagttcgcccgaatccattaactaatcatatactgggcctgaactcctgacaaacttttgtg

SEQ ID NO: 2614 - DNA, 2099 bp, Emericella nidulans
ctacactgattaaacgcgtcttagtctctgtgcgaaacgaaattgtctctattttcattacagcacatcttatatttgtatgcctacatgatctagcgcgtcagatcccgcgcgtgttcatgaacttcatcgccaattaagaaacggcccgaaggctggtaacctccaacgacggacgcgggattcggcgacgcctcagtgacgctcttgttttctttcttcgaggcgcttttgttcacccaattggcccagacaaagcaatcggggtggtggcggctgccttgtctgaaccgaagtgcgcctctttcatcgacaccccattgcttcaactcgagccgcggtgttacttgggcataattatacgattactcccaactcgaatcccttgcgcgatcttatttcttctcttgtttagagttcacactatactaactgcctaacctcgataccttatttacctgcttcgatagcagttgatgatcattttaactgtatgtggttgttctgctgtgactggaatgcgctgactgtagaagatattttaattacttgacaagaagccatgccgcccaagaaagctgccaccaagcgcacgcgggctgcgaattcggcttctcccgttcctgcctcgcgccggtctgcgaggatgagtccaggtcttggaggttcgaacttgcccaacatcccgacgaagacgtcgtttgcgtacggctcgtctcagaccccaattctcccgcacatgctagccgcgaggcctcagatgaatttggcggaaatggctgactctatcgaagaagccgtccaaaccgccaaagaacgcgagaatagcgactcaccccacaatatgccagctttgagcacaagcggcacaagcggcacaagcacgcgcaagtcagctgaaacctcgccgcgaaggactcgacgacaacctacgcctgatcaggtgcagctgctcacctcgctgcacgaagcttcgtcggcgacaccgtcgactcccactcgacattccttctcttcaggatcgagtgttagggaggtcgctgagaagcaactctacccttcttacatggaccaattgccggatcaagcggaggttccggccgacgcagatctgcagggactgggcttggacaacatgtcggttatctcctacaatgtcgagagggatgttcacgacgatgacctcaagcgaacacgttcaaatatcactgccccacctcggcgagtctccgggctcgacctcaagcacagcactatccttgaggaagacgagtcctatataccgtccccgtcagtggattccttttccgctccagctaagactatcatctcggatcacgatccaaggaccccattaagtccacactccgatgactcaacttcacaatgggagaagcccaaagacggttggattccatggcttcttcgagcccttattgcgacgttggtgatttttggcatttattccttgctaggcagtgcttcatcctttgacgcaaaacctatccgcttcaacaacagcgatctaaatgcgctctccagccaggtagtaaacctaggcgcgcaagtctcttcgctgtcaagggacatgagatccgtccgggcagaagtcagcaatatccctgcgccaacaaccatattacaatacccgagcaaacacggccaggaaatcattaagacaaactttctcaccaggggcaatggtgtgattgtagatccatttttgacgagcccttcagcatcacgtaaagtcacgtggactcaaagactctatttctggctgtccggcgacaagcatatgcgcccgcaaccgccacttgccgccatgaccccgtggagcgatttcggagactgctggtgcagtgccccgaagaaaggagtaactcagctcgcagtcctgctgggccagcgcattgtcccggaggatatcgtggtcgagcatctaccaaaggaggcgacgatccggccccaagtggccccccaggagatggagctgtgggcaaggtaccgatatgtcggaaacggccgtccatacaaaaatacatggtttgctttcttccggcggtatccgaagaacatcgccggacaagatcctcggc

SEQ ID NO: 2615 - DNA, 1238 bp, Emericella nidulans
gtctgttaacgaggaaatacagttgatggagagctaccttgaagtgaatgagtttagtaaggtgagctttgagggtgatctccttatttgctttccggcctgcttttgtcatgtctgtcacagccctacgagctgtgattatgagccaacatagattacggagcttcatcgtgtgcatcggtgcccagggtgagtgtcatgtgattggccattcatcgtgtacaccgggtacgcgatgaatcgacttctgccatttctgactgcttactgtatcagattaggctttgttttgcaaagatgtcccacactcaaggtcttcgtatacataattctcttcttcatgcttgagattctgaatatgagcgccagatggctgtttaaatgttctgattggcttgccgtcttaatgtccaactctaaaccctaattcccatgctctaccatatagtgtattagacatctgatctgtgcactccctagcatgattaaaacagactctataatttatcgtattatatagtgttgtagatacgctgaaaggggaaaaggcaggaggaaactgcatcaactacacgaacatagcctactaagagcctactaagatcgggcgccatatgacgattgacggttaatctcgttgacaatagatctctttttgatctctcgatacggtacaagaggcgccagatccgctggggatggagatcgcgaccaagccacgatatcacgtggcgtaagccgccagccgtctcgagctgagaccccgctgagggctgagactacacctggtgtacaggatgagcatcacatgacatttccatactgcgaaataccgaggtggttcagtagggccgaattcggtcatgtgaccagtgtctgcaacggaatcattgaattgtggtcttatatcataactacagtctgatagagatttagagctattatgaggttttttatgacggcaaaagagatgttgatcctctatgaccgacgggtgaatggaagattaaaatcgaatgcgtagtaacaacaataataaatctgattatatcactggtaatgtttactgattgagaggcggtacgttatgtttgattagtaagaagtctcctcggttgacctgtaaccacaccactgaccacaccaatatggtggcgccacccgcggccaaggaggcttatattcgcccagtggatccctatagtgagtcgtattatgcggccgcgaatactcatgtt

SEQ ID NO: 2616 - DNA, 1944 bp, Emericella nidulans
taatcatcatcatcatacccagtgacctcgcctcgcctcgcccttcttggggtacaaccactgcaatccagctgcactactcactaatgcatgaatatctctttctgctgatttaaactgttctctctgtgctcgctctacgtcacttcactcttcatttctgttctttgacgcggtcccatacgatacttcccgagaggcgtcgacatttcgcgctctcccttcgtttctctatactgtattgactatcctcttactgcttctcttttttttttcttcgatcgcctttgccacttggcccaattggtcttgggcctttaccttttcatacatttttttttttttttttgctttcactttttttcttccactcgggaccacggatctcctgcagcccgcggcctctctattattcagctgatttatcgaccggatcgcggggggaactatgtctgccgccgtggcttcggcagtctcaacaacgctcccatctaatcctaccgcgcattcttcaccaatggatgcgaaaaagaacagtgtcaagatggataacggtgagttctcttgattctggtacaaaacattctggatctatggttgtgtgccacccatcccggcctccgatgttatctttcccatcgtgtcgggatgacctcatacaatccttattgtctacctggatgacgtcgcacaactactcccccctgccttatcctcctgcgcattgtcgcgaacttgccgtttcatctcgtttcgtatctgctctggcttaattgtactgacttgatgatcttccagaggcctcatcggagaccaaagagcagaagacggatggcgagccccagacttcattagcacctccttcacggcctaacccatcggctgccaccgatacccccgattacttcaactcagttcacaaccctttcgctttggagccgaatccttttgagcaatcgttcggcgggggttccggtgagaccccggggaagtcgattcttccccctgtcgcttcgatcacatcacctgctttaccaggcactagctccgccggcggcgcatacaactggtctaattccttgcgctcgggtcccctgagtcctgctatgcttgcggggcctgccggggggagtgactacttcgacagtatcggaaggggctttccgacgccgaatgagtcctcactccgcactggtttgacgccaggtggcggaggctccatgttcccagcaccaagtcccaactcccaagctttgttgaaccagctgcagaacggaggcgcaactccgtctactattgagttccatcgcacagctctgaatgtaaagaagaacggcattgcgcctacatccaacccaaccggcgaaggcgatcaagtaccacagaacattacaacaactatggatataaaacccgcacagcccgccacagtcgactttgggccgcatgatgcagcagacgctgctaatggactgttcatgttggccaaaggtggacaatcgacggcaaaccagtttgctgctgtttcgaaccagacggcaattccaccgcaaacacttcagactagcgaaattctacaagaccagaatgccgcccgacgcccatcggttaatgtaaaagggtgtagcaaatacgagagagccaagtggcgaacgggtcagaacaaagtgaacaggccaaacctgcccgaggcagggggcagagaaacaacgttacaaagctttcagtcaggaaataggcgcaagacggtgattccttagggggtccaccaggaggccaagctaacaacgggcaacaaacacaaattcttaagggggaaatagagggagagccccccccccccaaaaaaagaggcgcccccaaaatactttgaaaaaaaaaaaaaaattttctcaaaaaagagggaaaaattcttccctttttttttttcctaccacaaggggg

SEQ ID NO: 2617 - DNA, 1412 bp, Emericella nidulans
taacacccgaaatttttttgttaagaacctacatttaattccagaaaatttgaagggcctttttcgggaattaaacgtaaaaatatatattgtccctgaggcccattgtttcaaaaagggccaaacaagctgcttcaaaaggcaaaccgcaagtttcagcactaaaaaaacccgcgaaacagccaggcgaccgtaaatgaccgtacgctgccaccgaccgttgcgtcccttcggaccctccaggccggcctgtccatttcccgcaccggcttagaataacccagatccaccgccgcttaagggtccctgaagaagaaagcaccccgctaccattggagaccgggatctttatcctcccgggttggcaccgcacgatcctatacgaggagggattggccctggtttgactggtgaaggcggtggcatgcatccaactttcgatgatcctctttttgaaggatctcaaggaggcggctacgaccctcgggcaccgcctggtgcaaggtacgatcctgtaggccctggacaaggacctccgtttggccaaggttttggtcgaggccggggtggccctggcggaccaggatctggggggtttggtggatttggtggagggttcggcggtgacatcatctaaatttgaagtacgacacgacaccgaagtgggtgatctaaatggcctgtaatgttagaaacgaagtaatgcgatagctacgagtatcataaacaaaaagtattaatcggtattctggcaatattctcgtttctttttgtgcgtattaggtgcgtattggtagctccccaccatacggtgagttagttctccgggtgtggctttgctgtggcgcacgggcggccaaacctcgtcgactctggttgccagcaaacctgctccctttcttgttctcgacaactcccatcgccatcccatcgctcagcgacacgaattatttccccaatagacttctctctcgccttaatttctattttcagttccattccccctttgctgtcccgccaacgacgtaagcgactgcgcctcacgagacccttcgcctagctctcccacccctcctcggcagccgtttccctggttattatccgcctttgagctgcttcacctcccaacgacaatggataacaatatggagatcgatgcggcgcgttcgccagagccacaccacctttccccgacaaccgaccctgggtcgatccccacgctcgatggctggatcgagagtttgatgacgtgcaaacaactcgcagaggaggatgtgcggaggttgtgtgatcgggtgtgttcctttggtggaatggtgaagatactgtttcctaactcctgactatcaggcgcgagaggtcttgcaggaggagtcaaacgtccaacctgtggtatgtgctgtgtttttgat

SEQ ID NO: 2618 - DNA, 2937 bp, Emericella nidulans
tcgtatccgcgaaattctcatggtcccctacaagatgttccttataccaggggtcatccttgattttcttgtagtcctcgaagttgcgaaataccacttggctaaagcagtcgtagtcggcaatattcgccatttgcgggtccatgatctcgtacatcagttcgcgcgtttcggtggggttgtggatcttgcttctgtcaggacatttctgacagagtacggtatatgtcttcaaggaaagatatggttgcggtggtggatgcacgtacgacagtccatctcaaaataccatacttgatcatcagatcctttgtcaacggtgcagagtgctcaatcatgtgtttgcggtaagcttcctcactcatgccttgtttgcggtacgcgaggatagtgaggcagaggagacgatcctcggaggtggtggagtttgttgctgggggattgggagtggacattttctttgaattgatgcgggtgaattctgagctggtcgatgtggttgatgagtgaggatgggcgagtggaggctccctatataatgcaaaatgacccgagacgagatccggacagcggcgggaaattaagcacagatcgggtcattaagctgttatctacgacgatagatcacatcgaggcttacttcgtcgcgtcaaggatagtgaaatatgcatagaccagtgttttcatctgtacctatataccataactctaacaaccgaaagcaacagcgcagccctttcactaccggttaacatactgcctaattatagtactctaatagccagcttcgcagatcgccgatggtaggatactccaggaacaaactaccagtcaccgtgacccccagctcctcccgaaacttctctgctatcaccaggctcatcaagctgtcaaccccgaggttggcaaacgaggcatcgtccgtgagatccgaaagctccagcgcagcttctttggcaataagcacaagagctttggctgctacgctgtcgctctcaccagcggcggctggtgcagctgcaggtgtagggccaggagcaggggccggagcaggggctggagtaactgacgccggtgctgcaggagactgggcaactggtgcagctgcagtagccggggtagcgactggaacaggctcgggtttggttctgggggctggcgtactcgaagcggcggcatgcgaaatggctcctgcctcttccggtgccgtgaagaacctattaagcaggatgcgtggataccgccggaactggattccaccacacatcccaatgatcgccccgtcttgcataatgtatacatcgccgaggtaaacagtaggatcctcttcggtctgaatcatcttgacgtatgaccggtatttggcacctgctacaagcggtttggcgaatcgcagagacttccatcccggagtcacgcagtagttggccttggtatcaatagcgtcggacacattcatcacgaacccagcgagatgcgcgacgctgtcgataaagtaaggcggaatagtccaggtgccactcttctccgtggacagcgtgatatcggcgaatgcttccagctcatgcagaaccacagactgcataccgcggtacttctgcgcgtagtccacgaggttgttggcaaagagcaggtaagccatattgcgggtaaagcggttggcaatgccatcttccgcaagtcgctccaaagcctcaatcctaccctgaaccagatgcgtgcttggtatccaagacttgagccacagagccgcatcgtcgtataatatcgaggcacttgcaaaaggctcatccgctgtgttgtcattgaggacgttctgccagatgagctcagcaacccccgaattgatatctgtggttgaaatggtgactcggatatactgcggctttttggtgtttttctgcgcaacaagtcccctcaacactacaagattggccatgttcatatcaggcgccttgccacctttgaccaggttcttgtacagataccctcccagagtaaaaccaatgtcgccgtgtatagactataaaatgtcagattataatgggggcgctgagtggaatacttaccgaagttaccacaccgcatccgttcatcttatgtccatgtgcagcatccaaaaaatctggctgcatcatatcggactgcatcaccactttacccgccgagccgttgaagctctcctcgataatctgctgaacagtggacgtcctcagcccggatggtacggaggccaattgccctgtttgctgtgccttgagtgacttttcggcatcgtaaaaggtgttcccttttgtcaatgcccagtcgccgttgtactggatccagtacgtcttgtcgttccaggcgtatgtaggaaggtctaacagcctcagccctttttcgaacgggcgttggtattcgttccattcgattggcacaccagcacagtgcaaggcagtaagactattacataaagtcacccagttgtcctcacctctcttcattgaggcgaccgtctcattgacagctgggagagtggcattcacaaagcccatgcaaacgggatgcggcccaatttccacccaaacagtctcttcatcaaccgtcgagaaagtctgtgccatctcaagtgcggataagaagtttactgtctctcgtgtggcacggcgcatgtatttagcggtaatggtcttgtcatcaaaaatgactttgcccaacaggggagatatcacgggcatattaggcgcacgaaacaatactccatcctttgcagcttcttcaaagtcatcaaggatagcctctgtttgtgaggagtgaaatgcaaatgcgacgtcaaggctggtgcatcaatagcctactgagtggaagattgcagacacaacctcaaactgagcctgcgatcccgtgaggacggtttcttttagcccgttgatgcatgcaacttcatagatcggc

SEQ ID NO: 2619 - DNA, 3324 bp, Emericella nidulans
taggtgtcgggtcaagttccacattgacttttctggacgacttgtaatcacgatattcctctgcaattccaaaattggttcggagtgaccagctaggaagcctaggtgattgtccaggccgtagccctggtatgtgcagcaaatccaaggggtagtctctcaggttgacgcgagcctcacccatgtccagttgaatgctcatcggaatcagtaacgcatacttcgtagacatcggcatgcctttgccaatattatggaggaaaagagggtagttttccgaaggaaatgtgggtttatcgatggtcagatttatgtcgctaattagagctgccatgagagcaggtctatttggaatagccagcactgtctcggtttcttgcacatcttctggaggatcgtcagcaccctcaaaaagatttcgaacctctctgattgtagagttttgaaactgtagagccgcatcgatcttggctttccagctgcgcgcattatagtgctggagccaataccaagcactttccgacgataccttcgcttcgttggaaaaagacgacgctccttcggtatcgtagcggaatctatgtgcacgcccgcgcttttcctctttctcctctgctctatcgtttctcggctttggatccgcgctcttgctcctgcgagagtctgaactgacccgctcgctgcgcagtgttcggtggctggatcgagtacgcaacctcgaagaagctcgcctttggtcagattccttgagcttctggagtttgaggtgaaacgcatcctctctagcgcggcgctgacgctgttcaataaggccagtccgatatatgcaaccaagcttccactcaaatgcatcgtcctccaactcgaaaagcagagctttacttctgaatgagatcttagggactttctttggcccttctgggtccctagcagatacgaagtcgggaatttggtgttttaagcggtgatgtagttgtttcaaagctttggaagtgttgatcacattgtcgaaaatgcgatgcatgatcatgtggtgaggaacaccgatgcgtacaaagtccgtccaaacgtcgatcgatttatcctctaccaaagacttgccctgcttcagcttcattttccgcaagtccagtcggaaattattcatgctgactattcgtgcccagacgcctctgagcttgggtgcttcagcatgtaaccgaaccagatgggctcgaacgaacggagcggaatgtcgatgagagccggcagtaacgccgtatacttgcagcaacatcggtgggtctgctggcataaatgtcttgacttgaagcacggtagcttttatgtccactgtgataagctcgccccgctggatagccaagcgaggggaaagtggaggcgaagtatcacccgcaacatttggggatgacggttgcttttgcgaggatggtaagaacgccttctgaagtactgacaaagcaacgctgagacaatagtatcggtacagggaatattggaggtaaacgcctttgataagagagtttacatggaatatcggtcccaggcgatcacttgacgtgctgagggctatctcgaaccttgggagcgagaggaatggctcagactcaaggtagtcttcggattcaataacgaatccctcaaaaccgcgagcatggaaagccaaccgtctcccatcagcagctccaggtcgggtttgcttaggaggagatgttggattgaatctgaacggcgactcgtcaccaatggtggagtgactgggagttcgtcgacgtacaacgctcactgcagtaggctctgtcttctgagctcggtaatcagctgtccaggattggagttgtaacgaaacgccccgcgtcactttcgacacactctcatcaacgccggcgatctctaagctgaacccggtggcctcgaattggaatctaagtagccaaggaggaagacgccgcagaatactcggcttccggtcttcgcctggcaagccgtactttttcttgggtcgaatttgggcacgaaattgctccacgacttgttgaatcccgcgattaacctcgctattgaccatatggccagaaaaattgtttagactgccagaaaccacaacgcacacctctggcgacgcgcttagaagaagcttaagctccatgttgtcggttgtcaagagattatgtttgatgccggacggtgtctggtagtagaatttatgcgaagcaactcgataaatagaggaaagcgagtagtgggcacctccctcagaggaatgggaggattcaacatccacagatatagaagatattgatgaaataaggaggttgtagtcgtcctcccctgtggatgaagaatctggaatgggaagaacaaatcgaaccacaggctcatgaaccgatagcttgatatttgccttgggaagtaagcgagatattagttgacctctggctctcttcttgcctcgggaagtggatgccttcgtctgagctagacctaagagtcgcgagacatgcctaggctccaagtcgagagcgggagaggtgaccaccaagttggcgaagagaatgttggtatttcgttcctccgcgttgaacccatcatatgaactgagtgttttggacggcaaagttgttttaatagtcgtagttgccatgggtatatacaggatattatccgtttctcctgagctgtcatccaggcttacggatagagagatagcggcgagaagtgcttgatgagcaacgtcagtacgttggaagtacatccgatgtgctggactcgtctggtccatccggtggagatcgatgccgatctcatgcgaaacaacattcaggtaaacagagctttgtccaggcgacggtgactggacagatcgagatagtctgaagaagcttagtgccacctgaatctcctggattccgcgcagaagtgaaccagcaaactccttcgaggcagtcacggtctcgacaattgtctcatctgtgctgccgggcttcttgagctcttccacgtagtcggcaaaggtgacttcctcgtcgggtttggtaacgtctacctgcactaggggttttctggattgcttgattcgctgcaccagaagcgtcaagtcatcataaggtatatgcatcctcccgattttgaaagcgaccgacgcatcccgcaagccatcaagtcctttatgcaggatcccatggatgttcacgccaacattatctagcacctcgatcggctcgttgccatcgacagccacctggacattgtgcacattcaagatccactcggcagggcgttgttcaccagattagaccattttctggcgaaaagccttttgga

SEQ ID NO: 2620 - DNA, 2519 bp, Emericella nidulans
  unsure (1)..(2519): unsure at all n locations
acgtctgtctttgtggttcggcccggctggaaggaggcgttgtgtaaacgttgggtttccttgacaaagttgttgaggtaaggaaggctgtgtgctaagtcaggggtccaggttgtcttgttgggctcgccactggggccgacaatgccgtactctacaagttcgctgtagaggcgatcttgggtgccttcgtacgtgacgagacagtagatcagccacgataagagggccgatgtcgttgtgaatccggcacccgtgacaattaacatgttggccaggatcaggccagttgggaagtgctcgcctttctcgtcaaccgcatgaagaaggtaatccacgacgcaggatgcgctcagcgcggcatcactcatgggtgcatctttgctggcagaccgggccgcaacctcgtcaatagcctcctgtagtagggtatatatggtgtgctggacagaccgcagacgcgctgggtcgccaaacgggagaagtcgataccactctccgcgtgctgtgattttcttattcagtgagagcaaggacgcaatgttcgtaacaatcggatgcaaaggggaatctattgatgcgaaatgcccaaaatctttgcccagcgagaacgacccgatcgtctgcgaagcgagcttcaccatgtactggtaaacattccagctctcatcgcgggcatcaagctcatcgaatactgggagtgccttgcgcgcgcaattctgcattagtcccgtgtagtgtctcacggctatcggacccatggcagggggaagatacttgtgcgcaagacgccagttctccgtctccgtatcgccgatgaaaatggccgtgttgtccttgacgccncagagcgggtggtcttcggtaatcttcttggtcatgtagattgactcggcgaagcagctcgccgccacttggggactgtcggtcaagtagattgttttccccatgttggttgtcttgatgacgggcccatatttgcggaagagtcggtagtggttgcctagatggtcggggaagatctcgtagaagctgccgacgagggggagaccaggcggcccctgaggggattgcacgggcttcccatctacgaggatgccgatggctgaggaggagtttgctaaagtgaggacttcgtctaccgttgacagggttcctgaggaggtgttgaaagagagtcctactctgtcagcttcgaggccgaggatcagtagacctaatgacatacccaacggttgcgcaacgtgaaacactaagccgacagcacgctgtagatcctcgaacttccaccgggtgtcgacagtgacggattgtgctgacgaaggttcatctccaatgaggtagaactggcactgcacagtagggggtctcattatgataactcgttggtgactacattggctcgtatttgcgctgtccacttcatttttatatcttctaaatcaactccgacccgtatccgagcaaaccctgagctcatagtgtgctcctccgggatgccggcattgccagtgtggtgaatccgaatcacgtacgaagttcggccgagctctccgtaagccggaaatcggcataccggattatattcgagaaaacggacagaggaaaagattcgttagaacgcttatttaaaggcaaagagtaatcgatttactgtctagtcgctatacttcaaaagaaactggcatcatgccttcctacacgcttgaacaggtcaaggcccactgcacaccggatgatatctggataatcctgcacaacaagggtacatattgctcccatagtcgaggatttattctctaaccatgtacagtctacgaggtgaccaagtatctcgaagaccaccctggtggaagcgccgtccttattgaagttgccggggctgatgccacggaagcttttgaggagatcggccactctgatgaggcgcgcgacagctcgagccgtattatattggtgatttgccagatcaggtaatgccggctcttgatcgttgactgctccaccaagccctgacggtgtacaggaacaagccgagtccgtcgagatctatcgaccgaccttcgagcaagtctcacagtctgccgtcatcaacaccaagaagacgagcaagtccttctcgtcgcttcttagtgtgctagtcaagctcggccttacaggtgcagtaggtgctgccacaattgcggtctttcagaaaaactggacgccccgtcagctattgcatgctctccctgcgctgaccactccaatcccgctccctcggatatcaggcagcgggggatcccagttctggtctggtgttgggattgccaccatcacgcagctgtctctatcctttggtctgggcgtctgggtgtcgaccaagctcgacgtgcagcaagagtttacgcactacccacctcgacgaccagcgtcaagcgcacggctcatccgcctcccttccactacacgtcgctggcaccgcgcagcccggtccttgactccggcaatggcgcagcttccctctcactagcaagaaa

SEQ ID NO: 2621 - DNA, 1686 bp, Emericella nidulans
gtggtggctgtcgcggctcacgggaggggcaccaagtgggtcagaccaatgaatttgaacttcatccagcaacctccccagacttcgacctacggtagagtacaagaccttcgtacacaatggcggaagacctggctgatgtctcgcttgaggctccgccaactcactatcgatctattttcctttttctcggctacctgtctctaatactgtcccttgctttcagttgttgtcgcaccatatatgttcgatatcgcgcacgccaaacgaacaatgactgggctactagtcagcggcaggcgcatttatccttatttgtctttctggcagctttgagtcttggtacaacatggttttacatgatctcactctttgtccgtacgtacaataattgggcaactagccccaagggaataccctatgcaggcgaagagacgcctctggtcactcggatgggtctttggctatacaatacgtacatcttccaagaggcctgggagacggtgtccgaggacgcagcacgagtctggtggagtggccagatcttttggtggaccattggttggagtcttttcctcggcatcacaggtatgccatcctcaaccatgaagcaggcgactctgaataacatttatggtaacaggtcggagatatcgcattcctcacgtctgggtttatatgctgctggcccaggctgtcagtgtcgccttctcggcaaacctcttcttcgctgcaatcaccgtctctacacgaccggatgagaagagcgttgccttttcatggtccccgccattattctatgaagtcgtgccagttgcactctcgcttctcgacacccttgccgtccctatctttgcgtaccagaaagaattcatgctagtcctgctcgcgcctcactttctggtcttcgtcccctgtttgttgagcccgaagagctcgtcctcggagcctactactaaagcgcagggacagcgcacaacccagcgctacgttgccttaatgcagtgggtggcggctgtttcggttgttatgcaggcctatttcactttcctggcgttgcaagaactcggcacggatctgtcttacggcgagttcgcgaagcagttgtgggacactgtgtatgtccatccagcttgtagcagtgtcagctgggatgccatcatgagtgctgtgagtgcattctcctgggcgtatgtgcacggtttcgacacaagtcggatgcttggtggggagtaagtgttagatgggtagatgtcgtgatctcttcggcgacctaagcaggtacatatatatgtccagcaattctcatgttaggtgttggggcttacccgagagagccggaaaatccgtcttgatatgccgacttttgagcaagcaatttatttagcgtagcagctaaggaatgaacatgcgagaactcgccttgttcaagtatcggtatagtttccggccagtagctaatacaattttccatttgaccggctgccccttagagttatagccatgcagagccccttgccaaacacctatctaggggctaccccggcaactcaagtggacgcagacgcactatttccaacgaggccatcagctcgtgaattaagggcctctaacatcacagtcagcaaatattccagcaaaaaaagggagaaataggtcaagcaagcctgagtccccgggttcggg

SEQ ID NO: 2622 - DNA, 620 bp, Emericella nidulans
tttccgcaagtcgctcatccagatctcaatccgtgcagttctgcttactttttcttgaattcattgcgcctcgtcctcgtcttcaagctgcgtgctaatatgtccaaggtggtttcgtccaagacaataattatctctcaataacggttacctcccaattgcaacctccgtcccctgcagcgtacctttcccgatcgataggacgcgccgtctatcgccttctcgaaaccacatcaaacccacagctctttgtctccggcgcttagcatcccgtactagcgagtatacgtcctcgaacctgagtcttataccaccaatgggcagttagccctaagacccatcgcccgtttcttcattgacacgcccctatactcgtcgtgcatcgccgcgttgggtagttttcagcctctcaataagcttgcgtgccaacgcccacctgaactcgaatcttgagcagtgtctggtccggggtgggaactgtcaagtggccccaaatgaatcaatgtaagaaacgccatcctctctagtcgctgcctcgtcaagtcccccaccctcaattcacccgaaacgtctggccgtcacctgcccctgcaagtcaagcagcaaggctgatgacatgc

SEQ ID NO: 2623 - DNA, 1041 bp, Emericella nidulans
tacatccgtccttgtttacgcttctcggatgaaacaccaagccacctccacggaaagccatggggtcgccgctgaaaagaaagcgtctgtatctttggtcaggagccgacgacgaatacgagacgagcgatatcgatttgcaagaagcacgtacccagaacgacttgcgtctgaagtccatctttgaggggattttcgaaaagtacggtcgggattttacagacgtcggcgacgagatcgaccttcagacagggaagatcacggtaaacaacgggcacatcgatgcactcgaggtggaaggcaacggttatggggactggctgtcggatgcaaggccgcaggctccgagacatgtactagcagaaaggacggattatgagggcaagccggcgcgccttgcccttgacgccgatgcgtggggtgcagaagatactgccctggaaggcgaccacgacctgcaacatcccggccggaggacggtccatctactatcacacatgcggccaggctctaggaggggattgggcgaaactacggaaacagattcagatcagggtgcggcgggtgacggagaggatcgtgctacgtcggaggctgaagacgacaggtcgagtgtggattctttgttaggtaccgcactatcaatcccggcccagaaagtcggtaagaccaccaagggcgagactggcaccgaaaaagcaattcctccccacgacggatcccaccaataccaggccgcacatactgagagactcgatgagactgtggaccccatttggcgcgttcctgagatcagtgcgaagtttacaacaccgactttgccgagtcgacctagacctaacccaaagcctgtcattaacaatgcagtacgttcgcagtctccacccggtgcgagctccgtttgggctctatccggtacaagaaagcgggatacggacgtagtgaagatcatacagcaaaagggcagcccgaagaggcgggtcacacaccattctagccctgatgctgtctgggactggtcatttgctgatggtcagatgg

SEQ ID NO: 2624 - DNA, 1108 bp, Emericella nidulans
tagtttggtttgtggtgtgtgttgatgacatcaaccagggaaatcctccttgagatcttgggcggatgtagaggagctcattggatggagtgagatcggatgtttattccttggatcggtctgcggcaaaacattcgttacgattagctggcaatgcgggctgagaggaaagacgatctgaagagtaagtggaagggtgaagtgatgagggtaagagtacacaatcacgtggaccatcctatacaatattgtacccttctctattctctgatagaactggacaaaatacattatgggttctcaggaagcttaaactattccttctcaataataagcttaatctgggaatcctcatttgcttctagccttgttaagcatcacaatttcgccgcctccccctccaagtcgaactccgtggtacacagcaggaaagtgtccttcaacgcctgtgacaattgaatcaagtcagtacaccaatcaaactgcgaacgctgtccgtttccctgcaataaatagaggggaaaaacccaagggtaacttaccccaagtctatacttcctggtcacctcctgataatcctccgcggccagcatatcacagaaatgcctaatagacgggtagtgcacgatcgaaatctcattccaccagtcctcttcgggtctgtcaacgctccccctcgagtctgagaagccggagtccgagtccggggccgcagagcgccccgctgccggtctaatgacattaccgactagtttggcgcttccgccacgttttgcagcaacaggattgaagccctaacttgcttatcagatgacgagtttggaatgggatgatggattggaagggtcgggctctacctgtccatatttgaagtaattctccttcccaccggggaaatggaaatgcagcaggttcaacatcgtcaccggcttgtcgtgctctttggtgagctcctgcatgaactcgagcagttccggactgacttcgaggttctggccttgtccgtcatttccctgcttttctttcaatttgtccagacttcctgtcaacggcactcgctgtgcattcttctccctcttcagctccgcatcgcgcgtctggataagtg

SEQ ID NO: 2625 - DNA, 2350 bp, Emericella nidulans
tcagatctctaacaagaattgatatgcgtagatgagtattaaaggatttaaattcatactatccgagaaatacaccgtcaaggcgtttcagattgcgcaaattgtgctatatataccgagagcgctccattcatacatgcgacatactcatatcatcttctcatcacccctacataaccatacgttcaaaccccgagaacccagctctcgaacctggagcccctagtcttttcacccgttctccctttctccagaatgggcgcaaactgactaacctccccatacttccttacaagcgccctccaataacagctctccgccgcaggggttaaatacctatctcttaacgtcttaacgctattctccgcaatccgttccgccgactgtgggttgtccagcaaaaactccaccttgcgttcaagatcagaccagtcccgatcaacttcaacatagtttgcatcaggccccgacgagacgagcgcagaatggtgcgcttccagccaggttagtttatgtgttatgaaaacgctcttgcagttgaggaggtatttaccccttccagaaaaagagcggccttcggtgtgtacgaggaaggcgtaggtgcagtgatcttcaataggcagtacttcgttatcagatggattcgacttcgagtttggttgaaagcgagagtcagcccagctgatctccttcacattcgcccagctcttcccccccacagtatcaagcaaggctttcctgatttctgggtttgcggacacactaccccgccaaaggagctgtttctttttatcactgaacggcagaccttcttccttagcaaatatccggcgccggacgtccttgtactcgccgacggtgtcaacctccggccacgaccaataaccaaaatcgggcattagccagatagcagcgtcttcgtcctcttggcgtttagtgtaagcccatatcggagatggatttgtactagttctggtgctgaagtcgtctgtcgtcaacacaaattcgatgtcagggagactgtgtctgtcggggtatgacgatagtgcgcggtgcagagaatgcaaggtcgctttgccgcgggtgaaggtgtagggttggggcccgtagtcgattatgtataactacaaccacatactatcagccacatccccttcttgaaaacagagcgaggctgtcggataagggtaagggaatacgtacctcgccatctttgacaagcagccctaacaagaccgttcccgttcccatcaatccctcctccgcgtgcaatatcatccacgtccccataactaataccaccattcgatgcccagaactctgcagtccgttccagttccgtaaagagctttggaaaagctaaggaacattcgctctccgagagcccatgcttatcgccgtcgcggtggacgttgaattcccatcttgactgctgagtgtcatttactccggtttcaccgcttgtgcgggttgttgagccctgatatacctgtgtcgtcgtgcttgcagggtctattggtgtatagggtccgctgccaccatggccaaaatatgacggccgtctgaagactaggagtgtaagaagtgtaagggataacgcggcgcctgcgccaaggaagcggagagttagagagtggctctttgagccgagcattgcttggttgaaatctgcaagtgcttgttgtacaaatatgcgtgttatgcgtggttgtttgtaggtgcccaaatggtatatgcaatgagtgcccagacttggtcgtaactgcagagttggtttggattacgatatcgagcacaattgtgcagccatctcagctctgcagtaatgatatccctaggattgatgagatatatcgtgagcctatggagtgatttcgcgatgctgtactctctttcgtggattggcttttgagagatagatggcgttaccatggcaacaatcaatctctacatattaaagctgacctccaactctgaacctcaccagacacttgacgttttccatacattttattttattgactacaccaacgataattagcaggccagatacccgccgttataggtaaacaggcactgtcgccgacggacaaaagtcagacttgagcgaactctatggctgggttttgttcttggatatgtacatgggattccattcggagtgctatataaggcagggcaggtgtattcgggggtactcaaagccaatcaataggtaggtaaggaagggaacaagagtgacatcgacaggtgaggtaacgaaaagggtacatagcaaccagaacttccaatgctaacagccacgaagacatagaatagactgcgtacagggtaacgaaggaagagtggc

SEQ ID NO: 2626 - DNA, 1409 bp, Emericella nidulans
atcagctgctagctagtatgtcaacgtatatattctcttgacattgtggtgcaggcgcaaataaaacgtggcctgacaatgagtggaaatctatgaccgaaagtcgtccatgctcttttcctttcttttcttttcttttctgttttgttttgtgatggggatccctgctagtgaatccagagacagagaagcgatgaatcgacgtggcgtgcacgaaacagtacaggatagagcgggactttttgaagcctcgagtttcgaggaaccccagaatgatcggcgatacctagctgaccgccttggaggcttagcagtccggttagcagcttcccacgtcatggtgcctgcctgttctccttgctagccgaagttagactggccacaaggtcgggtacatcagccgtgattcatacttggcttcccaatctctttcatctttcccatgtgatctcggggatgatttattgcattcattcccttctctcctcttcgtcccgaatgaaatggcttagcccacgcattctttaggtatccttcattgattcgttaaaacatgaggctattgttaaagtaagcaaatacaactcttggcctttgactccaccaacatggtcgcgtggtgaatcctagatcttaggaactaaccgtaacgcaggaacctgtctcgctctcttcggaagaacagtgtcgtgcttcgcctcccgccacataacgatttcctgccatcatgagcgaaagcgagcttcgtcagcggaagccggcggctcgtctgcgagacgaccctcagcctagtcaagatgctcaaccacgtctcaagcacggaatacccatgcaggtgctgcggtctttgcttcttgcaacttggttcaactgctgttgcgtcgttatccttatgacgcagctgatcggttgccccctgtacatcatcaacaaacactattattacgcctggatggcgtccacgaaacgatcttttgggctggtgataacttcccttaccgagtggggctgcccgacttatgtccgggtcagcggtgacgagagtatacgcggacaagttcgcatcgccgacgatggccgtctaaagacaacctttccagagcgccttgtcatgatatccaaccatcaggtctacaccgactggatctatctttggtggattgcttattcgaacatgatgcatggccacattttcatcatactcaaggagtccctaaaatacatacctatcattggccagggtatgacgttttacggcttcatcttcatggctcgtaaatggctgtctgacaagcccaggctccaacaccgcctagagaagctgaagacccagcacataggctctgattcaggcgccccgaagtatgaccctatgtggcttttgatatttccggaagggacaaacctct

SEQ ID NO: 2627 - DNA, 1582 bp, Emericella nidulans
  unsure (1)..(1582): unsure at all n locations
taaatgttagcgctttcaattcaggcagactaaaccacttctaagaagtaatatatcgagtgctaagataaaggaatcatggtgctacaccagccaagccagaaaagaactagatcgcattttcgacctcgtctagtgctgttgcgtgagccagtataccatcgggccttaggatcaccatcgcaccccttccaggcgagatagtatatgcagcatgggccgattgatcttggtcaaagcagaaatacccgagtcttggaatactgaagaacctgtcgccatgggccacattttgggcgacgacagttatgaaccggatcatgtctctgggaaggcgagtgacgagtgcacccagcgcttctactactattgctagatttgcttgggtttcggacggctgcccggcaaggattaagacgtactattgaccgaaattcttggtcagattgaataaccggaccggcaggcgcgagcctggggggatacaccaggccgtctggagctctccaaccagcggatgtcataccggtagtcgagggccgattaatcatgttttcgttgtagtgaattccgagcccaattgagaactggatcgtctcgttgaaaagctttgtgaagagctcgtttgcggccgtgtaccgtcctttatacgaatctgggatctggccagatatcacagcggagaaggctttgtcgagctcaataaggcggtgcgcggctgggcggcattcactgtcgtaggtttctaggacaccttttggtgtaccagccattgatcgtaccaccgagcttccaggccagattgactgcgtcgtgcacgccggtgttcatgccctgggcggctcccgaggagtgagtgtggcacgcgtcgccgcccaggacgactccattgttactgatgtaggtatcggcaacatgttggttgatactgtatactgttagatcatttgatggtctagtcttttttcaagactgacctgtacaacgtccaccattggatactctcgaggtccagggtaagatggttccattgacttgacggcttcctgtttcgcgtcctcctcggtaagccggttaccgtatttagccagcatctctgtgtcatggtgaattcgatgcgcttaacgccatgatctagttgcacccagaggacgttgccgtggtgcttggactcaatggaagcaaagcctagatcagcatccggcatgttcgtcctgaaccttccatcagttcgcacccaccggtggtggtacgctctccctcaatgggaacgttggccagacgtcgaatcagcgactgacctccatctgcaccgatgatgtatttactgagagagagattagttagtacctccagttttgatatacctgaggccttaccatttcaccaccagaagctgatccgtcttcgaattgcgtacgtgcgaggtcactttatactcatnctcactctcgtggtcaagcgagaatgactctagcttccagccaatgtagggttcaacacctaatttctggtaagactgtccaatgacctccttcgagtatttttgacgatgttgaggcaattcccagtaagtcccgtc

SEQ ID NO: 2628 - DNA, 655 bp, Emericella nidulans
caagaaatcatctatgggcagattcaaaacgtacgccagacggttgcctcccaggctaaccaactgaaggatctagcggaggagcgcacctaccatgctaccggtgtggtgaaacagtatgttggagactacagcaacaaagcccaggaatatatcggccgtcgttccgcctctcccgaggtcgccaaaggccctgctgcagggcctgtagtcaagagggaacccgagcccgaggctgtcgtcaagacgtctgatttccctgaagcacctaaggttgagccggtggcgcaatcaatcgagactcaatcagagaaggagcctctcctggctatttaaatgagtctgcacgactcctgcggtcctaatctcgcctggtttcacggattagacgggttgcgacgcaggaccaaacccagctatctggcttcaacgtccaggaaaaattgagacccagttttgtgcactaaagcagtcgtaaatctgcttctttgacatgaaagggcctcagatggcttggcctgtacgatgacgagttggtacgattttgaagtcttcttctagcctttttactttcgtcttcctgtcgcacgtattagttctatctacctgcgcttgctgctctgtttctcttatactcattatttccgcaatagca

SEQ ID NO: 2629 - DNA, 712 bp, Emericella nidulans
ttttcctttttctacttgactgtcactattgacaacgcggataaaagtgcaacgagcccggagtgtgttgccgcttttaagggtgggaagtcgttgcaacatcgaagccaacccataccatccgctcttcatcgccaggaataacaattatgtttttggggtatatatctcagtgggtgaacatgccattgtgtatctgcttcatgctctctgttgctttgtgataacaggcctcagaatcccattctgggcaccgtgcccagagaaaagtaccccccccttccactgccctcatttcctgcccctcccctcccctcccccatctcgtcccccttccggtctcgaccagtcaacctacgcgaccgcaatccaaactccctcagctggcgctactgccaccaccatgaagaaggcgggcagggcaattaactcagagccctagctgctgccacgaaacaacgccgcttgacacttgtctattcgtatgcctcccgtctttccaattgtagagatcgcgtacatatacggcaatctggcacagacatctgtccggctcattcgtacatttgcgcttgatttccatttggaaccgattcaccggggatgatcgaggatcgccatacgcctacggtgaccgatgttctgctgaactgtagtcagacgggcccttagcaagttcttgtttcgggaaacactgtacgctgtagggtgt

SEQ ID NO: 2630 - DNA, 638 bp, Emericella nidulans
caaccagagctggtcccgctgagatgttacggccattcaggctcaggccgctggtcagcatatccagggtatgaagatgtgctcgtacgacgacaccaactgctccatcatcactaccggtgcgaagaaggtccaggacgcctacttggagaaggacaagtgggtcgacggcattggtggtaaggtccggccgggtcctgtcaggattgttacctacctcgactacgacgaataaacgcaattacgtgtacaactgagcacgagcacgagtacacctatacgttgtatatacctaatctagtcagacgttcctacctaggtagttgggcgtggcggtcaatgtatacttaatcctaattgcacattcttcgctggccactggcctgttgataatttattttatgattcttcattctcctaatatagatgaggagagaagggggcagaaaagcacttgtgaatttctcagtggatcattgagcatcatccctgctgtttagggagcattcgctaggatgtgccgcggaatatatctcgagtgggatattcatgctcttggttctttacttctggtattttaaagaatgaacaacattcataaatattagaactgtggctaccgccttctgagctaatgg

SEQ ID NO: 2631 - DNA, 2367 bp, Emericella nidulans
  unsure (1)..(2367): unsure at all n locations
gcttctgatttctctaacctaggtctaggtattgtttctaagattgtcacctgtacggatcctatatacagcatagttatcagaaatgtacagatcacctgccgcgaggtcatacagcctagctgttttagcttcagcactcgcccggccgtatgccttctttacatatgaacaatctttcctagccccgcatggaaaagaggtggtcatccgtcttacagacgctgaacgactggtcttgggttggacgggtcagacagtccacagattcataaggtcattgtgcagccggaacactcatcaccgctaagaggatcaccatagccaagtattgaaagtttgtaaattctggctagttacgggttgaacgggtttgacatcaccactcagatcgatgccgatctagggctctcgatgctattgtctagactacataccccacgccttgatgacttgaaatagaccccttattcagagaaccgaacggatagggacctatattttcttcctcgttcccaagatagtgcctggtaatttgttgcctaaattctctacagtctccgatcccaacgctcaatcttggctgagattcaggaactctaaagccaatctatttcctaaacccccactgatccaaccagagctcgatccaagattcattgacggcaccaacggtcgtcaaataaggaatcttccctgtcgtcaaggtcgtatcgagcatcacattcggttggtccaggttactcgccaaaccctggtagaactccaataaggctgtggctgcggtcatatatgactccacggccttcgactcgccggagtcagtgccattgctcgttggcgtccaggcagctagccgctcggtccactcagcgagggtgtcgacgagttcaagcttcatggtggacgttccatttgctaaatggcgtgtaattgccgggatgagctctgggtatgaagagacggaggggttggtaaagtggtaatatgctgctcctttgttagtcttgggtcctgtttgctctgtatctagatcgtccaggtcgagtgcgagtgtgacgagggccgcggacagagagtcaacagggagccagtctacgtcgtcgaagtgtcctatggaattcggcaagacgcccatgacttcagacgcacgcaggagagtcgggaaccaatcgcgctcaggccatttaccgtccccatgaataggcccgcccacctggccgactcggcagactgcagaatgaacaccgcttgtagcaaccgcctggccgagcagtttgctcgcaagcatcttgctctgtccgtacccgccttgggtgtatttgatcaaatcaagcggtgcctccgggacaggcgtacccttatcccagccctggatggtagcgattgaggagagaaaaatgatgcgggcgttctgctgtgagtcataagctagctgaacgagattgacgataccggcaaactggggctcaaagagggcgagcgggaggttgaacgtgactggccattggcaatgaatcacttctgtgacggttgagacaaggtgtgtataggcttcttcgtggaggccgaggagaggctgtgagagatcgcccttgaagtggttgactactgtggctggattcgaggccggctctgagtcgggaactctgcggtttatacaggtaatttcagcgacatccgggcgttgcaggagagcttggaggatgaagccgccgacgaacccggtgctgcctgttagcaggacgtggtgggtgtctcttttggtgctgggtggtgctgattttgccggctgtggtagcgttgacgaatacctacttcgttagttactggatatgccaaggcacgaatagcttcatacttctcgaatagagcatcaagagttgctgatacatcctccgtagcgttacggcggatatagttcaccaatccactcgcagtcggattcatgtacactgcattgcgtaggaacaggacatctttctggtctggcaaagatcgagccaatgttgccgccagtatctgtacctgacgcgagtctaaaccacttgcgaagaagtcatcactgatgcctaggtctttgaccttcgtgaggtcgccgaccatagccgcgatactctctgngagggtttcatcagttgaaggatccagccgagcttggagtgcctgatctgggatctttgaggccgagctgtatagagcttcaatctcctttgcatacagtttgttgggctgctgcggttattgaactttagaatgcgaacaaggcttttcggttgctaaaggacccccgcggggtctgcccgattatgtcattgtgagcttccagatttgaggctgggggatcccatgtggaagtgcattacc

SEQ ID NO: 2632 - DNA, 1023 bp, Emericella nidulans
cctcagagcgtcactgaactctcttctggagcatgtgaatgtctcctacgagcgagcgccggtcgaagagtgagggatggattaggtgtgaagctgcgtgacggggtgtcctgaggtgagtttgatgacaacctctcccgcctaaatggaacggacgacgctacagagacggcatcatcgtcctgatcggccgaaaccagatggatgttgcctggaagggaggtgagtatagagtttattttctcatccatttgatccttgggccgaacgggctttttggatacggaggatgaccgagatttagttttgccagctaaagtcctcacggtgccaggttgtgtctttgatttgtaggcaccaatgctttcaagactgggatgagcagtcagctgctttttgagacgagctgtagtggcgctgttgagaggttcagccctggccgaggcagatttggacttttgacgtctttcagctggtgactgagacttcttaggcctagactcatcctcattgctggatccgttgtcgtaatttacgtcaattctgtcgtttataaaacgttgcagcggtagactgagcgttcgaccgtgcgcgaacgcatcccgaaggcaaggcttttgagactcccagtggagcaagtgatcttcgtgcaagtcgtggtcgtctttttggcgcgtagaagttgatggtctatacggcggcgtctcaaagatcgatgacgaagtccgtggctccggcatttctgggctcgacacaagtgaagggtaatcagacagggagccatcagatgtgttggacgtccgccgcgcacgagatttctgtttatctgataacttaatcggactatccaagggcttctttgcgcctttctcatcttgctcgggttcttcggactgctgtcgatcactaggcgccttgctattgccatagggcataaagagattgggaagagatgctaaatgatctgctgggggtgttgcgcaacgcgttgatgggtttgaagtatgagtccctggtgttatg

SEQ ID NO: 2633 - DNA, 1393 bp, Emericella nidulans
ctgagcggaggccgcctgtggatgaagagacggtcgcgagggactggtcgcggtcttcgttgctttctcgaccggatatcaaaatagctatcgtgattgccgcagatgacaaccttctgtggatgaggaagcttgcgcagccagtcgacagcggcttgaatctccttggcactgccgtcgttgcacaagtcccctgcgtggattaggaggtctccgtcaggcacatcggccaattctaacgtgtgagtatcggagatgcaaacaacccgaatcggacgggcgtctggaggaggcaatcgaggagggccgcgaagttgtgatagcaggtggtggagagggtagaggaacgcggcgagaggcgaggcgaagagatagtcgggaaaaggacggcgatggaatggagacgacatcgtaatcaactccaataatgcactgcgtactctggggtgttgtggttgaactgactcgaatcgctcagttcgtgtctccgagaagtagtgaagagtggagagtatcggttagagaagggaacggatgccatggcgctatggcagacaaacaccgcggcagatttacaccgcggcagatttaggcggtgagataaagcgaaatagtgcgtgtgatacgatagcaacagatcagataagcggcatcaccctatctctgaggcatcaagacagcctcgcaaggagcgaacaatttcaaaacggggaggaggtaggcataggcgagaagtcagatcaattgacacaatcatggacaccagtctcaattaaatgtaccccactgtcgcactgtcgcagtagggtggtattctcaaagggaacaaatataagcgaggtctgtccagttgctaaggttctggctagttgtacggagcatacttcatttcaagatatggtcgaactacgcaataaccatacgatggttcaagtagaaatgtgtaagaatggcctatcaatatgcacaagacataaaaataactctcccacagtctcgagtataaacaacgaacgccctttgatccaatcagggagttgacaaacgcgtactctgcatacactattgctgcttcttcatatccggtttcgcctggctttcaataattgaagctgccacctgggcagactcccgccaacccttctgccgcatccagaaccgctcctcagcaaccgtattatgcttcgaccaagcccgcgtgtcatcttcgagcgacttacgcgttaggtcggacagctccatggactcatccttcgccgtaacctcctcttcctcatcgctgctgcgcgcccctagagtggcctccaggtatcgcttgcggatcatgtactgttccgtcttctcgcggcggacattgtcggctcaaacttggcgatccctttagtagggttat

SEQ ID NO: 2634 - DNA, 1437 bp, Emericella nidulans
aaccttcgtgataggcttgaacccacgggtttcaagaagcgatttgagcgcaaatggcttcaaatacggcggtaatgatgaaaagtacacgacgcccgttttgttcttcttcggcggcttattttttagcttgtcgagcggcttctggttcttcttggccttcgctttttccacttcggcggtcacgtcaaggtactgggattcttggttcatgtaattgccatcatcgtctgagtcattctcatattcatcacgctgtccgcgcttcttttcacgtaggcgtacacctcccgcttctgtatcgctttcttctccctctgatccgcctgagctctcgtcctcggaggcgctttctatgccatcttctcgagattgtgtctttcttcgcttcacagtccgacctttactctcttcagcggcttcggagtcatatccggcatcgttgtcttcgtcgtcgctggttccgatgtccaagaattcgttgtgtttgcgggtcgtcattgtattacatggtatattttcgtaggtaaagtgggtgaattatcttggtaacacttcgattgttaaggttgttctagaattcgatgttgcaaacttgcgagacttaagatggctgcggagatcaactttttagaccgcggatggtccgtgcgtcttgcgttgatgccttgtaattcaggtagcacaactaactaaataactaactagttaacttataggcggacgctacgttgatgttcacataaactggtcatgagaatgctaacaatctgaaaatgcttatggaaggtcagcaatcttttgctcacagaatagaagtttaagatatactccttccgatcgtgcaatatcaattccattgagtttttaaagaaaagccacctcagctctttagctgacaaatgtcatcaaagtatctaatctttatattcgataaacttatctacagcggtcgtgccatagttcaactatgtatagaacgtaaatatgcacatgaagcgggtatgatgataagataccaacatcaggagacacccagcccgaaggacgccaaaccagatagcaaaaatgaagcagtctcgaagaggaagagagcaggtctaaatccctagtgaccatttgagccgttcataaacaaaaaaaccagtagccgtcatgggtatcatcttaagataaccaatcgtcaagcctataaagaacccgcgaaatcctctttccatcattattattcgcgctgtttccgccatgcccaaacggcggccatcaccaacgactccgccgacttgcattcgccggcgcaccacttccaaaggatatgaagatgtttgggaaacaaggccggcgattgctcctgacaataattctgcggcggcgtcagttgcagtttttgccgatccttcttatggcccgaggacgaagatcgagggatggtggtgt

SEQ ID NO: 2635 - DNA, 1046 bp, Emericella nidulans
gctttgggcccgaaatgtggtcgggaggggccgggccaaggtaccccccgtggggtttcccccccgaagggggcccccccgctttttgtttccccaaaagacccaaatttggctcattgggcctttgaaagatttctttaaggccctttggatcgcgcctaatgcctaaaaaccatcgaaaaaaggcaaagaggtgaatccaccggccgaacccctgttttttaagggttggtccaagactggaaaaacctgccccggccgtgaaaaaaggtggttccaagccttgccccaccagtagctttcccttcgctcatcgatcgggaagcatacatcggctgctatcgcttgtgcctgcgcctcctagcgggtatatccacttgctctctggtatacctagttcacgggcgaaggttgtcgtggtgatgatacaggcagcagccaggttgaccgtgttgaaagcattcatgagtaggggatctagtgtcctgttagagaaatcttcgtcttggggccggtactaacatggcgagcaaatcatgcggttgcgtttcgtcacgttcccgatcgactctgccgtctctggtttctgaccataggaccaagagaaagggagtttagcagcggtctgagcgaactcagcgtacagctccgctgactctttgtgattttctgatagagtctgcttattgtgcgctcggaaagctgcttcgtagaggggatatacttggattggggcccctaggaagtgtcggctacccaggtctaattctgtgagcttctgtcaaacttgagaaggcggcagtgctaaccctctggccgttctcgatcccagattgaactgtgatcatcaagcttagtccagtgcgatggagggaatttctccgcttttttaaaggcctccactgttgccgttagcatggccatccgctgccatatcacctaggaaaacaaacatgaagccaacgcctcggcaccagtcacgactgccactttactcctcttatatgcgactcgtcgcgcacgttcatcaaagagcgtaccaggtg

SEQ ID NO: 2636 - DNA, 1125 bp, Emericella nidulans
  unsure (1)..(1125): unsure at all n locations
cttctccgccacaggtacatagctcccgttgcgaacctcccatagcagccccggtccaacaggtttccaaccaagctgctcaacagcccttcggttcgacgcacggtttctgatgctaatgaatccagcaaggaacgggccccagcgagcgactgcctcatcaggagtaatagagcgagcgggtactcctacgagctcgctgatcgcagtcgccatggccctgtatgtcgtggttgtgtgcccagtaccattgaagacgtctccgggctttgcgtgcttggcggcaagaaggtacagtttggcagcgtcatcgacgtatgtatccgagaagcagtactcgccatcgccaatgtacacggattcgccggatctgatcgctagcttgatcaattgcgcggcgaagccggttgtactaccaggaccgtagacgtactgcgggagccgtatggagacaacgcgcacgctcttgtctacaaacgaaagcgcatgcctttcggcgccgtcacggttggtaagaaggtggtctgctaacggggcatcctcgtcggtctcgcctccattgggatcgggcgcgacgttggttgtcccgttcgaaacgacaagaggcttgccggatccttcaaggcctttggcatgggcggtcacagcggcaatgtcagtgttaactagctcctggtacggcttggtaaaatcgtgatcgaacgcaaggtgcaggacgatgtcggcgtttctgctctcttctgtgagaaggtctgcattcttgaggtcaccgcggacgggagtcgagcccagcgactcgaacagcgcatcgccttcttcacgtcgtgagagaccgcgcacgctgtacccttctttgacggcgaactctgtgaccttgcggccaataaagccagttgcgccggtgacaaagaccttttgtgacatggtgagaacgagtcaggctctaaggcgaggaataagatacagagtgatagcttgcaatggagagacccaaacaaagccctgagagaagatagggatggagtttatgaccgcaagacgattgtgttgcacgacagcccaaaaaggcggcagtacatgcttcgtggagctacccgacngagattacggactatttcatacaca

SEQ ID NO: 2637 - DNA, 1868 bp, Emericella nidulans
aagcatgtagataggaacaaacgcagcggcacggcggcggctgtgcaggaacacaggatcaggaccgtgcgtgagccaaagaattcgacaggaataatgcgacgatcaatggaggtgaggacaagaaagacctgctgcaggccgaggatgatgaacaggacaccagatgccacaaagcagccaatgacttgccccgagttccatgggtaggtgactccgccccacgagatggcgaggacaaaggtagtcaaggctcccatctgcaagatagccccaacataatccagttcccgagagcgctctttaagtgaaacgcccggccgaggatccttagtcgggagcaggaacaggtagaccggggcgcagacagccccaattagcaagttgatgtagaaggcccagcgccagccgactgatgactggctgaatccgcctccgacaacgggacccaggacaataccaattccccaggttaggccagttccgccgacatatagcggccgctccgacagggtcgtcgtcatggcaagcaaggtcatgactccaacatagaggccggcaccagccactccacacaaggcacggcccacgatcattacattcatgctcggcgctgctccgcaaatggcggatccaatttcaaagactgcgacgttgaagaggtatgtccattttacattgaaatggccgtagatctttccccagatcaggtttgtagcggtagccccgagtaggaaggcaacgctgagccaggtcaatttttcgagctctccgagggattcgataatgacgggctgaatgtcagcgacgacggtgttatcgagggcgtagaagaaaatcgaggaccagatgcagaagaccgagagccaccatttccatccgtcgatgtcgcgcggaggagcctcaggttcggggacagtgccctgcttctcgttttcaggaatgggattgtagttggtcaaagagtcgctgctctcgacagccttgttgggcgccctgtcttcagtgtagtcgtacatggcgtagtatacaggacggtcaatggcgccaattgtgtagttcgaattataggaccgcaaggctctggtcttacacaaacagcgacatatggtgtctcttcagcatttgtcaggattaataaaagaaaccataaagcaaaacaactgatttttaatgaggcttcgttcgcattctctggtggagacagaaaatcatcgaagccctacctagatagagatgatcgtcggcgttgcccgattcggacagctttcggtatcttcattaccccttcaggattagcgtgcggaatattcatttccctttcgggtcagccttagggagtgcctaaacccacgagcccatagcattacgctaaggaaatcgttctatgtaaacaccctagcgtatcccaaactactgtaaaatgcaataaaggtctgtactaagagcaaggatgctgaattctgcctaatcaatcagttaccattatatctatgccttcttcgtggcaaatactatggtcaaaggagcctcaattcgcacctttccacccccgagtgccatctccggatcattccagagatgctggatctcattcccggggactaccggcacccatgttgcgaggtatcccttgaaccacgtcacatcctgctcgtcagcccaatcgtcgtcgccttccacccatacgacctcctccgatttcttaacccgactttctttgccgcgagaatcaagctgataactctcgatgctgccctgcgcatttacccgcccccactcatgctgaggggattcgagacagtccagcgccgtatttacgattgagactgcgtggtccagcaacgggcctgttgcgcgcttcgagt

SEQ ID NO: 2638 - DNA, 4502 bp, Emericella nidulans
gtggcataaatttcctacatagggaagaagaaaatagggccccaataccccaaacggatattgtgaaactttctttggaaaagtattaaagcaacagtgggcatttttttgacattcgttattgaacttaaccatcccaacaaagcacgtaaaagtaaggcaccgctaatccatgggggatttcgggaacgggcaataccttgtattggtttttatttccttgacaagaattgacctccggtcccgggcttgacaattgagggccagggcgactcataaagcattgcccgatcacccggtttttgaagaaacaaaacccactttgaattttaagtcatccatccgttagggccttttggcatccctaacagtatgcgtcagcttcgccagtcaaaaccaggtctatcttcaattctatagacctctcccaccgtgtttaccatgtcagtcatgagtggaccagccgaacctattccctcaccagctcaagaagttggtccagtctatcggtcagacaggggaaagcctacagcaacagtatcgaaaagcatatcacatgaaaatgtccatgtccttccccagactccgcaattgatagcacttttaacgtaggtcgatgcgcacatgcgaaaccgatttttgtctccactgacagtcttccagtatgattagagaccagaatacaggtcgcgctgatttcatcttctattcaaaccggataatccgcctcttagtagaagaaggactcaatcatcttccggttgttgaaaactccgtcactactcctgttggtcggtcatatcttggcgttaagtttgaggggaaaatttgcggcgtttcaatcatgcgagcaggagaggctatggaacagggattgagagattgttgtcgctctgtccgaataggaaagatcctcatccaaagggacgaagaaacttgcatgccgaaactcttctacgaaaaactacctactgacatttcaaatcgatgggtccttcttctcgatccaatgttcgcgacaggtgcgtgtcattcttcggcaccgcggtatgaaacataactaaaggaaacagggggatctgcaacgctcgctgttgagactctaaaggccaaaggtgtgcctgaggaacgcatacttttccttaacctcattgcaagtccttcgggtgttgcagatttcgcgcaacggtttcccaagctcagggttgtgaccgcctttatcgaccaaggtctggatgaaaagaagtaagcgcccagtaatgacagtgaagatcgccccaatgctgagatttttcaataggtatataattcctggcctcggggactttggcgaccgctactatactctgtagtactagtctcatagaagtacgaggttccctaggcatactgtatgaactgaatctgtttaaacagcaagaaccaacacttatgcagcacagctgtgcggccaggtgtaatcgtcagggcatcgtacctaggcgaaatctgatatataaggcgggaattcatgaaatcttcgcattttagagagggatgtcctatgtgcagtaatcccatcagtcctcccccaagtcgctggcaggctctgcgacgccaatgccgcggccttccggtgaataggtccgaggactgggacgtgtggcatattcatcggcttcatatttactagctgtgtccttggcaacagcatcacaagcatcaacccagtcggagtatacatcgacagcagcggaaagatctgcaaatagaaagtggttagttggtgagaggttgtagaagagcccaatgcctacagttgatgccagtttggaatctttgtccgcaaaccttgcaggacaaatgacccaagcccagctttttgtctaacttcaccacaatcgagttctcgtgattgcaaaaaaggcatgcaaacgtgctcggaagaggctctttctgctccttgagattagcatcgatcaagtagaagttacttcgttatacctttttgggctgctggggttggcggcttgacttcttgcgtttgccctgtgatttacatgtcaacataacgaacgccacgcgtccaacattatccaactcaggtccacatttggtgattaaattaaacataccattctcaaaatatgcaaataagagatggaagtcaaaacttaatgatctggtgtcaaaaggatatctgaccggagccggcaagttagtctttccttgagcggtgcacacgtttcaaacaatgcaaacttttagccgtaccagagtaccaagaacctaaataaactggtgcttcatgaaagttggggtgggctctagacataaatcttcgcatgcggagcctccgccccactagtttacatctaggaagcctgccagtgccgcagtactctataattctcgagattattctgagtaatcactcttaagcaaagagtatactaatgcacctgtgtatgatcgctccaattacagagaatatgacttccgaacaaaagcctcctgaattcgtggatgcatggctcaatccccgttgaacagcttggccctaggaactgaataataatgtaaaacatttgaaactgaagcagaaagcctgctccacgataagcagggagcaagaaataccggaggtattttgggtagcctgtattagagtgcaacacacctagggaagtggcaaggaaggccagaagtattacatttgttgctaatcaacagtttgctcggagtgtccataaactgagcatgtcacaagtagtcaatttttgaaaggcgaaatcactgctgctgacaggccaaggctcataagccatgagagtcaaacgcgcgagtagacataccatacttcgcaaggttagcaagggcccgagaatgatctcaaaagcggtgggtggggacaaatcacgtgacagatttatcttcatccaatcaaaaggacttaggtttgtgggtaatatattacgtaatacacttatagggccagagtctcgcttaatggaacttttctgtgggatttcgttcacaacttcttgtctgtcgaaaccggggcaagcagcacgagtcgacccgaccactcccaccgaattgcgttgtgtcaacaactcgtctgtcttcgattattgaaagataggcccgagtcgcaattatggctgttggaaagtacgacatttttaaacccagattgcggccaccgtgcaaacatctgagcctattgctaatggacggctaggaacaagcgcttgtcgaagggcaagaagggtatcaagaagaggactgttgatcccttcaccaggaaggatgaatactctgtgaaggtaggcgcccatagggtaaccagatctggtaccttgctgactagaaataggctccctctaccttcgcgaaccgagagtgagttgaataccgactatcgtcttggacaacttcgttttttgagaggtggactgactgaaatgtgtgaagcgtcgggaaaaccctggttaaccgcaccagtggtttgaagaacgccaatgattcattgaagggtcgtatctttgaagtctctctcgcagatctacagggcgatgaggaccatgccttccgcaaggtcaagctccgcgtcgacgagatccaaggaaagaactgtctcaccaacttccacggtctggacttcaccaccgacaagctgcgttctcttgtacgcaagtggcagtcgctgatcgaggccaacgtgaccgtgaagactaccgatgattatctcctacgcctttttgccatcgctttcacgaagagacgccccaaccagatcaagaagactacatacgctcgttcttcccagattcgtgccatcaggaagaagatgaccgagatcatgcagcgggaggcctctagctgctctcttgcccagctgacgtcaaagctgatcccggaggttatcggccgtgagattgaaaaggccacgcaggggatctaccccctccagcatgtgggtatttgttggaagatttgcggtattgtcactaatcaatgtatcaggtccacatccgcaaggtcaagctccttaaatctccgaagtttgatctcggtgccctgctcaacctgcacggcgagtcaacgaccgacgacaagggccagaaggtggagagggagttcaaagagcaggttttggagagtgtttagagtccaattgtcgcctagccctataattgtggctgacttcaaaatccgactctaatgagttgtctatactgttgcggtgtgagataagcaaaaaaacgggatagtgctgtaaccgccaatgatactttctccaagtccttgactcgctgtcgtatgactttcctacctggaatgcccttgaggaagtgctcaatttaagtgtcagtaaagctcttcaaaggtgtagctagtctctagccatgagaaccctctgaacaatctttaattaaaaagtgcgcatgaccttgaataccgaggcaatttgtagcatataaagctggtgttatgtgtattgccaggagcgtccaata

SEQ ID NO: 2639 - DNA, 2012 bp, Emericella nidulans
gtattcggttgaccatttcgttgaggcagatctcgccggtgacttccaacctacggcgatcatcttcctcgacacctgagcggttgcggcggaggacgattaggttaccctctgcatcactctccagatatgtgtctggtgcgacggacgtcacgcctgtggcccagactgtttggaagtgccgggccacctcgaccagtttatcaggtgcaccgttttctccttcgtggtattccacaacgcagacgctcttcatgagatctgcaatggctatcacgttgcgcgtgactgtaatgtcgacaggcgctgtcgaagttctgtaactggcgagcctctgaagttgcagtccgcccgatcttggtaccacttggaagactacaacctggaaactggtcagcttatgcgggaccaatactataagaaccagcgtaccgtcttgacaagcgcagcaacaatcttatctcccatcactgccagggcgcggcatgctcctttcaccctttcttgagcaaccttggcgagctttctaccgttgtctacttcgaaaacgcggatatatccgagagtagagtctccatcatcctcgcccaggtatgcacttccaacaacgaaccgatcctttgcctccccgtctttgctttccggagcttcagctcgaattacacattccacaatctcttctccttcaagatcgaaagcatctaggcgtctgaatagaatttcgtctgccagtacaaactgactcttgacaatctcttccccactgaccaacttgcgctcgattgtgcccataccaaaagccttttccgagggagagtatgcgacgcgtctcacagtagctttgatcggaagagtctggatctgtgtagtccgttccttatcgaccaggccgatcttcagctcctgcgctgtagccaccgcaattgactctggataggcttccgagttgaaatgacatattcgtgatgctccttctgaattgacagccgaatatatgatgcggccttcggatccataaattagactaggattttcacatgtggcgaagacattggagaggccgttgcccctgggtaactttttgaatgttggctgttctgagccaaggacaagcttgttcatgcccgatagggaatggtcttggtcgttatagtcatacgttatgacgcttccatcagccattgaaatgaagagtgtgggtgcattctccgccagtacactggccacgagaactgagcgcgggaatgcctcaccagcaggacccagcgatgtcgagctgatgtgggacagatcctgcagcttcagcactgagactttggccaattgagggaatccaacaatacaaacatcagtcggagttgtcggtagtgtaacgccagaaatttggttgtccgcgccaaagtctttctccgagacgactcgagcctctgactgaatatccaacacagtcacatgtttgccgcccgcgacaagtactatcgtgtcgtcgttagcagaagccgctgtgatgattaattgattttttggtgtccattcaaagatagtcattccgcattcaatatctgcaataagaactctctgctcagtaacctgcagtatccgactgcccggtagattcgcggcaagcaaggtgttctctgagaggcttagtcccaggaagctttcgagttcttctgcctccccgtcgggactgaaacgaaaaactcgcgtttcattcacgaatgtgacaagaagtgtatccaaaaagtcacctcttgacccgacttgcagaccccacaggtccgtaatatgttccatatcgcccaagacacccaactccttcaatccgacaccactacgtacactcctaagggttccatcatcgaaagctccagagccagtgacgattcgagcttgcccgatgaaattcgtgcatttggtttcactgtaccgttccgagtccattatcgtgaatctaaaccgcgcatgttgataagtctgataacttaaacgatgccacgatcgatacctgc

SEQ ID NO: 2640 - DNA, 1893 bp, Emericella nidulans
gccctcccacccacctatcttgtccccaggtatgggatacgcaggatattccgtaccccagcgcctggccgcctacgaggagatgtggcgcagagaagaaagtgagctttggcactggctggaagacagggtaggtttagatgggattgcagttccaacagtgaaccgccagtccgagacccgcgcacctagtcgccggtctcagggtgagcgggagctgaaagcctcgctaagcgaagagacgctatcagaccgggagatggatcacgccattcgcagcacgcgggagagactggatacgttggagcggatattgcataaacgaaggtcgcaatccactaaggacaccgagtcttcccgcggggaactctagcctgccctcatgcacagaggccatcttttcaccacatacattcaaacggcataagctgcatgccacatcactctctctatttttcaatttcctttactgtattttgtcagtccgtctgatggaactgatcttccaatcgtttttgtttgttttgtcttttgtccaacagcgatctgtgactatgcacaaatgttgagcgagatactttccttatctatttctaacaagtgtcctatgacatacttgctgttccccatctgttgttatcctacgttttcaggattgcggagttcctattcgtcttatataactagggctccatgtatatatgtactctgcaaatacggaagacggaggtcaatcagcctctctggattcttgcacgccttgaaagtgagagctgcccgaatacacctagtttttcgactacgtgattgctaagtctcttatccatcctatattcttgagggtgaagcgagtctcctccctttcattaaaccgtggtagtttgtcctcttcagcaaaatatactttagtccaaacaagatcattggccaatctttaacttttcttagagaatagtgaagacatgtctttgcgcgtgagacagtacaatgcgaacacctcctcgcctacctactgcgcgcccgttccccagcagtcctatttaatctgcaccaagccataagtcgcgaaggcagcgggtccgaggacgtgctgagcatcgccttccatgacccaggcgagtatagaacacttctattatgtccttagctccatcgtgaggggctgcagtctatgggcgaactttatgctgggtgatcctgtaagtggtggtggcagactgatgtgcctaggtgcccaagcacgggctctggggctgaggattcggctggaggatgttgacgagttgatggcctactgatggctgatgtctgcccgggtggactcgctggacaggagaaaacatagaatacctggtataaaggtgggtggtgaggagattggacccctgcctaacccctccaatcctgggccatctaaccggtatttcccggaggccccctttccgaatgctttggcgccacatggcgtgaggataaattttaaactcctagtataagaagtcctttgaagggcaaaaaccaaaaacctggcccaagggaataatggtttttaaccacaaaattgcgtcctttaataaccctttaatttccccttatggccctattcccccccctttggggtaaccccgggtctcgtcttggtgcatctcccccttggcgaacattatcttatcctctttttgctggggttattctaaattgttctcaactggcgtttcaacccctcagtcccattaatatctattcttttttttatctaacttatactcatcttccaagtttttttttgttactctatcttccaatattattttgttatgtctttttcttcatattttattacatcttttttccttgtttttttcatattctattcttttttcttctcaccta

SEQ ID NO: 2641 - DNA, 2915 bp, Emericella nidulans
aacacccggcaactgcaacatttggaacttagttactagtatgtatgatcgagccttgtagcctttgcgtaggaagctagcgattgcataggctcagatgaaaactgcgctactgttgccgccgaatatggcatcagcctggagcaatttcatgattgatatgtcatttgctcaatccatataagaggtgtttaagggagaaacagaaatcccgctgtttcggacgactgcgtgactgggttctaaatgtcggcatcgcaaagagatcattaggtatgcgtaatgaatactcaatgagcagggccaagtggatggctgagcctgcgggtcatcttactagtggtaaaatacgttatatatccgggctccgctgtctctaaatgccgctgtttccttgtgacctttcctgactctctatcgtaattttacatcatgccagatcttgccgatttgcctgctgaactcctagacgagatcctctttctcgcctttggcacaaccccaaggtacaacaatcgatatgatgaaggagtccttgatatcaaaggcctaagtcgtctccttctcgttaaccgaaaacaccaccaagcatttctgccacgggtctactcccactggacctacattgggacgctacacagctatagtggactctggaagtttctccgcactataattgaaaatccttcactcgcattaattgtcgaggtattaaacattgggaattggggtgtctgcccttcataccttgataggaaccacgagctccaggaccaggatgagcaggtgcaatttgcactcaacgacaaggagaccgtgaaaactgcgattcggcgtgcaggattgcaaggagatattgaatcccagatttataatgccatctttgctgacggctgtgaatatcagagccgctaccggcggcctttggtggcacttctcctgacctgcctcccttccatatcaaaggtatatgcgcatatcccaacatcagtcccattcttgggagctgttttgagaacagcaatggccagcaacaggccgactctggtgtacagtcgacctgactacccagcctggaggaattcatgttctcagtgaagtccctgggtatcatgatagggaccccaacccgttggatggctatattgatgacccttcgctaaaactggacaatatatggcccgtcttctatctcgaccgtcttcatatagtccgtctgtatgatttcgacccagaaggtttcagcaggctggtccagcagaaaatccagagtaatacttatggatacgagtgccatatcgaacacctccacatttccacataaaggacatctaactgcagagatgaagacgtgattgcactgttgactctcccagcagccctaaaaagtctttcattcccttgggacaatgacaaggccaaggccaaggaaaatgtctggcagaccttcaacaatgaattttgggcggctattttgaaatataagagaaccttggaatatctggatgtcttccatgacttccctccagaacgacgtaaataccgactggcagactattttggccctcttaccgaatttacacaattgcgctatctctcatcctggctgagatgctcattggcggctatactgaggtcagtagctccacttcggctaaaggaagcactgctagctagtattgaatccctggtctttgctgcggaggatgctggaaggacaattactgaccttccacgccaggtcgaggaagtggtgtctgattttcctcacctgaagacccttgagcttaagatggtgggctgtaagtggctgtcgaccaccaagacccacgccagtcaaatatcaggtgcccaaagaagcgtgctttcgcaataacactcaattcagtatccaaggcatctgcaccctcacaatcaatctgcaatactgtcctttgcctcagggtgcgcggtgcctcggtcgatggaaggaagcatacagcatgcgaattgatgctggcttcaggcaggagacaatgtatcaacgagctgcgcgcaaggcagcagggcggcaggagacttcatcgcccgaaccacctcaaaggcagtaccgtccgctcaagacacatgtgctcccatttcaggatcacggcaaaagtccatcgttcatggtttctgagagcgaggaacacagcttacttccccctctggtaaacattaatatctacattacccatcctgatggccccttacttcagatggagctggaagatgatctctaagcaatgtacgcccagattgccgccgaaggttttgatgacaaccactggcgactcgatgtgtactttctgtcaaatgcgacaaatgagggtcgctttgcacactatcaagctgaaaaggctgtccgtgggattctaaagacatgcgtgatgaagcagaaatcagactggatacaggtctcccaccaccgaccaccccacgactccctgggatgattgaaatatacgatgatgactaccatcctgaccgcagctggagggacggtgcgctgcacatgtgtcatatctgctacggaccaggttttgaacttggacagcctcttgatgagagttggtatggcatcgaccctgatccggatcagtctttgagctatttgatctgggagcactctcgttgggatggctggcaaggcactcttggggtatatcagcgtgctacagatagagagtggatcacttggtgaggctctcttatcatgggtctggtatccttcaggctgtgatgacactatctgttctcgaagttggcccgattcacagtacctacctttcaagcaacttaaacacactccaatggtgtttcttcccctgatatagccatgtattgtttatgcttcttttgtggtccttattgcgctgcccgctggttcaaccata

SEQ ID NO: 2642 - DNA, 1797 bp, Emericella nidulans
catatgtgtttagtaaacacatattattatattaataaagagaaaacacttttaaataattaaaaaaggggtcaatttacaccccttaatcaaatttaattatgaaagggtaaaatttggaacagtatttcctcaggcaaaaggggttgttaacacggggtaacacaccatgtaagggctggcagtgttattatttcaggtttaaaacaggtcagggcccctttccacatcgccgagtattataagtttacccctcgtttttccaatggctgcatttttagtataggccagttccctagggctccaccgtttgctattaagcagtaaggtttttccgcaattaagccactctgaatgaaggccgccagtccccacaagggagtttatttgcatggggccgtgggctcggttggcacacggccatcgagacccaaccgtccgactggactcgtaagctgggctgctatgcagcggaagcctgagaccgtttggcaagcttgttagtacaagtattgtcctctgattagtacagtacctcaccagttgaggttactcgaagtcatacctaccgaggcagtgctacactggatgatctaggacactcttatcttttatcaatcgctctactttaccaagtacaacgccttccaggagccgatgtcccgtccatgattctttttcgaaaggactctcaaaactctcacaggcacaaggtccaatgcatgcgtcacatccggttacacgcccatcagagtggcactaataccggcacccctggcgttaagatcgcaaggggaagactggtgacacactgcgcggtcagcacccgatatctgaagcccatctgcactctgtagtcacaaatgtgttttgccgtcggttgcttccatatctggcatctgctgagccgagccgagccaacatattttacgtatctagcctcttagaatcacccctggaggataacagccgattaggcattttgtccaccaataactattgacaccttcaaattttttaatcagtcctgttcacctgcctgagttttaaccagctactctgcgtaccaaacccgataaaagtcaacccttccgtaggatcgtcaattaccgggcgagcgctcgtgcaagccgtaggggccatgacgtcatatatgtgagcacacgaattagcgggagcaggggccattttccatttagtgaaccatggactgcgacgggcctcatttaacacctgaactcgccacagctgagcactcggcaacacactggttgcggcagttgtggtcttaagattcagacttggcttcttatctgcgtcaaagctaccacaacggagtacgggttcaggcacatgagaagtaactgagatagcccagatgtctgctgtactacgtacgaactcggtgactaagtgtttcaaagccctattccgtttcccatatgttcccttagcgatatggatggagacctaatagttcatggtctcgtcaagtgggctaaggttgactgtcatttgctggcgactcctgtgtccacagcgtgtttcaaagcaccgctgcactgggcagacatcagttcgatcctaattaccataagattagagtgcattacttgtttatcggagcattaaactacggtaatcgattacttggtaggccgatagactagtggggaataggtaggtatataatggctattccagctatgttctgagatcacttacctggaaacagcaacgtccgtgatgaaatggtgcgctgataagcctgttttatcttgaggttgcagtcaccat

SEQ ID NO: 2643 - DNA, 1270 bp, Emericella nidulans
agtgcttgttgtagtcggctttcaagagacatctcttgttccgggcatcggagcttgaattgtttggcttagctggaaagagtacggtctaaggcctgctatcaattgatatgtatgcaataattgtcgacgggtgaggtcctcatgaacggagaaaaggaagagcatttacccgagaggcggagattgaaactcttgtaatgacgctatacagaggcaaaaaggaagatacaagatcacaaaacttgaaggtgtatataaatcgaaatgcgatccgagatgcaaaagaagcgctgacacccttgagtcaggcagtagtgtgcctcaggtaaagtgctcaacaatgacaccggagaaaattttgtttgaacattattatacaaggcttagagcaatctgtgaaagtggctatcccctagcggctagagtccgggaatggctgtgcagctaagctttctgcgacggccgcaaaagaataccaacctcttggtatcaagtgcttgtacaaactgacaaccgctctcagaagcgaccgggtttggtctcgttgaatggagattggtgccatatccctccatccaggcagctcggcgacttcagcaacaggctcactatgaaccccggcaaaggtccagatcacgactgccgcgtgatgtaagcccgaaaaggaaagaagattgtattttgccttgtcggtaccggtgcgaaatctttcttggctcaggagggaccaaatctgacacacgtgtttgatggcttcaactgcccctgttccttttgcccactcctgaagtgtttgtagcttctttggttccagaggtttgttgtccatgaggatgtacgcggccgaatgaagatcagcaagaggcacacatagcctcaggtatgagatgtacaaaaggagtaagctgctcatcacactggtcctatcttggccgaacgattgtgtagtgcgagttgatgtgaagctttgctcccatctctgtagggtctgggtaatgcggcaacggtcgtttcgaagatcattcattcgacgataggtacgaccaagctggtcagtctgtaacgatgctgagattgaaagaccgttcggggaggaaggtagattctctttctgggcgacagtatgatccgactggccgatgagcgctgggaacatgcttcggtcgtggctgaatctccaaacatactcttgaaggccgaaaatcaggagctcatatccccttgggttcatgttaaggagggcctccccgcggtcgctcgcaactct

SEQ ID NO: 2644 - DNA, 2091 bp, Emericella nidulans
tcacgctgaaggaatgaagggcagaaagggcgtcgcgttgccgaaactgtatggagaaggcgctcggaggcatgggatcgcagctctgaactgaaatagtggcgtaattgacccgccccaagtctcttgcgagacatcatggctgcatggttgttacaagaaagacaagctactggacctcgaaatcccgccgttgatatcacgtgatatgaaggtctattcaagctgcgcgattaacgaccccaaagtaggtgctcttaacaaatatcggcatcatttccacgtggatcataaattgtgatgatagcaataaagttacatggcaagctcccatcgaaaaaacaacccgatacgccaggccatgctcacgaacccaactcgccaacgattctatcctccgtgccgtcgcataatctccagggtatctatcattgcgtttgtctcactttcgctcattgcgcgctccattcacagtctcgctgtagcctagtttccaccccgaccgcggccacgcccacggccgcgcccaccacgacctccccggtcgccccgtccaccatcgcgaggcccgcggttgcgattctgagactggttttgctgctgttccttaaccatatcgatgatttcttctggaattcgcagatatttgatctggaaagagcttcgtggttagattagatgatattctgcggcggcgcaaaacgtacgttgttcccgcggacatagacttcaggcagcttgaaaaaacggtctccctcggggctcgtttggacgacctctctgagtattaaattcatccagttgtcacagttggcaaggtggccgttcagagtttcgccgttcttgagctcgacgagcatcgggtggccttgagcggctgttagaagacctagggggagctatgcagcgcgcagttagtgaggtcctgcacgtacacagagctggcacttcggattagtgtttaccattctgactgttgagtgcagagcgttgtgggttgcgatgagggaagtagtaggtgtccgaaacgtggaatttccgttgtgaggttggaaattgagagaataacaatgtcaacgtggttataataacaattggaggctcaaagcaattccctcagctacttcgttgagtctgagatgtagcaagtgatgctgtgacatcggcggaattgacggaaaatcagataatcccttttccgatgtatatctggatgcagcatgagtaaatcgtcttttcaaagttcgcaaaatttatctaggctctccctgccaggacgccgaccatgttactcttaaacaacggtatctgttactgatattttcttctaccaagaagaatagaaaagtacgaattaacgtttgtcttgtcgagctagaataacggcaaatctcgatattgttacataacagctcagatttatttaaggagcttggttcgcgtgaatagcagcagtctgctaggttctaagcctttggccgctttgcagccgcagactcatcttcatcatcttcatcctccacggtgaatttccgcttcgtacgctggtctctattgttcgatgtttcagcttcttcttgctgggccctcaggcgctcctcgcgttcgttgaagaatccgaaaagctgctcgtatccatcctccacgttcgtgacagtatcctctagcgctttgtgacgttcgctcatctttagctggatcagcacgtctctagagcgtttgtagagacgctgtttggtaagcatgcgccaccagtagtatcggcgattattcggatcgtcgtctctgtatttcttgaccaggagccgtgccatattggcgccgccctttcgacgattcttaagcggaatctggccgagcaggaacatttcctggatgtgcgcgaactgagtcggttctatcttgtaggcagtgcggatctcgttcagggttttgaacggaaggaggtaggatgttggaacacggcttagtcttctttattaaatcactccgtggatggacccccatttggatataaaaatcccccaactccgggcgcaggatatggtagtaagaagagtcccgaagcacaaggagggattcattcggctc

SEQ ID NO: 2645 - DNA, 735 bp, Emericella nidulans
tgactcgctcatggctagatttccgagcgtctgacaatcacactggataatggtgtcatcccgactttgtggatgatcgcgtctaaatggccagatgattcggtccgcttacgagccatccgagaattgctctcatggggaagcacttgtaattctaatgtgggagcctcgttggccctggaaagttctagggcggatttacagccaaacaattagatcttttcttctctggctctcactgggcagtcctgtgatgaattgagccgagcatgttgcaaactggtcagcagtccgcgcagggtttctcaatagtcaaccggataaaggaacacacttcataaatcagcacgtgcttaaggactgcctgcttatacttggttcatagttatacggctgcaaggactggcagtctcgagccctagcttttcgctcaccctcggtcgtccatgtttcacaaagtagcctcaaatagggcagaagggtgagcacttgactttcccttatatatattcacctcactgaatcccgccttctccagaagagccacccattgttgctgtgttcgctcgtgagaagacataagctccatcaattgaaagtcaacaatggccgcgaatggtaatacatcgggaccgtcgtgaccgtcagaaacgtataatcgtgaataataagcaccgagtcttctgccatggcatcgcgaatgcgagaaagagcatcaatgcttgcttgtctggc

SEQ ID NO: 2646 - DNA, 1979 bp, Emericella nidulans
  unsure (1)..(1979): unsure at all n locations
taagcccgccggtggtgttcctcgtcctcgtcttcactaccgctgttgtctcctttttcttcattctcgccatctaagacttccggagggcttttttaatcttcggggtgttttcgaattctcaacctcttcttcctcattctccccattctccccattctcctccggctcctgcttcatcttcccttctttctctttcttcctatctacctgaccccctttcttatccttacccccgttcctgctccctttcttctctccttccctgcttacctctcccctcttcctcttcgcctctccagtattcgctacaaactgctttcctgcctttgacccttccagctttttctgttccgtcgcctttttctccctttcatctagctcttcccacgccttcttcggcaaatacctcttccgcgtcccgtcatcctgcttcgctgtgccagagccctctttcgtttgccattcttcgttggtccatttatcgagatgtttctgctcagacttcttctcgtctttggaggtcgtgtagtccccgccgcgtgctttgtattcagaggcggtcatttgggcctgtcaactacgattaaattggaataagaaaagaaagtttgaaatgcgtaacaaagtacctttcgcgcagaccattgacctggtttcccgcctttgtctccttgctggacttcattcttgacctgttcgcggagctcagggtctgtgtaattttttgcgttctggggcattttagattcgttcaattgattattgcgcacccggaatgatcttgaactgtgtgctacatcggactgaaattcatgctcctatttctgtcatcatgacgatctaccagatcgattgatctacccgtcaaatgacatcacgagtcctgaaccggtactccggaacacttaacctctatcacagccctaactcaactaaaatttactgctgtaggtagctagacccttctcaatagatcctgaatcatacctccaattctctctgagaccactgacccccgcggaatatcatgcccgccttcatgatcaaactccaccctgtcagcacaaaactccgctaactggatccctgctggccaccgtggatccttaccgtcgtaaacatgcactgtcgggatatctanttttgcccaagaagggaaagatgtgaaatcaagcccgaagaggtcattactggtgggcctgacagatggatcgtgaacgagagtgttggaggtaacgttgttatcccagagtcccgcgccacgctttataagcgatgtgttggatgcaaaggtcgagagtttcgttgcggtggtgttgagaagttggcctgtgattttgcttatagtctctgcctcttcggaaacaggtatgcccatatcttgaagcgcgtaaagggggataccgccgcaaatgaaaatcgctgctttaaatggcaggtctccgcgtataccattttgcccctgctcgctcaatctgtcataagagtgatacaatgccattgatgcgatcaatgaacatccctgcgagaaccccatgactgcatcgtacggcccatgcttctggatatattcagccacatatctgtgtgcagcgcgtaaaccagcaggcgttggttcccggaaccaggtgtaggttggcgagtcggggtaaatggctttaatccctggcgccggagaggaggggaaggggccggagatgaagtcgaaaacgtacgagtgggggagggttctccggaaggatgctgtgcgatgaggaggattagtgctgtataggagaattattatgaactgtgctcgactaaaggggttgcagtagatggaagaggcgaaagggaggtaccagtctgagacttgaatatgtgggcactcgtgccgtgcccgtgtaggcagagaatttttggcattgttcctcccctccggtaactttagttgcgggagaagaccactagggatccctttagtagggttaattgcg

SEQ ID NO: 2647 - DNA, 2756 bp, Emericella nidulans
  unsure (1)..(2756): unsure at all n locations
tctgaaatcgattcaactaaaccactttccgaaccttgtactatgctttatgtgctcgcgtatgctcccagcgcagactgtccgcctgtgtggataaacaagacattaacctgttccccatcttgacccctataagtagcgggactagctagtaaatctttctctatctccccttcggcaacccaatgcatcatacccctcgccactttcgccgtatacacaggatcaagtatgacttcttccttttctgccatcagagagagcatgtcattggtctttgcatctagcacaccatatctctctcccgcgaaccggtcatccaggactacatcgtccattgtaatatcagtctggggattcaatccgatcaatttccccgcgcctcgcgcaaagcgcaagatgcgttcttcatgatatctctttcgcatcgtcggggaggtaagaatccctataacacggcgctttctttctcctcgtgtttgctcgtgcggttgtgagttctccatcttctcgagtagtttgaagcccgcaatcagtccgccgactgtactcccactcccacatgcgacgaagatgtaatcgaaacgcggctgtttgataccgtaaccaccactaccacgatcattcggtgatcccagaatgtccttctcctgcgccgcaatttcaaacgcacaccttgcatatcccaacccccncagcggatgcaggctcgcaccagacgggatccaatagggaacctttccctctgctctgagattattcagaacctcctcgacaatatcatcttgtgtctttggggccacaggcttctcaaacatcctcacttctgcaccaagcaacttcacaatctggacatttcccgttctcaaaaaagctgctttgtccttcgcactggctaagccgccccccgtgcccttgtgcaggaggaccacagattctaggcctatcctcgaagccacggaggccacctggaccgtgtggttactctggattgcgccctctgtgacgagagttgtaacttttcctttcccgtgtattggtgtgggtacatcagccgcaatgccagcgccatatcttggactggaagataggatatctggcacgatgtactccaattttcggtacttgttccccgcacatgcgagcggggaagaatggtcctcgcgcttggcgtagagggagacgtggatgccctctgtgcgtgccccttgagaccgagtgctgcctggtgctgagtgtgttgttgatgctgaggctgaggctgaggctggggccggggcagaagctaaaccagacaggctttgcagggggtggattggcgaagagaacgggtagagcaggcttacccgtggaattgtggcgaagggatcaggcagattaagtctgggtgacatctcgcgtttgcttgcttctatgtatatctgcgaagttttactaccttatttactgactagataggtacaagtccatctgtagtgtgcgttagtcactatactccatttcaaaggacgaagtatattggagacggctaaatttctctttcatctgaggcaatcaacttactcaaaagaggccaggcgtggtagggctaagtgccagatatcatcccgaggtatcaatagtggggtgaattcgaaggcctgttgttggagcgggctcgctccttcccctttcggtaacgagcatagtaccatagggcggtctggaatgcggtgggctcacagggtccattttgacagatctatttccacctacttcgatcccatcatgatatgtgcctgttcccgatggcaatctggcgacttgaacctctgattgatgtatatgattacagctgcagcactagatacctagcttgactgtccagaaaatcgacatgaagagagtaactactcgaacaagacgcgcaatgaaaagagcaggaaagtgacaagctcgagtctatcgctataacatagccagagggatctagtttagcaagtatgcgagggcccaaatatcaatgaggttggcttcagacgatcaagagataagagaacactgagtttgaaaacaccgcttcgcaatgagtaaaatttccaacaactccggccatgtagatggtagtagtagaaagtacccagatacctaaatgtccagtccccaccggcgagatgcaatgcaaccatgatgcgatagatgaagtagttagagaagtagaagtcccccagcgtaaactgagttctcgtttatgatgtaatgcaatgtggggatgcaaaagcaaagtccagggccaatgcaaagatattagaaacattcccattcacaaaagacacaccaccgcgcgacacggtccgccaggactagtcctctccagggaccccgctcaccgatcttgatgaccgtttcccagacgctaccgtccgcggtacattcgcttggcgagtcggaggtctttgggctgctgatcatgtggtccgctttgcgggtgaggcgtagaatcttgccagagggtgattgtattgcgagcttggcaggcttttcccgacctgaattcgagcgggtagaggagatggccgaggtggaggccgagaactcgttggatactgttgaaacggttgacccccctgcagagctcgaaaccatgctgagcgcactcgcaggtcgggagaagactgacggagagatgcgcccgctgaagctattttcattgctagatgtttgaggtgtgggcgatgagggatgttggcggacggcgaatacgaatgtgttgttga

SEQ ID NO: 2648 - DNA, 2180 bp, Emericella nidulans
cgatggccagcaccgtcctcgacgaaaccattttcgacgatatggagaccctcaagtccggcgaagggaggttcttctccatattcttcagccttgatcgtcttggcttttccgataatgttgccgcggctgtcccagaactggcccttgtcgtcaagcttgctgccgagtctggaaagcttcttggggtcgccttccaccaactcaccaacgggcttgccggatgagtcaataatcttgccagctttattacaggacaggccttcgagggaagacagaggtgatagggcgttctcagcttcctcggacgtctctttagcaccttcagcttcctctttcgccgtctcctcagcgtcgtcactcatttctgcggtttcattctcggggttctctgtagtcttttcggtggtttccgtttttgcatcttccggaatctcgtccttcgccctttccatagtctccttcacctcgtcagtgagatccgcctggccgactgtctctccatcatcattcacaatcttgcccccttctttcacagttccgccaacagcttcctctccaccctcgacaaccttaccgacaacaccaccctcggggccggggatctcccctccttcctgaacagggagatccttcagcatattaagcggttttgaagcaatacttgggacacttttgaccgtctgggtaacctggtgtccaaggccaccggcgagcgatcctagtttcccaaacacgccacttccactgctacccgccgggccagatgcctgtgacccatcgtcacgttgctctagctcgggttctttctgctgggacgtgggggtctggggtgtaggctccgctgccaatgttcattctcttgccccttctcctgtacgaggggctcgggatcctgctgccgaaggtcattgttgacctccttaggttagaagacggtatcttgctcttggtttggggcagcgctagagccgatcaacttgcgctcggaggggctattggatctttgatctgacttggcaaggggggaccacattctgtaaagtttatcgagaatatgctcgataaattccaggatacaggtaggggtcagtataaattgctcagcgttgtcaatgtagggtaggtgataatggggtatcaagttttagtcaatataatagagggaaggttatgtttttctttttgttaaagcagaaacgacgggtcttatataccacgtctatacaaaaaccagtacatcagattcaaaacccccaagttgtatcttatgtcacaacgacatcacataacatccagctagttgatgagagctaaggctgctcgtagacccatcagctttagatctgggacatccttgcaagccacagacaccaggctgcagctgcatggtggcatggtgcactgcgggtggagtaagccgatcgcttgccggtacgataaagtaaagcaccgacggtccacctctcaggaaggaatggagatagtacccgagacctggaccagccgttgtacagttcaatccacgggttaagtgcgaggtacgtaggcatacccaaaatcggtaccattgtccgtggaccattttgtaaacttgtaaatgatgtacataaaccgtggatcgagggacaagtctgtatatattgcgtcaatgtgcaggggttctggaatatataatacgacattatattaatctacgaaatgctccgcaataatctatatcggccaagcccacgggcgagccactgcagtcggtagaaaagtgtactccacagtacattgcattagtttcgtcaaaatcactcagaatccatgaaatgggtactctgaagtccgtatgggtccatatgggtccatttttcgatcgatatacataatctgacagactggagtacagtagtggcactgagaccataacggctttccccactcccacgattagtgacatattagccgtccagtaccacagaaaagttgggggcagtgcgttttacacctttctaatctatgtacccaacaatgactggacaaggactgtggacttgtcactcatcgactaaaatgagatcatcccgccactgcacgctccaaattaagatacagctgataacaaggtagaggctagcttgaagtttgtagtatgtgctttgcggaaggttaggacgtgtgcattagatagt

SEQ ID NO: 2649 - DNA, 1098 bp, Emericella nidulans
acaaactcaatggcatctcaagccggtcttcgctgctcgctgcaatgccaagccagtcttcaaagacaactatgatgcgtttgtcgtcaagctgtctaagctgtacgatcttgttcgaactaaaggaaatcccatcaagtgggattccgcagctggcggctcgcagcagaactttgtccgccaaacaactaaatactgggttcacccggataacatcacagagctgaagttgatcatcctgaaggtatgttgcagtctttgctcgtgtaaagcctcatgctcagacgacatagcatcttcccgtcctggtcttcaacccgagcaaagagtttgaggaagaggactcggcgatctcgtccatttatttcgataaccccgaaacctgggagctgtatcaaggacgcctcaagaaaacggaaggagcagaagctatccgacttagatggtacggcggcatgaacagtgatcaaatcttcgttgaacggaaaactcaccgtgaggactggactggcgaaaaatcggtaaaagcacgcttctccatgaaggagaagaacgtgaacgactttctagctggtaaactgacggtggaaaaaatattcgagaagatgcggaaggagaagaagaagagcgaggctgagatagctgattacgaacaattggctcgtgagatccagtatcgggtaattacgcgcaagttggtgccggtcaccaggacgttctatcatcgaaccgcgtttcagcttccgggagacgctagagtccgcatctcgcttgacacagagctgaccatgatacgagaggataatctagatggccgtcggagagccggcaacaactggcgtaggatggatgttggagttgactggccattttcccagttgcccgccgaggatgttgagcgatttccatacgccgttttggaggtgaagctccagacgcaagctggccaggagccaccaaagtggattcgtgatctaacagcgagccatttggtggaggcggtgccaaaatacagcaaattcattcatgggactgcaaccctgttccctgatcgtatccatctgctgccattctggatgccgcaaatggatgttgata

SEQ ID NO: 2650 - DNA, 1098 bp, Emericella nidulans
cgctcatggggattcctcctatgcatttacagagtactgggtcgaagcgcacatcgagctcttgcggcagcacaaggggcggacgtggccgaccggcacacggccatcgcgccgtttccgctgcgaaacgtccacctgggcccggccatcaccgagttcaatatgcgcgagttcaaaagacaccatacgacgtgggcataccggctcgtccccggtaccaccaagatcagtttcgggcagaagacgagacagctgttcgcctcgtccaaagtcccaaaaatcggcctccgcatcagactctcgctgccccatacattgcaagtcggcaacgagcagaccatcccaaccactctacatatcgaccctgacctggactcaacgagcctcgccattcacggtatccaacaagagatcctcatcacagcggtccgggtcaaagtcaagccgacgacgaccgtgcaggccgagcggcacgacttctccaaatccaccgagagcgtgagtctcgttccgccgggcaacggcaaccggccactgcgcatggtagtgactcctggcggaaaggccagcgaaccgcttgccctgggcgagatcctggggatcaggctgccggcaggctgcctgtatccaaatctgatcacgtacaatatcgtccgctcgcatgaactgaaatgggaattggacggcgagatcgccgggagtgcattcaagctggggtcctggcacccagtgagggtcttacctgagccagacgtggagggccctccacggtacgccccttgaccgggccccggtcgcgatagcgggcgtaaactcaatgcccagagcagtaattgtagtggcaacggcagtcatcctggttactccgacaaggaggaggcgcttccgagttacggcgagttggctggccagacacgagcgttagtaacatgtgttagtgacggtgtggaagacaacgcggacgatgccgatccggagtaacggagaaaacctccgccttcgttgatgcctgggtatccaggcataaactcaggcatcagctcagtcgacggctctgtcgacgcattcacgatatttcgactgaatggagaccagaaa

SEQ ID NO: 2651 - DNA, 1285 bp, Emericella nidulans
tgcaacctagagaaggatccatcaactaatgcgaacctgccagactcaatcgtatcaggcgagcggtgtttggataacaaacttcagcatggacttgacgatgcgaggccgagccaaatctggaagttatcaatgtggaatccacccgtccagccgccttgcactttacaggtggatcctggctatggcgccatgcgcgcctagagattggacagcctgatagcctgacagggattgccctcctacgtcccaccaaacgcacgccggtacaacgctaatcgagactagctgactcgacgacattggcccatagtggcactgatcccggtagttagggcttccagcttcaagccgtaaaagccatagccggtaaacccgaatattgtattcaaaaagccatcggtctcccatgtggcactggaaactcctcaagccgtagttcagcgtttcagacaactttcaagatgcgtctcgccggggtcctcttctctttggcgcttcttcaccttgcctccggtgttccccatgggagccgtacaacgtgcagtaatccccctgtgcgcaaagaatggtaaacctgtgttatagcttctgcgtctggcagtgctaacacatccataggagacaactgagtgccgaagagaaggcagagtacattgcggccgtccaatgcttgactactctggatcccaagtctggtctcgatggtaccgccaatcgttttgatgatttccaagctgttcactcaaatcaaaccccaagtattcactgggtggtaaggcccctgcaggattattttactttttcttgccaagcacgctgatcactgttcactctcagggccactttgccctctggcatcgatactttgtcgcttcttacgagaagtcactgcgtgaggaatgtggatataccggtgcccagccgtgagttcccggttgctttggagtcagacgtagaaacgttggctgactgtgatattccctaggtactggaattggtcgcttgatgcctcgactaacctctcctcaaccgctatcttcgagacggagatctttgatccagataccggattcggcggaaatggagcgtgggttgagatcaccgatccagcagacaaccccttcaacctcactggccgtaccgcgcgtggctgcgtcaagactggccccttcacgccagacaagttccagcttcaccacagtggcggcggctgctcaagcgcgacttcatcccctggatcatgaacagcttcgcagcacagagcctcgtcgactgggtgcag

SEQ ID NO: 2652 - DNA, 4075 bp, Emericella nidulans
ttcttgcctgaatgcaaccttcaccagagatagtccacgaagcggaagccttgatatctgactggagactctcgatacacaccgtcacgcattcgaaaaacactaccaagacgcagaatccttcgatatggtcgcggtcgatagagcattccgatatgcgggcttgctgcatcttcatcgtcgggttctaggcaattcttccggctctgatgcggtgtcagaggctttggatggcctaatgcaatcagtggccgcgattcggtcgggctcggctgtcgaagcaggcgtactgtttcccatctttacggcgggatgtgagacccaggactctgagcgcagaactgagatcaaagaacgcttagaggttttagagggaactggaatgaagcaggtaagtcacagagctcttacactgctacctcttgctaatttggttctaagatacacaatgcccgtacactgatgcagaggtgctgggataccaagttgccttggatcgctttcgctcagggagagttccttgggtagtttgtcaaattgccgtgtagttatggctcaaacgggatatctggagacaatgggagattgaatttacctactggtagtgtcaaattattttttgccagtgtatgacaagatcaataaagctggtatgcatttgcagtgattaaaaaacatctttccagagtacataatatccttagacttatccaccgtatatgtctcttacatttgattggtcacctttagttaacctggcctttgtgttgcctcttctttgatcttccaaacttagctctgcgatggtcatgcagcaattcacacttatattcaccaatcaacatattttcagacccttaaactacttcgctctctttttcgctttctcttctccctatctctttctatctctctctaaataccttatcttttgctgctgcaggctgcggcacctggtcgactccatcatggccgagggctccctccagcactttcccaatggggaagtctgtaatgtctcagtccttcacggagattacaacgtctacgctgtcttcctcttctccctcctcactccatttcttctgtggctctgcgctttttcaatatttatccacactcatattctatccctcaattccccttcaccttctagacaacaacatcgtgactgtcttcgtcgcgctaaaggaaagtcagacaaggacgaaatgacacacaaccctctggcttactctgcagacctcctcgatggtggactagaagacattcagattaaatctctatcgcacctctatcagaatgtcgtgcagaatgagaaccaccctatgctggttagttctctggaggccccgatggacgggcttgcggataacctgaagatttctgccttggatcccaaggtgcgttctcttgcacaacaaaacttataacactgttcaatatacactgataatgtgatgctctcatttcagcgtacctcgcctatctttccacagtgccaccctccacccgcaccaccctcaaggaaaaaggcgaaaactgaacccatcaaacctgtcgagtggtatggggaaatatcctggtctctgaaaggaaccagtgtctttgacgacgcagaacaagagctggacgcttttatgaatcgcatcaacatgcttgactaccgcaagccctacaacgaactttgggttttccagtatggtcttcgctacatcccctccgtttccgacaaaaatgtgtaccgcaccattcgtatagatgaaatacctttggataaaactcccagtcagattctccctttcattgtaggtgaggtctacagcgctcgcctggcggatacataccgcatcaccggctacaacaccgcaatgattaccttcgtcaccgaagaagacgctgccaacttcctagctggatttgccaacagaacctacgccctaccctttggcagggttattcctgttcacacaccgacctaccccatccccgccgatacagagaaattgatcattgaacagggttgtacccgcatcctaggcattttccattgcagaccgacactcaagagggagatcacccgtgccatgaccagccccttccagaattacattctacagctggaaaatattgttgatggcccagggattggcgaagtctcggtgaagatgctttcggtcaaggcagcagcagtagtgtttgactgcctgaggaaccacccaaccctcagcaaatgccagttccgattcttgaaacaagatggcacgccttccgagggtactgcaatcgtatcggatgatggatatcagactgcgccgtggtagattgatgactctgggagacttcgatcgttttcattcattctcccccgcttacattgtcattctttcttctctgcagcgggtatcttactcaaatgcatatattgcaattctatcctcaggtaatgacctgctaataacaagtttgggtgtcgatacgtggatccagttgccacgtttgaagaacttaacgattaatgctacccttgaagttggttcacaaataactactctacgacaaaaacatgttactgcaccttgatatccagtgaagtagataattggcaaatgggatgacatctcagagataaccagactccatcatcattccacaagaaagtcataaggcagctgataaataattcgttgttcagctatactttttgttcagaaaatgcgacccttcacctggtggatgttcttgacatttacatctttccacagcagcactgacactagagtgacagaatacaaacaagtcgcggtaattagcatcagccgctgtgtctggctatacgacaagttgatagcatcgcgctcgggagtcccaacagcgtacccatactgcgccgtgatatcaccatagatcgttgcaagattgggtagggcatcggcaggaagattctcctttaacttagcggggaagattccagtccacatagctgcagcaattgaagaacccacagcggaaccaatgtagatgaacatgctctcagctgcgagaattgcggggatatcctgctgtcgtgagacggccatgacagtcatttgctcgcaaatgaccaaggtgccgccaccgaaggcaataaagatatggcacatgacgatgtagccaatattggcgccggcgtggcggaaatggatcatgagtgcgacaccgaggatggtgatggggacgccgaagtatagggcttgccatttcaggcggccgttatagcgaataactacccccatgacgatagaccagaaggaggagccgacggtgtagatgttgctgatgtaggaggccttggtgacgtcttgattatagacaaccaggagcatggaatagaaatagttgtcccagatgtaccaagcgatgtagatgcttgcagccatggtgtaggtgaagatgacggtgcggtttttaagcaactcccatggaataaaggttatgggggcaagatacctttcgtagagaataaagctgatgatgagaagtccaccaaagactaggaagcagattatgagtggagagcgccattcgtctgcttgcttagtgtataggttgaaggcgaggaggaagagcgccattccaagcgcgaagatgaagatgccgatgaggtcgaactctctcacgtagtggacgatagactgaagggttgtgcggttggattcaatcatggggaggaggcccatcttctcagctttgcgttggttgtaatagaagaggaagaacagtggtgccgaaaccaccgggatgacaatggcccaaataccaaatccccagcgaaaacctatcgtgccgagggcgctctgtgccgccggaccataggcccagacggtagcaatgtagggagaagcaacgaatgcaatccagaacgctcggttctttagctttgaagtatccgcgatgaaaatggtcattgtgaagtcaaggcctgtgtacccaacctggtagaagacctgagcggcgcagtacgtcttcacgttgttgcagcccgccatcatgatcaagccaatggtcatgctaccaaccatcagagcaaaacctt

SEQ ID NO: 2653 - DNA, 2255 bp, Emericella nidulans
  unsure (1)..(2255): unsure at all n locations
cagatcacattagggttatccctaggcaaatgttgatctctcggtctgagagtatgagaaaattttctatgatagagtaggagctgaaacgccctcgaaatacatccaatccagccgcatgtttcaacctcggcacttctttctttgaacatcctagatctcttgatattgcaactgaggtttatgaattcagattgataacaccagaagagtttccttggttaataagctctgtatacgggagaccttcccttccagattttcatgtgatgaaaatagatctcatgcatgttattgtggaatctttcttttttggagtctcgggaggttggagaaaaagggcccgcttatcctttcctggaggagacgcagttgacgaacagccacggagtggggtcataattacttgacaagttgcgagactggaatatatcaatctagcccgaattatctgataggcagaaaccgtcagtcttagcgttcaaccgaagctctgataggcaaccggccaaatggtggctcagcgataggcggcccacactgcacgccagacacggatacggagaaggactgcgcatagagctcgtaaaataaccaaaacccgtcaagcggccaatttctgacgggcgaagactcaaggctcggatttcaggtcagaaaagcagggagtatcgtccgacttcgagacagcgattgatgcttatgctgtgtctctgcctgacaattggactggngatgcaaccagtggatgctacattaacttggggcagtgtggcggaggctcagccccaagctcgcccagacgatccagaagtctagtacaagggtcgccttccataggaccacacaggaccgtagtgcaccacgcgtccccctgaacgattgcgccgccgtaagtcagtcgctcgaccatgggccgttgttgctccgttattgctttcgccgcccacaaccaacggcagtgctccagatttcctccttgagtgcttcaaccaccctttttgatgtccccaagacgtcgttcgctccttctttttaaccttctttcaattaacctaaaaaataaaccgctccaatccttccctattatttactctcatttttcccgcctttttcctcttcaggcccttccttccccaactgctacgttactacaagaagatcccttccccaatcatcctctatttttctcgtccttccttccattcaagtaattcctcgggttgcgcctaattaatcccgtgtcggagtatcagctctgctatattaccattttctcgtccctcaagctaatgagcttgagttttccactcctttcaagctaatttactcgaggaaacacggtcaggcggaactcaaatcgttggcggcggactcctttcccgacgacaactgcattttcccctggctatcctcgacaattgctcttcgacttcgtccccgtagtcgagtacgggttctactacgacgcccagtgttctggtgtttgtgagaaacggtcgtcggtgaaactggtcgtcctcctacctcccgtcgctcttcgccgaggcagctttcgctctcgagcagccatttgactcgagaacttcccattgtcacgaattacacgaattgaatccgcattattgttgttcgctagcatcaacggcctatttacataatcttgtcgaaaaggaggtgttgaccttccatactattcatcatgcggcgcggtcttttggtctttctagtcgtcaacctcctcatcgttacgttcctcattcgcagcgtatctacactcctgtcattgttgctggaggatgcttcggccgatgcaattcaccgcgcggagcttccgtcgccgaactcgagtttgattgaacagcgaccccagaagattcccaagattatccaccaaacatacaagaatgagtctattcctgaagtctggcaggaagcccagcaaagttgcatcgacttgcacccagattacgagtacattgtacgttttccctatggttttgtgaaagagcgatgctaataaccgcagctttggacaaatgagaaatctcgcgacttcattgcagccgaatacccctggttcctcgacacctttgataactacaagtatcccattcagcgtgcggattcgatccgctacttcgttttagctcactacggtggcacctatattgatcttgatgatgtgagaattgcttatccattgaaaacgacgaacaaattgctaaattgacaagggttgcaaccgccgctta

SEQ ID NO: 2654 - DNA, 2176 bp, Emericella nidulans
accctttgacatcctcgaccccacttcccaatttagaatactccacttcacagctcacaaccccgctcgaaacttcaggaagtccgtcgagagggctaagcctgatctgaagtttcgtagtaatgttggcagctgcgcaaccaaaactttccttagtttgtcgacagatgcggtgagattttccgtcttcactccgagaacaggtacatcaactacgtcttcgccggtcggaacctgttggtagaagctgaactcgaaatcttccaggttcttcattgtgagctgcttctctgacccaacttgggaagagggagtaaacagcttttgctgcctttccctggattcggaggaccatttgaggacgacagggtagccggacgattcgatagcgcgaatttctttaacacggaagcttgggctgagaccagctcctttgaaagtagcgccaaaaacggcagcctcatcggcgttgacgtttgttcgtattttctccgaccctccgcaaaatctttctagttccttctgaacaaatggggtacgaattgaaccaccatgtagaatgactgaatcaatgtcgttcaattgtaacccagcagctgccaaggcctcctcaagtggcttcccaacacgagcgatatgctgctctgccagtgactcgaacttagaacgggtcacgcggtacttgaaattaacatcttcgtcgaagagaccttcaaaagaagcgccagtttcggtgttggcgctgaggacctggcggactttttccgcatctttccacaatcttgccatagtcttcccgtgagagcgcaaatctgcgagactaacacggcccttgagttttttgtcatcaaggagttgagaaagcatatcaccaacgattaggtcgttcagagagtcgccgccaagagtcctgtccgaccctgctcccaggacctggacctcctggatggttttgttgaactttccaatgtccttgactttgcggctttggaagcggaggacagtggcagtagtggagccagcgcccatatcaaatacaacgtggtactcaggtttctccccatcagaaacgctgggaaaggttcggctcatcgcatagttgagtccaacagcaaggccatcgctgataagcgcgtcgactttcaatccggccagttcagcggctaattgcagacttcttttttcatccgcagtatagaacgccggatatgtgataacggcatctctaacatccgatcccttgccagccaaattgtcagcattagccttaatctgcttgagttgcattgccaaaagctcttcgaccaagaaagcatctttccgttccgcctcgcccagtctgttgcttcggaggccaatggtgcccctctcaaaaggagcatcctccaatctcaaagcagggaagcgtgcccggtatgtctctatgagctcgttctttccatcgttgaaggggactccgagcagtatcttaaggttcacgtagacatcgtctgggtaccgcgcagataatgcaagagcatcacctccatagaaccgttccggaaacgacgcatcactttgcctggtaggcttgaatgcaacagcagctgattctttgcgctttgagtccttagtgagcacaatttccagcggaatccctggcttgacaagcgccgccttcaagtattccgtgccgacgtcgattccgaggaccgctgaacccacggcggatgcgggagcggggaagcttaggaagaatagaataaacgggagaagtgcgagggagagaagaggagacgaggaaaaaagtggtagcaggttattcgttcttcgtcggccaccgggagccattgtcctttagttccgctgctgcaagacgtcaaaggtgataagcagagtgtctcaaaatgatgagactggtcctggtagcatacctttggagcagtcggggaaaaaaatgaagaaccgacaagacgcaagcaatgagcgaaatggacagccgactcttgtgagagagttgtagtagtcagtgctcaagtcgaccaatagattagctgtaaatcggagaatagcactgtaaagttgtaaaaagtgcggcaatgtaaggatagcaaggtcagagaaagaaaagagatcaagtagtgagaagtgccatttggacagaatcctcaagaaagatactggccaccggcgggag

SEQ ID NO: 2655 - DNA, 3551 bp, Emericella nidulans
  unsure (1)..(3551): unsure at all n locations
tcagtcacaccgtcactaccgaccatgtccccatcgatgtggtatccaagcccttggccagaaggttgcgaagaacgcctgcaaccatttggggccaaatgcagacctgctctgctatccagtcgcgtccatgactgtgctcaacatcngccgtttcgcttacgaggactcggagtttcctaatcccgataggatgacggtcgaagtggaccgcagcgagattgcaaaggtgttccagggtttcagtccgcagattgctgacatctggaagctttatcccgagaaggttgtcaagtgggggatctttgatctggaagacaaccccccttcgacatatgcccgcggtcgagcctgtgtcgtcggcgacgctgcacacgccagtaccccgtatatgggagtgggggcttgcaccggcgttgaggacgcccttgttatctgtacactcctggagtcggtgcagcagaaggcccttgccggtgaaaagttgaaggaggccttggtagaggccctccagacatacactggagcaaggttggagcgaggccggtggatccaccaccactcgcgtcagatgggccagatgtaccactggaggtacggaccgacaggtcgtgatccgcagcggatgaagcagaagctcgaggagaactggggtaacgtggtgacttatgatgtgctagcgcctctccagccggaactgcgtgagttggcgaggagtcaccaaaaatcactgtaaatacgtacatactctgataacttattgttgaatcgattctgtgtctctgaatcttgtgtctgtgaacttgaattattctttccaccgttctattgcagtacttcgttgcgagaactctacgaagccattaactcgcccgatcagatcctcctgagaaggacacagcatctacgctccgatactcttccactctatgccctgtaaactctcgagtgcgaagtttccgggttcttcgctggcgtgatggtgcaatctacttgtagatcctcctacgacgcaagactttgctctacaaccccctgactagaagatattgagacaccggtaaaaacaagtcaatattctgaagttgtcgagtaccataacaagtgactaatcctatctattcactgcttgggggcttcatgatggaacgatcgccagtagaccaaatgtgagtcgatctcatcgtcttcagcttccaaaggtcgtctactttgacagcatcacaggcgtagaacgcgccagtggtgaacttggtcgagtctggctcgtagcccttgcccacgatgcagtgcactgcctgagcgttgaacgtgacccgggcagtggtttcggtgtcaatgctaacacggacgtttggagatataatggacggtgttaacgcgctcatcaacattaatccacaccttgttcctgagctctttgtaaccgttgcactctttgaaggcgatgtcggtgtagatgtcgggcgtcgcactggattcgagaagctcctcgctggcatggtcgatggaggcgaaagcgcggtagcaggcgtcggcgatggcctcgcggtcgctgagagggggccccgccagtttagccgggaggggggttccgtttcgaaccatgttggctgtagagatgattgtctatagagacaatagtctgtgtggtgattgacgtcaaggatgaaggcaggtttgtgggctgatatcgaagctacaagacacaacaacccttcgatatatagacggagtaaacaaatgcatgaaaaagatcccctttccgtgtcttagcctgacgtgagatgtcgcttgaagtttgtcgcgtgtcggacaaaaaatgtaccgttgatagtttgtaactattttgagcccggacacagctcccaagcaggtctgtagggctagggattagggattagggattgcccgcaccactcttactgtaagagagtagctgatgattttgataggcttcggtgaattagttgtttcgtacgggccggtaaaggcgtatataggtatccatatacacatctttatcttaacaggatacttttgttttcggattattttgccatacttttgctgctcactgctcctaccctacttataaactaatagtattcaagcctcgaagaccatccactctacttctaccttcgaaatggacaccgatagcgagtgggccagtgagccgattgccatcatcggcatgagctgcaagttttccggcggtgccagcaatccagacaagctctgggaccttatggcgtcaggcaagaccggctggagtgagattccagaggaacgatttaaccttaaaggagtctatcacgcaaaccatgaaagaaccagcacagtaacgcccctctctccatgaccaacctagggtttttgctgacaagcccagacgcatgtcaaagggggccattttctggacgaggatgtagcagtctttgacgcagcgttcttcaactattcggcggagatggcccaggtggtcgaccctcagttccggctgcagctcgaatccgcttatgaagcgcttgaaaacggtctgctctccgttatctgagtcacattgacatcaactaactaattgacagccggcctgcccctgtcccgggtattagggtctcaaacgtccgtcttcgctggcgttttcgcccatgattaccaggaaggaattatccgagacgaagatagactgccacgattcaacgtagtcggcacatggagtcccatgtcatccaatcgcatctcacactttttcgactttcggggcgccagcatgactctagaaaccggctgttcgacgacattggtggctctccaccaagcggtccagaccttgcgtaaccgtgaggccgacatgtccgtggtgactggcgccaacgtgatgctgaatccggacaccttcaaggccatcgggtcactgggaatgctgtcgcctgacgggcggtcatactcgtttgattcccgtgccaatgggtatggccgtggagagggtgtggctaccatcatcattaagcgactgtcggatgcgctggctgccaatgaccccattcgtgcagtgatccgtgaaacagcagtgaaccaggatggcaagacggacaccattacaacgccatccggtgcagcgcaggtagatctcatgcgggaatgctacagccgtgctggccttgaccctcgcggcactcaatatttcgaggcccacggcacagggacgcccactggtgacccaattgaagctcaagccatggccactatcttcagcgaaggccgggatgacaagaaccattatctgcgtattggctccgtaaaaaccaacgtgggccataccgaggccgtttccggtcttgctgccgtgatcaaaggtgtcttgtgcctcgagaaggggttgattccgcctactgtcaactatgaaatgcccaaccccaagctcaagctgaatgagtggcgactcaaggtggtgaggacgatagagcattggcctgacagtctaattgatggaccttgccgcatgtcaatcaacaactttggctacggcggcaccaatgctcatg

SEQ ID NO: 2656 - DNA, 1982 bp, Emericella nidulans
gcaaaagcaacttcacaatcctccccaaagagaccacaccgactcggaagaattcacacaactttttaatctccctcatttaaccttttcaagtaggggcccgcccttccctagggcccatagcaaccaaaccatgtggctcccatgccccgaaagggggcaaagccaggtctccatccattgttcaaagagcccaagccgaccaaaatggattatttcccaaaccgattctccctttgccagatcatggtgtccactcggaccattatcaaagcagttatgcaggcatgatctctaaataggggatagcccaccaccattatcatcccaccagaaaacgtcgctcgcggtgtggtaccaaatttctgagtcgcatttttactgctgatgctgtgctctaaacatcgtaatttgacgggaaagaaaaataggaatgctgtcattttgcatgggcctggattattcatgcttggttggcggtcgtttggcttatcccttagttttcacagtacatatcttgcgctatgagttatgatataccatcaaatcagaatgtttccatctccattttccgttcaaatcgggcttgggcattgcgaacgaccttttaatgacatgctagcaacttaatgcgacatacacaaggctttgctcaatggcaatctagctggcgctcatctgggcacaaaatattcaaaacctagagtcttccaatcggccgtttcccagtacacgtcttcctattttccttcctgctagtcgcccaaaacactaataattcatgtcttgaaattttcggtgacagacactgaggccgtgatatgcaagtgaagatcaataactgcttagaccaggattctaaggctagataggtaggtagcttgtacttgtagattagataaaggcagctctcaacctcatacgatccattgactgcagcctacagtctaagtgctatatgtacaaagtccggtcgaaggtgggggttctactataatactccgtaatatagcccacttttcttcgatgatggcatagctctgatttcagagtcggcagaagaagtgacgagctttgggtggatttaggggttatgtcattcatacctaacgatgaggatgcaaacaagaatattcgacggtaggttgcgtagtattgtctgtttggaatgtaaatatatatgtacttagatgctatcctacgaatactaaggaccaggtgcatcgggtagaagaccaagccagtcaattcagagggagaatcggggtcagggccagcttaccctgcagctaacttaaatatatgtaatcgctatgggcgtggaagacacagcgggacaggataggataagacaggacagacgattcccgcacagacagagacggtaagaaagaagattgtgaagtgatgcacaaagagaccggacaggatgagatggcaatgaccggaattttgagaataagaccatggttttgcgcttcatttcccccaccccattgagttatatgccaccgtgtgatatatttagagccaaatctggtcctactggcccgtcccaaaaacctgcgtggttttaatatttctttgggctctcaaaggttccatttttattgaaaaaactaagtgtaatatatgactatccctttttacaacaaaataatatttcttaaaagctctaacagccctttctttcatatcctttcttccatttttgcttcaaatcatttgcctaatttgccttttacccttgaaaaatctaccctttccccttcaatcgaatcacgctacctaggttaatcactgatcttaatctctacattttacttttaccccaaacctcactttttattatactatgcttctattttctccactctatttttactctctccctactatatctcactttatttctctatcctatttcctctctctcttctacctttcatttccttcatacttactcactttcttatcaaaac

SEQ ID NO: 2657 - DNA, 2301 bp, Emericella nidulans
tcccacgacatggcggcaaccttgactgctcagtaaaaaaaccttgtttaggtgatattaccaagcagataagcacaacgagctggcttttgtatgcattggggactggatgcggagttctgcagccggataaggcggtacttgaagactgacatcaaaggctcatcgtgacagagacggaacttgataggcgtacagcattggtgctggttcaggattcaggtcgtcttaagcttgcagctcgagaaaagggctccggtgcaagtcgcgtcatgtccgagttgccgccgccatatgatatagaagctcgctttcgaagagattcgaaggaggccgcggttgggttagtgacacccgcgctcggagttgccggtccatcacggctgcttgaaaactgctcaagggccttaatgcgcttggagattccagaagaaacattgatttttttggccactagcactggccctgtggaggtttcggccggtgagaacgaactcgaaacggacctgccagcacctaatgtgggtgtgttgggaaactgatgcccagtagcactggggttagaaaccgcacgcgaatttctccatgcatcaggcgcagcttgggaattccctccgtttgaataccccggggagagtggggactttccgactgatatgggctttgcctcctcgaccgtggcgcttttcagttcttccatgaaggaatcatcggaaagcatgtcgtcatcggaataatcgggagttgggacttgtataggctccagggcaggtctgcgtctctcctttcgggttattgcgttctcttggtctacgtctatagcttcagacggtggcgcattctgcagctcgatgtggttggaattggtcacggctgaagagtcggtgacagagtctgacttcgactcggattcgagagatgttggtggaaggattgactggggttggatgctttcgtttgaattaggggccacggctaccacgtttttgtttataacataagacttctcgtcggccggtgggggagttgcgataatttcttctgcctccgagtctgggggtttctgagaattgttttcaggtgggacgtcaacaacggcgctagaagtgccggtgccgcacttaatttcattttcagtgggccccgttggatcttcttggatagaatccgcctcaggttcggacagagaggggccctctgctgtcttttcattgtcaatcaattccgtgtttgcgggtgagtacgtggtactcggcagtatatagtcggactgatccttgaccgtctctacagctggcgtctcctgggtggagcctaacggatccttggcctgctcttgatctccagcgagtcgaattgcgacaggcttctctgtttcaggttgcataacggggccctggcccttgttgtcattttccgaaatgctagataacctctggcggctcctatcatacttctggtgctcaaagtgtgacccgacatcccctatatcgttcagatctgatgttgcattgttgttttcttccttagctgcctcagtctgtttcgctgcttgtgctctcctttgcatttgtgacttgcgtaactgaagcgctttcataagcctctccttttcgttagaagttgacgcagatagtgcgctcagcgacttggccccaggagaaagctgaggcctcgaaattgacattgtagacgggggcaccaatagagggggtaccggcggcaccttggcggatggggttgcaacgggatttccctgggaacgaggacgagcgaaggcagggttagacttgcgaaacggggatgctcgtacaccagcaggcaaagaagcgacagggcgttgttcagcgctacgaacgagattacctgctgtgcgcggccgtccactttcatctagcgaaggccgcggtcctagcttcaccttgggctttattccggctgtgcgttcgaggtctcgtatagaaggcctcgccgactgcgtagactgtcggactccgtccgtgtcaaagataaatcatcgggatggtccctcgatgaagccggccgtgcatccacaggggcagcttgagtgaggccattgacgcgatcgtcattgggacttgttggtgcagacacatcgtctttgggcccttgcggcgcagttgaggctaccgatggcggcacgactgtggcttctgacgcttggctaaacgatctctgtcgggcatcctgaggtggtgcttgggtctgtatcgtactccttgcgggagattcctctgcatcttccgcaatctccatcagtctccgacggcggagcgagct

SEQ ID NO: 2658 - DNA, 828 bp, Emericella nidulans
caaaggcatggttcgccaaatcctttttggttgccacccatctctgcgtgatatggtctatggcgtcccttctacagacttttaagagtatctaaaaccgggctcctagcacttaaaaagccgttctctttccagagctggtgcagtatgcagattgaacactgcaaggccaacaattaccagagccatctccccttcagcgtcgtacctccaaactccacgtactggggcatgaatgatctgccgaactactacggtgacgtccgaatcaagaagttctcctttggacaaaaggagacggctctggcgctggacaaatgccaccagcgtctccggaccgaacccctagacctattcctcgcagttatcatgcattcattccgacggacgttcaccgataggtcattacctacgttctacaacgagggacacggcaggcagacatgggattctagtatagacttgtcaggaactgtcgggtggtttacttccatctgccctctccaagtacaacctgagtccagtaagtaggcacccagcctcaaatatgaacaatactgacgaatgagattgtacagacgatatacttgagactctgcggatggtgaaagacgcccgacgaaagactatcaaccatggcacctcttactttactcaaacgatcctctcgcctgagaaccagccggcgtctccatcaatgggtcttcccgtggaggttgtcttcaatttcctcgggaagctgcagcagcttgaaagagaagattctccgttccagcactacggcaagttgtatgacgaaaatgacttcaagctggccggagacatggg

SEQ ID NO: 2659 - DNA, 1759 bp, Emericella nidulans
ggtttcctttctagctcttttttagcttcctttctggcgtccatttctagtataggtggatgtgccgggagagaggtcagtttacggtgaatgtgtatgcagaacttctcatatgttcgctagttgtacagtagagtagttgagagatgcctgctttctctcctaccaacatgctatgtataggctagggtcgtttcagtcactatcgaacaaatacaaatataaaacaacaagggaaagtgaatctaagagatatagacgaggaaaagactattctgcagacgcgcggttcccagattcttccacgccttggttcgggctcagattcgtcgcacttataggctcaggtagtttcataggcgcatcggccggcacgacaagtctgtcgagactttcgcccctcagaaccttctccatttcctccttggtcaatgtttcatacttaatcagcgcctttgtcagcaactctagttcatgtctcctttcggtcaaaatgttggtggcacgctggcgagcttcctcgaccaaccgccgaacttcagcttcgatttcctgctttgtttcggaagataggctatcgtagttggcgtacaggtcgacgtttccaagtttcttggagtagccaaaacgcgtgacgagcgtgaaggccgtccgcgtcgcactcgcgaggtcctacatccattagcgactgccctgagcttaaagattcaagcgttgtgaacataccgctgagataccactagtaaccttgtcttccccatagatcagctcctcagccaccttaccgcccatggagacgtcgatgtcgcttagatactggacatagtttttagataccatgtccatttccggcaagaaatgcgttgaacctagagacattcctcgaggcatgatggtgattttgtacaaaggcatagaggacggcgagaagtaggcaaccagagcatgccccgcctcgtggtaggcggtcaaaagcttgtctttatcctggataatcctgctgcgagcctctgcacccatgatgattttgtccttggcatagtcaaaatctttcggagtgaccttagattgcttattcctgctggcgaaaatggcggcctggttgactagattttccaagtcagcaccagagaagccgctcgtaccacgagcgatcactgctacatcaacatcagtgctgatttgcacattcttcatatgatgcttcaggatgtccatgcgtccccgaacgtctggtaggtcaacaacgacctttctatcaaatcgaccaggacgggtcaaggccttgtcaagcagttcaggataattggttgcggcaaggatgataacaccggtagactgagagaatccgtcgagttcggttaggagctgattcagggtctgtttcacgtaggcagcatctcgttcatttctctttgcaccaatggcatcaagttcgtcaatgaaaatgatcgcgggagatttgcttcgggcttggttgaaaagttcacggacccgcttggcgccaactcctacatacacttcatcgaactcagagcctgacatgtagaagaaagggacaccggcttcgcctgcaacggcacgggctagcagagtctttccagttccaggaggcccaacaagcaaaactcccttggggagtttgccaccgagtgaagaaaatcgttccgggttcagcaaaaactcaactagttcctggagctcatcctttgcttaaacacagccatgaacatcactaaagcggacagtttggtggtcc

SEQ ID NO: 2660 - DNA, 709 bp, Emericella nidulans
gtctcctgctgagctcctgcaaatcaggaaggtaagccttgacccttggcatatgctgatgcgtatgcttgatgggctggagtcgcctccaccaagtcgagtggattcccaggatccggcacttaggcgtccacctgtgaccgactccccctcccccgtttcgatcctccagcagccatgcgcaaacagcgtacctccgacaggaaggtggccacgggaaccgtacaggaattggagactatgtaggtagcgtcgcagcgtcgacgcgtcgacgcggcttcgcaccggctcagtctttagacgatggagtacgttggaggttatcctgtcagtgcaccgtagtctgtgcatacggacatggttgcatcggctatcagtcaccaggccagcgccctgttctacttttccgcgtgcctcagttagggttcgggacacgactggcaaataaacttgacgcccaatccactagtctactttatatcggtttagtcttacgagatctccaggcgcgtagccgtgaccgcactgcatcgcgatctggtacgacgatgcaaatctgctcgatggcagcaatcttcaggaacggacgatccagcgccctggtacaagcgcgattagcgagcgatcgagatgaataacgtgaagatcgactcgacctggaggttaagaatatacaccttactaagagcaaggcccatctgtcatctgc

SEQ ID NO: 2661 - DNA, 1568 bp, Emericella nidulans
atcactaacgtcccagcaggagcacacctttcctatcgccgatcttatcgagcaatatagttccgatactcctctccattctatcatccaactgcccttcttccttcgttcttcctattctccgggttttgaatagtgtggcggatagattgcctctacagagccagcaacaatggcccagggatactcgcttggcggacattcttttctcaacggagcacattggctgcttgacccgcatccttggccaggattacagcagccacagtcggctgactgcgattgaactggctgcaggtcttattgggaagctgtgcacagaggaaagccacaaggctgttctggctgaaagtggtgttttagacgctctggcggtcaaagtcgcatcgtttatagttgcgcagggattcgttttccccggcgcagagagccacctagatgatgtaggcgctctggggtcactgccacctcctgcgccccgcggggctaagcttgcgcccattttacgtgctgtgacggtcatcgttgagcattccaagtggcgagcggagcattttctctcttctccaggtatagttactgtgtttccacggcaaataccaggcttttccccatcggatatcaagaagggcccttggggctccacttatttttcagggtccgcggtgccacggcaccttggagggacgcctctagagtatcttcttccatctattcctttgtcacagttgaagccctctgctagctcatccaactttccaccgctaggtcagtatgggcagcatcgccgacagagccattcatttcccaccccgctgtccagtttcgaaccgcccacggctgaggacgatgagaatccggttgtcccctggctgctatacctcgtccgtgctgagagcggcatggctcgtctgatggcagcccgctttgtgacggtattatgccgcctgggactaaccaaaaagcacaggatctccatgctctgctatctgttaatcccgattctgcttcgcatgctcgataaggactacgaggcctctgacgacggtgtccaatacggtggacttatttcttcctcgcaacgcattaaggaggaagctccgggtgtgctggccaccttacttgttgatgatcgagaactgcagaaacatgcggttgagggggatgcgatcaagcgactatcccagcttctcaaagaaacttataatccaatccatgagccagctcgaacaatgtggcatgctgaaggccaaccgaaggttgaggaccatgactcgcagccggcggagtgtcgattaggccctcctggatactcacccctccgttaccatatcttgagatatcgggaaaatatattgaaagccttggctgcactggttcctttcaaggacgagtatcgcaaggcggtatgcgagcacggtgttgtgccatatatcattgattctctcaaacccttcccagaccaaataccagcagagtcctccgatccaggaaacactgctgctgacggcaacccaacaccgacccttctggcagcctgtggtgcaaccaacatgctgactgttagt

SEQ ID NO: 2662 - DNA, 1099 bp, Emericella nidulans
atcaatctgtaagctgtgctatacccataaccaaatggtattgaatagtggggtagtacagaggggtacacagatgccgccgctgcccagacggcccattgcgtgacggcgtagtcgtatccattaggaactaggaaagcaatacgccgttcgtccaggtctccagtgctggtaagagtcaattcctccagaatccgtttcttgagtgctgcggcatctgcgaggagctgggcaaaggtaaactgctggaccttggtcgtatcgataacggccagcttatctggattggccagggcatgcttcttcgcttcaaggaaaagaggaagagagggaagcgcgtctagcgacatggtgactcctttccttgcgttggtctgtgaatgtaatggcaggaaaagatgcgatcgtgatgcggtagcaatggtgaaaggaccaggggttggtgcttgagcggcggatcggcagtccgctctgagaagaatggcacgcgattattcgacgaaatagacgataatcgatcaataattatggagcggttggagacgtatcgggtcggcgaggaatcggagattcggagactcgcgagagataaagcacgtatttgtacattgcaaagatatagatgagctcataacaagtcaaggattcttagacggtaagtatccataccgtcctcttgtgttattgttgttcacccgcaaaatgaccccagtggaatggattagttgatcctcgttaatggactccggagtcggcgcactggtccgcggtgcgagaaaacacccacatcactatattgtatatactcttgagtacatataatattgcatacgcattctccattttatcctataatatgtcaggctgccaaccggcacaagactgaatcgcctcgctctcgttgtcttggactattcttggagtattcgcacacgtgacagaagcctcggaaatcaggccgagaccggaccttttcttgaaccgcatcaaagtccccgtgaaggcacagctcggctcatgccattgccaataatgctgcgattaccgccgctgcgacaaggctcgttcgtcctgcagcgtcccatcgtcgttcgtgcac

SEQ ID NO: 2663 - DNA, 4173 bp, Emericella nidulans
cagtttatgacagcattaccatagctaatctatctttccaacagccatgcttgttcagtttgttggtctgtcggcaaggcttgcccaaatcctgggtggctgcatcaacatgatgttcatgttcggctcgatcgtgccttccttttttctcgaccgcatgggtcggcgaaatacaatgatagcaggttgcgcaggacttagcctgtgcatgatgatgatctcagctctgttgtcacaagctaaaacatctaacggacactcttactcatccgctgctgtgactttcttctttctctatatgctagttttcggcatgagcgtgaactgtgtgccctgggtctatgttccagaaatattgcctctggccgcccgcactcgcggtactgcgatcggtatcagttcgaactggttatggaatttcacggtcgtcatgattacaccagtcattatcaaccgcctacactggaaggcatatttgatcttcatggtcacaaatgcgctgttcgttcccgccttttatttcttctatcccgaaacaagcaacttgcgactcgaagatgttgattacatcttttctcgcagtggggatccggtgaaaaatgcgcagcagattctcgctgaattgaagctaaatggacatgttgatgcccttcaaggcagtggcagccagataagcccctcacgccatttctcagaggagaagggtgtccatgaagcaagaaacgaaacgaaactggctccagctgaaagcaggagcacgtgaatgctctccaggaagtgaaagagtgattttttggctgtgatacggataaaagaagaaagattggattggttagcctaagagctgctgctttttaacatgatacgatttgaagctatagacgcgtcctaggaactttcaggtcaatgcgagtattatacgtccagcattcacggttacagtcacccacggcttcaactttacggtcgtgtacacttagacgatttaccttgtcagcgcagacgtggtagtatcagcaggtgaaggtattgtatgatgcatgcttgaagacttgcttggacccatcaagcttgaactagctggtaggcgtcagtcgtcgcaaaccaaggacacagtaagcatatttcccgactattggaatcagaacagaggtctgaataatgtgtgcgtgtgtgcaagatcgtagagcgatttcggctgtctaccccagctctagtgctcatatttgaaggaggcacttcaatatgtcccctccgcaaagatgtggctatccattgagtcacacacgcatcaaaccatcgtgctcttttagaagcgttaatgctttttgctatctagaacgagtcctaactacgctattctcctcgccccatatcgtctttcatgcattacgtggggtcatgcctgttgctttaaccagctttcctgcaaattctggtctgcttggcggaactttcaggagcactacgaaccgcagacttacgcaaacttgcttaagaagcctggaggctccctcctcgtatcggtgaaggtgccagttgaacatttgttccttcaggtggatgtagccactaagtgcattgaacctgttcctatgctctccacaatttcttctgacagaaaacgataactgatagagcatgccttgacacacttggattacaatgatatatcgtttggggaggatacgaaaaggccacactgtactggacagtgattggcattagcaggctactcttagctgggtctcccatgtatcctgtaagtccaatagatgtcttcagggctctactccagtaagatgatgatagcattctctcagcttcggggtctattataatacaaagcatgtgccaccggtctccgaaaattgacattgtgagaggcaagatgttcagctttattccggggtgatatttcatagccctacagggtcaatttctgaataattagcacccatactgcatgagacgaatagtggtccatcaaactcttcgactataataggtatgaggttgactgtctcgatccttcggggctcttacatcaatttacatatgtgaaaactttggacgatttcgattcaattttgccagtggacgatggccaggtgatggtggggtcctctgatggcagaaaattatatagggtagatgttctgtatcacgttcgaccgagaagctgatcttaagatggtcttcgacttttgctgggaattgaagatatattctgctgctgtaggatacacgggcattctttacttctaggaggggcagccgtagtagcacacaaggccacgtagtctctaatgccgagcatatgactccatgaccgcaggggaggagaagaaagagcgaagatcatttacaaacaaatctggtctctccagtgacgaaaaatggcctcctcggtcatgctcccgccagtagtgaatgttcgcaacctgggctgcccagtcacgagggcactttaccatgttagtacgctcctggacacgcgcaacaaggtcggggcgtatgactcacatgcagttgttccttcacgtacatactgacaccacatggcaccgacacataagtctcgaaggtcttctccgcctcacgttttccgcatccgaaagcctcccggtaaaacctcaggccaggggtcgcgccttggatccagtgcatcatcaccaaagtaataatatcggtatcgctgaacgcctcatgcacgtcgccccagtcatggagcttctcaacaaaccacgcaagcagcccgagtggtgagtcccccagcgcgaacccaagcgtctgcggccgggttctctgctcctcgagatagccactctgatcttgctcaaagttccggcgcacacgcaatgcctcgtgctcgaactctgagtatgtcagcgccgacaggcaccagcgcaagtacgcgtacggtgcggaccagagagtcggaggaggcaccgggaacatattcacggtgctgtgctgccacaagtgcggggtactggatggcaatggctcgtgtaatgaaagagccgaaatcgccgccctggtcacaaatttggggtaccccaaaacgtccgtcataaggatcttgtacgcgcgcgcgaccacattcgggccgacgccagattttgagggcgcgggtgaaaaaccgaaaccaggaattgacggggcaacgaggtggaaggctggatctttggcatcctcgggctcagtcaaaggaagcaccacccgaatagcctccacaaaggaaccgggccagccgtgggagaagagcaatggtatagcattcggtctggcagactggttgtgggtgaagtgcagcatcagcgggccgtagccagggacatcgaccttgactaggaaatgcctgaagatgtcgttcaggcgtcgctgagggttcgaatcagcgatagctctccacgaggggatacttcaacgcacctcttccgcctcccaatcgtactggtctttccagaaatccgccaactgttttatacgggagaccttggctccctgagaccaatctttctctccaaaatctgtctgctcttcggggtatcgagctaaggcgagtttttgcttggtcacttcgagcagttgctggtccacgtgcggcgtatacggcacgggaatgttgaatttgaggtcttccagaagaaatggtaacttcaagcccatcatagccgctgctgaatgatatacttgagttttatggaagcaacatccgttgaaacctggaagacggacattgcagaagggcggttaagtatcacacggcaccggcgcttggagttgctttcagcacacggcaattgtaagcgccctgggtgaccccaccatgcacgctaatccggattggtccagaggtatagcttccgccactctagtctacccttttacacagctcggtcagagttaagagaaggttcaggcggtagacgtcatcatgctacctaggtcatgaagatctctgcggtatcccggaggccagatggattgccagaggctgtaaaataatgctactactctcagaggcgatattgtcaagcgaagcaattctaggtgactaaagattgcttcatcctgactgcttttccccagaaacaacacctgggcccgtaaagctcacatagctggctggtgggtcatgtggtcggcgctcccaataactgatgt

SEQ ID NO: 2664 - DNA, 2936 bp, Emericella nidulans
ggatcgtgtatgagggctctggatctgtctcgagcaacgccgtttcaattgacagaggtgaatgatattgtgttctcctttttacaagctgaagcaccagtttctgagcctaaacgggtatagcggctctaccccgtgatctggaacctaggcaattattttagttcaggttgccagcttccccaacaattaggatatcatagccttactctacagactgactggacgccgctcgccatggaatacttgaaggatatctcgtcgtccctttcgggctgggagttcaactttgctcctggttggcagagcgtgacagcctcagtgctgctcgtggctggaggctggtttgttgtctccagggtttggaccttcctcagggtcttgaccagtctgttcgttcttcccggaaaatcggtatgttatcaatgctaatccgtttgtctatacgaaaatagtactgatgatttagctccgctcatttggccctaagggtagctgggcaattgttacaggtgcctcggatggtttgggcaaagaattcgccctccagatcgctcgcgctggctacaacatcgtcctcgtttcacgaactgcttccaagctaaccgccttgaccgatgagattacgtctaaatacccctcggtccagaccaagatgctggcgatggattttgctcgcaacttggacgaggactacgaaaagctaaaggccctcattcaagacctagacgtagctatcttgatcaacaatgttggaaagagtcacagcatcccggttcctttcgccctgaccccggaggacgagttggcggacatcatcaccatcaactgcatgggtactttgcgggttacgcaactggttgttccaggcatgacccaacgcaagcgaggattgattctgaccatgggttcttttggtggtctcgttccatctcctctccttgctacctactccggaagcaaggctttccttcagcagtggtccacagctcttggttcagaactccagccgtacggcattactgttgagctggtgcaggcctatctcattacctccgccatgtccaagattcgcaagaccagtgccttaaatcctaacccgcgtgcgtttgtcaaggcgacattgtccaagattggcaacatggcggttccccaggctacgcatacagaatcctccatactggagtcacggattggtcgcataccttgcgacatgcgtgatcaacccgatgagcaaatggctcgcaaaccaaaacaaggctatgcacgagtcgatccgcaagcgggctctgcgcaaggcagaacgtgagaacgcgaagaagagttcttgaaaggacatcgtcatttttctctcaagtctcggccgagtgttttcgtgtttcctggagcccgaaagcaagacgcgagacaaaacaaggcaaacaacatgcaaagaacgtatgagaaatgataagagatgttacgtcagggatgaaactcatgatggaagtggcctctgagcattgggccaggtccaaaccgtgaggcaagagttagagtattcgtttttacgtctcgagacatgagacgtaactgcattagtttaataattattatgtttattatctcctggcttggagcactatgtcagtgagcggaccggcaacgagtctcgacgacaaatcatcgccgccgtgggcggcctctttttttgcctgcttaatgggtagatgctacgtagtcatacgacgttttgcattttcgttacacgagtcggactcaggactgtaatgcgacacaaaacaaaaccggctagccaatcatggagcagaaagacctagagctgcagatgccgtgcatgacggtgcatcaggccttgagtctcctgtcagtcctaaaggagaaagcggaccagaacttgttgctagcgggacggtagactatggcacggcttgagcctagatcactctctgagacattctgtaagcctctgattcgggccgagtttgcctcttctagtctcaaaggtcaaggcggaagacaagcgctcggcatcctttccgtataacaaaccttcagcatcactacacctcccctcaagaagaaattagtacttggcgccggcattcttgtgtgttcttggactacgtgctactacgtaagcctgaagattcacctagctgctcgggagccgtttgatgaatgtatacgattgtcggctgcaagctccatctaggttctgggacccagtcgtgccttgcacggctttcaccgagacctaaagcgacctagaccagtgggccttggtacgagatcggcagacggttccggccaagggccaaggcaggatcatctgcatttgcaggcccttgtgctctatccttcgacctcttgaggtccgcataatagatcaggcaactgggcgatatcttctacagattgggcagtttgggcagctgctatactatctataatgctctagggcagctcaagacaagtctcagctcaaaggatatattacatgatgtaattaccttagtgggctggagaggcgatgagaagaccaagactcgagccaagtggaacaaggcccaccattcggtgaggattctgcgacgaaaggtatgcttcgctgaaaaatttgcacccgaatcggcacaccgagcccggttcagacctttcagcgtggatcccgagtcttcggcgtgccgataagttcggctcgggaccacaccgcaacaccaaaagccgtgtcgaatgtcggagagctgcaatccgtcctccagtctggaatatatatatatccttaagagcagccttttcgcgcaggttctgtttcttacagatccccagcttctgctcagtccaaatctatgctgcctgcctgggtttgtgatcgccaggaaaaaattcttcttgaggtcactaggtgcggatctgccgtgaatccgtgatat

SEQ ID NO: 2665 - DNA, 1038 bp, Emericella nidulans
ctgggcagaaagcctcatccacaaacacagttagacagatacagtgtttgctgcacaccacgagcaggcaggttcagtcgcggccagcagatctttccttggatcaacccatcgatttgtttggcggcgacttcacgattcccttaagaatcgctgcgtatcggctcactccgttcctccgccagctagatcgattacagtcttgtcctagggcaggagtaccatctgagcaaattatccgggttacctctcagactgtcaatattcaccttcccgtccatgtctgtgcccttctcaccaccagcatctcacttagagcaggtaaaacaaaacgttctgtggttccaggtcaagcgaagagacataggtggagggacataggtggaggatcagagcatgaacccaggtctatctggcgacgccgcagctgtccaaccaaattccaagttgagtatctgctgccaaatatggtgtagtcctcataacgatctggactactttgggtaggtgtggaaagcgctagactggaagtctgcggcgagaaagcctagcctgggcccttgaaatcgcaacagcgagttggtgtcgaagagcgtactgatttggcttggaatgaggagccatgactcaccggatcaacctcaatcaagtaatacatgatatagcttgaatattcagacgggtgttcctcaggactcctgatacgtgcctagcgaaccccgctccccggcatctacaagactcaaccgctgtactcgatggagaaattgggaataaaaatacgcaataagatctacatacaaccccgcattgatgtcttattcaatcactttgccatacagactacgtacttagtccacctgccctgaatggtaattctccgcttctcccgaggtcttactccacatccaagcccgcgtgccctagctagtcggggatatcggatagaagagcatgtcatgcgatgcattctgcagagagatatactaacagattcagctttagtagcatccttgctcattctgcaggggtgatggg

SEQ ID NO: 2666 - DNA, 987 bp, Emericella nidulans
cctcctcgccctctcggcctgctcatgtacatcctcattccagagccacgccagcctctcttgcagtgtcttctttaacttctcctcgtcgctacccaccccatctagccgcagacaaagcaggtacgcgttctcggcactgctcgttactactcgttgactgcgtggccgccgcacttggtcgtacgccttgaatgcggcagccacatcgtctgcagtcgctactctggcatcccccaaaagctcggccaggacatgcgcatcctcgattgcctggcccgctccggccccctggtgcggcgtcgaggcatgggccgcgtctcccagaatggccactcgggccctcgcatacgtcgagatgtgcgggtgctcgtagagcgcccactgagttggatcaggcatgtacttcaacaccccgccgtggttagctcatatcctgatctcgcccagcttggactggcatttgccgacgagacaaactggggaacggctcacctcgattaagctgtttatcaagcgccccatatgcttaaagtcattgtgcatgtcctctttactcgccggccgcacccagctctcccggtcccattccgagtgtaaggggtagatgcccacgttcaccttctttgcccgtttgatcgggtatgtgaccgcatacgctccgtcgccaacatacatagttgagacgcgcgcgcgatggtcgccgacggcttccaccatcgtctccatgtccagcacggcacggtacccatacattcccgagtaccgaggctgagtagctgcgtactcgtccgcaccgagaacaaactgtttgaccttggaatggatcccatcgcagccgatgactacgctcgcacgggcagcagtgccgtcctcaaaccgcatctccaccccatctcctgtctcaaccagcgctgccagcctctttccaaagtgcgcgatccctccggtaccagcctgacgagtgcatcgagaaaatccgccctt

SEQ ID NO: 2667 - DNA, 2075 bp, Emericella nidulans
cattcagaacatcaactataggtgtgctgcttgccaatctttattttaccatccgtagcaaccgggtgtggaccttgtgatcatctagctcacctttgctccagtttctccctcacggtccacttataatatccgagctcgggccagtcacgacaaatgtgagaaaaaaagtggtctttgaagcggaaaacgatcgtcttttctgggtgttttgttgctggatgccccggataagtgcagagcacgtctcagtttgcccctctactccacaaacatcgcgattccactggaacatcaagcacgaactccgggtacattcaggattcgacaccggcatctcttatccttccactctacggttggatttctcttgcgaaccgagagttcgatttgccacttctcgtttgataaagctgccggattccgctcgcggccatctcttacacgttaaatcagcacattctttgggtataccttgattcccaacgtcttgttttcttttttgttttagcttcaatctttcgttacgatgaagctcttcaacacactctcgcttctactcggcgcagctgccacgactgtctttgccggtcgccaggacggcaagaaccccgatacattctacctgaagacttccggagctgagaactctgcacacaacgatctctatgtttacggataccacgcgggcgctggcattaacgatgcggtccctacaccagacattgaaacagcgagcagggcctacctgaacggcaccaaggttctattcgactacaacacaacattcccttggggcttgtcgccctggggcgttaccaactatgcgggtgagtactggccagctcgcatatattgatcgattactgattaactgccgtcttcagcatggccattcgttcagatcaacgccggtaccggacaagacggtttctccgtcaacagtaccggcttgcaatggtcgcagcagacgggttttggtggctggctaggtacgataacctgataacccggcagatttctgtatggtcgctaatctgatctttctgtcttcgctagtatgcgactggtggcacaacgcaccccaattattctacctctaccggtactacgacgcggaataccccgcctcttgcagtgaggtgaagcttgtgaccgaacccactgcgtgaaccgtgttatgacattccgccacccgtcagactctcgcggtaccagtggtcgagactcgagaggctcatgacgcgcgtggcgggcttgatgaatcatccactctgagctgggtcggtccgtggagggcatgcatcattgccatatgcccggccgtgtgtgtcctggctttgggacctgagacgaaatgtaacggttccatgtttcataattttaaatctgtaatgctatcgctgttggaatattttatctaatgttgggaatcaacatattaccggatctttccactaattgttcttattcttccgtattgagaaatgggataagcgtgcatattgatgcagattatcggcaatagtacatatagtatataaatagggggtggactgctgacaggttcgatctggctatgctcactgtggccagaagatgccagcatgtgagacaggatgcgcgaggccttgaccctacaagaatattgggaataataatgattcaattatggaatgaaggtagttctgattgaacgataatccggttagacttgtcagcaatttacaagggctgggtgccctgagtggttaatgggcccacaaatgcccttttttataacaaggcccgccccatcgggtttagccacctcatctgcccggccgggcctctcgattcctttttttagccatcctcctcccctccaatcttggccttccgtgtaccccacttatcatcccccctcttttttcgctacctgggctattctctctttctcctctccccctatttgtaatactcgctcacatccccctaatccttttcctaccattttctccctcatgttccttgtctcactctctctctcgacgctttccctttctccatccttctctcctattcttgcattccca

SEQ ID NO: 2668 - DNA, 1385 bp, Emericella nidulans
  unsure (1)..(1385): unsure at all n locations
atagtgagacccaagcttcggatctcactcatcccttcaataagcgtgctcttgccggngctttatcaccaataacacatatctttggagcgtaatatgcgaatcttcaatacctaaatggcgtaaattcttgatcttcttgaccagattggtcatgctttgggtaagattatccaacgactttgatgagatcgattcgacagaggcctcctcttgtttgggagatgtgatttctgctgtggcttgagaacgttaggtatttgacatatcgtgaagtaatgtggatggcttacgaatgcttcggtccatttcagtgttcccaactggcgtaagacttctaatcgtaagcgaggagctcggcatcatgaaatgcttgttagccacagctgggtctgaaaaatttgcggaattatagttaacagagagatcagagcaaggatcgggtggacaaaacggacgtatgctagacgagatggtgaattgaaatattaaagatgaagaagacggctggaagggattaggaggagaaaaggaaagtgagaagcaagaagaaaggacacatgaagggatgaatgaaagtaagtgttgagcaagagaatcgaagagaggctgttctggtgttacgtcctctggagagggacgtgacttgctagacgaaaggcagagattgagtgtatacaacgaattgactaggcagcaatcagatataggactcacttgacaagagaatagagaagattactttcagatctgactacaatggcccaatcattttgtgttgtatggaattatacaggagcaatgagaagagcatatccagaagctcgattgatttacacgaagggcaatgcttactgtagcaaggcattttcaatctagctcttagtctcggcagctggcccaaggaaatttatcggtacgcgattgaggtatggtaatctgaaaaagtatgatcattgtcgaccacggccgtcgctaagcgggatgtccaagacaactatattgcgggtatggaaatcctgagtaatcccaaaaagaatataagagagagagagagagagagagagagagagagagagaatctctgcaatcttccacgtcattgatgagcacgatatcggtggactgagtcaacaccctgtcgtctactaaaagcgccactgcagtgttatacacggaaggaatcacaagggattaccatcaggacgatgtctgctcagaataacctatgcgaaaacgcgcaaagcagactctttctttatggacatttgcgctgagtttaggtcacggcgagtccgaatcccggtcgtcngatgccagtagatactgttgaagcacgatacacatngtatcgtagacgcgcctatangactccaactcattcg

SEQ ID NO: 2669 - DNA, 1163 bp, Emericella nidulans
atcgcatccagagtccatactgccttctgatcgcagccctccttcatcccttcttgctgccctgcttctgctcgtcttcgcctgccgattccccttttcttcggcctttttggctccgtcctctcctcgtgttccctcaccttcatccactctcccatcccacccccctcttccatcaaccgtcctccccgaccttcatctctgaaggcgtttttatcatttattgtgtcttttcatcaatctatctacgacttcacctccacgaaccgcaatttccccgtctccaacagccaacgccttcacccacgaaccagtctcgcttccgccctcagccactgtcgcgccggttcaatgattcagtttcactgatttcctccacaatgtccacggggccgcccgtttggccggctcaggacgaacaagagtcacaaccccctgctgaaacccagacccgtgcccgacggtcgcgtagaaagaaggacgacgccgttgagaccgatcggaaggaacctacaaagtcggcgagatccagggataaggataaagacaaagagaaggacagggacaagggaaaggaccaagacaaggagaaagagacgaagcggcccagtcgccgcccgcgagacaagtcttcgtctacctccaacaaccctacttccacccagtcgaatccccgcaaaaagcccaagttagagggtacgccgccgaagcaaagccctgacgcggcccctgccgtttctgcagcagtctcgacagcttcagactcggccccagttcttgcgcacacgaccactgtttcggttcctactccgcggcctagtcccccaagtgcacctgcatcgcttccggcgaatcactctgagcttccacctcaaccgcagatgacccaatctcgtcatctcgatctgacctctcagttgattcacccttctcaatccgctactctccaagcttcggctcctacaacgtcgccgccatacccgatgatggtatctgcgccgccttcccgtccccaatctcagccattgggaccaccccctcagcgaagagcggtcaaaattacgatcctataaggtctgcatttggcacgagctcgtcgcctgccgcaccgcctccagctcctgcgtctacttctttcagtcctccggcccgtccaatttcgc

SEQ ID NO: 2670 - DNA, 3773 bp, Emericella nidulans
cttaggtgctgttatttctgtgaattgagactgtcgcggcgtctgaattgttgaaaactgagcatagatagttgagaggataatctaagatcgttttcctcgatagctcgaggtctcatgataggagttgagcccgaatcagactgctcgaacttcagaagccacgagtcgtggatctttagcagcctaagggccttgacggaaagagagcatggccagaaatctgacggcaagtaccaatgatcgtacaacagaagggtagaaaggctttccatttggtattgttctccaagagcatgacactacaagccgcagctttactatattagacatactcgttagctgacgcccagatattgtgactgcggtttgcttcggtataatccacagattgtgtgcacagtgttatacctaaaataaagtagtggagtctccgccgcatgcgggccgcttccttcccaaatataaggaggggccccacaaccttactagcactccgccctgggttgtataagttgtggatgtttgcgagatttagggtagaactgtgaagaaattggttatgtcgtcttcaccaaagcgtcaggctccgccgaatgatgacttgaccgcaccatgacaaacatccccccacgttgcgagtcagtaactggatgccgccatacccgtacgcccagttagcacagaacagcagtccgcgatctgctgcatggtgacatcgttcgctccgtgatgcttagaacatcaacctctactccaatgacagttgctccggacccccgacatctcgcgatccgcgcacatgcgacagctggatgcgatccaattgcattttcgggcatcattgtggaagagaaatgattcagactgcgatgcggctcaaaacgtgtctccagtatatgaaaggagaaatcattgatttgatcggtgttgggcagacttgctggtatctatagccaagttcgaatacctacatctgctctgcgggcattctacccatcgctcaacctaatcagactttcttgccgctaccagtgccactttgccactctcgattttacagccacgatgcaggagcagattatatcagcccgttatctcgataagactaagctgatgaagttgttgaaagagcggttcgcaccacaagaatattctgtcacggtatgttcactccaaggctcccaggcaaccagttcatcccgccttttgcttctcctctcaaatacagcctggttagttttagaaagcttaggggggtgattaggcgggtgatagcattctgccgccaggatgactatccctgttgtaaaggatgggtcgattggacgtttctgcaaggctgggtttatcgctaccaacacagcccccactaatttagcaatagcgcattaggctaacaagaagccaacagatcagctgcggacgattctacctaaaacttccggaggccttgtcggaggtgggtcagccttggaattttttcaaatttgcgaagccagtgttgccttcgaaccgggtttttttgcccgaaacattccattcgttatctgatgtgatataggaggaaattgagtcgtgttcgccataagaaagcagaggcttggattttctttaccaatgcggcgccggcctgactttcacagattgatccctcggttagagcaggtgaaggcgtcttattttgcccccataggcaagggtgacgatctctttgtatatagccgctggactcctcgagaggcacttttgcccaatttgccctcgtcttctccagaagatatactctatctttgatatctcaaagcgtctttggcactacataccgtcaaaatttcgcagtccaattgagaaactacataccttcaaaatcacagtcaactctatctagcaatggaaaacggttgtatttcgcccgcaccgatcccacattgttctcatggaaagtacatggatacaaggaagctagttctcctgctgcgtgagcaatatggcgcatccaattttcgcattgatgtaagatgccattctccactctagggttgattccttaatgacaagctaaccgttaggttgttagttacaacgagaccagtatatggtatacataaataatagaacatcacgaagttcctatcttactgatgtacgtttccagaatgtctatcgagccttcgctgacacttccataggcagagatcgaagactgtcgatgtccatgctgacccatgatgccatcagaaggaggggtgcaggaagatgctcggcgcttatttccggctatgtgctacagcagtgttagtttccattattgagctcgtttccaggcatttttttttgtacgtatttttcaacaaatcaatgacaggatttccattgtacatgtaggaagggtgtatggttgtgtacatggcaatgcgtggccacagctacagggtaggctgggcagtgttacctcatgcccttcggtctgctaagcccacggataccttgctggtgacacggctaatgatgcctgacccaccccagtttttttagtgctgcagcctgaggggctaaggtgacttgggtcaggcgaaaaacgcaactgcccttcgtgcccagtagccccggtatctgctgttctgaccaggcttttcccaactcacgcaaggctgaataccgcctattaagctctcctttaggctaggttgaaagtaggacttgaggcttagtgctatatgacgagcctttatagccctgtatactcgatgaaatggcaaaacaccgaaataaatgaaatgccgctttagaagacgacaccaacagcagaacacttatacatattctgagttcttagagactactatctgcagatggatcaatacttgctggagagagcgaatgctcgttcagacaaaatatttagggcaaagcccacacggacccagctccagctccagaccatcgagaaagtccaagaagacagtgaagtatggaggttccagttcggagaacggagccaaatcaatcagattcatgagttggaggaggcatatccggtatatataggccagcatcaaactgccatggaaccgctaacatagcgcagcgcagaccgagcgagtgcattcggatctacactattcaacatgtaagatcttggaagacgctagacatttctcgtgagatcttcgaccggttattggcgatttatcaagtgttcccggagatctggagggttctgctcactttcggattgaggtcatgcgagaacgaatatggatttccgccgccacaagtgagagaatcaagagagaattcaatggaaactcgaggctcgcccgaatataaacccatgaagaagaattgtgcgctgactgcgtatagaattgacatatgttatgcggcgagttgaacggaacggcaagttggcaccaggatgtccctggtcgatccgacaaacaggcgtataccagaaattggtacagccagcggacagctcccaagaggccatctcaacattcttcctggtggcaccgtcctcggcaattgagagcgatctcatgcgaaacttgggtgatattaccaacaacgtgaaggcagcctttttaattcataagagtattgtggcagagagtttggcgggttggatggattatatgtgctgtttagaggagcaactaaccaaaaaggtctgcggctcctacggtccacatcgtctcaaaatataggactggccgagactaacgtggtgcgatagtcaacgcgagtgatggcgacgcctaatgaac

SEQ ID NO: 2671 - DNA, 1151 bp, Emericella nidulans
agcctccagcgtgggccgtaagtaaccccaaacttcatcgtggtattcctcctcgacagacatccactccgccgcaccgggcagatttgccaagacagtatctcgcagcgaagttgcgtctgtcgccgacgcagcaggaaccgtatccaggaatgagccaatatctgggacgagactgaacgagttaagctgtcgcttctgctgtgtgtcagtcgttgactgcgagtcgggtggtaactggcgtcggaacgactcaatcatttgcatctcctctggggtaagctgaagtggggagagctccgtctcgacatattctggaggttcgttggctgagggagggaattccggatcgaaagtttgatcattcagaattgcgactacagcgtcgccgtcggacgggtttagagtcggcggtgcggtggttccatcgtggtaaatcgaggatgtaagcccagacccaggtactgagtttatagctctgcctttcccttttgtctcgtcgagaggatcgattgtgtccgacaaattcccgccataagtgctctggaattcgtcctccgtgagccgaggtagctcgaatcctcccgaatgagtcgcgcccggtgatctgaatgtttccgcggggacatgaacgttgtgatcgcgagaagccgacgaagatggcccggtagtgtctttgtattgctctgcggctgctaaggctgaggaagatgaagacggcgcagccttgccactgtctgagagtagatgcgcggtatctcccgagggagtagaggagaagaaagcatttctcgcgagcccagaggctgatttttgaatgcgtgaagctagagactgagtatcctggtcagactgtgcagggtcgccgtcgttcctgtctggtcgttgtttcgtcggagtattgctatcctcagaactaccccgcttctggtgatcggacatggtcggtcggccgagtggtgcggcaccgctaagagggaacgggagctgtgagagcggtagggctagaatcctttaaggagcttgggctggcgagggcagtgagtagacagaagtatagctgtcaggtcttgccgacagcttgtggctgctacggttcggatccctttagtgagggttaattcgacgctctatgacacacatccaatata

SEQ ID NO: 2672 - DNA, 4655 bp, Emericella nidulans
gcagagtaggtgaccgacccggaaccttgggtaaggccgtgataactggcggcgaaggcgatgacctcaaagttgccggtgtagactttggcgatcttgatggcggcctcggtggattcagagccggtgttgagaaagaaggacttctcaaggggagcggggaggaagcgagctaatcgttcagcgagatcgacgacggggtgggtgatcatattgctgaggaggtggtcgagctcgccgatatactgcttcacaacttcgacgatatctggatgcgagtgaccgaggagcgagctcatctggccagaggtgaagtcgagaattgaacggccatcttgattgtagaggcgggttccttttgccttagtgacgacaaagggagaatatggcactccagtgctcatgaggtacttgtcagctttgtcgaagaaggcttcaacgtggtcgacggagcccattttggtgacaggaggtgtatatagagaggaagagagagcgaagaacgaacaatcgcttcaagccagactgaacagaacccatcttaacttaaatcttgagagagacagtggatgtgttaagttggatctgtcttcgccaaccgcgggcagtcgtgtatgcaattgcccgcggctaagttgatactgacgggagattcatggctgataagatctctagccaatcatggcatgtaattggatccaccacttgaccgcggccaactttccttcaatgctatcactatgagatgttctatcagccgtctgctaaggtttagtgtcggcctcttgaatgcatcttgataacaagagtgataggctcgcaaccacaggatatttattcacggccatcctcgcaaaatcaccacccccattgcctggcattctatgccattgttcgcaagatggaaagccaggtagatggacgaccatacaggtctcacattcacccagcttgcttttcatgcagaaagcgcaagtcccgctgtaaaaccaagagccctgcggaaatttgtgtcatgtgccaggaatatggcactgaatgtgtttttccgcgcgcggacgacccgcgaatccctcgccagagaaaccggccgcggagagtggtccctaatgcaagatcatccaaatccatagaacacaggtcatacccccatcctcagacccagtctcatgcaaactcagctgccaatcgagacgagcagcgaccaaatggtccccaaccgcatgtttctgcggactctgagctccaagagcgatcacgcgtccgcgaaaatgcttcatgtaccgctgccccaggggttaggacaggaagcttccctcacttcatgggaattggcgcagaatccgagggcgatggctctcacatcatcagcccagctgtcgccgatgataacgagattttagaaagctatctctcgacgattcccttcgctcaaaagagatgcatgattccgacaggctcaaattccaaccgacatttcggcccagtgtggttcaatgttgtgcccaggcggcccttgggtgttgtagcaaaccagtcatttgctgcctcgaaatgtgagctcattgagaagtatatggaccctgatatcgaggagtacataaatttgtgagttcacctgcggatgctgagataaccctcgttaaatagcttcaggttctttctcaaagccaatccatgcttccctgtattcgacgaagtttctttccggagcagttattcctctcacaaagagaaaatctctcctgccctgctctgcaatctgtacgccaactctcttatttattgggggagctctaccaagttgtcttccggtcgcattccagacatccgttatatctggaaccaggccaatgaggctcttcattccgaattatttctgtcacccgggctttcatcaataatggctatactcatcaacgtcaatggcaggcccagtacttcgatgttcgggaatggaggcatggttggaatggcggttgcgttgtccaatgcgttgggactcaatcgcgaccctaccggctggagcatatcaccgctggaaaaaagcttgaggataaggatctggtggctggtacttatacatgatcgctggtatggcggcttctggattaccgctgcttccactaacgtgaagcaggtgcagtctggcctacggtacgcctttgcacgtgcatcgcgcgcagtacgacgtgccatttccatctgtcgaagatatctgccccggctctgcttcacctagtgataaggctgctgcatctgttttcgtggctttgacaaccctgaccgacgtgctggcacgctacttggagcatgtatacagcgtttcgagagaattcctgcagaccaccaagatgtctgagatggatctggagcagatcctccgagactgggaggaatctttgagtgacaacatgcgccatcttgtgttccgagggacccgtttagacatccctggggctgcgaattttcgatcggcgtacctctctgtcaagcttctcgttcgccgactccaactcaatatgaacaagcgagccctggactttgaagatgatatcgtaactccaatctatgtgcatgcccagagagcggcagaagagatcgcttatctcgtgcaggaactagacgaaagtcaattccgtggattttggattccagcccacgccttctctttgacctctgcaaccatgttcctgctccgcagtggtctgcggatgaggaattatggccgtaacgcggcacttcagactgctcgggacatgataaacgccctccagtctcatcgccaaaactacaattgggatcttgcagacaattgtttgactcaatgctctgaattacttgagaggattggtgcagctgagtccaacaggagtatagaagcaccagagttctcgagtattccgatgaacttagacgatctggacatagatccttctgtcttggaagagttctttggcaacactggcttcggtagtgctggcttcacggaaggactggaactctggtagcacagtgccggaggcaagatcgatggatgactcggtacgagtcgttggggacctgagacggactcgagttggagatttgacgggcattggggcttccggccaaacccagttctttcccagaatacaggttctaattccgtcattagtcccttcccgttttggcctgtttctaagactcgagttcggttcccccccgaaggcccaggctttctaaccgcatcgctcctccaagcgcctatcatctacttatccaaacactttattgatttattgcgaaagatactccatggtgagtggcgcgcggacttgtgtacgaaccgtgaagtaacaggatagatgcggtccctttaccacgtagccggttgtctgttactgttcgctggcgacagagcgtggcggcattcgaaacttttcactagctcacctgcgttcgttgaacatcccttcccaacgatcagcgtcgaatgtcccgaacttggccgctcaggaacctacattgacagagaccacacttcagagggcgccggaattgtcccagctctagcgtggccttctgcaacgtataataccgtagagtatgtcctaatcagtgaagacccagatgcacctattccagagcctgttgtccacgggatatactatcggatttcgcgggataagactggagtgcaaaaccctgattttcgcatccacaacgccagttgggaaccatacatgcttcgaggcggcttcaagtacggaaaaaacaggcatgacaccgtctatgctccgccgactccattccttggtgacggaccgcaccgcttcttctttgagcttattgcattgaatgactcgattgatacggataagatgagccccttggcgacctatgatgagctcaaacgggaggtctttgggaaggtcgccggttggggtgaatgggttggagtgttcgaaaaccctcgacatcaatctgaggaacgtcgctgattgatgtttgcaacgattcgaagcctggcttgtttgttgccaggcgtttatctttatcggaaaagcaatatcgcatggtgtttccatccaatggtacgcaaatgaaacacaatttcggtagagttattgctcaatctcatgataaaagctagtgtagacgttggtagactctgaggagcctaagtgacaaaagagtaccgaagcgaaagatagtgcagagcttgtctcaaagtcaggtatacttcgaaaactctcgtcttgacttgatggtgcaggaagacagatgacatattcctttgaaagcgtggtttcccaacgacgatctattgcagatcgaggatacggttcgaagctaagctgcctaactcacgttcggaaacttgaagtcttgaggtgaggcgttagcactagaccaaaccaggactagtgggtttctccttgaatcgtagccaataactgctttgtgatagcgccaagaatagaatctgagtctgactccaccggcatggccgggctttcactcctgaattctaaagctcgagcagcagccacgggcagcttcacaggacctttgcaagacctttgacttgagctcgatagaatgctggatagcattgacggatcaggtgcatcactgcatcactctgaacccatccctgagcagcagaagaa

SEQ ID NO: 2673 - DNA, 2532 bp, Emericella nidulans
tctacccgggcattgcggctaaaaaagcgaagctcgggctcctaactcatacctttgtatcgagtccgataattcaatggattctaccagcacgcctgaggagcaagtatcagaatgatgttgtgtttgttggcgagcgatgcttgcaaatcaaggaagcgatatcagggacacacctagaggaggtcactacaaagtcggacttcgatgcttatatcatggcggctaaggtcattaacgtcagcacggaattaccctgggaagtccagatgaaggccgggtctagcactgcggatgccagcctagatgcacgggacgagcttcctcctcagataatggttcttagcctcgcttcaaaggagctagtgttcctgtgttattcacgcgctgccggacaatttattcattgtcatcgtccattgccgagcgatgttagcaccttcgagagattcggtcgtaatattgctgtcgagccgaggtaagcccccctacttgatcctttgagacagtgctctgacctcgtcataggtctcgagcagttgccgtgagtgcttctagcgactactttggcgtgttcgttctgaaagctccttccgtcgtgcaagctcaaatgttagaagatcagttggatcccgtggcagaggtgcgaacagaaccatcgtactattttgaaggacccccttaacacttactgtcgactaataggagcgattttttcgccttgatggcgacatcatcttcatggacttcctctatccgaaatctgaagatggcgataagatcattcttcttctcttggtgtctcacgagcagaccacacacgctgtatgctacgagtggaatgcgcatcagagcctacgacaatctcatccccgtgtcactagaaagtcgttaccagctgacgacaggttgcctactatgctaatcccattgaccaaggcctcatctttcatgctggtcactacaactacgatgactgtctaccggaataagctcgatctcccaggaccacctatcaagtatccaatccccgttcctgaccgtgagcagcagaagtcgcctctttggacccgatgggcacggcctctgcgtaatgcagtgtacaaccagatgcatgatgacatttacctctgccgtgaggatggaaggatagattatttgggtgttggaaacgaaggtgaagtcgagaaccagattcagcttggatacttgttttgcgatgtcgacgctgccttcgatatcctagatatcggctacgagggcggtgatcttcttctagccgctggtagtactggggatggtgggctctttgtccagaaagcccgagaccaaccccgctgcgttcagagattcaccaactggtcaccggtcacggactccgtgattgtaaagcaggcccccagccagaatacggcggcagactgtgttgtcggtgatcgtttgttcgtttgctctgcatcatctttcggacgcggggctgtggttgagctgcgacatgggattgaagcccaagttggactattgatatccctggaggaactttcaggagccagagacatatggatcctaccggacagcatcaacggcggcgttctcatgttgacatctgaccctgtgtcttcagcatttttatatttaccgactgatttcactgaagagatatccgctatcgacgaagcggattgtgggttggactcaaactcgccgactcttgctgcaggatacatcgagccgggtatgcttgtgcaagttactgataaagcgatatttatgggcgcaacgacggatgcacagttccgttctcggagtgacctccatattggtcaaagcgcccgcgcggctgctgtgcatggcccaacgaacaaagttattacggccatccgcactcaccaggaattacaaatacgttctaaaagaattactcaactgggcatcgatcttcagttatccgaaatcattccgccgttcaatatcgactacgaaccgatctgcataacagttgaggaattgggcattggtactttggtcttcattggcagcggcgatggcagggtgctcgtttatcgcattgatgatagcttcaaactactctttgacttcactgtgaaagtcgagagtgatgatgacatatccaaggcgattgacagtctagcagtcattgcccacgcaaaggggacgcttagcaaggcagtcctgctctgcggcttgaggagtggttatttggttatgcttgatatcgcgatggatgcaataaatatcaatgcgcccttaggtaagatctgtgttgtgatatcttgctctaatcgagacgggtttactaatgcatagacgtatagatatgcggcaagccacaatcaaacacctgggatatacttctgtacaagtgcagagcaccgtaagcactggtttaatgacatgcggtaatagcttctggcgattaacatgctctcaagagaatgaggctagtgactgtgctattcagcggatatggataacagaccagaataaagaaagtctccgaaatcattaacc

SEQ ID NO: 2674 - DNA, 2028 bp, Emericella nidulans
tgcgacaacatcgggccaaatggcgataacagagttgcttcttgaacatggtgcgaatatcgaatacagatgccgcgagggttgtactccgcttctgctggcagcacaaaataaccagatacctgttgcttgccttttgatttcttgaggtgcagatattctggccgagaatatatggggcaaaagttcaatctacgtgtctttatgtgaaggattttacgaagtgctttacaagaaatgctccttggatcccctaaagagtcccattctcgcaagagtacataaagaagggtatgcaagatgtcttactggcggcaaccaactattggcagtcatctcagtgggttcagtatgcgatctccaggggtgctgataaattatcaaaaaaagcaaatatgacccaactgcattgcttgttgcagcacgcggtgcagacccagccatagtccaactacttctagagaatggagcagaccccaacatcaagaagcccagatccacagtttgccccaaagggtcggcaatcagtatctgggtactccaaagacacgaccaggccactaaggtcatgactgcctagtgctggccctaatacaaatggttcacacagatcgcgtgacttcaaggcggcagtgctcacctactagaatgggaagggcaatggttttggcgtccgtagatttttgataggtaggtaaactctttgtggatccacaggccactctgggcatagggttactgtaatacaagccagtagaacagtagtattggatgtggcaatacacttctagtctaaagcttttagtaatccttccaagtgccagatgactcctcatcgcagtctctatacccaatacccaccaagctatagggtcgaaaggtacctgactgtgtaggtaggctaggaagaatagaccctctctcaagaatatcacgtcatgcatgcacttggtgaatgatgagcaacagaaaatgcgatcataccgtgtcatgttgccggagagtttgagtatcggatcatctctatagatgagggtccggtacgggcacttgctaaaccctagcccggcggccagctgcatttgccctataaaacggcatcaaaccagttcagaactactcatcaaagtgcaacaaaaccctcggcctaatgtgacttgtgcaatacgcggctctggatggaactcactggccaggtctgctcaggagtacactaaacctaccgaagcagacaacgaataagtgttgaatgtacatagttgaacagcgaagtgcctacctactcgccctaatcaattggaacgccatcttcggatcggccgctgtgtccgcaaaacacagcccctcctctgtcgcacctaacatatcccagcacaggatcttcacgtcgaatggcgatgactggacatcatctgatgaagggcttgatacgatagaattggagtccgtcgtccgctgccgctgagacacagcaacgatcgtgctcgtcccggcataccgggcgggtgaaggagaaccatcttcttcacctgcgcggttcgcgaagacaatgatgattctcttgtcggcgtctgtgctacccacgtctgcatccgcgtcatcggcgttcctactgtggttcatctgctttgtgattagaggcataaatcgctggatccagtagttgaatgtatctatctctggcttctctgcgagggcgtcgagttcctcacgacttagcagcgttagcaggccatggacagaatgacgagttgggatttagactcgaggacacggtgcgcgaattcgtaggctgtgtaaggagcttcaaaacggtaagggtttatgtccatgcatattccaaatgaggtagctatttctttgtccggtttgtcctgcgactgaggtggcggagggagaatagcggcttcaccttcggctctagcgtttaaagaaccagaactctcctttgcgttggggaatgtaagctggtggaatctgagttcggcggaacctcctcagcccatgtttcgtctgtgtagtagagaa

SEQ ID NO: 2675 - DNA, 1216 bp, Emericella nidulans
gcggattccagatcgatgatcagacaaatccgcttgtcggggccgcggcgagagtcgaaattctccagaagctaggtgcgtcattgctggagaataagaatatttttggaccgtcgggaagaccaggggatcttgtcggtatgtcaacacttgtcacggcctgcctcctatgatgcgggcgagcagtgctatactaacaacaggcccatgcgaagactacttaactcgcaatggaagcagtagcctcgactacgccgagctctggagtaccctgcagacactcctcatcccgatctggccgtcggaccgaacgaaggtagccggaaagcccgtaggcgacgcctggcctttaatggcactacgcaagcacgagtcaaccgccggcatgccggtcgagacagcgacaattgctcccttccacaaactgacccagtggctggcctactcactcaaagtccctttcgagcggctgctgggcaccacatgggcgaacgcgcagctgggcactggactgcctgagtaccgcaatggcgggctctttgtcgacatgggcgtgctttcgctgaaacgcgaggcgatggaacgaggactccagaattcgggcggctccttaccctgctttggtgccggggatgacgagatcgtggagtggcgagcgatgacggttgcgctcctggatgtcctgcaccagcggatcctggagagcgggaagtttggcgatgtcaggctatccctgccgcagattctggaggctgggtcctggaaggccgggagggaacttgcggcccagaatcggccggagacgagatcgagcccgattctgaattcaggggatgggacgttgttctgaaatctgttagtctcagacaggggtcagttgcaaaattggatatagttctgcttcggggctcgttaaatgttttgaccaatcatcccagacggaacaaatatcagcatgtgcatgtgcatgtgaattgatttcccgccccctttttccctctttgtcccctcctttttttctttacttatttatttttttttatcaatcaacaatagccgccaagacccacacctggagatcttgagctcgagtataccccgcggtgtatatttaccctctacgtttgggagcccgaagcatgacatcaccgctagatgtcctttgcaagataagcaatggtaatgattggcgttgctctcactgcggacagacccg

SEQ ID NO: 2676 - DNA, 1746 bp, Emericella nidulans
acctatcgtacggcaatagcttcggtattggctgctcccgagtcagaagccaaacagacgcacctgttttttctcgacaattccatccaagtctttctcaccatgacgatgcagcggttcccgatggcgtcgggagtatactgcggagggatctcgattgctatacggtagggtccccttcttctagacaacccagctaacgccaactagtggcctctttcttctccaccggcatgttcttgcccaaacaaaagacccgtcgggcgatgtcgactatccgaagggggcgtatcccagctcccgtgccgcgctggatactgtgaccaagatcgtcagtgacattgcgacagcgcgccagcagctctcgcccgaccggctcgacgcgtatccaccgacctatgcctacctcgttcgggcggcgctgcagtatatccacgaagagtgccagccgctgacccctgggtcgtggctgtgggaggcggaaaagcggctgcagcattcgcttgaactgctgaagcgcagatggcggtgacgtcatctgtcatcatacctagtcttcaggcagaaaactcaggcaggatttcaggcatatcttagacagtgcttgcatgatcaccagggccgccagacagccgtgacaccctggatagatgtatataggtaacaataataataataataataataatgtttatatatcactgtgtgctttttctagggatgctctaattgctgagatattggctaaagatcagttcaccaagcagttgggcaagtgtacacctagcactctagatgcactctaggtatatatccactgattttgcatgtcaaaagtcccatctgacatctttcagccccgcgtctgtggtctacttggtctactacggctgtcagcagttgtgaagtgccgttgtgtgtcaggccattgcggagaattccgtcctcaaggaagaaccccttggaccatagttcccagtcattttgtaccaacacgatttgatgggcgagatgccgaacaggaagcgatgcgatggggacgacatgattcgtttatcgggtgcttgccaatcgatcggcgcccttctgccccccgcgtccgcttaaattccaaggatcgagatggctctggccctggaagagtagtggcggcgggtcttggagagcccttcaactatcaatgatacgctaatacgacgatggcggaggattgcacgtgcgccacgactctctcgccccgctggagaaacattcttggaaagtcttccaagaaagtcaacttcactcgcctcctgcactgcagggtgcaagttcattctcaatccatcggctctagctttgtctagcttcctgaatgcagctccttgtggaatccaaccgtcttatcccctgagctcatactgagcatgcaggaatacctctcaccagcgcttcggcaaccaccattgcctgactcggagaagaagcgattgcgcgaactgtccaggttcgtctcttcaactgcgcaataatccctactcgtactagagagactcatctgttcttctattaggtattactgtgccatccgcccgtcctccgtacctcaagatcctgacgcatcgttgactcagagtgagcccgagaacgaatcccgtctcaatgtcgcccaacttccgtctgatatcaccttgaccgctcttacgcagctcggcgtgcatcgacttgggtgcgagcggtcgtttgcctcgctcattgacggacaca

SEQ ID NO: 2677 - DNA, 2018 bp, Emericella nidulans
cgtaactgtttggatcagatacttcaggctttctgcaaggataacagaaacgggaccttgaaaactgtttctccgacaccggcaatccggccagatgtccaggactccagaataccctccggcgtgggagttgacgcgactgacgaagttctctgacataggtcgcggaacctaatttgcccgtagagcgggtaaccaccgagctcttctagcttcgctttgacctctctctgtggccatcttggtacatttggatggacgtaagtccgatccaacttgatcataacgaaccagttgatggtagtgtcaaagtttgggataatggtccagaaggcgtgtaagtacgaccgggtgtagatctctcctggcttcatcgtggcagtcatctcttttgatggggtggtcatgccgaaaagacacatgtagtcgaccgtcattttgctcttgtccttgactagggccggcgaggccgggggctctgttagccgctccatctctttcagggtgattccgtggaccccatctgcgccgacgactatgtctccggtgtaatgctccccgttttcggttgtaaccgttaattgtccgttagattctgtgctgcggtcgatgccgacaactttggccccaactttcacctttgagcgtccttctagagtattgaagagagcgtatagcaagtttcgacgtgtgagcgcggagaatgggtaaccaatcctggataagttagtcctagcactatcaagacaaagactgtgaggaatcactccgtaagattttgagcaaacatcgcgtgtcgatgggtatatccctcaggtagccctacattgactgcctgtatatcattcatatatttccacaaatgatcgaggacgcccagctggtcgaggatgcggcatccagctggctggagggcaacagagccaccaatattcgtcgtgatatctcggggcttttcgagaacaacatagtcgatcccggctttctccaggcaatgagcgagtgtgaggcccgagacggcaccgccaatgataatgacccgcagctgcgagttgtctctatcgaatgtcattgtggatagatcctcggcgtatgagcagaaagatatgaatataacatcaaagacagagagtgaatagagaatatataaggtgtcccaccttggtgtcgtttccatccaccgcgtatgtgcgagcgttgatccggttgtggaagtgttgcttttttgttagatcttgttttcacatcgatgtttgttgttggagccaggatttgctacggcgtgatcaccgacacaactgcaaacaaatcaattcaaattaccctgtgccttgaagcaatatgttcatccggactattgtcgtatcggtacccgagatgcgacatccatccataagacggagtttctaggtgccgagccacttgctgttgtgggagcaggatacttagtcttaaccaaaatactcgagaccggtgacgcttctagcgtgatgcgagttatcggcctcctactttcgctgtcgttgggctttccttctttaattggctcaccaagccatactccaatcttgacttgggcgtatctgccggggtgagcatgcacgagcgatcacagctgacactaacagttttccgctcagcatactgtgatgtactttgcattctctgattgaagaaatcccgtcgcatcaagtgaagcttgtaggatctctgcgcgttggtttgcaaatgagcgagaaaggcagttgagtctgcgcagttcctttgcaccagatagagctgcgggggtttttgatacaatccgaattgctgggcagcttatattacccaaaaatagagtcaggaatcctatttgttggaatggtgctccggatatggttactggagacccccttgccgggctacccttatttgaagactcatattccctgccttcttgcaatataatcagctctcctaaatccaaacttcattactgcggaattcgataatcgtgacaatttttaggtgttgccccg

SEQ ID NO: 2678 - DNA, 1168 bp, Emericella nidulans
catcggaggcatgacgcaggtaccgttatatttctacggtattcttcttgctctcggctggaacgagattgttgctggtaagagttagctttgtcaaaccctctttttgttgctgaccgttgatgccagttctgcgtaacccggcctacttcttcctgctcttcgtatgcgctgtcggcgcatacgtcacttaccagctcaacctatggggaccgatcctgaagatgacggaagcggcatccaaccaggcgatgatcgagggtaagcgccggctgcgagagtttctcgagacttcagatactgggcgccaggcgattgcgatgtcaagctctggctcttcgcgttctggcaacgaacacgagatgtcccggctcaacaagcaggggaaatcctcgacggacgaggacgtggatgacctatgagctattgatgtgtaactctacgtaattagcatgtctatgttcgaataaataattatattattgcgttagaccttgtcaactgttctggttattctggttaatgtatgtacgtctccgcttgctggcggacttgctccgaaccggacgtcccccacctggctccgattctcatgcattatttagttgcgggacatgtggacgtgctgctggaggctaatcgtgacagctctaccgtgctccagactgcttaagattttcatcaacagcagacgacccacaactgaccattttgaccagctcattatgactactttcgacctaccagagacatttgatgacctccccaacaagcgccaatactggcctgctccgaaaggctcgcccgaagagggcctaggcatgctccgtatcctgaccccggacatcgttgccaatgcagcccgccaaatccaaacgggcgagcgggtatgtctgaactgggatattgagaacttgaatcctccaggtgggctaccctcatgcagatgagcctgttctcaactcacaaaagggcaaggtttcaaacgcaagccctttgagcacaggataaaatgggtcgcagaaggcgtggcttttgatgacgaatatcacttcaatccacagcagtcatctcaatgggacggcctccgtcaccacaatgggcccgcaccaacggccgaagatcccactgccgacttttctacggaggaacgagcggcgaaggaatt

SEQ ID NO: 2679 - DNA, 1111 bp, Emericella nidulans
ctcccagttgagatgtagtcgttcttcgtacgcgcagggacggccctaaaactgttagctggtatattcaggtctcagtcacagggaacatacagtgaagattatcgtgcggatgttgtcctcaaagccagctgtgcggacagcttcctggtgagctttgggagcacccgcctcctcagaaagaatgaaccgggtaccaacccagacaccggaagctccaagcatgagagcagcggcaagagagttgccgttgaacaggccaccagcagcaacaacctgcacaggcttgccagtgaaagagctgatcttgccctcgcagagtttggccacggtggggataagaacagttgtaggaacatcaccagtgtgaccgccaccttcaccaccctgggcgcaaatgatatccgcaccgatatcaatagccttctgcacgtgtttggggtggccaatcatgttcatgtagagaactccatttttgtgaagtttatcgacaacggccttgggaggaacaccgacggcagagacgaagagcttagcaccgctctcaatgatgatgtcgacgagttcgtttagcttgccctttgtgtagtcgtaactttaacggttagcagacatgcaacgattatgcttcccaacagtaagaacgacagataaacgtacttcgtcttacgcgcgctaccaccaacttgaggaagcagcagatcaacaccgaaaggagcgttcttgtccttcagatagctcttgagctcggcaacttgctcacggagcatgtcaggagtgtatccgacgccaccgataacaccgagaccaccagcgttggtgactgccgcagccagcttaggcccagcagccacgttcattcctgccagcaggacggggtggttgatctggagcagatcagtgagcgtagtcttgatcttctctggaaggagtcagccgaagttgccacaccatcacatgtgataagaacctacgaggggaggccatggttatggaaaacagagaagcaacaaaggttcgatataagggtgaaagaacagtagttcagtaggaagagggaagtaggaggaggataactaggcggatcgagactgaaaagaacagatataga

SEQ ID NO: 2680 - DNA, 909 bp, Emericella nidulans
gacacaagcgctatctccgctgctttcatggcgactcctggcgctgcgctgtgggcgatcgatggcacattgctggcgttgacggcgacaaagacggggtcgccgcgttcaccggtctatcctcataccagttagctacggcgctctatgtatcgagggctggattgatctggatcgctgacgtacaccaggccactgactatgtagcttcgcctgcggccagagcggataatcctggacattcgtgaaccgctgcgagatgaactctgcggagaacacgctctcgccgtatccgtctgctgggagaactggggaccgcgcggtcatggttctatcagcgatgtatacctcgtagccgtgggaaaggaaccaagacgcccagccgcggccgccatcaggcttgttgagaaagttctactccaatcgttagcatccgtaggtctcgacaccaccggagagatatggttgagagggccgcaccgtgccggtctgagcacccccatgtagaaacacaatcggatagagctgtgtggtcccccttgccggcgagagcttctcgacgtacatctggttatgcatcatccagccatcggtggtgttgacgtactccccgccgacgtagaagtatgagcggcgatgaagagcttcggcttcatggctgtcagtcgcagcaggggtaaaagctaagctgccttgaatgagggcgccgagcgcctgcaggaggcacgctgcctgggtgagccgaaacatcgcggcgcgctgcgacgtgaggcggaaagcttgacagttgaaaacacgacagggatctgaaaaggcgaagccgagccggtaagtatccctgacagggctgtcaagccgccaatatgtactcaaataatcttagccagacagcccagagcactagttatg

SEQ ID NO: 2681 - DNA, 1052 bp, Emericella nidulans
atatattctgtaccgagccttcgctgtggctttcaccccgtaagaatgtggtatctagatacaaaagaaatgcgcatagaaccagcaaagctggcatgtgaaagtgacctccccattataaccaattgatcccatcggcaaagagagcgaggttagattaaccactcgcgctggggtcctccctctccaaaaacgtcggatcgacattgatcctcctctcaaatttcgtccaccagtcatgaaaagccttaagcggcacgacttcctgcccccgattcgacggatcactcgacgcgaagctcgccaggaaattgaacgcgttccccacgattctctgtgccagcaccttcgtagtaatccctttctgctgcggcgtctgcttgatcaaatctgttgatgcccctccattgcctccattcgcagcctcaagctgcgcaagctgcggcgcaactacctgcaccggctcaattgatatccctagcgtcaccatgccaccattcccggcgtctaccatctggtctcccccctgcgcacctgtgcggaccgacgggctgactttaataacagacgacggcttctcatttgcaagggcgccaatgaaacggaattccgagccaggatattgaatgtagatagcagcagctgtgtcttgcgggaggacggtgcccggaaggaagaagacgactaattcggaaaaggatggtgatagcgggaagttaaaagcaaattttgtggcttgcccatttggctgagggtcaacggcgacgatgtctgttaggcagggccggccgggaattatgacggagaacatggtgactgcggatgatggaggtatatggtaggtaggtaggtaggcaaacggcgtttagtgtaagacgtcaacagtccaattgtaagccaatgtcatgtataggagttgcgcttcaaaagcatcgtgttgtgcagagttcgtggagattctaggtgctggatggaagctcagagaagcagcaaagaaactcgaagcaccagtgacgaaaccatgcattgcccttatcgataagggcttgcgt

SEQ ID NO: 2682 - DNA, 4696 bp, Emericella nidulans
ggctctctaagtccgtttgctattgaggtccgcacagacatagatgtggagaatagcggacaatcagttcgctcttataagtgatcagatacacggtcttttttatgcctctctcttttctaggcgcaggcactatagcttttatattctctggccgccactgcacgcgcggctggtcgctgagataatgaccttgcgccccagcaatgatctgatgacctacccttgtactgcctgctataacattcccgctgtgatctcccaccctagcggtcagacgccccaagctgaggaccggagacacgtccacactccagatggtggctatctgcaagttagtaggtacgcatatacgaaaccagccggataacgctggtcggtccagtcttgctagtcttcagaaggtcggcggtcatttcgattaccagggcagagatttattatatctgctacttcatttatttatgatggctacggagttcaacgcaatgtattataccccattcagtgttttatgacctaccttgtcacgcagctgttggtcgtatacggagtgaccaaataatcactatctttatatactcttttccatgtttaatgcgcatatacatttcaggaagagaatatagttacgagtggtcatcatgagtcttcattagtctgtctgcggcatctacttacatattagtgggctgtttgcgcagtggaattctgaaggtatcaaacaaatgtcagcatgacctcgtttcaatccattctgcattgaggctgcagcacgtcaggaggtcaacgtaccagatggccctcggcaatgttagtcgcgactcgctctaccccctccgaaagaccttgtacaccagcatcccactgccgaatatgtctccccgtagcagtcgtatttgactcgaagtagattataccatcaatctggtcaatactcccgctcagccgcccttgttctaccattctggctgcatacgcttcggccttctcaccagccgtcagatccccactagcttgcagacccagaatagcgcctagcgcggtcggtctttatgttctcgtagagcttgctcgcggccacgagattgtgctcaacaacagctttatcaagtactgttgttccgtctgcggtttgtgcgagctggtgcggggctaggcgctgcgcgaacgcagatacctcttctgagtgagaagcggtcgaggaacattttctccaggatgccgaattcttcaacggaggtcgcgcggtcatctttgtacagtgttgctagagtgcgggagcgttgtggaccggccggtgcgaggacagcgcagcggatagcggccgcaagggcttggagtctgtcactctcatctacgccagcggcgaggctaacagcgaagtattcctgactggcgtccagaaaacgtctgcgggcatcttgaatccgagcttgggaaagccggaagtgcagtttcagctcgtggtcttcgatcttgctcggcaggttttttattctgttgaggaatgcctcggcactagttgtgtcgtcttcctcaaggtatagccgcacgatccgaatccaaagtttcactttggcggagtcagagactagtcgctgtgaactatcaatgtgaatcccctggagcgctcttgcagctgcgatgtactcctcctctgcttcgtatgcgtctgctaggatctcgcggatttgggcgtcttgctcctcgacggatgcggatcgggactggaggagattcacagcatgttgggctactttgatttgcgtctcggaggacagttttcgtagagtatagatgaaggagtcgaggatagggcgggcggcgacgatgctgaggtcttcgcttaggactgagtcaaggtagtagatgaggtcgtcggcaagctggggttcgggagatgccgacacggtttcggagagaaggtcgttgtaaagttgtagtttgttctggggactcgctgatgattcaatctccgcaagagcggagattatcttttgggatggcatggggaaggtttggtgatgagttgaggctggggaatttggaggtggggatctaattgctgcgtgaagctcaagcctgaagatcaatcaatacgcacttatcgataagacgtatctctacaggagacaggagcagccactgccgcattattgtcgcaagaacttactttaagaatttttctctggtacctattagattcataaatatcttgaatcacagcagtgcatgcattgcaagatatagtcattcatatacgataacttagagaaatacaagagtgtgcagattgacagatgacgttacgtatggtctgttatatattattgctagatatcctgtatttagctccttaacttacgtctccgattgctggccaaagagaataaacatttatgtattcaaactcttatctcactgcagccttggaattgcaatgggtatgatttagccaactataagctttgccatgcccaaaaagctgtctgtctgaatggtagtacagcatcttcaccgcctttgtaggacccgcattttgcgattctttcgactcgggcggtgcatggatgtattcctgagccgcctttgcatcattcaaccaacaaccacactcacttggcacttttctcagtggagggctttgctgctgccactcgctcttacttgtatccggtcgcacggtagagggcttttacttaacgcatcatgttttcccatatcaaacaagagcatgatgcctcctcaccttacattaaaccggatcccgagaccaaagacactgttctcgccgacatcgacgatgaagacgtatatgaggatgatggtgacctagactttacaaacgccgaccaaagcttatggctttcccgaataccccggtcgctctgggagcattggtccaagctggatgatgatgatgaaattcagatcggcacagtgagaatagaaggggacataaacaatcctaaaagagtacggaatagttctgggcttttaaaagactttaacgcagctaaccgagtgaaacccataggtcagtttacgcctcaccgaaagcgaggagaaccgcgacattcccaaggactatattttgtcgcggcagacgctgaattcggaaaacctgctacacatgacccagaatacatatctcttcacagaaaaggacattcctggttacgaaaatcggatggtcacttttggcgaagcgaggtctgctttatacgagtcgatgaagcgcgatgcaaggagaaaggagcggaagaagaagtgggagccctatattcgcaaaactattccgagtatgtgtagtccggttaaaatgaagcctgtgcgctgactcagtggcagagcgaactgctttggtcggacaagtgaaagaagagttcaactgtcttcctgtcgaaaacgaagaattcagaatcctctcagagaagaaggctctggaagctctgaagccgagacgagaagttaaatacgttgataaaatgccggccaagttgcttcaacaaaggcacgctctgcctggagagcagggcgcgtttgtggtatgtccgaatttgcttatacaattggtctatggctaactatgtcttcagcaagctacgaagccggccaaactcaaagcgcaggaaaacaagaccactcgtatgccgcagaacgagctgttggatcttatttaccagtgctttcgcgaatacagatactggccatttaagacactcaaagctaggcttcgccaacctgaggcttatcttaagcaaacattggagatgattgcgcacctagtgaaatccggcgatttcgccatgacgtgggagttgaagcccgaggcaagagagagtaactactcgaacgctatggacgtcaaacaagaagccgcacccggtttggactataacttcgatgagggctcggaaaccgatgcgatggcatccggcgtggataacgatgatacgcaattcgagaacgtggtctagagaagcatcttcattttttccaatgtagcataatgcacgttcggcgtcttccgggtttatgggttatttgattacgtgtttgggttgttattcttataatagccacatcattatatatttatgcagctctctgtttaacccattctacatcataagctacccagttcacgtagagcgatatataaggtttagtgcacgtgattattcaatagaggatgagcgccactgcggagttggagttgctttcatcacttcttgaaacaccacgttattggagctttaacttcctcaccgcgcaaggaaaaggtcgaaggatttacacccagctaactgtgaaacccagacttgcggtcaaaatgtccgaagatcaggacttaatggccaggatcagtcagcttgctggtacgcgatttgtgggatgcgtctccctgtttcgatagctaattttcttaggccagatcaacagattcaagaatggaaatacacccgttcagtcggcccataatgaaatgcactccaattcccatgtctcgcgacatacttcctatcgaggacgacctggttgggctccttatcgcggacgaccgtacgggcgcggtcgtggtgctgcccctcaccgtcaccgcacccttatccttaacaactatgcgacgcccgcttccaaaagctcgactcctccggacggtaggcgaagatactacgagaacagtgcc

SEQ ID NO: 2683 - DNA, 690 bp, Emericella nidulans
acccagggcctgcctattctggtgcgaccacagccgaagaaggcggatcgggcctgatcaagggtctcaagaaagtcaaaactccagagcccgagaagccttacgatccctttggcggaatggttccaaataagagagactattatacattgcgagattactatccatcctcgtatcttgatcctatccgtcaagatacacggatgctcgcgggcggatatgaccttcaagaatattactcacgaaccatgctcgaggcatttgcgggcttaggttgctttgttgacgaggaggttccgatgcgagaagcaaactccttcaacattatgaagcctattgccacacagggagctgttttagcggcgggatctggtgagggtagtgcatgagcatttcttcgaagatggaaactacctttatttgacattctgcattgcatagcggtggcgctaagtttttttttcgttgttttctcgcagttggcttcttgggttggttataccaaagaactggtatacaaggcgtaaaataggtgcggtcaatacatattctaaaatcacacagtaatattatacaagtgttgatacactatcagatcgttccaccggtgatttgttccccagcttcttgattctgccttggacaacatcccaacgctccacctcacggttctcgttaacacggcttgca

SEQ ID NO: 2684 - DNA, 4677 bp, Emericella nidulans
aggaaaggcctaggactcagacaattttatagaagcttgtaatgcggccagatccctttatttcaatctcagcaaggagcccaacaaggagcgcaaaataaatgctctttacaccgcgtccccaggtcgtgcaggtgataatcggaaccccctttttctggaggtatgcttcccacttcgctacatcttcggtactctggacggcgacacagaagtgctgcttcaggctgtcaatgtcgccatcgccctctttggctgcgtagagctgcgcgacgatctgcgcgctgggtccatggccaggaatgacgccgctgggagtagtaatatctgcgtctgtttggcccagttggaagaggaggagagttgtattgcctagggagaagcaggcactgcggtgctaggaagggtatcagcctcaccttaacagttgcccaacattgttggtgaaaagggatcgtaccgattgcatgaacggcttaatgttcagcacatcctcataaaatttccttgaagcatggatatcgcgcacgtagaggcatgtctcgaggacgtgggtgaggggaggtgggttgttttcagtggccatgatccgatcctgtacaggaacgtatctagttcaatgttcaaagagagttctatatcctatctcgtaaggactaaacaaatatggattgagcacagttgtggatcaagatacagtgagccagcttctacggagcccgtcgaatccatttatgtctaattgattgaaaattattgggttttcggctcgcatctctggcctgaggcaggctctcacttcaggatgacgctcacatagttgcgcgtgacccataaatacggactgccggagatctaccttactaagcacattagcacctcggccgagtgcttaaccactgcttaacctggttgtaactgcccaaataatttgttaacatttccttcaatgaggctctttttaagagtctcgaaaagctacaaactgtttttatatcatggatagggcatcagatctcaattatattcgtttgtcgcagacgatggtcacatgatcaagatcgacgctagcagctcttagagtgcggggtcttagctcggcgtggcttactctgaattccgcgaacatggctcagagcgcggaacggataaacattttaaacatccgaaataaagttctgactaatatactggctgtcacatcaacatcttcgcttcgcttcagagtctgtcccagattacgaagcacattcatgaaaacgcctaactacgctcctaaacaggtcttagaaagcctaatcgttgagtacgattatcttttctattaagttgtttcaattttagttattttatacgagcctattcactagtaacaatacttgtaacaatacttgcttctgatgaattctctctcataaggctttatcctacaattattagagagagctttctctactatagcttcaggtgcttatgggctgatttcatagtctcatcacgtatactagtgaagaatgtcagaatgcaagatgccagaattgtctgaaatatctaccgttagttctcgtacttgttaaagatggatctaaactaggaagttggtgaacacacccgaacttaccagccttgattgtagactcccgcaacagcttcagagcccaaccaaagccacaatatagaagatatgtcgttacgcgtaaatcactcaggggaacgcatttccggatttctgcacgaacgatatctatctgctgcgcttgacaagaaaaactccagttgctctgggtggtattactaattccaccactggctaatggttgctgtttagaataggaggaaacgacgctaaacttctgtgtggacgctcgcgtcggcgtcaagttagtggctttggtggacaagtcgctcgtaaagcctgggtttagatgccgtgatgtctatcatgatattcattgtaagaaggaggtaaaagagatctatgatagggagaggcttgtaaacaaagtcttatagacagggaactcccaggtacagcatcatctcaaccgttcactggggagttgatacatacgagtacggcgaatgagagaagcctacatacctaaattgctatgatttgctaataggccagttttagtgcaattacaatagtttagactccgtcagtggatagcctgcgggaaagagatggacctctaggccgccagctgtgatgtcgggagcatcgcacgaaatcaaccaaatacgtgtaccaaagggcgctgtgacgatatataccaccgaagctctcgataaggatctgtgatgcgttcggaggagtctctcgttgtcttctctgactgtctgctctaatccagcgcggaaggttgtcctctcaccactgccccattccaatgactcggctcctattcatgttagtggtacagatggtatagggggctcgccccttatcttggttgatgtactttgtattagacggtactcccattcacgcttctctggctccgggcggcggtgcgaatcttgccgcgtcattgacagccaggtactgatatagggtatggctgctcctaaaatgttcggtatccatatggtataagcattcctggtcttgagagtgcccggcatggccaaggtgaaacctatgcgaaagagccttccggggaacaatcccaggaagatgtcactactgcacaatcaaactttcacaagcaaatatagacccctacggtttatagctgacgattctgtatctattactgtatcatgctgggggttatggaagtacagtcctttgtgctgccattccgtagctcttgtatggtctatagggttgctttctttttaaacagcaatgaaagttactgagctaatcctcgactatgagtgacaacaaaagcccaagtcagccatgaaatatctttctctgccttatcaacaaccaatacactatgctgagccagtaaaaatgcaggaatagacggcttcctcctaccggtcattaacccctcgactacccttgcccctcgttcgcccacggccaccactccatcattcagcaagcaaaggttcccttgctcacagtcccctggcaatcaatacgctccatgttgatgccatctaacatgtcataattgtctataattctaacatgtgttctccaaggcagaacatcccgaagaaagtacgtctggacaaacaaaaacacatctccgttgcatacccggggatatacactagtatcttgtacgcgtctggggaaaatggtggttctaccgtgaaatgatcccagggacacgttggtagttcatatttgaaaatattactacgcaaaggctaatttgcctacggttctagttttaaaataatagatcattatatatctactacgtgattatattttctgtctcgagaggcttcagtgattactcgtccgtctggcataacgttgatgccagtctttagcgctaatgtcatattggtatttaacgcgtggaaggacttgttgaattcaataagacgacacttcctcagtgagcccaccgcttcttcattttatgttttggtaacgtttactggcccagggactaattagacgttctaatccagtctattagtacatatcgagccctctctacaacacacaacacctttctcttctctctctctctctctcttttttttttataatttttttttttttgaggttgtctttatatattgattcctgccagttgtttggtaaattcgaatgacatggcagacctaaaaaatacaatagtcgcggcggcatttccttcgacgggctataattatttgtttcagattgtttcgaagtatatacattctaagacgctgacccacaatcaagtaacaagacggcatgggtagctccacctttcctttcccaagcaccctcacttcagggtgaggagccctggccgatatggcagaaggtcgtagccggggttgaggctgggatctcggccctgatagaggagctgcaggttgcaagggtcgatgctcattgtctgatccggggtactgcgcacaagaatcccatggctgatatcgtccgtccaggtggcaccgctgattgctttgccagcaaaaggtgcgctctcagtggccgcctgcggtgtccatgagccaccaaggctgtcggcagtgaatgaccggaaatagcgcccctgtgccccgatcgcttcgacaatcattaggtatgtgtctttgctttgacctgagaccgtgtacacctggacagcttcgaacaagttgtttctttcatctgacaggataatctcggactcggtaccgaaatcgccggggaattggtcgatgggcatactggcgcgatagatgcggccgttgtctcccgcgaaaaagaggtacattgttgtactgtcgccgatgactgtctggtcaatgaccccggtgtctgagtctgaaattgacccggaaaagagcggttggggtgatgaccaaccattggcatcggttggatcactcgacgtcaggtaggaaaatgcagtagggccccattggtacgcgaggatccagacatccttgggctcgaagtagaatagcgtgggcgcgacacccgccccagtcattgcgttctggctcgccgagaccaaatcggaccagttcgagaagaggccgaaattcatggagccg

SEQ ID NO: 2685 - DNA, 2131 bp, Emericella nidulans
caaatctctgagcgaacctcgcccaaatcttcttcctgctgcttgacccgctcctgtagctctctgagcgttttatccaactttctctcgtacgtctggatttcggacgagcttgcccggttttcgtcgtaaaaattctcagcctttcgacggtcctcagcaaaactcagcactttctcaattcgctcttgaggtatctccatcttgcgatctgaaaacattatcacaccagtcacgctgtttgtccaaacgcgtctgttcttcgacgcactcgggatagtccaatgtacgttcccacgtgatctggcttacctggagaggactagcgtggagccaacgatcgcctcactctcaacctcacctcttcacctcttcaccgcgacaacacctcctgacaactcctccccgtcttgaactcctcgcctttgctgctctcgtctcttttcttgtcgacgtgctgatcgcgccttactggttgattttctgcatcaaccctacactctatacgagtatccccgctcttcagagccttgttgcgatagttgtgttgtacaccagcacataacgaagcgttcgtaatttagaggggaaaagatagatcgagccagcagtccgtccacttctttgagtctctttcttactttgataattcctcttccccgcgcattgcactcgtcagctcccagcacgcccgacccttgcagtatatctcctacttgtcatcgcccaacacaagcacactccgctttcatcgtacccgatcagattcaagtcgtttcctcttgtctcatcctatcccaacactgctttgcctcgcaaagcctcctgccatacaagtctctcaacgcccgtcattccacagcatttttctacgtcgatcctcacttctcccgcctcacttcctacactgtgcacgattacaccaatccttcccgttcctcaagcaccagattccctacccaatcgatcgccgaaccagcacgcttttctgggaatttctggtgtacatagtcgatcaaataaagcaagacaagtcaagacagatattcttccattgcgactctttttgagtaagcgagacaagactgcaccgttgaaataatgtccgcctccccgtccgcgttacaatcgaccaaacgtcctcttgaggacccttcgtctccgtccggacccaatgaccagcctgaggccaaacgtcctgctctggacaaagtagttaaaggagaggagtccgagaacaatgcagaggtgaagaccgagtctggtgccgcgaatgatgcagatggtcagggtgatactgttgtcccagatgccccgaagggaggcgtcagtgaaacacaaccgattcagtcgactgcttctcatggtgaagcggcgggcaaccagagcgagcagcagcggccccaggacgagtctaactggatccatatccgtgctgtaatatccagccaagaggctgccaccgtcattggtaagggcggggagaatgtatctcaaatccgccgtttgtcaggtgccaagtgtactgttagcgactactcccgcggtgctgtggagcgtatcttgactgtgagcggcccgcaagatgccgtcgctaaggtttgttttaatccgtggtaccttcttgagcaatctcactgaccatttgataggcctttggtctgatcatccgtacattgaacaacgagccccttgatgctgcttccacggctcaatcaaagacctaccccttgcgcttgttgattcctcacatcctcattggttccattattggcaaaggtggtactcgtatccgggagatccaggatgcctctggagcccgtctcaatgcttcggatgcttgccttcctctttccactgagcgatctttagtcatccttggtgtcgctgatgctgttcatatcgcaacatactatgttgctgtgactcttgtggagcagcttacagaacgttttggaggtccagcagcctctgcttatgccacccggagcggcggtcctgctggagccgtcccaggtggtatgcaggttgtaccttacgtgccccagccagctggtggtcagtatggtcatccggatacaatcaagaaacaccacccgggccaggccagagccggtgctggagcctgtgg

SEQ ID NO: 2686 - DNA, 627 bp, Emericella nidulans
gcaaccggccgcataatacgagattcactatagggatccgtcgcctccacggccaaggttccgtgctccgccacctatcgcagatgccggcaagtacgctcatacggccggccaagctccgcccgcgcgtccacgggcggcgtcaggagctacgcctgggcctccgccaccacctcgacccccgaaagctccggtggacgatgcgccgcctcggtttggggtaccaccgccgttccagggtgagcgcaaggtgtcagcccccccggcacccccaagtcgcagcccggcaggacctccgcctcctccaccgcgtaccgcaagtcccgctacaccacctcaactcccgcccaaagttcccgcattctcctcaggccctccgccgcccccaccaagaagcccggcctcccaaccgccgccccctccacctgtacctggtgcatcgcggccagttcctccacctactgcaagcgttccaccaccacctccaccaccagcacgcccgacaccaactgtaaccggacctccaccaccaccgcctccaccaccagcaagttccggacctcccatgccacctccaccgccccctccagcccctggaagctccgcgtcgccgccgccgccgccgcc

SEQ ID NO: 2687 - DNA, 2973 bp, Emericella nidulans
gtctcacgcatggacatagaattaacacacagtgtcagcagccaaagaaacacataaaaaagcccgaactggatataagaaagaaagggaaacgacactaaatttggtaataagatcagagagcaaatactggcagggctagcgccatagcccacgaccaagccatcgagcctggagcacggtggagaggcgacgcagcacccgtaaacaccggtgctgttggcgagggcgtcacggtctgcgacggcgtgtttgtggccagggttgttgtccaggggttggcgagggtggttgacccagctcccgagccggagccggaatcagagccagaagtcggcgccgcggtaggctggggaactagctcgatagtagatgtctgcaccgggttgacgcccgacccagcagtctccgtgaccgtggcagtggagaatccaacttgcggcacggtgacggtgtacgttgagtaagtaattgtcgtgcatggaggggccgtgggaaccggagactgcgattcagagccagtctgttcagggctcacatccgtaggcgtcgcggcgggaggcggggtgagggtgatcgtcgtaggaacattggtgatgattccggggttctcagggacataagcggcgcagataccagccatgtaggagagagcggcttgaacctcgtctgcatcagcaccccatgcctggatacaagagataaccttctcggtgaactcggatgaggggcagaagcaggtgatatcgctgttggacttgcagtccgggatgaggttgagccaggtattgatacatttaggaacaacgttggggcaagaggtcgttgggacgggggtagaggaggtttctgtctccgagggggttgaaggagtttcctcaggagagacagaggttggcacggcgatggttgaggtagaagtcagggtctgcgtagagatcgtggtgtaagttgacgtgattgtggaatcgccgctggtgattgtggttgttgcagggcaggtagtgacagtcgtgtatgtgatctcggtgacggttgacccggcaactggtgcctcaggggttgtcgtggggaggaccacggttggcacggaggcggttgccgactcggtaatcgtggcggtagagacagtgggtaagtggaagtgattgtggaatcgccactagtgatagtggtagtgacagcacaggtagtgactgtggtgtaggtgatctcggtgacaggagtttcagggacaggagtctccgaggtctctggggcctctgggtggtagtagggttgacgtcggttgggacatcgggggtttccgatggaacagcaggggtctcagaaggcgatggaacaccggtcaatgtgcagcgattgcagatggtggtcgttgcagtgatggtcgtcgtgctcagagtgctggtagtcacggtagtaaacgtggactcgtcggaggtgatcgtatcggtaactgggcaccaagtgacagtcgggtaggtgatctccgtagttgtcatgtccggaggaatgaccgaagaccagccaaggctgacgctggtgggaataaccggggtagtggtttcaggggcagcaggcgtcgacgtctcagcggggattgagacagtggtagtggtctccgacgaggaggtctccgcaggagggacgtcttcagtatcagttggagtggacggcgtctctgtaggagttaccgggcaccaggtagtggacacgaataccgtcgaagttgtcaccgaggtggaatccgcagggcaattggtcacggtagacgcacactgcgtgatagtaatctcgctggtggtgtagacggttgagatggtgaatggcacggagctgctgccggggatgctcgagaaggacgtagtagtaggcgggatgacaggagtggacgaggtgacagggctggagccagtaggagtcgggacaccgatcacaggagtgctgctagacgtcggggcctctggagtaggcgtcgcggacggcgtctcggagggagtctcagcaggaggagtgtacgtcggcttgcctggaccacagacgaacccgatgcttccaataccgagatcacagtcgtcgtgctcgctgtcatctggcagctcgaatccaacagatgtagcaccaccgcactggtcattggtgacttccgtaccagcggaagagcaccgtgcgtgcttcttgcaggtcgaaccgtcgggcatgccaaaggagatgaccacgtcggcgtcgacggaggtgaagaggtggaacttgtcaatggagaagccagccctgtcctcaccgcacgagatggacgggccggaggactttgtgatacccttgccaatctttccggtaatgcatttgctctaagaagaagaatattaatggccgtcgacgcttttcgtcagagggcagggtccctatactcacattgaaggtccgggtacgcagtccaccgaaaccattgctgcagctgaagccggagaagtccaagccaccgaacgagctgaagtcgccaatatcgaggtcgtccaggtgaagccagactgctgctgctcggtacactcgttgtcggtgttatcgggagcagtatagcattcgtcactacccccacactgcccgccgcccatcaggtacggatctatatctgtagaaggaaccttggggtaactcaccaagccagtggcccgggcagtggccagaagggaaaggaccgagaccaaagaggtggtcttcatggtgttgaaaagagcggatctattgagaccaagatatcgaaaccagcgataacagaagcaacagaagcaaagtgcagagtcgggaaagactgagaagaaaggacgagactaacgagtgtctgtctaacagaatacatcagaatatcaagagagaaaagagaatgaaacgatgaagagaatgagtagacccggaacaccccccagctggggggtgggcgcagggtctttatacgagagccagcccgtagtc

SEQ ID NO: 2688 - DNA, 1341 bp, Emericella nidulans
gagttgaggattggggattgagggctcggtgctggtattggagcatgatgtgcttgttctagggttgctgaatatcgagatatcccttgtgtctccggtgtctgacgcatcaccagactgggagtgttgcactctcatagtttgtatactcggctgttgtgtgagacccacaccagagtcgtaccctgttgccgaagccgtctttggtctgggatttgaaattggagccttcaaggcaagctgggcttctgttgtaatgctttccccctgttcatcttgtgccgcgtcgcggtccccctggttgttagcgagagaggggattccttgttcgatttggtacgcaagtaaggaacaggaaaatctgattttcgactctagctctggagatatctcttgtcgactaataaatggcgacggacgtttagggggggaaggcgtgtcgacaaaatcatagtaccgggtgggcttttcgtctagggctgctgcgaacgttggtttctagatctgtaagagtgggttcgaaagcagttatatctgaaacttacctgcgagccgaatataagagacaaagaggcgcgcctctttggagcggttctagatagaaggacatccatagtgtggatggaaccatgtagtttggcgtataccgccaaagtatatgtagttggaccacacaactacaacgcacagagcaaaaacaataaggctccaggcaaccggtcctgagcagtaagcgggtacaaaggaaaaagaatgtcaataaatcaagatcaggcgaaacgagagaggacccagcgcaatggactggaatgcggggatatcaacaatgcttcgagtcgagcctcgaccgaatgccgagcggggtctgaaagcctccagggctaattccacgagcagacgatgcagaaacaggaaattcgagatctaaacgtgaacgggcacctaaaccgctgatctttgggcgaagagctgctcgagcaatgcaagcgttgcgttaagagaagccgaataaagagcgtaagggctggttagccgaacagggaaagagagaatactcccagaaaatacagaaggaatgacggtgatggatgagagaggaagaaaaagatgaagaagaaagaaagcagaaaacagcagcccaaggtcgcacggcatcacgaggcccgtgaaacaaagccggcagtatccttgaacaagcctccagagggcgaatcttgcagcaaaagcaatggctgtcatttgccaggtgtgggaaacagacatacactctctgagactcgacctattggccgcagccggatcgccgtcgtcatctcgatggtgggaagccgcaggataagg

SEQ ID NO: 2689 - DNA, 3251 bp, Emericella nidulans
tgtcggttccgatgctgcgtctgctgctggctctgctgctggctcggattcagctgctgcatctgttgtaggtaccgctgctgcgtctgctgtcggttctgctacggcgtctgctgccggctctgctgctggctcggatttggccaccggctgctcgttttcagagggctcaggtggaggtgactgtgttgctccgcccttcttcttcttcttcttttccttcttctttttctttcccgacgaagctgtggattcttcgtttagctcctctggagcagctgcaggctcttccgtcttttgaacgggctcaagctcgggctcggcggctggtgctggtgctgcctccagcactgtttcaggctctgtagttggcttagcttccgccgctgcctctggctctgcttctggcgccgctggttcaggctgcgtagctgcttcgggctttgtagctggtgctgtctccgccgccgcctctgactctgctgcttctggcgccgctggttcaggctgtgtagctgcgtcgggctctgctccttcttccggtgtcgctgtcgtttctggctccgctggttctggttccgctgctggttcaggctccgtcgccggttcggattttgttgtcggctcaggctcaggctcctctactccattcttctttttcttcttattcttcttcttgtttttcttgccagtgggcttgagttcctccgcggatgactcaggtggagtatcagccgcaggttcctcggtcgtctcagttgcagcctttttctcctcactgggcgccgggccttcttcagttgcggtttctggggcgggtgcttctgctactgcgtccgtggcagcaggctgttctgcttccgcagccggctcgggcgcggcctcttcggttggcgcaggcgttgcctcgggctctgttgtggtttcagtttcaggagatttcgcagcaggtgactggtcttcggccggttctgcagtcgctggttccgctgtctcttccgcaggcttctcctcagtaggagcctcgtccgccgcggggtcggcaggagcggtatctgtttgttcgctcggttcagcggccggctcggccgcttcctcagctggcctttcctcagcagattgtggagcagcctcttcggctggcgtctctgcttcaggttctgagccttcgggtttaggctcttctactgtatcgggaggtgtcgtcgcacccgatgatgctatcccgcttagcattatacgcttagctggatacagttgggcggcataccttccgcctccggtgaggaagcgttttcactgcttgattcatctttctgaggagcatctgggactggggcctggtccttctcagcttccggggcatcgggtttgttgtcctgattattagccgtcagataatccgcagagacaggatggtatgagaactgagccgtataacggtcgaaggtttgataacgaaattgaagattatcatcgaaagattgataactgtactgagggagctgtgcatactggatcggggaccccatgttcctcggattccgccgggtcggaaactggtttggaaacctctgggttgagaaagttgttgtcgtttaccggagcccttttggcgctgttacccttcttcttattattgccgcccttctttttggccatcgcaagggtcgggtggtcaggagtggtgtgccagctctaaaaatatgataggttcgtgtgagctgaggcttgaggcgtgaatataaaaaatcaatcagacatcagatcacggtcgcttgtgtaatcgtcggttcagggggcgtgacaggtgagaaatcaattacaaacaaggaaaaaaaataatgaggcgacgagacaggtgagaatttggatctgggagcagaaagacactggatagcagggttcagcagctgtccaagtcttattggatcgaacacaggaaatcgcagcggggaatcccgtctatccgcaagcccctgttgaccaaggcgaggcgacgtatcgcagtacgtccaggatccagttgtttggaagtctcgagattttggccttgagactgcggatgtcattgacgaactacccaaacggcatcttagctcattgggccacgtctcaaggccggtgggccgactgaggacaaggaaagacgcccctcttcgggagcattgctgcaaagtgcaatcggtctgcatcgtgcaatgatagctgctgcatggaagccagtaggagcgaagtgcggcattgggcctgagtgcgtggagatagtggaatagtggggtgtaacaatcgtccgtcgggctctgaatccagagagaggctgggccaacagttaggcgactcggccagttagtatgaatcaccagtccgactcagaaacagtttacgacggagtacagataggcccgagaaggttctctgtcgcaatccgcaactgcatgcattttggtttacattctcccaggaagccgtatgaagccgtattcccttgcttgggcaggtactgtacctgacacatctgaaaaaaacgggaccaggcatcggactcttaactcttttgtctctcggcgtcgaaaataatcaattctgcattcatcagcatagccatactatggactgttaatctccccaccaagtctctgcccaacaccacctgtttcgggcgagatacaggaggctgggaccgcggcgtgggaggttggcaggccggcacctgggcttcaaagtgcgtggaactaccgggctctagcggactcattctgattgggaagtgaggatggagatgatgatgctgcagcttggaggataatctggagtcaataatgacgtgcaagatgatttgagtatcgtccactgtttcaagatccaagatgggcgggagcaggtcggggcgtggaaacagcaagaaaggcagtggcgctttttctccacgaccgccaaatcaacgctccacgtcgatcagacacagaccacaagtctccaccaacacaccgaacgtcgtccaccgacttttgtctttacttgagcaggctgactcacattaatgaccctcttagcactgtttctaagcctactgggttgaattctcgagggcaagaaaagagaaaagaaaggaaacctgaagatactctgaattcgcccgggatcatgatcaacatctaggatggtctcaaccactgccaaactcgacgaaaacgcgcagtggcacctagtacaaagtgaggcagacgctatatggcagtcgacaagtg

SEQ ID NO: 2690 - DNA, 2206 bp, Emericella nidulans
gcgttacccgcgctccagacgagtggtcgcacagacatcaccaatcatcttcgtctgttcggtatcattattagctaagtcgggctccgaaatagatggttcagcattatggaactgaacaatgtctcagttattttaggagcgttttgtttctattcagatataacaattgccacgctgctcaggggagagctctggatacttcgattcgaattccaagtgtccaaacagcatctctggcaaacctacgcaaagtcaatacggctcgatgagttagcaaaccaagccgattgggtgccgcttctgaccagctgacttgacgggtggacttcgcaatatgataacaattaatgacctgtgacgaaaactggagaatcggtctttggtgggcgcttgggcccatcctttccgacagaacgtacgagaaccattgccgctcagtctggactctagacgtgacccaatatagttcgtccgtctctatgctagcctatgctagccgttgtgggtagccatgtggtctaagccatgacttgcagcccgacgcctgggcaaatacgtggaatacccttcgatttctagccagcgagtgattaaccttcggcaagtctgcttacgccgggctgctcattgttggggaggtttactggtcagcagcacacgagctctattccacaagcagtggctcgattgagccatccggactttccaacaaccaggcattcgtggacaagtggtaattacacaaagcagacacgctcggcattagtccaaggactctcaaactccctgtctcggcgtcccgggagggtgggatctcgtcaaacagaatccggagcatatctactcaatgttgaccacagttataggttgaattcgtagactctattacacagccacaatatttgcatatgcaaggtgatcatgtgctatgcctgcccatgcgacggtaaatctcgcttcgaacagacgaaaagtgagctgccgaatgctctccacgcatttatgatccaactggcggacagcataatggcggctacgactgttccgcgtagggactgcacaatatctgtaacgtaatgtatccaattaactcaacggtatgcccgcatcggaacagtatgtgatatgacatgtatatatcactaatgaagagatatgtccgtagagtcacagcacgtcaaggcaagctcacagatagaatctgacttggctgaggatcatctccccgtaggcgaggttcacaaagtgactacttaggtacaaggcaagagccctagtatactggcatattatgtggtgcgtacagcatgtacgtgccgtaaaaggcagatcaatgtcgattcatgactacaggtcgaaatcggcgtataacctttgtgagttagcaggttgggccgtagccaggtctgacgggaaaatatatgctgcatcaagactgggcgccacaccaaggatatcatctcgagacagaactagaaccagaacatacatcacttcatagaaatcatgacaggcaaattagagaggacattagggacataagagactaggcaagggttaagagtttgctggcagaggtgggacagaacaaataaaatacagccgaattagacaataaggcttttacgaatgggtatatggataaaagaaaaaacaatagtgtagtgaaaagaaaagctcaaccctttagcgacatccatggagtcgcatatccccaagacgggtcattggcgagcatagggcttgttctcgtatccggagaaaccccacgcgttcttcctgatagcttttcgctctgctttctgctaatattcgagtaacgggattcagtatctgtgtcgctggtgtaagaatccgtgtcagaagagctcagataagtcctcggatgagaggaaagggtcgggctcaaaggccgttttcgtctggaagttgtattgtcggagcttgggtttttctttggtttctggaagcgagagcggagcgtgaccagatcgcaccggagcgtacgggatgggatggcatctatcttgtcagcagatgcattttggaacgactgacgccttgcgtcggaggagtagacaacaggaccactgccttgttttgatcaaacaagtggccccggaggaggccttgccgttgtaccttttgaaagaatagggggcgaaaggtttaccccggtttaaaggaaatttttgcatcgaaa

SEQ ID NO: 2691 - DNA, 1068 bp, Emericella nidulans
atttcactgaacttgcaattaacgacctcacaatcagagaacgcgacgaccaggcaacaacatattcgccgagactgtcctcttcaatccaactccagcatcagtcacgcttgtatgtctccccttctattaatccttactaagaaagaaaggtgatgaaactgacattatgggataagggcgacgtgaccctctccatcttggccgccaaccactccatcggcacggcgacgagcagcatcaacaatatcaagtccgggaacaataccctgagcatccgtgcattcctcgatggtgacgtattggaagagaacatttctggaattattagagagcagattccgtaccttcggaagggggatattaagatcacagcaactggcaagtcagtggtgtataacgggcagcatctcgaatactgggaaacagcgctgcaggccgtcagagtcgaggtgacgaggtcggtgagggaggtggtgaatatggtccttgatacgcttgacggggatgacattgtaggtgaagatggagatgattctggctttggaatcttcgggtttgaaattgatattcccagagtccaagagggcgtaagatctgttgttgaggggcttgttgagcagatcttggatactgctaaagggctggatgagaatgaggaagacacatttacggaggaattgactgttcttgggaggctgatattgcgattgctgcaggttcttggggttctgtagacctgatagcttgttcagtaggtttaactatgtttattctttgcctatcacacgccagaagtaaacgcacttggacggacagtcggaagacaaagcttaccggaaggcgcgcgacacagtcttgatgttaagttggtttagcctcatattccgggtcatatccttgctccctgcccttcgagcaggagaagccagcctagctatgatctcggctaacttaactatcagtggcactgtccaattgttctggccatatcagtctggaggctgcctcttatatcatttactaatcagataatctaccaggttcagtcacacagcggctggtgat

SEQ ID NO: 2692 - DNA, 1307 bp, Emericella nidulans
gaagctaaatatctcccaccagattgccgatgctgttgaacgcgcgtcgcaagaagcatatgcgaaggaagcccgtcgcgcgaaggcgcgtgcatctgctaatgctggaggcgatactggtacccaacaatcatttcttcttcctgatttaccgaacctttcggatcttgtttctggtgtttacgaagacggaatgccggtatacacaagacaaccaaggaccaggaccacacggtttgtctcacctcctgccgatgttacagatgcttctttcagtcgcgaacatatgccacttgacactataccaattcctgaggacgagaaggcgctttttgtgtcattgagactcctacaagataaagtttcagaactcgaaagggccaaggccgatgctgagaagaagctggaagatatccggcaggaaaacaactttttgaagggaggaaaggcccgccaaagggaacgagagagccatggtaaacgctacgaggttgaacagaacgactataagaaggaccgtttgatcaacgagaaccaaagtaggctagccccgtgtggtttgagctttcggtgctaacgactttctagagttggaatcaacaaacctagcacttcaaaataaagtggatcttcttgagcgcaagagcgatattcaagaagcagctttgaaaaagcttagtaaggagcgtgatatggccgtctctcagctgggtgtggcatacctcgagtctcaggacctcaagagtgaaaatgaagtcctacgggaggagatcgctgagcttaaagctcggtttgcgcagctcttgcccggctcgaagacaagggacaacactgcacaatctgaacaaaacactgccagcgatgccagcgcagaagcagatgatagccaagtggatacccgacgaagcaccaaagacgccaccgctaaaagcacgcggtcgagatcaaagagtcgcaaagaagataccaggactagagtgtcaagccaggttgacagagagatctctcgtcttgagagggaacgtgccgacgaagaactcttctcgatcgaactgccacgagtgagggaatcctccatgtccaagaagcagaaagtaaatcgacctcggtcaaccagcgcacaaaccaaaaagcagccaaatacgggaagacgtgttaagagagttgtggtcgaagaagtcgagcttacaggaccggttgaatttaccacagagttaaccgggcacaccaaagagacaaccggacgcaccaaagagacaactggatacaccaaagattcaaccggacaaacccgcaaatcgtccgcc

SEQ ID NO: 2693 - DNA, 4787 bp, Emericella nidulans
ttaggacggacggagctggcatttgtacgataatgcgtacgggtacggaggccatgccgtcccgattgataggccgtcgttctcggctgcgcgaatggatcggatttatacggcataagggagaggagtgctgttgtacctgcaagactaaattgtggagacagagatggagagtgataagaggcagtatatgttgtggatacgcacgcacgctcgaaggggggagggcataggaaaactgtatcaactgcaagaatttagcctaacaaggatcggacgccatttgacgactgattctctatctcaatgacctagacagctctgctcaggatacattacatagaagggtcagatcaggggtcagatcataggccgcttatatcatgttgcataagccacagctgccaactgccagtccggtggtatccgagttgacctccatcttaaagccacgagaagacacgcccggctagagggggctagaggtgaaactcggtcggaacgtttgcttgtagtaggtgggtggcatggctcaagtattcattgcgaaaagtattcaacatcccaacatcaatgtacgtcctgggtaggccttgcaagtttgaggccctagcaggggtgacgtagcttcacacattgtcccctcgagcctctaaacctaacaacgtgttccaagcggtctgattatcggcagccgtcaaggttgtaagctcgcctaacgtctcaatgggtttattttgtggttgcccagcatagggtggaccagtatctactccgcaagtggcgtcttctgccacctatctctcgccataagggctgcacttgcagcaagcccaccaccagcgctcgtacccatgacgccaatgcaggtattgtccactccacagcgcgagcgtacagctataagaaggcagcatagtaatcttcttcggagtagggaatgggtgtcccggtgcgagttggtattcaacaacataaatcggtgccccgattgcgccaatgattcttctcgtgcaaagccctatctgcctcacactaccgtagtccaaaacgcctgtactcatgtgcaatatcgcaggcatcttgccctcttgagctggtgtacagaaacgatgagtgaaggattcaatttgatggtcatcagcagcagtcgcatggtatacaatgcactccacggccgtgttccgttagattttccgtctcttcaggagctgttcatatgtaaatgccatgcagcatctatccagagcaccggggtatacaggcaccagtgcccgcaatgatactggttaatagcaaccaagaagagatctatcctcgatgaaatagatagacaaccatactcccaagtgggccaaatggtcactttgattagaccctaatgcgtggcctgcccgggtgggacctatatagctagctcgtcgtgacatgcattgcatctcggtaacgggccatctaagtatctcctgagtgagttggtgctggacgagagcagtcatgacggatttagtcaagtattcagcatcacggatcctcttctattaaaatgatacatacagaatctaatctaatttttgatatgcaagtttgtgtatgttgggagatgaaagcctgttccaggcaggatgttgggatgattatgtcgtcacgaatatgaccagctgattatgtggtatgtgcggttcattaagtcttcttcccttcgaaagtgaccggtcacttatcccggagaaccttgccatatcgcgtgaagagaattgggaccggtactaaggccaacgcatggaagccaagaagggagttaccccaccccaaacccagcgatcgaaacatggtaggccctgctagtggaagaagcgcaccaacaagagaccgtgtagcagtcatagtggcgtttgccgaagctgcgtacttggggtagcaatcaatgatataggtctgaattggcatataaacgccgatcatgccaactccaaaagggaagcattccgataataggcacaatccagtggacgtgcttgtctgctgaccacccataccagaagaaactgatggggagaatgcttgagaatattatcatcaaaggaagccgcatttcaggttcgaatttgcccccagcgcgcgcggttagcttaaccagcattctgtcatttgttacagccatgaaacagataccgactatgaagcctatgccaatcccaaggtaggccagccccgacaggccagtagaaaacccgtagttactggtaaagacagacgagattgttgtgaagaaaaggtacagaagtccgtaaataaaagcctagaagtaatcagtctgtcagcaacgttccctatatgtcaagaaagtcttgggtgattctcaccatgtagacagagagaagaaatacgattggtgatttgacgaggagaagaactggacgcttcaggccgagtttcaaagcctgacccacagacagcgattcacgctccagatcgtatgcactccgtaggtcagcgcgccctgtctcctgcgcgagcttggtcgttttccactttatcaggaccggggcaaaggtctccttgttcaaaaactcgatgcccagggccacagtcccgccggctatcaacaaggtccagaatgtccatcgccaccccacgttctcccctataaatcctccggcaattgggccagccaccggcccaatgagtggaccaaggccccagacggcagtggcctttcctcgttgctcaaccgggaaaaggtctgcgataacacccgcacccagggtaatgcaaccggacccttcaattccagcaaaaaatcgacaaacaatctctgtttcgatattttgggccagggcacaaccaacctgccatacgacaaagaaccagtttgcaccactaagggtaactcgacggccgtagatctcgcttaaaggggcgagaatgcatggaccaaactgtatcaatgagattctgtcagccctatccgcatctgggtaatgacttggtggtatagagtcggtctagacctactgtatatcccatcaaataaacactaacggtgaaagataaaattgtctcgtttgtttcaccgaagtccgccgccatgtaactaatagctggcgaaaacatgcttgatgcgagaggtgatatcaaagtaaatgcgcttatcaaagccagtagcccccattttttcctagcaggaaaattctggggattacttgggtcatcctgactgtcccatcctacaatcccttggctgaggtcgctttcggggaatgtgacttgggtgggcattgacatctcgcgggaatcttgtttctcaagatcatgttgctcttgttgactgttgtttgcgttggaggcttgtttattcagctcatctgggccttgtggaataatcgtgatgctgctgcggtcgctgcctgttgttcttgatgagctcacctgcgcggagtgttttgcaggtctcatttttaagcgactgaaagagaagataatgggcaaaaacaaaaaaaaaagggaaagagaaagatcggggatcagtgaagatcaacaagggaggagaaatcaaaataacggacagaacccagaataggtactgatgagatttaaatatggatacgtttaatcatataagaatcaggagagacaagtagttaagtagtcggggagaagaagccgataagaatttccgaaacgttccactgtccccgaaaagttgctatattagtattcattagaaatacgtccccttccaatcttctcaacaccatgatggcgagatcccgggtgcatctacgggttgaacgcggaccgactgagagccttaatgtgaggatgcttctgcattatacggtatgccgatgttcggaacgcgctttttatgcattccctgtccgtgcataatgattgcctatcatgagcaaggcttgactggtggctgcttggtgagcctttgcaaatggaggaaggattcagggtgccctaatccacgcaatccactgattctggccaataataacttccagcgtctccgctaggaatcggttgaatcattcatcacatgcaacacttgtcattatgcaccggatttcttcatagttacggagtataacatcatatgctaagctcatagactacaaatctccggctgccggtcaagggatcaaaaagataaggaattatccttctgagtcacatgtggcaaacatagcctatcttcacagatgtcatactatatggcgccatgagggcttaattcatgcacgactgagagctacgcttcccattcttaaccttctcacaatagcccgatatcgctcagttggcgacattcccgctaatatgtctccgctggatgagccagctttggagaactggtagaaaaaagctgttctagaattcggatggaaatgttatgagcctagacacgtgacccatgtgtatattatctgagtgacaagtatattagtcagaacttagctctccaaaggggtttagcccttttttggctgattgggaagttcgatagaggaaagttgaaataagccgcttttttattctaaaaaattgacttatgtatatgatcccggatagtcaaaaaaagcacttctcttactaaatgcggctaacgctattaaatagttttatcgaaagcagaggattcccagattttcctcgtagaggcggatgcttgcttaacacagtccctacttctacccacacacaacggataccgtactctttttcatgaaagaaccttcttgtgtatactgcaggacgtagctcagaacaagcat

SEQ ID NO: 2694 - DNA, 2642 bp, Emericella nidulans
gtctggcatccttgagataccttttttgtttagcgggctacgttttgacctagatacttatacctatctccgggctttcaaaaccttttccaccagtaaagatccaacatgcaacaggcttggaagatcatgtattaccaccgaatcagtaaaaatatcaaatgaactacagtagatcaacccacccctccactctgctactggtccccagggacagcttctgtcttttggacttcttcactctctaccacaggggcaacgtccgctatatcccgggcactcggctctccgagcaggctggtctcttgtactggcccttctctcccaaccgccattccccgctctccattctcgataaccattctcagttcttccattcgcctcgcaaactgatccatcatgtcctccaaccgctgaccgcttgcttccttgtccctgtcaagtataccaaatggtaggccagatgttccctggatttggagcatgaggccgccgttcagcggtttcttagaagaattttcgaatgtcggtgccggaaggagttgagtgttcaggatttgccaggatggtgagaggctatgtgcggacgtgattctgaattgaccttgcggaggtagctgctgttcagtgattagtgggttggctatatctggtgtcgggccttgcggctggtcttgcgggtgcgttccaggagacattcctgcaggatattcgttctcctgtctggacggtacatgatcgatatcgaggattatataattatcgcgtacgccgggtattggatccggaaggagagattccttccttgccggattatcgtcctcgtatggggtctctgactcgtgctctcccacccttgaaggatgccggtgcaccgcttttgacttgcccttaatacttggattcggaagggcatcctgctcagattcaagcgagcgcagcgcagcttccgttacgatgtctgtgtcgtcgtccgaaaagatgtagtggactgttgggtgatagtattcagaggtgtgggtgtcttcgatcagggtgaagaatggctgggagagcatttgcgatgcaaatgaaggcgcggtctcgtggtaaatttggtcattgtgttctgcgaggtgtgagtcgacggttgcgccggtgttcaagcttgcctgctcatagtgatcgatagactgcggttgcgtctgcggatgcgcggcttggtcgatgctgtgtggacgggacaacggacggcgaagggactggtttgagggtgatgaggagatagagggcgatatagagggtttaggtagagacatggccgatgagctcgctacatggtcacgatcgtagtgaggttgacggttgagtggcaggctgagccactaggctgttggatgaggagaagctcttatcgatacggtagcggtgtcaggtgattcggccaggccaggcacgagtctatttctgtggggatatgtacatatgggggcagaagtatgagcatgactggaaggaaatttttattttggagagtatgtaagatgaataagataaaagatataggaaaagggtatcataacaagtgcaacctaaacgccgtttccagtctgtaaccttttgcgattttgttattcgtcgttctgtttccattcaaattctagccaactgttagccgacggtaattggagttgtagggtagatatactctgtcggcacataggacaaagtcctttcgaagactcttgttgtatccaagtcatgaggcaatgctatcacacaaaacatcagcttgattgaaaggacgaggggtcggcagtcataccatatggaacgagtggccgcacttcccaagcactatagcgcagttagaacaggagcactagctttgctcatcatggggacctcttacgcaatgagcaatcgtcgccgggaaatttgcaggttgggcaagtcccgtcaaactggacgcggcagataccgcagacctcatcctcgggcatatcccaacgccaggtagcgaccgcattccattctttgagcgtgactttcatggcgaattggtaaagtgacgggtagacagaggcgtggtggtggcgcggtcgctactttctcgcaaccacagaggaaggaagcttgttggtagctggagataacagaagccgcttccagggtaattcccacatggcggagatttgaggtgggcttgccgaattctaacttatattggccactgtatgaggtagttttcaacacaagtttctaaaccttaaaatcgtatgactggttacgcttggacttaaactcggggaatttatcttaccatttcaatcgaccggcccacaatggggatggaatatacctgcattccccctttattttccaaaaatgcttttcacggacccattctttttcacggccggtaatagatcttttgccggttcaaaaatccgcttacttacccgaggttttcttgttactggatccaagggttaaggccgagagattcttcaaatttgctccccgaaacctttgggttggttccaacctcggggccgggtgggttgaaacccgccaaagtttttctggattaagctgggttcttgtttaattacttcagaaatagttgtccttgggtttttacgcccttcaatttggggggg

SEQ ID NO: 2695 - DNA, 1003 bp, Emericella nidulans
gactattccgaagagcagcactgtttgctgagcacgcaactcatgtgattaccctggtgaccggttgtatcaagatcctctccttttcccctttgtaatccacctcgcagtcccaagccaaaccaatttctctctgtactcgcactgagtctgagtcatttcaatctgacacatttcttttccgatatcctcttgctatccgtattgagaactagagtaaaagaatggcaccaagtactctcgtcgcgatcatcatgttgatctctaaactgtactcgcactctagacgttcctacttctcggatagaaagggacccgtttccctcgccttctttgctgtgtcacacacaagcgaaaggatggggctaagctggcttccaaggatcagaagaggaagaacagggaacagatacctctagaccaggtctgctcgaacatctcatcctaaagcaggtgcgagagattcgtgtcgcgagcagaggaaggagaagctgaggaatccatgtcgtataacgcggcgtgaaatcacgatgagcaaacaggtcctttagtgttcccatggtacagaggactgttcttgcactctttgccgagtttacaaacccaaccaagaagtcaagcgcgaggacgctctggcaggaatgacaccctagagatatgatatctccaaccaaccaccaacggaggtcaagagtcaagccaagggaaatgtacgcaatgtgcaatccgggccccgttggtcaggcatcattttgacgaagatattaggacgaagtaccatggttggtggtgatcatcgctccttgatagagtcgtacgtactcaaaaccacccaggaatgcgcccatagcttcttcgttgatcaccaccataagcctcgaccgtcctataggatacctgtttccctacaagagaactaaaccttcctctactttatcttgacggttattgtcggagctctgtgcgctacgctgtgttagacttcacgtgtagctcagtgaag

SEQ ID NO: 2696 - DNA, 2189 bp, Emericella nidulans
aaaagatgcccatgtgcttaaggtcggttaatcatactaatcttaggtaacgatcgcagctccaaaaaaagacaacttgggcgcacggttatcattctgggtccgcctggtgatatattccgccactggtcgcaactcacacgttaccctagtacaaatgttcactccgcgcactgtgcgaaccttgtgaattctagttacttgagatgcccatacgctaccggagagctacagcgcgttgagtgatattgtcggcaagcagtttagctaatatggtggcgtctcaaatgcagacattgtcatcgtacttatccaaagagacccctttgctgtattgcgtatcttgcaataataccatatacgcgacagttcttgaaacttctatcttgcaaagacccagacaatgaccctgaatccacagggctacggcaaccttgcctccgcaagacaagtgcaaactggcagctaaataaaacacgattctagcgacctggctagaggggactgataactcttttctacccatctttagtgatcatccatgatgctgcggtctagttacctgtgccctgtgctgtatagttcaaacagcatcccgtctgattggcgggatggatatacaaaatgcacgtgatctgatttttccagctcaacagcacaacaaactcctccggccttgataatactttcacatcacagccgttcccaaaataccagactttcggggaagctcaggtccacgatgtcactccacgcccgtctccggcctcttccccgccgcttagccacccagccgccctccgaatccgccgctccaaccccgcacttcgaagacccgcctgacggtgcaaacgctgaagacgacgctgaagaccttttcagttcctttctccctcatctattcccagatgatgcacctcaattccatggcgaccctggccagtacctcctctattcgtctccgcgctatggagagctacagatcatggtcccctcatacccgagccagagccagagcggggcccgtcaaaggagattgcggagggattgccgcgctctgacggccaggtaaaccaagtagaggaggggagaaaattgtttgcgcatttcctgtggagtgctgccatggttgttgccgagggactggagcaagctgatactgagtcgggaggtagtgaggctgagttctggaaggtacaaaacgagaaggtattggagttgggcgctggtttgtctctctctctctctctctctctctctcttctagagtgaacatgcatgtgatgtgctaagatgctacaattgcaggcgctggactcccctccatagtctccgccctagccaacgcctccatggtaacgataacagaccatccttcgtcaccagctttagggcccgcgggcgcaattgcctcaaatgtcaaacacaatctttcctctagcacaagcatagtcgacatccgtccccatgagtggggcacaacactcaccacagacccatgggccctctcgaacaaaggctcctacacgcgcataatagcagcggactgctactggatgcggtcacaacatgagaacctcgtgcgtacaatgaaatggtttcttgcgccagagggcaaaatctgggtggttgctggcttccatacaggtagagagattgtggcggggtttttcgagactgcggttagcctaggcttgaagatcgagagcatatacgagcgggacttgaactcgagtgctgaagagggaggcgaggttcggagggcgtgggttagtttcagagagggcgagggcccagagaatagacggaggtggtgcgttgtggccgtgctagggcatgctcctgctgctgcagggactggagctgatgcgtagtcattgagtcaaatgtatgtatacttgatatgattatgatatagatcaaatgaactcatcccgatgttagtttaaagtttaaatgttgggcgtaacgttgagttgttcaatttgaggaaagcttggcggaagaagggagcaacaccttcctcatctctaatctacactatgatcaaccttcatttctatacaagaagtcaaagagcatagatctatttccccgcctcaaatataactttaaacaccttcattgcattgaacagatcatacgcttcggcagcctgcgacagaggcatacctgttatccgtcataaa

SEQ ID NO: 2697 - DNA, 1728 bp, Emericella nidulans
tagttagttctcctccatgaagatcccattatacgcatccatagatataacttccaggaacatctcctcatctcaagtaactctttgaaaatttttcaatccctgtgggccttacctcagggcacctctcattcaagcaccccttgaccacagacgaccccctgccgcagacatgatattttgaataacaatgctgtccaggaattcccctcgcgaagtccattcagcttctccactgagtcctgcatccagcttgagtgcgaggtttcagggtttcttacgtcttaattttggaggcgcctgaatgtcggcataccggcggctgaacagacactgctattgatgacttacgacacatacatactgttgtataattttcgccttctgccagacgcatatcatttactcttatattttcaccctgacgatttaaatgcaaatcttctacccgtatatttgctgatatactcatcgcctcagtcacagagggcgaaagccctaccgcctgcatcaccgtcaccagcggcgactgtcgcatgatagacggttaggctcgaccggacatcgctatgtatctgtgacagcagcatttggacatttatgtgatcataaagtacatgttaggtacaccggcactctactcaataggcgtcatcccagaaacgtccggaacaccttcaccctcgaccactctcgcactcacgatttcgtacaccggcagctccgcgagtcttgatatcacatgatgaagcgtaggcaattgctcccaattcaacggatcgatctggaagctagccttggaggatgtccacacccggtgcggacggggaaccggcatagcctctgagaaggggtcgaagacggcatactcttcggctgcctgatttttatttgcggcgccggtcttggggatatacttataagccaaaataccctcgtcagcctctccgctgaagccgccaggggtcgatgctggatcgacctcgataaggtcctcgagtaggaaatggccccagagggctccctgccatcccgtgcggatacggtaggagctcgctcgccggtagatatccaccgaggtgtaaagcttgggtgcgcccagctcttctcttccagatacaatggggtctgtcaaggactcgaacaggatgggcaggtaggagcctcggatcacggtgccgtcctgcttgacgtattctaccccatgaacatacaagcctatgtgagagtaccctgagccgccaagccattccatcttgttcaacgtggttttggaaaaagaagcatatgctacagtatctggcgcgctgaaacgccacccacgacggccgggggggaacagattctgcagaactgtgcgtgacgttttgaacttaatggaggctgtcgtaaatgtggacttggttccattgcgaggcaggcccagatggttctggcgagggccaggcatgggcccaaacgcaataggcatgcgccaataggggttggggatgcgattccatgaccattcgcggagtctctgtgtcgagttgtcccattcatcatggccgaagttgtagttggtgaatccgtacactagccgtttctgagtacagagctgcttaaaagaaaaaaaaattgagagaaagagagaatgacttactatctgcggtggactgaccgtctgttccgtcctgggccgccagccgagagaactgcttgatccgagtggcacgttcatggcgtatc

SEQ ID NO: 2698 - DNA, 1435 bp, Emericella nidulans
  unsure (1)..(1435): unsure at all n locations
gattaagcagattcttgagcaggaggaggacgggacaggaaagaaaccacatatcatgctggaccaggattgtattgagcgtggttacggatcccatgctgtgtggcttgaccgagaacttactttggatcatgttggcttccagccggaagagctggcaacagtgccttgtcgttaattgggcatgttctgcttcacgcatctgtggcagaccagaatatgcggctaagtttatcgtataaagccttggatcttgcggagctttacgaggaggtcccatacgtttaaaccaagggagagcggaatgtggttaagttacagccaaggacggtcccattgcgccggggtaggggagaggctactaagtcatatagcactaaacctgaagttagaaagcctagacagcaatggattaacaactcacctttttagcacatgtctcgcatttggcaccgggttttcatcattatgttacgcgtttgttattgatttgtcttgtaagctccatacgatcgcggctccagcttaggtctagcgtgccatgtaagttgaatttccaagccctcctcatgtacgtagagtatgaaaagacaccagcttatacggaatacagaggtggcccgcttgcttgcatggcccattcgcttacgggatacgttatactacatcacgatgagtcaacaccacattttgccacacttttgcctggagagcattcagcattattctagtaaatagacctctccctgagcctgaaccaagcatacttcacaagtacggcggaaataatagtgcgcatgtcttcgataactggtggtcgacggaagctgggtccccaatcactagccgagcgattacgcctcacatcggcttgagaaggaagattgcgacaagcaaagccatcccgccaaataagccagaaagtgctggacagcccatgccagggtttgatatccgggtcgtggacgaccatggggaagagttaccagcggggtcgatggtaatattgtactgggccttcctcttgggccgacggcgtccaacacgctatggttggatgagaagcggttttacagaagctatttgaagagataccagtccaggttcctggatactagtgatgcaagatgggttgatcacgaaggctatattcatgtgatgagtcggaatgatgatgtgctgaacgtcacgtatcgactgtccagtggtcagttctgtcctcattggacactggtttcgataactgattctcgcaacttatatgatccatcgaggaagccataacctcccatcctcaggtcgtagaagcatgtgtagtggctattccagatgagctcaaggccagcgcccgttgcatgcatctcctctacaatgccgatcgtncgactctgcataccaacaaacttgcgcgcagagtgattcgctcgcaggagcg

SEQ ID NO: 2699 - DNA, 1983 bp, Emericella nidulans
ctcaagctgccattcggtgactgctgtggaaggatcgtctttcgtgatgcagcgagcatactttgtccagcggacagccatctccagactctgctgctagtccatgttgaacacgatccatcggaagcacggactcgtcgccacgtacatgtgcagaatcgccttcttcgcccccttgagggagtctactgtgcggcggatcaggtcctcacggcaaggagagagcacttggagccaaacgtcgtcgggagtcagaccgggtgtctcaacgaggctgcgggtgaagtcaaagtcgatctgggaggcagacgggaacgacacttcgatttccttgtagccaatctcgacaagcatcttgaagaagcggagtttttgttcgccatcctgccggatgtcaatatgtcagtatcgcaaaacgtgcagatacctgcgaagaacataccatagggtcaggcagactttggttaccatctcgcagatcagtggccagccaccgcggaggtttgtcgataaccttattgggccattggcggtccggcaggctcagaggcttgaatggcctgtatttcttagagggatctttgagccttttctgggttagctgctcctgatggctcgatagatggacgacgcagtccagcgatgggatacatacataggcatggcgtggttgtgaacccggtcggtgggggataccgcagcggggaatgaacagagaagaaaggctgtacagagggatgggagaagaaaggcctggagtgatgagatgggctgagaggaggactagttgaactagttaaggccagcaattgagatatgatttaaaagagttgtgagtcactcgtcaattgtaataattatcgaaacaattttgcagagggactgatcaccgatggcgggggactcttttggctccatgaatcacccagtggggcaatagactgaccatactctgcgagccatagtagtaactatgtacaagtttacattgcctcagtggtcaaaaaagagccacgggtgtcaatttaggctcattgatacctcgccctctattagtgatatattctgtatagtctctctgcaggatttgccgtcgtcttcctcatctagggctcgctgcgctctactgtgagtcgctcactgttcagccatcttggtcggggccgataacggagccaaagcgaccgcaaaatgccgcagataaccgacaaatcacgtggatcacgtgaagtggctattgtcagccacaataaaacgccaccattcaaaactttgaacgcagtagggcaggctcagcatgatgaataacccgactagggatgtccaaatgtaataccagaatcgcatgttcttagaaaaataaaataaaattaataaaataatataaataaatagttaaataaagattccatctgttatcccttccaacctgcaagtctgttcatgcatgattattaccaaccccgaagagacctcaaggacgatctttcagtgctcttgggcaaacgcggtctgatatcggctgatcatcgggtctacgcaggtttaaaaacaataccctacatcgagtcgcatagtccaagactgtatcatccagtcctgaagagaagatcatgtattcaacttagtggaaggtggaaatgtcttgggctgcgttaaggtatggtacagggttcaaggttagggctaatccaacgcctggatattcgcaatttatcctgtagcaaaatagcataaataagcccgacggttatctgcagtcccgaaacccctgcattcagtggtacccgagcagttgtaccaccgacaagtgttattctcactggcaaccaggaggaatggggttatcattcgcctgctaccctgctgtgtattcccaaggccgactacttcgacgaccggtctttaacgcctggttgttcatcccacatatgtgggattcttagcaccccaaatggtgttgtctccccattctttttcttt

SEQ ID NO: 2700 - DNA, 1725 bp, Emericella nidulans
  unsure (1)..(1725): unsure at all n locations
taattccgtgggaatatacaatggccgttctataaagaagccacctaagctgggtgctgtcaaatataatgaataggtcttgtctcaggctacaagatatgcgacgccaaatgtcgagaaaagagcaagatattagtgtgacctgtacagaaaacgttcagagatcatagctctggggctaggcacgtcacaaaaccccaggtctcggcagccagttttcttaaggatgctactgaagaccccgcaagtgaattgtctctatttcaaaccagatttcatggccttcagagtacaggaacaggccacaaagaccagaaaggccgagaacaaagaaaaaaaaaacaaagacaattgagttgaaggaacttgactctgaataaggacatatagaggccgcaagacctatcaatatggcataagcgccctttgagattgttatcaacaccacatcgcatttgcgtttactgcaggcctccgagaaagcgcaataccgctaaacagtttgttaaatggnggcctctacgtgcgctgcctgagagcttagaaccggggtctcaatacgaggactgataagtagcttgtgacgccatcctgcctcgtgcggataattctctgtacctccttaaaataatccctgagcggctatgcactgctgaccagccatctcacatctgcagccttgagagattgacttcactcagattcaaagagggcagcccatcttcgaaggtactctatagctaaagaaatattcgacaccggaaagaccagggcaaggcgtacataacaggggtgaaccgcttggtcgagggggttaaggcaataagcttcgacagctctcttgatagtcattcggtaacgtgtctgtttggtccttattgagggattgacgtggaagccgaggccgtaatatcttgtcctgaaataaatggcgcgcgaaaaagaatttgaactcccaactcacccaattgagattctatttggtggtatggctgaaaagaacggatatgctgctcaccaatgtatcaaattacaactaccggaagactatttcttttcgttacttccttactttctttccttttcctttttctttttcttttctaaggaagggctcacctaaaaccaatgcggcctatatatcgtgagacgtgcagtaaccctaagctctgcctcaccaggacgtaacatgatcagccattttactcaagctccttaacaaccaaagtcagataattcataaatttatctttgtagtatactctgtggacttttggagactgtcacactaaacctttgtagataaacagctcggaccgaaaaggcggcgggtgggctaaactcgccggatcgcagaccccaaaatatatatccctggcaagggatgcttcttgaccaactcatcgggctgttcccaggtatctacacaaagctttacaccagtccttttctgcacaacctcccagagctgttcccagctcgcccggtcatggtagtagtacggcatacgttccgctgttgcgttaagcacgccttggtcacgacaggcggtaacccggcatacgatgagtgagccaggctcggcagcgagaagatccaacacgtttcctgccacagttatctgctgttcgaagtcaaatacgtggaggaaaagcgaaatgtagacgatgttgagctttccggtgaggtgggtgaagagaggagactgtctatataggatgtcgt

SEQ ID NO: 2701 - DNA, 2937 bp, Emericella nidulans
  unsure (1)..(2937): unsure at all n locations
agtcgagttcgaactcagctgacgaggtttctgaggaaggagcggcgtctggctcggcctcgagtgcgtcgatcacgagtgacgagccaagtccgactccaacagatgcgggggagaaactagccattacagggcgagttgcagtgcttggtgctgtagcagcggggctactcctactctaggctacaatctcgagcctctagtgtgaaaagccatctagaccaggaaacagcaacgtgaaaggtagaagatagtatgcatggtatcattgatggtactcgctataaatcaaaccgaaaccaaaacctagaaccaaacccaaaccccaaagaatgagcacaggcttatagcctcaagtcagacagctattcctccggctgcacctgctctgccatgagcaacatgggcaaatgtaccgcctcataggagaccttcatcccctccttcaggcgctgtgtgtgctcagtgatcgactggcggcggaggatgagctcgccaccaaagtcggaggttataaagccaaaaccctgcgcgtcattgtaccatttgaccgtgccgaattggcgattgggagaggcaggagcggcgacaggcattttgggctgttctttggctgttcatcgttagtcttaatcttcttcagcgtattttagagaaacgtgaactgggaaggtgagaatgtaccttgagccggtgtggaagaagaggaagtagaggaagatggagatttggtatgcagcgggagcgaaacagacgcagacgtgtccgacatatgaccttgcctaaataattgcaattgctcgtgtgcccctctgcccatatttatacttctccctcagaatgatatcatccggttcttcccggtcctcggcaaagattcgggttgggtctgacgagggcgttacagaagcacggagaccccacggttggcgatctctgcaactggtggagaacaggccaggacataacattggctagcactggctgcatttaccgacgtgatgtcatgatcgactgattcnattcaatagccattgttcgtcgattgcagactggtgaacgattgataagatcctctgaatgtacaacgccgtccgctgcgcactacgcggactgtgaaggagctgaaaggtaaatgcaagtgtctgctcatacgaaaatgccccgggttgacagtatagtaggcttgatacagacggtgtctaccgcgaatgaggcattccgagttatctgcaagcgtctgcaggggcgccaattcggcactatggacaaatgcgcactgaatcgcaatccatcagaagaccagaaaaaagcctagacctcgagattaagaaattacccaatccactgagattagttggtgagaggaaccagtcaggctcgtcctcaggccctcgaggcgaggcctgatcctattcgcacgcctggcaggaaccgggaaacgacctcgctacgaggcaaagaagaccgatttccccgcacccagactttcatccacagaccgttatgccatgggtttggtctcgcgtgacgaaaattgcttcgtgccgtgtttctaatggtcgacgctgccagccccggcctcccggagtggtagaggtcgattccaaggaagttctcttttcttccgtggctttatgggttagaagacaagtcgatctgatttgcttgcattgtgctgctgttccatcaaccgaagattgagcccaagtggtgctgaggtctattggccatgtcattccacatggcctcatatggctgttccttcctatcgaactgtagctggagacggttcacccaattccgtcttcttcaagatatcaattcgagatataagcctgcggttccttgtctcggtccacaagggagagcccctgtcagcggctctctaggactcccctagggatccagtcaagcaacgagtgcggagacaaaagggtgactaagtctatcccgatcagctggctgctatgatagccagatccgccaataaggggaaagggggcgctttgtcactcggcgcaagctcgggtaacgaagttagtatgaaggaatttcccttcccttcatcactacccagcgcatcaatgcctctaccggcagaccccagatgctcgtttgaaatgtgatatacatctgggtacatctcgagcgagacctgttgcggtgctgcggtgctgcttccgagcaatcgacgcagaagatatactcattcgacatactcttataacccgaagaaaaccgcatcccctcctaaacatgtcacagacttccagcagtctgattcctcgtgcttcgtgtgacagatcttcatgacgaggcaagatgaagcgaagcgccggcagctaatcaagtgtgcagtagctctcgctcagccttgcgaagcgttggcatgaggggcaggttcaagtcaaatgattacagcccttattacttacccaactgtccacttacaacgacagctggataaaatgtcaataggaaggttcaaagcggccgttgtcagtaacatcagcgaagcaaccgccactctcgtcaatctcatcctcgacttttcgctgttcaagatcgaagcacccaaagaattttccccggtggggaacgcgttttcatcaattcgtcgagaatccgcagagagtggcgtcgtacatactactgtgcgtaaactcattgttcgatcctctcctcccggatacgctgcagctgataaaggcctacggctcccgcgcgtcggaaatcgccatcaaatcaaagaatgagaatcggaacacaaactatggggtctttgagagtcaggttggcccagatgcaacgagcatctgggcatcggcgacttcggcggccatcaaggtccatcttctggcttgcatccttgctcggatttgggagtcgggtgaggcaacggctatctgggacgagattgtgagtacacagaag

SEQ ID NO: 2702 - DNA, 1873 bp, Emericella nidulans
gtgatgtgtgataccgaaggatgttccatccgaagcggcaacgacgacatcgccgaggcgaatatcgtagctaccgttcggtacgcccccgccgataccaacgaggaggccgaacttgaggttatgaaaggtgcgccggacctcagttgctgtgattgctgcgttgttcgtcccaggccgtgcggcagcgcagagaaccacattgtgacccgcgacgtcaccatattcgtaatgatttaggtctcctctgtcaattccaattggctgtccgtgtgtatgatcaaacatttgttcaaatgcggcatattctgcaggaataaccgtgatgcaggctacacggtagtcttctactcttagtcgttttgaagacatcatatcgcatgatcttcctgggaaatgagcttgagataatcacttttcagtgtagctcgcagttcccttcagaagatcagtctcttgcctcgtcgctcatccgtgatgttgcttagtgtctggtatttgaggggctcgaggggtctgcaaatgacggcatgagatgcaggttctcaaaagggctgagccttgcagataatgagccagcgaaggtgtcacgcggggcttacaggcgtcatccgtgttcctatcatttgtctggagtgttggtagggaaattgggcaaacacagcctgctgccggggcctcgatcaaggtatgacacgccggcggcaatggcagaggctggattggaacccttaaaatacgtcccatggcgcctcatgggaacggcagtctgtgtcgaatggttacgcagcccagcgccctcatcaggctgagcctgaagacaaagggctctgggtctgcaactccatacaaactacctccgtatcatttagcacgccggccttgtttacattgactggctccacgtcttcccgcatctcttgcataggcgctctgctgatgagattgtcagctcaatcatagcctcgtcttaatagaactttatggatgtagatagaagggaatagagattcggcgatgcttctcggcttataaggccgggaactcagcgaattccacagtagtcccctggactgtcatcagacttgccaggtattttcttccaacgcagcgagacaattgctatttatcgaatttacgctaccaagtctgaccttgggctatccacccgaataccctaagcgctgcacttcaccgaatgctcgggatggcctcatttaccccgaaggacacttgggcgctattgagaccattgagccagatgacagactggctaggaagcaaggacaatgtactgaggctttgatcgccctcacgggccatatattgcggtgatgaacgtggatgagcttccgctagttcctcctggctctgggcccagacgagatagagccaacgttaggactggcaaagcaacggccccgtcggcaatctctcttatcacgtaggattggcaggcggtgcagaggtaattctgagagatatttatgctaactggccggcgaaggactgaggtccagtcttataaagatagatatagattatatatgtttgtgttcatgaactctgttcttttcactacgggcagcctttggctagaactctacatcttccatctacttcacccaacttgtttggccagtccaccagagtacacgcagctgtcatatataccgcgatagttgtcacaggtacccactttcacctgattttcgtcattagttctccttgctcttcagcgtagaccgatgagtctcagtgatgtttacctaggtcgagaagccgccatctgaattattgcgcactcatgtcgtgataagtagatcaatggggtttcttttatttaggggtatgccacccgccttcatcaaaa

SEQ ID NO: 2703 - DNA, 2105 bp, Emericella nidulans
  unsure (1)..(2105): unsure at all n locations
acgggccgatctatctattgcctctgtactcgcgtctcgtcgcaacccttggacagtatatgccagacttttctcagggattgacgacgtatcttgacgaagaatttcgcagtcttcagcgcagaaagtccaaggagtttcttggccaggtgcgaattgagcatcattccgctaccttgcggaattgacaaaatttggagtaatttcggagcatattatattctactgctttaaagttttcctggatgatttttcgcgcatgaacattgagattcattggccacctgctagagaattgcggacgatacttgcttcggaacccggatacgtccccacgaatggcatcctttctggagacgctcggaagaaagaagacagtgcagcatctgggtccacaagaacgcatgatcatcgagaatgctgtctactatgtcgacccaccccagcggcctgccattcaacaaaaggagcggacacccatggagtcttacattcgaaaactcatttatctggatatgaacaagcggaactataccaagattctaaagtcagtccggaagctccattgggaggaaccggaggtggttcatatcctggaacgtgtttttagcaaaccggctaaggtcaaatacggcaatatccatctgcttgcaatccttgttagtgcgctctaccgctatcaccaaggcttcgtcattggtattgtggacaatattctggagtatatcacactgggtcttgagcagaatgatttcaagttcaatcagaagcggattgcagaggtcaagtacctgggagagctgtataactataaaatgattgactctcctgtaatattcgatacgttgtatcggattgtcacatatggccacggtgcgtttttcggaatcattgaggttgccttactaactgttctgcagaaggcggcactccgatgccaggaaaaattaatgtgcttgatatgcccgacgatttcttccggatacgattagtctgccagcttctggatacctgcggtcattgtttcgaccgaggatctgcgaagaagaagcttgacttcttcttgaagttctttcaagtaagcttgcttatgcttgatgagtgaagcttaggctaattgtttagtactacatttgtaccaaagacccactgccgatggacatcgacttccttgtccaagacacgtactctctcacccgcccgcaatggaccctagttacggaactagacgaagctagccgtatcttcggcgaggctgttgcccagaatttcaagccacaagaggagaagcctgaacccgaggaagaatcggaggatagtggatcagatgaggatctggaagaagacgcatttccagaggccgacgaggaaggagagtcgagtgatgaggccgatgtaagtgaaccagcatactctgctgatcaatgctaacaaggcaggtctctccaaacgctgagcgcaacgacgacagcgagtctgaggaagaacaaatattcgtcacccgtcaagaagaggaacgagaccccgaggccgaagccgagtttgatcgtgaattcgagaaaatgatggcggaaagcgttgagtccagaaaattcgagcgcaaggctgtgtttgatattcctttaccgatgagacgcgctgcccgtgatcccactgcggaagtcacagccgcgaattcaaccccagctcccgtttcctcgcctgctcagtcgtccggtacaatggcgttctctttgatgaccaagaaaggcaataagcagcagactcgtactatcgatttgccatccgactccacttttgccgttgccatgagaagccagcagcaggccgatagggaggagcagcagcggatcaagaacctggtattgaactatgaaatgttcaacgagacggacagtaccgaaggtgggtttacttcgccttatcgcatgaattccaaggagcagggggaaaagcgacatgctgacaaaagaataaaacagaacccgttgagaaacgctcccctgccagggtagacaagtanggcaccaaccgatctgttttccgctcgcgcaagcttgagcttaatgacttgaattggagtgtttggattgttatccggagcc

SEQ ID NO: 2704 - DNA, 2979 bp, Emericella nidulans
ggaagatggaaaagaagaaagaaggatgaaaatagaatgcggtggggtgggagaaagaaaaaagtgaagaggaaagaaaaagagatagggagattgggaataaagaaaaaagagaagggaaggagatagggaaagaaaagatgtgaaaggagaagaaggaaacaacatggatgtgaagaggtaaagagggcctaaagaaatgagtaagagccaagaaagaagaggagaaagttaaaaaatcgtttatagaagagcagggacccaaaaaaaccaaaggatatttatgaaaagaagtttttagaggggaaggtaaatatggggagatgtaaagacatcgtgcagaatacgcggaacctcgagcaatactgcaatataacaactccgacaaggaaaggaccaccattaagcttttaagggagaaagataggggcggattcacctgcccttcagacagaagtccggcctgcaaaggtctggagtaaatctcgtcaccaggcagggttccatgatcgaggcgttgaagggctgggacagcaagtcttttgaaaatttcgagaacaagcagtaccggttcttgagccctgtcttccggaggggtgagcactatgatttggacgatatgcatgttcttccttttacaaagaaggatacagcctcatcctcgaaaactgttacggcgggtggatatggagaagtcttccaggcacatattcatccggaccaccataagctaggcgataagtctggcgaagaggtgagtctaaacgtttgctgtttgggtagatttatacaacaggctgcttacacattcgtgaatacatcagtccctagcaatcgcagtcaagcggatgagcaattatgagcacttcatatctgagcgaacggtatatcgcgaccttggtccatcgaaccatccccaccttatcgaccttcttttcacctaccggcatgacggcagataccaactggtgttcccgtgggccaatagtagtttgaaggaatactgggagaacaatccttgtcctgcagatgcacttagcacctccaccctcaagtggtctctaagccaaatgatcggactggcaagtggtttgactcatttccacgaattcacaaatcgttttacgggcgagacccgcttcgggcgtcacggtgatattaaagctgcaaatattctttacttccagccgtccgagggtgacgctattctaaaaatagcagacctagggctggccagcattcgcagcaggaattctagatctaatgttgaccccagaagcatcaagttttcaccaacatatgcaccccccgacgtcgagcgcggatgccatatctcccggaaatttgatatctggagtcttggctgcctgttcttggaatttgtcacctacctggtgctcggaggcaacgctatcaatgaattttccgaagagagacaagagatcactacagagtttcctgagcttgctgccgatttcttctactccaagaataagaacttggtgaaacgatgtgttttttcatgggttgatcgactgaagaaaaactcacgctgctctcatatgttgcccgacattctagatctggtcatggctgagatgattatcatcgagcccggaaatcgaagctcgtcccttgatatttgcaagaaactccgagaactcatgagtcaagttgaagaagacgaaggatatcttcttaagccgccacccaaccctggtactaccagtgcacaaactgcagcagaccagcccaatcgcaatgctttacccactgaaaccatcgtcctgcagacacgcagagctcgaggggtttctactcgctcgaaaagacacagttgggcccattatatgcaaggccgtcgacaaactaactaacccgccctacctcaaatatcaaggttcaatccctgtgcttctcagtatatcacgccatcaggacatcgcattctgttcagagtttcttttcaatccgttaatcaatcacgtcgtcacagcacgccatcaccttcagctgtttcctcttattatatataccaacaaccagatatactagtctctattgtttgacggcgttcgagagacatgtatattcgaaagttgaattctcgcagctgaaggacatagagattgataacggtgtcgctaaaatttcagccttgacaatgacaaacctgtgacgggtgacaggtcaagatttgtgctcactggtagcgttaagggtcagggcttgtaccaagtacccactaattgtcgcaggttcttgggtagcctaccggttaactgtcaagaactaatactgtagatgatctcatggtcaggctattttctctgcattaaatcactggttcatctgagtattagatatatatagcaagtttgtactgttttctaacccgaggtttaccttattctgtacagttaaagtttggccccttactccaacctgcaggttgaaacagggtatctgaacccgactgattacggctgacccatgacgggtaacccacaggctgtattagggtccacttcggtcccagctgctgtacttgggggccatcaaattgtttttaactgactacgcccatggttctccatccttgcagccaatctgaagctgcaacgccgaccccgttgctgtctgagaatatgtaagggggctgtcatcggagaggcgtgagaagggtgctcgaaacctcagcactgcaagaagtttggattggaacgcgatgacggtcatccagaattagatcgctagtttcgatccggccgatttttatcatatgagaggaatcccgaagatactggatcgacttaaacgacttgtgagagatctatttggtggctttatcagttcttcagctttggacccaacccacagcgaaatccacgagttctggagacccttggcccactgctagggagggttcttaggaccaaatatatgcagctatggctgaatattacttcaccatcccct

SEQ ID NO: 2705 - DNA, 1827 bp, Emericella nidulans
atggacttctttgctgagaccggcctttgcgccaggcgagcagccgtcgaggagaccatttgagaacgaatggcagaggtgatgtttgaaggttgtacgcctgaggcggctggttcccggccatgatagaacgggcctttgcggttaagctgtggtggaataaagctctctgagctctttttaggagacaagggaagcccttgaggagcatccggagtctcttgcctggtgcaatgcggggcgagctcatctccctcggcaggactcgtttcttttttgagcggcaagttttcctcgtttcgaggttccaccgcggtgtgtttagattgaggcactgcaggtttgataaattctttcttctctttctcctgacgagctcgttgtctttcaatctctcgtttagagggcacatcctcgataaacgggcacttgccgagcggagcactcctgaactgcggccacacgccgtcttgtcgtcttgcaactttaggatattctcgaaccatgacgggtcgtgtcttttcatccatgtcatgtacgtatataaaagggcccttgaatggtaccaagtctttgagcacagatagatgacttcggtcagaggggccgttcagttcgttctggagaacttgtgagagatcatcttttcctctggacttcgtctgagacccggcggcattattccgtgtagaatggccactcccattagtaagatctatgtcgttgatcgtggcaatcatgcgctgcagcttctctacggcccagatcttcatacccatttcccgagctcgatgcaggacatcttggctttgttcacgcttaggacaaacggctaagtgtaaatgcatttccaattcagcaggattgactgtttgcagcatagcaccatccccagcagactcatttggtgtatcctgggtgtgccccgtttgtgctcgcctgtctatctcggggggtattggtcgggatgtaacaacatgggttactagacgggagaagaacttttcttcacgctatacatatgatcagtacagagtcaaatacacagtccagaaaatcgaggggattcggccaagaccagaacaaggagtgatgagataaggaaattttgacgtaccgctcccaaagcaatgacctgtcgtgagcatttgctgcgaacatcaattggaacggcgtcaaagtagaacacaaagtggggaaaagccttccgatagtgcctctgccactgcctgatcgagatattttctgcgggcggcttccctgctttgtgccctttgagggaccggttcctggcccaagcagccaccagcttcctttcaaatgcactgggctgagcatggttcgtctgcgggtgaacaattttggatccgtcccttgtaggcgccgaacttggtctggctcataggctggttctccgcgccggccccgtccccaacctgtttcttcggagaaggcgggccgtaagggatgtcaatctgtgcactggtcgtccggggacgtttggcaggcacaaggcctactctgtgaggggaattggttgcattcggcacgtttgcaagcggacggcgggtcgacatgttcacggaggtttcgcgcgatgggggtatgaatactgctgccataaggtaacaatacacacaggcaccttaaggaagaaggagctgagcgcgagctcgtcaacgaggggacaccgagcacgcgactaggcgacacgtctcgaagagctgggaaactgtcgctcagagaaaggccattgtagacgctgagagaaaagcttgtcattaaggacgtcggtgaaggagacagagcctcaagaagtagtcaagg

SEQ ID NO: 2706 - DNA, 3940 bp, Emericella nidulans
  unsure (1)..(3940): unsure at all n locations
gaaacctgtggagtgttggggacccaacggcattcaacccgctgtagttccgtcatattgttgacaccttactactaatatccaacaagtgatcagtccaaaggcggacaggggctgttgatgtatatccgccacgttatttggcgggaggacaagctcagggacaaaacaggaaccacgggtccgaagttttgcagatcagcggatgccgtccgcggctcaccgcctgcctgctgagtgggaccgcaggacaaaaagtggcggtcagcattatcagccaatgagaggaacggtatggggtgtgtgctgcactatacgacggtctagattcagggcagcatacgcaagagcatgagagttgcctgaaagccggtatattgctatatatttgaccccatatatccactatatattaagtgtggacgtgggctcaagctggatagggggtttatggtgtatcacttgcttgcctactggatgctcacctgctcttcaggaagaatcgaatgcagggacacaaagcctgcaaggcactgatgatgtggaatgcggggcatcaaaaaggctccgagatacgagtgacaaattttcaaaaggttaaaaacatgtaaagtgctgacgatcgaagacttctctgttagactgcatcactagccgcctggagcaggcggccctccactcagcattgtggccactggtctctagtccctagttccttggcccctggttgctcgaagtagtcgccgtacgctatggtttctgttggcgccatagccatagggcccataaaaaaattaggatataataagacggtgaggggccatgtcgctgcaggacgcaactataaaattcaagcgcttttctttatcttcggccctgctgtcgcctgaccacagtctgctcctcacggacaaatatccgctcattttctctcttgcttagaacaggatgtattctagccccgttcccatatctatcccgtatgtcctggtcgaacgcctagcctatactcgccgcacggactgaccatagcaaactccccctcttagatccttaacctaatcgtccagacgtcctggtggcgctctaaggagaaattcctcgaccattcacgcccttttctatccgtttctcccgccagaacccttgctgatcgttccgaccctccactcgcggttgctgggccatgtgaggccgtttccgtccagagttggagactgaatttcgggcactcatgacgcatcctatcgaccatggcctccatcacatgccatcgtcaccttcctcctggccctggtggctatgaccactacgtccaccaccataatagtgatgtccctccactacatctagctgcatcgacccttgcagcccctagttccgctccactctgctccgatcccaagcaggacgtatcgtccattcctacgtcgctggcagtaccagtgccagtgccagtgccagtggcttcgcttgatacctcgtcccatactagtactgccgctgctgcctctgagaaacctcactcttgccattctcttgaccttgcggggagcgtatatatcctctctgaggcaaggttgagcaaaggagccaaatccaccagagctgcgaacggcggtatgcttgaccattcctcaccactgcccgtgtccgataagctgcggacgccagagcggagacggacagtatccccttccacaaggtcttccggtgaaattcgttcgacttctcgcagtacccggcgctctggaggtggaaatggaggtggtgatggaggtcatagccatagtcgtcggagctcgcttcactctcaccgccgtacagttaccaccacctccctgacaccttctagaccagactcaccggtccggcgtgagaatctcatagccctacatcgagagtcttgtcgccttttccaggataacaaccgtgcctctaccaccgccgctgtcacccgccagtcatccttctcttcttccccgccatttactccccgtcaagcaagaacatactccaacgtcagctcacctcccgtaacgccaattcttgaacgccaccattcctcaactttccgccactcatactcttccagcaacttacatgccaaccacggaaccgtcccggtctcgcgcgtggaagttaatctctccgccgagacaaaaccgactataatcgaatggacatctccctccacccggcgccgcgagtacaaggaaatcgaccgcgcgagcagcggcgtccgagggctctggcgccgcgtcgcaccccggtggtgccagttcggcgataagcggattcccttcttcgaggaggaaagggacggcaaagcgaattatgaggggagcgtccgcaggtttcggatggatctccctgatgagctggagtccggtgaatatcggaatcagggccggcgcggactcgggatgaaactgaagccgaggttggttgtgcaagttaagaggagcaagacgagtatgagctggttatgatcgtccttctaagtaaaaaccgtcattagcgtttgcttcttttggttgttgtgtggatggcatacctgcttcatgagtttgcatgtgatacccatatacagatacatatacgcatacatagagtcaaatttcatatcattgcacctcaacgccgttgtttgcttttccttgcttgagtttaaacatcgcatgcaatacaaatgcaatacgtaggaataaatattcactggaacagggntatcaatccnnacactcatcccaaccaaacatgcatgtagccagggtattcgccctcaagcctacattagatcaaaatcatccaggttctcgcgataccgcatgatattccgcttgatcttgctggaatccacccacgtcacgaagtcctccatgttccgggtaaccaggtacgccgggtccgtgacgacctccgatccgacacgcacatgcccttgctcgatgaacgttacgggctatcaccacaattagcctccgacaaatctcattagggaggaagagaaagaactgaagaaataaaagggacacgtaccgtcttgatgttttccaccatcccactcctcgccataacaactagccagccgaagtcagacaaaatgcgctaaccgtcacctcgcgctcaattctactcaatcctgcaccttgctcacgactttgtttgaggattcccatgcgccacagtttatccagaacctcggattcagttttctggcggatggggtcggaatcggggtcaagtgcggagagcttgtgtgcgagctgccgcaaggatccgacaattgcggaatatttcttgtagtcgacggggttttggaggtagtatcgttggatgatctgagactctcgatgcgcgtggtcggatttgtaggttgttaggtttactttccggaggagtctgattgatttcaggttagttaggtgatcggatacagggtggaaacaaaacgaatgagacagacttctgctcgtgatgcttgagtttgcggaccattttgacgtctagattcgagttgttggcttgattcgtttgtttgatatgagggctacgttaatggtgatttggataaattttcgaagtgataactgggcggtgtgcgtttagccggtgcaaacgtgtcaaactcgaaaatgtttatctctgatggagtacagatcacatgggctaaaagcgctaaagagaacaatacgtctacagaatcaggtcataaactgtagtccatctagagtacatcataactcgtcctcaactggagctgacggccgttggctgtccttcgccaaacaaaccccgttcttcctgcgccatttttcccacagggcgtgaaagtccttctccattccgctctccatctggtccggcaaaatgacgatgaactcaacatataaattcccggggcccagatcgtcatgatcatgaatgtgtccgtgcc

SEQ ID NO: 2707 - DNA, 1758 bp, Emericella nidulans
taaccctactaaagggatcctcgctggtgaggcgggatgcttgattcctcttgcgctcgacaacttagtccttgacactaaccccaagcacacaccggactctgggagagagagcgcgatagactctgcgcagacgaatgtcagtgatcgtctatgcctatactgcaggcacgggcataaccctatgcagggtggggttattactcatgaatactcctgtaagtgccgccctatcccctcgtggattttcagctaatgcgctcttatagtggtaatcaagtatgcatgcaatcccttgaccgttacttcctatacaaatgctgaccacgatgctactgtcgcaggggatttgccgcaaccgctccggaagaagctatccagcagatctcgacgcagtcgactgcttataagcccaccatcgaacaggaccagacagtttcgatttcgtaaagaatacaatgacgacgtctggatccttaaaatctcttatcatggttctttgagaccgtgatcagccccgtggttctgggtatattgttatgaattatgacaggcgttgtacggtatgctgatgcattttattgtgcattggctttggtatatagtggtgacaataacggtttttagtattgttatggcgttttgagcaaatggaattatgcttaacgggtcttggttgattgtctatttttgcaattcttaatgagtgatgcaagatataacatcgtatataccctgaaaatatcctggtactttctatatgtctcatgattgattgaggaagaatcatatctgacctgcagacgttgactctgcggacaacggtaaactgccgagcctaaaactacggagtaagccgcggaagtcactacttcacgcgtcaattcatccaaaaattcaacgatcctaatccctatcttcctgctttcaggacgcagtcaactcagcgattacttggacatatccccgctcgacgcccgaacattcttggtcgcctgcttttccttcccctcgccgcccctgcgcccgctcaagatggagtcggagcgtaccgtcagccattccgaagcgttgctggcatgggttaacagcttcgatctcgtgggtgaaccaaagcaaatagccgaattatcagatggaaggataatctgggatattctacacgacattgacccagaacgcttccccgacgtcacggatcctaagaagtccaacttggagaacctggtcacgatacacggacgactacaatataacattctggatttacgaaagtcggagggctggccccgagggctggatccagaaccaaatctgattgagttcgccgaaaacaactcggctagggacgcggagaagctgctgaagcttgtcttcttcgctgccacaatcaccgccaagggaaacactgcgagttacgagacatacggcgatgccattcagaaacttgatagtccgattcaggagagtctccaggattttcttgaaaatgtggaggaaggccagtacgagctggacgacttggcgcgtgaatcacgggaatcgcagctggtgaagacgatcgaggaacttaagcaggaaaataccgtgctccgtgagaaatacgtaaagacggagcagcgcgtgcttgagttagaatatgctgaggaaaactacaagtcggaactggagttcatgaaagagcgcaaaagaaatttgacatctggcaagggcgagtttgggtttagcaaccgagaccgcgcccagaagaccaaggag

SEQ ID NO: 2708 - DNA, 1312 bp, Emericella nidulans
gaacgcgccgacgcttgcgtcaacggcgcaggtcttgaaaggcggaagatagtactcgagaagatcgacagcggacacctttgcgtcgaactcgaaccggctgactccgccccattcttccagatcatatgccgcgagatgcttgcacgtagcaacgaccttcggcttctcgggatcgtcgccctgcaagccgcccacaaactctttgacatagcgcgagcagtgcagcgggtcttcaccgggtgtttcctgcccgcgaccccatcttggatctttaaatggatttacattcggcgtccagtaatcgatccctgcgtggtcggagttcgaaaacgcccgcgcctcagtagagattatctcagcgactctcctgatgagcgcatcgttgaacgcggcaccgagcacaatgggtgctgggaaggatgtcgcgtagctaaaatcaccagactcttcgaaactcacgccgtgtttttcagcgactccgtgcagggcttcgttccaccagttgtacgcagggagacctaagcgggagcttccagctgcttcgtggcccgtgttgttgattttctcttctagtgtcagggcagagacaagggattttgctcgttcgagaggggacaggctggcatcgcatatgggaagttcagagagagggcctgttgcgcactctgggtagctgcactgacacagggcggggattacgagagaggtcagttcggcatgggtgcaggatttgcatacggtcatatctataagtttccgatctctgtgggcggatttcttcagttgcttgatagattggctgtgcggggtagccatgcatcgcattgggcctttcagctccatcagttgaatgtatatagtgccacctttcatgcggctatgctactacctttgggtttcaatgtgtgctggttggcagtttccacccttgtgaaggtagctcttactatttcacttgaagcatgcccacggacagaggggttggcgtagttgagtcttttgttcatagggattttgttgactttgtttgtctactattcttgttcatgtacctttttacatcctattttctttgttgatttttagtattttttaaacctctattttacgttctttccttgctcttttctccatttatctatcctctctaccttaccttaatctcttgctcctattctctattctctttatcttttcttcctttctctttcttttcttcatttgttcatctattttctcttcttctttctatatttttcctctttcatttatggtgttctctcttaatcttttctatttcttctatttc

SEQ ID NO: 2709 - DNA, 2123 bp, Emericella nidulans
ctctaccgggcagttacaacatccatccatcaatcaagagcaaaacaacacaccaaatagctcggagtccaagaccatctatgcaaaatcctcctcgtctaaaacggcactatcagggacataatccgatgccgaactgtccacttcatccatatatccctcgaacccgtcctcaccttcagcaagatgatcagtatagctgaccaagccgaatgtggtcgtagcccggcgggccctggaggtgcgcttgactggacttccgtcaccaacagcatcaagtgaccgctgagcctcctttccgatccccaagcccaagctaactccaacttgaacgtcactggggcttatgaacccagcggtagcagcagcagggcttaaggctgggggaggcgatgcaatcttgaacgtaggaaagttgaggagcccctctccattcttcctggtaggcgtttggatggaaatgctgtcgaccttccccgtaacaaaatcggtatccaattcgtgctccgcgtccgtaggaacaatagtgtcgtcatcatcaagacccatatctcttttgggttgcgagctctgggtaggtgcgttcttgccgtttccgatgatacctgcagccttcttccgccggccagacctaggggttgaattcggggttctaggtttgcgtcctctcttcgatacaggagacaaactgctggatccagcgcgagggcaaatcatggagctgccattgctctttcccggtttaaccatcgcacggatgcgcacgagacgctcagtgatggcacggggagtaggtttatcctggttatcgatggccgctgtatgttgggtttggtagttaggcctgaactcggactaggaaatagaaaacgggcgacgaaacttacgccagacttcagcaacctttttaggatccagtctgaagtcatgagtctcgaggatcttcaataagagctgcaatgtgagaagactggttagtttgatgcaaaagctagactctcaaagggctctgaactaacaagctgatctttctcaggagtccatttcataggcatggtgatggtactttgaggagagaaatgcaaaagaggcttgatagagaaagccgacagctcgtttagctagtgaatcagtcgaaggagaaagatggtaaggcgtgaggaatacaaaagagtaaaggaagaaatagaggattaggcaatatttaagagatctgggagtgagctgtgagcaagattgagggagaaggattttgtgttagtatcctcccttcctgaatctactcttcttcacttctcatttaacatccctctctcaaaatcaacacaggaggagcaatatgcttgtctctagctaccttaaactcctatccgctcttctttcgcatactcttcagtatctcttatgctgatacttctctttcaacatcgatatcttgcttttacttccacgcctcttcacctaccttcatctggctggccttcgacaccttccaagagctggtttgactcttggactgcactcaaccatctgagctcagaatctccagtaatctttaatggttcacgcaaagcttattttattgtgcgatgaagaaccatgatacctctgtacagtcttggtcttgccagttcgctgctaaccaccttatgcaggctgttatttttcccagtgacaaagacaaagccagtgtcactatgcccatgaagcatttgtgtttgaactttccctgcaggagaagtttgatacgtttagcgtccgtgggcgcagtgtcctacctagactcagacagcgacgaatatatgaaattgtcaagtgcctttctcactcctggaagcaggtggaaatgtttgcgtacctgaccttcgtgtgcctccgatggacgttgtgaacatggatcgtattgatgaggaactgcttagactaggaactgcctcgacatttgtttggcttgtctgatttgccgctgggttaccctgcaccgtcatgtttgtcgcttgcctccgttattttcagttacatttcagacctagttcgcatttactgttcaaacaaggcgaattaccggaatgcgtagaagcatgcgatgggaatatcattattggactgatctgggatgaaca

SEQ ID NO: 2710 - DNA, 1929 bp, Emericella nidulans
acaagcgagaaccactttcgccgaggttcaaggccatgaggaaatcagcatcctgcgtatttttgatgagtagcggggcccgaccagctgggcttccaccttcgcgcggtctcagaccatctctgtctctgaaagaagtgtctaggcgaagttgggggcctccagcctgaggttggccgacgtcattcggttgattagaactctggctatggctacggctccggttcaatgagatttcaatggtgggctcctccgattcgtccccgccttcaccaatgcacacgggagcgccatcagcaaatttgactctcaatcccttgtttttccgaatctttaacggtggtaatgttgaagcagctgagagcttagagtctgttggaggtgatgtactagaaacgggtgatacagtctgagtttcatgtgcggacggccaccgctgagatacatctaggcgaggaggagcggggatctctctttcggtcgtggagacagcgtgcccaccgtgagacacggatttcgagcgtacaggggctaagaacgcctcgacctgttggtcggcagtattcttgggcttttcccgtgagaacagtttctccctccaatgcggtctcttgggcgtcggtttgggttcggcgtccacgaatgaagaaggatcgtcggcagacattgtggtcgttatcaggcgtaaattctcaaaacttgtcaaatctactatggcgcattgcaggggtatcaggcgatgataacggtgaggctcgttgaaggttcttggccttcttgagaacgtgccccgcgtagtaacaccaggtggttacgatcgcggacgaaactatgaggagctcggagacaaacgagtatctgtggatgaccggaatgacgcagtgtaacgatcacaacaaataggagaggtggggaagacgacggcgccagcgaaatgtacgtatcgagatatcgacccctggcgttatctgtgcggtgcggagaccggttgcgagtagaaaagaagggggaggtagactagctgagaataaactccggggccgacgagcgttcttaactcttcccaagaggtgacggtgctcctgccaccaagcgtgattgcttgcgctgtctggtgtggagtcggggacgagcgatctaccgcgaccaattattcaatgaccattcaggaacaagaaaggagacgggaagtgtgtaagaaggggcgattgcacaacttcgaggggcgaagaggggtattagggaggtacctggacgagctaagcaggagtagttcaagataaacaacactccccagattcgacgatagtgcacagtgtggtggggattctcagaatgatacttgggtggaaatgcactcaagaacgaggcttgcctgggctgagccagcagccgtacctgaatgactgtgaagcagtgcttgaaggacgacggataacggccaaagaaaatagaaaaaagaaaagtcaagacgagggagagaaggtgggaagatgcgcagggaagatgaacaaagtggaatggagacaagcccgtgctgggactgtgcaggtgggaggcagaggaagcctaccgtagtacgaagcctccccgaccgcggctgcaatactttttactccgtagtccaccgccaaagtattaacgccaccacgttcctgggtaagttatcggtagaatggaataaaaactgagcctggagtgacccgtgaaaagtccctaggccacggtatttcaatctgtggtcaattcgctggcatcttcctgcaagtctccatagctgcttcgtcagggtcacgtgcgcagagcaagcgtctgagacgacgagcgccttgtattattagagctcctatatatatcaacgagtccgatccgtcgtcttcatgcttcatggtagatgcaatttcgggcaatctcgtgcaattcattgaa

SEQ ID NO: 2711 - DNA, 2018 bp, Emericella nidulans
cctctgcgggttcgcctattttctccagggcttcgttagcaagcctttcggcctggtcacgcgttttgctccaacagcttgtttatgctagtgcacatagcagtaagattagtcgtttctcgtctgtccagatcttcctctcggagctcttgcggccggactgcttgtgatgggtcaatgcgctctctagctcgtcgctgtgctatctggcgcgtacgcttttgtactgagagcggtccaagcaagaaccccgaaactgcaggacgagaactgtgacgaaaacaagcagcacgtccaagccagtcccaattcattgcatctccatcctcatcgtcgctgtccatgtctgcctgggtcctacgtggagcacggcaccgttgtgtgctagtgatggatacattcggatcttctggaccagcgcgcataaatgaaatgcacttcgacacgaattcgtcaacgtcaattcccacgccgctctcacccaagtctaatgtcgcagccttcttgtatgacaagtccgccgcattgactagaaggcgggagtcgattgtcgcatccgacgtttgcttgacatcccggaaaatctcattcgctttgagaaaggtgtccttgataccagtatttcctggctgtagatactcattcctagaatctgcacgatcatttattaacaaatgctgaggtagacagcggcaggttattattaccattcaaatctcgtgtgagatccctcagtcccttgcgcacccgcctcctttcagctgcatcctggtctggatcgtagtatttcgtgctggctttccgctgtgcttgtgatatttgggttccagtttcaatattcgaggctgtatcccctaggcgttgccttttcgtgcttttcctcgaagacgacatattttggccctgaattccgcgtttcttgctggaaggattctctagattctctttatcggagggcgaacctggcggcggcgaaggagatgttgggcggactcggggtgtacgcgccatactcacaaggctgatttctctaacaaagggcgcgcgcgattgcgagttgtgttatatcacagtttcgagaaatagaagagtactcagaatagtagacacaaagagataaaaagcagagatgacatcaaagcattatctgccggcaatttggcccacgaattcgtcttcaaattgaaatcaatggattgtctgaacgcgtccgaaatacactgcacgtgatgtctccggcctcaccgagtcatctccaaattggagttgggctctctttaatggcacaggcgttgtccacacgtcaactttccctaatcatgccttaagcagccggacagtgatgccccgggtcaaggatggaggccttcacttttgcggtttccgcccaagtggattttccgatatatgtcaagatgtatgcctaagggaggacataaagagcatgtgaaagttcgctactaatagaaatcacagtggttcactagaagggaaacagaagcagatcccactctcagttcttctcaagcaacctgaattgcgacatatcggctctgtgcagaatcccctgtccgatctattcgtgactgcgcaattatggtcggagtccaagcccctgggggttccattgcagacttcttacaaagccttcaagactgttagagcctggaatgagtggctacagttaccgatctccatcaaagatgcccctttgagatgtcaactcgctattacgatctgggacctgtcgccgtttggtggggaaggagcgaacggccattacatcccatttggtgggacgacgatacggctgtttgacgatgatggcaaattaaaaacggggaagcaaaagtgcaaggtataccggcacaaggccgcagatgggttctcggcgacgacgacgccatcaactccatcgaaaaggcgaaggggcaacaaaccagatccgctaggtccctctccggaagagttggagttggagagagtagaagttttgatcaaaagcatgagatggagag

SEQ ID NO: 2712 - DNA, 3486 bp, Emericella nidulans
atcactttattcgtagacatgtcttgcagggttacggatcagagacccatcgtatctggtatatatgctcgaaaccctacatagcgacgttctactctgacagcaaaggcagttaatgcgacaaattcgtactcttctttacatcatcacattataatcagtatcaaaatagcgataaccgagttctgtcagctatgaaccgagaaattccagggttttattatggtagcgctctagaaccgcccatcttagacacatcgctaactcgcttatagatccagagaagaaaaagtacttcgcgattcaggcaaaccacaaatcagcgccaggctctcagtattctcaagacgtcgtcaagcggaagcgcgctgatgaggaggttgttccgatcccggtagaagacttttattctctgtgctaaactttctatagaaacgccaacggaaagctcgcctggttcagaggtacgaaaaggaaacaattaagagagcaacatgcctgcaacatcctctcatacaagcccagagggaagtaggggctcttcccgtatccagtcttgtagaacaggaacaaagagggttggcatatgcgagccagtttcagcgaaaacaattacatcagttcgagccctggccggaccagtacaccattaagcatgttgtgcgtaattcacggtccggtatcttgattgccagtgagtgtttggctacttatccgcttcatagactcaatcaagctgatatgctctgcaggcggacatcgcggtggcgagtcgtcagtgtcgtaagttgagccttgccttgtcgcgaggacatgacactgacagcggccctgcatcagtgtttgctttccggattgtgatcaggaaacatggacgtacaatcgaaccatggagcggctgctctttaaggaacagtatagggtaaatctgctcatgacggcctattcttaccccagaaattaatgcaaccgcgcagctttcatcgctctctttgagccacaccgggtatctcttgtgaggatctcttcgtccattaatctgctcacacgactaataagactagggcgaccatggacagtggtccaaacggcgactccttccttgcacccagaatgcttcccgaccctgacgaaggcggagactatcgatggccgccattctgtatgcagaattccatcattttaacttgaaaatataagggaaccactaacggaccaacagtctctcatccgatccgcatccacacaacctcctccctctggtgttccgcgccatctccaacgggggacattccccggtttgcagtcggcacgtctgatggtctctacaccctcgaaggcttcggaagctactggacattatccaagaagccctttcccaatgacaagtcttcaggcaaccctaagaagcgccgcaccgactcctcgcacgcccttatcacagccgttgaatggctctccccagacgtgattgcggccggtctcaaggactccaccatctttcttcacgacgcccgctctggtggaagcgcaactagacttcagcatccccatgcggtaactaaaattcgcaagctcgatccgtatcggatcgttgtcgctggtataaactcggtatgcatgcattcatccctttatccaattattcggccctcttatggcctatacctccagtagtccatctttgccgtttgattatatccatgccgtctaacgagacttgcttcacagctgcaaatgtacgacattcgctaccccccaaataacctacaacgtaaccccaacccaaacaagagccatcacacttcgactcgcccctacctgaccttctccaccaactaccccgaagtaaatatcaccccggatttcgacataagcccagaactggggcttctcgctagcggttagtttcccacttcttgaatatgccctttcccacactgacaaaggatgttgttatatacagcttcgcccaccgacagggaccgtacggttcagctctactccctccgcaccggagagcaggttgcctccccgcttaccagatatcgataccgagattccattagatcagtgtgtttcgagtctgggaatcagtcggccgcgcacgggtcccagacacctagtttgctggtttgttcggaggctacggttgatgagtggaaatggtgacgttcatcttgacgaacgaatggaattcaatggtacagcgcttgaaacttgaggtattctaaggaagtctgatgagttatggccatggccgtagttatggtacagggtaaagaaacgctattagtattcacggtaactacattgatagctaagcgagtcatgcccgcagggtattacgcctacctatttctaacgccagatatgcaagctattgttacatcactccataaaaaagtaaggtgagagaaagacaacaagagtcgtaacaggtgtcctgccataaaaaaatcttaatcaagcccaccagctaaccactccccgacctcaattcctattccttttgccatctctccgatccagtcgccggagacatttacacaccatttttctcccacgtccgccgtcgtgttcccgctgttgacacctgcggaacccagacccaagcggctcccgcttgcacgtccagccgcggggacaactagtcgtagacgacgtagcgtggcaagttctgagtagaccgagtcagctatagcggtgagccgtagcggatttgcagggggattggggtttatagcatggtagattgcaatgagtctttccaaggggaaaggacgagcggttaggatggtcgatgggccggtgataccgggaccaccgcctgcagcagatgtcgtggcggaagtggtagcaaaggcattctcaagaatggatttggtgatacgagtctttgtccgcttgcccaatccccttcttcgtttggcgggtgcttgcgcttccttgtcttctgctgcttgcgcctgcgagagaaccttcaagcggcgtcggtggtgagcacgtttgttccgcgcagacaatgatgaggaggagaactttgagaaaaagattgtgtccagtctttgcggagtgtgagaggctagatatgcggatgtcaggacaagagtagcgaagtaaggtaagcttggaagaggtgaaggtgctgagatggatgttaataaggatgatggtttagcgagtgcgccattctgggtagtagaaggggcgtcctccgtaactatacgatggactaaagcggcctcgccttgccgtctaaacaaggaacggtttttgactaggagccgagagaaatcccactcgtcattaccgccaggcgcgggtttcaccgctggtgatcggggcaacgaactgcggccacagcttctcgcatatagacttgaataccggtatagaacttgcggttgggccaccagtgaatcgtacacagcggagacaaagtagggatagagttgtaatgaagtttccgcggcagaccaggta

SEQ ID NO: 2713 - DNA, 1500 bp, Emericella nidulans
tatttcccgagctctgagcggcgtggagaccaagaggcggtcgaacagagatgaaaagcggtgttgtagatcacagcagtaatcaaaaaaaccagacgggaataatgcaagtggataacggaggggttctcttattatgtgaggtctggacaaacaagaggaggccctacgctgttgctgacacggagagcacctgcaggctggaaagtctgatgatgtgggatgggatgggatgagccaggataaatcaccaggtataggaccagggcccgaagagagcgacacagagtgaggaactgggaacggaaaacgcgaagcaaggaaaaaaaaaaagagagagagcgacagcagtttgtattactgcgagagcaatggatgattctgattctgaaggagcgacaaggacgcgcgagagtggtcagagggacaacgcgaaagggaagaatcaaacagcgccagtccgggcagttgttcgttcgtgtcttcagactctggactgttcgaacgtctagcctgccaggagaactaacgccgactagtcttttagaggcagacgttattcgacttcattcgacggccctgacttagcgctgccaccgttggtcccgtaaatgtaattcattaaatttccccgaaattggccggaacagcctccaaacaggatacgctcaatgaatttaacatggagaataaacaatattaggatcagacaacccctcgataggctcgaaggatagtaatataccgtcgaggggcaataatcgcatagaatcctaaagaccgtacttcatggggtgccgcgctaaaaatactcgtaccttcgtcagcggccagccctggtgggtgatgaagggagatccaccgccgcccatggaaaaggagtttgtcaggcttgagcctataatagttaccgcggttatgaagagcttgataaatccttccctccggatatccaatacgtcgcaaaaacaaatgcaccgctttagtataacacgggaaccacctcacctcatagatcatcacgatgattcctgcccaattatcgaaggtactttggatcacccttgactacgtagtcggaggatttggattccagctctgagaccgagactggtattttcgaggatgatgtctgatacagcgcgtgttttactagtatggcttggagcttaggcccattacatcgaccttacgtactgcgtcgtcctgtcaatactgatctagccgttcttcttgtcgtcctggagctctggtacagtaaagctctcggagagccttcggatcgactgcggccgccgcccgggtacacggtactcttatgtacaccgacaaaattgaggggaagcagccagacactaacttaatcagacggactatctcgtgcgcggaacttccaggtgatcggatccgattctcgtaaagacgtgggttcgagggctccaagcctaagctgtttagtgaggtcactcccgctgggcgttgactgatcagaaaggttat

SEQ ID NO: 2714 - DNA, 1620 bp, Emericella nidulans
ctgggtggcgccgcgtacgtctctccgggacggctcaacaccagggcttccacggtgaaggaccctttttgctcatgcgcgggtagacaacgctgccgtctttcgtcattttgcagtttccagccgggaaaaagacaacgaaaaagattagattctgaagcgggtttcaaaaaaacggtcagagttggcgagaaatcaaaataacacttgcgtaacgtacaggtggcagctcagctatggcgttcccaggttcaggagcagaaactgacggaagctgcgacggggagagttgaggaaatgcggggagacggacgcagacggttcttaaggagagccgcggggaaaggaacggctaaggaactagcacgtaggcctaaggaaggtttaatgaagccgtgtctcgtggggagaggtgagaggtaaaaggtcagaggtggctggactggccgcgggcaatgaagtcactccggtcgctttgcatagccgcaccaaagtgcttccggtaagttgcaacgggctccttccttggaaagctgtcggttcaattacggttcgattatttgattcggtgctatgcaaccagaggtacaagcgctaatttcatttcaatacacaatagccagcttccgctattcatcctgtactgccattcatattgtctcgctactcagtgttttggtcttgttcgaactgtgtccaacagcgtacagagcacagacacagcaggcacaggacaatgaatgcatgtctctggctacaccacggcaccgcccagaaagcccagaaactctgtcatttaaattgagatgccaggtgccgcggtacactcagacacataccccggtcttgagcttctgattctcgctcgtattcaggtccctgagcgcatctcatttgcaccaggcttctgttgggattttagccccaacgccgtctcgaaccgtgctaggcggatgatcgtcggagctctgtcagaaattgaaatgactttgatggcgcctcttatcgccagaacacggaataaattctaatgaacgccgatgcactttttttggttttcagaactctcttataatctgaccccgttaagcctgctgccacaacacccggtgccagatggcgacgcgatgctgtccgttcgtagggtcacgtgataaacgagcttccatcttccccacactagaacaagccaatcacagaatctcgctttttcaaccctgggaggaaaaagtttcactttgacctaatctatgtcgcaagagagctcatagccgtcatcgttcactagtagctgaagtggttacagggctattcgccgagctcgacgtagtcaacaaaatgggtgacctaatcagcttcctatccaccattggccaagaggtcgaagacgccgacgagggtacgtcacagtggacctgggctctgtagcactattcccaaaaacggtagttgatcaataaatggaactctagaatcctttttcctctttcccaagacattccctcctcaaacctcggctttcgtgactcgaaagcgtcaaccgtccagatcaccgtccacgagcgcgagtacactgtccaccaatcggccacattactctcgtcgtctcgtgctggcggg

SEQ ID NO: 2715 - DNA, 1102 bp, Emericella nidulans
ttcttacaatcaccgagtcacaaatgcaggattgcctgtagggcgttgggattagttatatcgcctcaagtatagttggagctccatctccagctatcggcgtcacctgcgtaattcagtgtccccgcatgcctcgcatcaattccgattccatcattgcccgtaccataaccttgcgctattattctctccatcgactgtttcagaggtgttccaatcccgtaatctcttgcgggatgcagctactggcagtagcagcctgtatataaccttgtcgctacaacaaccggatttcagccggcacagacgcagaacaggcgaatctcaacagtaagatcagatgagacctggcgaccgtcagacgacaatgatgaaagtcaatattatgcgcgacggtacctacatccatcaacgttggagaggatggcacatgttttgacaaagtcagtcaacgatcctgcggacgagagcccggctgaggtactggattcgtaatctaacgtataactggccaattcattataagcattcaactgcgaaaatcaccagcaagtatgctcttgtcaagcggaagctggaggacagaatggaaggttacctcccagcagtgtttggattagtaatgcactgtcccaatcaggaagtaccgaggaatttctggattgccaggatctcgtacgatttagcccaaagcgctctagcttcgatcacggactgtcctctcgcctatgcttatgctaggcatgcacgataacctccctgaagaattgcggagattgaatcgtacctactaactgggattctcaagccacctgcaaaaaaggcgtgaagccctactcattcgcataataaggctcaagccaagcggccccaatccttggaatttcggtctgattcaggtaagtcatcttgataaactcgagctaaccaatggctaacgcgtcgagctgaagattgtcccctgctaggcttccccacatcttctaacagttagcccacacggattcatggggctgtcttgggctcgggtattgggagttgcgatggaggagctcgctttgggcgtctttgtcaacgaatctcttaagcactctgcagatcg

SEQ ID NO: 2716 - DNA, 1977 bp, Emericella nidulans
gagctggtagacgcttcggcgtcagttggaattttactagtttggtttgtagtgtcggcgacggccgatgaaggggatgcagtttcgtcattattgctattgctatggtgggcggaaaaggcgcgtgaggattcgacgagggttgagcggatggaggcgagcccgtcgtcgaggatttcgttgcgctgttggaggtggcgaactgtaagttccatcgagtcgagtctggcattttgggcttcgaagtacgggcctattgagataagaggacaactctgctcgtgagttcctagttctgcacgcttcattctgatggaacaaccgtatttggatgcggcgcaagggtgaaccgcttcagggcaggaatcgatatgttctcggagcgcttttcgaaagacggttacctgacaatccgggcaggttgttttgaggctagggcatagttcttttacgtgctccttgagtagagtggttagccttcgatatatgcagatctgaccgggatatattctgtacctcataatcctgctccatgatatccgcgtcgcagcgcagacatttgtggagttcatgcatacatttattctccggactaaggtccttcttgcgagttttctcatcgcaggaaggactcgggcagtccatcaacttatatctgcagtacttgtctgcatgggactggatatggcccctcggaacaacctccttgcatccttcaggcgaaaacggacaccgcaccggaagatcatcgcacatgttgttcaagagtcggggaacgttgagatagacatcccgtgtaggagtgcggcatgtgggacaggtgaagtcgtctcggccgggagcaaaagttctgatagcaaagttcaagcacgtctggcagaacacatggtcgcatcccaggcgcactggccggatgaaagggcagtggcatattggacacatgagatggtcatcatagtcagagatgtactcaagtccgcgcaggtcgatgagtccgtcctggtcgctgcccacctccatggcgaggaactggtcgagcttcatgatgaaggcaaggaaaccgcgcttcctcccgtatttctatagtatactggtaatgactcccctgcgacggggagatgtgtctcaaggaatcgtccgctggaatgtcgtgttggttggggtttgaaacaatagcttcgagtgacagcacatgagtgtcacacggtggctggaatgggggggagacgtcgtgacccagcagatcagcgttcgttcagcagcgttaatagaaggcgaaccagcgggaatgatagcgagtggaatttgatcggcgtggtcgaggaagtcggaggtggactggacagaagcgggagttgaagcgggattgcggggaggcgagaaccgtcatcttctcttggatgggtattccagggttagaccttgaaagtgcctgctatttggcgcaatagatcatccaaatttcaatcaagatagatatattcattaatgacactatttcggctcttcttgttctgttcgtcaacattctcgactctcgggccatctgccggtcgcaacttagcgctgaaactctcctccgcagttgcctatcgtcactcaatcagcaactttcatccatctctgctacctcgacatcctcccctgcatcagcgaccatcattgtctgacatctcagaatgccaaatccttcacagctcttcctccttgctgatcacatcaagctctcactcctagaacgcgagcgggccatctcgctgagtctagaacctaacagccaggatggtgagatatcccgttccctcgagtccctgcgagaaggcatcgagggtgtcgaagcggaacgttaagcgacttgaagaatcaaatgatgaaaaggctgccgattaaaaagaccagttatgcattcccgtcgaagccagcgattatcgtcgaaatccgcggcccaccgttcatccgccggggcgaagcatgatc

SEQ ID NO: 2717 - DNA, 803 bp, Emericella nidulans
cttagcttaagcgctcttgtgttatccccaggtccaccacggggtcgtgttttcagcccacagtacttagcagcatgccgtatcttctatcaaggtcatatccccattcagtatggatcctgcctctggcatagctcaacaatgtccattttcgttgggccaggatgagacgccaactcctgcggcttcggcccagttaccggtgtttttagggtacgtcgttgcagttctcagaggaggaggatatgcgacaacgagggctcattgaatacttgggaatctgtgcggccgtgtttctcatgttctatggcgaagccagtggcatatataggctatttcctgatttggaggacagcttctttcaactcgtacaagagagtgttaggcgggttattcttacacagtccatccgtagttgcagctcgagtttcgctaatcgggtgatttgagtcatagaagtttgcctgatgctcagggaacccagagaagttgacagtgtgcggaacgcgaggatgataagacagcggaggggtaagtgttgatgctttgtgagcaagctctgtaatttcagtggctggagcccacccagaaagcttgtaattgcaggctgtattggagagggttgggactgtggagcgagtaagtgggccaagtcatagagacttgtatgaactacaccatcgacaagtacctagggctgccatatcgcttgaagtgagaacgcttgattgtcaccggacctgaacgcctagaatgtcatcgcttgtactcctgtaagctgtaatagtcttgtttactctatt

SEQ ID NO: 2718 - DNA, 1088 bp, Emericella nidulans
ctaatcacgtgtacagactgtgtccaggttatactacatttctggctctgaggtcgagcgatacccagtccagatgccgctattgacccgattgcatacctacaacgagcctacgaagagacgacacaagctacaacatctccgagcgaatggttcggcacgacgacgtcggtaaccgccctcttgcacaaaacgttagatggcagcggcaccgagaagccattactatacgtgacgaatataggggactgcaaggtcttggttatccggcctagcgagaagaaggtcattttccgaacagaggaacaatggcactggtttgactgtccgatgcagctggggacaaatagcatggacacgccacaaaaagacgcagtgctgtcgctagtcgacctggaggagggcgatatagttctcgcggtctctgacggagtgctagataatctttgggagcatgaggtcctatcaatcacgctggagggtctcgataaatgggaacatggccgatacaatgacaaggagctcgagtgggcaccaccggcagtgctggcggaagagcaaatggtgttcctggcgagggagctactcaagtctgcgcttgcggtggctcaggatccgtttgccgagagtccttatatggagaaggcggttgaagagggtttggctattcagggtggtgagtctgactacatatttgactcatcagaaccatcgtctgactattttcgataggaaagatggacgatatcagtgtggttattggaatgtgcaggaggcgtatcggcgaagcagaaacgagccatacgaggttggctgagaatcagccggctggttgacttttgttcaatttaacgtgatacgaattcgaagacattgcatttgttggtatatggaggacggcaacaataatcgagtgttgcatttgcatggtctggcggtctggacatatttgtcggtactcgggagttttataacatattaatgatttaccagagcctcggggcatcatcaataaataagtcaatctttcaattcgtacagctctctagatagtgcgcacggagcagcttacatcaggtatgttccgc

SEQ ID NO: 2719 - DNA, 593 bp, Emericella nidulans
cacgtaacaagtcagatagcctgcaagttctatggacagaattatgtgtatcagtgaatggattagaattcttcttctcttcttatctttcacctgcttgtggttaatgaaaaaataaataagaatcagaaaaaatatttttgttagcggcagagatttgggctcttcgagtcttctctgccaagcactttgcctgagatgtcatgtgacctgtatagatctgccgggagcgtgactgcctaattgtggtgcttagctccttattgcaactaactaatgcttgaactgagtctcaaccagtcgaccaggaatgccagtccatatgcaacgcggaacgcggttggggtagtttagcggcgcagtatcttaaccctcttagcttcatgtgcgcgcgccccgggcgggggctgtgtcaagggccctagagccgttctaccagcgaccttggaccatataaggacgcacatcgcccctgatctggcatccagcaacccaccaagatgccagggacactcgctctcgcaacggcgcacgtcgcaattattttagaccggccgctggacgcagaaccgcaccggcccggcgatacaatc

SEQ ID NO: 2720 - DNA, 3155 bp, Emericella nidulans
  unsure (1)..(3155): unsure at all n locations
acccagtgaatagggaaaggacgccgaagaacagcgcgaggatctcgaacggccatgagaaccgtgaagttaggaagtagtggttagtgctgcagacggggtgttagccaaagcggattagatctttcagtacgattttgcgactcacccgatgaaggcagaaggaatgttgacctcagtaccgaagttacgatggctgggagggtcaaatgggaagtcggggtgtgagcttccacactgactcttgccatcttcaacagcgcacaggttccaccaggtccatcgtgagagagtcggtgcaccagggatattgctcgtgtccacttgaaggaagtagatgttgtcaagcggggtggtgttccttacaccggccaggaagacgagccacatcaggagaagggctccggcagtaaagaagaggcccaaaaggcccaaaacagctcctaagaagatgatcagttagctcttgcacacatcaggtaggaactgcgggaggattactggaagctggcattatgttctccttgcttctgtatctggctggggacgcttgatgaagaaagctctgatgagagacgagtagacaaaatttggattatcacggcctcaaaaggcagtcaagattggtatgcaggaccgggggctgggaaagttgtggaaggctgaaaggaatggaatgtcgaaaaatgcggtctggaaatcctattaaagaatccggagactccggtcgcagatttagagcccacaggccgatcgagagatgaatgatataatgctgggcaatgcatcattattattgctacctgaagcttgaacgatgaagccgaagactgagtgatgatctcaacgtcatcccggtggtctgcggctagccgtataaggtatagcgtctgacactatgccttatcagacgctcgtcagtcgatatccatgacgtccaacctcagtccaactcgatcggcaaacccagtcactgacgttgcaccacccacgaccaattttcgagggcccagtcaatacgctagaaggatctacgtggaggtgcaataactctgttgtcaaaattttgtttctgcctgcctggttcagccgatcttatcaggagccacgatctgggcctactctgtagacagaggagtcggttctgagagctgacgttgaatctcgttttcgtctacggtataggcggagatattttgcgctggacccttgcagcttcccgtggtccggagaagatggccacttgggcatacccacctgcttccccagagcgtctgaaacaggaagccgattctgctttggtatgtttgcgctacaccgctctgcaccaaatctacgcttgtgtgcaatactaaaggtatattgtagaaacaagagctggaatggctactgcgctcgttgcaggattctctcgcttccttgagggagggtctccatgaatgcgcagcgttgctggccccgaaagagcctggttctaccttggtattatcgtcaatgcgatccgagaatgtaaagggctttgtgacaagggttggcaccaaggttgtaaagggggtatgtgtcgagtgataaccgacctccctcacgggaatgattctaatcgtagtcctttgataggatattcagcttcgtcttagttccctcagcacaagaggcgctcccacaacgcgcctatgtctatcacagtctcctgaagcgccagaactggcacttagccaactggtgtcggtcagggactcagtccgncaatgtctagacattgtggatgtgagcacttggaccggcgacccgcttgacgcgcgcttcatatacagccaacttcatctcctcggagagactattgctgaagggcggcaaatgttgaagggtgagaacgatatcgttcgaggcaagtggtgggagacaagtgcgcctgacaatgtaagatacggcggatactcgttgcttgcgatgactgactggagtaataggtgttcgacccacctttaccaccacatctttctttccacctgtcaattgcagactccgcgctggtgctgtatctcaggactcttgagtctacaacacaggcccacacgcctactgcatttgcgacagacatctcgttgaccggattctctatacgtgatcgactattcggctctcgtggaccttctcatgacgaggctggagatgtgttctcgtggaagggagatgaagtcaaagtcagggagaaagtacgcgtagagagccaagatcccagtctcatggcagtaatggccaagttgagcgcacttcaccacgaggtgatcaaatgcaagactgctctcaaagtcctcatgggtagtgaggacgacacggatatctagctaagcatgataggaacctttgccttccctgaactactggagtcgctgaatatacaagtataagctttttgctatctaactcttgcttgccggtccttgcttaagctctctatgcggatttatgaagcgcacggaccgtttatgtcaatacttatgtaactagcgtaaacctagtggccaataggacgaacttagttactttaggttagcattgattttctcaaagctcttacagtggcaaccagctttttatttagtccggcttcttgctcttcccagggcagcagaagggcgaaaatgctgtcgcgatctcctgctttaagggctacccgggctaagcccaagaatatcattattcccggatatggctcgctacacgctggctcgcgacggctccgatgcagagcgccaactctcacgaatccccagttcagcaccaaaagtacagcaaatgcagccgattctctcaaatcaatacgccactccggtcgcactccgaatacctacaaatcaggacactttgtgacgggacaacggtacttctcttcagctaaagaagcagactcgaaaacggagcccgatgatgcgctctacgcactgattgataaaatcaacaccacagaggctgaaatactggaattactcgatgagctcgacctaacagatgagtactctgggtcaggttcttccacccaagaagttcttgatgaagcctcaaacaaagctgcctaccacgtcgaggagcagacagcggaagaacgagttcaccaggctagacaagccttcggcgacacctaaccggatgga

SEQ ID NO: 2721 - DNA, 2380 bp, Emericella nidulans
ggaatatagaagagatgagaggataatgagagtgaaagagacaaagtgagatagaaagcaaaggggaataagcagtataaggagcataagatgaaggagattgatattggaaaagcaaatagagaagaggagagagaagaagaagggaaggagaatagagtgaatagtgcgagaggagtgggaaaggaagggttagaaaaatggtgagaggagagtaaaatgagggaggggacagagtgaagagaagggtaagaagtaagagagaaggaaagcagaagagaggtaaagaggagtgcataagaggaaaaggtaaagagcaaataaagagaagtatgggggagaagataggaagatagaggagaatgagataaggcatatgatagaaatgagacgagacggttccatcaatactcagaggcggggagaccagcttattcgccatcgtcaccattacaagctccgccccagacatcactgtgcacgccaatttcgtccttcaaggccctgaagctgaacgtgtccttgagatcataacttcccaagatgtcatcctctccttcaccattaccatcgtcggcactggcgtccatgatacccttgctcttagacttacggatccgatcaatctccgcttctaatttctcgcgcactgacccgggcggcagcgcggtgaaaagatcctgcttgttagctgcaataagcacagggatttcagctgcagccctggccgacgacttgccccgctgaagggcacgtttttgaagtatcaaaagcacatcatagaggtacgaagcggcatctcgcagggcctcagtttcagagatggccgcggtgtcgaccatgaaaagaacaccacgcagcctcgatttggtatcttttgttgtggacatcgatacgagctcggagagaccttgcgaacctctcaattttccatggccgggcgtatccttaacgcggtatttggtcgggttccgttgagcctctttcaaggatgtgtcattgactgaccggtacttgttggatccaattgggacggagacaggaaggcgaatcgtagcaagggttgaggtttgagaagtatgtgtaggttgtgatttcggctttgcggcaaatgatgactttgattcaagctgtccaaaacaagtggtcagccaaaaatagcattcactctcgacgtccgcgggcagatacataccaaagtcaacagagcagttttacctgctccactgggtcctagaaggaggaaattgcttgacggcggcgaggctaccgtccggtagaagatcagatgaagtagtatagggacgccgatagtaatgatcacggcgactgcaatgctgaaaaggctaccctcaagcagctttgtagctactgcttcaagtagttcgtaggcagccatcgtgtgactggcacagctgaaaatgtaaatgccggtgcaggtaaaagaaggatgcaaggagaatcaaattgaatcgattttattcattacgtgggcatcgttttaaagaaggcctctagactcctcaccattcgaggttcaagccaggagtctactccaagatagtggagcttgtttcccaacgctacgaaggaccttcagtggtagagatcacgccaccttgaacaagcttactgatgcctcagtattgaggcaaaaatcccgatgcttatctgccttattttggaggcaataaatgctttgattcaagggtctgcatacctggagcttcgaagggggatgccaggacgatcgaagacagaaaatgaaaataatggagctttctattcattgctctcctgcttgcgctccctgattctcctgattcgattctgtcatccttctttttgaatcaacctgttgtcgagtttcaaccgtctaaactatatctagccgtacattatgcgtctcaactacatatacacagccactctaactctcgctctggcattaagtgtcctagcaagtaccggcgggttttccagcaccaacacagcgatcgaaactcgcaatattggaacagcagagtggatggagtatgattcgttatcgccagatctaaactccggggtagaccacggagcaggtgatcatctgcgccctcaaaaacgaaaactcgttgcagacccatataaagttccctatcctttgcagactggcccaacaagatacgccccgttggctaagaagcccgggaccgcgactgcaaccaccttgccaacgcctcagtttccagctagcccgtacaaaattgccaccaaatacctgaaccctggaactgttcagactacacttagcgctactgagacgctgtctgtcacgatgatggagaacacagtacgtgaatgcgctatatgttctgcagaccccccctgatgctct

SEQ ID NO: 2722 - DNA, 1188 bp, Emericella nidulans
atcaaatataagcggctcaatgtcaaggcaagttggtagcttggtcgatgctcggtcgaggacaaaagcgacctctatgcatgtgacagccagctgggctgggcaatctcctcttgtcctgctgggttatcttcatattccgccgctcgctttcgcaatgacatgcatcgcctctttggctgtcgtcaactatatcaatagctcttttattgggccagactcgaattacccctattcccatagtacataaagctgtctggcaatcataccatacctctggcatcagtaatcaatcaagtggccggcttattcttcttatccgtctgagtctctagaagccagtttcaacatcttatttatctttatttggcagcgtaagaaggtctatggactcaggaaatgatgcctcatctgcggcagcctctgaggctggaccacaagtcaaggtaagtagctctcggccaggttgctcatgtacagttgcggaaatggaactggaggggctcgggtctacctgatgggctcatgccaacgctcgctcactagttcatcgctggtgatatatgtcgactcaagtccaacccttctatgatagggcgggtctgcgtaagtagagtggatacgttctcacattctggactgatgctgcgagtagagaagccctcatgatgtatgttgcctggttttcgtatccaacccatcaacaataccacgtattgacattatcgaagctagaagagccggaactgctgggcgagcttttgaccggcacatatgacggcgtgccagaagaggacgttgatatttttattactacatcaacggtaggttaaagatattcttcgatctggcagattctaataaatcataagcccccggaaggttacgttttcgtgatctatattcagccctcgcatggtagctctcttattcatgaaaatgacctcgaactcgttgaccgtgtctacgagcttggtgagacggtgaaacacaatctcagtgaaaatgacacaatgagtggcacgattattggtgtgtccaggagatgtactcttgagccaattatctatcagccacgcgaccctataacaggagactatcttccagtgaggttcaccgagaaaccctacaagggatacgaggcatcttctgcatctgaggaagcaggccctttcttgctctacgatg

SEQ ID NO: 2723 - DNA, 1513 bp, Emericella nidulans
ctcggctgcccattctgattgggcaaaactgtacacgtaagtttcaccggtcacttttaagcctggataggagactgaaagacttacggggtctgagaccaggcataccctctcgtattgcctggatatgggggcgtcaagataactttattggaaagctgtaaacattagtcgctgagcatagtattcaatccaaactctttctaacatacaatctgagggaaatgtccctctcctcctatgtcccaacccggaatgccttctcgattgggcgccaccctatatagctggtcagctatgccaagcacatttgatagaagaacggattcggagttttacatggcaccatgaccaaagctcgaggactcaattaccgtttgagccgtggcaacggcggagaaaaagaaaaacaatgctggaaccttcatcgcgtctatatagtccggcggtaattaccggtactcgctacgccttgcttgggagaagaaaaagaagaattgtgcaaccaggcgttagtgagaaaggggtatccaataaggcaacgaaaagatgtaagctgaactgcgaactgaagaatgtacagtagaaaggtcagattatatggccaggacccagggaagctctgtggtacaccgtggagacaatgatagtaaatcactgcagtccaagggcgatcacaaaaacattggggtctttgcgaggaaagaaggggcaataaaaggtcaattgagggtgaagatcgagcttgagatcaagcctgtcgaaccatgagagcttctccacgatatgctttggagacagacacggcccaggtggcctttagtgacttccgtcagagcctcgagctgtcacgtgtcgtgtccgcgttccccggatggatcgtcggtccgctctcaaagcaatccactcaacatcaacattcagtattggaagaccgcaatagcttcgaaaggtctccagatgtgtcgcgctcgttgattgaccacccgtgatgctcattcatagctgcaatggctgagttgtacccatctcttacccaatgcgccatcgtcgcaacggcgttcaaaatcctcctcttccccgcctagtaagtgctcttctggattgaccagttacaattcgagtatggcttgatttttgtacggattatgctgatatgtggtcttgaaacagcaagtcgaccgacttcgaggttcatcgcaattggctagctatcacccattcgttaccagtacaggaatggtactacgaggtactaaacttttgtcctcaataaaatctggttgccggaaaataacaattttgtttttagaaaacctcggagtggacgcttgactatcctcctttcttcgcggtctttgaatgggcactttcgcagctggcgcaatatgtggacccggcgatgctagatgtccagaacctcaactacgattcctggcagactgtatattttcagcgagcgacagtcattctgagcgagcttgtcctgttctatgctctgaaccggttagtg

SEQ ID NO: 2724 - DNA, 1124 bp, Emericella nidulans
gatcagacttggtcggaactgacgctgcgaagggcaagggttaggccgttgctgtacctcatagatagcttcagtaaagacctcggaactgtcacatttctgtgctcccgatttcttacctcggagtcaagccaccgaatttccacttcccgaccaacttcccaccctttataataacccctacggcacgtcgcctccaattctatggtaagttccccgaattcgcctcgcccagcttccgccgtccaattgacctcatcgaaagggctctgcatcgctggctcggttctccccctcgatgcgcccgggaacaagcacccttgtgcacggaatacgtactcaagctccattgacccggccactgctgcccaccgcctgtccgatactcgccctcactcgctgctcgcccgcgactcgtcgcacatcagtgacagtggctccccccactagacaagccccttccccccctccctcttcttctccctcttttccttcttcttcctccatcccgcctactatttcagcatctcgaattgatcgttcgattgcatccgtaacaaaccgtgccgctctagtttcaagacattttgctacaacagctaccccgccatcttccacaatgtcctacaccgtccgcaagatcggccagccttacaccctggagcaccgggtgttcattgaaaaggatggccagcctgtttttcccttcccagacattcctttctaagcacatgctgaaaagaccggcctcaaaatgatcggtgagatcccccgcttgaacaatcccatccagaaggtttgcccttgaaacccctccataacggaacttgtcgccgtggcaatatcgcagccactgattggaattgtataaatttccagggggattttctaaccttttaggcggaaacctataaggcaagcttcgtttctacaaaactttatttctttaaaagggttcctctgtgactcagggccttttttaagtacgtgcaaactctatttaaagtttattttacattttaccctatatctgtcataacatcgaagtgccccatttattcatccattcctaaccaagtttcacttccccctctaattttttatactataagtatccaatcctc

SEQ ID NO: 2725 - DNA, 884 bp, Emericella nidulans
gcctcgtattttggagagttcggggtggtatagcccgtcaagaatgggtttatggaatttgtctgttgcctcgcgtcgcagaaagcagttcccggggcaactttgcatatctgaggttgagacggcctagccatcgtcttatctacttcggctacaacgcgcaattggacgctcacggtctatctgctgacacgaaccgatcagcttggtcatcaatacagtgtatatggcgaatagcagagtcgagactgcgagcagttgacggttagatgtgtattaccgtacgtcgatgaactcacgccaaggacaaagacgcgcgtcaacagaggactgaagtagactgtaatctgcgtttagttgataatcttagagtgacaatctaggcagcagcaaaatcgtttgataaatctagtgaacaggttgtcggcaatcgtagaaatccgtttaatgtgttgttggagagcgaaggtggagtatgaaagaaagtgaaagcttcaggcttggcatcccaacctcactccatccaatgcctcgcttaactaaagcactcctactccaaaccatcgttttacacctcctcgcatttcgaatgctaccttgccatcctctgccagtttgcgtaacacttcgtcgataaacggctccaatgccatcttgcgaacctcctcgtcgattccatctccatgcaccagcaccactagctctttaaccgtaacgctagccttcttaccttgtcccgtgcgtctggactccttgttgatcctgtccagtgtcaaaaggacctgcttctctcgtctcattttctgcgctagttcaccagcaatcttcgcgggaaggttggtgatacgtcgccatgggcggggtagcaaccgcacaatggtgtg

SEQ ID NO: 2726 - DNA, 2627 bp, Emericella nidulans
gctggtcatcttgtaacgtctgctggcagcgcttcctctccgtcgacgttgcaggcaaagtgttctttctctgcaaagtcaccttctttaccaacagtttcctctcgcactcggtcctctccacacataccaaagtccccgcctttcgagccttcgactggtcccccgtggacgagaccctagtcgcagtagggcaatcatccggcgatgcgacgatcctgcgcatgcgtgagggcgatgactcgcaggaatcgttctctttccctgtgcgacatcagagatactgcaatgcgattgcgttcagcacccacggactgttggctgcggggctggatcgagtgcggaacgacttttgcttgaacgtttgggatgtgaaccagcggttggcgatgaagggggcgaaggggcatgttgagccattgaggaagctggcgagttccgaaccaatcacgagtgtgaagttctttagggatcagcctgataccctggtcacgggagtcaaggggcagtttgtgagaatttatgatttacgaggtatgttttgcttttccccctgtacgggttgcgaggctaaatactgtagagggcccggggcttccgtcgctgcagtttccgacgaggtgcgtgcataatctggctattgattggcttgatgagaactatattgcgtctggattgacgtcccatgattccactgtctgtgtttgggaccggcgggtcggtgctcgtctttctgcggctgccactccgggtttggagacgggccaaatggagccagccctcgagtttaagaacgtgattgcgcccaaatcggctatctggagtctccggttttcgaggacgaaacggggctgcttgggtgtcctttcgagcaacggccatctgaaaacgtacaatattgaacaaagagtatgtggttgaagaataccgctcgccgattgataggacactcggccaaaactccgttagcaactatccagagcagatctataccaagtccgttcgcgatgtctttagcccttatgaccacccatcgcgtggatacgaggtgtctcaacgagtagtttcatttgacttcctcaacatgagcagctccaatgagcctagcgttttaacgctgtccgctgatgatcaggtcaaaattattaccgtcaagccaccaccacctccagtgcgactatcttcacagggaacgttgatttgtgggcgtttcgatgagcatcgcgatttcaaggcgatctatccgctggggactgaaggctcaagcatcgcgcaaattgcaaagagtctacgggacaacgctctggagaggcaagaggagcaagctgaaacccgtggtttgcgagagaaccccgaacaacctctttccagtcgagagaaccgggagcgcatgctgtcggttggcactctaggtagtcctctaactgctgaagaagcgttgactctcttgacggtgaataggctgcggtgcaaagaagggtatttgttcaatggaatgcggaacaagcagattctggccgatgacccctcattgcaggatttctgggattggattgagcgtgagtactagcttgctgagatacgaagttctacactaacgagtcaggtgcacgatcctactctgcggacgattccatgatcatgaaccacttggatctgaattatttgggcgtgttcgatgtctggacgggagatttaggtaggttacattcttcacgtccgctaaaccagtgcggtgattgggctaacttccgtaggggtcagccttatagccctatggatgggccccagtgctgctcataacccggatatcaatgatacgatcgtggatttggttcaggagaagctgaaccttccttcgagtgagagtttacactctcgttaccctgagcagaggcggcttggtctgcggatatgcggcgcagcccagtcacgtcgtgagctcgaggagttggtcaagacattgtccgccgaaagtcagcatacaaaggcggctgctctggccgtcttccaaggcgagccaaagcttgcgtatctcgcgctgcgaagtcatactcctacacaggctcataaactcctcgcaatggccattgccggtgctgcgaaagaaaagccagatcctgactgggaagagacttgcgccgagattgcgaaggagcttactgatccttacgctcgggcaattattgccttcgtcagcaagggcgactggcgctctgtcatccaagagactacactcccactaaaataccgcgtcgaagtcgctctgcgctggcttccagatgacgacctcacaacatacctaaccgaaaccacaaaacgtgccattcaacagggtaacatcgagggcatagtcctcaccggcctcggccattccgccatggaactcttccaatcatacatcaacaaattcaatgacgtccaaacaccggtccttggcatgagccacacagtaccacgcttggtcaacactcccgcaaacaaacaccggtttcgagacctggcgccaaacctacccgttggccaaatcaaccttcctggaaaacctttcaagcttcgaaacggcgcccccgcgtttcgaacagttcgggcttttttggcaaaatattcgccccccccacctttgg

SEQ ID NO: 2727 - DNA, 1425 bp, Emericella nidulans
aattaaataccctttttcaaataaaaaaaataaaacattgattagaacggataaaacatcaaaccgaaaagcccagcttggtaaacgagtcgcccacgagaaggacctcctttggaaggtagcacataggggctttaaacaacaaaaccttgtactagtagatgtttggataaccaatccccgcaaaacattcactctcctgaatacacgggattactcatatatttccacccctcgtgtaacgtaaaaaaacgaacgaccgccgaagaatcccccctgtacagcgcagccctcacctcaaaaatgcttgatgctcaaaatgccgctgccgccaggccaagcgccaaggatgcgcaggcccgtcggatcccaacatgccaacaaaacaatggtagtcaagacactcgcagatatgttccctaacttggaccgtgatgtgaccgacgacgtttttaggatgaaagagggaaggttagtcgctctgcagtttcattatctgaaagatgcggcgctaactcggctgataaatagggtcggactggcagaagacgcgttgtctcgctcttagtgggggttgattcgtagatttctagcaacatatcttaatatgatgtagtttatactccgtaccccaaccgctcctctagaccaggcgtacggcatttactattataactagtgacctgggacaggagctgtttgatactagaagtatttaccgaatcaatgagataatcgtgattttggttcgttatttattccactatctaatccagaccactatgtagcacattgtatgatcagatatatccctaactctaatgagtagatatattctcacgtgattggatattgctcgcttaccactagcgccataccacgtgcctcgccagggtataaattcatcgctctcccgccgttcttttagcttttttcttctttcttttcttcatacttaccttgtttgggtggctgcgatcaagaaggcggcccaccacagactggtccctgcattgcacagcgcggcggaacggtctgttcaacggccttcgggtcattgacaggcgtattctttggcactttcctctctctgagagactccttttcatcaggtctcgggccaggcgctcgagggtggagaagaggtttctttcgtcgcataggttaatggcatttatttgatgtcttaaaacaggttttgcgaatatgcatattatggaaatacgaactgttgttattggatttttgccacctgtagtcctagaggttttttcgaatgttagctgctcaattgtcttagtgtcgagctgtcaaacatgggaccatagcggtctctgaaccggtctcttcacttctggatcacaaaatttgctcaacctgccattcggtcaaccacgaaatataatagctgcttgagccatagcg

SEQ ID NO: 2728 - DNA, 3354 bp, Emericella nidulans
tttagattatttggagaagcacggctttattgacggcattatatcggaagactctgacttgcttgtattcggcgccaaacgactgttgtccaagcttgaccagcatggtgaactgattgaaatcaaccgtgctgatttcacggcttgtcgagaagtcagctttgtgggttggacggacgccgccttcagacgaatgtgtatcatgagcggttgcgactacttgcccaacattgctcgcgtcgggttgaagacagcataccgaagcattcggaagtacaaaagcgtggagaaggcgcttaggatgcttcaattcgagggcccgtaccatgtgccagccgactaccttcagagcttcatgcaggctgaactgactttcctctatcagagagtattttgcccaaagtctggcaaattagttcccttgacatcaccggatgatggagttaacttggatgagcttccttttatcggtgctgatatggatcctgagaccgctgtcggagtcgcgaatggtgacctagatccaacatcgaaaaaacccctacagttggtgataaaaccactgggctcaagcacagtagaacagaacaaacatattgcgtccctcagccgaagacaaacaattggctcgttctcggatataaaaccatctaagccaataaactccttcttcaccccgaaacgcgttccacttgccgagctggatccaaatagcctcactccatcgccaagtcagcaacgactacttcatcgtcatgtcaacagttcctgggagccctcccttgctccgtctcgcccatccgtcgctaggtctaccaccgttaatgactcgtctagtcgtctttcgagtccgctcgtgagaagtgctgaacggtctttatttctagcacgcacttcgaagttgacaactctgcagcctagcaaacgacagaggctctgctcagaaacagacgaagtgatcgctgctagtacaccagactgccgcagtcgcttcttcgcagccagctcgaatgatgaaacccctagcggcggccaaaagcttaatcgtagcaagaaagcgcgcaagtctactttagacgttttctcggacgatgcgaccgaagatattatgtcacagatgcctgatccgagcgaagccgcgaatatgacgaatgagaaattctcagcagcaggtcactccggtgaaagcagcgaacgtgaagatgaagtaaccaaaacaaatgttccaattactaccaggagcgagaccgaggccacccaacttgatgctaagaagcaggcctacgaggctgcatttgacagcagaacgctatccagaaagataagcgccgcatcagagcctcaggtcgttccacaggttacggaccatcatatcaagcggcagacctcgacactctcgaagtattccttcaagactgatgctagtggaacccgacctaatccacagcactcggccgtgaacggtcctgaacggagtgcttcgagccagttggttcgccaaagaacctggacgcctacacaacccaagcggctaaccccattacagcggttgggccagaacgctttataccgatcacgatcattgaacaacatgccggcctcacctacgatttccagatccccaagtcgaattgaggacagacccagcgtcagctccggtgactgtcctcctgcaatcgctttacgcaccgacagggtagcgaggatctcatagtcccagacagtgaagaggaggaagatgattgcgatgcaggcgacgacagtgttagccaatctcgagtaacagctttggatctcaaacggttctctttcacggcgagatgatgtacatattattggtttatcaaagcacctgatcatgcattggtgtcttcattggtgtcttggagtttggaagaggctaacagtctttaggaggtcaatatgccgatcggttggtgaacggattgttgtctggatggttgttttgcttcttggcgttgtattgagtacataatttttattgagatcattacattggagcaatgaatactgtatcactactctgtattcaccgtcgcgcttcgacgatcgcaggcatccgacagactttccgactttaggcttcagtcactaaatatgggttggaacttgggaatctgggggcggtcctggcgctaatccagtttacgttagctcgatctacggctcgatctgctgtgtttactattaaggggaggcggtgaatttggttaccggggaaccggggctcgtaaacaatgggcgttggcccagcctctcgatttagtgcggaagatccagttgtataccgtcagatggcccagccacccactatcttcgctggtgacgctcacgttcttgttttgcaaatactcggtggcaggaagtctcgccggttttgggttgcagctgtggatttgtccagatacgatctctccccttctccgtcttcctccctcttgcatacttctcacttgaactgcccgtttggaccattgttgtcccactgacactctgggtaacggtgctttgttttcattgaaatctgactgttgtgtatagcaccggatctgtcaaccacgtttgcgagacaatccccatacattccctcgatctattatcgtcattcctcccatctagatctcctacgtcgcattccacgccgtattttgctacattcctttgagcgaaccgtcgctgggaatcatccgggtagcaggcactcagtggttgttattggttgttattcagattcacgagtgtgacaaccgtttccttcagttttataggagcgggcattgctgctagacaaggtgtgtagggtcagcagcactccttctcggggctccgagaagtgagactcaaaaagaaagaaggaatcaacacagcaggaagctgttgcatattcaagatgccgagattcgcgggcggcttcgcccgtatgtgttttgtccctagctatgggtttgcgactggtatttgctaacagcttgggttaggcttcattacgatggtcggatatcaccacgtgctgatgattatcattgctattattatcatccttctctgtgagtcactctacttctagctatccgtttgactgtagctaactcacataaccactcagcgctgctgctcgcaggatgctcttcatcatcgcctcaaatgccaacaattttcctgatctctatgtactatgagcgctacgacccaatatttgacctcgcgcaggtcgaccctggagttgttaccgctacagcaaacatcgttggaggtgctcagctggaggttcgcgtaggatattttggcatttgtgtcaaccagacggtggatcttacatctgcaataacaacg

SEQ ID NO: 2729 - DNA, 4255 bp, Emericella nidulans
cgtcttctggaagagggacgctgtcttggtaatagacagtgtttttgaagccatcaatagcagggtcgatgcgcaaggagaacatgtgttggtggaaaggagccatgacgcctgggccgacattggtgccccacttgacagtttccccatttgtattgtcaaagggcaccgtggagagaataccggtggcgcggacttcaagttcgatattcgctacttgatcaaggatgtaggcgaagatgtactcgtagttggccaccgtacagatcatttggagaacaagctggcggttgcggacaacggtggctgctcccgatctgtaattggtgtgtttgtgctgaagcccgttatcctgttcatgcatgcagattatattcttcagacgaacaggttggcctttagaatcggatcggtaaccgtcgaagtatttgatgtgtcctaagcagtcacagccaagcgagagctgattggcattcagaccaaatcccacatcaccaacgtcgaaagcttgcttcctatgatacggtgctcgagggtctgtagagcttaatcagcagatagtcaatagagtaacctggtagacacaaagcctcgggcatgtattaccccccggagttatcttatagcccggatgcaatgtggccagctggaacagttcgaactcacctccatagggcacggtcatttcagagatggaaagccgatacaaaacgttgcggttgtcgtaggtaagattgtagaggaccaagccatcacggttgttgaatcccactcggaaacgccacttctgccagtagaccttgtttcccgtcaccgaaaacgaggcgccctccggttgttggacgatatatggcttgagatcagtgcggagaggctcatccaagagatcatgtgcatattgaatcgtcttgactggcttccacggttgcgtctcagctgtctgggtatcggagcctccaggcaagtagtccatgcggaccagctcgcgtgtatggccatcaaaaacaggggagaacttgcacggaatagagtagtgattgttctcagggtggtccacagacataatgtacatgaagcactggaacaaccggcgggtctcatgaatattgtccgtgccatacatccagggatcattgcaaactgtaactccctggggaagtttcaatttttcgatctcagccaacacagctggatgctccatgcaaagcttctcaatttctgtgatttcatccacgtctatgggaatctatccttgtcagtgacgaaaccgcaatcaaggaagaatgatagatacctgaaccccagccggcaactctttcgcgtagacaacggatgcatcgtcggcgttgagcagagctttgcagcatgcccctgtatcaagacgatgaaagtaagagtaaagcaggcgggctggctttttgggaagaggcctccctagccgttctgcctcgatgtaaggaatgacatcttttttgataggttcttgaagatcaattcggttgatccgaagctgaactccagggaacgcagactgcaggatacggtgacctagacgaatttcttgagatgtaagagggtcaaatgggtgagggactggctgcccttgcgctgaagacatggctgatcgtgtgaactgaagtatatgtggaggtcacagttgaggagctggggaaggggtatgaaggagaagacggtatcaaagatgagatggagatgcgactcagctcctctcaaaggagagagacagtgacttatatagctgtcatctttgccatctgttttggagataaagaagagatcgagatagatctggatggacctgcctattagggaaggtcacggctagcgccattgtggggtcgcgcctaagttgacgacaagcacatgaacttgagccgctcatcggagtcgagcattgcatcttgagggtacttgcaagcctctgggtctcactgcacgacaatgctttggttggggttcagtcactgttgcgatttatacggaggatcgacagagcctactctgtagttagtggaagaagtcagtcggctagcctagtgaagtagacggcgttgtatccgtctgaaatgttccatcttgcccacttacacgaagattccagtgtactcaactttaaagcgtcgtgaaagtaatgtaaggatacagtccttatatggtgagaagaagaaagtgcaagtactctgtagagggtaaatatcccaagtcgtggcgaaagtcctgtctggcgtaactctttcccaaaacggtttagtgtaaactgtcccctcttgttcgattctgcgagccattcagatacaaatgatctttttattttgctgctccttttctggctatgtgcttcgagaattctgtcattcgaggcccattcctccaccctagtctctttgttgaccgcttgttggcgtaccggcccgttcccgaagtatatatctccccgaaaaatgggctgcccggggacgccgaacatattccagcagtatgaaagcgagccacgcacgaagaaaagatgcagaagacatggaggcaattggagtcgaaccggctgtttgacttgcaaaagacgaaggaagcgctgcgatgaggctaagcctaggcaagtgtcctccgttcactataatactggatctttgctaaccctcaacagctgccatacctgcaccaggttaggcttaacctgtgaaggttatagctcaatgtgggcagttccacttggaccaggcgctcagatcttcaagccaacagagcccgctagacaccatagacctgggcccagtttatcacctgcttcgttagtcggttcaagggcatcgtctgcgactatagggcagccattgccagtaacaggtcatacttcacctatttattcgccggtccctgaaaaggatgaccttgcggattcggagagttgtagttcgagaaatgccaaccaactagctgttcaggcggcctcccggtctccctccccctccagattgatcaatcatctttcccacctcgactcccattacctccaataccacatggaacggggctcaaagctgctaactaacctagagtctgatgagaatcccctccggtccatgttaatccccagggctctctcatcgactcttctcatgaacgctctatgcgccctatccgccattcacttctccaaccgtactcaccacagctggtttgctgagaatgaaggggccaagtactacattgacaccatgcgcggcttaagaacaacgcttgcaacttccgagagaagttatgttccagacgacgccatcctcgccgtttctcttctttgcaagtatgagattgtccgcgggagcgtgaagcaatgggctgtgcatctagacgcagtgcagacgttggtttcctcccggggaggactcaaccagctcgatcaggatgcagccgagtttatacgtggactgtacgatttttcttcctctcctgaacacccgtggatgatgcaactgataagcttcccatagcttcgtctatgcaaacaacctggctaggcttaccaaccgaagaaccttactcaagccgtctattcccggctctgatatcgtcaagccccacaagctagacatctacatcggatacacagaggaaatcatcaagacgtgcgcgcggatagcagacctccctcgtctggtctcagattcggaggcctttgaacatgaacttgtttcaatgtatgcggacttttcttaccctttgctcgggctatgaggcaagaaagaagaatgctgacgcctgtcgctcgatagagacagcatcctccacacatggacctccaccaagacaacctacatcgtacccaaaggcataacccaggctaccctctcccgcctgcgcttggtagctgagtcctttcgtgatgccgcgtatatctaccttcattcagtcctggaacgcacaagcctatccgaagtctcactcccatcttccataacttcacacgcagactggagattcgaacacctcatctcaatctccaaaacgaccgccataatgtccctcctaaaacgtctcaaaactcatcccatcgacaagaactgcgagttctcagcgctcacattcccgcttttaattgccggctgcgagagcgcacagtgaggaagataggcagctaatatggggtatgctgagtgttgtcgaggccaattttggaatagggaatgtgaagagggcgaaagaggcgctagagatcgtttggtcttcttgtaccctg

SEQ ID NO: 2730 - DNA, 783 bp, Emericella nidulans
attgcctgcctgagggcgcagactggcgttgggccgcaggtggtgtcgcatgttttcgggctaaggaaagccctggaggatggcacttggaagcaggatgctgagagcgaggagggggcgagatggttagctggagaggaggggaatgcgtggatattgaggagcgtagatgagattgtcgcggaaatcagtgagggccagggatcgaattttgcgcccgggaaggccaagttgtagattatgagagttgtatatataccagggtggggctaggtgggatgcgatgtatacagtgggcatacggccggatatatatatactgagtttttctagcactcgttatagtgaacagtatttgtgcagagcaatgactagataagtacagcattattttatttggccttcttgttctcagatacactccggggtttttttctatagctccccccaccgagcgaacagctgccgacatttgaagcgaggggcttgtccacttgagggtataacgaatgctcacctggacagctgtggccgaatagcttcgcacaatgatgaaaaaccattaatcggtgacctaccggaatcaggcccttaaggcccggtgcatcatgacgggaagcctccgcgaatctccaacttcgtgttcgccaatgaacgctcttgccgcgcacccccgaggcagcccaaatcacttctaagatgccagatctggacaggcagataaactccccgcacttgatgggggaattaagcagttagcttgtcgggccgggccgctgtcac

SEQ ID NO: 2731 - DNA, 2040 bp, Emericella nidulans
aggttacgggcacggagttgaggatcgtgggcaattttaccatgaatagctaacagggtattactctaaagcgcttggaatatatgtctgatctggaactctatctaaggtggttgaagcaaagaggcatgggtgcaaaccaatttcattctattaataaaagaccttgccctggagtgattgggttcattgagaacaaataatggaaaattgctaatttatatgtagggtggtggaccatataccgtaaaccatacagttatcgtgtttgtgtagggtcccaattttaaaatggacataaggcttccatcaaggaaaagtctcgtgttcaccccacatgcgatgggcttatgagtcgtcatgaaacgggtcgtgaaggtgtgacgaatcacctagggcaggtgttttcaggtcaagggacagatgttcacacaggattagtatgctgcagatgcattatataataacctacaatctactggggttagtagagtttggcatgaggtgagtaataaaaaggagggctctcgatcgctaggcagagcatttatcctcttgcgacaattacggcgcttgcagagaggtctgtggcgctggtagcagggcagaggcacataaagatcgatttagacacggaaaatggcgacattgatacctatagtcagcctaggggtccgcattataataacagccacgctgaaccgaacagggactatgtctcaaccggatggcactttaccgaatccctcgaagggcacgttgccgtcccatcatcgtgtgtgtcttatgcggctgccgagcttgaagggaagggctgctcatcgacaatgggcattcttctcacagtggaaatctatcgcagagttgaaggtatgttcatcgaaagtaaaagtacaagctgacatttgccagggggtactggaccaagatacaagggcctctgcaccggaacagtttcatgccgttccttatcacgcaggacaatgtgcgttatgcgtggagatcttgatttcttcgttgcaggcaatgagagtgcctcaacaaccttgacatatacactcccactttgcaccgtcgagggcaggagattgaccttgatcggcgtcaaggctataggccaatctgctgcattttccatacctagattatgggaagccacaacaaccgtcaagcttcatatactggacttcaacaacaatagtcttggggccggtgtcgtgcgtattccgttactatcattctggcggcaaatgcgaacatttcatacgatagggccaagacttagttcactcccggtactgcttatattcttgctgtatttcatcatccagctcagcttggtcttcttctatccactcatacctttttgcggcattctctctccaaccagagcccacagtcaagcgatctcagctaaacaacaaccatcagaaatactcgaaatccttacctctgacagtgccaagatcaggcttgacgtgtatgaccctattcagcccctgggtacggagtcaagagctggcaagcagtcacagccaccaatcctctttctcccaggcattacaggcctaaacacctcgcactctatcttcgccctgccatttcaacgctgcaacatggtcaaatacttttcatcccgcggacatcgttgctacgttcttaccccgcggtggagccatgatgggcaaaccgcaaaagatggcaccgttttcgatagccgcctcgacattgccgccgcaatacaccatatttccagcaccagtcccacgtgcgacagttcgagcccgaaaccatatattatagcacactgtcagggctcggtggcgctcgccatggcccttctaacaggcatcgtcaagccggagcaactcctcggcataaccgcgaattccgtgttcatgaaccaagtcttcgggtattggaactccatcaaagcttcatccaccttgctgatccggaaaatatgagtttttggacgggccatatttcccgatttccttcttagagagaaggaaagatttcaacaatacattcgggact

SEQ ID NO: 2732 - DNA, 2580 bp, Emericella nidulans
acggtcccatataccaccacgtgacggcgccccagatggctgggaacacgaggaaggacgaatacgactgaatgaacgcaaagtaaaaggccaccttctccccgaacagcgaccggatcgcatccagatcctccgccgtcaagagcactgtccggctccatttgcgcacaacatcggcattcgccacctggtcgtgcagcgggaatgccgaggcgacgtgcttccatttcccgtgcttcggcgtgatatgggccccgcccagtgtcttcttccaggtgacggcgtggtagaccgatcggagggcttcggcgggcgtttcggcgtcggcgatcgtctcgtcgtcgccggcagggagttcgtggatgatcccgtatagccagtctttgactcgagactggtgcaccattcggcccaggtgcatgcggggaacgcggatgaagaccagcagcgaggcgccgtggccaggacggacctgggtttcgagatgggctccttcgaggtcgcggatgagcgcttcgaattctgcgagtgcagtagacgcatcttgtcctgttagcggccacaccttggaggggatcgatccggagacgtgtagctaccgagatcctcgaactgatagtgaacgacccagtcgacgccgaaattgtccagttgggcctgctcgggcggccgatagttcggtgtgagactcattgcatggatgaacactgatacgactgaacaacggaaagaaaatataccgttagcctttaatagacggtaaatgagcgactaattcatccaggcacccgtcggtttcattaaccgcccgtttttcaggtgtgcgtgcgtgttgggggagagtagagacgacagacgacggggaaggagcggctgcgagcaggttggagacaagtggggtgtagtcctattaatgccctttcggattcaatagcagtcaggagaggtgattgtcgttggtttattcttggaaacctgacatggtgattgccctgaatagtcgtgctactctggccaaacatccccatcgcaatccccatccactccatcctgctcgctctcagccgggaaccgggggccaagcttgtcagccctacagggctcagccaatgcgagcgaggtgccatgcggtaggtggattctcgcttgtatgagagagtacggagtagagggactggcgcgaagaatgtggactgcagctgatttattttgttgcctgcggagctatcggatggcctgctcaatagtcaagaagacggagtactacctgtgttatgactatattgacaggtactggctgctcttctacttccagccttaaaaattgtcccataccgctgtaatcattgccctccagatgaggaacttcaagtcagccatgactgctctatatggaatggtacccttcatagacaatagttgcttccactcacctgagaatcctgctgcctacgccttacgtttggagctatacaaggctgttcactgcacctaggtggaccctggatgtggagatgaacatttttccatccaatcagaggctatactgtcaatcaagaatggggatcctcacaggcatccattttgataccctcaattggcccaaattcaaagccttgggatgaatataagcattcatgcgttcctgcaaagattatcactatcagggtgcttgatccaggcgctataggagtaggtcagttgctggtctgcttggatagcgttcattcagcatctataaaccaagcttgtcctgttcatactactccaaaccctaatccacactctgctcgacctgacgccaatgcccttgctcaccactctcgccgaacatatggaccgccggcttttccccggccagagcctcgcctttgggctgagtctgttcctgttcacattcatgttcattccgacgctggttgtcctccttgctgtcgtcgtgttcttcctcttctactatccacaactgcgaaaagggttataacactattgactgtatgtctatactaacaacaccatttgcaaggagccactgactcttgtagaccctgagcgtcgaaacgaggacgtaaaagcatgacggttacgatgttgccttgattttgatctatcgacgtgggcgtcgagcgactgtactatattccgcctatcttcattcgttactttcctatatttattatatgtttatttcctatgttatgagcactgccgagctgttccaggttggtttgaatcttgtcatgatgacaacaaggacgatgtattatagcagatggtcgcctagtggatatctaggggttaatggactcgtaataagcaacaacataaagcagccgagaccatggtagttgagttttacatatgctaccacacttatccttccaagtcattaagaatacatgcaaagaggacaacgctatgaatgaggcgagagcgaatattctacaaaaaaaagatcctccgtctaccctctagccaatcttgataccactacttctctatctaaccgcttccaaccgccgtccgcgagacaagacctactccaacctcccaaaccctagtttctcccatttccccagc

SEQ ID NO: 2733 - DNA, 2384 bp, Emericella nidulans
  unsure (1)..(2384): unsure at all n locations
cctgggtacctattactttaggtactaccagaattaggaaatgcaggtccaattatgaacgaccgaatgtactccacggaatcgttctgaccctcgattccgtgctgatcgctacgtacccagtagcatcagcaactttgttctattcagagtatatctcgaaagactttcgatcattaacgcttttagcacagtcgcatgatcacagcggatttcagcagcaaacatctcagacacagcagcaatcgacttttggcagcctattgccgttctgccaatacctcctctttatccgaatgtagagcatccgaggactgtatcgaatccactctccaagatagtggcggtgcatctcgacgtgcgacccacaacccacgaacggcagggagcaaaggcgtgcccgattgctggctagggtcaagccatgctctgcccatgctctgcttgtgggcattttcgcattcgtgccgaagaaggggcgagaggagatcctacagcccagtagggaatgggtagctctgcaatgcctcgttagccagcgtctggtaaccttccagtggagagagttgtgctgtagagttgcggaccagatccgtggctaccacgatgagtccgtcctgaaatttggatgcctattgttaaactcagagtgagtctctgccaagctggtgtgatgcagtggaataatcacttaacgattcgcccatctggattgtgtgtggcaattggtcaggacaagaagtgtgaatgcgtcgttgatgtcttgtcgatcgtttttgtcacctcagcggggctacagggctgagactagggtactgcgtgaaaactgggctctctgaagagctggaagtcatcataatgaggataattatagaagatgcagacttttggttggcggacgctattagatgggccaagttaatagtatggagatcaagaaaggatgagtgacgccaatccccggggcccgtttgggactccagattgttcgtcatctccttttgcttttcctttggtcctctcctgacttctcttcaagcttcaccctcgtttctttcttcgactttatgattcaatagtatctctattatattttcagctaatattggaaatcaagaacacaccttatacagagcgcctaaaacaactaaggtttgcccgaccgcagacgtcatttgcaacgcccacgctaaataggcagacggattccgtccttcggcttgatccagacgcagccgaccctgtgcttagcctcgatcattacgcgctttctgcttaatccaccgcggatctctttatcgggaatttttggggttctgctcggtcagcttacttcataagtacccaagcccccatagttgggggctctctttctcttcagaatatccacctggccggtcaattgcgcactatgcacgcgaccaacggagttgtcgactcgcctacccctcgccaagatggcgaccttggctataagccagtcctgactggaaagcaagaacactgtcggtccctcaatatacaagttgtcgagaggggttgctgactgtgacagatctcaagcgcgaactcatcgcccgccaggtccaaaaagagatctccgaactaaactccccaaccgcccttcggcgctttggcgctcccttcaagtcggatttcggagaagtcgcgcctatcgattctgagcttccaatccttcgatatatattcgttcaccatgttcgaaatttcccattcttagatcaggcacgggagaaagaattttggcaggacaagctgcaagtggtgcgtgccgtgtttttgcctctctcgacagaaccggcggagctgacaatctggacacagtttctcgaatcatttgcgaacaagaatgtttcgtcctctgaagaccgactggaggagacgaagcgaagaaagtgggcccgaaagtgcgagaaactcgtcgagctgatgatggtttccggtatccccaccgcatctggctatgaggagcgtatccagttttcggaaatgaaggtagttgaccgtggtgctaatgagaaggggcttcttgtcaatatgccggaggggaatgcgattaatggctgggatatcaatgtggctgctgtgcgggtaacatccgtannnnggacggttcgacatcatcaacatgcggtatgtctagtataccctggactaatacatcaaactaataatcggcaggaatttatcatccgcgtaagacggaacggtcagccagatatctttgtagctcgacggttcggcgagtttgtcgggcttcaaccgcggttgcactccaaaataccccccagggcggtgccgcccctcccgcgaatgaccaaatcgtcaacagaatcaacactctggggcggtagcaccgcgca

SEQ ID NO: 2734 - DNA, 1146 bp, Emericella nidulans
aaataacaggttattttaccaagtatatgcgccttcgcggaatataccttactagaacgtatactggatgaaaaatatgggctgcctgactggccagtcttagaccattctttattcctagatacattccacatcgagtcggtaattgactctctccaaatcaagacgagatattctcgaatcgagaaaagaccttcctcttgcgccctctgatactctttcatgatggtctcgcgccgtctctccgatcggggcataatccgacatggaaaatcatttgcgcagaccaaaaaacccttcactatatccggtcgttggatgcaagtccggctcgatcagtttcccactctcatccactccgggctcgatagagaaggcccaaatgagtttcgaaatggccagaaacaggttccgctcggcaacatggatgcccgggcagatgcggcgtccggtgccgtaaccatagtggtcgcgcgcagtgtaatcagaagcattagctaattcaggcgcaagggccgtctgacccttgtagtggtctggatcgaagactgaaggattgccgaaccgggcttcgttgtggtgcatgccccagccactgatgatgaccgagctgcctttgggtatgaaatggccgtcaacccagtcatctggttcacattctcagcattacgatcgacaacgaagctgaagggtgtgggagaagtggaggaccaaccttcagcagctgcatgcgggaacgccaacgggacagcaggtctccatctcatggcctccttgactgtagccgcaacatagggcagcgagccatagtctgaccagactggcgttctgtcttcgcctacgacactatctatctcagcctgcgccttcttcagaacctgaggccactttgtcatggcgtgaatgaacgccagaatgatcgaactcgacgtgtcagagccaccctccatgaggacaccgccgaggaaatagagctgatggcgcgtgaggccgagcttctcattctggtcaagcaccgtatccatgaacgagcccgtgctgccaacctttttgcgccgcgagtccacaaggtccaggtactgcccgtaaagctggcacatttcatcccggaccccctttgcgcgcgagagccagttgccaaagact

SEQ ID NO: 2735 - DNA, 633 bp, Emericella nidulans
acctgtgatgctaatgcaaagcaagccccaagaagtatgcagaatcaatcagtctgtcagaactttatcacagatttaggtacagcgcaccacataacagattcctgaaggcgcatttgagaacagcaagtggcaaggtagctatagtggatggcagaactgaccgatacattaggtcagcatctatgaagccccacgtttcgttacctaatttgtcctcttttgttcagagaatgtggtatgatcatgatatatcagggcgtcactagatcgaggctggccggtttatacaagcgcagaaatcttagaagggagaatccagcgcgggtgcaaagcactagttcagccctgttacagaatatctggaattcgaaccttgtgctcagtataaagtgttcacggctatttatgaatagaacgttctgccggtaccgatcatctttgcaaaaccacggtatacttggcgactggatggctactagttagctacagtcttggacggtgaaaattgccctggcctgcgatattcccgccggacgaacggccaaaggcctatgcggcgctctggctctgccaacacagccgtatcggattattatcgacgctcaccgaacagagtggtgaccggacgca

SEQ ID NO: 2736 - DNA, 1120 bp, Emericella nidulans
agcaatgttagacaattaagagatggaaaaatgccaatggagtgctcaacataccatagccgctcttgctccaatactgagcaacgtaggtcaagtcgttgcgcacaataggccagatattgttactagcatagctggagtagccgttatcctattgatgtcagccagcaactttcatgccaacaagatcgaatcatacaatcaaccagttgccgaaacctataagggtagtagcgcgcagggccgggccatctcgctgaggacgaccccaggagccggtaaaggcggtcatatcaacatagaacttgggctctgcaagccctccactcgccagaccaccagatgggtttgagacggtctgcaaatatgcctgagagttggtatattcttcaagaatagtctgtaggctcagatcgccgttgtgaaacaggtcgacaaggactttcacggtcagagcggcatctcgtgtccaggtatagtagtctgctcctgttaatgtttattccacaggagaccaaaaactagatagccgctgagctcacagtctgggctttcagtgctagggctggcgatgaccacaccagccttggcggtctttgcataagcgccatttgcgccaatattggtgagaatgccatccagagcaaagctagcctcggtagataaccaggtatttaagctggcagtagcccgcgcagacaactgaggagccgccgcgacagcatggctgagagctagcacaggaagtactttagagagggtaagcatggcaatgcgaacaggcgagagttggacagaaaagatagagtcaatcagggggaacaaggttattctattacactgagtatcatgaattatcgtagaccaactaactgtcggatctgatttactttaaaatagtcgtcggcattgtatgactggtgtctgggtactatcggatgtcttagtgggtggttagcatccacggttgcagtgtctccttagggtttaggaatctgattgggccacccaagatggcttcatatatgaccaccaacttctgcatattgagatttcccgagcgcaccaaaggatagaaaaaaatggatgctctgtgaatattagcaatttccccatgggg

SEQ ID NO: 2737 - DNA, 1460 bp, Emericella nidulans
tgttaagaatggtggtcctatgttcaattatttatgtatttaaggttctatatctatgaaaccctaacgtgaatgctatacgttctactctatcaggggtcatctattcggccaactcaggccaatattttcgtacgacgtctttcttattgactttccccatggcattccgctcaataccgtcgacgatcttcagcacggtggggattttatacggcgccatctcctgcttcaggcgtgtgcgcagggtttgcaattctagtggttccgtctagtttatcccatcagtatcttgctttcctttcttccttttttctaggagcggcttctgtgaaatcagggaaagggtgattaacttacaccaggcctctgctttacaactgcagcaacacgctgaccccattcctcatcggcaatcccaacaatagctacttccgcgatctcatccagcgctcagcagcttacgctctacctccagcgcagagatcttgtacccaccggacttgatgatatcaactgaggcgcggccctggatgtagtatgcgcctcgttcatcccgtcgcgcaacgtcgccggtcttgaaccacccgtccgcagtgaactccttggccgtagcctcgggccgtcgccagtactcggagaagacgttgtcgcctttcacttcgatcatgccatcgacgtctgcggcctcaattacggctcctgtttccttgtctgtgaggcggacctggacgccgggaaggggccagccgacactgccgtcaatgcgctgcgctacatcgagcccgcagctgagacccatgccaatttctgtcatgccgtagcgctccaggagggtttggttcgtgatggtggcgaatttggtcttgatgggggtcgggagggcggcagagccagagacaaggaggcggagtgctgctgcgccctcgcgggcgggtgtttcctgctctgtaccacggatatgtgcttcgaaatagtcgacgagacgggagtagatggtaggaacggcgaagaacatggttgaagagcccttgtttgtccagcgagtccagatagttgcggggtcgaatttcgggtacatttcaacggtggcgccggcgaggagggtggctgtcaggccgttgatgatgccgtggatgtggtgaagggggaggacatggatgaggtggtcggtgggctggtactgccatgcctggatgaggcattgcgcttggaaggtgatggttttatgagtggtgattgcgcccttgggtttgccagttgtgccgcttgtgtagatcatgagcgcacggcgctctgggtagtaaactgggaagaattcgggcagttgcggagacaacgggctttgcgtgaagggcgttagggtcatgtaaaggcgtggggtgtcggcggtgccctcacggagaggggaaataaatttctcgaacgccgggtggatgatgataagcgagggaccgggg

SEQ ID NO: 2738 - DNA, 571 bp, Emericella nidulans
aagagttaggaagtgcggcgaagacgggtgaagagtgacatagggcgtgcggcccgttggatgtagggctcgagggacaacttacctcaggctcgttctcatgcgatcgtccaggtcgccacccagcatctgccgcaccagtggtgtgatgaagctgggaagtgcagagtcaacgtagactcggacgtactggtcgtttgtcgcggttggccgcgcgacttcttcctcgtaacggaccgtccaatcgcacagttccgaagcgaagtgcaggccatctctccatccttgtgctgccgacggaagcacatcgaacgggatttccatatcttcgcccaggttcttgtggaagatgccaagggcgcatttctcgacttcggtcaggctccgccactcttcccgctgcaccacgttcaggatctcgagaagaccgtctcctaacgtatggaggaggtcggcgtcggtgatcttgttggcacggcgatagcgggcatggctggtatcaggtcagcacgtgttaaagagtgtgaagagcgtgtgtgagagagagtgggtggtaaaggtagcgtgtgga

SEQ ID NO: 2739 - DNA, 835 bp, Emericella nidulans
agttgtgttgcccacctcttctttacttgcggcactgatcacagcttctccggatggtacacccggcatagtgacggacgatgcggtattgatcgctgcgtcgccttttagaacataatagacgaaattcagaaaaaagatacagctgtgttgacgcgggatgccaagctcggctgaacgaggcgcagcggtcgatccgttgataagtcgctgggaggcctgaagatgaatatcggcagaccgacagtcactgccggccaatatgagctgatcatcatatcatcatattgcccggaagcctgccttattctttgctcctcgacattagctgactcgacctccatgaaaatgactatatttaacatcgttatatccaacaaggacagcgcgttcaagcgtgaaggactaggcttagtaaagacgatctcctacctattctagcgagtctatcctatagattatcagctattataagactaacatatatggtctaggcatattcgtacctctgtacctccaggcgacccagatcctgccgatcatcaagagcattgtgatcaaacaacaaacaattgtaccctgactcttcatgcccgttgctactgcgctgctactgccactgccactgtcccaatacagctggctgtgaaggtacgtgttggtccaccgacggcagggtctagctgaagactgtcgagggaaccaaagcacccgctgtcatcgcaagctcaatatcaatcctccattgcaaacaccaaactggaaactccagctaaccaacctttcgccgtggccagtaggatgaggctgagctgcgacaggacggcgatatttt

SEQ ID NO: 2740 - DNA, 1203 bp, Emericella nidulans
agcggcattcagagcctagccatattagcacaatgaaggaccgagtcactagtgatgcacttacttcacggcacctgcgtaggagatccacgtagttctgagcctgctgatcgtctataatttatgagtacccatcaccacccaaagcacgcgcaacttactctgaggatactcccaatcaatatcgatccctgagcttccattagcagccattcattatcgaactcagaatcgaactcagaggacgcgcaccatcaaaaccaaggtcagtgatgagctttgtcgcagtctgcgcaaagcgggctctgttctcaggggtaccagctccgttggtaaagttgggagaataggtccatcctccaatcgaaaggagaaccttgagctgtctgtgctgccgcttaagcaagcccagctgcttgacgcagccgtagacgttgtttccggtatcattccaagaatcagtggggtagtgcttctcgatatcagaccaggtgtcagaaaggtagctgtgtcggcattagcttcggcttgggctggcttccacatagtccatggttcggcttacacttcgccagtctctggcctgacattggcgaatgcgtaaagaatatgggtcaatttctccgcggggagatcttgggggttgtagttgcggccgtagatggcctgtcgatcgttagtgaaagatatatatattggtaggagacaggaagtacgtacccaattaacaaaataaccaacagttttgtatccagacatcgtggttgcggttaagtgcttcgagaactcgggaatgctgcgctgtatgccaaatagagaggtgttacttccaaagtaatgaaagtagagagtgacaagcaaaatgggggtaaagagaagatagagagctcgggaaaagaccatatggagtcagaaagctaatacagaatagacacgaaccaatttgaaagtattctggagcctgcttcgtacctgccctaaacaagaatagctgcgagctcaacaacaactgtacctgagacgctgtggtgccttattctacaggtatcaaggtggcgtaagtggcttgtcagtggggacaccaggggcggtgcaaatagggctggctgtggactgtggctgtgcgtggctgttgaagaagttgcttactcagcgctgtggacgctagatctgtatggagcagagagataacagtaaactcaa

SEQ ID NO: 2741 - DNA, 897 bp, Emericella nidulans
catcgcagcgaccgacctggttcgtcttactggagacgaagagatcaaggctgcactggaccgcatgtggatggacatgacagagcggaaattgtacgtcacagggggtattggagccatgcgtcagtgggaaggctttggtgccaaatacgttctagctgataccgacgagtcagggatatgttatgccgaaacttgtgcctgctttgcgttgattatctggtgtcaaaggatgcttcagcttgacctggatgccaaatacgccgatgtgatggaagtcggactgtataacggctttcttggagccgtgggattggatggggggtcgttctattaccaaaaccccctacgaacatatactggccacccaaaggaaagaagtgagtggttcgaggttgcttgctgtccaccgaatgtcgcgaaattattggggtcaatggaatctcttatttattcattcaaggatgatctggtcgccattcatctttatattgagagcgacttcacagtcccggagaccggtgtggtggtttctcagaaaacaaatatgccttggtcaggcgacgtcgagataagcgtcaagggaacgacagccctggcattgcgaattccaacctgggcagaaggatactcgagctcggttcagggagaggtcaaaaatggctatctttacattcctcactctcaggatttggaagtgaagctctccttcaccctcaaagcacgaaagctctatcccaacccagcaacagaaaaggatcagatctgtatcacacgtggaccattggtatactgcattgaagattgtgacaacgaagtcgacattgaccatgttggtttggtagaccgccctgtgactgaccgtgaaccaatcgatatcgcgaacgggaatggtgt

SEQ ID NO: 2742 - DNA, 1459 bp, Emericella nidulans
acgctgagatatgaattcgggaatggaatctgtcatccattagtgggttatttccagtgccgtgcaaggtacgtaccaggaacatcagtctctccaacagcactcttgacgaatcgtaagacccatctttcctcccgcttagcaaccagctcccaacagagaatacgatcctccgccaggtacatattggcagtgaacacatctgcatccttaccatgcagcgtctctcccttgaaatactggttcagaggaccgttaccttcggcgtcattttgcaatgcgaagaatcgatatgcactaagcgcacccggcaacacagtgatatacccaaacacagactccaatggcttgtcgaggatgtttgacatcttgtattcaaagttctgactcgcgacgagcggattcagaagacctagcatattcttgcctttactggccttgatttcaccggctgcaccagcaacattggaatcctgatcgaacgctttccatagatggtacagtgcggtgggctccggccgggtaccgacgtcaaggaggatgcaaatgttaggttgcaaagcgcggccaaaagcgttgaagaaccaacgatgcgagtttagctttttctgattgtgctccttcagacagaagataacctggcaaggcacgatacctttctcagcccccttgaacttgaggtcggagtcgagcgacacttgtgtggtatactcataaacgtgggcattgacctgtttctggttgacgacgttctttgcaatgccctcttggtacacacccagcgcagccagagcattcaacgtccggggatgcaccttctttcgcccgtccgaaatgatacaaaccacaatcttcttccatccatctttgccccatgtacgagacttggatcgagaacaaaaatggctgatattctgcatgacgccgtgcatggtcctcgtaaagtgggtttcgtcctcgttatacatggtgatacatataaataactcggtctcgcgcatcgtccttccaatctgctggcgcagtttataccccctttgcgtaaaatcatctggatcgcaggtcacagcagtgtatctcatgtgcgtaaactctcggtcgtctcggcgtggcagaaagctatgcaaaatcgtgggtatcttacactccaaaatcaactcaccgttgaccagctgaacttctttctttgccatctgcgcgttgcggacgcctcggcggctctgcttctcgggggcagggccgtagtgcagattgggatcgaccattgatttggtttcgttactttcttcttcgtactcatccaaatcaaccttttccaagtccgtttcgtccgcgataaacgtcgattcgctcgtaaacgattgcacgcttccctggggtccgtggcgagaacttattgttcttccaccgccgccgaatgggtctttttcgccgtcgccatatcgatttcgtgtcttga

SEQ ID NO: 2743 - DNA, 845 bp, Emericella nidulans
aaatcaggaacgcatttctcgtagcgtcagctcgcccgctacgagaaagagcacccggactcaaagtcccagccctcgatcaacacgtcgccgtacaacacgtcgtcttacgacatttcagcaagacacttcaaggttgtggcagaagctggggtgggctttgacaagtacctctacgaaatcaaacgcaagactccgggagagcaggccctcttgcatggttatcgcattgactcggtcacccataagtcgcctcaagagcctggcagccagtttactgcaggccaggggggtatacctccaagcaaccagggtctctttcccggtcagtcgagtccatccctacaggggcattatgatggcctccaagcccataatcctggatcccgtcagtctcaagctcaattttctcagtatggctatacagcggacggcttacgcagccagcctttcgtaccgcacggccatgatcctactttcaatcgttctccgcaaacgggatacggccaggagtttggaatggggatgggaatgaggaatgaatataatcttcagccacctccagtgacttcaagcaagcattcttttaaaggttctcccaggggcactccaagtggattttccggcaccgctgggcatggagatgatgattctgattctgatgattgacgtgatgcgcagcatttgttactgtttgtcgatagctgtttttcgtcgtaatcaccttagtgtcgtttagctattattgcttaaattcttacttagtaaatccaatagcacaatccgtcaatagctgcatgtcgaaaacgccactttgcactcactgagccagctgcgcgcgagaa

SEQ ID NO: 2744 - DNA, 3526 bp, Emericella nidulans
  unsure (1)..(3526): unsure at all n locations
aagcggatcagctccacccgtattactgttttcgcgttgtcgctgcagtattttgacccgcttgacgagtgttccaaccgagataggtccaatcagagtgcaaagcgagattgcccagactactacgagatacgtctcagacgacccttgcgaatcctttccaaaaataccattggactctgccagagaagcaatcaggtagccgatttcgccacgcgctaccatggctagagacaggatcgttgctgggtagagggacttgggcttgggtgggagtgatgacacgaacggtgtacgctggtcgggttctcgctgtggtggacgatcagaatcagtgtttgtggcgtattctccttctttttggttgtttgagccaacgcgcgcacttcgattatcgctgggttcctgtggagccccgtccgtattctgaaccggctccctgtgctgtgcttgttgagcatggggggatttctcgctttgactctttagcggccggcggagacaggatgtcacataagacaaggaagccttgagtatacgggcgaaggtggtaagaccggacacgggagatcctcgtaccagccacaaccctgtacacattttgccgaacgtcatcaaaagggcgtagacgaagccgcgccatacaacgctaccctggaacatctcggtgattggtatgcaaagccaattgaagcctagtttgttagatgattcagtaaactttcggtagaacttacgaaaaacatgggggtcagaatccggttaacagggccttggtagtagtgctcgtaaatatgcattcctgttatttgctctctctcttggccaggttcgggtgatcgaggagagtgagttacgcttgagtcgcgtgaggcaggttgtggcgaagcctcatggcggacagaactgctttcggcgattgagaccggcatcgctcgcagcaggccgtcaaaccacgagcttataacaccagcgaggtacgcagctaacagactcgacgtgccggcgtacgtagcaccagcaaccaagcccacgagcaagccagtatacctaaggaacgcgaattggggcgtagacgtaaatcctggcagtctgtccctagatgggagcactctcatcagaaacggccggaggacgaaccgacatgccagaacaacgccaactccgaggccgagtgatacgaacagcgggcggactacagtcagtgcactgaacgaattgccactcccacccagattggatattatctgaaccatcacaaggccaacgacgtcatccagcatcgccgcactagttgtgaccgtcccgaggcgggtggtgataagcccagttgttgagagaatcgtgaacgtagtgcccaagctcgtcgcgctaagagccgcaccagcagcaaaagcctgcagcggggtcgcggagaccagttccatgagaacaaatgacagtgccatggggattccgatgccagtaaaggctactgcaacagagaggtacatgtttgctctgagggaggagagcgaggtggataagccgccctcgtacacgagcataatcaggcctaggtaccccagctgctggatgacggtctcaacactgcgatcgagccattgagctccaggggtaccccagagaatcccaacgaagagctggccgatcaagccgcagtaaagcagcttgtcgaggcaagtattgactatattcagcaccagcagcaggccggtttggttgaggatggtggaaatcgatggctcatgataggcaaatgctgagtctgccatatctcatctgtcaagcagttaaattggagttacagctctggtgaggggctatttatgcggtaatagcagtgttcggtgtttgcgtataggcgagacaacaacagactccatcagagatgagttggcgaattgagttctcagaaagcacaatcaagctgtacacagagtagagcagagtaacaaatcctggagacgaagggcgacaaagaaagaaagcctaggaattgagacattgagagaaagaagaaagctgggcgcttggcaggcagatcatgtgactatttccgccagtcgatttaacccgatatagcaatgccaagacatcgatatcatgtatgtaaatgatggctcactatccacgtctacgtcctaaatacagtcttatagtccaaaacacaacatctcctaacccatagagtgtaacgggcagctcatccatcccatagtctggcactggcatccatctatatccagaccctgggcctgcgcatactccagcgtacttcccccactacccgcgggataccctggagttgggaccaggatgatagcgttagaggatgggccaagcgtttgcatgacctgtggaagggatgtctctgcgcacgttagcgtcaggctcgacgcggaaaaggaggggacagtaccagtcgtcagataaactgacccctgaaacccccaccgttcacacaactgcattgtattaagaccaaggccaaacgcttgcccggattcagggccagtcccaattcccgctccggttcctaatattccaccggttccaaccgtatcggaagcgacaaggtcggtgggactagacgtgccgcttgcgtttgttgtcatcgaaccgacgccccccgatgcatcctcgtagcgggccgtggagtgaaacggcatctgggtggttgtgtttaggttaagattacacgaagcctgccgctgaagctctgtgggagtggaggaggaacatagcggcagtgatagcgacgaggaagctgacgaggtagacgagggcgatggcttgacttcatacgggatacaaggggtagagtgccagccgtgcagggttgcggcagcacgaagctcgctggcaatgactcgctcttggagcttagcgatgcggtcgcggatctttcggcctttctcgaattagtttggttttcaagtcttcggttccctccctcaagagtagggctgggataaggcaaggacatacggtggttccgctgcgacagacggttctgcaacctccgccgctccgttggatcctgtttcgacaattggtcttcttctgtttggtgctttgccggcattatgactatatacaaaatgtgaggggggaccacgacgctgagtacgtgggtaggcagatagcagaccaccgagagcgaggtacttatatcccgtacctaccgtacttcctctcaacagaggcaatgactgctaagctccggtgtgtgacaagaggttccctacttctcgtctacgaattccaattcgacagacaaactccggagcctgacgctgtacgtctccgctcatgaaccatgtgtattgcgaatgagtgattgggactttgggtaagctgtacgacgccggagttctgaccatgctatgtttagagccgtgcattatcgattaggcaatacacccgaagataagccattgaggtcataaagggtcgttgctgacagcgaagcgggagaagnttacaatgctgggcgggaagagaatcgctactcttgtgggcc

SEQ ID NO: 2745 - DNA, 958 bp, Emericella nidulans
gcttacgactgttcgttttgcctcgaaagacagtggatgaagaatcagactcagaaactgccacatctgaccccctatagacgaaagcttgagcggacactcgacgggtagccttacgagacattgtacttgccccttaggctctggattcatgcaaccaacaagatctacctgcggtgccctcacagtatcatcatcttaactgtggaacgcccttatacgatgtctgtttcgggcatcgcatgggtgacgttgacccttaagacacccacttgctctgaagaagattctttcaagctggtcgtcaacttatatatggatgcgacggcagcccattgaacatcggcatatgtaacgagctaataccaaggcgatgcttgatcgccgaaagcgagtgttaacagggatggcttacgcgcgattgggaacagcaatgcacggctatacattatctttggagaataggtctaaactggaaaggagtgtgagagactacataaatgtttctcgcctactaccgcagcatacatctcttgctccctctgttagaagctacacgtacaaccgactccccattattccattatttcatattactgcatagacatagcattgtcggtcaggtcatcgtctcccatcgctgtcttgccggtgccacaattatcaatagccctgatcacgatgaaaccattcctgcgatatgctcctatagcgctcgtcatcctcctacgaactacgtatcctgctgtttctcgagtgaaattacgcggggcccaaacatggggaaggccgtggcagatatggctaatttcgccgaacggccaactcagcaggtatgctgaatcctgtgagaggaccgactcttaatccagcccccagtttctctaggcgagagggctggctgtggcatgtttggacggagggcaagttagaccaccggattggcttgggtcgggag

SEQ ID NO: 2746 - DNA, 2925 bp, Emericella nidulans
tacgcacaccagccatatctaatcgcctctagcgctccaaactacgtaacttcctcatgcactcattccacctaatcctctggctccttacacccgcgaaaaccgccatgatcaaagacacccagtgtggattcaagctcttttcgcgagcgtctctgcccgccatcgtcccctacatgcactccgaaggctggatcttcgatgtcgagatgctcatgctcgcggagtttgcgcgtatccccgtggccgaggtccctgttgactggcgcgaggttggcggaagcaagcttaatgttattagggatagtgtgggcatggcgtggagtttggctgttttacgcgcggcttggttgttgggggtatatagacggacatagtgtgctcttagtggttagttagctataagggcaatttatcattttccttggtgttcgctttttcctttggatgattctttgaggtatttggatggctttaagtagacgaatttaaaaagagagaaaatcgggtagatgtccaagtggtaaccattcaccgcatcaaagtaattaccattattattaagtatctaatctgtataaatccatcagtaccctaaaagatgcaatatacctttacacctttcgcaccaatatagatgataaatagacaatcaaacgccaggataaataaatccatctactcatacaggacagaagttagcagtaaccagcaatttcaaatccacctagctcaggttctatcgacgttcagtgtcagcactggcgcagtcacgcacaagaacagctcttcccagcgtttggctccatcacaggccgaggctttgactccactgccttctcaaccgggttttgaggctcgttcacgaactcagtctcagcctcgggggcaggttcaggttctggagcagggcacgtttcgatctcctcctcaacgggctcttctggtccctcaatcacagtattgtcttcggtctccggaataggagtatcattttcactctcccctgtttcagcagggggcaagggaacaggcgtatagaggtccacactcgggggcaccgaagttggaggcggcggcagagggagcgacggcgtcggaatctctccaggttcctcaattacctgagaagtaggaactggtgttgtctccggttcgtggtagtcctcttgataactttcctgatacgtattctcgtaataatcgcccagatttagcgacgggccatcaggtatagcgatattgatatctgagccggcttctgtatagccgatcgcttctcctgaatttgaactggggtcggtgttctcggtatatgtgtctgtaaaaaagtcgtgatcattgtagactggtccgtcggggatgctaatagcggtgtttgtgccagtgtttgtggatgtgtcgagatttgagctcgggttgaattgtctgcggcttagagcggggtcgttgactggcagggagaggacggtacttgtggtgaggaggaggggcaagaggaattgcatgttgaaggtgcgtttggagggaatatatggttgctgttgatgtgagataagacagtaggaatgagtgatcttggtgaatattggatatatcgatggagaaacaaatgaaatgatgagagtgagtggccaagattgaaccagttctatctgaaggaatgtagagagaatatttagaaggtatatatggatgattgaacgaaagactgagtgcttaggaagtgcgagcaaagaggcctcaaatgacccttatatagccccgtctccattgcctaatctcttaatgtatacaagggttttgtaccgttccaagggcttcctagacagtaagccctcccagggctttcccgtagtttatttccataggaacgaacacaggaaaaattcatcaagggcgaatggccgctgctgctctgtatacatgtgctaggtctggcgacggagctgagacagacgcaaggagtgaagggggtggtgactggctcgtgatatattcaggtactatcatgatgagagatgaaggaagggatgaggtagcccaaaccacagaaatctcaatgcatcaaatccgtttattctgtgtgtacatacatcatcccaatcattatggtgcactcagtcaagacaagagtgtagggtatagataggcaaacaagatagagaacagagtgattccaagagcgccatataataaaacatacaatttcttgtccgtcacatggactgtccaaatgcagtgccataatttgttgtattcttgatcttgatctctgggacctcctcgccctgaccctgaccagagggactgtcgaggtccgcctcgtcctcatcctcctactccctgtgccctagaatcagcttcgcctgggcaaggagcttcatgtcaccttcttgcaaaaagttatcgtcgtgactcttctcattgaccacgcataagggcccttggacggccggatcatctggtaaatccaccaccccatcaaaatatgagtcagcgcgttctgtaggctggtgcaaccgggtagcgggtggatcaaggggatcttcggcgaggcccatctccccaggtgacccctgcgctgtatccaagtcgcgatcgatgacaaccatcggagtgtgaccagcgtcccgcacgaggttggtctcgggcgggcctagatccgagagcttgagctttacgctgctgcggcggtccatggacggcctttctctttcctgtaaagtggaggtgggcgatggctcgcgggatgagggggatggtggcgtcataacccgggctacgacgtctggaggcagcgctgttgatttgagggtgatgccgtcgagcttgctatcgagcttctcgataggtacggggatgttcgctagtggttcggttgggtgagatttcggcgagagtgcggcgtctagggagggttga

SEQ ID NO: 2747 - DNA, 2270 bp, Emericella nidulans
gacgtagacgcactatttatctcatggaacgtcctctcgccaatagtgcacttctattcagactgatttgcagatagacaaatcatccggtgaactcaaaggcaatgaggacgcattggtacctggcttcctgctggcccgccagcggcgtccgcgccgatcggtatattttcattctttatgctcaaaagcccgacttgagtacttcagaagaggtaaagcggaagttgagggttgaaagtaccctgcagagaatgaggtttgatcttgataggctggttaaggagttaggattgggggaggttgtggatgtgaactattttgtctcgaattagcctcctgttcttttaggcaggaaggtatatatatgtggcctgtttaaattctttgcctattgttcgcaatacacagtatcctctaatactctgttcgtgtaatgtctattggcgtagaggccggtgccgatcccgtacgggagaatggttatttagaaacctagcaacgagaggatgagtcggctcgagagcgagcaaaggccaagaaggcgggagtgtcaggctatcagtctatggtgactgagtacttcaaacaagtataccaaagctttctgttcttctgacccatcaagttatgcatttagtcgaggcgctgaggctgcccttcattcaagctactctgtaatcagctgattgttattattccccttaaccaactttgtttaccacaaacactattctctgataaaaccagtacagcggcgccagatatttatgcgctagagaaccatgagcttgcatacttgtacatcagctcatacgtacgtatcctccggctcaaatatcggcggcaccagcgccttgggcggccatccgacccttgcgtcgaatgtcttctcaaacacccaccgtccggagcccacgggcttgctgtcttggtcccggccaccaggaagtatcaccatcgctgttgagttaggcggcacaacaagctccagcttgaactggtcaccatttttaatctcccactggcactctaaccgaccatatgacgtctcataggctgcttcggcagatgtgattgtgccacctggtaaaggttggacaaggatctgccgccatccaggctccaacggactcacgccagcaacagttttatgcagccagttgatgatcgatcctagagcgtaatggttgaaactggtcatttcgccggggttgatgctgccatcggcgagcatgctgtcccagcgctcccagatggtggtagcgcccatgcggatcgggtacatccatgaggggcagttggattcttgtaacatgcgataggcgagctggtggtgtcccgctttggttaatgcgtgtgttatgacaggtgtgccggcaaagccggtagagacttggaatttggctatccggacgagtcgggctagacggctgcccgctgctgcggcttgttcaggctcatcatggaggtcaaagactagggcaagactgagtgctgtctgggtatctccaatgagaaggcctgtgggagagatgtacttggtctgaaagcgcgacttgagggcacgatagtcggtgctgtaacgggaggcatcggcggattctccaataatagcactgatgcgggcaaggagtcctgttatatacactaagtaggcatcggcgaccagggttccgtccgtgcgagagttgccaggctggtctggaggggcagtaggatcaagccagtcacccagctggaaaagcgtgtcatcccagagacggtccggaccgcgctgcacgccacgatcgaggtagccggccatgctagggtactgccggcggaggatctcaatatctccatagtactgatacagggtccagggtaagatgatcgtgatatcatcccagacagcctgtgggaatgtgggccagaaagactcgtctatcacatttggcacgaccaatggtggaactgccttaggatgtgccagctgttcagccgagagatcctgcaaccagtcacttagcatccctgctgtccggtagagaaagctcgctgaaggagcaaagacttgaaggtcaccagtccaacccaagcgctcgtcacgctgtgggcagtcggttgggaccgagaggaaattcccgcgcatgctccaccatgcattttgatgcagtttattgaccattggatgtgagcagctaaaccaaccagttcgatcaagaacggtatgcatgacttcggcggtcaggctttgtagagtagaggggtgtggcgtataagggctc

SEQ ID NO: 2748 - DNA, 1202 bp, Emericella nidulans
atagttaggggccttgcccttcggtttcgtgtagattcgtcggaggttgagcttctcccacatcatgtccaatagctcgtcgatattccagccgtgctctgaactgatagggacggcgttgggaatactgtacagcaggtcgagttcctcgatagtgacggcatcgattttgttaagagcgtagacaacgggaatatatgcgcgacttttggcctccagcacgtcgatgaggtcatcaattgtcgcgtcgcaccgaatcgagatatccgcagaggaaatcttgtattcgctcatgacggctttgatttcctgttaagttcgaaaacggaagtgttaataaccgtcacaacaattgaaaccggtctcttaacgacttacatcgttatcaatatgagtgagaggcacagtgctcgtaatcgatataccacccttgtccttcttcttgaacataatgttggggggctgcttgttgattctgattccgaatccctccaattcattttcaatcaccttcttgtcgaccagaggcttattaacgtcgagaacaatgaaaatgagatggcatgtcttggcgacacgaataacctgccgcccacgacctttaccatctttggcaccttgaatgataccgggaagatcaagaatttgaatcttcgcgccgttgtatagtacttgtcccggaacggtggtcaacgtcgtaaactcgtacgccgccgctgttgcaaaaatgcgtcagtgtccgtcacacggctcctgtcttcgttaagcataccttcggaatgttggcccgttaacctgctcatcaatgtactctttccgacggacgggaaaccgatgaaaccactattccatagttaatgacaatttcagagcgacgtcgaacgacggaagaaacatacacactagctacaccggtacgagcaacatcgaagccggcttcatacaacgttagcgcaactaggttgggtatcagagaggtttgttcttaccgccgctgccgccaccacctcctcccgacggtgtcaaaagttcacgcttcagtttggcgagcttggccttcaactgtcctgtagtcgttccatcagtgatggcgtctcgtaaagaagtccgctagaatcctccccaagtgatactaagtgttcctgttcttctgagtccgggccatctggagaacatgtcaatatgcgcccccgaatagaagt

SEQ ID NO: 2749 - DNA, 1724 bp, Emericella nidulans
tctccaacggaaatcagtctcaacgaaacagatcagtgctgtctacgccgagtttttcgacagcacatcttggcgatctggtccgcgcagtcgggttccagccggcacacagcgcgagcgagttccggcgcacgctcagacaatatatccaaaaatttcacagccatggccttgcgatgctgagctgcttggacatcacggggcggtatcagttcgaggcagtgttctcgccgatataccacttcctgcggagtctggaagtggactaccggttcgatgcgcgggtgaaggatattgggacgacaatgagagaggggcagacggtcgtggacagaatcgattacatcgcggatgggtttgagttgagacagccggtcggtgtggacgatatagtgatcctcacgctggggtcgacggtgtcagggtcgacgacgggcacgaacgccgaccctccgctcagggagccgttgcagccgggcgaggcgctggacgcgaactgggagctgtggctggaactggaggcgaggcatcccgggcttggggatccgtataacttctgcacgaagcagagagagtcgatgatcgagagtttcaccgtcacgaccgaggacctggaggtctacgcgcggctctgcacactctcgaagagccccgagggggctgggccaggggctggctcgttcatcgcgctgcaggagagtccctggcggatgaacgtttgcctaccgacgcagccggtcttctcagagcagccgcccaatgtgcgcgtcttttgggggttcgccagcttccccgaaaaccaggggaaatttgtgcgcaagccgatggtagcgtgctgcggcgccgaggtcatggaagaactgctggcgcatctacatttggacccgcgccatctgatcaagcgcacgatgacggtgccgagagtgatgccgcggatgagcgcgatcctgctgcccagggcgctgggcgatcgcccagcggtgattccgccgtgcatctcgaatctcggcctggttgggcagttttgcgagctgccgcatcagagctgcgtggatatgagctacagcgtgcggacggcgcagcgggcagtcgcagatctgacggggctggaggcagacgaaagagatgagcggcactggtgtcatttgagcttgctgttcaggatcctgttttggaagtgatccgtcaggccatagcattgcctcagtccggctagcatacctcctaccatccctaagctctactagatctaccagctctatctccattattatctcatcactatcccagcaccttatttttccagcaccttaatacgaccctatcttagcatctcagtacgtccactattttagtatctttagtacatcctatattcttcagacatccctatctcaacatctttagtacaagccatcgcgccttgctgtgggcgttgagcactggtctctggcttcgccgccgtttcttctgtactgacagtggccagatcacacgggtgagaaaaagaaagaaggggccagtggccagatagcgatcgggcgaggcgtggggggccgatacgagcaagaaggaacatagcgtgggctctttcctttacattcgcctccttgataggaccatgcccgtctcgagtcaggaccctctgccctgttcgattggtggtaaagtaagcatctgcctattattgccatcaaaaatgtaaagagaaggcagggtatgta

SEQ ID NO: 2750 - DNA, 4268 bp, Emericella nidulans
cgcaaactgttgtttttgatggcgtcttcgccgaaaccgtcgatcaagcgagcatctgggactatctcacgaatagcgtcggtctttcctgcaaggctacaatgtctctattctggcctatggccagtcgggcgccggtaaatcctacacaatgggaaccgctggcccaaatgagcaagacgtagagtcttcgggtgagtctgatggattgtcgcaagattgcagccactgataaagtcaggtatcattccgcgcgcggctcaacttctgtttgagaaactggaaggtcccaagcattctcgcactagctccaccgggctccgcacaccgtcgcgttactctatcagctctacatcgagcttcggaaaatctaccgtcgacaaaaactggcagttgaaagccacctatgttgaggtatgtgtatctcaatttttagccggcgagtctaaccctggcagatttacaatgaacaattgagggatttgctcctccccgactccgtgtccgccgcagaccgcagtaccgttactatccgcgaagataccaaaggccgcataattctgaccggtctgcatcaagtcaacattaactcgttcgaggaccttattggcgcgcttaacttcgggtcatctattcggcaaactgattccactgccatcaatgccaaatcgtcgcgatctcacgctgtattcagcttaaaccttgttcaacgaaagtccgccaatggtgtaacaacaccgagagagaagcgcatgtcgatgcccaccgacctctccggaggcgaccagtccatcaccgtcgacagcaagcttcactttgtcgatttggcgggaagtgaacggttgaaaaataccggcgcctctggtgagcgcgcccgcgaaggtatttcgattaatgctggtctcgccgcgcttggaaaggtcatctcgcagttgtcctcccgtcaggccggatctcacgtttcctaccgtgactccaagcttacccggctacttcaggactcactgggtggaaacgcttatacgtacatgattgcctgcgtcaccccagcagagttccacctcagtgaaactctgaacacagttcagtatgcgcagagagcgagagcaattcaaagtaagcctcgtatccagcaggttgccgacgaaagcgacaagcatgctgtgattgaaaggcttaaagccgaggtcgctttcctgcggcaacaattacgcaatgcagaagatagtgatcgacggacagtggctccccaggaacgcacagaacgtcagaacgagcgagagattgaactccagaaccagctacttgatgtccaagagggctacaacgcactgagccagcggcatgcgaagctaatatccgaacttgcacgggattcaaggcctgcagatgcagagagtgagtctattgtgggcgactctgtcgagagactcaagcggtcacactcatttgcggaatcggtcgagcaggtcgtgcttgaatacgaaaagacgatccagagtctcgaatcttcgctttcaagcacccgagcttctctggccagcaccgaaagtaccctcctcgaacgcgagaccaaatgcacttacgtagagaccgtcaatgcgcagcttcaggcccgcatccaaaagctcatggaccgggaggcgagcacggagacttatcttcatgagctagagtccaagatagatggtcaagcctctggggaagagcaacacgcggcaatggtgtcagagctccgtaaagagctcgcccgagctcgggagaacgaggctagctgtgaagaatatatttccacactagaagagcgcctagccgaggccgaccaggatatggaactcatgcaacgcgagatagatcggctggagcatgttgtggaccgccagcggagcctcggaaaactggataatctcctctacgagctcgaccacattcagcaaaatggcaagaaagacgaccaaacccctgaacagcctgagaggacgtccactcctccaggagcataccaacctcgaaagcgcggattgtctcttgacgtgctcaccgaagccgccgaaaccgctattcctgattctgacgagggtctgtctgatccgattcctgaagaggacgaggaccaggctacacccagcaagcccgtgtcaaaacaaggtgattctggcctaaaaatactcgaaagtgctactagccgccttaagtcagttcacgatgcagagcctctgagccccacccagatgcgggtcgtctctgacaaatttgaaaccgagactcatgagcttttcgattcgcgcatgcagcatgagaacacactcaatgactacgagggcctcgaggccataatcgaggaagccatgagagtcatggcggcacttcgccaggactcatcagaacgaaggccgtcactatgcctccccccaaaaccatacctgttttagcccgatctcttcttttgaggatccacaaggcccccgcgtcgaagactggaacacaacattccttctcgcaatcactctcatcggagttatccttggccggggagcctgcgacttcgcgagattcatataatgtcaacactcctcagactaccgttggttcacaggacggaagtgtgccgaacgggacgcacgacgacgaagatatgcgcaaactccttctggagcatcaagagagcgtgaacgcaatgaaacaaaagtacgatgagcttcaggccgaacacgaggacaccttgagcttgattgagtcgctcaaggccgagttgcagagatctaggtcttcgtcgccgccggcaactcctggcttcaatgtcatccgtaggaagaccagccagagcatcatgtcaaaccttgatcgcgctcaccgatctttgaatggaatgcgtactattgctgctgaggaatttgcatcccgcccagatactatgcagaactttgaacttcatctcgagggagcgatgcatgaactccatgtgcgtatggagcggattcagcaacttgaggcagagaaccaaagtgtgaagaaggagatggagatgaagtccaccatcatctctggactcacccgcgagcgatctagtctgcaaggagcttcccctgttgaccgtggtctcgtgaatcaattgcgtgaccaggttgttcagcaggagaacaccctcatgcagatgaaggaagcccatgatcagagggagaaggctctcatccaggaaatagaagagctcaaggcaattctgaagacccaggaggaagctgccaaggcccaggatgcccatgtggaggagcaggagaagaaaattactgatcttgagggtgagctgacggagtggaagagtaagcaccagaccgctattgagtctttacaatcctccgagaaccagctcaagtctaccctggaggaactgaacagtgcacttgccacaattgactctatgggctcagccaatcctgcccgtgacgccacggataaggaggcggctgccaccgagctggagagtgagcgtgcccgacaaaaacaggttgtcgatgaattgacccgaaaaattgaagagcacgaaagcacggctgccacctatcttgagaagatcgcgtcccttgagaagctgcacgacgcccagaagcaggcatctgactctgcatccacgtcagccgaggttgaatcgcgccaggctcgtattgcggaattagagcaggagattaacagtcacaggagtcttgttgagtcgtacaagaaggacttggaatctttgcaggagtctcacaaacgagagttggaggagctggaatcacgggcaaaggctgcacgtgacgctgagcatgagttgcgcctggcggagcagaataaacagcacgaagaggccatgaaggctctgcgttctgaggtctcagaatcacgagacgagttggttaagctgctcggcatggtttccaacctaatcaagtcagatgtcaccgcagacaacctcgcggaccagatacaagacatcctaatgcaaaagcagcacttttctgacaagtacgccgagctgatggacacgaatgaggatcttcgcaagcagattgaagcaaggcaaaacgatgacagccgtgtggaagagctcaacaaggctatttccgtcaaggatggcaaggtcaacgagcttgctctgcttgtcgctaccttggaggacacgcttctgcagcgcgatgagcagatcaagaagaaagacgccctcgttgccgaagccatagctgagaagcaaaaaagcgcgcgcctcgtggaggaactcgaggaccagatca

SEQ ID NO: 2751 - DNA, 1089 bp, Emericella nidulans
gatttgttgtgctacgaggaaagaaaaatgctgaaaaagctctggaggctgtgaacgggaaagaggttgatgggagaacgctagctgtggattgggcagtggagaaggaagtgtgggagaatttgcagaaggaagaagagcatgcagaaccagatgtgaaggaggagtcgagcgatgtggatatggaagacggaggggttgggttggataatggggagcttgatgaggatatgagtgaggacgatgatgaggaagatgacgaagttagcgatgaagaagatgaagacgaagatgaggaagaagaagaagaggaggaagaggaagaaaaagaggacgagagaaatgcctcaaccatatttatccgcaacctaccattcacatgcgatgatgagtctctctacgaccacttcacccaattcggaccgctccgctacgcccgcatcgtcgttgatccagaaaccgaacgtccccgcggtaccggcttcgtctgcttctggaagcccgagcatgcgcaggcctgtgtcagggcgcccctaaacagcaagaccctctcgccgcagaaaaggaaaaggcaaaaagggcacgatcatcaagcaatccgtcctgcagaatgagaatgccgatccaacgggccgatacactctcgacggccgtgttctccagatcagccgggccgtgagcaagtcccgtgccacacagctccgcgaagaaggtgtctcgaagcgactcgtccgcgacaccgacaagcgccgactctaccttctcaatgaaggaacgatctcacctaactctactctctacaagagcctttcgccttcggaaatcaagatgcgcgaagacagtttcaagcagcgacagaactttatccgcaagaacccctcccttcacttcagtctcacccgtctatccatccgtaacataccccgccacgtcacatcaaaagacctcaagcagttagctagggaagcaatcgtcggctttgccaaggacgtcaaggaaggtatacgccaaccactctcgagagaagaaatggaccgcgcgtccgaagagatgagagaggcagagaagctgcggaagaagaaaggtgtc

SEQ ID NO: 2752 - DNA, 1535 bp, Emericella nidulans
tgctgacccaacctggaactcttggatcgcccctaccacccatgatactggacacaaatacagacgccttgtctttgcccgcacccacgaacagaacgaacaactcggaatcgcgtcagatcccgaagcgctcaagaacgaagggaaaacaattggcaatctcgatgacgtcgatattgtggatggaaaggtctacagtcttcccgctgactgtcctgcctgtgccaaggagtgcaccgtcaacatgcagaaggtggatattccatacttcaaggaagtctttatcttgagcaacgtctgcgagcactgcggataccgctccagcgatgtcaaaactggtggtgaggttccagagaaaggaaagcgcatcacgctcagcgtcgagacgattacggatctccaccgtgatatcctgaagtccgatacctgcgcactccacagtgaggagcttgaagttacggtccagcctggcactttaggcggacgattcacaacggttgaaggtctcctcactgaaattcgcgaccagctcaagggccagatctacgatatcgacgattccacacaaagcggaggtgacagcatgtcagctaccgacaaggagaaatgggctcgcttcttcgaccgtcttgactccgccattaagggcgacttgaagttctccatcacgcttgaagaccctatggccaacagctacgtccaagactagtgcgctcccgcggaagaccctcaattaaagaccgaagagtatacccggactgaagaggaagaagaagagctgggtcttaaggacatgaaggttgaaggatacgaggcagaggcgaacgagaaggatggagaggaaaacaagtcatgacctattgtaacgatacccacacagacattggaatgtctccattatgatctttcggtcttgatgttatgataactaggcctctgatgagtatggcgataatagagcatgaaagagattgatagagcgagaacctgtgagctcactctcatgacatttattactggaatgccgtattgtcatcaccgccggccgactcttgtatatatataaactaccttgctgtgctgaccttcttctgcgaccagttcctttttgctcgaggtacatatcatgtgggaaccccatcacgacctcacgactggttgcctaagctattaccaaatacccggtcagtttaacctgggatatccggcttctgctgaagctataacctcaggaagctgtccttggatccactaagtcccggagcctctgagttgcctgccacttacaacagaaagtagccgggccctgaggtatacgaaggtcaaatgacaggctgttttccgtcattcagtctagaacaggaaaaaccgggaaagccgttttccggaggataccctaaaaattaaaccggaaatgcctccggaagaaatctttaaaaaattaatacctcggctttgtaaacacccgcccccccaagaaaattccgctcaaattaaattacattatataccttatacagaaagaaccaataaat

SEQ ID NO: 2753 - DNA, 994 bp, Emericella nidulans
aaatgtggggaacaggaggcactgctcgtggattgaaaatccgcaggagtcgtcaatgattcgaatggagccgtgctaaacctagagtgtcattgagcgctctcaattcaatgtctccacgaagcgcaagctggtggcttcattcagcattattgtccacactaagaaaagaagaggcaggccaagcccagtgtactctctgcctatcataggcagcaggcaacactgacataggtcgctaatttcctgtgaaggtacaagttgaattctttaagtcctttttttgcttgtatccgaacgagtcgcaggtacatttttctatcaggtcccatcgtaggcagcgaacggaagccatctgaatcctaaaactcaaggtgctaataatgtgtatatgaccaatcttatccatatgcttcggaatatatcaagtgacccgtgcattcctatcctacatatgtacgcgctttgtaatatgttctttatttcctactaaaaggaggtttatgaagatctgacatgtcatggatgtcgcaggctttttatattgtattctattttaaccgagcacaatatctcaaactcattcgtcatcactttcttcgtcttcttcctcctcactgctctcctcttcctcagcttctgcaagccagtcaatgaactgttgcgtctgagctcggactttgcgcatctcttcggtactggtcgaccgctcgtctgcccaccattgctctaaggcctcctcttcgacaacttccaactcatacagctccttggccaggaacagaagcaccgtctcaccccggggacggtggacgagatcttgctggaactgaatcagaaggtccacctgatcaggcttcgcgtcggtgtcgcggtcaaacagtgcacgctcaatgatttcgtgatacttgctgaagatatcgtggacggcgtcccttgctccctgttcacctttcatcaactgcgccacacgcttcataaaggctgaagtgac

SEQ ID NO: 2754 - DNA, 1362 bp, Emericella nidulans
ttggaaccaggtcactcttgcattgacaacactcgtcactgtcgtcgtcagctactttcgtttgcttgaacattatggcaagctctactgagtgccaaaaagggagaactatattatcaacgagtaaagatacatgtagactcgtggatggagacgtagctgatgattcgcgtggatctcattgatagaggaagggacgggataataagagaagaaacgggaccaagaacggactgtcgatcatctagagatctgcaggctgggtttccactctggataagaggtgcacgtgcatccggagcaagacgattcccgctgactcagccacaggtataacttaacttatctcaacggccttcctccatttaccttcatatatccgcagggacaggtccactatctggctaatgcggttcgtttagttggctgcagaatgagcacaccgactcccccgcggcgcggcggtaggttacgacgcgcttgcgacttctgccaacaaaaaatgtacgtggatagcttgacaacccgctgcaagtgcaaggatacgtcccttacaacggaaatattgacagattcggtgtgacggcggcaaacccgattgcgaaccatgtcgtatttctggtgttcgctgcacagtgacgcggaggtcgcctcggtaagaaatagcgccaaacagtaagagcaattggtatctgttgcagcattgttgttaatacttctcagacagcttgccgaaaccaaagcacggattcgggatttggagccctggttaccctaatcagcagaaaccggcagcctctgataatagtctgtctattgggtatctacaagatccacgtgatcttgacactggcctggctatgtttcgaagagaggtgtctctgtgcggcgtcggttcttctggctcagcagagagggaattattctgctccgctgttctccaacaaactagctgttatttcgatgtcgaccaatttttacaaggattgtccaaagcgtttggcactagggatcctcgagactcagaaaaggcgacagtccaaaagtagccaccacggcacttagtccagcgctgtttgcaccagtatgctaataccgggctatattcagtctttcttgttgccaacgttgaagcgttgcagaggttgcttgatgaaaatgccttgcacactcaaatccagcagaaccacaccgcacatctggcctgtttagtggcttttacttcccagattacggaaatcatagacttgagcccgcctttttggattccgattcggatgcttacatacgtgctgtgctatcactgataccccgactgttaatcgaggatcctagcgtgagaagcttagaggcattcgttat

SEQ ID NO: 2755 - DNA, 1993 bp, Emericella nidulans
atgctcatcatatggactggatggctatggatgacgactgcacataagcgttcttcctttcctgtaactctcacttatggtatattcatactatgcggccaccctgaatcgacagtactatggaagggctgaatatgccaacctggcagtttcctacggaatcgccaacagattccgcaagtcccggcggaaatcagagctctgagtttacccaacaggctggtgactcgggtgctacctctgagcaccctaaaaggcactatccaagtcgcttatgtcgcatttgcctggagaccgtgcctccaacccttgttcctccttcggaacatatgcctggcttccttcagcgcggagttcgtgtcgtctacgagtctgaggatccggagctcgggcgccttctcaagccctgcaaatgcaaaggttcatcccgttatgtccatgagggatgccttcagacctggcgattatccagccccagccacgacaagagacgcttctggaattgcccgacctgtggctttcagtaccggctagagcgcctcacttgggcgggctggatcaatagcccaatcagtcagatagccttgactagcctcgttttgcttttgaccattttcttgcttggtttcattgctgaccctatcattaatttttacattgacccggtggaaacggtgtattatgccgattactgggaggaaaatagtttacttggcgccaaaagtcctacttggattgatcactttctaaaaggaatgacatcgctggggttgctgggcttcgtccagactctttatgggctcgcgccatggcactggtctaccgtacgatcgtccacgattgttcgtggtcgtgccagcactggaagggatcgagtttcttctatccgctggatcgttgttgtgctcggcattgcgagttttttctgggtacgtatcctatgggtccccatgcatactcctgggcggccgctgaccacttgaaggccgtctacaaaggtgtaagggcgtggagccgtttgatattggaaagggcaagtggacgtgtaatggacgtcccgtcacccgacgacgacgatgatgacgaagccgaggacagccacccgaaaaccgagtagattcggttgttagtctgtatccgacctggcgcaactctgtaatatcccaaatcgcacaactttaagttgtcacggtcctgtcaatgacgtgccaattagtcaacgtgcgaataacgacaccgaccctgcttaaccgcggagagtttgagagatagatactgttgggaacgttctgttcccttctgttcctctatctcgttaaatcaaacgttctttgtgggagggtcgaattgcagactcgatttctaccggcgctctcgcagtgggcgcttctgattgaggtgcggtacatcatctgttatgtagcgagttttgattaggaatgaataactatgttcaaatagtctattcgactcataaatgagcgttctttcagtgctttcacttacacgtgtcagacactatctattcccttcaggttcatcagacgatcctcgcggccagtgattccgacggcgatattctagagtggcagcaactaggaccgggcgactccatagcctacataaggacgtccttgctactcaactggtttagtccagcaagctctagagcttcctcatcttgcgcacgcttccattagtatcaaagtatctcgcaaatcttggactctctcgaccaacaacagcagcgaacctccagcggcctcactttctctccaattgactttcccaggtttctgcattgaggagcacaatttacgtcactggtgatgttcagcagcttctgttaatttgactcactccttaggtaggatgggctgttcaggctcagtgcgctctttacaggttcattctgtccaagccttttcccttgccaacaggaatatcaaagactaggcatgtcattcacctggtctcacatttattggtggat

SEQ ID NO: 2756 - DNA, 1422 bp, Emericella nidulans
acttcgttttattgcctgcgcacggtgtgcgctattgctgatttgttgtcaccatggatgttcaggagacccagcgtctcctttctgaatatcttcatgagctcgcgaatcttttccatcgcgttccgggttcggcaatctttctgcgctatgtgaagtctagctaccagaatgaccccatccgctcggccgtcgagttgtttctattcctgttcgccgtccgctatttgctcgccccgaagtattctaccaagcctggtgtcgtccagctttcggaagatgaaattgatgacctagtggacgaatggacaccggagccgcttgtgggaaagccaaccgctctggaggaaatggagatagataagagaccagttattgccgggtacgaaccgtgaagctacttgtccctgcctgcattttcgcatgctgattctcagaggaccatagccccgttggtcctaaagttagactttcaaacggtcgaacagtgatgaacctcggttcctacaacttttataacttcaatacgaacgagtctatcaaggagaaggcaatccagacacttcgcaattacggtgtagggccctgcggcccccgaggcttctatggtacccaagatgtccacatgaagaccgaggcggatgttgcttcctatcttggcacagcgtcgtgtatcatctactcccaagcgttttcgaccatatcaagtgtgattccggcattctcgaagcgaggtgatattattgttgcggacaagggcgtgaatttcgccattcggaagggtatacagatctcgcggagtatagtccggtggtacgagcataatgatatggaggatcttgagagggttctggccaagatcaccaaggagcaagcgaggaagcctctcactcgacgatttatcattactgaaggcttgttcgagtcgtatggtgacatgagtgacttgcctaagatcgttagtctccttttcacttccttaatatttcggacatagctgattagctgtgaagattgaactcaagttgaagtacaagttccgactgatcctcgacgaatcatggtcgtttggcgttctgggaaggacaggacgtggtatcactgaacaccagaacgttgacgcggccgaggttgacatgattgtgggctcgctggccggcccattggttgcgggagggggtttctgtgcaggatcggaggagattgttcaccatcagcgtatctcggccgctgcgtacacgttttcggctgcactgcctgcgcttctgtccacgacggctagcgccacaatcaacatcctgcagaacagccccgagacaatctcgcacctgagagacctcacaaaggcaatgtgggcgcagcttgaccctcgcagcgattgggttcgatgtacaagtgcgcccgagaacccgatcctggtcc

SEQ ID NO: 2757 - DNA, 1599 bp, Emericella nidulans
ctacagagtttgcgattctaacagaatcacatttattacacccttgccagcgccacagattctcttcccgaccgtacttgggagggaaggtcagggacacgcgacgagcaaactcctgcataagacatacatgatgatagtctcaggcgtcaaggggaacacaccgatgccatgcgtacggcgcagggaccgcgagaaacaggagcaatacggcatacggtccgacgttggtcgactatttgacaattattagagattatcaccaagttccacggtaacaacggcgtgccccgtcagttcagcgccgatcgatcggatcccacctatctatctatctatcgagatagctggtcgacccaacctctaaaaaagaaaaatgagaacggcagggatgtgatgtgggaatccggccccagcctcacttgcgaataggctagcaagaacggcgttgttttcccctggcgggcgcgggctggaagtggctggccggtgcatcgcgcgtctgctccgctggtgcctggaaagctcagagaagacgatctcgttccagacacgttttgcatcccactgtgactgacaaccgagtgtggcaggaatcagcggtgggctcttgccccgactggatcgcgttcccaggaacgtcggaaacggaaaaagcacgttctttgggtcgaaatgaatatagcgaggtcgaccgaagcgggaagcagcgcacgaagctaggaaggagcgagttagtccagttttgagtagcgaggaggatgcatcgaaagcccatggaacccccttcatgctgtgtcacactaggcgaggtacctggttctgattcctagctcgttacagcttttcagcgtcgaactcctggctgctactgacattccccaggtcgtcgacaaacggttgaacagtgagcagagagcagagagccgtgaaactgaaacccgaggcctgacataactaaggaacacaactccgagatgtcaatagaaagtcaatccaggcacctcaacgctctccccacatgcttctgccccctgagtggctgcccaagcaatcctttcctacggtctaggaccgcgggcgaaggatggtcgcgtcgcatccttctttcagtaactccgctaccgttttgattttgttatgattgacgagcatctgagaaaccaatatataccgagtggatcagttatgaccgttcattagacaacgataaccagatttggccattgtttgagggagcctcaaagggtggcaggcagaatcgggctgggcatttcagggcccgtgggatgaagagcgttgtccactgtccacttccacccgtccagtgccgtcacagaaatagaacacgaggcttcacgacgaacctcagcatcctggagacagacgcatgcaggatgaccgcagtaccacaattcaagctgggaagatcacaccggcagtacctgcatccaagacaaggggcttttgagacctgtcatccagctgcatctcaagctaccatgcttttctctctcttcgtgccattccgctgggtttttgcagagacggtcgatagattccgacaaccgactcgattgtcgatactaactggagggc

SEQ ID NO: 2758 - DNA, 1701 bp, Emericella nidulans
tggtgtgtttatcgtcaacatcaacatacagaccaggaattgctagcttgaaataccttatatattaataatattcgcactctcatgcctttgattttatgtgaattcgctgttttgaagcacctaacagcgtattcccttcttgactattgcctcgcgatcgagccccttgcctttaatgagatagaacctgggcccgcgcggtctgagtcccctgcggccaagtttacgacctaagtaaagtgtgaaaaatctccagaaccgtacagtgggagattcagggccaaatgccatcatgtcaacgggttcaggatcgcggaagcgttctggtctcacccatcattccagtcgctcagagtctgaccgaaccacctaatcggtaatatacaaagaattgactccttttctcgtctttcttttcttcttttctcacagttatgcacgtcagcatatcctgaatttccatcgtcggtaaggagaatcggaagaagtttcggttgaagactgggctgacgggtaacacatatggatgagaatcatgccggagtgaagcggtcacaggacgcagagttttggcagtcacattcgtcaagcagtctgacataggggaacttaggtggtcttgaaagcgaagtgcggctgcgtgcttttcaccgtccggctccgagtggacaggctctcagcgtgttaacgtgcatctggatcgtcccttgagaccacagagactccatgcggttctcccagctcccagaagtcgcgtgacaataagtcgaaagccgcaagcctctgggtcggcagcattaccccgaaaagtgagttgaaaggttatttggcccgacattggtcttatttggtacctaatcacgaagtgctatcggccggatgctgagtctcgaggcaaccttcaatttccagtcgctattatgtgtccatgggtcaatcgagtcagctcgtactcgtctgactcttcaaaatggtcaatcgggagcgaccttgaccaggaggccaagggccaatctgaggttcggaccactattgcactccctgaaaatgaacaagacgagcgcaccatctgccaataaagtggctagagctagactaagtacagttctgccctttctataaagcatcgctgtcgttaacagttttaatctacctgtgtgctagggtcgactacatatgcagccttaaatagtgtctcctacctagagtctcgcctttcgaaaagttgatatacccttggatcacttttgatgtactcgtccaggttataattcccgtatctgtggcagcggactatcttagcccagatacacagcgaactgggacagggctttctgagcctctggctacaaagtaataacaaactgctggaaccgttagcagggagaacctgcacctcattaaacgtaccattactatctcctagctgattaccctaattaaagtctaaccctttcgacggatctttctatgcagtatactccatcccaaaaagccgctagtcattcctcacctcataaaagatgctgaatactggaatatcaacaccagtccggagccccatttcatcgagtatttcggaagccctcatgatcccaatctcgtgcgacgccgcagccgctgaatatgcacccacttatgtcagccagatgtcgtcccatgtaggtggttcatcgtttaagcaagataagacaggta

SEQ ID NO: 2759 - DNA, 1594 bp, Emericella nidulans
atacttgagcaaatattgcaacgtcttcatcgtgcttgctgcatccacttagtcgtcctgaggcgccccattatcttaatataaccgtctcttcaacctaatatatcctgcaactctgttagcggttcaattacacgacgaagcctatttcgtgccgttgtccgctgctcaaatgcgtaggccattgcgatgagtgattcctcgctccatctcggtcctagaaagctgattcctaatggaattcccggagcagcgtcgacgagatccccacgaccgttatacagaacggacgtattcgcggggaacgaatcaaatggaacggtaatgactggcgtaccaacaatactgggtatatctgatgccaaggatgaaggcaggactacagcgtcaagattatgccgtgccagcgcacccaacagacccccttcttcgccgaagcgtagagattgctggtaaaggggccagaaatctggagatgaattgttgattccagcaaaaagcgccctgtcccactgttgcgtgttcctcgccggatagtcctcttcagcgctttgctgcgtgaagttgcgaatgtcccccagtccacgaagattgtttggattgctagacaaatcggagagataggttgcgaagccacttaggatatctgctgctatcacctttgatggagcgtcacttttcaggtaggattcataagctgtgaaattcgcgtcgtcgatgatagttgcacctgcgtctctgattatttcaacagccttctcgaacgaggatataattggactggccatgccatggcgcatgcgaaagagcgcttcgaggacatttcgagggatgcctatccgctttccttgcaacccagccatatcacacgctgcggcatactcgggaactcctgtttggaacggcgaagttgatgtataattgtcgttcgcatcttgtcctgcaatggcttgtaggacgagggccgcatcacggacagtcctagccatcggtccaattgtatccaagtgctcgctgacaggcaccaccatgtatcgcgacgtcagaccgactgtcggctttataccaacaatattactcttctcggctggaagtattatactaccagacgtcttgaggtgaattagcagaaactagtaacagaaagagcatatcactcacctcggttcccagtgttgcaaacgcgagacccaaatcagcagctactgcgctgccactcgagctcccgcttggatcctgctcctcataataagcagcataggtctggccgcctatagcattccacccattcgaggagttagtagagcgagtatttgcccactccgacagacttgtcttgccgagtactatcgcaccactttttctgagatttacgataaccgtggcgtcggctcggacctttgccccaacaagggcataggagccggctgggacagcgatgtgtcagtgggagactccatcacctccgtcattgtgagtcgagtcgagcacataccagttgtgtccatttggtcaaatgttcctatgaggtctttgacaagtatcgggagcccatgaagagggctagtttgatgtcaactggctacggtcaagc

SEQ ID NO: 2760 - DNA, 636 bp, Emericella nidulans
attcaaaggacgtaaagcagcttgagcaagatgccaaattccgagatcggatggtaaaatcaccgagtgtaaccggcgagcagctatgtactccttacggtgtgcgggtaaatgcccggcccagaggcgtaaaagccacggcctcggctcagtcggccaaccgtcaatccctccctcccagagactcagccgacccttcttcttctctccctctcccttccttccgaccaggcgatttctttcttctccttctgacatcaattgggtattgcaatctcaatcctatctctgtgtcctttctcttctcttcactatgtctgcctcttcagcgctgagacggctgacccacaggtctccccgcaatctccagtcccgcatcgcttcgctctcccgcacctcttgttccccttcgtcgacgttcaactcctacagagcttcttcatctcctgctttacctcgtgcttcgagattctcaacaatggcttctctacgatcggcggcgccaattcccgcgtcctcccaagtggactatgatcctgaaatcaaggacatggccgactacatccacaactacaagatcgactctgatctcgcggtatgagctccaattgagaaccaattatggattgatggggt

SEQ ID NO: 2761 - DNA, 1246 bp, Emericella nidulans
cctaaatgttgtttttgaattcttcgtcgagtgtttaattgctgtgagcgccgagagcttaaatctgtgcaagccgaaatactggccgattcaagacaggttcacatgacacctgcaagacttccatttttttttctcaagattccatcgtgcataacggtgctaatattctacttggatatcctcaattaacacagctcatcttcaggcacaacacgctagtttctcacttctgcaacagataccgaatattcaagcccaagcattatctttcaattcctagcggggtcaaacaagagcaccccctcacagccagtgccacttcattcccagttttgaaaatacccaaacaacgctcccttcggcacgtaccccctgtaaagactctgccatctggccgcaaaagacgcttcgatgggtcctagttctccgaatccaaggacctcgagtatccagggcgtcaatacagccaacacgcccagggcaataagcgtcgcgtaaacggggtgttcagttgcgaacccaattgcggcttctttcgcctgagctacagcatcagctgcagcctttgccatcttcgctccggtcttgatcgcgttttcgagaccctttagcgtcgcttttgcgagagcttctgtccagcttgtggtggagatctggtcattgagctccttgtggagagtatcatgggagtcggcggtaaggatcttggtgacaacgtccgatgctatgctttctagggagcgagaggaggtggcgttgacggtgttggtggtgggaggacgagtcccgaagatacagtcgaggaacggctggaggatgcacattttgcaaagatagaacggagttttgttgttaaaaaagtcttgtcttgttcttaggaagaggaaggaacgagaggccgagaacagaggaaatatgaaaaggaaggctgtgttagtgagaggctgagggtttcactgtgttgctagaaagcgtaccccttcataatgagcaccgcagtattaacaaatgcctcaatctagacgacaacgagaagcaaaacctctcgttctcgactcagcaacaaatcagaaccctgaatagccgcagctaccattcgttgcacatcactgtatctgcattctcaacctcgatagatttagggcaacttagcctagacaccttgctacttatgttagcagcgttcttttgcatcctcacattaccagaacaataaaacctcgacgtcttcccaacccaaaat

SEQ ID NO: 2762 - DNA, 2056 bp, Emericella nidulans
aattgtgtcctctatatacctaaggttcaggtaaaggaaagtcggacggagcggccaccctcgttcactgccgggtgggtgtctcacgctcagcaacaatatgtatcgcggaggtcatggcgtccctcaatttatcttttccacgggcatagtaggttgagctctaacgtttctggtacgttgctaacctagatccagttgttacgtccgtgcaagaagactcaatgttattattcaaccacacctacgatttgtgtaagcagcagtactacattggaaagcattcatcagacctaacaacttcgacagatacgagttgctaaagtgggaagaacttcaacaaaagaaaaacaaacagccagtgaagagagaacttgaatgggcaactgtagctcgcgagatcgccctcatgaacaagccttattcgagataagtagaacatcggagttggcaacggccatctactcttgggactactacacgagacaacactgatataccatcagaagcgattaaataacgacactccatcgatgcatcgataataagaacgatcagacgaactaacgagccattttttcttcttctttctattttattccccgttctttcctgatacgatctaaccggactggacttgattttgattttggcgctagacggatttgatttgacttgatttatatggatatgcctgcgtcctttcagtgacatgacactactacttctcatttctttcttcttatgaaattcaatctatttcgtgaacatgacatgccgctttatttgaggggctcatttgtcttgttccctcaaatttcacgctcaaaaggaatctccttggctgtagttttggagagcaccgttctcggtttcctggaagtagatacctgcttgacctacgttcctacgcttttatctgcttgatgttttcgtaccctgccaataatcgttatcttagcagtgaaccgcctataccttactctacgacagctggattaaccgcacctgctgtatggtcaactgacaacaagaggattatacagcgcgctgctaagtgaaaggtacgatgagaagctcggggcgcgtgaataggacagtaggatggaggactggaccagacatcgcattgcagtttagatattcccggcctgtcctccccagcaacctactctgtatacgagtcagggtaagtggagaacggagagtgggtggggaaagtgcgggaatggcgtgccatctacgggtaaccctaactccatccatctcagagccgccattctagagacaactcacatccccgttcaaccctactgataactgattctgggctcaggtagcatctttcaaactaaggacctgtgatgataatgggcaaaggagaaccagaaaatgatagtaccaggaagagattgctgcagtgcccggaagaactttccattgctggtcaatcatccacacgcagccaagcaacagggaattttcaccgcgtgggggaatcgtcagatgagagtcaagcttctgaattataagatctataaagctgaaagttttacagtgcatcaaaaagctgctacattatcagaagccgaccatctcgacggtcaggggcagcttccacagcaatactggtactattgaagccttcgaaacgatctagatatgttgttctttaaactacgttggtcagaatatagtaaagatcactttggaaataggaatccacatctcgattcctagcagcaagcgtaatgtcagaagccctgcccggctctagcttcgcgcggttgccagggccaagtccagcaactcaccatctatcagcacctacgtattgggaaatctgcacagaatactgccaatatgaaaagagtgcgtcgcctcccgatatctctgcccgtatattcatctaatcccagttgcaggttcgaagttcgaacagcttttacgactcggcaggcttcctcttttatggatgtagtacatttggtagagcaatatctgggttctcttagattgcttaccctgcttcaaaacctcactcgaggtttaagaa

SEQ ID NO: 2763 - DNA, 1367 bp, Emericella nidulans
aaccgcacattgaccattgagcaacccagcccctttccacctttccctgcaccgcttgcatctttcacagccctcaacacatccgtccctaatgcagacgcaaggagttcacccgcctccccagcgagtcgttcaaggtaagcatagatcctctcctcgccaccgcagacctcatctctgaagttgagtgctgcagggacacacgcatacgcgctgtcgtccgttgtccctgtgaactcaaagagcgcgacgaacggggattttccagtatttgggagcgtggacggagggatatccttgtcttcgcctgattcagaaggtggaacctgtggcggcacatacccccatgacgtagggagacttgtccggatgaacttctggttgcgctcgggaacgtataagactgcgcaggagcgcggagtgtagagccacctaagcataaaccatcaagcctgcgctagggtaatgaaaagggagagacagggcatacttatgacaattactcgtgaagaagtccacccctaacgcggccagatccagcttgatcataccaaccgcatgtgctccatcaataagactcagcacaccctcttccttacaagccctcgtaatttcttcaaagggaaacctgatgcctgggtttgacacaaccgtctcaaagaccgcgagcttcggcgtcaagccctcttttctcacgctcttcagtgcctccctaaacctcttgaccattcccccctcttcaagggggaaaacatacttaaccttcctcagcttgacgccccaggattcctttagggcaaagagggcgcgctcgacggcgccgtagacggtgtcaaagtagaagataacgtcatctgcagtcagagtacgggtcagtgcgagattgtgcaggacagtgttgacacctgtcgtggcatttttgaccaaaacgaggtctgagacggggacgttaaggaggggcgcgagggcggcccgagaagtgtcgataaggccgggctgaatgtaacggatgaagatgtcgggcctagattcgagagatttctggatggactgttgcttttcaaggacctgggaagggtaggtgccgaaagagcctggttgtgtcagcaattgctgtaagcgacgttgaaggagaggaaagaccgtggttgagattgttgtaattaggatcgaggaggaagtgcgctttcatgggggcgccaaacggagttggagaggccatggctagtttagaaggttgttggagggtgaaagagtgaaagaaaatctggaacgttatggagccatttaactaagttatttaactacgtggagatgcaaaatgccaatttctgtgctactactgatcatacatcaatgagtcacag

SEQ ID NO: 2764 - DNA, 3768 bp, Emericella nidulans
aacactcgggaacatcttggcagactgcacgaatatttcgttgatgggattgaagatattgatgtgcccaagaacatacccacaatggcgcttgcatattgagtttttggctttgtcactggcggttaaaatcatagacacccaaattagtagcacgaggagcaagagtatcagccctaccagccgtctgaaggggcggaagaacgcttcaagtctgaaccacatcctaggaaggagtgcattgcccttcccatccgcctcctgtgccaggcgctgcctcctgattagggtccgttcttccctgattaaagcgtccagctctctgcggtccttagaggataggtgatcgaaatttcccccacagcggccctctaattggcgccgtcgttccctgttcgaatcaagctgaacagtgaaagtttgcgttccaactttctgcatttgataagcgaggaccacctttaatcagacgaataggtagaacggcaagacctgtgaatgtatccagggcataaacatacatcccaatcgtgatcaacaagcccagagcaaaagtaaagggcacgttcgccgcctgcaaaccagcagttagcactaacttgagagcgagtttcaatatgagggtcctcacggttctctcctagtagactcttgaagggatcaagaccgttcccaccattggctctggaaatgggcacaaaaacgccgacaaggaacaaaattatgagtatggcaatgaatgatagtgtatatttagaagcaccccaaaaccgctgtccggatgattgctcccctgtttgagctgccacttcatcgtattcctcgtaccaaaagtagacaaatggaacaacaagaagacaaagaagaatgtccaaagaatacaagatgtaatatacaagggtaagagagaacgttattctatccactacttctggagtcgcccagtccttccgttgtcccacagaggacgacacggtggacgaaactagagcgacatcgaccggtagcagaaggatagttgcaagaaggcttgtgattgcgacaatgcatgtcaaagtcactgatggcgagcggtcgcgaggagactgatacacatagatgaacaccgaagcaaccgcaaacaagaccaccaccacgactgcatagacgacccagattagcgatgtttgcagaagaatcatgctgaagcctttgacaattagagatgcctaaatcttcttccgttgcaagagcttgaggataatgaacctgacaggatcaccttacgtcatcgaagtcaggatcacgtggaagcgcggagagctctccgtgcgtgcggaggaaaataatgatattataccaatgcccagtcctcaaccgcaagagcagttgagattgtccaattattgccgattgggaccaattgacggtcctttggcgcgtctataatatatgaacgttctgacatttatcatcccaagttttacgtccctttctctggcaatgtctctggccgcacagcacagctgaagtgcaacgacgtagatcctcaggttatagcctttgcacctcacgaacttctctttacctcttacaagccgaaatgcagtgctacactgaattgatatctccgacaggagttactcatgccttggcagttccttttctttcagcgactgctaacaacctgatcgtcgcccggacttcgcttcttcaaattttctctttacgcgatgtgtcattgagtgcacttgatacggaagttcgaccggcgcaacacaggcaggaaacgtgcaagctggtcttggaaagggaatatcaactgccaggtacagtaactgatatctgtcgggtaaagattttgaagacaaagagcggcggagatgcagttcttgtggccttccgagatgctaaattgagcttggttgaatgggacccggagcgctacgggttatccactatttctatccactactacgagcgtgatgatatgacccgtagtccatgggcgtctgatttgagcacttgcggcagtatcttgagcgccgacccgggcagtcgatgcgcaatttttcaattcggcgcacgaagtcttgctattataccttttcaccagcccggggatgacttagtgatggacgactttggctccgaacctgactacgagaatagggtagaagggaattcgagaagtcatgaagctaaagataaagacgccgctgagtaccaaactccgtatgcgtcgtccttcgtcttgcccttgactgcgttggacccttcagtcatccatcccataagtctggccttcctttacgaatacagggagccgacctttggcatattgtactcgcaagttgctacttcacatgccctacttcacgaacgaaaagatgttgttttttatacggtcattacgcttgatttagaacaacgtgcctctacaaccttgctttctgttactagactacctagcgacctgtttaaagtggtagctctcccccctcctgtaggaggatcgctacttatcggatccaacgaactcgtgcatatcgaccaggcagggaaaaccaatgcagttggggtcaatgagttctctaggcaagcatcttcgttttccatgaccgatcaatccgacctggcccttcgtctcgagaattgcgtcgtggagcgcttttctgacgataatggtgaccttcttttggcactctcgaccggggtattcgctctggtaagcttcaagcttgatggaaggtcagtatctggtatatctgttcggcccttgtccggtccgtcaaaagagttcctggcttcgaccgcatcgtcttcagctttcctaggcaacggcaaggtcttctttggcagcgagagcgcggattctgtcctgctaggctggtcttctgcctcatcagccacaaagaaatccttctctgggagcacttcaaacgatgaaagtgaagatgacgcttacgaagacgatctatactcttctgcgcctgctgccatgacagacaatcctcaaaatcaaccgagcaattcgtctgtcgctgcgtttggtgatttgcgaattcacgacaggctttccagccctggtcctatcagagacattgtgctcgggaggagctctgaagcgtcttcgcgtgacacaaaagacggcgtgctagagctagtggcagctcaaggctcggatgaaggtggtacaatggtgattatgaagcgggaggttgatccgtatcttgtagcatcaatggctgcagacacagcaaactccctctggacagtctctttgctaccggataacaatgatcaaaaacgtgactatgtcatactgtcaaagcaggagaaacctgacaaagaggagtccgaggtgtttgtgctagaggataaactcaggccaattacggcgcctgaatttaatccgaaccatgaattgaccgtagaaatcggtaccttggccagcaagagtagggtaatccaggtattgaggaacgaggtgcgaagttatgatgctggtgagtgcctgtcagtccgaagaagagacatactaattgagtagatcttgggctggctcaaatctatccagtatgggacgaggacgatagtgatgagagagtagctgtcaatgctactctcgtggacccttacttggcgatcatacgagacgattcaaccttactactactacaggccgatgacagcggagaccttgatgaagtgaaaatgaacgaggatgtcgtaagtcaaaagtggctgtctgcctgcttctacagcgataatgctagtttcttcacc

SEQ ID NO: 2765 - DNA, 1271 bp, Emericella nidulans
  unsure (1)..(1271): unsure at all n locations
cccactcgctactttgccgactacctttcgtgggtaggaagttcaaggcgaagaagacaatgcgcactgccggagagcggctagtggagttgtagattttgcattcggcatcaaaccggattccaacaatgctagctctggagatatggacacgggtgcagatgaggatggagacgtgaatgacgatagcgatagtgagggcgggtactacaccctcacccttcccacaagagacgtggatctgccagatacggattgtttgaatgaggagaggcaagaggccctctggagaaaaacactccaatgggcgggcatttcgaatgtgaatacagcgattcaagtcgagatctgagccatgtttgttgtctacgacggagtcgtatagttcctttgagcaactgtttctgacgaaatgcttttcgagaagagagcttcatcgagccttcgcataaagattgcttggcatattgagtgatacttggaaagaaataagagattgtctcccttcgcaagaagacgcccgcgaacgcgtttcgacggcagagggtgtcagacactttatcgagacgggccaggacagtcttgcccacataatgaggtcccagggtctgggttaatgaaataaatcaactgctgcggtcgacaaataacaattcaatagggggcgtactgcgtactatgaacgaggccatgagctacaaccactgcgcctctgcaaagacctcccggctcccccgggcccttttgcctgtctagagtccgtgggcagagtgacagactacacaaacacggcaaatagtttcaattactgagatgattagccttttttacaggtattgaacagtatgctgtagatatgcagtggaccctggcttgccccgccatccgcgtattccgcagacagtgcaggcagcagcttttttctaccctatccttcaaaaaacagtcgaatacaggctgcggtgtttcaaattcactgctcttgcggtgtatcatgagtggcaatcatttgacaggttgatccgtgcagaatatatggtagaaattctgagagggaacacagccctaacccttgagccgagtcggttctactgtcggagccctgcctatcccggtctgccggcgacttggagggctaacaagccctactattgtacagtaaggcatggcgtttctgtagattgcttaagatacgggtctacaagagtgccatcngcatggcaagggtcaatccactctgcaatctacatggcacaggtcgaagaacccaa

SEQ ID NO: 2766 - DNA, 1532 bp, Emericella nidulans
aatgggaagtctgttggcgaccgtagcgaaccacccacttgggatcccagtggttggctgtgaaggtgtcgtaggcgtgggggaggtcgagtctgccatgacgtaagaagcagtgtttgtatatgaggagcggtttgggggagttgggcacgagggctgtcggggagatagtacatttttctatctcaagagcgctttccattgtgagaatgtttgaaggatggtggattgagttgaggattcttgataacggtgattggaaagcaagtttgtggaagagaccgttctaggttcggatggtccattgcggatctccaactcatgcggggtcatgactcatgcagccatggaatctgaaagcattctgtttattggctaattggaaatgcaatatatagcgggaagataggatcgggcaggagatggatatagggctagggctagggcatgacatggacataggtaaaggctcccactcattcaccggtctatcgtatgcatggttgttagtgattccctctgcaaatatatccttgtctatagttcaagtgtcgaacctgacgagttggttcttcttcagcgggagacgctgggtctagaagtaaattggaagcagatcggttgtatggaatcatggtagaaggctaccttaaatgactataaagttgcggccaaaggaaaccgtgttttaatgtcctagggtcatttaggcttaggcagtctaatacgactaacaaagcaatccaagtcctcaaagcccaattggagttatatcaccccaaatataccatgcaagataagtacggcctcaccatacgtacactttcctcgcgcatcagaaggtccttgccagttggagctcggccttctcagccgggccaagcgatgtcaatctatgttgatccaaaacggtcagaggggggcgggctcggggcattcttgatagtttcggggcttttcaacgccaaacggttcgcttaaagaaggtctttgcatcgaatctggggtttgccagtatatatttttgattctagccgtccaactccggactttttcttgggtctcatggtttggctcccaaacggcctcaaacgtaggagcttgtcatgggagggttgcactgtcctatgtacttgtgccctggttgcaatttgtagttagtcattatcagaccctgtaggagtcgccgtgggccatggcttccgttgtgagacgctaagcagcaatcattgctggttccttgcaatattggccgcaatacattgcccattgcgatggtttgacacatgactaggaccttaacttacgagatacacattaaagagaaggcagcagccaggatgaaggtgactctgcctgagatacagggaaacaaagcttctccgctgccttgccttttattcagtgtaaattgtcaatccattaccagaaatgcaaggcctgaccaagtggatcggctgatgatagtcacattaacgatacgttcatggcagacaccctgaacaagaagaatatcataggattcaaaaagc

SEQ ID NO: 2767 - DNA, 1476 bp, Emericella nidulans
cacaagccgagaagctttgtcaaatcctgatacttttcgagctcatttgtgattcgtgcaattgcatcgtagtacttgtcctgtttggtcaactgcgccaaacgcgtgaactcgagagagagagagccaagctcggcgagaacagccttaaagtccccccggcgaaactctgaagcatactctgggctccatttataatagagggttggcatccggttcggtgtgtcgaaggcgtccatcaagacatccgcaagctcaacagacttttccaaaagtatatcgtatttgtgtcccgaaatatcataggccccgagcatcccgcctaggtagcgaatagtggtttcaaagaccggaatctctttcttggtgctggtggtaaaatcgattttcttgacgtagtcgactgccatggagaactcctctttgagatccatgatccacagggtatccaaggcgtcgacaagggtcgcgccccagccattgaatgtgtccttgaaaccaccgcgcagaggtctaacctcatcatgacccatggcagagatcttgtaaccgttccacgcatgtaagaacgccgacttgatagtgtcaagttgttgcagccgctgcatcttgtccgaggacgactcgtccttgaacttagcttgcagttgggggagttcctttgattgcccggttggcagcttgatcaaagcctccggactgactggatgccgttcgggcatcggcttccagtgagaaattgggacaatatcctcatcatcttcatgtttattttgggtctgcgcacccgtctgaagtctggcggcatcaaattcaggctcctgagatgggacattgctcggggtgtccaggcgttcttttgacggagttgggctgtcatctgaatctgtgtaaagtggtggtcgttggtattcttctggctctaccaacgcaggcggaggagccccactgccggtcgcactattgtcgttttcgtatggatctttgaggttctggtcggggaaagggggattatggtgatcgacgggcggcggaggtacctgcaagattgcaggctgatcgtaactgcgagagcggctaaagtggaatatgaggaggacaaatataacggcaaacaccagcgagatgcgagatcgtcgtgcacgaaacatggccggcgacttccctgtattggaggcgtagggaggagcctaataatcagcagtaggagaggtaggaccgtggtcaaacgtaggcaacgagagtgaaggcgccgcagcgctggaaagaaggaacgtcgaaggacagatcactcgcagaatgcagagaatgatagtaatggaaagggggttcaatttctgattttcatggcatctcgaaacctaaggctgtggtcgcgcgaggtcgcgcaggttaacgagttgcggtaaggacaggatgcagagggctgaagttctggggaaattcagctaaagggttgatcaaagacgcagagcc

SEQ ID NO: 2768 - DNA, 844 bp, Emericella nidulans
tactgctgcgcatgacaagtagctctgtccagtacaatggaatggccatcatggagaaaaaaatattatcacaaacatttatttgacatcgaaacatgcaaaagaaccggcttattgaaaccgtggggtaaagcctggcttccatttacgctagagacagcaggctggacagcatcggctacaagcatccgatcacgttcaaccaacttgcctggccaactaggatccagattcagcatgcatactagtgaaccaaatgaactgtattctcttatatactattactgtaaacattccatgtactacagtcgaaggttatctgcgtctgctatgcaaccccggcctccggcctcaccggcccccagatatacatcgacgcagcaccctcactcttctccctccctgtctcattatcctcgttcaccaggtcaccatcagcataatgttcaatcgcaaacccgctcgggtccttccagtagtcaaagatctgcgagccgaggatatgccggcctacgccccagatgggcgtccacttcttgctgagcaggtactcgtggcccagtagctgggtgtcaaaatcctccacctcgaacgagcagtggtgcattttttgcttttcattgaaatccggtggcgcgcgtgaaaggaagacggtgtggtggtcgacgtactccttgccgtgatcgagatgcatgaaggtgagggcgtcagtctgcgcgcctgtcgcagcattctcttcgtagagaacatcagagggaacaaagttgaaggtctgcgtgtagaaggccacgtcttcatcgaacaaaactgtcacgtacccaacgtgaccgagtttgtgaatcat

SEQ ID NO: 2769 - DNA, 4046 bp, Emericella nidulans
ttcgaatctctcttgtgatctcattgagcttttgcagggtcacaagcacgccgctggagttgggcgcgctaccaccggagagtgtaccagacgggtcatagacatcaccgtcaagagtaacgctcttgatacgaacagaaggatcaaaggtcacccgcttcgctgtctcagcatcgttggcaattaaagtgttgccgaaaacgtaattcatggctgcagtaatttcttcatcatattcaatgagcgacaaagccaagtcgacttttcctggagcgaggttttgcgcagccccaatcttctctacagacgctcggaaggcagaaattttgttcagaggaataatggtcacacgcttgcggagctttcccttttgaagaagctgcgtaccagtatcggaagagtcaacaacgacattatacaggcgaccgccagcgcagatttccagagctgtagcagcctggagcttctctttgtccacagtgaaaagctgggctacaagacccttgaccttggatcggtcaaagttcgggtagggatcagagtagttgaattcgatattggcaacctttctctgaagaccgtcagctctctggcgcaattcacggatttctttctggagcccgctctgttcttgatatagctgctcctcgcgcccaggctcaaaacctaacttcgagagctcatattccaatttcttggcctgagacttgaggccttcgagttcttttagaagccctgaattctgctccttagccttcttggctcgcggttcttcctccttgatcctcttttccaagtgcgcaatcttgagcttcgcctgttcttgttctgtagcggcgttgctcgcacggttccgggcgtcctgtaattgaccctgatatccgctttcttggccttctttcgaagcgacaccggtctgcaaagtctggagcaactcctccttctgttcgacttcggctgtttgtgcatcaagttccgctttcgccgcatcatattctgcctgcagtttatcatatatcttctttttctccttgagtgatgtttcgaggtccttcactgacttctggagctctttgctcttctccttctcttcagcgatactcgcctttttgaggtcaaaaacagtcgtcaaacggactagctcatgagaatgagccttgacctcatcctcaagggcctgaaattttccccctttgcgtagctccttgtcccgaaccgccttgacccgctttacatcttcttccatgtgtgctatctcgctcttgagcttcgccgtgttatcttccagtgcctggatctttcgcttctttttctcgcattcctcgccagaagcacggagtcggtcgccgctcctaagatagtcatgagcaaccacaaggcgggtcaatcgctccaaatcattctgtgtctgctggaaatcaaggaaagctcgcttctcagccctcagtttttcgagtttcggctcaatttcctcctttaataaaccttcaatttcctgtaatttcaggtcctttttagccatcgtcttcgccgccttttcccgcctatcctcaaacattcttgttccggccgcctcctcaatcatcgacaggatttcccccgctttcatattgagcaccttcgtaatccgtccctgcataatcaaaaagtttggattgttgatatttaactgcacgctctggaataaattttgtacggtctgttgttgggcacggtgcccgttaatgaggtatttgctagtcccgccgagaacaatttgtcgcgtaacggagatggtcgcatattcttcgaacccgatcggtgatttcgcggtgtccctattgtcaaaaacgattgtcacgctcgctttggtaacgccggcctgaccgcgcttgtagatgagatcctggaggttttgcgctcgaactgtgctcatatttgtgatcccgagcacgaaacagatggcgtcgagaatgttggatttaccactgccgtttaggccagtgattgagttgaacgattcatccctaggaatcgaagttaacatccacttatacacggtcgcaaattctgcgatctgtagatgacaacgaaagtccgccacataccatcctgaaatcactgtacgcacagcgtacgatttgaagccctgcgaccggattagtgatcgaaccttcgatggcactgaatggtatgttatggaaaatgcctcacgtcaatgattatttctgtgatcctcatggttccgaaagcagacggggcccgtcaacttgagaatccgcagcatgagggagcagccccgagttgttttgcgggagatgttttggcggcgggatcatgtgttgatgcattcccgcttgcagtttagcgctgctgagataacggcccagctgaggggtatcacgtgcgtattcccaatacccttcctctgttatattcagaaagtactccgtatacccacctctttaatgacgcatattttggacctgcgttttgacttgggaggacttggggctatattcacttattttctcaggaaatggtggcctaagtggtcgtagctgctatgcccatatcttcatccgtcagccttgtatagtcatactacacagggcatacggagtacagaaagcatagccctcgactgacatttagcctcaaacatgcttcgttttcattactactcgcgcctcacatccaaccgacttaggtggttatagctacctcactgaggctttggcctgtgactttattgaataatggactcctgaacaacaacaacagcgagaattctccgaaacgtgggatcctactattgcctgtctcaccaatggactgaatcaccacagtactttactacatcaacggccttcgagaatgacatacaaaccctaaggattcccccagctctcatatctttcagatcttggtcatctcttcaaagtacggtcactccaagttcctttagtatacattcccgctgccaccgatattcataccagcacgaccataacaaacgacattcctgacgctcttgaaaaaagaaattcactagtcatgcaagcttgcggagcgtcaccgggcctgaaaaatggtattccgtatagtaagctttggctggctactgccttgctcttctaccttccttcgaatatgactgctgtattgccaatactattaaaaacagccagcagtcggaatattctcgcgccaaactagtgagtccgatggcggctctcgccggacgagcatatgattgaaatattaccttggatcagaaaatggtccaaccttcgaagtagacatggggcagtcattggaccgttgtagttttcgcccttgtgtaaacggtcgagcatggtactcgcgtccacttctctgaagggccaaaccccggcagacacgtctcactagcttcagaaagtagtgccggtttggcagaatgtgaacttattcagttggaccaaggctcgctcacggtgttgcacgagggtcttgaaaaactctgggaaaggcggatgctaaataggggtgtgtttggtcaggcagtgaggcgtctggaaaatgaaaagcccgcacgcgtctatgttcataatctagacgccttaattagataactagtcggagcttgccaatccgctggccagtttcgcttaagggctgcaaaatggtttagttctctcagctttctacccattgatgtgcacacgtatattttggaagaactgagtcagttagggcccttatggcatccactgcatagtagcacagcttagtgccaccagtcccatgcaatccatttaattggtctcaatagataccctatttatcccaatcgtcacatggttcgtgagaaaaaaaaaagcctgtttcagcaagcatggtacaccttacccggataaccataagggaactgccagccaggaagtggaccaaacgccgttgctgatcactgtaccgtcctacgtatactcctacccaccgaactcaggcgattatgacccatgctgcggaaatgcgactcgcgacaatgttcggtttggatccattcggttatccaggtcctc

SEQ ID NO: 2770 - DNA, 923 bp, Emericella nidulans
tactgaacatttccgcagtccgtgcatggtttaccaggggtattattatgagctgatcttttttcatcgctattggctaatgatttattcctcaccctccatgatctcctcctcggcgctgcaaaaacgttagattgggtacacgacaaaagcgatatcgaattacttactactcctcctcgccttcggagatggaggcgtcctggtactgctggtactcggagacgagatcgttcatgttgctctcagcctcagtgaactccatctcgtccataccctcaccagtgtaccaatgcaagaaagccttgcgacggaacatagcagtgaactggtcaccgacacgcttgaagagctcctggatggaagtagagtttccaatgaaggtggaagacatcttgaggccgcggggaggaatggagcaaagagcggtctggatgttgttgggaatccactcgacgaagtaggactggttcttgctctggatgttgcgcatctggtcctcaacctccttcatggagacctttccacggctgaaaagatgttagtcagagtaataaatgtaaagaaggataatgacatacaagatagcggtgcaggtgaggtagcggccgttgcggaagtcagaggctgccatcatgttcttggggtcgaacatttgtggggtaactcgggaacgaaccaccccgaaagagaagcccccagcttgtcaaagagccaacccaccttgagaattgcaacaaggaagggaccatgtgcagcagttggcagtaaagtaatttaccggaattaagcaaggtccccgaatacggcggacaggggtaacaccatgaggtgaggggtggggctctatttttaggttatcaacaaccacccctcggaattcactttttacaaaataatactttcctttttctaggggttgg

SEQ ID NO: 2771 - DNA, 525 bp, Emericella nidulans
tgcgcatctctttccgcagaagtttccgaacgaatgaatccgggtcttgaacgaacttttcagcgtaggctaggaggtaaagaccgcaatcagaaaagttcggctgatgtgggatctcctttgcggtcatgcctttgaccaaagatttgtcaatctcgatgccccgcttcgactttgcttcggcgaagaggtattcgcggaggatactgatggttcccgaacgagggaggtcaagtgaatcgaatgtgatgataattggttggcaagtactgtatttcactccatatgaccggtttttcttgggcttgcgcgacttcttaggcgtcccacttgcttccgagtctttctgagtttcgggctgcggttggcttgaaggggcagccaacttcgcacgggctgcatctggataaacatcgcgttctgaccattcattttcgcctggcttagacgcctcttcttgtggaacttgcgtgtcgataaggctcatagaagctaacgactgcctagctgtttcatctttgatag

SEQ ID NO: 2772 - DNA, 1256 bp, Emericella nidulans
  unsure (1)..(1256): unsure at all n locations
gggcccggcccgaggaggaggaggatgatggtaagactgttgggcggggtggagatattgcgacaaagaaggtcgatgcgaactacttcggttatgggcttgatgaggaggatgggactctgctcgcttatgagatgcagagggagaaagaggccgtggagaagttacggaaggagggcgaggacgaggaggatgttgaggatggatgggaaccgttgcctggggacgctggggatggcatcgagtggcgactgccaacgctggaggaggtgcaagaggagcttgtggataggaggagaaggcggcttttggagaagatttcataaggttctcgtttgcatcttgtctctaggcttgggatttcgtttgttttacggcgtaactcggtgcatcttgaatttacacttgttgactaaggctgtacggctttcgttggcttcatcttatactgtatatgctgctagcggggtatattttatgtacatagatgctatttttgtctaactgaggggtctgttgcctgctgtcgcctcgctgatttctctgctttcagggcttgcgttatactgatactggctttgtcctcgtcgcttgactcccgacgacgtcgctcttcctgcaggtcgtctaatatgaacctaccgagcccgccaccgcgccacttttggatgaaatgtaaagcagcaaggtccatattcggtataccacccttggcaagcaaacccgtactgcgggcaaaactatccaaaagcgggtgaacctcattcgtcggtagggaccagcgctgatatacagtgggatcgtgcaggttaatatggtagagcaagtagtccgctaatgtgaccggagagattaccgaatctttaacgcagccgcaaagggccagcttcaacatattctccgcgtcaggcacatagggcataaacacgccgggtgtatccagcacataaacatgggcgccattgtctcgctctatgatttttacaggcgttccgattttccgcgtgatgcccggttggtcccccgtgtgcacggctttcgcctttcccacgccgcgattgcgcaggttattgattaatgttgacttcccgacgttcggcatcccgacaaccataacgcgacagccaacgagcctgtcgggcccttgggcgtcttcgcgcagatgcgttaggatcgtgttcacatcccggcggttatttgttcgagactttgatncggggtctaaatgatgtggactgacgaagaaaacgggtgta

SEQ ID NO: 2773 - DNA, 1729 bp, Emericella nidulans
caggaactggggtgaagagtctcaggcatatttgcagctatatgtttattatttctcgcgaaaccatgctcactaaacttaggggctaatagaagctcttatgcattcaatcctgaagctagcactttggatatagtgtacagaaccaagaagtaccaagagaaattgttagttgggtaaactggtgcgcactgtagcagctggaatcgaggcttgattattccaaaggatcttgcatcaatttcatccaagtcagctgaaccctggcagccaccctcatagatagcagatatcctataacgcccgcaaaagctagctgattcaaattctgaaatgcctagagatagatactggttagattaaaatcaagaaagcacgtataatgatgcgctgcatgaattagcagtacactataatcttatttggatagtacttgagaaagtacaaaacccagttcttaccggctcttctagttatcccacaggcatagttgctacgctttctttatgaggtataaaggatctgcttgctctgtctgtttattaggcttgtgagtctttctcatggtatctgttaagtaattataggtactcatattgctgcttctttatgccctgggtagccttatgtttttaagcaagtatcgctgtttgatactagactgcctcactttctaatgcaaattaagctgtttacctagcttaaccgattcaattgctgctagcacctcctttttggttggtgtacacaagacggtcgttacgtggtatctttcgttagacggtcaagcacaaagcaacacaggataccggaaaacaatgtcaagaaggttgcaaactgacatgcggcttcttatctcgctctcatcgccgtcagtagcttggaaacctgatctgggggatgaggcgaattgggaacttagggcagtcttggaattgccaccggcgttccccaacgtgcagcctctccaaagggacgggagtatgcgcagaatggcccttcccatcggatcggaaccagttttcggggattctctttacttttttttttattttattttttctccatatttctgtgcctcgctccgtacttggttatggtattctgtttccaggatcgtctgcccactgctgttcaccgggtagcctgagccgcggcccagctggagcatccagtcttcagccctgctgcgaccatcgccatccggggctcttgacaccggcgccagatactccatgactacagagaccgcgggtcgtcagttgcggctcgctctacgtgcacctagcgcacgttgaatgcaacgctttggtggcaaagggggcaattggcggcctgaacgccatcaggaccctattcagggactagcaagatttagtctagccgcacagaaatttccaccagatcacacatcccacactccgcgcgtctgtactcttgggccgttgatgtttctctcccctctctagtatgccgacctcgacgtcgacaatcggctggactttggccaacgtgggcccagcgcccaccacgtaccctgccgctccatcatgcaccgctgccagctccctgatcttggattggcagaacttgcgagagtcacaatggggagtcagctgcggagtccctgacgactgctggccgcaaccgacagactcggccttgaaagatgagatcaagactaaccccctcatcgtccccttctactcgcctggggtggcatgtccga

SEQ ID NO: 2774 - DNA, 1226 bp, Emericella nidulans
gaatgacgccaagagctataaagaccgttcgtgctccatcatcctccatccagtccacaacgaacagcgagaagaccaggccgtggaaaacatctgcaccaaagttgagttaagctgatcgagaatgagtaatggttgggaaggagactcactcttgctccagttcagggttaccaaggcttctccagcatactgccggtagctatcgacacagaatgtgatggacgtcgtactccctaagcagcatccaaacgacaccaggccgaaaaagatggtcgggacaatccaagcgtctttttcttgggcgctccagccgaatcccataagccctatggtcgtcgatagggcgatggggatagccattataaggcggaactccggctcgtaaactccaccgttgcgtcgtgtcatataccggacaatgatatctgaaatcttacctgccaccgccgtgcctagtaagccgcccacgaacggagagatatagaccaggccagtctgaagagcggtgaagttataggtctccctatcttggtagatgtgggaaacgacctctgacaagacgatgagccatcccaccgacagcgcgtacacggcggtcgaccacaatactgccggatacgcgaacaatatgaacggacggatagcaacccgtaaccaacgatcctgcgaaatccttccgttccatggtcgcaggtagtaggtgtacgggatttttgtcttgtcacgaagtcgattagtatactgaacgggcaagcttaaccctgcagccggatccgctgactcgcttcgcgcaggtgacggcgacgcaaatcgtccagcttctagatcagaagagcgagtcgcaccgccgttggttagcggcggaagactcggcttctccgttgattccggatcagaaggctccacagacgggtctgccacttggctttggctctgcaccagagacaccgggtccgatccgtagggcaactcctgcttctcctgctctaactcctcatcttcgggctcgttttcgataaagccaacatgacccttcttggaccgcttttgagaaacggcatctggagcatcctccgagatgtcacgaggatgagcattggtggtgcggcccctgtgaagtccatgcgacaccatgtccgacacgctccggtagaaatcagggcgtttgcggtgtcgacggggccgtggggtacgatcccagaaggtttccggcaggaagaaaa

SEQ ID NO: 2775 - DNA, 3869 bp, Emericella nidulans
gggtaacagtctgtttgtctgatagacatggaatttcctagctacatctcagcgcctcgaagaggagtgtttttgactccgtcaggctgtattgtatctagccttgcagcgtaagccagctgaaagacgaccttggccaccagatacagcgacgtctgcctctgtccgaagaagaccattgttcctatcgtcctctccatcgcgtccagtttcctttttcagaggcctttaagaagacaaactgcagaacagcaagttgtgagtggccaacctacccatacggtcaaagatggcatttctgtaccaatatcaactaggttttgaccctgattgaataaaaatctctggtaaaagacattgccggggcagacggatccgggaaacagcggaagtttcaaatctgtttaagattccctagcatttgtcctatcatggggttgagcgagatacctgaagtccgtgtaagatgatgatggcacatttcgtgaagtctgtgcaatacctaactagctacacacatacatcgctgttcttgttctgcacctaaccagggtcctacccgagaccactacttgtcatgactctaccatttttccaagagtcgtctgtgtatcagatacgtaaggagaccgcccgattggcctggattttatccggggggtgtacccgtttcacaacccaacctacattccacaactcacaggaacctcaaatcgaatacgtcaagaaccgatccagctccggcgtccaattacgctgcggatcatcaagtgccaaggcaatcccatgtgctgcatcagggagaatcagcgcctggtagggccgatccttctccgtaagagcattgataaacctcagcgcattctccacaggcactgttgcgtcattcgccgagtggtagatgaaaaaaggcggtgtcttgtccgttaccctagtctctgcagacatcttcttcaccaacttctctggcgggttgtcgcctagcagatttgtcggcgaaccattgtgagtaattgctgcatccattgagataacagggtacgttaaatgccgaaatcaagatcagcttctgggtttgtcacagtgaccgctgcgaggtggcctccagccgagtaaccccagataccgagtttgtcaaccttgactcgcttctggctgcgtatgtagcggacagcgccgagggcttcttctagtggtactgggtaaagtggtgttgccgctgtttcggccgtagagtagtctagcacccaggcatcgtagccctttgcgttgaggtaagtggtcgagttggtgccctctcggtcgagtgagacgtacgagtagccaccgccggggaggacgagcacggcgacaccgaggccgttgttctctggtgctggatagtaggctaactttgatgtgttgaagctgcggcttcttagagaccgtgtatgaaataagaggagcagggacgaacctggggctaccatgcggacggccagtcaccatggtgaaaagaagagaagcggcaactgcaagtctcattgtgtgtcggtggtcttatagggctaaattgataatttcagaacagatgtgaagagcactacctcaatatatagtcatcacccccgcattctgcagggtctcttttgcggggaaatagacaagcgccggcataattcaggccgagccctccatttccacggtgactgcccgctcagttgccgtcattccggctaaatcatgttcaatttaccgtgttttgacagtgctccgtacctaaaaactacctgataaggactctgacgtaatggtattagagtagagttcgaaccaggttggagctaagctctttcggcggaaatttcagcggagcagcccattcaagcagcaatggggtcaccaaggcaccaatcagtaaatattggttgtttttcctggctttcgaagaacatactttgggtcttggctgtgctgcagcccggctgagccatatgagggatatgctgtacaactaattcgcggatgatgcattcaaggcccctcaaaaatttgtcggtgggcagatgcacttgtcctaaactttgtctctgacaggtcttattctaatggtcattcagtattgacattcagtagtgatattcatctttggacaatagtccagccttaccggcaggcgctgggcagcagcaggctagccataagagccaacgcaaaaggcctatcatcagccctaagacctttgttttgacttgagaatcgatgaatctcacctccgcactgcgacttctgacatggcacagatcccggttcgggttgattgaaaggttggtagcggggataatgcgcggatcactgggacagtatatatttcaagcaacgggactttaaagatagtaaaagattgcggtatcccagatcaggtagattacagcctagtaaattattagacgaaatagggcaccatgaatacaagtctattgatcaataagcttgagccaatatttgtgcagagtacctatgcgcagtgcccaaaccagcgcctacttccagctgtgatatcgcagtgagtggtacagcaagcttgcatttagatatatattaaaaaaaattacagactcccaacaaatggccggttggtgtagttggttatcacgtatcgttaacaccgataaggtcgccggatcgagcccggcactggtcattttttttggtcccttcaataccaccgcaaatgctcgttaacgcctttcgccgatacattgccttcaggacgaccgcccatgttcgacccaagcgctttccccgcaagtccactcgtatatggccaacttgaccaagcactcccttgcttcaacatgttctgtccgtaccatggtacgtcaagttctcaagttggggctaccggtcgaccgccttctagttacattcacgtgataccatgccagattaggactagctcccatgcttgatcggaagaaaaaaaaagatcttgagctccgcaagaattctcaagccaaacctcaacctatctctcacatcaacggccgtgatccgcagtcgtgagccactaaatctttaaataatcaaccatggccgatgacaccaacgccggtaagtcacctccatttgacgctggagtcaatcctatggatagagatccggccgcacagcagaaactgacaattctacagcctggcccatcgccgatgaggctctctctcagcagctcctcgacctcgttcagtctgccacccactaccgtcagctgaagaagggtgctaacgagtacgtactccgctcatcctgccccgcgttccaaagtcttgaacatcactaacgatcttttcttgtttcaggaccaccaaaaccctcaaccgcggtacttcggagctcgttatcctcgctgccgacaccacccccctccccatcatcctgcacctgccgctcctctgtgaggacaagaacgtaccctacgtctacgtgcccagcaagcttgccctgggtcgtgcgaccggtgtttcccgccccgttattgcggctagcatcaccaccaacgaggccagtgatctgatgccccagatccgcgccatcaaggtgcaggttgagcgcttgatgatctagatgttatttgctattgatgggttctccgggctagagtgggctcctgagatctgaagggcatggagcgacatgggagatctggtgatgaatgtctgatccgcgttatgctctcctctgcttttgcctcctgggccttttgttaggttgtgggagtagctagagtcaggctgcttagtgaatcaaggacttggatgtgaccaacaacatggtcggtgtcgcagtgcggtatcgttcactgtcctcgggaagttctcttccactaaatc

SEQ ID NO: 2776 - DNA, 954 bp, Emericella nidulans
gtcaacaagaagctcgatgttccgctgaactcgatgatgctgggtatggtcattgaactccttatcggtttgatctactttggctcatcggccgcctacaacgcccttctctggcgtcggtgtcattcttctcactctcagctatgcctgcccgatcgcggtctcgctgctcctccgtcgccgcgaggatatcaagcacggtagcttcgatctcggagcgctagggttattctgtaatattgtagctctaggtacgttcaccccgccccgttaactcctcatttattgatttcatgcagcatggaccgttctcgtcatccccctcttcaatttccccagctacatgagcgttactcttgaaactatgaactacgcctgcgtcgtgttcgttggcatcatcgtcatctctgccgtctggtactggatctggggatacaagaactacgctggtccgcctaccgatgccattgatccggaggctgatcatcccgctgggagtagccctgtgcaagtagcaaaggatatccaacgctaggtctgagttagccgcttctgcagatgaactgtggacggtagtgattgttcaatacgtgtaaataactaacctacatagatattatatgaatatatccgtaaacaagaagcaatcagtccaattggatataccctcgagagcagtctagtatcgctgttctgttccagccaattcccctttcgtatcaagaagaagcaattaaatggggtagaaacgatggctcgttggatttcaaccccaactatacgtacgcacactcgaatttctcaatcatttgtagttgacccttcactcgcccgcattatcaaaagttcgcctgcttgactgatgaatgtttgttctccgtaacaagctcagatcacgaaaatcatgaatgctacggcttgaaaacattattcctgcactagagagcatagttt

SEQ ID NO: 2777 - DNA, 853 bp, Emericella nidulans
ctccgcgacatccaaattccagaaatgtaccaaccagccacgatcagctgtggggaagaatgccttggaggtaggcagagtcgcaacctcgacgttcctcatgtggccgatatggacaaagccagtaaaaaaaacaattgtcaatggcgtgccatagtcctccaagaacttccgcacatatctctggaacaggctgctgttaccgagctctccacaaatccacgcggccatgagaaccagcagagctaccatgatactcagatacgcggacgcctccccggcgaatccccactgcctcgtgaggacctggatccctttctggaggtagatgaacgcaacgtagaatccaaagatgtcgcacgagaagcgagtcacgtaggtcagggcgttgcaggcattcattatagcgagtatccagtgcataataagcgaccatctgaatatatcagtgcacgagcttgacgataataaaggaggtaacttacatcccaatccagcacatgaactccatgtacggagttccacgaggcgcgataatgtcatagacagtataattgaagacagtaattggacctaattgtattagcgacgatccacataattacgtctagtagactcaccagtaaccccaacaatgaccaaaggttgagccgcaaaaagcgaaaagacaaaggagcccaagactgaggcgaggagaacctcattgacaccataactctgatgcgtcttctcaaacatatcaagtgaaaacgccagggccggcaggatactgtaccaatcagcacttttcttgtccaggatgggcgatgggcaagtaacgggccatactggcaaaatacatatagacagtaca

SEQ ID NO: 2778 - DNA, 1052 bp, Emericella nidulans
tctaagtatacaagtgaagttcttcatcgatgcctgacatccatcatcatattgaggaatcaagctcttaagccctcaggcactcactttgccggccacgatgcctcctccgaacagaatgaacgtctggatcgagctgggagaacatcagcaactaatggaataggtgcgcaccgaaacacttacgagatccaagaattctggaaagccgagtaatgcttgagttggtgttcctgatagtagtcttgaaacacaccaaacgctatatagagagtcagtcaccatcggcaaccgaatagcccacactctactcaccattcgcccatccaaacatagagaaaaagatacaccatcccccgacaacattcaaccaagcctttgtagctccatcgggaaagttggatgcatcattgatttgtttctcgctgggtgactcgtaatcaatactggtaacctccgccggctcgtcaacacttctctgttcatccgattcgccggtcgattcgagaaagctcataattgaggaagatgaatccacaagaacctgtctaagagaagtaaaaacccagaagggctttgcctagacgaaggcgttgcctttaactctgcctgtaacgcacgccatgtatctctgcgagaagagccgggacccaatactagcatggtttgattgctttttctgattttgatttctcagccattgttcactgcagtccatttgtcagccagttaatcaaacatgtctgcgagccggcgtaaattcctctggtacagtgggcagccccttgtttgtcattatctagaaactaaacctgagccagctagtatacagactgtcctgaactacaaaaatatctggatgacagcttttgaaacacaattgaaagagaataaccaatgagaatgacgcaaccaagcacaggtcttctcttgcaccgccactctgtatacccttctggaggcatgcaggtacaccaccaaatcggatctcccaccaaagcagccctcagttccactctagaaatctgctagaaacttgctaaaatctgcaa

SEQ ID NO: 2779 - DNA, 1277 bp, Emericella nidulans
cctatcaagcccatacccatatacgaatccagtaatcaatccccaccaatattgcgccattctcatccctgatttgtttttacagatctcaaaagccacgatcctccattggcatcacagtgctgtgttattccagagcctcatgcgtaaacaagccatttgcctcaccttggccggcctccaatccattcacggctcatcaacctccagtgtttaaaagcatcagtaacagaatttaattgctctgcagcgctaaaggtcgcgaaaacttgtattgcctgatatcggcgcggtcatgttcgggggtagtgctctcagaggactgcgccatctctgcccttgcagtagcgattatgccccgttagaaccattttgggatagacggcaggtgaaagggtgccagataggggtacatacgtcgggtgggttctggagtttggcagcagatacaaagactgcttacagagccaccgtacacagctatcgggaattgagaccagcctcatctgagcatgcgagacagccccagaagaccagaaacgaaatctattagtcgggaacggggcccatcccgcatatgtgtgcttgcaacagaggcaacaaaggcttacgctgcgtcatggggtatatggactataaaccgaacggtacttgcaaaagccatgaactttgtggctgaactatgaaagtctcctctcatcatctcatctgctgctctctatccaatccctctatgcgcaaggactccgtcctggctgttcttgcgggaccgagctagatcacgcctgctcgcatctagaagttgaaacaggtgggcatgagaagagttagatgaggtctgtggtctgtaggataggtcatattaagaggtagagtcatagcagggctattaagtatgaaacagacgagcctagacctatgcttgcaccacaggattcggtatgaggtaactctctagtacaacaacggcacgcgtacgtaatatatctttctattttcttctacataacctctattgcatcaagcatcgtcagagggactataaataattattttcctaggctggtagctatttttttcctttggtatctgttgagtcttgctggtatggcaggatctgccaccagtttagccgtccgatgttaacttcttttctgtttctatctgggctgtaatagagtgctctctaaacttatcgccagtcacggtccactcgaagatagtgaagatcgtgcaggacagggcattgggcacattttagaagacgttaaggttgt

SEQ ID NO: 2780 - DNA, 930 bp, Emericella nidulans
gggcacaagacagagtataattcacgtgcgctgcctggaggttgactggggtttggtaccagtcgagaccttgataacagcgcgcgtgaggaggcatcatacatagtacccgccttgggcctgatcctccactgaacgtcaacagcatgactgatacacctttttccccttccggtggagctcctcgagctcctcttaccaccacatattccgcaccgagtatctcttctatcccccgtcgctcttcttacgcctctgtgctttcaggaaccgccgccctatcgccacaggctagcactcccttctcgcagttgaactccacttcgtcctatcccccgccgttccaccccgaaggccgcccgtcgaggcactcggccgccgtggatgcagagatgcagacgaattctccctggatgttacctccgcaggacacgcttcctccatactcccggaagttcgcgagcttcccggcttacgatcccttcttccagaatctcagtaacttcgccgagacaccttcctccttcacgccttcttatctccgcaactcccggtacatctctcgcctcgaagctgctcgtcgcgccaaaccgggatctcaacgagatgctgcctccgtctcgtccggccagggcaatttgccccggatagcgccttcataccgcgggatgacgtatgatattatcgacagggaacctgtcggcgacgacgatgaccatattatgccgctaccatcccgatggagtgactcggacaaatacccaggactagaacttctgaatgatggtttggaaattcggtacaatgggccggttaacaagcaggatcatgaagccgcctctgtccgagcggatcaccctatgccaccgtattgaagtaaatattatttcgagatcacaatacattcgaaacctaaagaggggtgcgtct

SEQ ID NO: 2781 - DNA, 1769 bp, Emericella nidulans
aaaaaaaaagggcacatgacagccggtcaccgttaaccccactgcgcggcatgagagatcccagttcgatccagataaataggccgctttatgctagaatcaggccaactacccagagggccaacgcagcgcctgcgctcccgacactggcggcaatggcagacggcgtagagaagatagcagtgccaatcatacggttagttctacaagtccattaggatgtgcttccctagttcctttttgttagacgcttacattaaaaaggtcgttgataacaggcctaagtgacggcgctggcgggagaacccgtcatattcgtcccgatcggtatccgggagctcgcgaggaaggaggaccgcgtgttcgtggctatcctcggccatcgggctggaatctcgcaatgaagactccatttcaataaattttcattatcacataggtggaagatgagaccgtcgtgaccgagtagatgcaggtggctaaggacaaggatggaggatggagcaacggtttgtcgtcgtcagtgtttactgacagtcctagtcacgtgaatcatctgccaggaactgtacggagttggaggcctcaggtgttcaggcaggcaggactgcagccctagcagagaggcatgtgcttgcagcaagtattgagcattcggacgtctggctacactggcttaataaacctttcaccctcttttgagcaggcaattctcagtggtctcgcttgatgctgttgtgtcattcccacttctactcggcagcatgctatgcgtggtgtcgcggcagacatgtgctctatttgttttgtatgggtgagtggtcacgtcatgacataccatcaatctatatggctctagtagtatcatatatggagctataagtccaacaaatagagcaaggtataaaggaaactgtaagtaatgcggattgcaaccggtatctatgcaaatagggcccgcgccgcgcggccaacagaacgaagccacaccgagactgaacgcagcctggactgccgtcttcgctgtttgtcttttagtaagggcttctcatccacctgttgcggtccgtcgaccaccgcagatcgagcggtgctgtcttgttccgtctgagcggagtcagtaggagttggaatagacttgatagcctttacagagcggaagctttccgctgcacttgacgtcgactcacttacttcgtgcacaggagataggttggtgggaatgtaaatgagcttggcgtcttccactggctgcagtgttacggcggcggcatattgtggcttgcccgactctgggagcctgatcgcggcggcagcaggtgtcaggggaatatttagggagaggacttcggccttttgttcgtctggtagttggagttcagaggctccggtcgatgggagagtcttatgttcagcaggctcagactgtttaggcctgtcaatattcatagatttgtcggtctctactaacgctggctgaatagcaaatccttcggccgtctcagcctcggctgttggggaattattgtgaataccggtatgattagtcttgagttgaggcaaattgtagtctgcaaccttttgaggcttttcaggattaacggcttgcggtagctcatcaacaatcgcttggttgcctgatgcatcaggatcagaattctctgttcgagacaggtcatccctacgctcttcaaatttgtcatggcgagcgggctccgcgttctcggcttcgtagcgaaaccagcgatgctcaagcccgggatcgatcg

SEQ ID NO: 2782 - DNA, 1381 bp, Emericella nidulans
tccacagtcaggcacaattactggcgtcctgatattgaacctcaaggcaaccatggagttgttacgactgtacatggaagcccgagcagcagtcaggagaaccttaaccccaagcaaaattcgctttcaggggtcaatgtacaaaaatcattcctagtgacgacaactaacgagtcctagattagaatttataatggagcggaatgatattttcacaacttagaaattcggaatcaatccggtagacctgggccgcttaggtagaattaagaagtcctgtggtggaatttggataccttttgggggccgagtcagtagtcttctggaattcaataaatgaatatcctcccaaggttcttgcctgctttgaggctctgggatgaaaacgaaggtttgggctctaaggcttgacagcctggcgaaacaaaattccgtaatcttggcggcacgtggcgctgaccaatcaacggcggcagcagctccgcccagcggcgaacctcctccatcaaatttatgcagtgaggtggcttcttcgtcgattcccatcttgtcgcgcggattgcgggtttttgagggcttggagactaatgaacatcttctcgtcatttttccgtcgttttttctttctcgtttgaaattgatccccgtcaggcccagcgcgctggccgttcgatttccattatgtgagtatctgccagctacagtgccgcgtcgtttcactaacagagtccaaatctagggcgagactcgtgaatgatcctcagattaaatattcctcgctgcataatcccatatctacgcagcttcacacctacgtgtggccgttcttgatcatctggcccaccttcttcgctttctacctctcgcccgaacgttacgacacgtatatccaaggacaggaatggacttttgtgtattctggaacaatcatcacgcttcagtcgcttctttggttgatgacaaaatggaatactaacatccgatcgcagataacgacaactaatgatcggctcactgattctgtaccatcctattcatggtaaaatcgttagacaactttgcctaagactagatatcttctctaaataaagatacttaaaatatatcaaaaatcctaccttaatttattaattacaacatcaaataatcaaatacatctttaacatatcctatactaactaataaataatataatatctattttactactaataattacagaaatatattcatgttttacatatcaacaaaatattacctcctatataaaaattaaaatattaaataaaaaatataactctctaacattattctattcaaactaacacttcaatcaccttacactcatcttcctataatattaatcatataaactattaac

SEQ ID NO: 2783 - DNA, 4897 bp, Emericella nidulans
atcggatttcaggggatcaaggcttaccttcttccagacggcgacgacgttgataatgcgcaagcacgcagcgatgagaggaacttttcctcgaaatactacgcttctcctgcacggcagctttcttttgtggatcagaggcgatcgtggatgtcactgtttgatccaaactatgaacagacttcggacatgcgcgtaatgacattgagaatgactctgacaacaccagaacgtagggccgacacctgccttgcggagaccggtaccaaggaatcaaccaagcccatatacttgccctcaactcaatacgggagaccagtcggtgataaaatatgacaaaagttccgtaggcggaaggattgagacgatctggagtacacatacatactcgaaatggactagccttactgaatctccagtcgtcagcagcgtcaatggtaattgtagtgttgttatggaaggtccccctggaagtgttttagggactaaagctggcgttgaaaccaagtttcagagtatcactggattttcttctaagtggtgctgcggatgattcgtcaggactctcgatacggaagtaaaatgacacgtgactattgagctctcaaggccaccttctcgaaatgcgataagccgagcaattgctcatcaacattcccatcctttagttcactgttttttatagcgtatacatccttcttcaacttatcttattctcttctgcatatatcgcccgtcccaacctcattgttaaaatttctcctgagcttgatagttccaaggcaaggtatctggcggcatcttgctggccgtgagcttccgattccttgctgtttaatgtttactgttcgctggtcatgataccccgatggattcagctggtgggctgcctattactggcgctcatgttgccgccgagcgctgcgaagaaagacaaacccggcatatctttccataaactccacgagaagccgtattctatgttctatttcgagaagtctgatactgttttgttaaatttggaggacggagaagttctacgttcgtttgacgctggcgaaaactgggaagtgattgaggacaatggcatgaagcacggagtgacttccatccaccagcatcctttcgacgaggataaagcttacgcgctgggagatgacgggaaacactggataaccacggataaagcaaaaacatggaagtcttttaaggttccagaccaggcatatttcaaaagtccacaaacgggccctctaacgttccacggacgggattccagcaaagtcattttcgaaacaagaccgtgcccttcatgtgcgccacgatcatactatacaacagacgacttcgatacaatagaagtgctgacagaaagcgcaggggcgtgctactgggcagatggaaattctcaattcgcagcaggtcccagtatgccaacaggcatggaagagcgcactgcttgtgtagatcaaggactcaaggcgtcgacaaggattgcctttcgattggtctactctgacgactacttccgcagccaaggttatttagacgaaacttcaggatggccgaccagtatctggtgtgaccagtatcgcgcaagtcaagagcttcatcgtcgcggctgtcgaatctcaaggaaccactgagcgtgctctatatgtaacaacagatattgaaaagtggcatcgggcggaattcggagaccataggctggaacaagacgcgtacactgtgctggagagcagtgattatagccttcaggttgacgttctaacaaatccgttcagcggcatgggtgtacttttcacttctaactcggatggcacctattttactcgcaacattgaacacactaatcgcggcccaaggggctacgttgatttcgagaaattagctgctatccaagggatagtattggtaaatactgtcagaaatccggacgatgtcgaggccggtgcatccaaagaggttgtcagtcagataagcttcgatgacggaaggacttttcagcctctaaaatcaactgatgggcagcgaatccatctccattcagttaattcggacacaaaccttggacgagttttttccagtcccgcccctggattggtaatgggagtggtaataccggtgattacctcggtaagcgctcagatgggcatttgtatgtcagcgatgatgcaggccttacttggcgccttgctcttaaagggccgcacaagtatgaatttggtgatcaaggggcagtgctagtggcaattagcgaagcacccaaagttaaaaagattgaatactctcttgaccatggaaaagagtggaagtcagtcgatcttcctcatgaggtcgatggtgaaacatctactctaaccacgacccctgattcaacgagcttgaagttcatcctacttgggcactcgaaaggagaaccctctgtttatgcaattgactttgaggatttgcatgaacgaaaatgcgaagatgaagactttgataaccattggcctgctcgattggatgaacatggagaaccagattgcctgatgggccagaaacaatttttcagacgcaggaaggctaatgctgactgcttcgttgcggagcattcaacagttctatgtcgaaattcgagccgtgcaaatgtactgttgaggacttcgagtgccagtctacacggactgaggatggcaaagactgtgttccaccgaagtcttttacccccccagatggagtctgtataaacccagatgatacgaccatgattccgtcgggctggaggttgattcccggcgacgtttgtgttcgcgatgatggggttaacctcgacaaagatgttgaaataccctgcaaagatgtcaacaataggccgaagagcaaagaaattacctctaccatgaagatgttcagctcgggcttgtccgcttacaggtacctcgaacgtcaagtgtcgaatcttggggaagatgagacggtcctgatgctcagccgcaatcaggaattattcgtgtctcatgaccatggccaaacctggcagcaagaactaaaaggggccagcattatgaaaatcgtccctcacccttacaacagtgataccgcctatatccttactgacagcgaggaggtgttttacaccataaaccgaggcgcgacgtttgggtcttttagagcgaagacgcttccggactacgaaaatggtccaattctgaggttccatcctttaaagagagactggttactctgggttggtacagaatgcgactctggcagctgccactccaacgcctattttagtgatgatcgaggggactcttggaagaccattttgcgccatgccaaaaaatgcgagttcgagtataaggaaaatcgtccagacagcttgtacctcgtattctgcgagcaatatgaaaatgaggacgacaagaaacggctgcaattgatgtctacaactgacgagaggttctccgactgggaaactgttgaagaaaatcttgtggaatatgccaccagggctgaatacatcatacttgcttcccacacagataaagatggggcttggaaggctagggttagtgtcgacggtacaacatttgccgatctgaagtttccgcccaatgtcgtgccagctcaaaatctatacacccttgttgacgcctctgagcacgccatcttcctgtatgtcggagggagtaataataccggctcattgataaaaagtaacagcaacggcacaacatatgtccttagtttggatgccgtgaaccaaaacgactggggatatgttgatttcgagagaatgcaggctttggagggtgtcataattgcgaatattgtcagcaatgttgacgagctttccgacggagcacccaagaggctgaggacaatgatcactcacaatgatggtggtgagtggacattattagcaccgccaaccaaggacgccaatggcaagaagttcccctgttctgttgttgaggggaaaggcactgaagattgtgcgcttcaccttcacggatacaccgagcgcgcagatccgcgagatacattttcctccggttccgcgattggcttgatgatgggcttgggcaacgtgggggatcggctaaccagcaaagatgaagcagacaccttcctgaccatggacggtgggatcacctggaagtccgtcaagaaaggtagatatatgtgggaatatggcgactcagggtccgtaattgtgatcgtatctgaacagaagtcaacaaaagtcctgcattacagcaccgacgagggcgccacctggcaggactattatttttcggatgaggaaattgaggttattgatatctccactgtaccctcagatacctcaaagaaattcattctatggggcaaaaaatcggacgagcttgttaccgtcaatgtcgacttcagcgggctttatgatagggactgtgaattcgacgacaagggtggagatgtcagtgacgattatcagctctggaccccgaagcatccattccaggaggaaaattgtttgttcgggcatgttgagcaatatcgtcgcaagaaaccttcagctgaatgttggaataattggcggggaccgcatctgcacagtatccaaagaaattgcacttgcactacagctgattacgaatggtgcgtctacattctaatgatgtttcttttcttaccatgctaattggatagtgactataactacgaacgtcaaaatgacggcacatgcaagcttgtgcctggtttgaaaccacatgatccagttggctattgcaaagcccatccagatgcgatcgagtattgtgagcctactggataccgtcgcattcccccgaccccgtgtcaaggtggctataacttggaaatcaaaaccgcaaagccttgccctgggaagcaacaagagtcg

SEQ ID NO: 2784 - DNA, 1325 bp, Emericella nidulans
ttgttaatccacatgagagcgctccaatgcagtggcatttgacttgtgagccatctgcgccgggtcaggggtacaccgacagttccttgatgtttccgcgttccacattgatatacagagctaggcggctttcgggtccgtccgctgagccagcgtcattgccagactctttagggagacgctgcgaaggcgacgagataaatctgcaagaatcacattattatcacagctgctcagagttgattctttttactgaccaatgtatgaagcaagcaatacttgacgcagttggtgatacctgcaagcctcatccgcatccccaccttttctccttttcatttcttttccggtgtggatctggtgttagagccccgaagccttgaccatcacggaaggaccagcacgagctatctcgcaatgagtaaatgaacgtcaatgagatccagagagtgccgtgagtgggtactggcacagttcatatcttccaacttggggtgtgatccttggagcgttctcgacctatggatttctctgtcttcttcagacgatggggctagcagatgaagaatgtctgctcagaaaacagtaatgatccctcggatccaggtaccggcgctacctcgacccccaaggctcacttgtacctgggctgccaggcgggagccgcgccactgacagtggccgggcgatacggcgggaagagtcgaggcgctaaaacagcgacaactgacaggttcaactccggtggcacagcaacagcgttgccgccgttggattggaagccatctgggaggataaattctataggggatcgctgaatcttccagaatgccgcccggcttggaagagaacgccttgcgggtttgtgcaagagtctcttgacacgtgaccgaaggggcactttttgttaagtcgacccttttctttctcaccattcccagctaactgtccagggtgccagcttgtcattttgccgcatgctttacgatgttcagaccactatttccatgaaagatctcgaagggaacttatcctcttatggattggcttcctcggccggtctgacacttttgcatgttgcgaagggggagtcattttaaaccccaaccgttcttaaaaggtctggttaagggaagcctctctttctttatcatcccgaccatctttcttgccctgtgccaatacatctgcctgtttctcagtccttaatctactaccttacttcatctcttggcgtaaatatcttcaggccctttcaggacctctcactaaaccacattccttacttatcatccttctttcctatctcccccctctatttcccc

SEQ ID NO: 2785 - DNA, 1096 bp, Emericella nidulans
gtaaccacaattgcgtgagatgacgacttggccagcttcggttacccatgtacaacgagggaaacaaatgccgaagcgcggataccaccacccgaggggcgaacaggaacaacgtacctttcccacagcggcctccccgagaagtaccagtttgacgctgctgctcggttttggcgcatttgcgggcgttgattcagacattgtggacgaagcccaacgaagagacggttatatcgatcaggtcgtcttgcagcaaccgctgggttatcaatcgtagatacgagtcggtgacttcagatacaggaaaagcaatccgcagcctagacacaaaaataaaataagaaacaggttagagctgctggtctgtattcagtgctcgggatcaagcaggggttgtttgacaggcagcagacaaatggagaggcgcagagcacacaccagtacctggataggtggaaagagcggtggactgatggagatatgacagtctgctctgcagaattttagatgccttgcaacataggtaaggcagacagactagatcttgagagctcgctgtttgttggttctccgacagcaggtctcgtttcgtcagagagtcggtcgatgcgattacattagcaccgccagtccaaccgtcgtaatcaggcggagacgtggacagctagtgacgctaagcctattcaaatctagcgcattaaggcagtcacgggaagtcacggggactctagcagggatccagttagtagttcttgcgagtcccagcggcaaacaaagaaccgttggatcaagaaaaagtccctcattctcatgctctcggcttattgtttgcttgcagtccattgacagatctattggtttgactgtcgcttgcatcaaaaagtaaaacagactgtgcctgcgcaaagtactcggcctggaccgaccactccatgtctccaggacagcgcaatcgcagggaatcagagtatcgtccaggctccgataaacgagagaatgcaaagcaatcttagacaccgctttagtcaatgacgagtcccaatagaaagtatcgctgttgacacccaatgcagtctaatttgattgggcccagcca

SEQ ID NO: 2786 - DNA, 3238 bp, Emericella nidulans
gttgttgacaataatagatacaggcttgctgatggggcagaggccaatgcctgtgattagggagctgggttcattgctgttactgacagtattaatgtgctggttatctgcattgtgattatcagtagtctcaataataggcttctgctgattttggtcaccattgctgttgtggtcgctgtccgcgtcgctgtctgtgtcctggctgttgttgctgttggtatcagtgttgttgttgttgttgttgttgttgttgttgtgggagttgttggtgtctgctgtgggctttgtgatcacaagctcatccacactgtccaagggagcagggcgctgaggcagagccgtcatcaggctggcctgcagcacacgctcccgctcctgttactgattgcggtggtgtctcctctttgactttgcattgacaatggttggtgtcaggccgggggggctcggagggctcgtgaggtcggtcgagcagcggcgaatcagggtctggggggcagagatagccatttcggtgcaacaaggttggtgggaggacaaaggtgatggttggagaggtgattgagcagccaaaagggaggatagtgcaaggtagatgatcagagaagattgagcaagcagtgcgatcaatgggagcctgtaatgcaagcaagcaacaacagcgatagaacaagtaatgtgcaagataagagtaataggcagagggaataagtaacacagcaagagagaagagcaagaggaaaggaaaagagcaagcatgaagggagattatgtaatatatattgtagtaaatcaagcaagctgtgttataatgcaatactgaagccacaccatagcaacacccacatccctagcaacagtattgtaataagcttatttactacacaactaacaagctgtgtacgcgccagcgaggatgagcaatatacaatacttctgatcatgcaaaggtggttcctgacggtgcaagagcacaatgctaacatcaatgctaccgtacaacaacgcgacgacggcaaagtgacaacaacatgacaataacagagctctgactccggacaaacatgctgcaaaatatggacagcattgcattgctgtcagctactggctgattaaactgcagaggttctgcttatcaatgatgtgacatattgtcatgctcgccggcgtgacatgatcacaatgctggcaacatgaagagaagattataattatcaaggcatagctcggtcggcagcattgtacgtacgtcataaatacttgcataaactggcatcagcagattcagaatgttgtgcacaatgctgggggagcgccggggtgacgccggcgtgttgtgaacaaggcatggctgagggttgtcacagttgcaacatgcagacaggaggtattggccagcagatcagcatcttatttagcttagggtataatatgcaagcagacaatgccggctcagacaagctttgtacaagtattatgagattaggcattgatgatcaatgctaagatgccggcgtcagatcgatccagtgcagatcctgccccaccaaccatcagcctgcaacatgaacagctgaagtacatctgttacagtagggccagttgcacagtcaggccatcacacagtccagcagttgcaggccatgggcgtcgcgctgccacagtaatagagatgccaaaggtgacagatgcatgctgcacaaggatacacacatcaccacccaacattgccaggttagtaaagccatccttggatcatcatgaatactgtacaccattatcaggagacttcgacgcaatattagggattatattaatgcaaagggagttgcgctgctacagagaggtaggtgaccagttattgccagctggcaagtagttgtagtatgatcggccgcacaatgatccactctgatattgatcaggaccagccaccctgccatccttctgctagccagagcactagtataataacagcaccatattatcatgatagcagagcccacacagtgaatagaggctgatacaaagtagatataactgctgcagtacacgcccagcccgtgcagagctagtgtttgacaaggtcccagctggcgcagcgccgatacagcgccctccaggaacccatctaaagccggccagaacttgtaggaactggtaccaaggccgctggagccggccaggccagtaactgatagaggccctccagaggctgctgcagcgcgctgccagcacaggccggggaagggccgggttcagcccatcagtcgccccaaatatatataccgcccatagcacgagcgaacacctgcaaggggccacagcaaaccgtcagcacccatacagggccgggatcaagctagagccagtaccagcacgaagaccaagaaggcatgtcaccagcgcagcgccggggaccaggagggccagccaattatcaaaatcaagtcagggggtgccagcaaggattcagtatcaagccagcatggagctagacatgtgccaggaacaagcttgaggaaagcccgcacagggctggtagcaagtcagcacatgcccatagccagcgtggcgccggggaggagcaaggggggaggcagcaaagtcatgcccgaggcgctacgccagggcattgggggctccgcgcccggggagagcccgcagaggcatactgacaggtcattgcaatgcaagaaaagtgccagcgccagcacagagcacgtacactgccaggacatactagtaatatcaccaagccagagcactgccaggatcatgctgacaacctgccagcatagcaccagtacagaacccaagaaggcacatcacctatacaacccaggggagtgcaagggaaatactatggcatatagaataccagcacagtatcagggagaagctgggattagaacagaacagggtcagggccggtgcaacgccagctaccagcagaagggcagagcaccagcatcacaccagggaagtacatcgataccaacgcctctattgtatccacaaattgggctactatatcacttatgaggaggtctctgacttaatcccaccactcgtcagacagctgtggcaattcctctcaccactgagtcctaagtttcatgtggacgccgttcgctgtttatggaatctgcactcagtccagttatccggggacctgctccatacttgacagtctcaatgtcggcttctggcaccatcagagccgtccccgata

SEQ ID NO: 2787 - DNA, 2151 bp, Emericella nidulans
cgaattaaccttactaaagggatcactgtgactatgttgtgcaggtgtctccactgcggccgaatctacctctggtacttccgtgtatctcggagcaccccgtgcgatcattaacaccattttcgaatgcttgagcaatgcgatagcctgagagccgaagacactatgaagacacttgattcttgattgatacgtccattttcaggaacagcaaagccggggcttttatttatcgaaatgggcatatcaaattcgaccgagaaaatttgagactaaccactataggaaaactaaggcgttcttgcggaggacgcggacgaactgataagtgttcatagtgctctagcgaactcagtgcctcgtctcgtctcgtgatcaagggttcgaacatcacctgactgactacagagatgacatacataaaggatacatgggggtcaaacttgcggataaacttacataaactctggggtcgaggcttgaccggcgaagagttggaccattttctcgggcgaaggggagatccggaggcaagttcacattccacccggcaattcgacgttttcaacctggaccgcccgaaaggtggggtgttaagccgcgggctgaagatcctcggggttacgtatataccctgaactttagatcacaggagcagtttccacatgaagcatttttgaagagcaggtgtcctgactgcctgtaggagctgtagcaattagtgtttagcaacaagagtgggtgagttttgagtgtgttgactagacagggctcttcagcacgattgcctgatccgcagcacgggtccgtcgggactctggagccccccacacgtgaccacccggtctggtctttggctctccgcaagaccaaaagagtcattgctgttcgactttaccaaatcccattagcttcaccatttctcagccaggactcaggaatgactttttttatctgagcagccgactcgactcatttttcatcctcccggtgttgacagtgcccttctctgccatcacctgcaagttgtgctccggctgctaaatacgtcggcgacaacctcggtagtagtagttccagagctctccgaatccgaccttacgatccttgcagtcataagctcccgctgcctctgtccagattctcactcctgcaaatctcattatatcttcattttctccgcttctactcgatttatatcgcgcaagctgggatattgagtgtggcgaccacttgagcagattcactttcggcaaaaatgtggaagccgtcggagcgcctgatggacaccatcaggcattacgccagctttccagcaactggtgtttcgctccgacagatggttcagtttggagacagaccttcaactggtgagcacacttgattcctgagaataattttatcagtttccttgtactgctcacagtggctaaccttacgctttccccgatataggaactctgtttcgcgcctcccaatttctgtcagaagaactcccaatccgcctagcgcaccgtgtccaggatcttggagagcttcccgatggactcagtgaaatgccctccatcaagaaggtccaggattggtatgcacagtcgttcgaggtatgactcaccaaccatcatgcttgcggttcatcctgacacatgatctgaaggaaataattaacctgccccgaccaactctcacccaagaagtaaaggcgcgcctgctgcgcccgaacagaacgatgaccggcgggtcgaagattctcgccgaaacaacacaaaatccaagtgtccgcgagggacagtatcgctccgctatgacaaacggtaatggaaatggcaaggctgctgctgctgcacgaagatattttgtcccttcggatgaccagggaaactggcctcccgagttaaatgattacaacgaacggtttgcaaagactctacaacaaattaagcggcgacacgacagtgttgtgactacagtggcccaaggtattctggaatggaaacgaaagcggcagtacctgcaaatcgactcgacaatccaatcatttctcgatcgcttctacatgtctcgcataggtatacgaatgttaattggccaacacattgctctcacggaacaaacgcacgtgcgccatccgaattatgtcgggatcatatg

SEQ ID NO: 2788 - DNA, 605 bp, Emericella nidulans
aatgctgaggagagccttgtgtagtcgctagattaacgatagcagtacaattagcacgcttctggattgttttgctgcctcactttccctgactcttgcttggaagagcacttgagacagcaaattgtgccaatacggcacactttaggatagaactaagtctcattcttgttgaagcttgggcaaaattagacacgttcggctctcagtcagtcaatgcctggcttgtctggagacgaaattgtagcgtaggaatttcaatgtactctcaaggccgttttatagaggtactctccatgggggtgcaaggaaacatttccctattgactgcggacaaagtaaacacggattttgtggcgttacgcctagccttgcataatccgtgcataacctgtcagataaagcagcggccttcctttatcgcattgcatgaccacgccgccatacaagcaattagtcgttctgcgccctacaatgcgttcatctcttctggaaatgacaacggtttaggatccccaagtccgcatggccctctccactcgcataaccaatgaggcagtaaagggccgacaattgttgtgaaaagccacaccgtctggcagtcc

SEQ ID NO: 2789 - DNA, 1642 bp, Emericella nidulans
  unsure (1)..(1642): unsure at all n locations
ccaggataatggggtatccaaaaactaaaatggtccactcctgtaggaaaataagaatggataaaccagaataaatcctaaaaaggaggttgcaaacacgcgcaccagaagtggacagtcattattggggcgttttctataagccgtccctgacgcatgcatcttaaaaaggaatagtagtgcataaggtaaaaccaagccgccgtaaactagattgtaaggctttgtttaagcgacgtcagtcgctggtcaataccaatgaatcgccattttgaaaacttcgcgaaaccaaacccaagtctttcgagccaaagagctagtcctccacaacgccgaaactccccacgatctgaacgattgcccaacctcgttgtttaaggtcatccaaccaccgcacaactccgagggggtcaaaagagctgacgttagcaatgtgatactcaacacgctggccgcttctggtttggacgagaagacttctacccggcttgtcggacggcatgtgaagcccgcagaacccgggcgtttgcgtgaccggaacaagagaaccatctacaacacattctcctaggcgctcagtcaaccagacagctcgctcgttccttgccaatgctgcatatcgttctcgttcgttttgaagactttgttgcaggtctgatgcccattttgccaattgaattcgggcacgcttctcctcgtgtctagaatgatctgacacccgagccatcgcataactaggttctataccatacgcactggatgcaaatgataaagcctcgtcttgtagagggtttcttcggcgggacaagatatccctttgccgttgtgcaagcttcttggcagcagagtgccgaatccaggccatggtctcgcgatcgaagaggctctggactaaagctgtaaggtcagaggcaactagtggttgcatatagtccggattcatcagcgtgctagcatccatgatggaatcatcatttgacttggcggacgaaactgcgaaaggttgttcatctatatccgaagcattaaggtgaaaagtccttaaagaagcagcctgagctttctcgttaaaggagtttctgagattaatgatttgatgacgggtcagtaagtctgacttggctatgaggggtataacgttggtccaggtgctgagtttgctgatgcactcgacatcagaatgaagcttatctatgtacatgtcagtgaaagtcagcttactcactgccaaaaacataccgtgcgatatgaggtataggacagcgtccacctgtgaccctccattaccagctaacatgttctggaaatcggcatttgttgattcgagggctgacacagcacgagagagctgttgactgatatatttaataacggtgtcaatttgtccagcttggctcaatcggtgcccttggacatcgacgaagcaaatattgcgctcaaggacgacttcgcctgagctctttcgccttcgaagaacacgagagtcttctaggtctgaccaccaagtaggataaggctttgaactagcatatatttcagaaacgagcgcaggtacctgggttaattgagtcgaagtgtgcgacgttcggccgcggcgtgaaagcgacaggantgtggaaggttcatcaaaaggatcaacatg

SEQ ID NO: 2790 - DNA, 1017 bp, Emericella nidulans
gcccgatttatctccaatcaaaaagcagggaactgaagcgtgcgatgttcgtattccttaggctgacgctggctagccctaactcgaacagtgccgccgcgccccgggcaccttgcagcgtcaatctgccttgcgccttgtgccccgaatgatgttaggcattcagtcattccttcctcggattacaccagtacaggtagtcgcttatctggcgtcagggggaagaagtggccgacgcattggtcctattttctgtgctgttacacttggtagttatggctgattccactgctgctatggcgacttcaacgctgaagaagaagcatgcctctatttctctacaccaagagaatatgaatgtggatcggatggaaagggtgaaggaagagtaagtcctgtggattcgtgatttcgctctgtatattgacgctacagaccacatctaagtactaccattaccaagcaatccgcgatatcgatgtccacaaagacatccaggacaggagtatatgagaccgaagaacccaggtccaatgctcttgacaagaatagcgatactcggatggctaccatagaatccctcctggctgagaatgatgtcctccaaacccagatcacgcagctaaaaaccgcccttcatgacgcccagaaccatatatttagtctgcaaccacacatccaaacccttccaaatgccgatgcgatcacattattccaatccctcgtctcctctgtcgagaactgggtggacaactatctcgcggatagtctcgaggagaaggaagtggccgccgacgcgttgaatatcaatgatatccgaaatctgatgaatttaatccctccagagggaatggcggcgttcaataccgggaatacagacgtggatatcaatccagcggtgatattgaaagttctggttgagagtatcttcaaccaagaatttttcaccgccgttcccaaggcctgagatggagtttgggatggaaggtgagagagcaatgcggggttggagcccaa

SEQ ID NO: 2791 - DNA, 5070 bp, Emericella nidulans
agacttacaagcttttcaaagagtggatatttgcagccttagaattaggataaatagggaagtataacaacaaaaaaaattgattcccagctccataagcgccttgcttgcaagcgacataaaaacgagatctacgatataaggctataaatctatttccaccaataaaacgagcttttgttggacatagactgtatgccagtgaaaacgaagatataggtatgacataccatctaacgaaaattgcgagactcgatagaggtttaattgtggaggtccagcatggtaccgcgggcagaaaaacaccggccacttgatcaatcctcaaacttgaatgacttgccgccagagatgtcaatagggccaccgcggtacgagccacgcttcttcttgttcttctccttggtgaagcccttgccacgtgtgaccgaaagatccttgtaagccttttccgcgtacgcgtacggcacgtactgattggaggggtggttatgagggagttcgctgagagcggctagaggtgtaggacgggtgccggtgtggtttttcttgccgttaccattgccatttctgggagctgggctggcactggaggagactgaggcttccgatgtagcggcgggcttttgggtggcttcagcctccgagttctggagggtgcggctggtgctggaggactcttctccagaggacgacgaggagtccgaggagccgctggagcttgagtcggagggcggcaggggtgtctcggtggcagccttgagagccttcttgtcggctttcttggcggcgtccgattcggattcagacgaagaatcagacgaagaatcagatgaggaatcagatgaggaatccgaggaggaatccgaggaatcggaagaagagcttgaagaggagctgtgagaagcatcggactcggactcggactcggactcggaacttgacgaagagtctgagtctgaatcagagtctgagctggaatcggatgagctctcactactagatgaagaggactcttcagccttcgatgtcaacttggttttcttcgcctttggagtttcttcggagtcagagccagaggaagaagcgctcgattccgctttgcgcttaacgcccttcgcggcagggccgggagcgagggctgcctcatcctcgtcctcatcatcagcgtcactatcggaggagctcgaagatgaggaagaagaggaagacgacgaagaggccgaggaggaagaggaggacgaggacgttgacgaggacctcctgcgctgaaccttcggtgcttcagacatctccacatcagagtcggacgaatcagagtcagaggaactgtcggcatcactgtcactgcttgctgagctgctagaacttggaacattcttgcggttcagttgagactcccaactctggaagatctctaaaagagaaggaacatcggactttttgcttgcactaatcgacttttttgccagctctttggtaaaggcggcgctcgtggaggaaaacccatgttcggataggaaagctgaaatcgccgagatcagattcgcaggcagtatagtatctttcgtggccttcgcctgcttcgttagggagttgtcagtcgtccgacgcagatactaagttcacctagatgaccgcataccttcttttcccccttcacagagctctttttactgtgagcagccattttagggagctgatgagcgctgtgcaggtcaattcgtccttaagcctctgtggatagagaaagttgataaagaaaaaaaatggcagaaaaaaaaaaaattcacagcactagggcggtctctcagggaatagtgtattattggctgaagctttatctgaaatctcaagtcacctgatacgaagaacgaacttactaagcgaccgttgaaggactcgatttgaactatctacttttcttgaattgtgtgtaatagagagaatttatggcaagatattataacccattcttctatgatatcttgaaatacaggtttgattcaggttcggctttagatacaatgaatacgttctcattacatggtaatacctcagtgcaacttgagtacatggtgaaggttgagctcttatgtacggtgctgttacagccacgagctccgccgcccgctccatccccatcgataatgagctaataattgacccgctggagtcgctccttcgttttgcacgggcatcgtctgatatgcaatcctgaccccgctaaagcctctaagactgtgatcttagctggaataggattcaaacttgattgcctccatccgccctgcgtgctccgcctacgtttcttcggtttctcgatcatgttcacctggcttcgaatacctcctgagtaagcaggctgttggcagttcgaactataagcatgaatggtcatgatcgcccgaggggacctctaggagatcctgtacctcaaagagatcctcgccggcgcgctgagagtcgcgctggtgggcatggggggcccggtgacggagcgtcaagggccgagaaattcgaggacgaaaagcggaggattgttcaaagttgcttttcaaagaaggatagcgatggtgcctgtatgtttaagccaactttgagctgaacgcttcatacacctgctcgacgactgtttcgcaaatcaggcctcctgaaacgtcatggagctgacagccctaccacttctggtcaagaatatggctgacatttcgttgatttaccagtggtcgagtcctacattacacacgtacggatcatggaagatggcgcttatccttcgtccccgcccccgcctaattcttcccctgaaaacaagaaggcgagagtcataatcgtcgctgtgagacggtccggaagggtacgcatgcacaaagctagggagaacaatgacggctctttctcaattggcaaaacatggatgctggatgacctctccgccattaaatcatataatgcgatcgtgccgtctagccctcaggaggaactgcaaaaacaatgggcatcgaacgttggctttctggtaactgtgggaaagccttactactggcacgccaaatccccgaaagagaaggatttctttattggcagtttggtgaaaatctataaaaaatataccggcggcaaaatgccggatcttataggctttgatgagcgtgagctccagcttcttctgggaccgcactattctggcggaaagggaccatcttctggctcgtcgaatactgaaggatcttttgtacccccgcgtccaccttcgtctcagggtaaccgtcctcagtcccctcattgggctcgcgcacggagccgcgattcgcccaaacgaagaccaaacgaggaagatctaccaatacgtgctcagcgcagccgggaacagatgagcagaccctctaccgcgcagtcgggcaaaagtggtccccctccatttgcaccgccccaacatcctccaccagtgctcccagttgaccaaggggatcggccacctccgcgtgcaatggagcggctcgccggcgatccaaagacaccgaagatcgctccggtatcaccgttggaacctaagattagggaaattcctagcagcttgagaacggcacactcaagggagaatattagtaaagaggctgaggaagtcaacttatccagcgtccagacggagccccgtccaccgtcgtcacgaagcgggaaaatggtacctgaacctcgtcctatcgtacgtagcgagaactcgagctccagtatacccgaggctagacgactcaatgatgacattgttccgggccttgctccaagcgagctgcgagtgaaagaaccaaagcgaggttctgaaacgccatcgtccacatccaagggacaaccgacgtcacttgcaggagaccaattgagcagctcaaacaatctgcaacttgccgatgtaccaccagggctgttggcaggtttacccgcaagtaacaatgccactagtgccaagcctgtcgagacaccgcaacaagtttcggagagagaagagccagaagaacctgtcgcggagagcaaggcaccttcatctcctattagccccccagaagcccttcaggagaacgatgaagatgaccccgacgctcatcggcctggcctcggacctatgattaaaaagaagtcaaacaaagatgtggcgggcgcgttccgcaaagctgccaatgcatatggggcgttcaaaccacgaagcggaggcgccggcgcaagacttttagctgccgcgaagaaacaggctgcctcagagggacctgatgggatcaccagtgtcgtgcctgcgccatcccttgttcgaagagtagaagaaccggcgaagacgacgactgaagagcgccctgaggaaacggctactgtgcctccggtgtcagagaccccagaaatcccgtcgacggatgcgccgcctgtacctgcgccgcctgtacctgcgccaaccgtaccggaaccaaacatacaggagcctcccagggttgagattacggaagctgttgctgatgctaccgtagcaccttcactagatgcccctaaaaatatgccagaagcagtagctgtccgagcagatgaaaggtcacgttccgtatctccctctcgcgggatcgtcggcgcaggcgtcatgaagataacactgtcaaatattgtcaagcactcgggctcgatccaaagtccttggagatcggcgagtggaatttgatgatattctgaccgacctttgctggaaacggcggctcttagacgagaagaaatttgagaccttaaacagacgttcccgagagattggcgcgtggagctacaagcttgtttgtaaccttgacaccagaaagcaagcggcccagttgttaacttattgcaggaatttgagagggagagttgcacctacccgtatttcgccaactcatgggtttccaagcttttttttccggtgtaaaataaactttcgagcttttttgaccccttaggtagccaacccccaattttttgggaaacctggggttttttacactattaaggggtgtttggggggacttatttggggaaaaaactttttttttttaataaaaagag

SEQ ID NO: 2792 - DNA, 1684 bp, Emericella nidulans
catggaacacaccgcaactcacgcggaggcacatcgagcattatcggcgacgccgtcgtccgcggtgaccttttccgctcgtcatcctcgcaatcgcagtcgcaatcgcagtcacagtcacaatctggtagcggtgccggcaacaacaacatcgccatcagtatcggccgatacacgttcatctcacggagcgcaatcctccgcccgccctctcgtctctcgcgtggtgtccacacgtacacaacgctgcatatcgggtctcatgtttttgtaggggagcggagtatcgtcgaggccgcgaaggtggaagataatgtgacgattgggaaggattgcgtgattgggtcgatggcgattctgaaggaaaggtgtcaggtactagacgggtgcgttgtgccggggggcatggtggtgccgagtcattgtgtggttggtgggcagccggcgcggattgtgggagatacgccaattgcgtacggggttgaggggctggaggggggattgagtcgggagagatatcgaagtatccgataggtactgtacttggagtcggcctcggttgggtggagtttgggttattggttttggatattataccccctttgttcgcggatagctggcctatcgctcaaaaatagttgagatgtatctcaggcgctaatatgtacaaaaagcttctctgagagaataaatgctaacccatcttctgcacttcaagctcccgctttagccggtcctcaccctcctggtaggggatacctgcatcttcgcgcgccatatcattgagccaacgctcgttcggcttgattactccccccttggagagcttcgaagcaagatacaaccagttcagcgagttacccaccgtgctcacctcgtcacacacatgggccagcgcgaactcatgcatcttcttccacagcacgtcgtcggtacacaggtcgaataaatgcttggccacagcatccgtatcgccgacatctaccaagaacccgttacctttgtcgattacctgcaacgggataccgccggctctggtggcaataaccggccgacccttatgaatagcttcggaaaccttgacttcgaacccctcgcgggtagaaagctggagagccactttggctttggacatgagtgcgttgaggacttggtcagatgggccaaggcggacgacacagatctggtcggcgaggtcgggaatagagtcctcaatatatctgacggccaggtcgtaaatgatcgagccatccgggtcatcgacggagccgtggccacagatcaagagcttgggtataggcttatccgggcaatagtcctgcatacgctggtggaatttctcgtaggactcgattacgtgcgggatgcctttggatgggtcgaagcgtgcaatctggacaatatactcgtcttctctcgttagtgtagttttctcaaagatacctgcgtgaactcacctgcaggatagtcaatgaccggcattcctgaatttcgcacccaggagttgaagattcgtccgtaataggcgatatcttcgtttctcatgttcttgttcagtccgtccagccagtctgtcgacgccggcatgtagcccaccttttcacggggaacgatctttggtacgaaagatttaacaggatggctaacgaaaatgtcggccttctgaatgtccttccacatggtg

SEQ ID NO: 2793 - DNA, 2915 bp, Emericella nidulans
gcctccgtcttgagtcagatcaccccggcgctagctccctgaagtcacgcatagttcgcctctggtatctccttttgttccgacatatgcccagacgtcgcattacccgtcgcatgcaagttcctctcgacctcaacttcccgatttcggacgtcattcgcccctagtatctccctcattccccatgtacagtcatgttcaagatacacattcctggtctcgttcggcatctcctcgaccacagcttccagagatcacgcatcactcgcctttgtctccctcagtccccatgcacaaccacagtcaactgtcgcatcagtcgtcccgagagatctctcctctgcagcttacggaacgcgaagactctccaccgcctcctccgccgccgcctcacagagtcgcagtccaacgtcagccttccccaggcccggccgttccacgccaattggatatgaacgatcgctatgtggtcttcacaaggactccgtctccagccggccattcagacgcgaacgggcaaacgccctcaccattgcgagacgcaatggaagatgtgatgacttcgctcgaagatatggggatgccacgagactcacgttcgccgtctccgcagcctgaattcgataatccctggtcaccggctgcttttgactcgttgcgtgaaagccgtcacccacaaagaaacaatcggccattaacatcattgggatttgaaggagaaaaggaattctaccatagcgatgccgtgcatagaaacagtgtctacacgcatgatccttttattgagggcccgccgcagatcaacaactacgtacaacggatggaaagccgactccgccagatgcaggaacaaggacgtcgaggctccgaagacatacagcctccggttgaaaacagtgaagaggatgatgacatgcctccaccaccgcccccaagacatggatcgtatcatggacggcacaattctatacccgctcacttgccgtccttacgaagccggcggtctggacatgacctcaggaatgatatgttgaatcgaagcttcaccaaatcgtcgaatacgacgaactcctcgagtggcgtgcacagcaatgccaccaaccaaacttcaagcacggacagaacgagccagagtctgatgagcggaccctccgccggaggttttagcgcaacaagtgctggaagctacgcaaggaggggtattgcagcaggcgaaaggcctagcacggcagtagatgcggtccggtcgagaggtttcagcgatctcacgcgaatgccacgtcctgaatcgcctatgagcggcatatcctaccattctagtcataacacttcccgacagggcgcttcttctgccataccttggtcaacatcggccactacgccggaagaaccgaacagtgtgtttggaggactggccacaccaaaggcgaagaagcaagggttcttcaagaaaatactcgagtcagcaaagaccggcgccgcaaacgccagaagtagcattgccgttggacaaagcggagggtctttttctccgaccaaggggagagccatctcaccaatcaggtcatcgcactcgcatcgagacactgctgcgcgcgagatgggcacgggaaataaccccatggactgggtacaagtgcggcgcgatgtgaaccgagcatcctcccccagtcgaaacgagagaattgagagagcagagaggtgtcagatgatggaccatccggtcatatatgcagtggaagaactatatgagaccgcggaaggggaagagagtatcgacggcctacccattagcgagcccactgattttggtaacgtcaatcttacactcgtcgacaagagcgcccgtttcgtcaacagtcttcctccaatgactaatccattgagccttgcgcaaggatacgtctgccgcccatacaagagtgatgtccaaaggctgcgcgctatatttacctgggtgagcgagaagattgcgtgggacgagccaatagaagatgccgacattgatctgaagcgtgttctccaaaccaagagaggctgcgcccaagaagtcgcctatctagttcgtgagatgtgcgctgcagtgggcatacatgccgacgcaattgaaggttttctcaagccaccaggtgaggtgttcgatttggacagtctttcgcgtccgaatcattggtggaatgccgtgctcgttgatggtgactggcgcttcatggattgctctctcgctaatccaacgaacccaataagaaaccaattcgtgaccacgaatacgacggtggccgagtcttggtatttcttagcccgacctctcgagctctgctatacacatgtgccgcttgagcctgaggggcagcatatttgtccccctatctctccggatgtcctcctcgcacttcccacagtttgtccgacatatttcaaaatggggctgcaatttccagattatgacaccagcgtatttcggatagaaggactggaagtccttcaggttcgtattttggttccagcagacgtagaatgtgctgcggaggtcgaggcgcctggattcgctcgtgatgccgacggggacttctttgagagtggagaaatcgtgcggaaacgagcgcttgtccagccagattgggtcaatggtcaaaaacgcataaccattaaggctgttttacccggcgacgaagggcaaggtatggtcaaagtttatgccggccgaaaggggctcatgcactccagccgagacatacctcacccgcttgcctttgcactcccaatcatccacaccggagaaaatcctccatatgaatttgtccttcgccatcccacccctcacgctcaacgccacgacttgtacattattcaaccgcagtgtgctcagctggctgtaacacacattggtatttgcggccgcaacatccttatcg

SEQ ID NO: 2794 - DNA, 2240 bp, Emericella nidulans
atagagaaaataatttactcacaccaaagagaagattaaaaaaaaaagtgtttacaaaaaaaggccgcttttagggaaaacagagggagggcctcatcccttttggcttccggcccttaagcttgtagcggggcctcactatatctggcaagtttctgagagggaagggtctctcttctaaggatttatcctaaacagtcagaaatgattaagcgctctcaccgaaagacactacaatattttgttttagcgcttctgcttcttacaaataatttggtaggttgggcctcagttcttcccgcaatttctccttcctggcttccctctcactcttggaaaaaggctggttcaccgccgcattggtgtcgacttgcggcattcgcggctggctgccagatgcttctgctttctttgtcgaggaacaaacttaggcatctcgccaaccggtttccagctcggagatcaaaaaaaccgaataccactggggtaggagtcgtcaatctgttgataataatgaaaagaatctagaaaatttcaggcggtggtggaatactgccgcaccgccgggctgatagcgtcaccgccttctctatctccgattctccgccccctccatgtgccccaactgctatttgtatacaaagcacgcagtccccgctggccataacactccttcgaaagagtctcaatatctcccaatcctcagatggtcaataataatggcagaaacactcgggctacacggccttaacttggaccttcctttccccgcagctaccaagcgagtatctgggaatatcaatggaatccacacagatgtcatgaccatcaagttcagtgataaaatcatgattacaatatcacaaaaaggccgacttggccattgggtcagtaattgagctccagataccaaaaccacgctgaccggtcacagctccatgttccactggaaaacaaaaacccaggcacagaaggccagcatagaattccagatcctgcgaatgatggtcttcttccgttgagtaatttgacggctacgtcgattcttgggggtcgtgctccgggacacgaaattgttggtcagctatatgcccgtcagatagcgagtgccattgtcaccaagacaccaaacgagaaccgcttgctggttgtcggactaggattagaaacagccgaagccgaccgagacgtgttcttcgctgtcatagaccttgtccttcagtgcatctaaggagcaagagacagtgacttacagatttagatgcagaaacgttcaccctgtatctttcttttctccccttcgaccttcaagttgtgaagtttgagaccataaatcaatactaagaggtaattgcgttcctctacagtaaatctcttctcttgaggttcaatctgccgaggaatatgaatgcgccgctgaagagagccttgatcagaagtttctcattgaagcaaaccaccttccagttatcattgacgaccacggtcggattatagaggactgatcctctggattcagtcttccaggagatatataaggatcggcgacgctgcattgctgtttcaaagtcactcgatccaagcacattagaagcgacacaaatgggttgtgccatccaatcatccgatattgtggctacgacccggttgctcgtttaagttgagttatctggcatcacaagaggataattgtgtgagatgcttgttaggtggtccgcggaaaaggcaccaaatgttctataaaacagtttgcggtaactcagggaatggtacaggacttttgaagcctcatggtagatggcttggaaccctttaagaatagcctaggtctccagcctcggtgcgttttgagtctttcgatctccaaagtgctgccgccatgtttgggcagctcttcataaatgcgaaatctgacatcaaacgggagacgataaagatagctgctcgtgcttttctcttcatctttgagaacacctctcacgaactttcaagccacgaagacaatcgtatcatgaaagcgggcttgcttactacggtcctcgaagtgacagatgcacccgcccaccacatcgtgggcctgaagaaacgcatatcgacgctaagtcaacattagcagtagatctttcttgctggcctacagacaattctactgggaatttttcggttctagaagagtatagcgctgtcctaaggcaggcttttttttggaagcttaccatgcatcctcgcgaggtatctct

SEQ ID NO: 2795 - DNA, 1651 bp, Emericella nidulans
tctagtaacggccgcgtctaaagaaacaaccgagtcccgaatagctgtgcccatctggcgagaaggcgaagggattgcttatgaggggctcattcaagccggcccactgcagctcgtcgatcacaaacacctgaccctccagctgcttctctttgggcggatacagtgccaatctgtccttcacgccagggacgaggtgttccaagctttcgtacagcctcgtgttctcgtgaccaagcggcagcttctggagagagccattctgcctccaaaaatcatgcaccgctagcgtcctctcatccttcatccacatcagcgctccgataggttcatggagcaccgttttctgcgccgcaacggctgcgtccgttagcgcagagcggggcccaatccagctcatcgcgctgttgtagttgcaccacttatagctgcgatgaagcacgtcgtgcgtcaatgtcactccgtcgtcgaccgtctcccacattgccaacgtagactcgccgatgggtttctgtgccgcgaccacgcgcatcacggtacgcagctcagccatctggaagtagttccgtctgtctccgttggccaggatcgtgccgttgcgatacacgatcccgcggatctgcgccatgtcaattgcccggcatgtcttctctgggggataggacgacgggccgacttcgagccagacagttaggccgaggccgcctagcagcgatacgacggcgttgagaatgacgggctgaaagtgctcagagaagtcggcgagaagaatgccggtgaagaacgactgagcatcggctgggcgtttcaagtgcgtctggagcactttgacaatggcggaaatggcgcgcatgctgttgtcgtcgccattgtcgccgcagtcgccagaatcagggctcccgtccgattcaaccagtttgcggatttgcagtctagcaagaatgtgctttgctgtcgtgcttggcaaaacgtcgctcacaccagcctgcaaggggtccagcacaactgcgtcccattgggaaaggagccgagcctggtctgaggtgggagggttcgcgaaggcaccgagatacaccccgaaggatctgggctcgggtactgcggcggtgggggtatacagacgaggtgtctctcgttttaagcgctcgatacgccgcgctacatttgaaggaagacccgaaagttcatgtcgtgtctgcgttcgtcagtgtcatctactgcattgtgcccatgctgtccagaatatatgcgcttacccgccagtagtggtacaactgtcggccaaccagatacaggatatatacaccacccaagacgattgtcgcaagcaagcaggcggccagtgtctataaatatcagtttatctgctagatccaaacattgtgaaccagactgacctgctgccaccacgtctgcgtcatgcgctcccatcccgtcgcatggaggcccaggtattcgatacccatggcttctaatagggaggtctcagggccgagacgaaacgagggacggacaacaaaagaaggaagtaaggtgagaactctcacagcagagcggggaagagtgggttatgtagtgatgagatcgcacagcagggtagcagcccgataacccagcttgcactggccaggatccgcactggagcctcaga

SEQ ID NO: 2796 - DNA, 1399 bp, Emericella nidulans
gtccaaaatgggtgtttcccccacaggctttgatggttgggaggccgaggaaaggttaaggggctagggctatataaagggggggggaaagggaatagggggaaggggcggtgggggatttgccagggttacccaggttagttgggttgggcttgaaaaaccagacatttcccccaaattggctcgaaccgggccttattgtttgtaggatattttaggccggctttgttggggggtccccccgttcccttcttttagggaggcggggactattccatggatccttgcaaggcatgcctcgggtttttttggggtttgggcttggggcttcgcaggcccccaaagggccccgggggagtacccacatgttaaggttcggggtttcccaaagggcaggggctcagcttatccatataagagtgaggaaattgggaaaaattgggggtttggagggcaggttttcatggcagtcacgggggtccgaaaaattctagacggtctggggggccttgtctatctagtcacgattactgagcttggctcggtcgagtataggccgtttttaaaagcccgaggggctgcctgtccgggatccctccttttcgcgcgcatccggtaaggggcttggctctctcgcacaaagtccgatcgtgtttgtgagaagaccagtcagctattttgggatccaacgctcgaaatcgacccgtgattcttccagccagcataagtcccgactggcaagagtcaaagaggccgcgacttccccttccgctatctcgccaggaaaagcatgcgatactgtcacccaagatccaaatattacggttccctcccctcatgaaactaaaccgtcgtcgatcgtgtcaccgacgcagacatcttcccgacatcactctaataactctttctacgcccagctccaacgcgagtcgcgtccgtttacagacgctgtggcgcagctcatgctaaattctgtcccattacatctcttcctagccaagcctcagagtggagaggttatctggaccaactccaaattcgatgcttataggcggacgaacctcaagagcaaaagtcgagggatccttggcagaacatccacgatagcgaacgcgataatgtagctacgaagtgggcaaaagcgctacttacaggctcacagttcacagaacgtgttcgcgtcaaaaggttcaacgatgagtcggcctaccgctggttcattttccgtgccaatcccctgctgtcatcaacaggtgaagtcctatactggattggatcctttctcgacattcatgagcagcacgtcactgagctgaaggctgcccaggagcgagagaagtttgcaattgatgccaagtatcgcgcgttctcaaattcagttccgcagatagtgtttgaa

SEQ ID NO: 2797 - DNA, 1177 bp, Emericella nidulans
gggcgtcgctgttcaaggctgaacagagcgcatcccaaccctgactctatattttaaacattggctgacgctgtttgattcgcgatttattgaagacctgccatgcgcgaaaagtgagttcccgcttccccccctccgctcccgctgcgaccgtggcctggccactgcacggctgcctcttaagaaatccgctaaccacacctcttgatgattaggtccgctgcgacgctgccagtctaggtgtgccttgcaccaactgtgtggctttttctatcgagtgcagaattcccacgccgaaacgcaagaagagccaggcgaagcccagagaggtcggcgagtaggtggcaaccgtataccccttcacgtctaccatcgactgaccactttatcatcgaatagtagtaacggtgatggcgacgataaatctcagagtcaagagaagcgcgaagagtccctgccgatgcccggcaaggatgcgtttggttatcagaacagcaacaccagcaacaccaacgccatggcagtcaacggtatgcctgtgacaacactcacggaagcccaagccgcccaacaagcctcgcaaaattcgacatacgctcaattcatgaagccgaaatttgcccgcgcgcccataaaggaagctggaagggttgcatacttgggcgagtcatcgaatctttcactcttggttcaagaccgccatggaacgaccgacgtggtccattattcactgcctaccaacatacgaggttctcgcgcgagagtctccgacttggataatcttgagttagatatcctgcaccagcgcggtgctttcctacttccgccgaagtcgttgtgcgacgagttagtggacgcttacttcaaatgggtcgcacctgtcgtgcccattgtcaaccgcagccggttcatgcgccaatatagagatcccaagaacccaccttctttgctccttttgcaggccattcttttggctggttcgagggtctgcaccaatccgcagctcatggacgctaatggctcgaccactccagctgctatgacattttacaagcgagcgaaagctctatatgatgcgaattatgaggatgatagggtgactattgtccaagctttagtgctcctgggctggtactgggagggacctgaaggtgggtgccctaagcagaaaatggtg

SEQ ID NO: 2798 - DNA, 4047 bp, Emericella nidulans
tttaggtaaagggtagtgtctggggcggcacctaagcagtaacgagggcgctgcgtctgcattctcgacatgctcagataatgcaagtcctgtacatcacgacgccgaccgtactaccaccacagagtctgatactgcaactgaatcgccatcgccgctttcattccccgcctgcgtccccatcgtacccgtcgtggtagcaatttaccccaaagtcctacgcacggcctttgttctgctgaacctgcacttgcccgattcccatctcatcagcgaatttcgcgcaacaatcacctcccttggccgtgaatccgcaacgctcggccttaccactagcctcttcaatgacatgctctatttccactggcgcgtcacgcatgatttccccgaggtcattgcgttatgccgcgagatggaagtcactggtgcgcagcccaacatcggcacgatcaatatacttgagggtatcgtgcgcgagcgcaatgaagacctcgtgaagcgtcagtcgggcgagacctcggagcagccatggtgggatttccccgataatcggagggctatgcgtaaattgttaggggaggacgggatgcttgagaggttcaggaggcaatatcgcgaaggcaaggagagaaagaagatttggaagccgtacctctaatcctggaacttaagggctttacggtattttcatcttgcaaaaaattcactatcataacttaccgcgcgttagatctggcaggatgtagaaactagagtaaaatgagtatatatcaaatatatcgtcaccggccgtacaagacctatcttcaagagaacgagtctatcgagttgtctactcggatatttgtaaagacttgggctttataaatctttactgttccgtcaaccctaacgttatctttccggaaatgagcgtagcgaaaatactaactccgaccgcggcaaaagagtccttggaaataaattgtctaaccataagtcaaatgctcatttcgtctatgccaacaatgggaattcgtgggctatttacacaacaacagaaaggatctagagccacccactcgctgtctacaatcagcaaagtgtccaaaagagacaataaagagcattgggatcactcatatggaccctgaaaacggatacctcacagctccctttttttccgcttgcaagaataagtcatgcaagaaaagggctcttttatccctatttgacactcacatacaaagacacagacatagacagaatagccatcacaacagggtatcaacaccatgagaaaatgctttcaaaagagaaagaggagtagtagaagtaggagagcgacaaggaaagaaagagcgttaatcgtgaggagcatatatggcagagatgcgaaacggcaacggctgaggactgaatgccctttagccgagaactagagcaaacatatacaccagaagatgcgaaaaacagcaagtgctaagccaccatatgttataagacagttaacggagacctgttctaggttggtctgtcttcctgtttatgcttttgaggacccacaatggttcaatcagcggcggcggggggcgagtgcggagcattggctgtagaaattgtaattataggatggtgatcgtcatcagaattcattccgtagctcttcgcgtgactgctgctggttggcatcgcggtctttgcccttgcgcctggagggtgcaggcacgaaatcgaagaaattccggtatttactcgttgtctccctagtcatactagacctacgggacttggcagcatcgggaaattcaagtgaatatgttgaagagttttttgagctccccgtgctatcccgaggttcagaccaccttggtattgaaaaaggtactcggctctggtcccaagtggcagaagaggaactcggaggggtctcctcatcggcttcaggagcataatcagttgaacgccgcgggagggacggccgagaggcaaagtatccgatggagttgcggtggcttccggtaaaagacgccgctgatggcacaacggtttcggagatgggcgctgaagaaggcgccgcggccggagtagcaggtttggatgagctttcttcgtaaagtgtcacagaacgctccagagaatcaaccaattcttcccacttaacttcgaggttgccgctgggacgctccgccaactccgccctgcttaagcattctttagttctctgttgtaagcggatagcaatctcatggaatttcataactgcagggtctaattcttccagttgtgaaagtctgcctggcgcaacttctagccatattctgatcagattggcgaagcttcgtgcatggtcgatcaggaaaggaaggctggggaatccctcgcgcgacggtggcggaagacgaccgagaatctggatgggagtggcataggatggcgtaacgatgggagtcgggcgatcggccgggattgcacaaatggagtcgacaaatgtcttgaactcattccggttgctgttaaggaatttgttcatcggctccatccacggctctttgcttccgaatgttgtcatgttggctaggccctgtagggctttggcaatcagtgttagggtgcgttgggcgcgcggtcggggatgatctagacgcgcatcagtaaggtgttacagccgtagagaaattaatgtagatttacctttcaacagtccgaacagtttcggattcaggattgccggacaaaagaaccgcaagaagaggaatccagatacactgctgtacgtgactgagcggaggaaatcgccataacggtcatcagcacaagctcgaatgtgtcgaaaaataagtcttaactccgccgggcatcgtgaggctgaactagctatggacttccaaacactcgtagtaaggctgaccagatttttccagttgcgctcgagatcgtctgcccgatgtatccgagacggatcaacttcgcattcaggatcggtttcatcgatttcgtaaagacgttcaccaatcgtttcttctaggtattccttgcccagccgacgcatgtggaaatcaagagctttggtgagaagcgagtttcctcggaaaaggagatttgcttctagggttgcagtgcgtcctagatcgcgaactaggacctctctatcttgaccgtgctctctggtgtcgttggaatggagccgcgatgtataccgaagtctgttggccgtggactccttgtgaataccatcaatctcatcttcaacgagcgcggatatccattcgaccgtcgaccctgacacttgataaatatttataagtgcttcagacagctgattcaattccgaagacataatctcagccatgttgacagtgaggccgttaccaaacgagtggagaatttcggacattggtgcgtactcctgagacatgagcacaactgtctcctccatccgagctttcatcaacatctcgccgacacattgatctctatcgtccagaatcggccaccacttttcggtttccgtacctggttctaggtcgtcgagtcggatatccacccttccacacatggcgtcttgagaagatacctcaacatcatccaatagacgcgttggatttgtgtcctggctcaaagcatatgtaccatgcgccactaacgaccaatcacgttgtgctgggttgagagttttcaccattatggaaacctgagacagaaccggcggaagatcgttgaaagtaaactcttctcgccagaagggattggatgtacggtactttacagccgttctcgcccgaatctcgccatctagaaggacctccgtgtagtaatcgttggttgcggatgccgcggccgcattaaagtgagaccgcgactgtttacgactcctaggcgtctcatcgacgcctttattaccgaacatcttcgcttcagttaccttgacggttagcatcctctcgattcggaacatatcggtaagggatgttgtgttggcattgccagagtcaactgagcctggtgtctttacagtgtcatcctcgggcggattcgccgggccatacagttccggtgtggtaaagg

SEQ ID NO: 2799 - DNA, 3867 bp, Emericella nidulans
actcccaccgtcaccgacatcagtacgttcgcccgattctataatgattttcccgcggttttcttggaaagagcgaaagcaggataggggcggaggaccatggaggagcgatggaataatagcaaattgccatgagaaagaattgtgattgctaacggaggctctttgatcatagtcatccgtgccacccacactcaggaggttcttggagagcagggtcgccgcatccgtgagctcacctccctgattcagaagcgcttcaagttccccgagaactccgtttccctctatgccgccaaggtccagaaccgcggtctctccgctgtcgctcagtgcgaatccctccgctacaagctcctcaacggtctggccgtccgtcgtgcctgctacggtgttctccgctttatcatggagagcggtgctaagggttgtgaggttgtcgtttccggaaagctccgtgctgcccgtgccaagtccatgaaattcactgtacgtttgatacggcctctgaggttaccagtggaaatgcagctttcgaatgaagaattgaagtgtgatgacatgatgcgcaacgcgcggaggacacattcggaattgcgatttttcactggcttttttgtgtgtaaaacagctcactaacatctccttctctgtttaggacggtttcatgattcactccggtcaacccgctaaggagttcatcgactcggccactcgtcacgttctcctccgccagggtgtccttggtatcaaggtcaagatcatgcgcggctccgaccctgagggcaaggccggtcctcagaagacccttcctgactctgtcaccatcattgagcccaaggaggaacagcccgttctccagcctatcagccaggactacggtgccaaggctatcgccgcccagcaggctgctgagcagcagcgtctggctgaacaacaggccgcggaaggccaggagggcggtgcagctgagacttacgcgcaggagtaatttggtcatttcttcgttcctgtcatctaccttatttccatgaaccaaaaataaagactctatgaaccttcatagtcttcgctgcgctgggaagcgattaggctttgtaaaattacagcttcgaaaagactcaaaatattgatcaaaattaaaagggcagctaggaaaataagtagaacttagttacttcgaaaggtgcttaagatcagtatatccgtatgcggactcgaggaatagtaggagcgccagcagctttgttctagaacaattttatcatacttagtggatactgctgcaccagctcttgttatgtgtgttgtagatcggacttcttcaattagaactggcagagtactaaatgtcgcattgccaaaaaatacgtcacctagagcggataggatcgggctggaactgttttaccttttttattcattcctctttactcaagctaaggtcagatcaaaccaaacatcataggatattgagtgccatgagataaggtgtatgctatctatgcaagtctaaatcaccatttcccgcagattgagtcttcaaacccataatctcataggaatgtttcgatattgatttcaagcgtgctgacggggtatttcagaccgtagttctccagcacagtgggatgcagaataccaaaagtaccgatggtgtggtctttgccggcaatgcgaacgtggatagaggccgagtgaccgtggaaataagttgggtctgtatcgttatatcagtgactagagggacctttgagtcttgtaaatgaggaagacttaccgtccagctcttcgatccagtactgcgagtccttgactgcggcgttctccaggccctcttcgccgatgatgaaagcggacttcagcattgacatgatgcggtcaagcaaaccgtgtacgacctcgaagccgctagttttgctgtaccatgcggcagcaaagtgtctttcgtttcgactcttacgctccatcgatagatccttgaaggcgacatcgctgacctcgaagatcttcatgggcactgagtgagacttgttctcgcggatagtcttcaaaagaccgggaagaagacttgtgcgcacgacctggaactcctgtgtcttggggttcgccagcttgacggctgtgttgccgtcgtccttgcggttaagccaggcaaagttctcgtcatgggagcacaagatcagaggcagcacctcggaccaacccgccattgcggcctctgtgcgaatgatgtcggaaagcttgttgatcggtaacggctgagcaaccgtgcctgacttgcttgggaaggaccgggggagattgttaaagccgtaggcaatcgcaacatcctccatgatatctgcttgatgaaggatatctgcacgtgttgggggaatgtgaacgtcgattaagtcaggagaagtactagacggtgtcgcttcatatgccatcttcgtcaggagtctacaaatctcctccgcagagagctgcaagccacaacactggttgatatacgagacttcggcctgtgtagttcgaggtgcaatgtcaggagtgactctcgtctcgttgttgtgctcagagataatctggacaggctcaaccctgtttatagcgagatcagctcccgaaacctttaaattgagcacaggaatgcatgggttcttacgtgaagggctcggatgtgtactgcgagaacatcgaaaccatgattttgttcacaatttccacttttgtcttatcgagcgctgtaatctcaataaaaacattcttagtgtttagcgtaatcttcgagtgctctccgttgataattggggggagagagcagacggttctgttggcgtcgtagatgactggtaaaccggggaatcgcggatgatgtggagatatctgcctagatgcttgtctttctgtagcagtattagcatccggaccagctcagtacacagtgggccatacatcgtagaaggccatgagctcctctccgtccatctcctttgtttggttaagaggcacaaagcgaatgtctttaggcggcagagcctcatagctgaacgggcccttgatagtgtccaagtcatgagtaccaatggagacgagtgtcctttgcctcgccaaattctggtggagtttgtcttgcagagcgatgaaagattcgtaacgagccttatcaaaggtgacatttcggaggatggcgcccgacaccaagggtctgatcttcgaagtctagatttggctagtcagcaaagtggtgctatctagagagcagtaactcaagagtcaacccacgtcctccttcacaatgatcttttggagctctccgcttgggggctcaaccaatctgtatttaggaagaggtttccgtcccaggaatatgttgagcatgagggcaattccctcgaaacacagcaagtcatatctggatataactgcttagcacatttcgtctggagtttcagaatatggtgcgtaccggttggcggggatttcaattttgagttggggtggttcctgcacgccatcgacaatcggacggtccgaattcgttgtctaggttaaattagcgagagtatcctaagttgggaatgaatagcgtatgaatacatcttcgtcgagctcaatgcctataattcgacttggtcagcgaaacccgcaccagaatcgaaagtaactcggaggggtacctaccgaactcgaagcacagttcatcgaattcctcagtggtatatctgaaagcctttagtcatgcacaataccagttctcaaatctgcatagttgaacatactctctgccgagctccttgaaaagcgcggccttgtcgaccgaaatggtaggcatgatggaggggttccaatcgcagccgatgagtcagataccgttcg

SEQ ID NO: 2800 - DNA, 1162 bp, Emericella nidulans
gcggtacaatggccggaagacccagcattcgtaaagtgagcaatcccgagggcgtgcttctcgggatttaaatggtatctctgggcaacagactcacatgcatcaatgcaggctaatcggctgtacaagtactcttctgtccggtcttgccggagggccaccgtcaggtgagccttcatgacaaggcaatagtgcatgaactggacaatatgatcaggccttagatcattcgatgtatgtatggcccaccaagacaaacgggtctgataaggatgatctaccgcctctcgaataattagaaggcggggaaatgaaagctactggggcggaccttcactagcgctgatgtcttacaggtccgcgtatcttgggcgagacatccatcaaccattcatgtataccgacgcctgaacaacgccattgactattagctcatcggcgtttcttagctgataccgtctagtatatggtgggaggtttattaacaacccggacaaacggtcgaccgtgcagattagattccagagctgcatcttctcattccgctctgcctcttccgcaggcccgttgggcttttttattcgagcgagctgtacggccttgggtagacccattagctccgcaagcgcgatgagatgtcgcaattttagccagcccttctgggcgtttccacgacccatttgcctgttccagacgtttcagatattgcgagaaaaaagaaatcacaagacgagcttacaagcgaatgaagtggatgcacattccgagcccttgaaatgtcccgaccaacctatcatgagccaggaccagactctcaacggcgtctgacacggtgcgcgcgaaatctatccgacgatggtatcccttcgatggactgtccgggctctcgcctccctgcggcacctgctgcgcggtgatagccagagtcaatagccacgaagccagagcaataatgtccacacccggtccacacatctcttcgtaacgatcgaggatttcctgcctcgagctgggcactgacggttggggcaacatggcatggaccatctgcagccagtcataagtgcaaaccagcatttccgccgtctgttctttagtggggatcagcttctgcagcgctgggcgactctctcggcgaggtgcgcggacgcttcactctacg

SEQ ID NO: 2801 - DNA, 1466 bp, Emericella nidulans
gggaaaaagcgacgaggggatagatatcaatcaggcgtgagagtgcagcataaattgaaagaagtgtaagcagggtatggtgatcaaatgggcagggcaaaccaaggggagaataaggtgacaatattcctgagccgagttcgtaagggcatgccaggcgagggggccccacttttgagacagagaattccaaaaaaagcggaagggtcctccgcatccaaccggccgttttttgggttgaaatatccgggaaaacctgtaaaccatccatggccggcgatttgagggcctaataactggagggttccagtcccaggacggtccaattggatttaggaagcctcatccccaccacaacattctttgaaaaggaatccgaaaaccccaaatcacatgttataggcgattcgtcatactttgctgtcagaccagccgtttttttgccagatttgataaacccctcctggaattccgcagcggacgcattccccttggccgagaatagcttcgagaagtatctgtcgaagttgatcaagtcgatcgctaccttttcacgctccaagacgtatgtctccaacaatgatggcggagcgagccccttcaggacatgtgccagtttccagccgatattgtatccgtcctgcaagctgacgttcatgccctgtccggccttcggggagtgggtgtggcacgcatccccgccgaggaagatgcggtagttcttgtggaagaaatctgcgtgtcgctggccgatcgcgtacgcagaccaccagaccgtctctgtaaactctatcttatactggctgaggatatttttggctgcctgctgcaggtcttcaagcttgacctctttagccttcgtgccagctggcagctcgatatagaaccgcgtcaagttgcggttttcgccctctcgggggataatcagtagactgcccgccttggaccgaatggaggcttttttgcggatatcagggaaatcggtacgtgggatcatgtccatcacgccccagactgcatccgtgctatcaccaatcatattgtaaccgagttgcttgcgaacagtgctgtgcgccccatcgcaaccctagcttagagtcagtccgtcgaaaagcgcgatctccggctcgagaaacttaccaaaacatacttcgcctcaaatgcttgtacctccccatccttctccgcggtgaccttgactgggtatttatccccctcatcccctagctccacgcccttcacatcccatccgtattcaatctcctggccgttaaacctcttcattgcatcgataaacaatccattgatccgcgcctggttcaggataacatgcgggcaatgcgacagccctggctgtgtatccgccgtcctccctgttcgtgagatactaccatgtcctgagccgtctgaagcagactcagtcccattctccgcccaaaataccacttccagcacatggtacgctt

SEQ ID NO: 2802 - DNA, 959 bp, Emericella nidulans
aagttcaagaactgtgagctaggagtcggacgccgacatacgctgtatcccatgttcggagttggcatcgtaagtcccttaacccacattcgaattaatctattctgatatcctagttcacatctgacggcgagacttggtcacgctctcgagctctcctccgtccccagttcactcgggaccagatcagcgacctggatctagaagagagtcacgtacagcaagccatgcgcgcaatgaacgttgacccagccacaggctggacctcctccattgacatccaagccatcatgttccggctaaccatcgactcggcaacagagttccttttcggcgagagcgctggcagtcaggcagaggctcttcgcaacgggggcaccctgccccttaatcacttctctggcgactttgacctcggccagtggtacgttgcacaacgctctcggttcgaaaagttctactggctggtcgataatcgggagagtcgagcagttgtgaagcgagtgcatgaatatgtcgatcggtttgtgcatgctgtactaaccacagcggaagacagaattgagaagagtcagagttcaagctacgtcttcctcgaagctctcgctgcatcaaccaaggaccccattgagctccgctcccagctcctcaatatcctcctcgccggccgcgacaccactgcctccttgctaagctggtctatcctaatgctagcgcggtatccggaagtattcaccaaactgcgctctgtcattctcgctgatttcggctcctacacatcctcccgggacaagatcacattcgcctcccttaaatcctgtcgctacctgcaatacttcctcaacgaggtcctacgtctctaccccgcggtacccataaaccgccgcgtggcaacatcgccacgaccctacctaaaggcggcgggtcggctgggggacaaacaattctacttcgtgcgg

SEQ ID NO: 2803 - DNA, 1415 bp, Emericella nidulans
tgctgtggctatctataaacggtggtcaggaatggctgtaggtggcggataatatgtgtccgtcctggctggtcagagagatatatactgggtcttcaaaaacaagcactattatttcgagaaatgggtggtttctcggccgaacacatcctaggatacaacgagtagggaaaaagggcctgagggtgaagaacagggatgactataagtgtaaattaccacatacagacggtttctgttgactcaaggggtcttgtagcgttaggatgaagggtgggccggctaaattcacacggggagactccacaccccgcacatagcctgagttgtcgttggcggataatcttccgcctaacgggaagtataagtgttctataaccctattggatgcatttagccgcgctcttttgggcgtaccggagatgcacctggacatgatcgggctgatccagaagaggcgaagtgacattggggatgtgcggtggccttaagaaggtgcccatccactgaagaagtgtagacactactgaagtgtaggcctaccatgagttggggggcgttcacaggttcaccgtcactagacaaacgcagcatggcaaatccacctcgaacgcccctaagccagctgctgccgacgcttatccttggtggagcggactgtagctaccaacacacgcagagcccgaacgtcgagcagacgagagaggtggtgggccgcgcttttgaactgggggtgcgagccatcgacacgtgtacgtactatgagccgtcagaggcgctgctaggcgaggcgctctcgcacccagacttcaccaccagatatcgcaggacggactacatgcttatgaccaaggttcgccgcgtaagcgcgacgaaatccgactactcgccagactggatcagatcctcggtcgcgcggaaccctcagcggatacacacgaggtatctcgacgtggtattctgtcacgataacgctcttcgtcatggaggaaagggactttaggccatcctggtggctatagaggtgggcgactccggcacagggcttgacattggggtgcagggtttccaataacacgcttggcagagtggttgccgcccgcgtaattttacggcgactgtggatgtatccgaaatgtgccaatggcgtcataacacccgcttagaaggaaggtttaggattaagaggcattttaatttttttaatgcgcccttgtaacgttcctcggtgagcagccattgttctgggatgttttaccggggccttaggggccactcggcttttttctcagggcgttgctttttttattctaacaggcactgacatgcctgtgtcatatgatttacccattttgtatattatgtttttcatatttattttatattcaatttagatgctgttttctcatctcatc

SEQ ID NO: 2804 - DNA, 1663 bp, Emericella nidulans
actcgcactaatccactggattggatctgacatgtcgcagtgcttcaggtattgctcttcaatgtgcatattcacagtttgtattacatttgggcagttatctggagtgggtccggaaattgcaccactggtattagggcatgtatatgccactcgccgaagggcgtagcagatatcgcaccggatgaggaagaaagtcatgtcggtaaacccaactcttggtttgggcggctctttcgcgtcgggagaaaggtctgcgtcgttgatattcaaggggagtctagtgtcaaacatctggtcatgaatttgaacgtccgtcccatgatcctcagatgatcgaaggtcaagtagaatgacatgccaccatagcctgcggcgcatctcggcttcgaatggcttcaggtcgaagttgttgccatcccgatgcaagccgagtccttgcgctagacgaagtacaagagcagacatggaccagacaaatttagtatcgtcatctcgacggacagcatttagaaagatcaccgcagcctgcatcagggtcaagctttgggtgttcataaggccggctttagaaagtgcttgctccacagcaaaccgataacggctaaccaaggtgtcacgggcttcccctaaccgaatcatgcactgctcagccgacatgctgacgatggccgcaaaatacatagcaagcaccaacgcctcgttattcttgtcgagagtttccggagttccggcagcaacagcgaagacccgctgggccgctggcccatagaccacaggcaataacggcttgacattctcagcataaatgtcccatagggctggaaccttgctgggaggcggatggaaattctcgagggaatgtgcaagagaataaaatccaaaaagcattccgtcatgcattgtagagtaactagggtgttcgggagaggtataatcatcgccgtcggaggatgaatggtcaagaatatcctgcagttcttcgatctagtccacttagcagcttctcaacaaacatacaaaagacagctgagataaaaccaacctcgtccccgagacttgcccaaaaccgattactcacgtaccggctccgattatcttcgataacgagtcttccaaactcgtgctccaagggaggctgttagtcgggagtccgcttactggacatcgctggacctcgggctcggactcattctgagcaggctgagaaggctcaggcagctcgccgctcgagcgatcactatgccgctgaagcggaaacggctgagtgttggtatttgcaatagctgtctcaactatattctcaagctgtcgcagccgcgacagcagctctgcgttttcagcaggaggccgtttcaacctgcgcggggctcggcctggaggaggaaagatacactcgacccctgccctgacgcagttagagcagggagatcttttgttgcagcggaccttccttcgacggcaggtgacgcagcttcttatggttaaagaatcgtgacgagaggccggattatgagaagctggaggggcattctcatttccattgtccagagataagggggttggttgaggctttccagagtcagctgcaggctgaggctgcggtgaggacgacatgacactggaaatctagggttgaccgtgtcacatcgtcgatgtaagg

SEQ ID NO: 2805 - DNA, 923 bp, Emericella nidulans
tacaacataacaaaggtgatacggtgcgaatcgtatgtttcagaaagcggccaccggcaacgctgtttgtccagaggccgagatggcaaaagaagaaataaataaatatagtccaagaagaggtgaagatgtaagaggaaaatgagaaggcttcacatgatgatgaggacaacgacagcgaccaaaacagcgaagaaggaacccttgaggactcgctcagaaggggctgcattttcgccgtcggtgctgtcatcggtaccttgactgaaggcgcctcctgaagaatcagagctcgacgagcctccgtttccggtcgaggatccggcgatgttaccagtacctccctggttctgaggaaccgtggagttggagatggagccagtagagttgccactgctgtcggttttgttggaaccgaggtccatgttgaggccggtggcgcccagagaagcaagcacggtattgttgtcggtgatctcaacggagctttccaagcccttgtcgtccttgaagtcgtaagagacatcgccgctgaccttggcgtccgaaggagggtcatagcattccacggtgatgtcgctgtagtaggctgcgtagtagccctggttcttgatatcctcagagtcccaatcgatctcacctccagcccactcaatggttccctgagcattgctagcttgaccggcgggccagagggacagctgcattcgggacggggtctgggggtactcgtagcggtcggcagtctcattgaatgtagattccttggtaagagttcgaacaacctcgccgtcaaccaaccagtcaatcttctcaggagtccagtcgatctcgtaggtgtgccaatccgcataagtattcccaccgtccaccttggacttgccgccgttatcgtctacagaaggtcagtaacaaggttggca

SEQ ID NO: 2806 - DNA, 2172 bp, Emericella nidulans
ttctcggggcttcaggagtctgttactggtaatcttttccgtctgctcgtcgtagcttttccgtagtgccaaaattcgttgcgcttcttccagctgaacacgtaactccacagtgctgttccgaacggcctgcatcgtggaaagaattcgctctttctcagctacataccgctcgcgttccttttcattactcgtgagcagaaactgtatgcgtgcgatactgccctcaaaggccgcaaagtccagggatgcatcttcacgaaactggcgccattcctcaagcttcttttgcttttctgcctccgcagacgccgtagcatcctcgtcggctccctcgggcggaggcgtagggagcgtcgcgttcgaaataattatcgattcgggattcagaaggcgcttcgagattcttttgaaaggtttctcctcgacgttcagcaggcgggtcttgtggagggcatctggatggctgaaagttaggtctgaaacaaatatgagcaggcaagaaccgaccttcgtccgcctgatcaagcagtccgtaagacgtcatgatggatgtgcttatccgctaccctgaataattagcaattgatggggggcaccgcgtgtttcgcttgctcggccaccgagagggcttgggtgtggtttaaatggagcggtagcggtcagttgcagttgcggttggagcaacacgctaggcggaaggtgactccccgtctggtctgaatactcccatgcgggttgctctctcgaactatcactgcaaatctgctactattgctgctactgtcattaccccatctactcctaatctacgtttagcatactttcccaaaccccgtcggcatctgttggctctattggagcccagcttttcggctgacttcttggatcggcccgatactgggatccctcttctgcgtccactgtaatcatcttggcttttcgaactcgtctactattgaaatccgcgcatgccaggtcctatttctaaaacgatgcgaaccaggtcgactcctttttcgaaccaggaacctcgaatagaactccactgatgggaaggtctgttggtatcgactcgtcgccctccgttttgcgccgttttccctgatcgagatgacggagatgtattcgggtctccatgtgggccagcggtttgcatcattggaagactttaaagctctggtacggagtatatctgtgcggcaacattgggaacttcgcgtgacgcggagcaacaagaagagtgtggtgataggctgccggtcctcgcccaattgcttctttcgtgtcgtttgtcgtgcaaacaggaacgcaacatatatcagcagtcttcaggacagtcatagctgtcgacgaaatgcgacctcgacgaccaagaccccggctcgctcggaagcctcccatgtgcggttcctgctcagtgagataccgaaactatttgacatgcgaaacaaaatcaaggcgcaggatattgttgacgcggtgaaacggtatcacggatacgatatatccactaggcaggcccaacgtgccctaatcagacttcagcagaggggttctcagcagcaaagcgatgcagccaactcgtcaagtggggaggaccgacaggagtctcagccaccgcctgtagaagggcagagtgagggttcagcttatgctggcattccgggtcagagatggatgcctgagtctgttccgccgaatctagttgataatccccagtcacaaaacgaagatccaccaaatcctaccttttccgctacacctttacagggacagccgatacagcaacatccccagcagttacaaaatcctcaaaggatacagtccacggttcaaacgcaacaaccactacctcctcctacaccggttctgcaagcgccagcggttccacagcatgagccgacgtccctcaaccatcccctacacgcccaagtaacctcacaacaaccttcctattctctaccaacaccaatacaacctactcctcgacaggcagggctcaccaagtctccgacacaaactcagccccaacctactcaaggccatccttccgcaccgcaactagttcttacaaatttcaagatcgaattctcctgcaccacgtgtggtgctctcaaccagagcttctttcctaatcaaggaaacgtgactggcgggcattacattcct

SEQ ID NO: 2807 - DNA, 1038 bp, Emericella nidulans
aaccacattatcagtaagatcactgtgcttggaggagggcacacccttccatcttaagcgtagaggccgccatccaccatgggcacgtgtcgagcctatgatgcctcagtgagccacatgtgattgtcccagcgtattacttctaggtgcattctcatatagaatatgccgccagaaaatcagctgccctcagtctgacgatcttaagaggttggccgaaacaagtataaatcacatgtgtcgaaatgactacgtcgtttatatacagtcacctgtgagtgagcactgtagcgcagattagccaaggacgggtgctgaggctctaaaccagatattgtgatgctcattgttaacgatgtgtgaatatccaaaaatatccaaatgtcgctatgtcatgcaagagaaataggtcaatatcgacaaaagaacagagagtatggacagagtaagatcaaagatcgatcgggtcagagggtactgcgtccacttcatcttccagctcatcttcagtgagaactccaattccactgtcaatccgcctgcgatgctttcctcgaccaatctctacgtccataaaccgggtcatgctgacaggggtaattggctcgctgccaatgcccttatcatccgactccagttcatctgactttagctcccaattggcgctccgtaccttagcctggcgacgctcagcgttgactgcagccttcatcgatgcgaacgcccgtgtctgttccgcgaaccatttatccaacaggccatcctttgcttcaatctccagtcgcatttgctctttgagacctgcattgtagcgattgagtttctcagcttctgtcttggctgcttccagtgctgtgttgagttccgcaatacggacattcaacaagccggtctcccgttcgtggtctgtaacgtttttctccaagttctcgacagcttgttggcgctcacgctcaatgctttccattttggctgtgaggtcacagacccgtattctgttctgctcaataatctcctctcgctcgcgaatctgctttt

SEQ ID NO: 2808 - DNA, 2291 bp, Emericella nidulans
cttcctgggtagacaggtgacggaaggggaagttggaaggaacatgttatttggagctgtatgcgggcgtgggtttccctaatcacttttacattgattacgccctctacaaacactactttccaatgatggctctgggacggtataaaaggctgattggagctgtatatgatggtatttagtactatgggtttccgatgtttactcagactggacatgtgcgtgtcttacgagtactatgagtattaatctcaaaggcaaatttactgtctctctcgcgcccactacaggcaaactacttagtctgctctcttttcggaacgtgaattaagtaatattgagatgatgtgcctgaagggaagcaagaaagcacaggtagctggagtccgtgcaagagatattccgctagcccgggatattgatcggcatgcagacatgtccaccccattaaacctagtgatgatgttcgtagcacttgggctgtagggagtgtaaacatgcctcctcccgaagcagctggaggtttgcggctgagacgagagggttcgccgccgcagggactggagcccataggctcgtcaacgttgaccggccgtttgagctgttgtctgcaatccgattgggtcatgttggacttggtgatggcatcgaagtcattgccagtgagcagttttcctggggctgttttgtttcgttcagttcattctctctccccttgtgtttctgatatctgcccgtgctgtcttccaggtcttgtaggacaaggaactcccgcgaacaagcgcacgcttctcacttttgactgtggagaccgtggcagtaggtgttacttcagagccgagcaatgtcacagtcttattctgcatttcgatccggctcgggccctatgggagaacgagctttcatccaagatcagttattctgctagtcaaccatttccatgtaatttgagtgagagtctagctaactctagctggcttgacttttgtaacaaaagcagacagccaactgtgcttacagtccttttgtaggcattgtgtaggtcatttctgtggatgactccggttgagacggcttgaagaaggacatatatgggagtgttaatctataaattttttaaagttgtataattaccgtaacatccataatttccatgatttcccatgtttttacttatttttatttttaatatataattattttgaaaatttgtatgtatacgaacaacttaccgccgctggtctcctccaaacccaatatctacagtatactgacatcgattctctctatatacttggccccatacgcaaacccgcatttgccactttgtcctggaagcttgggtcatccacggtgtggctgctaaaattttcccgcctgacccataataaagaacggtgcaacccccgtctcttgctgaggagccgtttcaaagccgctggttcagtagcatcccattatatttcaggcaactgcccttcgtccccagtagtggtataggtcagtgatctatacagaacagaggatcagatcattttagaggagagacgcgtgcggttctccaggactggatctgccgccacgcgaatcagcccaccgtactttagacaaaagtattctgatacgtcgtcctgagcgtaggaactccactgttccacgaaacaaccactaggacgggtttcatagggcagttcctgactgtaggccccgccagggccctcttggagggccgaatacccctggcaaacgttttaacggggtgtcgagcattgactctttctacagtcttcaacataaccagcgctgccatggcataatggctcccacactggggcagctgccctcagaacttatccttctcatcgccaaacatctcgacgtcccgtctaccaatttcctgctacagacttgcctgcgctttaacaggcttttgggcccggtgctctacaaactcgcccgccggtatcggagtgtgcctggcgctggcacccccttgatctgggctgttaagaccaaccgtctcaatgtgatggaaaggttgctttacgggaaaccatggccagctgataacgagaatgggacgacggctctgcacgaggccgtctatgcgcaaaacgaggacgcccttcgtatgctgctcagggctggagccgacgtcttcgccctcaatgctaacagagaagcggcattgcacgcggccatcaagtgcgaatacgtactcgccgcgaggttgatcatcggtgtataccgactgttatgccgtgggaaagctacgcgtggcactggaccga

SEQ ID NO: 2809 - DNA, 1358 bp, Emericella nidulans
cccgagttctttttaatagtgtcttccaagcatgtcaccaagcgcctcaatgactccgcaggaacttgcaagaatctttcaacaccctgatttctcggttcagcatccgattgcggcggcagcagtgcgtgtgagctatgcggtttcgtactgccagggcatagagcagtggaccgggcagtctctggtatgtccatggaatccggagatataggctcttctggttccggtgacggtggaaggctcggttgctgggtgcttgaatgctcttcggaaggcagagcagcatacaacgattttttggtcacataaggcgaggactgcttggtctcgaccagatcaaacaagctaccaatactctcaacgtctgactccgcgacagacacagctctgtcgggagctgttaaatgtgaatcctcctgcttcttttgtctaaacgcagggacttcatctctcaaaatcgctcgagggacgaagtttgagatgtatcggtcagattgtactgtcttactagagacaggaggtgagcaagccctgcgagtaggctctctcaaaggcaagaagtcagacgcctcttcgtcactctttctcttctttcctcgcttgttggtgaggttcgtcctaggagcggcgtcttcagtctggcgccggtgtagctcatcaaactccttcctaatttcggacgatagcgcgttagagtcgaagtcttcagtcaaatcgattgtgtcaatatcctgaaacgaagacggtatgtctagcttccgtttcggccgtacgggtggtatcgcttgctctttgcgatctcgaaaggatggaatcgtactgggaagttctacgtagtgtcgtgcatcagtcgatctaatatctctcattatgttggcggaggagcaattgtaccttcaaccattttatttcgaggagtctggctgacttcctgtcttacggacgaacttttggaggccttgcgagccgagttatgtaactcttcggcgctgagcatccgtggtttgcttgctgataacccgtgatctaacattaggcgcggcatatctttgtcggattcgatatctatcacattgcccgcagggtcattgatcgccgattcgagaataggctgcgaatccttgatgctgagctcttggtggctctcaatcaaattcaagattgggaccggattgttttgagagccggtcggattgacatgggtgtcccacgcgagcggtgtcagaactggatatagcgacgggccttgatccaagagccattaaaaatgggtcttcaaattgcttctagtcatagaggcgtgtatctgtgggcatcctttagcaaatatcgaggggggtcagacgagctcgttt

SEQ ID NO: 2810 - DNA, 1424 bp, Emericella nidulans
  unsure (1)..(1424): unsure at all n locations
ccgattagttgtgactatggacaatgactcgtttgaaagcaccgcagaggataaggcgcatcgaagttacctcgtcatcagaacattgcacaaaccgaggatcaaaagccatctgaggtagagatatctctatttagacaaaacaccgaatagactgctataatacaatggacacattatgagacataaatcactgcttgacctccgacttattcaaagctgccttggccctttgcctctcccgttccatggcctgccgatacgcctctctgcgggcatggttacgctcttcccgcttccaatcctcctcttccttgcggcgtctctcatagtcctcggccagcttacggtccttctcgctgagcctgggcggttcagcgagtgaaccatcggcgttcttttttgggccctggccgctcagctcctgcattttctgggtggtctccttggtgagcttctccttggattccttgatgttgttgatggcacggtcaatgaatctgatcttaggttgctcagcggcaatcttcttcgcctcgttgagcttggcgttttcacgctctaatgcttcagtgatcaagcggacggccgtgttgggttcggctgggttcgaacctgatggttgcacagggttcagcttctcgatgacggtcatgccagtggccttacgaaaggttgcgtttgcgaacgcgtaggcctggagcagaccgaggaaaccggtggtgaggaagtacgcttgcaacgcagcagggaagaaagctacgaagaagaaagagaacgcaggaatgccgtacatcatacccttccggattgtcgccatgtcgccagacatgctgcttcccgtttcacctcctttctatacaggggcgaattagcaatggactcagacgtatgtggggggccacgtaccctaatacttagatgaaggacagtacagcagagaatggggaggatataggtcggatcagcgactgtgaaatcattgatccacgcgaactgttccgcagccaagccgggcacaggcaaaccggccataccctcgataacacggaagcaaccgaaaccgatagggagctggaatactaacggcatgaacgtattgcgcggtacgataccaagattggcgttggtcttagccatctccgctctccacttttgtgcctcaacctggtttccagaacgagcagcattcaacattttctctttaattggcgcaagaataggttgcgcgttggccagccttgcactggtatctcctgcgcgccaaaaaagaggtgccatcgcgaggcgctagcagatagccgtttcgatcctcttagcatgtcatgccagcaaatagttactcttgatcggacagttccagtacctcgagttagcagtcggagcgccaccgcactgcagtcagtagatccgaagctngggtc

SEQ ID NO: 2811 - DNA, 785 bp, Emericella nidulans
atcgtggcaaatccgtttgctgtacaggtcgtcgaatgtatgcttgggccgagacccgcgctacgcttctacagtgcgaacacagcatttcaagccaaagaccggcagccagtccatatagatgtggatttcaactttccaatgattccgtggggttacgctatcaacatcaacctcgtcgaaacgacgcctgagaatggggcgaccgaggtctggttgggcagtcatactggtacgagcagggatgtgcttgatcccaaacatgggcacgagcggatcagggagaagctactcgaagaacgccggaagatgggaagaggtggaatccagccggaaaggttgccaaaggggagtctggtcatcagagatatgaggctttggcatgcaggtatgccgaatcagacgcaggaaccgaggatcatgctggtgactattctgttttcccattggtaccggaatgaccagaaaatcatcttaccggagagtgtaaagggggagattgacagatggcggggcgtcgatgcgtgcgtccagtgggtagaggaagggtatgactatctgcagggaagccatgatcatgattttacgttaaggccataggcattcctttcagaacctttcgtggctattctgagtcgagtgggaatcataactgcagtctccatagggtcgtcatcgtccacctggacctaatacagatgcctgaacggactcgccgggaaatatggggatcagctgagatgttaatggaactgcccactcctagacgtttgcgtaaattagct

SEQ ID NO: 2812 - DNA, 2119 bp, Emericella nidulans
gggccgtaagaaataagaattttagtatttaaggaaggaatgagatataaggatgagtatgatattaaagtgtgaagatattaagagataatataagacgattgaaatagtaaagactaagccacaggataacaagagtagaaaaaaaagcagaaaaagaggatataaaggaggatagaataagcaagatataacaatagagggaggagctaagacggacgaatatgacacagtgatatgggtgattgcaaaaaactgtaataaaagaaaaaggataagacaaataacgcagtatagacttatgcgaagatgtaatagcgataaaggaagatttggagacagaaaattaggaatgaaaacaagttacgcatcatgaagtccagtattttaagaggcatctgggaacaccccacaatgaacttaagtcctttccgtgcacaatgggtccagtccaattaagcagcataatatgtaggtcgaaaagtgtcaatagtcaggcccacgagagcttcagctctagatcagttgtaagcggtaaatggctctttataatcccgacattaggttcaaagtagtggacaaatcaatcaagcgtccccgtatatacatgccgatccgggaacctacgaccccagtccctttctaacctcctctctgaccttccgctcatacgcagccctccgttccctccacatcttcgcagcctccacatttgctgggctttcatcattcggctccgctagcatactcattactgggatgagaatcttctccactctttgtataggcgaccagcgctccgaggcatgttcatagtggttcggatcatcgccgggtgggtgtagaatgcagatgcacactgtgccatcgggatagactgcccaacggaacattagccgataaatctcccctttcgttcaaacgaaaagaaacatagaggtcacaactcaccattcgcatgccaccttcccccgccgacaaacttcattgtcggtggacttaaagggtaatccttagggcatttgagctcagcagcaaaaaccccaccttcgtaaggggtgccttcgggtccctgtatcaaggcttcccagtgaaacatgtcatcttcagagacaggccccgcggtaatcccatccggcgggtttgttgatagtgttttatattcgcggaaaaggcgattctgcgtcatggatgacattgtggcggtactaggtgtatagatagtaatctattacttgtgcaggtctgtggaaggatacacaaagagcaacgtgatggtggtgcggagaagtcggagtagtggggaaggaggagggttgacttgatcgaaaggactggaccgaacaggagaaaggcgcgaaatgcagtctataagaatgaaaaatcgggattagaagtggacctatccggtgtgaaccctgtggcaagaactcgatggcaaccctgaggagaaaaggattaagatctgatatcgtaagggtcgaggtcattgccactcgccgtgtttattcgggagagcatattgatgccttaggcaatgttcacttttccagaagtttcagcgtcacctagatctagaatagataaaaaagtcgtgtcccttgaaaatcgctaatagcagctcgttcagatgattatagtacattgcctcactgtctattttgaaaatatagtaatctagaagaagtcagaccaatcattcccatcttccccgtcaccaccctcgtttccgtcattgtctgaccagtggtcttctgaagaccagctgtcattcctttcttctggtgtccactcatctccgtacggcccagttggagcatttcctgacgaattctgctccatatgcggttgcggttgtgattgcggttggctggccgtactagcttgctgttgaccttgggccgttgcacctctggacatcgcatcatagcctgcgattgtacctgcgccaatggcacccgcagcagcgccctcagccatacctccagcggcgcctctcccaacggtcccggcggcagcttcgcctacagccccagcctcgcccgcggcaccaccagcggcaccaccagctgagagatcaccgccaagtccgggaaaccacattgggaaaaacccaagg

SEQ ID NO: 2813 - DNA, 933 bp, Emericella nidulans
tacttcaagttcgactacaatatcgatgtcactcaggggacggatatcagcacttccagtccaggagcagcgcaactcgagcataaccgggcatacttgacgtgggtaaatgaactcttggatagatatcctggcctggtggttgagaattgttcgtctggcggacaaaggatggactacgccatgctgtctacacatcccatccagagtagcagtgatcagcaggatcctgtaaaatacgcggctatttctgcagcgctaccaactgccgttacgccagagcagggcgccgtctgggtatatccgcagcctgaatgggatgacgagacgaatgctatgagtgttgtgaatgcgctgctaggacgtgttcatctcagtggaaggctggatctgctgagtgagcaacaggtcagtcttgttaacgagggcatggatatctataggagtataagaggggatttgccgaatgcgacggcgttctggcccctcggtttgcctggctggcacgacggatggattgtactagggatggcggtggacgggggtgagaggttctatatggctgtttggagaagagggggcttggacacagtagtcctcccagcacctttgctgagggcgcgcgaccttaaggctgagctgctttatccaaaggcgtttgcgacccattttgagtggaatgtagcagagggttctctcagggttggattggcatcaacgctttgcgctcggttattcaagttaacggtttcctaagttagcatgtaagtctttccaaaagtctcatgttaggtgaaatacaatcgcctttgaaaatcgctctctgtaggctataatcttgaccttgtgaataggattcttctaagttcagtagtatgctaaaaatataaaggcaatgtaggatacaaggggctactggagattacaggagtt

SEQ ID NO: 2814 - DNA, 1427 bp, Emericella nidulans
atctgatgacattttatctctcttttcgtccaccattttgcaccagccctctcttgaacagcatagaaagtaatatagccccttgtgttcgcagcacagcttagagaggtcgtaattggtaagataggttgccagctaaagtaaactatataaattatataagcagttctgccagtttgctaatacgccaatctcctataatgcccatgcgtttacactgcaatagtggccagccagtgtcttctatcagttgcccatggttgcacccatagcctgatagtcccatcatcagatgcagagccaatctgcttaccgtctgaagagcggtgactacataagaccagaaaccgccagaagacgctaagagggtccaagtcgcgatcattactcgaccaattcgttcacgcggccagatccagcccctggcggtccatcgtgcaggcagtgtcaattatgcgtatttacagaacagcaagagcagaagctgactttgggagtggggggacagggtatggttggagtataatatactcgtggatattgtcaccaagcagacaagttgaacaagttgggatccattatatcagcatgggcttctttagatcaacctcaaagggtttatttatatcttgaagacgagacataaagagcggatagagcaactgaggaattttttgatgccaatatctctccaggatagatctgctgtggttcaattgtgatgaactgaagaatactgcgtgatttatgaaaagaggtttccacaggacgagctatttacacacgatagttcttggtatacggagatcgggcttttctaggtttcaatttagagcgaaatgagatatcaacaagccagaagaatacaggagcggctatacggcaccggcttgctaaagctttattggacctaaacgagctcttaaagtaacatgattttggcacagttgaagagatttaaatcgggaaatcaacggcctgccatctcggctgagccgatcaacatattctattcttcatcccactaaaataattctacatgaagagaatgtctagatcaactaactcagatggggaacgatggcagccatttgctgattctatcataaggcctggccgttgtctgcgaatcatacactggcgaatctgctgggctatacactgaccgatggacagcggcgagtacagcctgtacggcgaacgaccaggccttatatgttattccatccagtatgaccatagacctccttgagtgctactattacaacgcattctctgatgcttggactataggtttactgtgcgggggccctccaacagggacctgttgccaattgcacggatgacggatcccgctgattcttttgcatcgtccgacacaatctcacatttagtggacacagccgttccctatgcaggcataaccc

SEQ ID NO: 2815 - DNA, 719 bp, Emericella nidulans
tcccggttccaaggtggtaaataaaataagtcgtaggcagagtgtagatctcgccttatagccatgggcggtgccaagaagtcatcccacagaaatttctccaccgccaaaatcaaatcatctcaactgcaccagacttcacctctgccttcctacctctctctccatcccatcacccgccatgcccgctccttcaaccaccctcctgatcgagggttccttctccgaactcgccgaggaatttgctgcgtacctcgatgccctcaacaagcccgacgataccaccgttcagaccgaggtcgccccgctgctgcaacccctccgcgagcaggaacagaatgatacccagcttgatcagagcaagcgggatgaggtgctgaagaagctggtctcggccgccactgtgctcaacacggcgccggagaagggtgcgcccgtcactatatgaaattgctggaatcggattgcatactgattgttttgagccagagattacacccgcttacaacctcctgatccacctcgtccagcaggcctccgaccctgacatgttcctctctcgcatctgctcatacctcgccaagcccatcccctcctctcctcagttcggtgcctctctttccatcgccatcctgtccaccatcttcaacacactcgcccctaccgactccagccgattccacgttctcttggccattgtcaccgtgatccgccagtct

SEQ ID NO: 2816 - DNA, 1808 bp, Emericella nidulans
  unsure (1)..(1808): unsure at all n locations
caatctccatatttcgggcgcagcttgaagatgagttgaggaaagaaaggtataaaataataattgagtgtgtgactgtgaaccagcgcggactccacaaatgtgagtgcagtaagtgtcctgcataaagagttagagagagacttccacagctagaaaggaacatacctggcaacaggagggagagcccagaagtcatccattgctgtaaaataagtactcaaaggaccataatcgaggttggaaaagtagtcgaaatcactcaagttggcgacacctcattctgtgtccgattagcaacctgagatttgcgggagtcaactatagatgttcaaaaaagaaaggaaaaaaagacagactctacttaggtcaaaggtggatatttaagcgactgtctggcctcttggtacatcattcttccgttccgctagagcctcgttgacccacagtacatagcgcaccagcacaaatgcacaagttctattcgtactgcattcagcacgttttcttcaaagtatatgccaatatacgcggatacatagtcggatataaaataaactaatgactgagatggccgttgaatattagtttctaaagatccccagaggttctcgtccgtactatctatggacaaacctctcaaacctcgacatgccatgcgactgaaagcacttgcagcagctaccgcaaggcacccaattcaagtacggcggcagtacctgagtctcaagcatattcattctccaacgctgcctacgcgagcagtgcccctcacagacgtacccccatctttcccctcaatccatacatcccaagagccgtctccagtagactttggtttcccacatatcgctatgtcctcttcaacgtagagcggagcatgattcttgtaggtaatatcgctgacagaaaaacctcttccatgcagataatgccgaagggctgtaagaagcagtgttaacgtcagaggaccatgaacaagaaggtctcgatagccttcgacatcgctagtgtatcttctgtcgagatggatcgagtgagcattgaaagtgagtgccgaaaaacgaaagagcaaggctctggttggcttcatctgatagcggaatttcgggtccgcgggagctttgtgaggngcagtgagggttagcgatgctactgcgctccatgacaccagttaactctacacacatttaatagtctgggggcttgagagaacttcgccttgtcttcgtccagctgattgacagtcttgtctcgcatgaataccaaatccctgttctcgacgattgatgcgtccgctttcatgtcttcaccatcactccatattcggttcctgatctctttttcggtctcattttcctgcacagtgcctatttgtctctcgatcttgactattattttctcgtccncaggtcgccctttaacgatgacatcacggataccttcaatacatacggcgcgacccccgttgagcgatagcttattgttgactgcgagcctaactctaccgccagcccataggcgcctattgaagggtggcccaggagcatgcagaatgtcggttccatcggccagaagctggcagagggtatcttgtggagggaaatagacaatatggtgagccgaaggcaagtaggaggggccctcgactgttgcaagagtttgcgaatgaggaaaaacatcaagcttcgaaaacaagtctttgaaggacaggaccaccacatgtgccggttgaggttggaggtaaacaaaagtcaatggaagttatatgcatgacgatacttggtccacgcgcgccgtgttcatat

SEQ ID NO: 2817 - DNA, 1193 bp, Emericella nidulans
  unsure (1)..(1193): unsure at all n locations
catgttctggtctctcatatgccttgaagctactggaagtgcatgcttcattacaaagtaatagcgaactggtccaggaaccctttgccttgctggcgccacgaacccggttccatagatcttggcaagtgggcgatcatatcttgcaacctgcaggaacagcgcatgaacagtgacggtggggtaagccgatctatctacggaatactcgccttgagttgggtccggatatcggcttgctgtgatttggtggataactcgctagcaggcccaggtagcgggatcagaccaaggcgccgcaggggacaaagcaatagccgatcccagaaacgcagcagggtgctgacatcaaagctcgcttagtaggcgtacagagaaaacatccagttctttcgtcacttgtcgtaaagccatggcttgggcgtaggcccctcaagcctgaaagcagggatccttatcagtaagactgctccagagacgagaagatctgatatcaaataagatccattaaccaagctgaaaactctagactatttcagcattgtggccactaatcaacgttaaggatcacagctgattatggaggagcttttgcagctcactggacgtccggagtagcgatgatcatacgagctagtcaccgagaaaaaggaacgaaccattagttcaatccactgccactgacatctgagcatccatgcggcaaatgcggagaatgcaccaaaggggggcagatatagataacctcggcctcgaagctctgagaaataaaaactgataactgataagccgtcatgctgaagcatccaacagcagctgctgctgaccgacgatctggttgacagctcacaaacaatttctcgtcatccgcgattatgacccgagatcgtcgccaaagttgtggtcttattgggttttagaactttgttcatgttttccttgcccacattgagtacggggcatcttgcacgctgaaaatatagttggcgttcattgtgattgactttcaacttcatggttattcgatcaataggagtattttacaggctccactgaaagatatgagatcatttacgtaaatgaagccatacactgtatgctggttatcagcaagagtcaaggcggattgaaccaagggtacagaatccgtcggtcgaccggantggttttaagggacggcaacaacagactca

SEQ ID NO: 2818 - DNA, 1519 bp, Emericella nidulans
aaattgcctccactggggtgtacaaactttatggggaaaatccagccgcggaagctctcggctacgtgcccaagaatgcattctttattaaatgcgctggctgcgagatctctgtgtttacttctgtagagaagcatcctttcaggttggagggtttgcaaccggaccttgactcgccgaaacgcgtgaaacgctgctaggaatcttggccgtccgagagatcttgaagttggtgtacgtcatgagatatttcatagcagcaattacgacatactctcttagtcgcatgtatcttgacccaataccaaggttgaccaacgtatatcatctgctagtagtccgtcccaatatacccgtatacggcagcgtattctctaggctgatcacccgaacaaccgaggtggcaaccaaggcagggagggtataaagcacccaccccatgcaatgcatcgcattgcatgatgattgcatgcagattgattgcaaccccgagtaaaaagcatgttttcgaccccgtccagtaccgaagaatgacaacgtctgatttcgcagctcagccagatacccttgtccgagcaggggttcagtttaggcctgcgccgcgactactctgtgctccgttgatctggaggaggcctagcgttctgtaaggtatgatgatagtgggcttgggaggtcatatcaagccgtagtattagtacgaccaacaccctgtagcatgattaagcgacatagattcagccattcagaactgtcagaaggttaatgatccgcttcccatcttctgacgatcacactatcatccatcactgcgcttgcattcgcattgtcggcgcatcacatcaagcccgatccccgaagttattccgtgctaatgaatcaggcaagattcctgttccttcaacatgaaagcatccatggcttccagcatcggacaaatcgacctgctaccaactaccgactaccgacttaggtggtatgatatcgaagggatattacaccacaatggaccgggttaatcaaccgcacactccgtcctactatattctacacataaattgggatatatcagtatgtcacaggacatgggcatgagggcgtggagaacaaactccaggtttgatacttgattctgctgcatatactgccattctataatatcttgaaaacaaggggagtgggggaccctgccatacaagggagccctagatgctcctctaggggtgtagcagattccgaaaatccggacactgccaccaagacgcagctaaattacccgcggtcaacagccaccgaccatacatagtaatggcagacctgaattcttccgatgaatatcagtgcagcccaacctccaaaataacaaaacagggcgattgtagacggcccctgcccctggacgttgcgctttggaaataaacggaccgatccgcttagccgttttgcgtacttagccgtttttcgtatccatggtacatactgtatgatcccaggcataggtggataagcggaagcggaa

SEQ ID NO: 2819 - DNA, 1326 bp, Emericella nidulans
ttcaagaaccttgtgcgagatctgagcagcagtcttgtacttggttagggtatcggggttgttcaaggtgtagtctaccagcgatcaaagccatggttagctgtgagcattgcgacaatcagataaatcgcagtaaatacaagagtgtataatttagctcaggaagaatgcgttcagcttttgaggccacatcagtggccgcaggtcacagaggctctgttctcatccagttgatgacgccgacaaagcaagcgggaaacccacaaaacgcggacgtttttcgcactacagaatgaggggtactgcttgggcagttgacacttaccaacctcgggggtctgagtctggttttcagccattgtgaataattccagtctacctcacacagcgcgaggagaagacaagcaacaagcgcaaaatcagtcgtgcggaggagatggagggagaaaattagacagcctggtggactacctatggagctggagctgggcggtcgtgtgcactggtgagtaataatgaaggcggggcttcctgccgtgggctcgcaattacatacggtttttcttgccagccgtcgccctaagattcccttcgccctacgcgcttgatttaccatgtacgtcatgcatgtcggtcccattgctcctgtgactagaaatgctagcgtctgtttcagattgggattctgctagttcgaatgttcagagagcattcgatgatcattgcatggtcaaataccgaatggcattattcaggagaatcatggtcatcagtgagcttctgcgcccagggtgatttcttgcgggcttttagatgcggatagaggattttcataaacttaagggagaagtgtcttttgcgggtttcctttatccattgcaagggttcttaggagatcttggtgtttccagactcggtttcatttatagcgtacgttagctaccttgcccttttttatatgggaattcatttgttaagtccttttgcaattttgtaacccataacatttggctggttacttgtggtgcttttggtatatcctggtttgccttttgttagcctttaatatgtctccattagacttctattgccaatcttttatttctcctctctttcgtattttactatctccttatcgaaccttaaactttcttttgtttccttttcttaagtctttgcaatttaggggtatgacatattttgctaatcatacataatattttgtcaatgttttatattctatttgtgtatctcctattttatcctgcttggttatatattgtgtgttaaattttctatttgctctctttctttattttataataa

SEQ ID NO: 2820 - DNA, 825 bp, Emericella nidulans
agttgccgggtgacagtagagcaaagcatgaaccctctgaaaatggaaagaggaaaaaccctcaattgatggccggtaagtcaacccccgcggattacctagagtcttaggtgagagaaaagacctttggcccataatatgctcattgagccaagtctcatgttcgagttacaaccgaactatggcatagtcgacgagaatcctaaagccaaatgtcacctcctctcagagcaattctggcaataacattatgcggatatcaatgtgcagctcttcatgatatgcgctgactatttcatgctaataggtccagtcaattcctttgtagccattaattgctccaaagtgctgatgggctctatacaacattcgcaatgtaagacccggtcgaaatttgccagaacttgtcaaagtggccagcagcataaaggcccgcatggcccttccagcgacagttgtcaccgagaaccacgaattcgggttgtccagctccggtcagtgttggcacaagacgggcggcctgctcgaggccttccacatcggtaccccacacaactaactccaacccttcgttaggcaggggtcgaaggaacatcgcacccattgcccgttcgtagttaatggtatactggccacaactcctgcttgaacccgggtccatcggtccatgcaggccccctggaactgaaaggcacatatgcagagtcatgcggccgtcagaaacacgtatagggtatgacgaatatactgaacccgaagttcattccctaacgagacggtgatagcattcccgtgatgttctgcatcaaatgaaccgcaatgtct

SEQ ID NO: 2821 - DNA, 1805 bp, Emericella nidulans
acgctgagtacctctcacaggtatacaaagctcaaggactcaggaaccttggctgctcttttctccagcgttaacttcaattccacgcgacctttcctggacgacgatcttcaggaggcaacagaagcgctcaacatttccacagcagagatagaaaagcaaactgatgttttgacaacccagtatgagattttgagtcgacggcataaatgcaacagcaatcgagtattccaacaaaacagggaggtggaaagggtacgacggaagcatgaggcagaaaggcagaatacagctgctacggtaactgtctccggatcctgatgatcatatgccactgctaagaagtgcacagattagcgaattggcacacgaattagaagtcggtctcaagaatgaagcagagaaatcaaccacggacgggaaaaaaatactggccgctttgacggcgcggctgaaaagcaacgacagattactatcagacctggaggctcttgcatcaggagtaaagtcttctgacggtgaggtatctatcatgaaacgaacaacagaactgagcagtatcctctctcgatatattgcggaagagatatactgcagacttgatcgcttgtacctggagaaagtcctcaacgatagcaattcggccccaggcgccacgactgataaggatttggagacagcggccagtctggagcaggagatagattctctctatcccgaaattgatatcttggccgaaatatcaaccaagcaacaatatgttgagcctatactacggcaactccaagaatatcatggccagtttcgcatcgcctgtcataaaaaacttgaccttgtaagctcctccgttgtcttgtctgccttgccgcttaacctgaccttcactgtagatatcaaaaattattggagacatgacgacttctacagaaaaccttatcacaagcctccaagaccgcgaatcactctgcgccactcttgagctttcgcatctacatattggtccgaagtggtgacatcattctggactcgactagctcaagacgagagacaatgagaaggttttccacgcaaccaacagcactgacagttcagcccggaacgcactctgctccatgtccagactcaaagtgtttaagtgggctctacgccgcttgggcctgtcaaccgaggctgtcttccaggaccccgaagctgtaggaggagtccaagccttaatcaaggcacgaaaaaacatgcttgatgggctgcacagttatggcattgccagtgactcaccactgacggccgagatgctgccgacagaccgggcaactaggcttcttacttcagcgcttcaagcggattccttgttcacaacctctctctcgagcgtggaacatgagaaaaacctctcagagctcgagtccaggctcagccgtatccagaaaggcatcgagagggtcaagcttgacgttgtctatcagagggacaaggaccaggaaaagttcctggaaaggtgggggtagtgtaagaattggtgccaaactggagccttgctcgagtccatggcgtcagtgatagagtttgacattttccggcttggatcgagcagttcctgtacccaacacgtctgcctagcagaacaggcttcaattccagtcatatctcaatcgtcacaggccaacataatcgatgcttataatttgttgggctgactgtggctggtgccgtggcacgtggacgttcctgtcaagtgtattgaatattggaccatgacgaacaaacccgatatcgtccaaggcaggagcttcagtgtaaatggagag

SEQ ID NO: 2822 - DNA, 7556 bp, Emericella nidulans
  unsure (1)..(7556): unsure at all n locations
cagcttggaattctctatataagtgtagttcagcatcctaggcttctttacattgtacaattgcaagtagctccttgggatagatcttgtagttgcattcagctggggaattccttttagagaagtaggcacataggtgcaattccccttttttattatattaagagagaactcctcctgtattataacctgaggagtcagtctctactactatacagtaggaagggttaaaggttgctaggacaggtccagtaataaacttttccttaagcagatcaaagctatcctggcactccttagtctacaagaagggtgtccctttctttgtcaagttgtttagtgggtgtataatccctgagaagttagggatgaacctttggtagaagttgcaaagcccaggaatccttagacgccctttatagtagtaggggtttcctattcctttattgctttcaccttctccaggtctattttgattcccttccctgcctgtattataaagcccaagtactttgtctccttgcactcaaattcgcacttcttaatatccaaatataggcctgcttcttccagtttcttcaagactatttatacatgcttctggtgctggcagaggtccctattagtatagacaagcacattgttgatataggctgagcagaatttatctagatattcccagagggtccagttgatatatttttggaaggtgctcggtgcattagccaacctaaaaggggtgactagctattcaaagagcccgtatctcatatagaaggcagtcatccattcctggcctttggctatgtagatcttatggaaggcagcagacacatccagcttagtaaactatctggcttgtctaatttggttcagtgtctcatggatcaggggcaatggatagtagtccttcttggtaatggcatttagagtatagtagtcaatacagaaccgcagtcctcctcctggtttttgtacaaagagtactggggctgcagctggggaatggcttacacagataaagcctttctgtaatagttcagagagtgttttctggaggactattagttcttcctaggttatgttgtaaagggggccccaggggacttcaggatccttcccactctccacctgtacaagctcaattttgtgatcaatcctatctccccagtgcagtggtagttcttctgctttgtcttgtttgaagagccttaggtatttctagtattgccttggtagctttgtacaggggtcaatatgtctctttggggccagtaccttctatatatctgctaataagactgcaaatatctcaatatcttggccacggcaccttttcctttgtataaatcctcccatggttgcggcggatatctgtgctatgttcagctttggtaagggcctctttgtagtactctatagacagactccagtagtacagaggtacagcctacccctcttagcctctaaccttccatcatgttgctccagccaggggagtcccaagattaagtcatagcccaggttatcaggtattacatagaagtaggctcctttttctgtatgtgccctgatatctagctgaacctgtataatcttattaatctcctctatattcctggtcactcccttgaaaggttttgggtagatagatatgataggtatttaatatatcttgacaaacttgttactgattaccccataggtcaggcagcctgtatctatcattgtacaagcattataggtatggttgactagtacctctactaagaataggggggtattcatgcgcgagctgttgaaatcttgccaattaagtagtatttctctagctgtataacccctctatacgcgactttgcacagaggttattcattttccgactcactcttgctgtagtcattgatttggtcttgttcttcctggactatggccacctgcctagggtgtctggtaggttttatagggcactcttatacaaagtggtcaggatcaccacagtataggtatttgcccttagacaacctcttttgcttctcctctgcaggcacctgactagcttttcttggggtcctggtcccttttgtacagagggccgcgacttccttttgtagggctgcaatttgagtatgggtggcttcccagtctatttgatcaggggtcctagtccagtcagagcctcctgctggtcttgtacaagcaacatgcgtggggacagcagtgcaagatcctttttatataagcctagccactttctggaggttgtggttgattttgcgcagttgattatagtagttgtcatacgaatcctcctgcctaataccaaccatggcttttagcaactcaacattaattgccgtgtccaacaaggccttcttctggttatcatcccaattaatccctccagcattaagaagttcttcgtcaaatttattcaagaactcttcaaagtcacatttcccttgctttattgtatttacttgtacaagagcctttctctgtcagtcagggtcaccaaaggccttgtctagtaccgtggagaattctgcccatagcacgggagtctcagatttctggcgagccaagagctatggtagtacacactggctggcttttcctcttaggcggctgtaggcatagtaaacttgttcctcctctgtagggtagcaggcggcgttgattgcaaactttatataaaggttcatctggaaaggagggtagtccttagggtcttctccagtaaagggtttgacatccaggtgacaaggacagggatagctttgtttgtagggggtgggcgttgcggatgtaactgtagtggtaactggtggatggtttcttagttgtgagttctgtacggcctgtagttctgcctgtaagctgttattctcttcttggagctgttgtttctgagtccgcatctctgtacagagctcctggagctgctgtagtaataatgtgatgctttcttcttccattgtcatagtaaaaggtctcctcatactattattgagattggtgagcgattcctaatgttaagggacgtatttagatggatcttcctatctagacgtgccgtacgtacaggaaggaattgctaaagaagaaaggagaaagaaggattgttgttgtgaggaagtcttgtaggtggctcaccgccttcaggacagcgcaggccttggcgangtcactaaggtctaaggtccttgtataggcaaaggacccataacataagcatcctccaactatatatactgtatattcctagtaattgtttataacctttctccctaggatgttttttgatttcgcctcactggcttgatatataacaaaggtttggaccctcagttttctgtaccttacatgcaagtttaaatatagaagatcatattacaagcctgattcggaaagaatgcctactccattatcataatggtacagatatggctggaattctgcgagaattcagttttgatcaaaaacaaccttatgatcaatggattcgggaggtcttcttctttgataaagatgctaggcagtatattattctatgctgtacagatcaacaggcaagagcttttcaggaagcacagtttatctaggttgatctcttattcaagatgatccaaggcaagaccaatgttttcagtcttacagggtggagtaaggaatattagtataagttatgcctcttgcaaacctatgcctagcatatgctgaagatataggtattttaatatatgcatatgcctttattaatattgagtctcggaaggcataccatgtcatgttttggaagatctttgaaatgcttgcaaaaattagtcgccaggatgtgcactttatatatttctataatactcagcatggcatccgtgtgattacagcagatatgtgcatgaagcaaggaccaggacttggtgattatcttcataaaatctaccctgcattagaataggatgaatatcttttacatatccttgtcttctgccaggtctatgtaaagcaaaacttttgcaaaaagtttggagatcatcctgctaaggaggttgtctatcagttatagaatacacccagtcgggaagagttctttaaaaagatggagggtatccttgagctcttttcttatgacaagctaagaagatggctggagcataaatcaagcaagccctggatcctgggtggattatgtcctggctagtcaaaaatagactttcaatattagaggcttgttagcaagcataccaatatcagtaagagtagctatttcttggataataatactacaggccgaaagctttctctgcttggtagagtcctacagtatatattcttttggcatatgctggacagaaggttaatttatgcctagcctccaaacagtaacagaagaactctatgctcggctcgcgcattgcaaggagactggtattagttttcaccagtactcaataaatcccataccaagggttgcctagaatatgagacatcaagcaactcagaatcagaaatcagctgctatacaacaacaaaagctaaatatcctatataatgcttcaaatccctttaacttgatctatacaatgccgcctgcggctgagacagctgagactgcattacttacaagtatatcaacatctactatgcatatgccaggcagaagatcaatattactcttatcagatatatctacatttcaggaagggagtataccagatcttagccagcagtaactattgcaagctcctaagcagcttctatataaggaatctgcagagagtatactaagcagaatcttagaggcttgatagtatgctaaacagctgtaacaagagaataacaggaaacaagcagagctagatcttctagtccagcaagctaggcaaagagaactagataccttattagatcaggctagaggaggccaaacataaaatctggtttcatggctgatccttaagttatgatcatagctgagcaaatgtcagcaattattacagagaagtcgactctatagtagtatgctatttttgtagctagagtaaatatcttatttcagatggctctggcactgggcaaacttatgcaagtagtatagctgctctgaattgcaaaaattcttagcataggctcaacagatgcaagggatatgcactgctgttaactaggcctgctcaccctctttatcttctccatctcttacatctttattacctctgttatccccagcctctttatcctccttacttgtatcagaatccttttgctcttcatcttcctcatctttttctccattgttgcttgcatctggagttttgtcagccgtgttggcagccttcttgttctgaactacatgcagttaccatatactcagtttaagtaatatatataaacttacacctggccttgagggagccaggagctctaatagccgcgaggtgctggcaacactgtgatttattgggggtgggaggtgcttcggctggtgccataggtccttcctgcatactattagaataaagtaaagcatggtaggataatctatacatgacattttctacagggtgatattatttgcgcattgcactgttgacgatggaactttataccccagcgccccgcaaaagctggatcaaactgacttgaagtatgttaggcatatgctcagtatatattaaagtacttacataatacgctcacaagcagtggcataacagttgaggaggccattaactgggccgcggcctggttcaagaataaagcaggcatcatgccaacaatgctccaggacaaaatgcttcaaagtactttgcatatgctcagtgtcacaggctatggcctggatcttggttgtcggccatgccctcaacctggttctaaacaaggttactgcaatatcagcgtacagcttcggaattgaggcctcgaagcttaggaaaggagatccgtcctcataacttcggaaaagggatccgtcggcatacaggtccggaaagtcagaaaggttgataaagggaggaggaagatatctgcgcttctatcttttgtttctttctctaagcttgtgatacttgtttatacaggacagccagttgaaaataatactgcctacgcccgttacactcagcacctccccagcaccagctcagttctctccagtcatggtacctacttctcgccagcgactctttcctcaatagcaatgttcttgcggctcaaagtatcaactacattgattgttaacatgtgcgacaacatgcttaagtctgcttactttttgctttgtgcttagtacatacatgatgccagtaggccgaactcttgctaaagaccatgccatatatttggtctcctgaaattgcagcccagcatctgctattatcaatatatacttggtatatatttattacaacattacatgtattgagctattcactttcgagatcttgttcaggttgcttgctttgaagtacagacctgtataagtcatagtcagcataatctaagcaggtacagagcacatgcgcactatggtgatatccccagtctgacaggttcgccgcattaaggacctcggggttctcgaagtctgttttcatgagatcgtgaccgataagaggctgcatactggtagattagttaagtatatgcttaactgaagcactccagatgcgaaaacaaagaagaaaacacactggggacatggtaatctgttgttgtgaattattataggagagcaactaagaacatggacgaagcagaaatatattgcgcgcaaaacacaccattgctatgccccacaaccttagcaaccaaaagtctgatgtttgttgacttttcatgatgattctcagcacatattatggctaaatgcattctatttgtagtataaagtatagagaaattattattgttgaatactctatatgatgtttggctatacagagttcctgtggataagataagctgatcatggctcagagaacaggtgactgtagccgatcatgggtcagaagtctctgagccacggtgggttctgagccacggcgtggttcagaaactaggcttggcgcttctgagccacgatggcagaatcctgaaccacgccgagctgagaccccccgtcggctttacgtgggaattgagggattggggtcacgtgtcacagggccaggtcgtcgccagctggctcgcccgtgacagctacgttggtgtagttgatagtacggcagactattacgacaaaactgcaacaaccataatttcaggtaagcgctagtatatgaccggcagaaaactagatacataataagcctgcttagtttcactaccactggctggtagttactcgtcctgagcaccacgaagaggtgcaagccttgctcagggtgctgtacacaacgcccgtacaactaggtatgctggtgctggtgttggtgctctgcttgcaaacgaaaatttgtacgtaccttatagctggatgggattattaggccccccatcatcatcatcattatcatcatcatcatcatcatcatcatcgtcctcctcct

SEQ ID NO: 2823 - DNA, 725 bp, Emericella nidulans
ctgaaagatccttgatcaccacaatggcttcctgcaccacgtagttgaccttggtgttgatcagatcgagcaaagtattgacacacttctcacaagcgctttcgatcttgattgcaacctggccaatcgccttgaccgcgcggcggacgaaatccatgtccacctccagggcgtactccctcagttctgctagtagctggtcgaagtttcggtcgttggctatccgcaccatgatttcgagcttttgaaacttgacataaggtgggtcgttgtacttgcagaaaaaaacgcggagctctttgttaaggatgtccggctgcttttggagcaaaagatcgatattgcgtaaggcgacatattgcacttcgggagcagatgatactaaggtcactgaaacattcattagcagttcaatattaaacaccagagaacactcggaatacctagcggaggggccatcttcttgaggtagtttttcgatagctccgcattgattattttcatatgcaagaagactgttttgacagcagcgagaaccacactagggtttgcgtgctggaactggggtgcaactcgctcgcagatctgctctgcttcgtttacagcgctggttctgtactcagacagtgtcgtgaggattgtgactcggccccactcagtgcactcgttcaacgccatcaggagcttccgtagagagattggggttccttgtagggcctgaatct

SEQ ID NO: 2824 - DNA, 3492 bp, Emericella nidulans
acaccgccttggggtaactcaaccgctttatttcggactcccggtgtggaatttcattgaccaaacgtttcttttgctcaatatgacgctgagggctcatgccacgcctgagcacagtgttaagctcaacatcgctctcaatcatgtccatgcgatcctcagacacaagagcaggggaatgtttcgcgagtaatcgcagctcttcaatgtgattttgccccacggttgaactgagcgatatcccatggacggcaacattgaaccacgcatctcgaaacagagcagagatgtactggtcttgttcgagctgcaacccttttgaggagagtagagccagcggcttcaaaagtgggctgatgtcctcaggtgctagatgtccttcgtgctcatctgtcgcatcacccttgttcactagactttccaagagatgaacaaggtagagtctgtaaagaggggaatcccttctcaacgacatggagaggtaattcatcgcacctaggactgcattcacaacattgccatatcctttggcgacaccatcgcggaaaacacggtcatagaacttcaatagaagctgaaactcagcttgaccagtggtgatggagagtgccgctgtctccttgattatacaagcatccactgctgtgttcagtttgctgatcttttgcagaagcatcgactgtgccagggcactaatttgttcatcatggcagctggttgcaattgtcactatagcatgaacaatattcggaacgttgtccgtgatctcgagggaatctgccgaggcctgtcggaattgaataactgcctctccggtgaggtaagacttgtcagagccagggctcagcacattccccaaggagtatagagttgttataacggaatcttgggagagaacaccgagaatctgagaaagacatcgagcagcgacaggccctatgcttcctgcatttataccaccctccattatgaaacgcagcagtgagcgacttccagatgatgcgctgctgacagacatacgggagataatcgtaatgcactttagagttgtcgtcgcaagttcaatacacgacatctgctttgggtctataagggtatcctcgagccatgacagaaaatcatcagtatttgcattttccgtcagaagcgcacaattgaggtaccctgttaaggccagagccttgacagaaaatgcaagttgctgttgccaaggagagccaacttgcagataatcggagccgtcctctagaagttggatctcctcggcgatgatgccagtcaaacgattgataagggttatctctgcttcgtcatgactcctggcgataccgacaccgtccacatattcatccaggagctcatcatccgacatattttgcgctccaatgagagatgttatgcaagatttgatgaaacgcatataaccctcttgcagaagcatagcccctagcggacgaccgttggtggcataacgccgagtatatattttccaattccgaagtgtattgtctgaggcaccagcactgcgcactatggatgaggcagtctcgataaccaccataaaattctctgaaaacattgaccgaatatggtcgaccatccgcagcttttcagtcgcagaccaaaaggcactaaatttagcgggggcttttaggaaaccaacgatcgaagcgcaaatggccaatatactgacagactcggcagggtcaacttctgcagagaattcgatcgcctcgacacatttatatacatattcgttcacggaatcaaagacgacttggcgcaaagacgggtatttcgaccccagatgaaggagagcgaatgtgaggtgatatgaaagcgcttcccacggagacggactgatatcgcgtagaaagggcgaaggacggaaaagctggccatgggactctggaaggtatttggatagttgtgagactaatcgcgacgcgtgttcctctttggtgacggaaggggcggccttgcagagagatatcaagacacataactcgcgaatatccttttcgtttgttagttaatgtcacttctactggacgaaacgacgaaccataggcatccgtgacataggagattgactgtgcaaaacgccattgagagagccattcagtcgatttgttaaatgctggcattgtcgagtaagctggtcaatctcggactcgtggctgtcgtccggcgtgctgctggcggctaactttgcgagtttctccaaggcggaagcccggatatttggactgaagctacacatcagtcagcgtttgatagcacaatcagaggtctcccagaatgcgcactcgtccatttcatacgcttgagttaacttttaaaataaaattgttcgtgagtggtgtccttccgcgcctcttgtcgtccagatgggccaggggcagggattccaggggactcgaatgatataggtaggtatggagaaagatccacgtggggcgtcagcggcggccctggtgctccagcttccatacaagcaagtaccgagtggtacttgtttccgataattaccaaagcactccaatctgtctatacctcactttgtcaaacgacgggagtcgatttttagggccagaattactttctgtccagagactagaagtaatggcatcatgctctgcattttgttggttcatttgcggcgaatcagcagttcagattccctggagggatagttgcaatttaagcaacaagacagacatagagtgatttcatgagcaatgtacctacatcacgcatttgaaggatataaaagaattgttttagatcctttgaagctaccagtccttacaaagtagaggccgcgatctgtccgtaattagaacaggatacgaaagaaccatttttacgggcaatttacgaaaggatgttgtacctaattatggaactcgagagtagcgcgtttcctaagaccctggccgaacagtaagattcagattggccgacgaactcaagcttttgggcttttatttccaccgttatctttttatttgactaccacattcttctctgactttttcaagctgtcgctggttcaggagcaccattggcagctcctcccgacctttttggcctataaacttcacctcaagcccgttccgcacttctgctcgcagtagaatgtgagttgtagagacaatacgatggtaccacgaaatgagcaaagttcccttaagcgcagcagggtaggaaaccactctccaagctgtattcagctgctaattgcatcctcatctctataggttactgcagaccacgaatcgcaagatcaaaagaagcccagacggtctgagaggatcagttcacagcaacaatcgcagacacctgtcatacagtcatacctacccactccgtaacgcatcatgactctacggctacggacttacgaaacgaaatgacagctactccgccaagtcaagctcttccgcggtcaccttctgacctagggtctcctcctggcgatacacaagc

SEQ ID NO: 2825 - DNA, 965 bp, Emericella nidulans
acacactgtaagttagggctaccgactcacagaccttttttccagaccgaagccacaacgtcaagcctgagctgactagaaactactggatgtcgacataactaagttactggcagatgcccctagtccagcttcacccactctaatgaaaatcccccgccttaacgcgggccatagaactggatctggcggggcccaatctatcccagacctaatctacagcacctgtacctacctagtggttatggaccgcgatagggaaacagtgcgaaataattatataaagcctaactgaaggaaaagcaatttgcctaagcatcccaaaacacctttcatcctaatcatccccgaatttgggagactctgggagaatctgggagcctctcgaggggtctttcaagggcgggcagctagctaaatcttcctctgcgtctccccatacttcttcatccttttcctcatatccttcatatagaacttgactgggtatgtcctgattgctctgggcaaaaatggatacgtcgcctttgtgatcgccatcgtcgatttatacaaccgcttgcgccccttactgcttttcagaccatactcctttctcaggcgctcggggagcaactccgccgtaacaagacgcagcgtcggcatcagtgctttgaagtagaacggaatcttggggttatacaggagatcgtgcgcgacgttctttgcttcgtcgcagatgtcgaatgtcgcgagctgctcgtcccagtagatccagaaggcctcgcggtcttttggccacatttctacgggcacgcgcagagaggcgcccaggacaacgtattctctgtatgcctgttccgccgtttcttcgtccaaaacgccgaatatagactcgtacaagtcaacgccaacgcgtacataggtggccgcaacccagagctgcgcactgggatcatcggcttcatagtctgaccctttgacgg

SEQ ID NO: 2826 - DNA, 4587 bp, Emericella nidulans
atgtatataccacacaccatttaagagcagccacataaaaacttactaggatccgagggcgcgcctcggcgtttcctccaaacagggctgggctgtcttcttggattacagtcggcatggtggttaatgtgtgcgtggctcttcagcgacggcgaggatgggattaagaatccgcgatggcgacattcatatacaacctcccccacctgcaccggctgtcatacggtccagcttccccatgcttagaccattcgcagcatcctggaacatgaaggaaccatgtgggagccaggcaagagtcatgcaccggctaggctggtagcgccgtcggcggggcaccggcgaaattctcggagagccgcttcagtggaccggtcgtgttgccaaagcaggcttagattcaggctaggcaagagagaatctggagtatcctgggggtgatatcgtgcacattgcgtcgagcagcagctggcccttttgcgtactgcgagctccaagggcctgggacggaatatatccaggcaaaggggccctcaaaacctccccgtataagcttccctgctagcagggaccctcaaaaatgaccagcgaaggttcaacgtggatgcgccaccccgcgatgatgtgctcggacctagcagtggtgtaataaccctagcgcggtctgctcttcgccaacgattgcaaaggctcgattgcgaatagctacagcccaaagtgctcatcctgcccatcggaccagatgggagttattaacaggtatcagtgtatataaagacggacacggcgcatgccgtcttgtcctcatctcgacgtgactgcgtttctttccagcaaaggaaccctacccgcagcaatggacgatatcgagcagagcggcaaaagctcgctgtacagccaagcaaaggaggatgataagtcctccaaggctctacctgcggtcggacaggagaacctctcttcggtgactcctcctcatgagtcctatgaggggcatcaccggttcgatcccactgcgacctggacagaggaggaggagaggagggtaatttggaagaccgactttatgctcatgacatggctctgtttgatggcaagtaccgtggatgactgcaggaacatctgctaatacgccaatccagttcttcggccttcagctggaccgtggtaatctgtccaatgccctgaccgacaatttcttggatgatctcaacttgaccaccgacgactacaacaacgtacgttataacgacgtgttctgttctatcccttttttttttttttttgtttttttgcatttgtaagctcgactaacggcgatcgcagggaaccaccatccaactcctctgttttctcgcagcggagttccccgtgcaacttctcattaaacgcttcggtttccggcgagtgttgcccatcctgatgctgctctggagcttggtctcttggacgcaggcttggatgacagaccgagcatctttctacgtgaccagagcgctgataggcgccttcgagggaggttttatcccaggcacaatcttgcttgcaacgtacttctacaaaacaaaggagctttccatccgattgtcattcttctggtctactctgaatgtgagaaccctttatctgagccatgcgttcatggagcgctgacaatcccaggctgcccgtattatatcgtctttactggcggctggaattctcgagatgagggggaccaggggacacacaggctggttctggctattccttatcgacggacttataacattcgtcatcggcttgtttgccctcttctatctgccaagttcacccacgaggacgaagagcatcctgtatcccaaagcgtggtacaccgagcgccaggaggtgatcatgatcaacgtacgttctccagagactgttgagccaataaactgacatttttagcgtcttctgcgtgatgatccgtccaaaggtcttactcacctgcatgaacgtgctactctccgcgacgtgcttaacgcatggaaggacaagtccatgtgggggctgtactttatcgggctgattgcctacattccccaaagccccgtgcaggggtacctgtccctgacactgaagagactcgggtttacgaccttcgagtcgaacatgctctcaattccatcagctgtgctccagatcatcctgatgctcatcctgtcgaagagcagcgagtacttcggggagcgcacattccactgtgtgattggcgagttctggtcgctgccactgctggctactctcctcggtctgcctgatcatggatacaactggggccgctttacggtcaccacgatgatctcaggatatccgtatttccatcccatcgtgtcctcatggatatcagagaacacatttgacgtgaaaaagcgagccatcactgcggccacatataacgtgattgtccaaattggctcagtcatatcatcgcgtaagtcgaggtatccacccctggaaacagagctgaccaaaacagagatctaccgcagttatgactcaccgtactactaccaaggaaacaaggtcttgatatccatctgttccctggcgcttgttgtttttgtggttcagcgcgagtacctcaggcacctgaatcgcctgaaggagcggaaatgggaggccatgtcgcccgaagagaggatcgaataccaagccgaccttgctcaacgggagaaagacggaaacaagcgactagatttccgcttcaagtactagattttggcaaaggcgcagtcgtaatgtctgttcacttatgttcgacgatcggcccccatgtcaggttagggtgttcaggcgcggatactgggaatctccggaaaggttgttcagaggcagatacgtatctaagtaaagataatcttgacgataatcaaggatagcattattgaacatcggaccaagtgggagtagatccagcgaagtcgaagtcgttggagtagtgacgacactgggatcggttcgaagatcctgcacagtggagtatatgagaggatcatagctggactggctgtagtcccctgggtccgtgatatcttgtaggggctggccgtagggtagtggtatagtagccgcatcactcgtcagccggattgtactgctatcatcactggccggctgatctacggttgtcagtaatccactgggccagtcgatggcgtccccagtttcgttggactcattctgtgagaagtcagtcgcggtcacgctatcctcggtacatgtcgctctcgcggtttttgattttcgattaggtttattgttcccattgctcggtgctggtaagataggtgctgagtgcatataatgtgccttggcgattttgccgtatagtatgtccaccaaagtgctgttttctccgccagtcaacgccgagaggatggagtgaagccgcgtgaggatgttacttggccggctttcttggtcccatcgactcgtatctggcacggctgcagtactggtgacagcgtctgcgagggaggtcgcaatttcgtacagcttcagctgctattcacgttgtcagctaggcactccatccattctttatatcgactcatagcgcttaccatgccaaggccatgcgcctggagcgccactcgaggcagccggtagactacactcaccagatcttttcccacgatcaacggaaataccggcgagagaaaacagtctgatgagggttggcggccggtagacgagtgggacagggctttccatgcgagaatgcgcatccagtgtctcgtcacgcagatatcggctctctgaacgtcggataccctatccagggtgccaaagccgtccggggatttatcctggaacatctcatcaaaggtggcagctgtagcggcgctggagctaacaggaggctcgagccctaggtggtagtcttcgacaatgtcgaacattcggctttgttcgaatagtctgaacaatgtcaggagtttcaggaatgcaggtagaacctcgtcgtccgcatcagtttccggcatagctgtgtccgtttttagaatgactggaagcttgtggaggatgcaaacaccactattatacttgcatcagaatcaagctggcaagcaaagatatgcatgccacttaccgttccgtcacaaatagcaaccataacactcgacggcggatcttctgctcctcagccgcaaggctagggtacgatgcttctctatgtaggtacatcatttgcgccatagtaatagcctctctgaggtagagtaccgattcgcttccccctggttgttggttttcatagtatacatgtaggaagaaggctgttcggacattgtccaggttcacccgtgaacgatagtccaatcttctcctggcctcaaggcactcagccgcgaggacatcagctgtgactgaccgatccgatgtcgaaccaccaagccgtagctgagccatagtagcagcggctatgctcgtcgcgagcgcgaacctctcatggtccttgttctcggggtcttgttgcaggtttgcaatcaagtcatcgacgtcgacaatcggccaaaccgggtacatgcggacatggtaaatatagagcaccggcgcaat

SEQ ID NO: 2827 - DNA, 1004 bp, Emericella nidulans
caaggctggtcctgctgtccagcacactatccatggttgtcataatccctggtaagccaaacgaacgaacgagaacagttcgaagaagacgttacttttatccgcagtgtctggcaattcgtacatgcagtggtgacctttcgcttccgcggcagggaaatggcgatgctggagccggggggcatggcgggatcctgaccaaatcctgaagagtcagatactggacgaagtaagggaacagccagccaccatttatcctctccaagtgactgccgctggcgtatctgacgtaacgggcctggtatctccaaatacgttgatgggtgcattgttggcttccccatcatccaatcggatgacagccagccggcatcctgttcctccaatgagacgcatattttcctaattagctcagtagatgggcggtggaatgttgatcatcgccggatctgtgctagcaagaagtctattggccggtggcttggctccattaaccggtgaactaatctatactgagttctcgttatgcgaaagggacaggtccacgatagcggggttagggatggctgaggtcagggactaagggtctagaatgctgagaatgtagtcagaatctatcaagggttcctagcaatgaatccttagtagagtctttaaatgagccctccagtagagcacccttcagaggagcctacaagaggttccaagaccctcttggtaatattaattatgaagacgaaaaataagattcattcaagaccctcttgagtttgccagagccttcttttctgtttattttgcaagtgagattatgccaatagaatcttttcagactatcgcgtgcttttcaaatgcagtcgtctgtctgaataattcatgctgactaaggctgacaaatgacatgtcgaaacaagcatttatcgttcaatcgtcagcatacaattagcccagggccccattcatcttatagacaagctttagtcatgtcaattacattcaacctg

SEQ ID NO: 2828 - DNA, 1128 bp, Emericella nidulans
cctgaatttcaagatccgagtcagactcgtagctatctgagctggaagaggccgagcccttcccatctgcctttttggcaggtgctttcttagtcacaggctgcttcttgatccccgcttgttttgtttttgaaggcgccggtttagccgcgaatgtgctggtacggatttgatacctgccctggttaatagcttacggggtgaggattggcaaagacataccattaatggcaggacttccaaccgtcgaaatatgatcagaagcgagggaattattcacttcaggttggggtaaaatcggctgcagatgtacattatccgggaaataactgaacattctaggggaacccatcagtttgaggctcagaaagtaagtaactagggaaagcgcgcactttggatcctcagcaggatttacgtaaacaaactggttttggttgttgagcgaggagctctgattcatgggctgcggggtactgatgaactgtgggttgattgtctgctccggagcacgttgaggctgtgtaaattcatttggaaagctgagcgagggatgctgaaactgtcagtaaaaaaaaataataataaaaagaagagaaaatcaagaactgatgtagcctggatgatgcttactgtggggtcgtcagggaatccgggggtgatcgtatattgcgataacgagttctgatggagctgctgtggctgatatgaagcaggtcgagacgactgctgagagggctgtggtgagtgtgtttgtgggaatgcatccgggataggtatgtgttgtggagtatagaagttgggggagaacgagtaggactgatagtgagcattatccggcgcggcgaccgcccgggagtcaaaagtcacttgtccctgagcatattggggaacctggcgatcctgagaagatatcccaaggtcctgcggtgttggggggaccatgggttggtgatgcagcggattctgctgccatgactgcggtgttgctgactgatacagtccatgggccgaatctcggtgagaagattgcgaatgcagagcaggatggtcccagctaattcccaggggctgatgttgtgattgatggggtgtcaactgttgctgaggaggatgtgaatgatggtg

SEQ ID NO: 2829 - DNA, 1754 bp, Emericella nidulans
atgaaactaccgaatccgctggttatctgtgggctgcgccgctcgaagcttcctgtcgacatcggctgctacgttggagtcgggtgcgacgactatagtgaaaacgttggatctcgtaatgccactgccttctcagcaactggtacactccaggcttttaacagtggccgcatcatccattactttggttggagtggcccctctgtcacggttgacacggcgtgctcatcagctgctgttgctattcacctcgcgtgccaggtaagtgcgttccctagccaaacaaacactattacaattatgctaataaagtgtaccttgacctaggccattcgaacgaatgattgcgctatcgctgtagccggcggagtgaatataatgacagatccccgatggtcccaaaacctggctggggcatcgtttctgtcgccaaccggggcatctaaggcattcgatgcagatgccaatggatactgtcgtggtgaaggtgctgggctgcttgtgctgcggcccctggaagcagctcttcgcgatggcgatcccattcacgccgtgattactggaacatccgtcaatcagggagcaaactgctcgccgataactgtcccggattcaaactcgcaaagaagcttatatttgaaagccttgtcgctttctggacttactccagacgttgttggctatgttgaagcacatggcactggtctgtaacccactacctgttatcattaaccatctgtagatatcgttaacatattgacaggcacccaagtcggagacccaattgagtttgaaagtatccggaaaacattctccgggcctaatagggccacaaagctttatgttgggtcgatcaaggacaatattgggcatactgagacgtcttctggtgttgcgggcatgctgaagacgatcctgatgatacagaagcgcagaatccccaaacaagctaactttcgtcgcctgaatcccagaattacattaaacgagaggaatcatatagaaatccctactcaatcaattgactgggaagctgaaaaacgcgtggctatggtgactaattatggggcggccggtagcaatgctgctatcgttctacgagaacctgcgtcaacacctgctacctcaaacagtgcccatcgggagaccctgccctcgcatgttcctttttacgtctctgctcgaaccgaagagtcccttcgctcgtactgtgaagctcttcagagcaccatccgtgaggtagcacagtcaggtactaacaccgtgcagcatatcgcatacaatttggcacggaagcagaaccgagatatggagcactttgtcacatttccagccgccgctggggagccttcagagcttatgacacgcttaggatctatcgcctccgctcatacgcaggtcgaaagacggtccccgtcctttcatcctgtgattaattgttttcgcggacagaccggagatacagcgagcatcttaagaaatttatttgagaggtgcgagcttctgcgctttcacgtggtagtctatctttttcattttggatacacgtaaggcctttgctgatctgttcttttgggggaagggaaaaccctgtgccccgtagatctcccttcctatttccggttatggggcccttccctaacaaagaatggggaccctctttggatggtttcatcaaaaccccctccaagggtggttattttgtatgtgggcccccaagagggctaatttggggcaaaaccccctccgtgggg

SEQ ID NO: 2830 - DNA, 3364 bp, Emericella nidulans
ttcattgtccgcgcccagggtgaagctcgatcagctgaactcattggagacgccatcaagaagagcaagagctacatcgagcttcggaggattgagaacgctcgacatattgcccagatcatccaggagaacggaggaaggaacaaactctacctggacagccaaggtctcggcctgaatgtcaacgcgggtgcggacggcgaaagcaaataatatcgaatattggggggaaaagtttcatggagggtctccatggactggtggatcttctaaacttccttcccactcgagagttgtcgcgctttcaagtggttcggggtggaataaatcatttgtacaaatagtttttcaggtttccacagcacaggcgaattgtgtctcttctctatcataatttatggttgtcatcgtcgacgagtcatataccatgcaacctttttttctagaaaaaaaaagtatcgtacattgaggtggcagcagccctgcacttcatgcaactcgtggctgcggggacacgagcggcaagcggaaattttatatttcaagcggggaaacataattttatcttgatcacatacaccacaaatcaagctcgcgcagcaacatattgtgcgtgatttaatctaaaccgtgcttactctctcgtgtcacaaaagcttgattgcctactttttcagggtgcgtattgctcgctgtcaacctccgtaccctactcctctttagagggtcctctgcgcgaagccgcattcaagataaagagcgcattagtagctatagcttaccgcgccccagatggcgaacccggtcaccgaaatcgacgtcgacctcaacactcaagaagtccttctcgcagcgtcacagcacgacaccgcaaagctccgacggctcctccgtgccaacgatgcggccgggaaccccgccaatgtcaaggaccctgagacaggttattcaccgcttcacgccgccattgcagcctgtgaacctgacgaggaggaagacgtgaaatcaaatggtgtccagacaaatggggaccgacaaacccacgggcaggagagcacagttgaggccgccgtccagaccgtgaaacttcttttgcaggagggcgctatctggaacgacctggatttaaacaatgagactcccggttgtattgcgaggaggctgggactgactgagctatatgacatggtcgtggatgcgggagttagggcagagctgctgttgaacaggttggatgggtatgagcaattgtcggatgaagaaatggaagaagatggggaacaagagcaagagcaacaggacgccgccgtcgccgccgacgcaagcattacaaacacagcagaggacgagtccgtcccgcagctagttgataccacagctgcagcacctccacaaacagcagatgcggacgccagtgtcacaagctcccgctacctgaactcagacctcacattccagcaagaccgacttctcgaccaggaccaaaacggcgtaatgatggcctgggagtcggacatcatggccaagtccgcaaagcaactcctcccgacaccaggtctccgcgtcctcaacgtcggacacggaatgggcatcgtcgacggcttcatccaagagcagtcgccgtcagcacaccatattattgaagcgcatccagccgttgtcgcagaaatgaagcggaaaggctggcacgaaaagccgggagtcgtgattcatgagggcaagtggcaggatatacttccgggcctcgtagctgaaggcgtgatgtttgacgcgatctactacgacaccttcgcagagtcttatgcggatttccgagagttcttcacggagcaggtgatcggagtgttggagcaagagggaaaatggagcttcttcaatggcatgggcgcagaccgacaaatcagctacgatgtttatcaaaaggtcgtagagatggatctcttcgaggcgggattcgatgtcgagtgggaggagatcgatgtgccgaagctcgaaggcgagtggaacggtgtccgtccgccgtactggagtatagacaagtatcggttgccgctgtgcaagtacatggattgagtgcatatagacaatatgcgggcgaattttatgacttgagtacctgcgaggcgtcaagagacaaatacgactactttataaatctgccacttcttcaattgtaattttcagctatgatagcagccataactgataaaaacgaatttcgatgcttcaaacaatcacaatagtcgagtcgtcaaggaaggagtgaattgaacggaggataacagttatgcatttgtgcgggcaccgagggggcgagtgtatggtatttaaacagagctcgtttcaagcgcccgtcactcctcccaggtaagataagacaaaatgatatgctcagtacaataattattcgtattatgttctaattcgatgcttagacacgcttcatgctatgtacttcgtacgctcgatctgaaaagcccttggtcagggatgcgaatccatgccccagaatatagaacattgataatgacaacaagcagcagggaaaataatgcccgtctcagtaaaacgccattcgctagaggggaatagagtcaatcatcacatcgagaattgtcgagataggccgtatgcgttatatacaagtgacttgtaagaaggaaaaactttctataactggatgaggtcaacttctgagaagtcaggtggactgcggctgaagattgtacggcactttccatcaagtgcctggtactcgttactaatccagatatgcttgctgaagcgctgggtgcggtaaatctcgtcgtcactgactccgaggtcatcacgaggaatccagataacgggacgtttggaccgaagggcatcgtgctggaaagctcgctggacgagttggtcgcgttcgtcgggagtaagatcctcaagctcgtcgtgaatgcctgcaaacaacgcggagctgcgagagtgtcccgctacggggccttgtgcttcggtgtctttttcaagcttttcccgcatacgttgaatcgagggaacagcgtccgctgagtttgcaccaaagtatttcgaccgtcggttaggagactgtgctgtttgaacggtccatgatgcccaagggaggccccagttcgcctggggctccgggccaagtcctgaccttgtgtttcagtccaaagcccgctacttatcccgcctaattttttcaacccaactcacgagagtcttcctagcctgatttccccccccacctttctgagcgcgctaaggaagtctgccctccttgttttctcatttatattagaccaccggcctttcccgccaattttatctgcaacgcattctcactattgaactcaagggg

SEQ ID NO: 2831 - DNA, 1305 bp, Emericella nidulans
tcatgagtgtcgggataaaaagaacaatcgcgcatagctgggagcaagtcgagatcaaagaatatcattgaggtcttgcgttaccgccacagtcgacctgatggtccgaccgctctttgttacggctcaaggtcgcagaggccacgatgagataaagttcgctgtggtatttgtcctgagcatgcggaatcatcggaagtcggtgacgaaatttcactggccccatccattccagagatggaggatgatgatgttgcagagagcggactgccgaaattgggaaccagatcatccactgtatcacggtcgcgagaaacagatttccaaagccccgacgagggtctggacgttgtccatgattgtaagcccatacctgctttcagcgactgccccatgataatggggcctgaggaaattgtcgaacggtgccgatacgaagaaatgggcgaggtcggtatactacttgtcgaaggagagcggagagaggtaggtgatcgggcggaggtagtaatggggcttgttccggggcgcagatggtctgttgaagctacctcgaccaggttatagtgctcgggccccgatgttctactgagcaagtcgtacttctttgcccgctcgccgttccgcgtcaaatccttcacgtaatctttacgaacagcgagagtgagagaagctgtcgggacgttcaccagcgctggctctcctgacagggcgccaattaaggcgttgcagcccgccccatgagttacaagaatcaagatagtatcgaccgccgattcctctgcttcattttgtcccaaaaattggagctgtgaacgagtccgacggtgaccaagcggtgcggaagcatcatcatcctggtaccacgagatgatacggttgatgccgctcctgaagcgggtgagcatggtactccattcatccccatattcacccccgctgccccagttctggggctcacgcatgctgtcccactgataatcaaccaggacacagttgtcacgagcatgggtcacataaccgtctggaataggatttgagggcgatatcgcataactcgggacgggcggtgcatatgccgcgccagggttggaagaaacatcagtgtttattttcaagattttgcggccccacggggtatctacctgcctaaaagaatcataactaccggaacgatttcgttgtgctggcccgttggtggtggctgaacttgattcgacttcaaatttccggtcctcttcatccggggcggaaactgggctgcccaaccaccaggaaagtggccacggtcggagtaggttgggt

SEQ ID NO: 2832 - DNA, 1254 bp, Emericella nidulans
tcagccggcgcggcatgagaaaccccccagccttcctttgcatacgcctcgtcagtatcaatgtcgtctgtaaagagttcgcggccgggttctcgcttaaggaatgaagttcagttcagcccagcagataaaaatgttgacctgtttccatttactcgcgcacgcctcaatgacgtcccgtacagatctcagcagcccctcgacgaagctcggctgacacctgacgacctacgacgacagatgttgagtatggtgtttggttgggacggcgacattgaggggttgattaaggatgagcgtaagtttgccggtaccccttaggaagcttgactgactctttagtataccgccaccccccaggcagccctgcagccattctccttgcgcaatggattgacgagtctgacactgaccacatggtatcgatgatcagtgctggcccaacctcgctcggtgactggatgttactcgcattgagtcagatgaacggccagtcccaggccaacaaggtcggccaggcctttgtccagaaactgctcgagctcggcgatgtgcacactgcggctacgatcttaattgggttaggtgacagagatgatgcaatcgaggtgtatgtctcgcaaaattactacatggaggccattctcatgacgtgcctggtgatgccgaccgattggcagcgacaatcgtaccttgttcgacgatggggcgagcatgttgtcgctcactcccaacaacaactcgctattcgctgcttcatgtgtactggggtagagccttctgatccctgggcatctccggcagttcatcaagcacacttcaaagatatgattcccggtaggtcgccagtcggatcgccggagcctgcgtatcaaaaccctgcaagtctccttcacccgacaactactgcaggcaatcgtcagtcgctcaagactccgtcgctcaagttaatcacttctttcgatggacagccaaaccagcgtttccgattccctggcctcaaatctgacgatcgaacgccaaccaacgcccctggaatcactccaattgcagattcagcggccggatcttctgccctttcacctgggggcttcgggtcatacaagctgaacaatattcaaagcctcaacaatgccatgaattctcggacaggcacaccaggcttctcaaagcaacgtctgccgtcaattggagaaaccccagtggatgttcacccttcaacattcctgtttaaagagacaaaaaattagttgc

SEQ ID NO: 2833 - DNA, 4057 bp, Emericella nidulans
caatgtattgtttcggacgcaccgattcccttcatatcgtacaagactacttggagtctcaaacaaacagctcggacaataccagcacagtatctcttccgtgatgcatcgcgggcacttgatctggtggcagtcctcgcagtacaggagctgctccggcgggtacagcgagaaattcgaccgcggcgcccgcgggtcaaatgtctgttcgtcctcgtcctcgtcatcagatatcaccggctgtgggcgtggcttcacagggctggccttatgcggcgactctcttgacctccgtttcctggagggatcgggcacggaggcgtctgcgcacgggcaggagatgaacgtgtaagggaatggacacgccatgctgtagtagttagtctagatatgagaaacagagagtcgtagcctccaattcttacctgacagtctgccgggacccaattaaggggtgaaggatcaatgtgaggtgcaagtggcgtgtttgctggagaagagctccttatcgccaatcgacgtgctaaagatttcctctccgacgtcacaactcgcttccgcagaaatggccatctaaccaccaagcccgctagaactccattaagacttatcactattgcaatatatatctcatctacacaaatgtcatctctccgacacctccgccccgttttccgcgcctcatggacggctcgccgcacctacgccagtcaaaccccaggcaatcctgtgctcgaaatcttcaaccgcaaggttaaacacctccagaaagaccgcgccgcacagaatgtcgaagagagtcgaaaagtcgactacctcagagatgaggtggccatgcggctatgtgaacgtcttcttgtacggcctcacccatttctctatggagcctagctagttagctagcttagctagtcacttctgcagtagaggaggaagactgataaagactaggacataaaacgaagattccccaatgttctcgatctcggtgcaaacagctgcaacattgcgcgcgccctcacaactcccattccccccctcgacgcagcagcagccccagacggagacgcagacgcggccgccgcaggagcaacgaccataaccaccgagggtgcgacaatctccccaggtggagagccagtcacccttgcagaccggatagaccacctcacctgcgtcgagacctcgtcggccctcctgcaccgcgacgcagacctccctttcaacaaactcctccctataacccgcaaggtcattcctgatctcgagtctcttccctacgaacccaacacctttgatgcagttctctcgtcgctttcaatccactggataaacgatctcccctcgttgctggcacaagtgaattcgatcttgaagccggactgtccgttcatcgcggcgatgtttggaggtgatacgctctttgagctacgaacgtcgttgcagctggcggatttagagcggagaggtggtgtctcacctcatgttagtccgcttgcggatgtgagagatgtgggagggttgttgaccaaggctgggttcaagatgcttacggtcgatgtggaggatatcgtggtggaattcccggatacgtttgccctcatggcggatctgcaggcgatgggtgagaacaatgcgattctgcagcgggagcagggccctatttcgagagatgtgttgctcgccaacgaggcgatctaccggcagctgcatatggaggaggggagtcgtggtattccggcgacattccggctgatatacatgatcggctggaaagagggggaaggacagagcaagccgttgccgaggggaagtggggaggtcaatctgaaggatattcttggtggtggtgatttcaggccatagtctatagcttctgtacagtatcacgaacaaacagttgaatgacaacagagaaagccgcttaaagactaaacagtcctccggtccgtcatgacacgcacaatcgaccccgtccccgtcaactcgaccagcttctcatgccagttcaaaagcacactcatttgttgcccaccacctccctcaccaagattccgcgcctggatctgcgagaaccccgtgctctgcggcgacaccgacttcctgggactctgagcaccgttacttggccctccagccgccatacccttgtacctaaaccagcgcatataattagcctgaaccctcgcttcacgaatcaaaaaagagacatggggagaagcatacaagtacttcatcaaacaatcccccctctccacaccgcccgggccatccagcacagcttgcagaaccctccccatctcaccctgccgaatcccctgcaggacatcaatgaccgttgcaagatggacctgcttcgcgccctcgtcgccgcccaggggcgccgtgtcaagcacgtgaatcagcgccgcggcggggtcgcccgagcgcaggagttgccgcacctgtgttgctgtatttgtggcgtcgctcgagccttggggtggaggaagggtggactggagaagcgtggtagagggaaatttgggttgagtttgggtcatgggcgacaatgtttatggtgcgatagtttagcgtggacattttgatgatcgacttgatggttgcgttgagatgttcgctgtgccgtattaaggagattgagaggttcggaagttagctatataaattttagagctatctggggcgtcgatggttgtagacaggagggttaaggaagtggttgtgttgcggtggagttggaggagggagaagttgggtcgtcatcaattaagagaggctcagtccagttccacgcggggaaagcaaccagcttatgacagctggctttctatgagcaaggacgatcaattctcttgaatatctcttctgattagaaaaaaatgcgattatttgataagttccagggtgttcgctattgcaagctacaataatcaatggtcaccttctggtgtttgtgcttgggaggagtaattgccttcttgcctaaggcactctctcttaaccctacaactacggacttcacatccctacgggtaaacagataacaagtctagaacattgttcagctattcagattagtgtatatgtttcgttattggcccagaagatgaaacagaaaagaaaaccttcgctatgcaaaatgcccaaaaatgaaccggatgtatcgtggtatctcgaaacaccaagccgcccatgagaacgccaaagtcaagtacgtatagactatggtacatataacaaaaaaaatattgagcgtattatctgctggaaacatcgtcaagggtcgtaaatgtaagttggggcacggagcgctgttcctcgtcgggaacacgctgttcctttagatatgtcaaagcgttcgcatcgtctgacttgttcttgttctggcgtctgcgaataattcgtttgattggtcgtccaattgcagcaaaagcgcggccgagaggttttaaaacgaagccgataccggcagtcacagtgtcgaggacaataccaacaggtttgtcggggatgcagcggagtacaacagcccaggggatgcaaccaaatgcgcaagcgatacaaacgccccactgcacgctggttatctcgcggacgttgaaggcctcgccgccaacgtagataatcatgacttggccggcgaccattatgcagttgatgccaatgaaccaatagttgcgatgcatgccttcgaaaatgttgagtttattatcaagtcggcggttgttgaattcattgaatatctgcatccagacaaaggtgttgaagacgatagtatcgagctggcggtggcggatgtctgggttggaagacaggtagtctgacaggatactgtcaccggcgaaatagagcatgaatgtgatgccaagctgataaatggcctgaccgaggatcatcttccacatggtcaccgtgaagagcgaggcgctcttgggcacgggcttgcggatgaggactcttgtctgttggcgcgtcagttgcaaatgaaagcgcagcaaaggtgtccatgatcagattcacccaaagcagcccaagggcgctgagcacactctgt

SEQ ID NO: 2834 - DNA, 2454 bp, Emericella nidulans
taaaatttggcggattgttcagaaaaaaataaaaacgtgcatcttcctagaaagagtcgccccttcccggacaaaaggagcgcgcacggttaattaaacacctcccttggaatcccaaatattaccctgcgccctctagccagaaacctctttcgttaagcggtcagaacaagcttttggcccacagacatgcagttaacaattggcgtaccttcaaagcggcgtgatgttcgccaacaccggagcaagtcatttacaatgctaatgcggaagttcgaaatcggggaacggcgttctatgccttctcaaaaaatgaggaagtgcgcaagaagcaaatggaggagttattaaatgcaagggtcaagacggtaaaggaaagggaagcgaggagggaacggcgtcttgagcggcagaggttaaaagatgagaggaggaaggagattgaaaagctgagggcgaaaaggcgcgcggagatgtttctttctgggcttacggatgttgatatcggagtttcggggtagcttcgctttttctgatgcttggagtccggggttgtgttcagtattagcacctgatttgagatacccattatagttttgttggccacttttattttaactctaattcaaccatataatactaaataacccagttgtacatgcttccctaataaacttagctcgaatgcgccatgctaagccgcagcctgcaaatcaaatccaaacgaaaacaatgctgagtcttgctccagaataaggaaccgtatcagtcataacgcgtaaatcgtaagtcatgtttctgcagggcatatccaggcccattattaagtagtcttctgtcgttatgtcaccattattgccagttgttgccgagttgtaaaaccaataatcagtattatttataataatcttcaagtgtagaccgtaagcggtagatcatatcctcccatcggcgagttccgccatgatatgtataaatccttcagcgtctattgattgttagtgaaacaaaaccagagaaacgatcgagatatgcaggtacggcttaccctcacgattcatgaatttcagcaggtgcccgcccttatgcgttttcgggggagtgtagtcaggaaatgtaaaaatggtctgggagagttctcggagtatgatgaattttgggtcgcgctcaactatacggagccaccggggggttcggacgaggtccgttatgaacgtcgtccagacaggggatctgtcattgttagctcttaatatttcagggaacgcgcgcgtagacacctcttcatttcgcctttgtggactgaggcttggagccttactgcaccggtgacagtgtcctatatacgcgcaaggcatgcacgaagccatcatctattattggtctacttaatcagcctctaatccaaaatagcgggtgactgacttacgatgctattagctcctgttcgtggaaaagctcatagtggcgaatctgcgacacaggccgggctgaatcctgagagcgaagcgccaggaatgtgcagaagaaaagcaccatcactgcaaaagaatcagccatgtcactcaaatatggtgactcaaacgtactttcaattgtgctgaatttgaggttcgcccaaaccaccaattcggagccgctcctgcggcgtcggcataggttcaggcatgacgggccgcgcctgttgatctccagcaagttcaatggaaggcaataataatctccagactggccgcatacaatgcgagcacggtggtcgtcatcccgaacatagaaaagcacgcgaaagttgccgccgaaagacctatgcctgttagtcgagccatcgaaggctcaaaactaaacagctcttacaattcaaggagttttgtgaagtcctcagcatcaagccattcaaacaagtcgggctgtggatcccatagcaaatgcacctgccggatgtattagtatagtcttcgtcagctagatgctgggtccgcacctatcgccccttgctggaagccgcgtctccgtacgcggttgaaagaacacctgcgctgcccagtgttcgttcgctatattagaacccaatgaatgactggccgcggagctagtcacaggcgagcttgggacggcgggagctcggggaagtgggatgtcgagaaaagaccctgaggaaggtgaagtaggtactggtgagagatgcaccggccgggctcgttcataagacctgcgagtgcgaggtttacgatcacccattgggctgtttggggcggtgctgttgctgcttgaggacgaggagctcacggacaatgcgccgagacgccgagcgagatggccatcctgttttactaacagttcttgaaactgttcgcgcaggcgagacatgaacaagtagtcgggtccagctctactcatagcacatattagctccaagaccaattgagaattggggccactcactccttgatcaag

SEQ ID NO: 2835 - DNA, 1885 bp, Emericella nidulans
ttgctgggcagtgaggacacggtcgcggtggtgcgtggtagcccagaacatcatctcatcgcgcacaaagatgctgagctgttgttcgagctcatggcgtggctctgtcaagcagcgagcaatggccatgattgcgcaggcaaagagaccttctgtggcaattggtcccatgagcgtctggatgtttggtgtaaggcggaaaggcacctgctccgggttaaagaagaacgccttgttcgggttgataatgggaatgagttcagagccccagatgtcaccagtcgagcgtgagatcatgattttgttagggtaccggttgcccatgtgcatcatataggtcatgaatgcaagagccgcatattgataagcgaactggcgtcggaaaagccagaagtccgagaagtttggatagatcttctggaagtagtccagcaccatcgtcggaggaacccatttttcttggatagccgtgagcatttcggttctgagaacctgctgctgttcggtggtacgctagaatcatcagttgccgttgaaatcagtgtcagcaatgcacttacattttgttttgtctctgccaaagccctcatcttctccattgtgaaaaggacaggctcgtccttgttgatgccaattcgtcggcagtaatcctcgtagatcccttgcatggagatatacgaagggtcgtcgcgaaccaagcggatatgaggagccaaaggaaccatgagaggcaggtggaaattgaggtttcgccgacgactctccttgcgcttgcccaacactccattgaagatgcggaacaattgcagaattcgctcctcgcgccggcagtgtcgagcggcaggatgttggacagcaaaaggatgaacactgccgtcgtgaccgcgaatcttcagccgacggtggcagacaccaatgccgcggaccaaatctatgtcaggcaagaagcgatcgatgcgaatgaagtcctggttcttgtccttgtgctgtagatactgacctgggatctcaacctcatcaaacttgaggaagcggaattcactgaggtgcggggagtaggtttccaagaactgaatctggggtcgtcgatcgagtttttcctcgaacttgtcccgccagcgtcggagtttctgaatgtattcgtacatggttggcttcctgacgacaaagtcggcctcaaaagatttccgaatatgagcgggaaggatggtctcagcgaagcgggttatgttagcttccgtcgccgcaggcagcttgaagtcctgggcgtacgagccaggcatgcggccaacataagccagaccatcgttcaacagcgccacgatcaggcggtacgcatcctcatcgggcgggcacttgaaattcttgtggatttgatccaccatagtctgcattgacaaagcgagcaagggaaacgcggtcttaaggccagacatgatctcgtcagagtactcccaaggtttcttcagtggttccttttccggctccgctccagcggctggattctgctgtgcaggctgaggttgctgtccaggtacctggagattctgctgcccttgcggttgttgcggctgctgttgttgtggaacctggttttgagaagcgccttgggtatgcccagggggcagagtaggtttctgaacaggactttgaccgttgacatggccctgagattgcccttgctgctgagactgaggctgaccttgacctggaccttggggctgagactggccctggggttgattctgtacagactgctggccagctgggcgactgggagaagcctgtgtttgagcgggcggtgccacgttagcagcttgcgttccattcactggtggcgtaggcttattttgcggtgaggcttgggccccggcaccggctagct

SEQ ID NO: 2836 - DNA, 5342 bp, Emericella nidulans
aacctgtacccaacatacatgcgcttctcttttgagtgctcttcatgtgtctcttcaagtgtcttgcctcttgcaccggccgtgcaaccaggctctttgcatttgaactgcacctgcttgatgacctgtggtagttctctagcattaagttttgcttagaggtctgtcgtcggagcatcttcctagaagccacgcgatgcggcctctgaaacccgtcgcggtagactggcgagggctggaaatcgtccatgtattcgcacggcccccctgaaagccggctcagcggggtatcggcccctgaccctgtcccaagggagcaagacctgattggggtagtggggctatgttgtttgaatgcactaagagaggtcggaaagtctgtatatgatggtggtggagtaactgggccaacttgtgatggcgcaatagtttgcggcgcaatcgagtccccaagattcatccatggcaacatgttattcattgacatggacgaagacatcgaactcgggactcgctcgggttggtggaatattgaccgtgataggcaaggattggtcgtagactctggtaggtaagcagctgcctggtgacggtagttgttgttggtgttgcgcgccatggttgggtactgatgcatgccttgatggtaagcgagtccttgagcgacatgatcataagacttgggtgcttctgagggcatccacagttgttcaatattctcatcgtatccagagagaaagtcgggcataggcattcgttcctgcccttccatgctaccgtatggaagtcccagactctccgtggacgccatacctgctaggcgaaaggcactgcgcatcgaagcagaaccaggagttcgttcgtacgtgttgttggggagtgatcctgctccgtgccaaccgggtgattccagggagccctggctatatatacttgttggagttggtgtaggagactcgagcggcgagaagctcgaggtcatagacgggcactcgttggagcccagggacgaacaatcaacttcaacggtcagacgatcggacaggctggactgatttcgcatgtcttcgagcgacggggcgctgcgacgctcttggaggggtgctgtgacttgttcacctgccagagcaccgttcagtttacgttccctaagctttgcagaatctgctgcgatgattgaatgagatagagagacagaagatgtgggataacaatgagcgggatggcttctaaggccggtggggtggaggccagtggaggccagtgaaggaatgaaagagggctaatctcggcagcagtaaaagtctgtgcagaagaagagcaaagcaaaagaatgaagaccagagcgggtgtaagggaaacgattgagtgagtgaatgagcgagttggtcacgacatagaatgaaggttgggcccccggaatggaggaggagcggcggatgaaataaacccatgcgcagggaatcaatggaggcgggtagaaacagccccgcggagatcgtcgtactcactgagggcagtcattacttttccccaaaggagaagtgccagccagagtctaagagcaaaggctgaaggaggggcgcgttcgcgttcctgtccaggtcccgagcaaaggccaggaatgtaggctatcgagttcctagagtacccgccagagctgccctggtctggacaactgtgaacagagggctggactagctgtttcccgggagaggcctgtgtctctggataaaaggcgttgaagggttgcgcagaagggaagaacgaggtcgaggggttcaatagacccgcccttaaacgcgatgtccggatcctgggtctcaacccgcacgtagatcggaggcgttggaggaggatgcagtgggctgactggacagcaaagtaattcgtgtctcagttgcagagggacgtcgttctagatgatcagatgagggccagcaaggggatggaagtgaatcaacggggatggaccgatgtctcaggcggatctggatgatgatgcaggttgtggtttaggtgtgaggatgacgatgatgatgatgatgatgatgatgttaatggagatgttgggaggtcaaagataatataccctggcacttgaggcagatcgatggcttgggtggtcaagagactgcgactgaagcccaaagtggtaaaagggagtcactgtatggagagcagagcagagagaaagtggcatccctcacgtctgccaacctggagggcgagagggtgcgattattatttcgaatcttaatctattttgcgttgccttgattttaattctcctggttaatttatcgccaatattcctttttcctgcctttctgcggtgggcctccatgctccaacagacggccacaatggctgataccggacctgcatttcttcatctcccgaccactacgctttatttttatcgccctgaggaatgcacgacctggaacacttccgagccatccatccagagcccgacagaaagcgaaactcagcaaaaaatgcttcgacgtaagagagtgcttgctcggtatcagaagactcgcctggaactaggtccagtagatagtactgtatcatttaggcttccatgacgatcctggagaactaatctgaatcacaatcattattgccgccccatagagatggatcgtcaccaggattgaccgaccctgctccacgattgttaacctgcagggcctcaagtgatcggcaaagattgacgaacagtgtggggttgggcgttttttgtttcgatgaaacgtagccagtgctagttcctggatataggggaacgccggtgatgttcgaagatccgttcagaaccagccaaatcatctagactgctcagtcggaacgtgatggcaaataccagcagcaccatgcagaggcaaaccagcccaagccaaagtgggatacggctggctccattcaatattgcctcctgtgctgtggtcgaatatgcataaacacggccaatcggtctgcgcttggtgccgctcaaaagaagacgtgctctgaccttcatttaccgaaacttcagtctaccgaagtggactcgagagctatgcgacgttgagtttttgcctcattcctctccaagtacgggatcgtcattctactcgactgatacggcaaaggctggcaacggctgatggccaatgcgacctccaggtgctggatgacgcattctactggagaccatcaatcgctagagctgctgcatgactctccagatttcgaagagatgtgtcgaggtagtctgaggacgtggacgacggagggatcttgaggagcttatttcgcaaacaagtcgcgagtagtaaacaaactaggcaccgtccaataaacccaattatccatggttcccactgcctgtcattccacggttggagaaggcgtttgctgattcaggtctgtgcgaacctggttccaactgcaggacaggtccagggccgtccagctagcctagattggaggactaggtcgattccttcgacagctactctaaacggctggtgcttccagtacccggctgcacatctcgattctaaccggtcgactcggccgcggccagtaagatcctagtcgccgaattatttcttctttcaccgattgttttcttctgttggcacgctaggacggcactcaatctagaatcgtggtccacagggctgaggaacgatcggagactaaaagcgtcgacgatcagaaatggattgagtagtacggaggacgggcttgaacttaatcctcgaccttccttgaggagcccgtcccttgcccacatcctcgactctcgaggcctcggcgctgatttggtcacaagtggctggtgcttattgtgcaacaagcgggagactgcagtcgccgggcgagagtcgctctcgcccctccccgtccccgagtcctccccggcgtacttcagaactcgcagcagagacgcaaaagtacggcagccttcttcctcagcgatcggcggtgtccactgtctggtatggacgaatcaaggctcgaacggactaagactcttggccggcaatcatggctggaatagagtaagcaggatcattatagtgtggttgtctgctgccgggctctcgatgcacatcatcagggcttatttgttagtcttgtcgaggattcggccaatcaagcatccattgtgttgtttgactgagctgcttaggaagtcgaggctcagaagccgcgactaacgctgacgatcagctttctccccacttgggccgggcacagctcggaacgctttgactcggctggagactgggtctgggaggacttagaaggggatccattgcttctggaatgtggatgctcaaagctcaatcgtcgatgcaagacgaagacgctgcactcgcgtcaggatcgacggtgtggacctgctgtcacctcaccgccctcgcctctttcaatggcctctgcggtcatggggagctgcatctacagtatcgaattctacaccgtactgctgctcttctgtcgtcctggtgcatggctgctcgctttgtccatccgccagtttaccacttcctctgttattcactgaccgtctccagaggtacgttcagttaactcgactcctgactgatcaagaactcacatgagcctcgtcctgagcgtctgacatgtcattgatccatcgaacttcgaattgagtagagcttggtgccgcgcagctacccagaggtgtagctgaggaccttcctattctatcccatgaaatggtgggttaaagggcaatggcctaactcgataaaacgcgtgtcactgcgcatcattcgtacctaacattgcttcgtctgaggtctgaacccaggttgatcccggttagttgacatagcggagttatggtactgggcgcgagcacactttcccacgggttgtcactacggtgcggttcaacccctggcttaaagttaacgtggttggtaagcgagctgcgcatgtaagcgagctgcgcacctgcatacagatttcccatattttgaccttttaatcaaccacaacgcctttatattaattattatttatttggacaagcatttcttctatgcccaattctatggcaggtactacatgtaggtaatgcccgtgcctttggtgtttgtgcaccttctgctggtggcccgcatggaccaggtattgcctgaaaagacgcattatgagcttcctcgagctctgtagcctcttgtacagacagaccattatcatgagctatccatctatgcgtacgagctcgctttcgcctttgtatagcattttcagcacgtagcgccctattctcttgctccaatagtatgcccttttgcattgaatttgac

SEQ ID NO: 2837 - DNA, 1500 bp, Emericella nidulans
tctaggaacgtaaataaacttgtgtgtattatgttgagtgcacggtccgcatctcgttcttcaatgacacatgaaatattgatttcgcttgcacctaagatgaacttagttagtttcgcattatccaagaccaagaataataactgttaccttgagaaatcatctcaatattgacattgttctctcccagagtagagaacatgcgcccagccactccaaccatgttcttcatttgctttccgacaaggctaagaatagccatcccaggaattatatcgacggtaccatatctctgtaaatcactcaaagctcccttcaaatcttcgtcgatgatttgatattcatccctcccaacaccattcagaagcggcctttctgagtgaagagccattgacacgtggacttcgctggtcgatatcagatcaatcgacagcttccaacggtcgagaaccgagaatattcctgcgaagaatccatgagagagagaccgcttgttggaatgaacattaatgacgaggatgttgtgcttgatggtaacagcggttgggcgcttagggcgttgaagaaggctagggctccttgtacggaatagtctcggatcgtggccgggcgtcgtcctttccaactcataggtggaatctgggaatatcacggttccgtcgcctttcggattcataacattttttatccggatgggtattttggcacggataacttgttccattgtgaagggatggatcacctccgagccataaaaagtcaactccgcggcttcagcgggtgttatcgctggtagaagacgggcggttggcactttccgggggtccgcagtgaaaatcccatcaacctctttccatacttgaagttccccagcctgtacgccaacggcgaccagagcagcacaaagatcagtgtatccacgcccgatctgatcgagaaggcctcccggtatcgttccaaaatatcccgtgatgactggaactttattttcgcaggcatgtaccttgcgaccaagagcagccgcaagattgtcataaaactcttggtcaaggccttgacctgaaatgtgaaaatcaacgatttcagacaggtcgacgtactccgagtcgactcctcgatcctgtaagaatgcggccatcaggcggcaactcaacttctctccggtgcttatcactttatccacacaacgcgcactgatttcgccaagagtctgagcagcttccaggaccttgaggacccgttcgcattcggcgttgatcgctgaggtaagctgcgtcctgagttcagcagaattgatctggctctcgacgacgtcgacatgttccaaccggacggcctcgacaaatgaaagatattgtttggactgagaattctctgcatcgcgtgcggctcggagtaagctgttcatagttgtaaggccaaattttggttgataatttactgcaactctccatgagtcgcgctgcaacgtgtgactcaccgattcgggtgccttcaact

SEQ ID NO: 2838 - DNA, 2292 bp, Emericella nidulans
ccgagagcacccgccgtatataggctacgacgcgagctactttctcccaatcaatttcctctccatcaggggtattatagctcgccttccacaagtttctccatatggcagcccctagcacggcatcgcccttgataagaccctcatcgtatgcagcgagaacaccacgccactgaatgaagagatccttcagaaacttgtttctgatggcacggcttgtcaatccgtgtaaaacatccatgcgatactcagcattatgcgagaagtggtcgatcaaatggcgcgagtacgtctgcaaactgtcacgggagggcaacgcccgcagccgaaccatcaaaaggtacatatgtaaaaatgtgatttgtgaccatgtcgagaatgtcggaacaaggcccaactctggtattaaagacgtcagcgccaatggctcgacgtcaaataactgcataggggaaagcagacctttataccaccatccctctccaacacccagatcctccccagcttcggtcttaggaacctgagcccctttttctttcagctgcgggatcgtgtaatccccctgcttggaacaagcctcgaataatctctgggtcattccgtaggcaatatattgttcggccgcacccccggggcgttgcgccatcggtacaatctttttcgcaagtcggggcaagaaaccagaagcatacctacagctctgtgcctttgagccagagagctgtgcagatgctcgtcgtcggaaggaggcattctggagctctaaccgcggtagtcggtagtttacagcttcacgcgagttcgctgacattgtgcatagtgagcgttgagttgatgtgaacaatggtagaggcagtttagagaattgtgtctgcgttctcagtcagttgaaccaacgaaattgtttctgccgacagttgctatagcttgtatcccgcaacagctgctcgggcggaaaggggctatatgtacctgaaacttgatagattgatgagtgaggtattgggaccccaatctatcaaagtatctgggaggcatttttgaatgacttagagactgcgccgtgaggaatacttactgcttcagcgctattaccaagcctgacctgagactagtacaaaattccgggatgatgtcgaccgtttgcactgtttgacgcatcggtttaagtaatacatgctctgattggcagatccaagtctactgtgaggcctgctacctcaaagtatgagcttttacatgataaatgcgctacaagtgtgagtcaagaattccacttgattgcatatgcttgttttatgttgcgatggccatttgatatatcaccgcgctgcgtgcatggctcgcagaaatgctctcacaggcctgaaacgctgtgctgagttgatagacgcccggctggcggttcgaactggatgctagtgagcaggtcgcggatatgcgtctggatatagttccctcggtctatcaagatcttcgaggaacttgctcgcacctctatgccaaacaatattctctcgtacgaacagtctctgctactcaatctatccgtcgagaaccacgcgttctagtcgtcggtcaacaaggggaagaagttcggagagcctgttagggtccctcatgatagcgggtatatcatcccgtgcgcttgctaacttctatgttgatgagttagccttggaattccttggctctcacagcgaacccacctgtctgacgatgccgtaatcacactctttggactgatactcccttataacttctgatttctcgaaatcgacatataccctggtgtcccgaagtcggaaaagaacgttgtctaatctcaagaagaaccgcgagagaagaagaagtctgtcctgcataacgcgaattttacaagacagcatagtaataccattatcggcgagttcatcttcgtacaatattacttcatcgaagaaaagtattgggtcagggcgtttcagcagttcaatgggtatgggctttgaggtctcctcgaagtcggggccttgaatggacaatacagtgccctcgtagtctgtactgtaggaccagacaaatgggatgatgacatctttgataccttcatgagttgtctctctgccaatatatcagccgtccccgaaccggtcacaaccaaatgcgcgaacgcacctggttttttgccatcctttcgaatgagcgagctaaagcattgattctaccgtatgatcaacgcggctaaggctgtcaaagcgttgaagtgaaagctccatccactcttagcatgctgaaccgaaacaaaggtat

SEQ ID NO: 2839 - DNA, 1453 bp, Emericella nidulans
gaggtatatcacatggcgcacattcggcgtgcattgtttgtttaagaaaatgagttgatatgtagtattagactacatttccccttcttcacttccaccaccctcatcatccggctctggttccggaggcggcggcggaggaggttgctgactatgttcaggtggtggaggtggcgggtgctcatttctggtagaggaagaatacgagggtcttcgttgctgataagcgtcctcgtcatctcgatcccgttccctatatttgtcggcggtggcgcgtttgggaggtacagagttttgttgcacgatctgatcgatgcgttgctgaatggtatcgacgtttttagtttctctatttcggtgcggcggcaatgttgttcgaggtgcggatgggagtgggtgttggtagcgttgggattgatgagcgtggtgaccgtttggcgggcggtcgtgggaaaaggatgaagacgcttgcggcgattgtggtgatgttgtaggagggtgtggatgcgtcccgccttgcggcagtgaccctgcggcagagcgaggttgatctgcgtctgaacctactcggggccgttttggcgagcgggccccgttctgagaggcttcctcttttttcaaggatgcggtgtcctgtgagggttgctggctgctttttgaactgtcctctggctcccgcgagcgcttcctggagcttgggtctggtggtgcgtcgagtgagccaccaggacgcggaatcctggtcttttcagcaccttctttccaagctaatggaacgggtgggtagtactggctgtgtctatgttgcgaattgctttcgtatagctctgccatccgggtgcatgcgcggcgaacctgtgctatatcaacgtcgatctgctcccaccaggatcggccgaattcatcatcctcaaatccaatatcacagtggctagcggctgcataaaaggcagcagcagcgataacgcgggctggaaactggaggcaaagaaccgtgtacatggaatcgttgagaaaagcccaggatgaattgcgaatatgcttgttgtcgttgacgcggaagaaacagataaaatcgtagaggatcctatatggctgttcgagctgcagatcgaagcatagcgcttcgagcagaatgtcttcgtggtgaaggatggtatcgcgccacttccaaaactctttggattgctcatccacaaccagatccggctttttctgtgcaacccggcagacggctatcaccagctttttcatccttcggacattcttcttcacttttgtagctaaaaaaagggatgtagcggcaatggggtaccggtggattcccggtcgctccggcttgtcggctatcgcatattgcatgaagaagcgatggaggtaaactgcggctgtcgcgagggtaggctgcggcaacttcaacatgatttcaaactgagtgatgaagttgacttct

SEQ ID NO: 2840 - DNA, 1523 bp, Emericella nidulans
aacccccccaaggggagatagagaagtcgattgtgattttagagagaggagaatacgagaattagccgatgtgggatagagcaaatgagaggcatgagagttagggagtatcgcaattgaaaagctgaagccgaaattcgaaaggtgcatgaacccgcaaaagattccccggaattttgcagaataattttcccgtatgaaagcgctctgaccaaacacccttcttcacgggtcggggcctgaaaatcgcgcccgcaattcgatcaaagacccaacgggtgataaaataccacggatccagagccaaaaaccgcggcctgggctggcaatatcggagaggtagtcttcgtgcaaggggtcaatgagaaaaatgcccttggtttcaaggaggtggcggcttgcaaagatacggctgtatatgcttcctatgcctgcagagaggagaacgaaagggccctcttcaccggccagggccagcgcttcggagagtgcgtcggaggccatacctgcagagaagggagatggtgcgttgtcggaccaagccatacccggtctgtcccagtagcagtagcgtgggatggcgcccttttgatagagctcgttgataaagggttgtagagtgtgctcgacggggccttcgccagcctcgaggaggactgtggaaggggagttgctgtaagatgaattgccaacacagtcgaggtggacttggtagttgtgcgcgctgacccagtatttctggccaggagcatgaagggtcgcgtcgcgcgcacggagggcgagtgttatcataaacaggatcgatatgattgctataagagccatgaaaagagtctcagtcaggacagcaagccattcccgtaaagtccagcgggtttcctcgcggcctgtcaggcgttcttcctcttcgcgtttaccccaagcaacgtagcggttctggatgatgttgtagagtgccatgaggaatgcccatactacactggcaattccgacccagccttcttcaacgcgaatagatggtacggccactgttatacacatatcgatgaataagaatatagcaagcacgaaaccccacaccgtcattggctttgacgggaccgagaaaaagaggagcccgaacaggatgtatccaaccgttaacgtggtatatgcaaatgcgaaaaaacctgatccgcgcgtgtgcagtgccggtgcactgacgaagagggagacgagtagaaatgtccaccagatgaagctgactgcgaggaatgcggtcgaaaggccgcgcagagcccggacactccagaggttgtagggggagacctggtcgagaagctacatcagtcacccgtaaatcatgaagtcagaaatgtatgagcctacggcaggatcatcgggactcagatactgctcgcgctcgcgtggcaggagctgcgttctctcatcgggagcacggtgctctccctcgattcccccctcatgacgctcgccgtctcgcccaagcattctgttgatgaaattgaccatggtctttggta

SEQ ID NO: 2841 - DNA, 1523 bp, Emericella nidulans
aagatcgtaattcagcacccactaccgccatcccattccatcggacaaggcctgcagtgcctgcgttgtttctcaacttctgccccgtaccctgcgacacgagaagacacccaccagcccccatatccactatggcctcattgcgtccggaaaccaggttatcaaagacagtagaatccgcgaccacctcgcgcgccagtctggaatcctgtgtttcgagatggaggctgccgggctgctggataatttcccctcccttgttatccgcggaatcgcagactatgcagactcccgtaagaacgatgcgtggcagggatatgcagctgcgacagctgcggcatacgcgaaagagctattatgggtcatcccgatgcaagaggttgaagatcagccgttggctgtggggtttccttcaaagtgatcttggctgccggtgtcctggttgaatggtattgtacaactaatagaggataacaaaaaatacaatatggaaggcatgctggacaaggccatcatttatcaatattacaacaggctgtaaattcgtaattagtgtagaactaattatccttgtcctactcatcacgcatagaccatgacaaaaccctaacctgagggtcaggtcgagggtcagggtacgggtttttgggtaacccacggcaagccgccaagaacccattttgcacatatctccctagtagacaatatcttttgcataaaagatgctgatcgcctgaacacttggttcatacagcgtgtttgtactgtttgcaagcccgcaggttacccaaaatccgtacaggttgtagacttagacccgtccccaacccgatccatcacgagttttggcttgaccgtgatgtataactcgcgtcatgtcaaggtctagtcatgcattccctgtgctgaagaagggctattggtattttttgtggaaagcacatgcaatttaaagggagaagggcagattgaactgtatcaactacacgagcgtagcctactaacctactatggagcggatgtccttaatcattgactctatcctgctggcgataaatgcttttgtttcacttacacattgagggtcagatcctcaggtcagagagaccaggctgctatatcacatgacgttatgcagccagtagtcttatcgtgcactggtacccaggattagcattacatgatatttctatatcttggtagatttttatatctcgtctgcagactttctctctagctcttatttccaggtcactacctcctccagatactttttaactcagatcaaagtatcatgcctgcaggcaaaatccttgaccatccgaaaaggatatcattttttatgtttatatcttgtccaggatacagcttgcattgcaccctttttgatgcataccaaatgcggcagtattgccatccgccaaacgaacttcaatatttgagaactccctgagcagatcaaaatgcacataatgatatattattgcctgaaccagggtatccacacagggagagacatcatc

SEQ ID NO: 2842 - DNA, 1953 bp, Emericella nidulans
ccatgccttgtcagggacctctgcgaaccatggctcctccgcagccaactgtcaacatggagccggcctggctccattcaccaaagtggctgggtcgagtagcaagccagaagaagccttttgagcggaggatggggccgaagggacttttgcgcttgttggcgaggatcagggattgatcgggctgggagaagtcagtgatttcagtatcgctgtcttcctctcctgattctgaggtgttagcgttggaatactcatcctcctcatccttctcatcctcctcgtcttctccatcttcttcgttatcgccatggtcatgactgtttagggattgaaggaggatgaatttgtcgtggatgagagagaacagtcgacgtggatgaaatggccgtctagccatgtagacgaagttattgatcccatacctgcagtcaataatcagcaaccattcactcactctcccaaactaaaaatgtgggcaacatactccaaggtctccggcctaggcgcaacccttttcccaactccagtcgtaaggacactcatctcatgcaaactcctcaaccatcccgccccgctcgcagccttgaggaaatcaaatctgcccgtcccaataatctctttcacatcaacacgactatagctcgtctcgataagcttcgcatccggattcagcattccaattaaccgcctgatcttgttctttgtctgctcgtccacagtctcgatcttgttcatgatcagcacgtcagcgaactcgatttggtcgaccataagatcggaaatcgtgcgttcatcttcagggatgattgcgttggacccgtatcggtcacttaggaactcggctgtatcgaagttggagaggagattgaaggtgtcgatcacggtgacggttgtgtcgaggcgggcgagggtgtgcaggccaccgattctggctctatcgttatccagcttattagcatggcctcatgatcgcgctgcgagtggagctcagggtggataaacgcacatctcttccaaaactttcctatcgtcttcgtccaatccactcgcgccgctattaccctcaccctcaacatcttgggccccttcaacttccagcatagcagcactaaactccgccgtaaaagtctcagctacctgcatcggctcgctaatacccgtactctcgatgacaacgtaatcaacttctttctgtttggtaagccgtgccagctcggcgagcaagtccccgcgtaatgtacagcatatacacccgttctgcagctgaatgagcttttctttcgtttgggagactttatggtgcgttatcagggctgcatcaatgttgagactgaataggttgcttatcagctggctgtcttggagggtcgggtagagtgaataaacgaaggcgtgggacttacgagctcatgtcgttaacaatcactgcaatgcgtagaccgtgggagggggatttcaatatatgttcaaggagggttgtcttgccgcttccctggtagattgtggtgtcagtctttgtactgcccggcgtttctcacggattgggtgcgataggctgggaggatgtagactggcgtaccaggaaccccgagagcagggtgacggggagttggcgtgtttctccgtctttggctatcatgaccgcttttctatggatcctgtatactgaatggttactgacagaccgataggttgggtaatcagctactaatttcgatagaatctgtacggtctctgtcatgaacccatctccgttgtgagccccgcaaacccaagtattcccccaaggtatcccgtcttactcctctggtaatggtctcctacttaaccagacacgcatgtttccggcaccaggtcaataatgacctttcatacggagataatctgccggatagcgtcccgtcgcaataaggacccgtgttcgctagagtctccctctgataagtgcca

SEQ ID NO: 2843 - DNA, 2566 bp, Emericella nidulans
gccttgaaatatctgaggtaatacttccaacaacgagtcttgacatactcccagctctatccgctcgaggccagttgcggaatcctgtcaggggttgatctagattcctacgtgttgtatctgggtgaatcaggcttttctgtcacttatcgagagtatgtgaaaatctattagaaaacaggcatacctccggctggcttgtggtagttgttactctagctagccagaagtatcacctctctcccttcaagacccgacttgacgacgcattcctcatcgcactcaaaaacagggtaagtctgagccgaagcagacagctcttatgctggtcgcagccagtatgtgataataggcagaacctcggcattgcattgcagtctcaatatatcttcattcggccaagctaaacacctttatcaccagtcctttacagatgagccagcaccgcatccgcaccggagacctatcgcaaacagttagcttcagccatcgaacgccaaaagccgaaataaaaaaagacgcacctcaacggcacccttcttagtctcgatatccgcatacgtgaccttcccatgatcaatgatgatcgcataccgcccagttcgaccaccgctggcccatccaatggaatcggagaatttcgcgtcggggtcggagaggaacaactgtagcaagacagacaccacattagcatgaaccgcgccttaacaaacggctagaaaaggtgcagtacaatgtcatcaccggtaacctggtttgcctttccccaggcactcatcacgaaggggtcattggacgctaccaccgcaacgatctggatgccctttttcttcagctcgggaaggttcttgatgtagccggggaggtggttcacggagcaggtaggagtgaacgcgcctatgagcacgagtcagcataaaccaagaaaaacctcgcatttagaggggaatgacaagctcaccaggaaccgagaacagaacgactttcttgtctgcccactccttggaggcatcgtatttgattggaatgccgcacgcggtgacctcacccttgtcttcagaccaggggatatactggaaagagacgtcgctgggaaagggtcaccggccttgagggagccattttgtgaatattagatcaagaattggaatgggaagagtgcagtgaggtggaggaaggaggattgttgactgcggggtccagcgggaccgaggaccataaaagctatctcagtcatttatcagcggggccagagagctccgtcattggaggtgggaaaggcaaattcccagccaatcaacgtcgagcgatctacgtgctttttatataaaggagtatggtaatcagaacaagactaccctaaacgtatcagagcttctccccctgactgctacggttctacttcaacagcgaaatgcaagagaatcaactgtatgaatcgaaaaacagggatctgtttacctcggcgatcttcatgaccattgtcaacattgtcacatagtcacattgtcgaattgacacattttcaacattgtcaactattggaatatcgtagtttgcaaaccgccgagatcaatacgaggtaaaatacggaacgaagctgaagcctcaaaagaaaatccagaataacccataacttctgaacgttattactattgatctaggacagtgtgatacacagtctcattcgcagccgatactcttggtcttactaagggccttaaatcttgagtattattccagcagtccgaacgtctataattagccatggcgtgacggaggttggtatgtggcacgtgacatgtgtgatatgggcgaccggataacacgagctatgacaatgtcgtgaaggacagtttccttgcctatattgccgtagacaccggggatatatcattatgcggtgcggtaaggtggtgtaaagcagaaattggaaatatcgtaaatcacctaagataatgtcttgatatggaaacggtagctagatggcatatagatagtgaagtaggttgtaaatagatagtagttagtatcgccctatggcggattagctggcttatagaaggatccctcgaccatctagcccatgatagttatagcatagagagtagggctgatagatgctctgtagacaacagggaacttccctatggcagaccagatggacaacataggggcaaccccggtccacctggcccacagattacatagcagataaacaacagtctatgacggactccggctgaactatacgagggcaacccctagcccaacctgtcagtccgcgcacagtatatggctaagtaaagagcggatatgtagccatggctaaataaagagcagacagatagcgagtagatcacggtagatgtaagaggaaaaaaagaaaaagagtgaggaagagagagagaggcgggcatttataccaggagcaggcaggtgccaggattaccaatccagctttggattccaatacacgtccgtacttgctgggagttcctgccctatcatttgcctaaaaggccgagcgcctgataacaaggatgtagcataccagtatggagaa

SEQ ID NO: 2844 - DNA, 1392 bp, Emericella nidulans
ataaggaagcttgcttctacatcatgcttctacatctgcaggccggtcggctctacgataccactttcataaggaagatgaataaaaagtttatcagcattgaggaaatacgtctatctacagtatatagtcctgttatatatatagtcgtctatctaaaaaatccaccaccagactcgctccaaccagttccggggctgtcgctccatatcattctcgcacaaacggtcaatctcatccttgcccgtaaagatgtcaacctctgacaccttggtcaaccagggcgtccggtaccagatcttatgtccagcataaagcgcaaggaagatagcaaaaacaatgtacgagaccaagaagtccgaagcagtgaagcggcccgggaagaacaccgcgtacccgttcgtcaaggtcaggatcgagatgatgaacatcacgtagtaggtaccgtatggttgcagcggggtcttgaatggtagcatgtccagcatgccgtggaattgcagggccttgcggaacgctgtttttggtcaggtgtgttcagatgaagagatggagggaagcataccagataggcgattccgatcagaacccagttgatgaacccgccaacggtagtaatattggtgaaccagtagaagaccgtctgtccggagctagacagattaaggaaggatagcagtccgattgtccatgtcgcaagaacagccacatagggaacgccggtgcggttggtgcgtgtgaagatctttggggcctggccctcaccggcgagcgagtacagcgttctcgatccagcgtaacaccatgcgttaccggatgaccaggcagagatcaggatggcagcattgacgacatggttgagccctccaataccagcgttttggatggcaacgacgaatggactcgcgccggcccctgacccgccgctttcgactccagcctcaagggtagggtcgttgtaggccacagtgactccaataaccaaactgcccaggatatagaaggtgaaaacacggtagatgaaccgcttggtggctttggggatgttccgacgcggtgcctcgacctctccagcggctgtggtgatcaattcgggcgagaaaatgaacgaaaaaccggacttgatcagggcagtccaaaaccccaggaatttgccagtgtccccgggaaccaggtacggattgaatgcaccggggtcttgccagtagcggaaccctaagcggtcatgatttgggcctccaccgaaaaacagcacaacgcccaggataatcagaccgatgatggccaatattttcagaccagcgaaccagaactcggattctccgtaccactcgaccgcgaagacgttcagggccaggatcactaggcttgttaccggctggctttggggtg

SEQ ID NO: 2845 - DNA, 1066 bp, Emericella nidulans
ggcggaatcagaaaaatggctgagcacgagtggatgaagaacgaacagcttggagctgttactggtctcccaaccagagaacattggaaggtaagctaaacactgacactacccgggcctttccttggatttatactgcggcggttgcgtgcggcgcccagggtccgcaagccaactgtctcgcgacatcttgcgtgatctgcgccgccagttccatcattccctgcgtcatggcccaccaactgtgttactgggatcctcgctcacatgatataggcggactcggcttcccgtagctgtgactcgcccacctgtcgctcctcgttcggtctcttcctccgtcgccatcactgccgccattgcggccatgttttctgttcctcgcacactcctcatgtggtccctctcgaccaggaagcacgcttccacccggacggtgtcccttctcgagcctgcgacttatgctggagtgcgtaccagcgctgggaagaagcccgtgctgagcgtctaagtaagatccaacaatcgatcgactctcaggacgaggacgaccagagctccgatggccacagcccgaccagctctgtggaagcctcgctggccgagggacgcaagcaggagcctaccaacccaggccagaacagtgagattgctgccagcgtccctcgtggctggaactggagcaccttctaatcggctacatcgacttcatcgactacatcagctgcatcgacgaaatttctatctaattaatgagccttcacattgattgatgaggctccgcgaccgcaacttcacttcgacacaccaccttctagacattttatcccaattgcttgggcttgcgcagctttcgtcatttacatggagttcggtctcgcgatgttcacggatctactttcgctttcgtcgaggtctcctctaatgttgtgatcgttcgtagatctgggaggcttcttctattgtttgtttctattcgctaggataccctgtcatgcgtacacgttctgtttcccttcttctgcttctctttcatgttaatcttttatttacaatggcgttacga

SEQ ID NO: 2846 - DNA, 1662 bp, Emericella nidulans
tgccttgcaaccttgttattatacaccaacgtccttctcaagcccgcccttgatctgactcttaaagcccttctttaacctcctcccccacttctccctactccgcttcatcgccatctcagtcctctcccacggataattcaccggactctcacccccagtgaagatcataaactcataaagaaaggcgccaataaaggcgccacagaagctgcctgcccagggtccatagaaccagtacgggttgaggaagaggtcgcttccatagcctagggctaggagtgctaatcttggcccgaaatcacgcgatgggtttagtgcagcaccagtctggtaggaaaatgtgatgctcagcgtgtacaccattagcccgacgaccagggcgttcattcctgcgcctggtggcgcgttctggtcgtcgcccagcgcaagcacggtcacagtgagcacgactgtaccgaggaactcgttgaagaaggccgtttgcgggttgatccaagggttgcgttgggatgtgacgaagctgttgaggacgtttgttgtactgcttgtgctgcttgtgctgatggaaagatattcatttatagagtcgtggtacagcccgtagactgcaagcgcggcaacaaacgcgccaataaactgggccgcaaagtactctggcattttccgcttgggaaatccgcgataaaaccagagcatacacgtgatggttgggttaaggtgtgcaccggagacgccaccagagatgtagattgccatcatggctgcgaaaccccaggcccaggctgtggtattggggtttgtggttccgccgagggtgacgctgagatctgcggcgaggccaacagtgagctggatgaaaactgcgagagattcggcgagggcttcgcggtggtgtgtgcgaatgacgctccagactgtgtggttgttgtgaacttcttcctcgacgaggtcctggacgagcgggtgcaggtcctccgggtacgcagcttcatcaaaatcaagctgatcggggcttatctcgggtgatgggggctcctctgggatgtgtacgtcctggaggggttcatcacttaggtcatgacctgtgtcgtcagggggcgactgcgaggaatcgtggccctcaccttctgggactgcggagagttgctctgatgggcgcggttcaatttgaacgccggagggccgtctgattgctgttgacgaggtacgcgatatcctcgtcgtgccaacgtccccggtcagaatcttggtcaccaaattgttctccctctgtattcgcgcgttgtccacctgcgccggcatcttttttggatcagcctttttgatccgggcagcctccaactaattggatcgacaatcacgccttggttctgtgaggttttggccggtatggtgggccttaagcctaccaacctgcaaaatcttctctttgttgggacatccccggctaacacccgaggagagggtttgcaaactcatacggtctgttattggggctgtttatatttgattggaacggtgttccggggccaaagggtatgtgccttcgaattaaacttttttggcccgaaaagaaattctttcttgggtgcggagttttctaaacaaccgaaaccatttgcggtttctaagagcctgttcggaccaaccgtctttttc

SEQ ID NO: 2847 - DNA, 1849 bp, Emericella nidulans
ccagcggtccttatggtgtatccaatgctggtactctggtttgtcatcggaggaaaatctttcaggttacccacttttggcatcggcttggggccgggagggagcggcagccgctgcgcgctccgtgttgaatgctggtatatcaggtagcagatgagagtgccgatcccccataagatcaacgacgcgatcgccatcttagttgaatcgggtgtcaagatcaacagaaagtaagtcatgcaggacaaatgtttactcgagaaaggtcgaggacggaggccattgcccctgcagatgtggccccttttcactggtcttacccgcaatatcttagagttcggccgcagctttaatcctggcacttaatcctggcaagcctctcagataatccgatgactccgggcgccaacatccttcctggtgtcttgacattatgcagcttccgcaatgcgtgcaatcgcgttcaaagaacaggacaagggttgcattagcggcgagtacatgccctcaccggtggcgcggtcctagccccttcttttggccccctcctcccctcttcaccttctccatctcaacagatataaccgattgaatccagtgacattgttgaatattcgaatttgaccttttttgacacacccaggtccgagaggaccatcccaatcacccgccatggccaacatgccaaccgaggatgagatcgcgtggatgcaggcgcacatcaacgactcaacggttccagacattatcgcctgctgctcaatctgcggtgctgcctcagtcatcatcttgacgctgcgcatctggtcgcggctgcaaacgcgccgtcagctcgttctcagcgacaatttggtcattagctcagtggtgagtattatgctcttgacaagcaacaaagggtcatcgctgagagctattccgtccaggtgttttttatagctttttgtactgtcttcgccttgtcaacacgttacggcgctggaagacagataattctaattactgaccccgctgacatgcgtatgctagcaattgtacgccggctccaaaccattagaaatccttttatggtattactttgagagctgacatacgcggctccaccagcttaatatcctgaatcctatcctctatggcgtggccaccgcattcgtcaagtggagtattcttgccctgtacatcgccatcttcccgcagaagaacttccagtactgggtttatttcctctgcgtgatcaactgtctcaatgctgtcgcaattgttcttgttagttgcctgcaatgtcgccctctcgaagcactgtggaaccaagcagtgggaggcacatgcatcgacttcagcattttcagcctcttcaatacgtccttcaacctggttttggatgtggccatactagtatcgcctatcaagcttgtcatgaacctcaacctgagtcaacgaaagaaaatattgttggcacttaacttcgggttgggcggagggtcagtcccctatccactgttccattaatcccttggggtaaatacaccattacggcctcgatgctaacctaacaactccagcgcctgtgtcgtcgcagccatccgacttccctttgctagacgcgtgggcggtacatccaacccaagctgtaggttatgccggccccgagtatatctgatcttagcgatcattgtgttggcagttaactgactcctcctgacaggggacatgattccaggaggcctatgctgcgtcgtcgaggtcgccgtggcccttctttgcgcatcgctaccagtctatcgacccctgtttgcgcgcatggtgtccaatcattcgaccacgggcaactcccagcagccgggacgct

SEQ ID NO: 2848 - DNA, 1304 bp, Emericella nidulans
agtttgggggcaaatccccagcatctgctttttattcgcgccgaagcctaatactccacctcgacctttgaaaggggaatcaatgaacgcagcggtgaacatccagcctcgaccggtcagtatttggcccgaatgagtcctggccatgtgactggggatgtcgcttgcgctccaccgattgcaggtctcgcaccaggtcccgccaactttgggtgtttttccatagatgtgaaaatcgacgtgctgactaaaatagtcctgctgaaggatcttgtctttcatgaggataccggagactctgataccttgttagaaaggcattgtggatgtgcgggtgagatggagagggaaggcgaggagaggacagaacagtaaagacatacctggcgctgatgatcgtgacgcggaagcgcttggaaggctgagtttcggtcatgatcactatctatacttctgatacaatgtaatatacggtagccatgggtgggttcttcttgcttctgactcaagtgtctatttatctctgtctatcctatctctcatatcaggcattcaatcactgtgcggagagtggcccggatcactctccgtctccaagttcgataagaaataatagtttaatccttgtgtgtagttctttaatggctctctatacttcctgcttggtctaggcagctaccgttattctcatagcttcgactgctccaacaccgacagcttgcggagaggcggtcctccccggctcccatctccagacataaccactgggccctgggcagattccttctccggtgccttcaggcgccatttctggcgaagttcgctggatgcgcagttctcgaagcaatcaatgacgtattttcccagcacggggagaaatttgaatgcactgttagattttagcacctcatctggttagcagtcgttgcggaatagacgtactgtcctgaaccgcctgtagcgacaaaaagcccattcagcgtcggatgccgatcaatgataaagtccccatttggcgtatcggtgtaccagcacagccggcgattcaaccaaggccgatcacccaaactggggaaaaggtccttcagcccaccgcggagtgcagcgtctgcatcatcaggcacgtagccggaagccgcgttactagaatctcgtctgggtccagaaatgatgcgtcccgttgcttcggactgaacttcagtcgcgaagccgtagccgtggcgagcgagcttgaggatgtttgttccgggagaagaaagggaaagagaagacgcccgtcgtcatattgatcaagacaggtgtgg

SEQ ID NO: 2849 - DNA, 755 bp, Emericella nidulans
cctcactaccgatgatcgcctgtccttgattctaaagtgcggccaatatatttgccatcactatgcattcaaaaacggtcaaaacgaatacctctagtcaagtgtcagacatccttctgtcgaagggggctcgagtgtatacgattcgttcaagtagcgatcaaggcgtgagtgaagtggctcaaccaatgaatcatgggaatcattaggaagtctgaactggtatacacagccctatctgccaattgatccaatcgatccaattgatttgccaattgatatgggtaagctgactaactgatagtaacgttagttatggcagactgttcgggaaaccgaaataattattttccgccaacgccatagatatggtattgggtatagtatatataactggaatattcaccagaatgataaagttgaagaatcgtattactgttaagccgtcctagagtgcatggcgtgatatataatgtacttgttatggaggttgacttcttaagcttgcccaatatgggtgacttctacaatcccgattgacttaccagatctcaacagccacgtccaactagtatggagactagtcaccgccgacagacagtcgagctcactggtggaagcaggaccatgatatacagcggagctacttgccgtcacaggacgtgaacgcttcctcgaacgcgacttctatctcctgaacgtatccatcaccagtcctagtcacccattagcccattagaacagcctctgattca

SEQ ID NO: 2850 - DNA, 4656 bp, Emericella nidulans
agttgcggatgatctttgcaatcaatttgaaatttatggctactaaattctgcggatcatctgtcgttgcgggttctctggggtcagccagaattttggatcacctaatcgggctagtgctggtaccccagcatggtacgggcctgggtgcgtcgctgcctacagaggtgtacctaaaggctttgatcagtagatattattgccctgagtatccattttgtacctcaacgtactcgaggtagacaaagcatgggattgtggaagtccagctgagaccggtacacatatatatattttgctcagccatgtacgatgcagtagatctttagcgccctctccacgaccaacaattatatccacgttcagcacgaaagaggaaatgggcgagaatggccctttcactagagttccagtctgttgcaagccctactggcaaggatatttcaacaaggcaagaacgaccgaaagagggttattttaggggaagtaagttgtggtggaatgcgcggccgttccttcgtgcgtatacaattacagtgcgccttcccaatacctagacaatccgtactatctggcgtcatggtgcgtgggatgaatagatccatgagatcgccgccgcactcaaaattactactaccgttatatatccgccactctgcatttcatcatcagaacacaaagctggccgccaaattttgatggccaatgtttgctcatgtctgctgcggactcaagggtgtcctagattcagagacagcggagcttgacatgatagcttcactgtatcacggaagctgcgcgactgcgtcgcgaaacagcgagttccaaagggaaggcgagcaagctgaaagagcagccgatggtgtctatgcggagcacgggctgcggtatccttttgcgcaatcagagatatctggtccgacgtaaggtatgcgacgtcctataatgtgcacagtccctagataatctccagcgttgcccattgcccatatcaagtgaattacgctgagggatgttttttcagcctgtcgcagtccgtcggtcgtggctgtcttctaagttgctggcagtcgtatcagagttcgagaacgctgggggaagtcatatgctgcagttcggcttaatgacggtggacaccatctattcgaaacagcgaagcgaagcgcacgaagcacgtctactatcattcgctgcgactgttgagtggatgaaaacgtcatacaacaaggtgtcttggaatgcggaaagaagacattatatgtggtgctatccacacctagcatcgcgcttcggcctcaagcagtcatgaaagcatcggcaattggctggtggacatgcgcacagaagccacctggctctataataacggaccatcaacggctctgtcaagatatgccgtgtgcgtgtatagagtattcgcgagagtggtacgtggagatctccgttgtgagtaatggatggcgctggtgataatgaccaagcttgaccagctgacccggaatgggaacactgatatcgcggtgaaccagaagaaaggatgcgaggtcgaggtcatctgcaatctcgctctaacgctggaaaatctcaagcccgccaaacccaggccttctcaccgaacccgtgcgcctattcaagctcctttgaatcgtcttggtcttcgtggagtatttcataaatcatactcggtgctatgtagcaacgctggtttaccgtcattgacgaagccaaaaagctgcggtaagttccgacgcacaaccagtggttaggttcttacagattccgcatccacttaaaaagcatgctctggtgggaatgcgatcgaacaatgtcccaatgagagtgcaagaccccaggctggaacccaaggatacggacggcccaggcggactgaagccctggttcgcaaccatttcgacatctataaacattagcgaattgataattggacggttgaatttgtcggaacccggtactaggtagggcagcatctgcactgaggcagaagattagcaaatggaggagggtttccaactgacgtctgatgaatgcccaagccgccacacgcatgactgcccaacgcaacgcccaagatctcgtccaagtacgtcactggctgcgggaaaatttgctgccacccaacaccaaaaaagcgtcaatctttgtccagtgaaagacgagaaacattttaaatcgcaatatagactatgactctatacgtttaaggaagtctcgaggagccttgaattcttgagccgtcaagggacaggtgacaaccttccaaatcacgtaatccgcagtttagcgaagtacatacagactacctcagacaagtagcgatggtagacgcaactgtcccctaatgcattttttgtgattccatcgaggccgaaagaagcaaagacgagctcttgatagggtttgctcctgaacaatcgacgacgcatccccagcaccaaatcttcgccttaatcgaaggctgggcagctaccgctgggtgaacaaagcaaacggaccagaagccttgtctgtggcaccgggtgaggcaaagatagtcatcaaataggcgaggcggtctgtctgctgttagccgaaaatctcattgtctctcatgttgttgacctcgagatacgcaaaaagcaagctattttctctttctgcacccagatctttcactttcccaccatcttcccatagaatcagttccagaccgagtctatcgtccttttgatagttagtgattatagtacgcttatttcggagacatactccgtagcttagatgatattctgctgatcttcaaggctgggtcttatccaataatgaccagcaaacgggaagagacagcatcgcgactcaagcgctggagcaagccgtggaccaccggcgtcgacggtcttcgatggccaagcgcctaagccttattggtttggccatgcatgcagaatctggcgttgtcttttggtgcctttgctgccgttgcggtgtgatgtggagtcatctcctccgtagtcgtggcaccagacaggccagcagcccaaagccggcccaacagcccaatcaatccctgcaggtggcggaacacaggcgcaaacccacacacgaatgagtctcccacctttttctgttcgcccccctcgcagcctcgctcttcagcgctcccttcttatctcgctgctgctcgtctcttctttccaaccttctcatctcctttcctccctccctctcttcctactactcactcctatccttgctctggttgctatcaccagctcccagcttgcataatctgtacaaagcatcactggaaacgacaaacggccttgaaacctggaatcccctaaaacccctctttctagtgatctccctctcacctcgttatcctgtttcgtggcctcttcgttgtcttctcgactctctacatcaatatcccggccgtcttcctgctggatactccccaaggatcatcacatatctgcctgccacccaaccgtggtcaagaattcaccccccgggatttctttcttttcgttgtcgcctggaaagccatttacccttcctggatacaccagcttacctctctatccacttgggaatttatcaaatcaaaagtcagatttgatatatctatcagtcttggagcttcagcctcataattacctgccttgttcttgaagaacagccggatattgatctcgctcgtcaccacatttacctggactttccggcttctgttttcctggacttcctttggccgtttggattctccagcttgtttaattaaataccggatactcttccctggacaagatgactagccgtcagaatgaatacttcatccccggagatggtattagccgagaagtaattcaggccgacatctgccgttaccttggaaatgatgctttagtaagacctggaaaccacaatgtccgtctccctgatcctttgactgcgaccgcgtacaggcgccagagagattggcctcgatgaatgaaacaagcgaggtctcgttactgacatgcgaatagggtcgcgcgggattcttcattcgcgcttatcgaaacctcacatcagtatgctcctttccaaactctatgttttgggaaggcaaactaacatctgtgtcttcaggaaatgattgctgatctcaaggcggactccgcccgctgggaagcagacgtcagaagtcgtgctgaccaaggttatccccggggcagctacatccaggactacagctactctcaacctagccgggctacaccaacctactcaacctctatgggaagttccatgcaccctgaaatgtcccatggtcaaggcccttctcctcctacaacctacgctgctccgccgcagcagtattctgagcagtatcaccaatctggctacccagcaacttcaagtccgtcatactcaaatgctccgtcatatccttcaaaccactcgggctttggatctggtcagcccccatacccttaacatatcccctacagtgctccaacccagcctcctgtgacttctgaggtccacccttcatatacttacgccagctctggctatggtttcgagattgggcgaaacaatgccccttcggaccctggtcctggatatgatgcccattctgattattctcctgttactaccggaatggcttat

SEQ ID NO: 2851 - DNA, 1188 bp, Emericella nidulans
  unsure (1)..(1188): unsure at all n locations
aacagagtgatcgctgtccagccacaccaagatcgcccgcagcagaagtcttgtcttcgaaatgcaggaccgtttgaccgtccatttctgatacgcctccgaccttctttccgtaaacgatgttgatgttgggctggcgttcgaggactgccagcatcgccagagacagaacgatccgcatcacccgccgccccttgtacccgttcacgccgttcccatgcccgtcggcgaagtcgactgacccgagcgagcgtgctgatcgactggagaagagtccaatggcatagacctccgctccaccgactggaccctggcgatctagttcgtcaaggacgcctagcctaaccagatgccgatgggccaccggagtatgagtgaatgctccacccaaggggggaaggacttcgtgacgctcgaagagagtgatctgaagattcggttcgtgggggccgagttcctttgcaagagcgagtgcactagcgacgccggcaatgcccatgccaacaatgaggactttacgacatcgcggtgaaggatcgggtactgacagagggaccgacaccgtatagccggaccagggctcaccgttttctttaggaatacgcatgatctctctctacgatcatactgagaacttctgaagacttttcggccagggccatcggttgcagaaataaatcgatcactgattaaaagagctaaaaagagctaactgctagcgtcggcagttgtggagaattctcggctgccaaaagacttagcggccgctcggctgttccaaccttgcaagtttcggcctttccgttgtttcgtacagagtaaagtaaagaacacatcgcccgtccaattcatacatcatacatcataaagtgcgctcattacacccaataccaatacagtcaatacacctaataccacgagaacagctagagagctagagcagcgtctcctggtgcgcaatcacgcgccattctccatccgatccctggccccaagtcgttgagcctgttgcgtggtaatctggctgtccttccctgctggcatggattcgatacgttatggtacccgcatgagatcgatcacaatcacgcgcacgtcttgcangtcgtactcatcgaattgtggaatcccttgcgacaggtctcgccagggtttcaaccgggggatatccttttgggaacaagagac

SEQ ID NO: 2852 - DNA, 1100 bp, Emericella nidulans
attctccagggcccctgcacctactcaattgctgcgtcaaagagctcaattctcatgttagttgccaatacctttctctcctttcttgtacggtttcaccaacgacctggcgttcgactgcttgtatcgctcttcgctcggtctcagaatcagcacttgtttcctggaagtatcgagaatcttgaaaaacatgtcctcgacgatcgtggactgatcaaatggtggtgccgtgctctcgatccaattcttcgcgagtacgaacctgaatctgcctcccaggagcaagacaagaaacacgaagagccatcgcggagctcagcaacggcatatctcatcgtgcctggttgcgacaggtttgaaactagaggtttcttccctagtagcgccaaagcagacgataaagaccggccccgatggctgaatgcttatcctttacgtcaaatatgcagcaagcctgatgctccgccgcgctctctggttcctcggttccctgatgatccaaagacgcgctttctcattgacctcgatgatgaacttccagaggctgcgggcggagagagctcgagtggccactggaggagtgtgaagtctttggacgagttctgggagatgatgtccttccgccaggagtgctctgcgggaagactggttgggtttctgtggcttgttatcaaccctcctggagtggtgaattcgaagccaatgctgagcagcactgccggttctgcggaggttaggggcaccacctccgcggccggggaaggaccggcaacggatagccaactgctaacgtctaacgccccggccaactcagatcaggcacagtctctggaggtcccgaaaagcagcgaagatgcttcaatcactcattcagtcgatcagacgataaatcagcaggcgaacaacggaagtgcattttactggccacaagcggcgagaggacatgcagtgttgaacgaagatgactataagaaagtcatcaacttccttctcgagcaagacttttacaacgaagaggtctcgtttgccagcacgaaggcgttcaacgacaaggttgcaacacttgcagatgagctgtgggttgccagcatgttgtggga

SEQ ID NO: 2853 - DNA, 1281 bp, Emericella nidulans
agctggacttaccccagtcctgcttcttcagaccggaacccaagttacccatgcggtcaccccggcaccggcaccggcaccaccaccgccgcgtccgtaaccgccgccgccgtaaccaccaccgccgtagccacctccgtagccactaccaccaccaccaccgtaaccgccgccgcgacctccatagccgcctccatggccattagagtaaccgtttgagtagccgccgccaccgccggagctgaaagaatgacgttagtgtggattttaaaaaaaaaaaaaaaataaaagcaatccaatgtgaaacttgaatgttgatggctaggatcgtcaaaaccggtggcttgtgaacaaagcttcggctcaaacaaggaacagaagacatagcagtgtgcaacttgcagcagaatcacaatgttgctcaaccagtctctagccttttatgttttatgttgagatgcgacaaagatagtatgtcaacgtaccgataggaatcgcgctggtagccaccgctgccgccgtaagaagacatggtgaatgagagaaagttgtgttgcgttgttggtaaaaggaatcctcaacttgagaatcagaggcaacacagatataagagagagagaaagtgaagaaagaagaaagaccagggaatggtgagagagagaaaggtgaaaggtttaggataagaaaaagagggagaagaggaaaattaagggaaggcgctgaggcaacgtttgttcctgtttgggttagtgcaggagaaaattggaaaatctcgacaccgctgctgttatgtaagctgtaccagtggccaatggccaatgatgactagtgcaggtggccaatgtggctaccataaaaattcaagaaactaggcttccagtgaggtaggtaataggttgtttgaactcgatgctatgagttggctaatgtctccattcgctggacatcatctgttcccaccttgggcagtattagttggtctaccgacatacaacgcgaacactcccattatacataagggagcctggaagtatatagaagggaacttgatctatatacaaacattcatggagacaagctatatgtacatcagctgtgtccagcgccaagtcccatgtcccaaaacatgatctacaattcggttgccttgatgaagatcttgaccaactctttcatccgggaaagcgagacctatctatatgagtttcgagtagctctggaagccctcagtcgcaagctgaacaagtgttgcgcattctatatgaggagcgagtgttctta

SEQ ID NO: 2854 - DNA, 1100 bp, Emericella nidulans
gggtatgtccttcttgactttcccctctagcgaaaagcgccgttgttggttggcgccatcaccgtcagggtaaatgggaccatgctaatggtgatagcgcccgcggcagcaaagacgccccagtcctcgccggccgagtacttagtcgcagccgccagtccgtacaacgcggatgtgcttaggcagatgatggggccttttatgtgcccgttgaggtagatccggctccagtggcggacgagctggtcaggactacttgttgtttcgaagagggacgggaccgctagaggtagacgctcatcattgcacctggtggcattagttaggcggccggcaagggacgtggcagcattaccggacaggaaagtgccggtgataacggctatggcttccactccagcgttactcatggttttgaagagttccaggagtatgaacttatgcttggggtatctgccaggtctctttttctcgtcttataccgacgcctacatgggtctcggcaagcgatcggtgagggctccgccatgtgccgaagtattggtacgtggtggccggtttattaacttcgcgagagcctaagctacagacgagcaccatcagacagaccatcgtcactatgcccgcctggtccctcctcgtcctctccgccctcccagtggtgggtatgttcgccggtcaaacgaccttcttctcctcaccatgggagaccctttttggcaccgccgctgagcagcatgaagcagcaatggacggccgcatccaaggccgtggcctcctcagctctcactttggctggtacgggtggccgggccaaaccttcgactatgtgattgttggcggcggcacagccggcctagcaatggcccatcggctgtcagaggacggtagcaactctgttgcggttattgaggccggaggattctacgaaattgaggcagggaatgccactgaagtgccaatgttcctgttcaactacattgatgacaacggccatgtcaagaacccgctgtttgactggtttttttatatctaagtccagccagtatgcttaccctacaatcgagatagctcagatgcttacagtttcaggggctggc

SEQ ID NO: 2855 - DNA, 1229 bp, Emericella nidulans
caattgtttgcagatgagctactaaagtccgaaagagcttgaaagcttgaaataagtctagtctacttcattcaaattcacaacatccaacatccgaactggacctcaccaagacggcggaatccaatactcccgccaatgctcctccgtatccttagttgtctagcaaggcccggtagtaatgcatcattggtattaacttgctccattctgctcagtccgcagtcttagattgttcctttgaaacatgccaaaaccagatggaagatcattgaagtatgcttaggccagattacaccaattgtgctgttttaatgagcacatggaaataacacctcctacccctagacacgcttcttggaagctttaaagattcgaatgggttcggagcaagtttgatgagctactgcagcctatagtccgactgtgcgatgtttcgctatgtgtgaggatttgtcattggtttttcctttctcgcactatccagccgctggcaacgatgtgacgacgatgttgttgaggtccttaggaaggagtcatttacttcaggatgagggtaaatgtgtcaaatttggacttttcgatgtttcaattggtacgaagcagcgggacacagtatttataaatacgattgttcgcgcatgtcaggataccacgctccttgcggcaccccataaaaacgacatattcagtcatatacctgaacgaggacggatttctcgcagactatgccgtagaatactctccggtgcctgtgatgaaggctttttaattgaccggaatttgaagttgccctacactccaacctcgcccgttgtagtgagcccgaacccttttgaaaggtacgactgggaatcctgtttagtcaatctagacaacagtgacgagcattttgatcatggtttgaattgaaatatactacccggaacggcttgacgactataggctggataagctacatgggtcactcgggtggaggaccgctaccaagcacctactaatcggctttcaggaccgtgatggaagattaacggtacttaagaggaaggtagaagagagcggccacactacatgggagctgtctggacttattgtgccatctgtcgcttgtcccggcgcaatgtgatttacgccatgggtacgtaataattccctgttttctcttcgagcgacttcgccacagtacgactgggcattgattccgaattcgtctggcgaactaacgatcc

SEQ ID NO: 2856 - DNA, 1464 bp, Emericella nidulans
  unsure (1)..(1464): unsure at all n locations
gaaagaagtcttttcaatcgcattggtcgacagcagacagtgtcttggggcgaggctgcgcaatcacgcgggcgatttgcaatgttaacgtgtctcaaaaaaggcatcaagcatagctttttgttttcagcagtgtgtcaagagcaactgggtctgtttcgatcctacagtcatttggcttcttttcactgcagatgccagctaacagacgtgcagagccagcacaagaccgtccatgctcccagaatggtaccatccataagacatcagacttcagctctaggctgtctttgaccgtgactcagtggatggttctacaaccctttcccctgacattcgtttcctggcacaatccgacaggtctatcctcttttctgcgatgcgtattttgctcaggtcgataaaatgcccacactgggccgtgactcgtaaactcaagggcgaacgcttcctaggcaggatgaagatagatttcttggacgccaagggacaggaggttatacggaaggtcgctgactagcttgagaagtactggataacacggccgcgggatcgagccgggcgtcgccacagattacctggacgatatcatttatcaagcttgtgtagagtgtgttgagagagcaactctgttcaagatgttttcctttctgacctcggcagtcatattcttcgcccttagaccgacacgtttcccaaatcgctgtgcacttctgcaaataaagtggcttgccacgggaaacccgaccggcggagccttctcgatggcgatatcatcaatctcgaaatttcgctctaccaaggcggctaccatgtcaatatcagggtgatcgagctaaggtagaccccgattcggtcatggtagccgggtaacacgcgaatgcttggatttggcagtcgaaacgtcaagattggcacgcctatacgggcgttctgtcacattaatatgaaactgtaagtagtcacagcttgagtgtccatggctttcattcagaatcccaatccnccccattcataccccattatggcaagatcaagcaagtggcagtgtgtatggccggaatgacttttactattgagcctatacttgctccgggaagtccttgggtaactgttgaccgggtgactggacgaatcactgccgatggcatgcgcacggctcagtttggtgcgtaaggctgcatattagcagtcatcacctgacatacgtttagaacaccccttgcttgtcacgcagacaggtgtcgaagtcctgtctgcgcgaaacgcagattcacctggatgccctgccttgttgccgactaccagtgaggctcgatagctaatcgacgaccggacatagccaaagcgtaagtccgtgaccaaagccagatgttctggtgtcgtagtcacaaatgaaaacatggaatattctcgccgccagatcgacacgcagtgcaacgtagatgttggcaaggacgtcgt

SEQ ID NO: 2857 - DNA, 1366 bp, Emericella nidulans
accccatacttagcagggacatcaatcacaagaaactcagtgacaaaccaagacaccaatactaacacaacctcccattgtatctccactgccacctccagatctttttgtgattccctttcgcccactcagcatctggaatttccgaagcgccctttacccaatacaacacccacgcccttctgtacaagggccataaaccaacatcgtcgtcattcaacacttcctattaatctcatacatattgacaaaagcttctcgcaacatctgctgtcccgccgacaaggcccgccacgctcggcacagtacacgctcattggaccactatgtccgctgaccagtgcctggctcaaagctcatgctgtccaggtcgtatgctgctattgaggcggatcaggtcttagttagacggacctttccctgaacatgtaaagcatccacttgagagacagctgttcttagccatacagagtatctcatggaattcagaggttcggaaaatcgtacaattggcgttgagcagttctgactttatctttatagaacgacattgtcgaatttacctcccagccggcatacgtccgttaatactgtaatatgaattatatttcaagaatataacaaatcgtgacctcgaggaacactctttgcttttattagacagcaagaagcatgcttgatgggaggaacaaattccggcgcaactttcacgtaggtttatttatgcacgtatttatgcatagtatagccattggctgaccaatcttgtgtaaatcatgtgattatgaaacagccacgcggctgccgctctcagcccgaagacatcacgtcaatccttaggtgctcaggcttgggagcagtggctgttctcaccttctaccccatcattcttttatcgttacctcctataacttttctcagagttaaatttagcgcagttgcgcaactcctggtcgctgtggtgcaggactacccactgctaaggcagtcgacttcaccatggctccgaaggacaccttcttccgctcgtcggatatgagcttgacgcagctctatatcgcgaacgagatcggtcgtgaggttgttagtgctcttggtgagctaggccaggtgcagtttcgggatgtaagtgctgttcatggttgataatgctggagaggcgctggcaagtgagtcgtcactaactggtactcttttgcttaacagctcaatcccgagacaaacgctttccaaaagacgtttacgaaggagattcggcggttggataatgtggagaggcagcttcgtatgtttaccagcttctgcgactttccagcactttgagtgagtgggttggtggctaatcgattcggacgggcaggttact

SEQ ID NO: 2858 - DNA, 983 bp, Emericella nidulans
ccctgtcggcctatataaagtacgtttagaggacactcattcctggctcgctcgcagctaaaccgttctctttagtcgctcagtctagttgtcctcatcctgaaccatctccaggccttctcgtcgctcctcctgcaatccacctccactccaattgaatgggcatagaaacagctccacttgatgtcgaggagtcgacggagcctcctatatgtggttactcccacaagcaccctttacaagaccataatcgttcaagagatgtaaaagacgcgctcgacagcgagaaggctgcaacaactctctccgacgagcctgaatctatagcctataactctgaacaagatcttccagcctctgcggaccatgctcacattctcagcccctctagcctctcggcacttcttaaagtcgaccttcagtacgttagctctcgtgtgccgtttgcaagtgttgaccatgtagacatgggctctccaacgaggaggcctcttctcgtcttgcacgagatgggccaaatcgtgtcagggagatggaaggactatccgtatggaagatcctcctgaggcaggtttccaacagcctaactttagtatgatctcaccgaagtcaacggttgcgtctcgtggtacagaagccattattaactatgatcagattcttgtcatcgtcatgggagtctcttttggaatcaacgattatattgaaggcggcgttgtcaccgcggtcattcttctcaatattgtcgtggggtaagcatccccgatcaggtttcaatttcctctgacttgtccagtttcgtgcaagactaccgtgcggaaaaggacatcctctcgctacagcgattatctgcccctatatgtaaggtattacgtgacgggcgagttgcccctataaaggctgagtcgcttgtggtcggggatatcgtgctacttgctgttggggacattgttccagctgatttgaggttattcgatggcatg

SEQ ID NO: 2859 - DNA, 1080 bp, Emericella nidulans
gtgatgcatcatggagctgacatagtgggataggatcgaggacattggaagaatcacacgaggggatgaacgcgtcggtctactcatacattgtactgcttgtgtaggacaggcggaagctggaactgaggagggtagacaaaatcgcaaacagctagctagagccgataacaagtattgtgccgataatggatatattgagttcttgaaagatccacgcttggtcgttaatcgcgacgtgatgggcttggcgcgtagtaagcggagatatttgcgtgcctgagtgccttgaccggtccgactcctgtgcggggccagagaacctgaaactgatatggggctcggaattaccccttggaccgtgacgaaaaactaacactccagcacgaaaattcttatataaagcgtttgggccttcgctgctggaggaggatctcaagattgtgtaaaattctactaaatgggagtgattgctgcatataatgcaagttatatattattactctagattgccaatgtttagattagcatgcaggacctagcctgcagacgagatgctgagctcaaaaaggctctcgtgttgaataatcgctcccaagcaacgccggtacatccctcccagtggtatcatgttgaatttatccgcgcaaccctgatccccgcagggaccatgcaaagaaatagtcagacagtaggaaaggaaacaaaatgtgctttttgttttgacatgtctatgctgcgctttgagttgttgaaacaaagcaggaatcattacaatcgtaaaaagagatgaggaagatatgtcataggggattcaagcctaagcgacgagcttagaacttaagggccttgggctgctcccaggagaacttctggttggtgaagtggccgttctgagcagtctcaaagtagatgggcttggccaggtcaagctcacggacgatgacaccggggcggaggtcaaagttgttgcggatgatctggacgagctcctcagaggtcttctcagaggtgccgtaggtgtccacgtaaaaagacaggggcttggcgacaccatagcgtatgagaactggacgaggg

SEQ ID NO: 2860 - DNA, 1303 bp, Emericella nidulans
ggctaacaagcttcgatagacccggactgagcttaatgggtggtgactttgcgtgatgagccttatattatgatcagaatccaggtaggttcctttggttgaatgatcccacaaaatgatcccactaagtatcccacaccaagagagtaagccgcggcgttaatcaatccatccttgattctctcagattaataggtgatagtgtaatgtgccgattcttggtacaagttccaggaggttgcgttggagatgcggagtccttcaggtatgactgacgtcatacaagacctcgacataaacatgatgcaatcctgactccttcatatttaatcctttagatccttcaattctctcattctcattccaagaatcatcgatccatctatagccacgatggcagaacaagaagtgtacggcggccgcctctcgacgggccccctgcccgtcgacaaggccggatcgtacctcccacacaccagcggcgccgaacaagatctctacggctcccgttttggcaccagcttcgaaaaggcccgacagcatatcccgcatgtaggacagaccaaaggcacagctgcagagcaggacctctacggctcccacttctccggccacacccagtcctcgaccgccgcggcactaggcctcctccaatctgccgctctcccatcctttactttccacgcagcattttctacaatcgcgtacggtatttcccgctacacggatcgcgctgaaggcaaagactggctttggcctgccggcatgaccctcaatgcatggtatagcgctattggcaccaaggttctccacgacggtctctcttgctccacggcatggtctacactcagctactcagagaaactgcttctcggtggtgttactgcctggggtgttcgtctgttccaccggatcgcgactcgtggtgttgcacgtggcaaggacgacccgcgctacgatgcgctcaagaaggaccccggattttggaacaagtcgctcttcaccatgttcttacctgaggctgcagtgcagacgctcatctcgttgccgttcgtgctgcccttccgcaagaccgctgagagcattgctgcttcgcccgtgaccacggaacgcggctggtaccacgcgctggccgtcttcctcttctcggccggtttcgcgatggaagtcctcgctgataacgacttgcttcccacaagaagaagggcgacattggtgtttgccgcgacggagtctggagcgttgttagacacctaagtatgtcccatgccctagtctgctaaagagctcaagttaacagaga

SEQ ID NO: 2861 - DNA, 1052 bp, Emericella nidulans
aattatagggcacagacgcacggggcctagggacctggaaggaagctccttggaatgtgaatcgacttatgagctctttcgacttagtttccaggtctcgatttgcgcgcgcctagaacgcgacttccatttctagttagggccaattgtttatccgggtcccgcgatatcggaggcggagcgggatttatatcgcacagctctgctaatggatagataaatagcgccgacagtattgttggggatatataccggcattgggtatattctattggagggccactttctaatctggctgtggacatatcgtccacattgccttgaggaatcaagaattgagtcgcagatcgagctccaaaatttgagtcatcgagagaggtatttatatccttcagatctccgggctttgttattgagctgttttcccttcctttccctctatttactaaataccatcccagctgggcagcccatggctccttccgctcaacctacagccgcaatggctacattcacccgtatggtgaagggccaaatgcgctgctactcggcacccgtggacgccgctatcccagccagcaagcgcaagtacattcccacctcgggcacgtatccgaagggattctttgtctcagggactcacgttggcgtgaaagcatccaacaccaagttcccagaccttgcgctcatcacgtctgagacgccctgctccgcggccgcagtgtttacgacaaacaagttccaggctgcaccggtgcaagttagcaagaagatacttaatgcgactcaaggtcaagggatccggtctgttattatcaactcgggctgcgcgaatgctgttaccggcaagggcggtcttgaagatgcgatgagcatggctacaaaggtggatgagtatactggtgtcgccgagaacgggacgctcgttatgagtacaggtgttattgggcagcggtatgtttctcatcgtcatgacttgcaaatgattgccaacagattccaatttctctagtcttcctatctctaagatcctttccaagattcccgaagcc

SEQ ID NO: 2862 - DNA, 1580 bp, Emericella nidulans
tggttagatgcccgctagatgtgttcgaaggatgttctggtcccagtcggactgaagaactgattcttcccagtatcattcagcgggcttactgggcaccttcccaaaggggcatgctcttcattcctgggaccagcaaaataaactctttcgcgtcctaagttatctactgtgcttactaaatggccactcgacaagcctctgatttgctaacccatcctattcaccagcataagacggtcatattgaaggtttgagaagcggcctcgaactaccaaaggcatttgttccatctatgccagagacaaaacaggattatccaattcacgtaccaagccccttggaaggttgcgatgtctttcacaaaagcgtaaacgctcacagcatgctatgctacgcggtaatcctcttctctcgatatgtacgataacagtcaattcgaacaaggccgcaacaactcagccaacctaaaaagacgaccttgacgatgtagtttgcaccgaaaatacaagctggccaaatgcaccgtgatctagccgacgggtctggatttaaccatgtccattatggggcaagccaccaaacggtatatagcctagtgattccaggagcccgatatgagtatgattgagatagccggccctttgtccttccggccttggtaagggtgacttaacgatcctatagcccataatgatctcttccaaacccgcggaaagtgcgaatgggcacctgtgactctgttttccgtaaaggatgtagtcgcagactggctcttgggtcagatctaaatggacgtaatgagggagatcggaactcgatcaggaactctcgctaggatcagggagcctagagccatgtctgaccgtggtcccaaatctggaactcgggcgtgtcagcttgagccaagttcaaactcactctgcatttgatctcctgttagcttagccgtactgacctggcaatatcgggctccgtcggaggctccgacggaggctctgctggtatggaagttccggcattgtcggtggctggctgcgtctgggcctctccctactctagataaagggtctcagtggacaagcctctgccagtttcaactaaggcacccaaacttccttaatcatgttaccaaggcatctgtgaaccttctcatcttagcaacgattcggtaatcaaaaaatacgagcaactcactaccgcttgatcgacgagacaaggaatgggtacctagtttatataactagatgggtttgattttgcgtcgagggatgtgttggatcaaaaggtatcgtcacagcacctagtttcaagcaatgaccaccaaaagcggattcagctgcaccttgccttgataacgaccaaatatttgaaggctgcaaagatacaaccttgccgtattagtttcatcgagattgaatatgtatggcgaatatgtaaagcgagtcagtcctagagctgataacattctgccctgcgctaccgcttcacttttagttcggctccgcctaaggacccacgaccccagatgcttcattttgagaactctagacatatcacgcatcaatgagatagagaga

SEQ ID NO: 2863 - DNA, 1704 bp, Emericella nidulans
ttttccccataatatgccgcccacgcctcttcctttgactccctcggatctacattaccggcatactgcccgtagtatgcatccgggtggcccgaagtaagaacgtcgctcaacccgttcagaaactggatcgtcgtatcagtcaaagcactggcggtgcggccaaatgagaatgcgaagaatagagtatcgcggtggacgaaggctgtctccgagggtgcgacgtcggcgactgcgccgccgagcccattaaaggtaactgcgtacaaatccgtgccgtttgtcgtggtgtcgaggtattcaaaggcagcttgcgccacttcgtccggaatcagggtctcctgcttgaagacaagcgatttagcgtagaagtggctcggctgggccgtgccagaagcaatagtccgcgcgcttgcggcggcacgaacttgtagaagtttgtatatggtgtaatctgcgtggtctggggtgctgtgctgaagtgcgagaggaagtcgagggcctcgaagtccgcttggctgccgaagtatgcgccagagacaatgatgctgctcggtgtcacgacgaggtcgaagccagtgtttcggggcagggagccgctggcgagcaggccttgccacgagaggaagacctgtgcgcgagtggccgagtccgtctctgtccagacatacgagtaactgatggtagaaggtggcgcgggttcagtgcggatagcgaagtcggtcacgatgccgacactggaaccggcgccgcgaatggcgaagaagagatccgtattctgtgtcttcgaagcgcgaacaacggacgagttggctagcaccacttccacttcctcgaggtagtcaaccaagaggccgagctgccgtgacgccgctccagcccctccaaccgtcgcatgcccgccgagcccgactgtaaaggtggacccgtggggggtatgccggcctccgttgttgtactggagttcggtcacccgtcccaggcggttaccaggaccaaaggaggtgatccatgtgtcggtatccacgctgaagtgctggaggttctccagattgatggaaagtccgtccgtgggcgagccatagttgccatagctgtgtccgccgctcttggcttgaactttgattcctgcatctacagcacatttgacagccgctgccacctgagaggtgtcctcgggaaatacaatggcgacaggagtcgtaagaagatcaagattgtacggtgccacgaggtttgggtagttgggttgctggggaaaagcaactagactggagtcgcctccgactgatgccaggagacatgttgcgaacgtgctgagcgcggtcattgatggactatggtcgtggtaagtacggtttctgttgatccgttgcaacaagaaaattgtctcggaacatctgtacttgtatattgtcgaaggattgctatacgaggacggactgaagcctgaactataactccgcaactccgtaactccgcctctgcaattgtcatatacctttcaaagtgaagttgtcctcttcacttttttctctttttcagctatttctatacagcaagcccatgttcttgctccaagtgctgtcaaagaaactgcagcagccatgttggtgcgtttaggctatcaaaaccctaggtctaacttttcttgcttgattctcaggctggtacatcttgaataacagtgaatggctgtataga

SEQ ID NO: 2864 - DNA, 1591 bp, Emericella nidulans
tgtttccgcacaggttcaggcttatatccgttctctaggaaaagatcaccagggaattgtgttttcaggcaagtgttgaacctctctccgaagatcgctggctgcatcatgagttttcggttcatgccatttcttcaaagctgagatttatattctcaaacctgtctccagaccggaaaatcataatcacttggatagccggtattcatgaatgggttgtgaagagaatcttctgagaaccagtacagctatacagagtatgtagtatttgtagctccgccagaagatacatcctaggaacgggctccttggttttgtgaataactgtaaatccactcgaaaggcacacggggccacgtgccattctacaacctacgtcctctttacttcagtaagataactataaggccagttcaagcacagaaacatttggccggggtatcaacaaccatagctggccatgagaactttgaatgaagggtcggccaaaagttgcgttgcagtcagacgtctctcgggtgagtaattgaataccttctgcataatagagagcacaagctctcgctcagccggaccagcgtcaggccggtagcgtgcaatctctgatgcgaggctattttttgagcaggcgcttgactttgatcgtcaacgcttccaccaattgtttcgcagccgacatgcgagtggctctagaaaatctgcccactgtataacggtcaaggtacggccccattagaggaagcacataaccctatggtaacaattgtccccggacagcataaaagtgtccatataagtcaccaggtgcgatgatcctctaccctctgaacgatttcatcatgtatgcgtcgttcgatgtcacccgagtcgccggtggccatggctttgacagcaacctctttgttttcctgaaggtcgagggcaggccagactgtggaaaacccgccggtgccaattttatgctcaaccaggtgtctcgcgttgaggatgtcttcgagacaaattggatagtaaacgtttggcgttgccttgcgttcatacttatcccaggactcgacaacttcttcgagctctatttcctcgccttctgtgcttacaagatctccaaagtctgtcgcgtcatcgtccttggttgtttgcggcggcgttactctatccgtcctatcttatccacgactatgctgtatcgcggtccggtcttcgtatgtacagtgccgagacacaacataagcactgtgcagtcactagtgaatggcttcgcgagagagttcttgaatgatgaaagtggcttccgcggccagcgtgctttccgtcgcaattgcagtttggtgtggttgtgtgatcaattggtgatgtacaggttgtatccttctgagtttagggtgccgttactttggtcatattttccgtgtttgcctgggcttggcctagcctggcctagcctgatcttcggtctggtcagcttagccgttttatgggcacgccaggccattccctttgacttccttctctgcgaggttggggtttttttagatgttattttcttaatgtagttatgcttttatagtttggtggttttttagatgaatgt

SEQ ID NO: 2865 - DNA, 1065 bp, Emericella nidulans
ttttttgattgcattattgttcctcttggtttccagatttcgttgttttttctttctgtggctttgcaattgttttctagaattgcgttccgcaaggctatcaaatattgtcttgtctgcggtttccttcatatttaggcacgagagaattagatctcgatgagtttcccaggagttcggaagtattaaggacgaagtgtgttcaagaaccagttttcttatgcagcatgaaagccgctctgcaagtggctgaagcagagtgggccgctggagctcagttgtctgcgcgctggtcagtccgaacttattagtactcttcaccacgatcactacctacctgatgcagcttccccagaagcacttcggccaaccgccgtccacgttttctgtatcgcaacatactatcccaatagatacctagcattagaagccaaacaggaaccatgttgagtgaagcgccctccaaagaggttagaaaccaagcaaagtactggtcgtgatcaagtagacgctcaaagaataggcgagctgtcaggctggttctgcaagatgttagaaatgtcttctacacacatgggagacgtacgcgtaagtcattttcgatttccagtctgcagatccgcaggctcctattactccttcaaggaactgctgtacgccgctcgtccagtcgcgaacccattttacctcggatcctaccaccaacgtgccgccggtaccctttctcttgcaagctcgaatctcgttggcaccgacacatttaacaagccatacggctcggtttaccggaatccatttgcttaagcactgatcaagaagattcttgccacggataccatgaggaatcgtgcgactcagcctgcgcaacggcacagagggattggcgaggtcacggagccaagcttctcgtttgttatccgtcagcgtaacgcgaggcggcggcttaaagttcgacgggacattaattgtattgtgattctgtcgcttctccagggcagccatgaaaacagacgagagcatttgtaagccggacgggtgcttcaattgcgcatagagtgatgggcg

SEQ ID NO: 2866 - DNA, 2058 bp, Emericella nidulans
atccacgagaaggactttatccaaggttgggagacctgtggacgtgctgccttactcttcggcgactggaagattgtgtacattcccaagccaaagggtccggagcggtggcagctttacaacctcgttgaagaccctggtgaaattaatgatttagcggagaaatatccagaacggctgcagaaattgctcaagctctgggaccagtacgtcctggagaccggggtcatccctctcaacccggatctaggtgactttttggaagccaccgaggcgcagatgacggagaatgcctggatggagtatgactattggaaggcgggtgcgagggacgacccaggacgggagaagttcatgcggaagccgccgaggtttcagagggttgtaaaacagttctaattaagatccaagtcattagcatcataggtatatacagattatgaatgacaaactgatatggtatatagatgaaaaagtttatatcataacaaagaaatccgtaaaaagctccctccgcacacacttcgagtccgcccaagttctcgacgcatcctggcgtctcatcatctctttaagaagtagaagggccttgcctgcatttggatgagctgggggggctaatgatgccatacgctggatctcgttcgcaatccaactgcgctgctcgaatgaaccttcaagggccgcgatgaagagcggccagaggaagcttatggggattggttctgtgccggattctgagggaggttcatggctattggagttgctatttgtagaactggaggtaagggaagaactctcctccttcgccagcctaataatctggtctacggctgcatataccctatccgtgcgtggatatatggcgaacgccacgcggtgaaggtatataaacaatgccaggaaattcgcgacataggagcgaaacgtgctgacgattctcactgcgagtggtggtgccaatacttcgagcagcgacgctttcccgtccttgctgggagatgtcaattgtgacgaggagagctcgtagaggtccagtattcttggccttttgttccagagactctcgaggtctgcggaaatagcatgtgcgatctgtagcacttcgaattcgtcggataccgttcctcggctgcggtggtggaggtctatcataatgatgcgccgggtgacttgctgtgttgcgagaaaaaaggtgaaggctggcgaggtgatggtgcgggttactatgtatgctgggggtggagttgttgcaaaaagatcatcctcggctgagtctgggggggaggtagtaggggtagagatggtacttgcttcggaggtgtggtctcctactacagagcggggctcgacggctgggccggcgagcagtgctttgacgtctaggagagaaacacatgacgcgatgaaatgcgcgagacctgtccaggattcaatctgcggttggaagcgtcggaggagaaggtaagaggtgtgtaggtaagggaccgctgggcgccaggtttcgggggatatgagctgctttctgtcaatataggcgcatatgtcctgctttgttctcttggagtaaggtgtagaaaaggacgggcatacctcagccaacatcagcagcagcacactcataagcaccctcttcagcaatacttcatttggatcccccagcagaaaagcctgaatctcggaactcgcttgagcatggtaggttggacccattttcggttgtttgcggtctacccacgccaaatgcatgtctgagtagcagtatacagccaacagaatcgcatgacaaccgggtgcgctccgattcgactcagcgaaaatagtatctctcacatatctccactccaagtcgactggtgcgaatattgtaggtggtgcttcgttctcgcggaaatgctgcagcagttgttcctcccagactcctattccgatagtcccctgaggcgaggttgggtcgggtacgaccccaatcccaggactacccatttccacctccccagaatcccaagcaacaaggcgttggtcgaaaaggtgaccgccgtctatctcttgcatagc

SEQ ID NO: 2867 - DNA, 2151 bp, Emericella nidulans
  unsure (1)..(2151): unsure at all n locations
gggagcggatcctttacaagctggtcttcaactttcgcgatcaactttgttttccaatccaggcgttgaacctgccatgtcccgagggcgaaggaaataattgggattaaagctgtctacaaagttagcactcatcttgatgggccaccgggcgaaagcaactacgaaaggcataccgagaatgatcaatcctggcccgtgtttgcggccagttcgcacgatttgtgcggggtggtcgacgacagataaccagcggggatcatcacccatctgcccgttgaagaagcggacttggaattgttggcgacggcatctggcgcagattgaatcgaacttgaataatgtgcgcggaattcgagtggatgagatcggatgttgccatactcgagggacggcccgttcagcgaccgagaagatcggtcgcattatttatcgtgttatttattgtttctatttcgctttgtatgtcctgttgtcaactgagaggcctcctaacgttgttgatgagctagaagaagtagaagcaaaaagtaggtcgatggaggagattcaaaccgacccggccgtgctgcggaaccccaaatgatcggcaccggctgatgcgcgagcaactactgctgaccttcgaatccataacatcctcaaatcagaacagcataccacagtcaatatgttctttaccgggaccttacaagaaggaattactctggcagttcaagagtcaaaagccgttgtttgctttgtgccaggtctgtcctcgagaattgacgcgtacgtgatatacccgctgctaattattgccttcgcagataacggcgagacaagctcaacatggcaggaggaatactttcaaggcgacgaggtacaacctcaagtgtttaactgaaatctttgcttgcgcatgttaatccgatccgttgtataggagtttacacgacttcttggatcgcaatctgtcctattacgcatcgctaaagacagccaagaagctgggtttctagcctccgtctgtcccatctcaaagtatccaacggtcgttattattaggtacggatttctgtcccagctgggaggtggaaccatctgcgcagggcgtctgttgaccggatcgcaggaatggaatgctgcgggagtatatagtgccggacatctcaaaagagggctttcgcaatcgggttatggccgctatagctgatagcaaaccgcagagtcagacgatttcttcttcggtgcctcaacagtccgctcagcaagctcaagaattgagctccccggccgcacggtcgccacaaactgttaccacagctcccacgccagcagtcgatacgacacgggcctcgataactcagggacaatcaagtcaaaacgtatccacgaggagctcaggcggcagggcaaatgatataacgtattcttcagggtcaagaatgtactctgcaacagtaccccgaaagcaagagagggagtacgatacgccgcaatcttctaacaaagctaaggagacgaccgagcaaaagaatgatgatatgaaagggaaggcacctatacggacaaacatggacgaaaaatcaaagaaccaaaaatccgctgctgcgtctccagcccctcactcaacgtcagtgccagtgcctccatcgcaataccgtctccaggtccggctctttagtggaggtttctgtccgctcaacgttttcacccttacataccatncgcagtgacgtccgttcctggctagataaccaattggaggaaaagcgaccctatacctcaaactcatcatgacgcccttgccgtacaaaacacttacaatcgccgaagaggaccagacccttagtgaactcataagcggctccacggcgacctttgcatggtgccatcaagcatatacagaagctactnggactggatcctaccctttcgccaggcttaagaattattggttggtccttgngggtggagggcggggattatgtccttatggtattcccaaaggtttatataagcccccccccaaccgggtttcggttctgatctcaatggccggtgtgggcaatttgtcttgcataggtgcaatgngttatgtgccttcagtctttcttttcttcaagttattctgcttcccctcttgatttcattctctggtggttttta

SEQ ID NO: 2868 - DNA, 1878 bp, Emericella nidulans
ttggttgggattgcacgatgcattgctttggtatgtatcagtgaggtcttcacgaactcgggttgacgaaaataggtcctagtctggacaggattggcaggcggtgacagcgactactgcgcgattctagtggcaatcaactcgattctgcagatggtcctattcgcgcccctggccatcttcttcatcaacgtgatcagtgggtcgaatgagggcgtcacaatcgattattccctggccgcaaagagcgtaggggtatttctcggtatcccgctaggcgcagccatcctcacccgctttgccctgcgactcctgataagcgaggagtggtatgatcggcagttcctaaaatggctgagcccctggtctctgatcggacttttgtttacgattctggtcctgttcgcatcgcagggcaagcaggtggtgcattcgattgtatccgtggtgagggtcgctgcgccgctgatcgtctactttgccgtgatcttcctggtgacgcttgcggtaacacggcggtttggctttggatataagctgtcttgcacgcagagcttcacagccgcaagcaacaactttgagctggcgattgcggtagcgattgcggcctttggtgtagatagcgaccaggctctggccgcgacggtcggcccgctcatcgaggtccccgtgctgctggggctggtgtatgtggtcaagtgggtagccagaagacaaaaatgggcgtgatttctcctgtaaatagtcgtatgcttcattgaccactaatttcatccaagacttgaaatagaacctgattctgctctctgcaggcttcttcggagttgctgcggatgaacccctttcgtagcttttgctggatttctgagacgtccagtccgcgagcgttgtactggttcacgagcttctcggcgatggcgcagaatgtcgtattgaggacgtgctcactaatgggcagagagtccaagccttcgtcgggagagcaggcgcaaagtggaggaagctctgttgctctagctttctcacactgggattcgttcttgttcgcgctcggcttgcatgcaccgattacaggttcttggctcgggactgattcgctgcgaggactctgctcagtcgagcaagacggctcagatttcacctccgccactcgcgaccgagcctcagacggatctcgtcgaattgccggaatagcaactttctgagctgcaactggattgtcgaccatccgcagatactcctctagtgcattaggcggtacgccgaggaagaaatgcagatctctcagcctcttgttctcagcctctaatctctgggccgccagcctgtgctcgacgtccctgcgatcgagctcttgctggagactgagcactttgcgctcgaggtcctgaagatgatcctgtctccgtgctctgctcttacgctggttctccctcacacgggcgagtttatctaatcgctacgtataggtaagaaagtgatatcagaaagctcgggagaacatgttaccttcttctccaaagctgaggtcatcttgctcttgcgcttggtgttatggaaagggtcctgcagctggactggagaaaacttccagtccgcagaagcaaaatgcgagccagaacctggtcatgtgactttgtttctttggatttcagtttcagctgcagaagcaattatcactagtaatctgcagaccggtatacaactgcggcttgatcaataacccggcttcatatatcacagtaatctcatgaatgagcatggtctatatggagcgtggacctggcactggtccgagcctccgtctgcgtcacagtcacaccagttagctggtgcggtacaaagtcggcgctcaccagatcgctgagctaattgaca

SEQ ID NO: 2869 - DNA, 1437 bp, Emericella nidulans
agacaagcctgtcagactctacgtttggtgcggcacctccctgcagttctccaatcgtgagtgcgggtttgttttttagtagaccagaggctgaaaacctttttcagtaatgagaaaaatcgatccaatacttcgtagtaggactcggcataattcccttactctgagtatattcaatacctttgctgtctgtagcagataagggtctgtaatttacgaccggatgcgttgataagcccactcctggtgactctccaagatcggcggcctttaatagtcggccctctcccttccaccccgtcctttccccctcgatccggtcgtttcttctttcgttcacataatctgtttcaatcgagattcaatcgctaccgggacagagctttattgcctctcttcccaacctggccctctctcagcggtgatttaggtctcctatttcccgcagtccttcgttgattggtgcgctcctcgatcatactactatactccatcgccttgtataaatcactctatactctcccaatctgaaacgcaatttccgcatgcttcttggtaagtggcccctctcactccagttcatcgtcatctgcaatcaatccacaccctatgtcttgttgtcataattcgtgcacgcccggcatttccaataccaagccttgggtgttcccctgagtggatcgcagacaaagactttgatcaaggcccactgttataccactctttctgggtgctccctgcgctgaattgatttttaaactgatcttttatccgtcttctccagaccctgttctctgtatatgattctcggcctatcctgaccccatcacgtcgtcgccatgctgcgccttcaaactgctctgttcttcgcctacctggcggccaggtccctcgccgcagacgactttacgccgcccagctgcagtctcgatgaacactgtcccaaggaatacccttgctgctccggtaggtcggatccgccacatatacactgcgcccgctcatgttgcactagtatacggacaatgtggtaccggcgcttactgcctcggcggttgcgatcccctgatgtcgtactcgcttgattcctgcgccccgatgcccgtctgtgagagcaagagctacaagtgggagaacctggacagcgccgcctcgaacaatgagtacctcggaaacgccacagaatccgactgggtgtacagcggaaagcttaaagtcgaagacggaaaccttgtgctcaccatgcccaaggagagcacgggctcgctgatcgcgaacaaccactacatctggtacggcaagattggtgcaaagatcaagagcagtcgcggtgccggtgttgttactgccttcattcttctctctgacaccaaggacgaaatcgactacgaatgcgtcggctccgatctaaaagaggttcaaaccacctattacttc

SEQ ID NO: 2870 - DNA, 1692 bp, Emericella nidulans
  unsure (1)..(1692): unsure at all n locations
acgtgtaggtagtcgacgttgtatactcactcgtgtacggccgctcgctacagtatggatacgcgggacagtgcgggtacttaggcgggtggacttcatactccgctggcgaaggatagccaccagacgagtagtagtagtacgcgtaatagcagtccggtgcgtacacgttgtagcactggcagtaattcggagcgcacttgtagtaatcatacttgttgtagcggcagaagcaagcgcagagcccggcgctgtatttgtcgcagtaatagacttgtctctcggagaggtcatctacaatcccagattagtcggttattgcagagcagaacaaggtagggcagagtcagcatacggttgtcagcatgggcctgatcctcactcttggggggaagcgaaatgcccaaggcgagaatggatgtgaatgtgctgaggacgatgactggtttcattgtgacgttgccagtgtatctccagctacggttttcctccagttgaaattgatagaacggatccaatgccagttgcaactggcgcagcatcgaggaccatcttatactgcggaaactcactacgtatactttgtccggcagtggcgccacccagtatacctgctgtgacgactcgtgcctgtgaagcaactttcatcctctatgatgcttgtccgggtcgaagcctggccaggctgctcggcatccacttcctgtctaccggcctgatggagctgataatctttagatctcggatgacgtttagattccattcaagacagtcgttgataccggcgtaccgggattgccttaaagagctcactcaggttcgtctcatgatactataaacggacgtaatcaccatggattcccttcagatgctccatactgtcgggttatgacaagggctaccgcgagtgagactgccgacaattcattcaatcgatggctgggcctcgtcaggccaccagcagaacccatgggcgcagacccgggagagagacgggaaaaccagactttgctaagtcagtcgcctggtataaatccatatctagacacctgaaaatggtctgatcactaccgatcgttgcgtatgtcatttactgccggatgatggtgcttttatgcagcttgagaaaggtcctagaatatccaatgatgtgtacagtcgctgtgagcctatcactatcgcatgaggccgggccgtgaacgaagacaatattgattcggcttcaacaaactgagaacatatctctagatagatagctatagctatacgcggcagataaccagacaaggggaaagacaagacattaggacattatgacaagataaacaggtctatatctatcgttaagcagaaccagtccatccaaacgcctcgccaagaaaaaccaaaataggcgtctatatgtgagtgagtggagtgntaatataaccataacaaataaacccaagcatacaggaaactgaaaacagaatgagaacagaatagaagaagatgtgaaaccgggttctcaagcctggtccaatcccttcaaccacccccattaactttccggcgccatcctgacatttgaccaacactccccctattccggtatcgcccggtacaatttttttcccatagccggccaaaaaaaatctgtggccacaataaaatccttttccttggaatcccctccccgaactttcttttcct

SEQ ID NO: 2871 - DNA, 949 bp, Emericella nidulans
gcctagactgtattaccggcatcaaccggcaatagcataaacgaagggctgactttttaagtctaactgtatatggtcaaccaaatacacaaagattaagagaagcatagcctgatacagcactcgagggacataaattttgaactgtagaactaacagaattttcttgcagaaacctcggcgacaaatgccatagatgactagtagccacatacagttgacatattcagatcagccttcgcttaccacatattcccctaacgagagcatagatcgggtttctgacttggggtctgtgagaatgctcaagcactggcattatcaatattctgccgatgcaatgtacagcccttttgtgctcacatgccaaaatatatatcgcacagcagcacactttccactgccttaccccagctattgagttagccaatgaaagaatttgtactagctatcggcgacaacaataccaattaatactcctctctttggaaaattgatggtttgtgctgttctcgtcataatgtcttacctagagcaccatccaggcagacccgaggatggccgcaaccaggacatacctgctacaatacgactgaaatcagtcccaaacgtcccgtatacagtttagaccctggctacggcgaagtatgcacagcacaatttgtggggaatgccttgcctcggcacgtagacggatgctgggtggagttctacaaatagtcggtgtgggtcaatactgataggaaagttgagtgattgcaagcccaataatctgctggttaactgggagatgaatccatttggaagggagagctatacaatccgatggccgcccatgatcaatactcaatatccagcccatcggaaatatcgatctcgccagcattgaggtacacggatcagagcgccctaggagtagtttgtgactggcataaatgatagcaaatgc

SEQ ID NO: 2872 - DNA, 766 bp, Emericella nidulans
caaggcatcgaccactacctcggcatgtgagatggttaagaacatccttatcatgcgctttggcaacgagttcttcaatgccacctggaaccgccatcacatcgacaacgttcaggtaggaccaactcccaaactctcgcgtcatagcgcatcgctaagacagtttattggtatagatcacgttcaaggaaccattcggtacggagggccgtggaggttactttgatgaattcggcatcatccgtgacgttatgcagaaccgtatgcttgccgtgtcctctggtccgacgacatgctgacatgaattttttagaccttctgcaagttctcacactgcttgctatggagcgacccatctctttctccgccgaagacatccgtgacgagaaggtaaagtaactcgcaagaggttactctaatgatgctaatcaattgtacaggttcgcgtcttgcgcgccatggaccccattcaacccaaggatgtcatcatcggccagtacggcagatcactagatggtagcaaacccgcatataaggaggatgatacagtgccacaggactctcgctgccccaccttctgtgcgctggtcgctcacatcaagaacgagagatgggatggtgttcctttcatcatgaaggcgggtaaaggtatgcagacctgatacatgcctgatgtaccatgcactcaccatctctagccctcaacgaacagaagaccgaaatccgtattcagttcaaggacgtcacttcggcatcttcaaggatc

SEQ ID NO: 2873 - DNA, 1179 bp, Emericella nidulans
gaacttccatggttaggcccggcaggattgaagtctagtagagggagctagcagcggcgactcgaagagtttgccccacagccaatcagaggccacggaaccggctatcaccgtggggcctcccgaactcttcatcaacgggtatctcgaccccaactctaccaggactctagcaagtacagtagctcagcactagccgagccgggccaaagcctacctctagacagtactgcagacaggtcatctgaacgggtcctgagacggtcagcgtataccagccgctgtacctgtaacaactgacaccgaagaggtcaaagagcactaaatagagagggggagttccgtcacggcgcctttacccgtccggcgtcccttttcagcttcagctgatcactgattgtctgcttagcgcgccctcgtccatgtctatgggactgcgcatgggggcgttgcggtcccacccgtagcggcatcagtcactttacgaccgcaacgttcggttagttagggacagaccacaggcgcataatgcttcgatcaatccaggacgggatgcacgctggaggactctgcacaaagcttggttggccaactcactaattcgaaggtgcttccgttgcggtgaatcatgctaacgaagcacggctcccttttgagaaatcaagacttaggataggcccgctcgcgcatcgattaatctattgatgatatatggtatccagcgccccagtcgacccaaagaatgcctttgcatgcgagtcttcccgctctccttgcctcccgagcggaccggcgagtcggcaccagattgacaagtttcttactgtgaacttctttttattatattattattgttagggctctgtcttgatcttttccccgaaactacttcttcgagacttttctatccacaccagtctcaccagtctaaccagtctacaccagcactgccttgagccgcctgcgcactcagtccagagtcgctttgcactattagccttccggcgtagtgtcctttctcgcttaccggtaagaatccatttattgtggttgatttttctgctattttgtcttcacgtcataatcagaatcctgaagccattttcttttgcagtgtcacttctccttattcttctctgctttttcctctcttgattttttccatctccgcctttcctt

SEQ ID NO: 2874 - DNA, 508 bp, Emericella nidulans
cgaagaatctcgaggcggagcaaatggtgacgaggacgcgagtcaacctgttcttacaatgggcaagatccagctccttaagcgtggggatatagaatcgcagcagtgagaatacagatataatactatacatcgtataatgtagattgaggtgtggtatcgcttcgcaacggtgtacgaagatatatataaccgagcttcagctattagtttaaccggtctccatatcacttaacagaaaccggaagcatattgagttcctatgctagatgccgtctgcatcactatatttgtaaatactttattcaggttcctgtccgctccacttggccctcaaggcaccgacatcaaccccgcaatcctccgcctttctaacaatcgctttcgctttctccgcaaccggcacatcaatcatcttcccatcaagcgtccaggcaccctgccctgcctcgcagccttctcatccgcaaccacaaccctaatcgcccagttaacttcctcctcatca

SEQ ID NO: 2875 - DNA, 2883 bp, Emericella nidulans
cgtcatgaactgcgtggtcaaggcttccatcaagcttctagcccagccaagagtctgtttatcagctgtctcccagcttagtcgaaactatcgcgaaatacttacatagatcatatcatacacctaaataatcccttttcctaattctcatcaattaggcccgctcattctcgttaccagctacatgcaagcttttggagattgacatcgagatagatatataggcggtaagctagtgagaacatcaaacgactcctcgggggcttataatcagaatcctaagcatagaccagagaactaagtgctgcactgtttagtcgatgcaaatgattccaacaagaagtattgtctgcctgagtttgttgccaggatgaattgtctttcaacttatcatttatctatacattaccaagtctaaaataccctgagctattactgcgacgatttaaatctaagtgatattgggaaggttaactataagcctagcttggcagggggatcatgaatcgtcatttaactagagtatgaaacccctttggcaaagcaggtagagttacatggtgtatgggcggaaggtttcacgcatgtacataatttccgagtccaaaacttattattagctgcctatgacttagcttttggtgcatctgtagcttcctccgcttagggtaatggaatgatcaggcatagatatagtgttttgagcttcaagagtataaaccctcctacgacgaaagatgaacaaacaactaaacatattgagtctcatagggcacagagcccaatttgtccactaatatcttctcagtcaacttccacagattctcctggagctggtggttctgggcttcactagacggactagtaggactacgatctggcacaatctgtaattttcaatcagcacacggatgtagtagagggcagaagttggaaacttacgtattgtccctgaatggcgtccttacgatgtcctcccctgtagcggcaaaaagcgcgggtctgcagccttgatcgacaggatcttcaaaaacggcctgacaatcgcgacaccaacctttccaagaacgccgtatgcgtcctccgcctgtttctgctggtcagtactgacagcaccagggtgagttgcgttcatccagggtccagtatccgtctttggatcgaatccaagctggccctttcccttgcgctcagccagcgctcggatatataagaccatcgcgagtttggtgcggttgtacagcttggttggtccaatatccgtattgagctcttcgagagattcaaacttcacgtcgctgattgcacgatgcaggtcagacgattgcagcaccaggcgagagttcgacgtcttctggagcagcggaagcaggatgcgggataagtggaactgagagatgtggttgacttgcatgtggctatcaatgccgtcattggtcaggttgaagactccagaacccaggcccgcgttgcagatgaggccgtcgagtcggtcgagcttcgaagccagctctttggcgacctgatcggtctgctttaggtcttcgagctcgatctgcacggagtggactttggaggtatcgccatacttcttgagaccctcagtggcttcctggatgtgctcctccttcttaccgaggagataaagagcggcaggattgtgctggaggaggtgggcgcagataccgaagccgatgccggcgctccctcctgtgacaacgtacacctttccagaaagatccggaatgtcagtgttggggttgaatgtgttgctgcttctaaacatgatcccttataactcgagttagctcacttcgaaatgcataagagattcgagcaggtgattttgtaggccagtgccgctgcggtcgtgggatcatggtgacgtcaaggcctaggtcatcatggctgtttgcagggctgaatcagcatattcgggaaattcaggaggctttctggttaatggcaaattagggaacagctgggaactctataagatatagaagggagatttgtggaaaagcacggtttgagtggaagcgggcttgaaggtggaccctgttgcaactatgtgggccgcctgcgggcaactatcaagatcttacgactgaagatcttagggttcaacgagtcataaagaattatatctgccgaacagacgaaattatttaaggattcaagggcaaaagatcgatcatctatatgaagatggcttctttgttgcactatacgatgaggcaaagcctaacaatatggtggataagaactttaacatagaatgttgcagacaagagtagtttgtgatatcaaagaggcaacatcaagcaagggagtaaagtgctagatgtgacgaataactcagaagtataagcctaggagccttttctatacattgttctcgaatctgcttccgtgagttactccgctctgccacccagattgcaataacagcctaaggattctagagtccaatagcgcctgttggctcttgcttgtcatctccttctatataaagtagtagaaatggaacagtaaaagaaaagcaatttgagttaggtggtctggcaaatcagttttctgttttctaagaacagttgctagctgggtaaggtttgtaatttgtatagacctgtagtttagggctggacttcacgaaattctgtttaatacattaggtcatttgttgaagctttcttcatagacaagtgctctgaatgtaataattttgctacactagagttctttgtcctaatcgtcgaaatactctttaaactaatataacgaggttttgttggttgcgaatagcttcaagttcgctaagtacttagcaaatcacccaaggtgggcggaatggggccgaatcacgttgaaagcatctttata

SEQ ID NO: 2876 - DNA, 2395 bp, Emericella nidulans
taggcgccatgaatgccagaaccattaatcagcaattgcttgtcccgataataatgcacgcgtccgattaatgtccatattggggaccactgcccggaagctattgcatccgaggcccttttctcttttttttcggtcatcacataccctgtctaaagggcaatatttgctcaagtaacggacacccaatattggctcagaaaagctggccgcgtacatcatgcatggtttcgttacttggtgggcggctagagtcaccgctttatatgtctctaagcaattagtctgacaacattgcattagggtatacatggccctcaataatgcatgcacaatgatagcataatcgccattcacgtttcccattcatgattagcgtctttaatcgtttgtaggaacggtaggtacatacaaccttgagtgtatcaaattacaacaaacaagggagcagtatcagagcataattcaaactcaagctgagtcttaaagagcttgccgacctagcatggcgccaaactccgatctgagatatgtaccttttacccggttatatcttctggactgaaattcggccagaagtttatccagggcgagcgtggcattgcaatattcgaggttcagtctcaatgcctccctaagaagtgaggctagcatcgctgcgtcctccacggaagtatttgcgccctgtccattgttcggggtcatctattgatgaaatcaagtacagagcgtctgccatgttgaggcgaggcttactttgtgaacactgtctcccaaaagaacaaagcgactgaaatgccacgtttgcagtaggccttcctctaacgccgtcatggatgcaaacgttctggttgcccaaagatcacctacacagacgtgttcggtgactcggacaggcgaaaatttgcggcagaacttcgctgcatcgtctgctgagaaccgaggagtgttgggattttctgacttttgcggaagtttcacgagaatgaaccagaagacacggctctctcttccatggaaggttatcacgcacagccccttcgagtatgagttgatgtgctccccgatcttgagtccagctagctgttcagaaatcccaaagatgcacgcgtattcgactgtgaaagttattgttcttttgcattagcctctgcaggttgaacactgcaaatatgccatacacaccatttctttccagggtagtggcaatgcctgactgcgttgcctctgctaatcgccacgtctcggaccgaacccgactatggattccatcagcaccgactacacggtctccgttttatacaaatccgccttctaccacgactgatactccagctgcataaatcggattccagtcaccttcttattgacaaggatatgggacatgattggataccggtcatggagaatttctaaaaccctctgtcgatctaccgatatgataaggtatccaaagccgtgcgatatagcccattcagtacatctacttttatacaaaagaaccgggctacacacacctttcataaatgtcccatggtagtaggctgttgaatacaaactcatctggaaaacggacatgcattttatgaataggcgcagtagcgctcttgagctcatcatagagtccaagctggtcgaggattcggcctccgttgagccaaataccaataaaggcaccttcctgaggactaatttcagctcgcttttccaatactatgtggtcgatgtccgctctagccaggcagtgtgccaaagtcaacccagcaactgagcctccaactataatgactcgaaattttgatttccgcgcctcttcttcgtccattttaatttctgagacatcaagtggtgagcttaattgagcttaactggcaaggttagaagaaaccaccaacacactttgtttgaatgacatttggatacataaaattatacgtacttgacgggcaagatgtccaagtctaaacctaaaaaggctatttgaaacatgtagcaacaatttttatcccttgtttgagctccatgcttgaaaatgctacatagggaatacatgttctgctcaatccttgcatatacaactctgcacctaattgaatcctcgtgcaatttatgacctgggagagaaagggagcactcatacaagacccctactgccctgatgcatgtaagccttgcatgaaacaggatctattattggtgcaaaagcggcggcattcagatgccagtgtcaaattatccctagagaagggggtatgtcccgcaacagagccagcgatgatctggtatttgcggacataaaaatttatacccagtgctaatagttcggctaggattagatttaactggtgcgaatgtctgctggtgtaatatatatggtatgcgcggcgctttcttt

SEQ ID NO: 2877 - DNA, 437 bp, Emericella nidulans
tatccgacgcaatgggatgcgagctgtattaccaaagcacaagcaaaagaggcaaagggagatatggattgacatcacaatgtttgggagcgttggggaattccagaacgtcgttttgggacagtcccatacaactcttgactgtccgggactgtgtcgaggtcgtggaaggactgcctctcggcgaaatccaggttaccggcgcgtcgtcttgaaaccgagtgtctgtttattccaagcgcctagttgaaacgagaatggtaggggtgtttcagatgtcaaaataagcaggcgccgacgcgagaagtgcaggcgcgaccaagccgcgtaaacttcgagtcaagacacactgatactgcgggactgggacaatctcgaatgcgcaagacaggccgacgatgcaatggacgctggttggagtcgaatgcaggagaagc

SEQ ID NO: 2878 - DNA, 1666 bp, Emericella nidulans
gtcccaactcagtctccttgtcctcggggctgtttacatcaacatcgggcaccttgcgcttcttatccttcttatccttcttatccttcttatccttctttccttccttcttagactcacgctttgccttcttgccctcgggttcggtagcagcgacatcctccgggggattctcgagcttacgcttcttctcggccattttgtaacgtaggattaagcgattttctgaaaagtttgttgcgtcgtattcgtcggtgctcttgtatatatctttttacctccgtgaggaagtcaactcaacacttcaaataaatgaaacctaatccgatgactcaggattgtttaacgtttgacgaagaaagatctccatcgacaagccgcaaaaaaaaaatatactatattattctgccgggcggtccgagtaaatgactgagcggtgaatctccgcatccgcgcctgaaatataaggtgtctagggctgcgattcccatcaaccttctggtgtatcggtcggtgccgtgccttcattcttggatataaatatcttgtcaatcgacggtaatatgcttggtcgtctactcatcgttgatatgggtaaagagaacctcagcaaggcatgcagttctaagtagacactaagaccgctgattttatgctatctgccaggattgaggcagaaatctcagggtattgctcaagtccctgaaggagtgcggttcatatcaacgtaatctcgcctcaactggcatacttattacttttgcagtcctggtcctgaaggaggagtacttatttctctttcatgtagttgagaatccaaacgtaagattggcgggaccgatctattcatatatactacatatatactacaaatagagatagtctatgcgatatcatcagtaagacgcaaactaatacacaggattggtgagcacagacggcgtgtataaggtaggattagaacgagaagacgcggattagcgcaaaccgcagtaagaagctcaaaaaaaaaaagaggagcagggaatgttgtaaggatggaatggtgttttgagggcccggaaagatggtcgaaagcttttcctcatgccgtcccagccatcttcttgcccttgggcacacgagcgagccaatagataaacacagcgccgacgatattgaacaaaatataagcccacatgagaccaaagttcctccaagcctcatcaaacgtactgccaactgacaagagaaatgtgtccgtcttgtccatggagcaaaacgagcactggtcagttgcgctcggatccaggagatagccgctttgaacttcatcaatgtaggcccgcatatagtctccacaagtctggttgttcggtggagcaaaggtgagatactcgacaggttcacactcaacatccgttcctgacaggcctgttgaaagcattgccgaaactaggtatgtgaagggtgataaacaaaacatgaaaatccaaaacccaggcatggcatcgggagtagagagcacgccgcagaagattagacacagggagaataacaattgggcgacattgccaacggtctctgcaagctcgatgcctgcaatgatcatgtgcacagaatgtggatgtaaagagcaagaatgtccagataagcaagagcatgtagaccgccgcgatatgttctg

SEQ ID NO: 2879 - DNA, 1405 bp, Emericella nidulans
tctgcgcaacgtcatgctcatgaatactgtccaattgtctcggcagagtttgataatcagctccggcaacccgcgcttgtcattgtcatacctcaaaaaagaggccgcggacgaattgcaccttttgaacagctttagccagtgtataaataccaggcagtattaaatacggagtataattaacaaatgcatatcgacctgtacgtcatatagcccacatggatccccatcgcgtcaccacgcaccggaatagcacccagctgcggatgatcctgccggccttctgccatctagccgcccaagtaagtacgagattactcaaggtactggcggctcattttcgttctgttgcgttatacaatttctcattgatgactggcattcgacgagatgttaaggctactgtttagcttgcgatcaaggttggtgctgcatcctactagattgcgatttcgttccagcgaatctagcggttcattgtaaacagcgcgaagcgacagcgttgggatatggctgaagtactagccggacaaatcagattttgagctgggttatccctttcctggcacaagccggagcttccctgcaccctacccagctattgtctcttccaacacagcaatagtgggtccccgattggaccaggtcgtcaacatctatacaagtcccaccgggcctttctgcgtgtacattctccggaaagagattttctagtatcttagaaccaagcgttggggagacccacgtcggaattagggtttgttgaccgccgtatatggcggcaattccgcactcatagattccaagcagctaaccttctctataggaagcaaattccacaagcctgaagacttacagacggaaaaaaaaatggtccacgcacccagtctaacaccagctgaaactactgaaacagcaaacgcacaaggtacttaaaccatcttgagggatgggtcaaaaacccggctctggtccaggtacatacagacgactgtaccgcttgtgttttcgtggacagagcgtcatggtttgtcgtggcgccatgcaaatgaaatcaggcagataaaggtagtgtcgatgactctggtcctgagatggagttcagccattgtaggagcggcctggattataccctctgtttcggtcgttccgggcaaaagaaaaacataagaaggaaccaggagatagacagctgaagacaaagggtgatggaaataaatactatgttgagattgctgcagggaggagatacggtacgctcgacgagcgagccggaacatctcgaagtaccacacttggttatcgagcggccacctaccgcctatgaaggactggacctgatattcagatcatatatcattgtggtcaaattctccccggcattaccttcatcctccttcttcag

SEQ ID NO: 2880 - DNA, 1666 bp, Emericella nidulans
tggcagcctctggatcgcagtcgtcatttgcccagcggtacgccatggtgctcgaagagcttcgtaaagaggcgcaaaagtgcatacagcaaaaacagcaactggcgactggatatcaccattcagatcaagtcaccgacagcgccagtgcggatatgagcgctcaggagccaaacgtttcaaggcagagcttcagctatgagcctgcagtgtttcctcagtctacattcgcgcatacagagcaagctatcacccacagcccacccctggagctttcgaacatgcatccggagcagcaaacctggatagaaaacctgattcaagacagcagccctagaacctacattcccagttttaccggctggggagaatttgactcgctggctctcacaggcctgggagagttaggtcacatattctcatccaatgatctaccggatttccggggttaaaaccctgggcctggccaaccttcccctgttcagctatgctgggatagagaatggcaaaaatataaactcgacaagacaagagggtctgacaaccctcgcccgcagtctaatttgtctccaatagctggcaatcccagtccgactttaaatgagatatccccaaactcctggggagtatgctatttgctcttctgacataaagacctctcagagacggcttctgtaagacttagatagctccgtttctagcataacgagcaccaacccgggtaacacctgcacttccaagggtcccatgcacgtccacagcccttatccataagcctgtaccagtattgagcgacatggaagcacagcattgaaacacatctgccttatcccggggctttgcatatttgcagagccgccatgctctttgatatgtcttctcatattatattcccagcgaacaagcttcagagaaggacgtccacagagattgtgtctgactttgagcccagtaggcagctacggtgaacataatgcagctaccataattatggtgagggatatatctgccgttatctcactgtaactcagtccagattcataaataataggcagttgcttatcgtctctgatgtggttggggactgtatgatcacaacctgcataactttgtagatgactaatgcatacagtaaggctcagaacagaactcaaacagaccatcaggaactgtgccttctgcgagttcttccatgattctctcatacacctaatactcatgcctatattcccgtgtatgataagcaggattcagggcactctgccggtattgtctatggaggtcagcctggcgcctaccgttgtactgcaaacaacatcccattatgaacgctctgaaccccggatggatagttcagttcgtgtggataagctatctcaaacccgaacacctctggcttagcatacttcgggcattacccgctacgagacacttcggtcagaagacaaagtaagccgcccctggcccgcgagtctagtcaaaacacaatcagggcgaggtaccattgctgcgcaagacaaatcggatacgcaaggttagtagttatccgaaccccgctttgcttttccgagcactgccctaacaagctacggatagctgatgagacagcccttctcggaccatatgagaatagtgcggcatagacaaatattagccgcggcaatct

SEQ ID NO: 2881 - DNA, 3641 bp, Emericella nidulans
gagggaactggcaccaagcccgcctctcgtacgtcgtatccagtttcctcatattcttcccggatcgcgcagtcaagatctttttcgtccttgttgattttcccccgagggaaactccagttagcgcccttcttccagcccttgactaaaacaacctgatccatttcttggttcaacatgattgctccacgaacaggaacgcgagttttataggcaaggaactcagaaaaggcagtcatatgatgatatcgagaccagttggccataagcggacaatgctggaaaatccgcaaggcgaaagccttcagtgaaagcgaagggagggctgggtctaacggccggatgaaatcttcgtaaaaccattgtgcttcttcgacttggaaacatattcgctcaaccgattccagttcctcacggggcaggtttataatgaagcggacgcacaagtcatctagccctgtttttgatcgttgttagcgcactggtgccgtgtcgggagagcagggaggggtattccacaaagaacatgacatacagtcctccagttgcatctttgtttctgtcatagtgaagggcgtgctttggcatttcaagacggcctgttatggccgagtgatactccgaggtcagtggtaaaaagtacgtcgtcaacagacgcagttggtgaacaaccgtgcagcttcaaggagaggtgcttgcaaagcgccaaccctgaagcggacagtcactaatcgggtgcacagcgcaagcaatgaaaggcagcagtttgtccgtcaccgacaaacgcggttaagcgaatagacaaagatagatgcgtcagtagttggccgtagcctgtcagtgtgccggaggtcgagctctggtgacttatcaagtgcgtggcggtgctgtggcatgttcgtcacgtgattaacatgaaagctgagcagaacaggtatgatgacgtctgctgtctgcccaagggcgcttgttgaggtatatttaacgtagaagtcaaatctagctcaactctctcctaaagggacttgcataatagcctacagagcaatctaagacatattttcttgtataataattgctatattgtgagctccttgcaagccatgtcatttcttttcagcttcgttgggaagaagattctcgctgagtctgcgagaaaccattttggacaagaggtgagtccaaggctgctatgatccattcgtactgtgtctaacagaagccaacaccataggatccctactttgaagaagtccctgcatcgcgacttggccgcgcttttggcaagaagacacagaaaagacgcaaagccatcccacctggcctctctgaaaatgatagtaaagtcctcacacgcgttaaacgacgagcctacaggctggaccttgctctatttagtctttgtgggttaaagtttggatggggcagcgttattggcttgatccctttgtaagtcaagattccacgagtcacgacggcttcttcctgactagcttctagcattggagacgcagccgacgcggcgttggcaatgatggttctgaagacctgcgaaggcatcgacggagggcttccgacttggcttcggacgcggatgacgataaacataataattgactttcttatcgggttggtcccgtttgtgggagacatagcggacgccgcgtacaaatgcaatacgcgtaatgccattgctcttgagaagtatctacgggaaaaaggagcccgcaatatctcaaggcaagaaagaaaagatgttgatccgagctctgccagcggagttcgatcggtacgatagagaggcccatactgaacatgccaccgagccgcgaagatcgaaatctcgaaaaggtcatcctcgtaagtcaacgcgcggagaagaagatttagaaagtggaatcgttgaggaccgctcaggcaggagataaagctgaaggtttgtttgtttcgcgagcggtagtgttgtcgccaacttgacattatgaatcatagtctcttttagttgtttcacccaagttatggtgtcacctttcagcttagcccagggcgggatcgttcacaggcgtagcagaaatggttcgttgggcgttcctcaagatccatggtctgccgaccttcaggattgcagatgaaagtgtcacaaagagcacatctcaatccgtccgtaatcattcgggatgattcaagtttattcacggtccttgtcacattagacatgacaccagggtatttcgctccctgagatgaaacgtaacgcatcatcaattggtcgatggataggttcttggtcaggatattgtcggagagagggccatctgggattatgatgttgagaagttcggggaagaaattagcgtaactctgcaattccgcagtaaacagatctcggagcggaaaactgaattctaagccaaatggagatgttccgtcagacacctgccaagtcaacgaagagccgcgccccttggaaacattcgccaatgtctttgcagcaagccggtcgtcagagtctccccatattattccaaggcaaccaaggctcctagcgaaagcgatgataagcctgttcagcaggacagagtcaacatcagcagcggaggtggctgacgtgatagaagcacggaaagcatcaaggcgctctttggaaggcagtgaagtatcatccacaaacgctgggccaacatattcggcaagaatgtcgttcaaacccgaaacataatcgaaaacgctgtgtagaggcagctgggtgaacgaggcgtgagggaattgctgctgaagcaactggaaagccccgcgatgtgacggattcgacggagagatacttgatggttctactataaggacatgaagctcgaaacctggtggtgggtgtggcttcgtgagcagcctctcaacttgtccatgaaccatgtgcaaaaggaccgatgaggacaggccgtaagacaaaggaaggagaaccggacacggcccgctccttggtagatctctccggagacgatacttttccatgcgcttgaagactttatacccaacgaattttatatagcagtctctatgttgggtacaagagttagaaaggcagcagtcaagacttagaaagtatacctacttgcacagagaacggccccggatcgtcagaacagagtccgcatttcgacagtccacacaggaattggacaattgtttccccggcatctttgggcttttttcttttcgctgaacgtgggcttgtagcaaaaaatatgcgaggggtggcagcggccatgaaaaagtgcccagaaaggtgggattttcacgtgatctcattcaatacttgagagtcgggggctgtcctggccggtgatcattggcgtaaataataaagctaccgtggacgaagtactgtactgccaccattccattctacccgcagacggctgctggcttatctcagaagccttacatgtagcctgaaaccgtcatctttaccattcgatttattttcatatttgtgtatgaccaatacctccgacctagttcctttctgctcaaccagggagccgcgccttagctccaagttaagtcacaatgagaagctggattcggacacttggtttgtctgccatgttggcagggacagctgtcgcaaatgaagcagaatt

SEQ ID NO: 2882 - DNA, 561 bp, Emericella nidulans
aaatatttttagtagagcttttaatcgatcagggagaaacatgtgaagttctgaatgaccgagacaccgtagcattgttagtcggatagattcgaagagctgtgttgaacaaggagcacgtgacgcgctaccttggggagaatcagcttcacgccttagcagttcgacctctctccatttgatcaagccctgcttcctcaaggccagcttacaatgcctacttgatcagttacgagattacaatacgttatcgacgcccacatggcatttaagagcctcttgctccgagctcaaggtcggctccgagtccagcctcgtctaacacagccacgcttgcatggcaccgtctaagaccgtcccgttcagcctatcaaagaaaaccggggaaatgtgcatcgtgttgccgctcttgagaactttcatacctagaagtgctcccattggccgttgggtgacgcgctcgtgttcaaattagtttggctgctatgcaggtgaaattgcccccgcggtcctagaggtggccagttatgtcgatggcggaagggactgaccccttatctc

SEQ ID NO: 2883 - DNA, 2735 bp, Emericella nidulans
actttaagcgaatagggtcaatgttttcctgtagcgagcgtggctgcctcagctggggtctttccgagaacttcgctaactgcttccctgtttgaattgcgcatcgccgatttttgaggggtaggcacgtcaaaagggaccgcgggagaggacgaaccgaccgctattttccatgctcaagtacgaatttcgcgagtcgtcgagtcgtcgcggagggttagtcggagctcgccctacctcaagggagatatcatcgtcaatctcgtggtcttcttcttcttcggatgtccctatcggcgagatgttggggaggtattgttcaaatgtggaagtgttgaaaacgtaatctggctcttcttcttcgtcaacctgtgacagcttgctaaacgcgcctttcatctttggaagtcgtgggctctcatcaatctctctggttgatgcaatggcttcatgttctggatcaaagtcggacccgaaagacgcgaagctgttcgccgtgttatcgcgcgacatggctgacgcgacgttttcgaggaagaatactcgagaggacgaagctgagggttggaagtcctccgctcctaatctcgaggggttaagatgtatctgcctctatgatatgggatgtgtgtgaaacaaaacagcgcgtcgagtgggttccgcttgaggtaatggtaaatggggaggctgggtttgtttacgggtaacccgtgctaaatcactcaccgctttctgcatacacaagattcaggaacgtgccaagcaaagtcatcagacttgcgtcttttaaccatggttactgcaaggctcagggcatagtattaattcaagatgaaaattgtactattatacgcatgatcaattatatgtgcagccaaacccactaaatgctcttttcccacttaacgatgcctcccaaacgccttgctaggtccatacaagaaattccaaaaccatggacagaaaatcgtagagaatcttataatcgtagcaggtcatatccataatagggtgcacaagcgctagctcaccctcgcggcggatttgcactattatcgccttcagagcctgattctgtcgttctatttgccgaagtgcttcttgatgcgctatcatgattaaaagtaccagccgttgcgggcgcactttcttcttcgcgttgtgttataggcgtgggagggtcattactgattgggctcgccacttcaatttggatcgtaggtaagggagttaactcacgcagccgaggcgaattgtcggggtgtaactctgaagggggaggttcataggaggagcctctccccaatccagattgtcgtagtccgaaggtggaatatttcgtgctcaaacgtccccatcttcaggctgttcattttgattgtgagcagagtgcagagaagtggtataggattgtgtaggagttagaccctccccgtcggatagcgccgaagaataagattcgccacgggaatgcacgctgataaatccagatgagcgatcagggccctcgctcatcgcggcagcgtcgttcaaaagaggccgagaatctgaatcgcgtgaactggctcgaacgcgtgaaccgtcgtgccgaacatagcctacatcagcataagtgacacttgagatccgcctatcgcggccgcgactctgagcttccgctagagccgtagccgccgacaccgaagtactcccgttgacagattctcgactattggcacgtgcccggcggctttccgcccgaagctgttcaagacggacaatgtctccacgttcgcgggcttcacggcgctcgcgtcgtcgtgcttcgcgctcggcgatttcctgacgccgctgcagtcgaatttggtacagcgattccatcatttcctcccgccgctcttcttcctcctccgctgtttccggaaattcaaccaccacgtccattcctcctcgttctccctcccttgcgatcacttgctctgtgggttttggcgtcgatgagtaggcaggtagggttattatagaacgaatcgaggtatcgcgacgaattccggcgtcagattcggtctgcggaccgccctcggcggtttgagcggtcgctgtctccccggctcgattgggcgacgagcgcccggaacctggccgtacgaggcgccaacattccaccgattccatctatccttgagatattttcctggtatgtatttagggcgacagttcaattttcggagagcacgtaggacaaagtagacgatcactagaaatgccacgacgaacactacgatggcggcaatctaccacaagtcagtactgaacaggcaatttacctggatgaatgaagacccacgataatgaccacgttattatttccgctccccgaaccatcttttgtagggttgttttgcccttctgttccattgtttgagtgttcattagtcggaggatccgagctttgacgaggctcgagctgccgcaacgggattggaatcagcatgctgtggaaagggacaaagaaaagcgaaatcccaatagaagctcagtccgacgcatatagagccttggggaagtcgaaaaatgtcgaaaaaaatcagcaatcaaggcccagtctttgcttgctgaccgaaccaggcagagacgaataaaacggcctcgagcggaaacagcagagtcggcgaatgcgttgacagcttgggtgtcaatgtgggtcggtctgccgttgaaatcaatagaaacgagatgaaacagacgcaatgtct

SEQ ID NO: 2884 - DNA, 1427 bp, Emericella nidulans
ctctcttctctacgacatcgacatgatgtccctatttggtggtaaagagagatctctggcggaatggaagtatctgatcgcctccgccgaagagagcttgcatattgtcaacgtgattttcagcacggagtccgaggcagccattcttgatgtccgaatcaagtgatgtacttgaggacttatcgcaggttccccagattgttccctttaggcataacaacgcggagacttaggtactgtgtgttgcactggaacgtgtaaaaaccagtcatcttttgcatgcttttagtagtctagctctggcgtgccgagatcccagccttcaagatctttatcttggttatagaatggaaagttgtgttattcccagcagtgattcgaagcagctttgaagctattcttggggcacaaactgtcccgatggaacttcaaactggtggaattcatctattggaggtagcgttctgatcatcggtggtgagtaacttatatttgcacatactggagggacccaccttgctgccaaagaggatgagaaaaaaagtgcaagcgagcgcacgagtgacacaaaaataatatctacttcatccgcaccaatcagaattgaaacagccctgagtctggcgagacagcaaggtgctcttcatatggggagtatgggttcgattacccacacgcctggatctttggctgcgtcctcagcattgagcataggtgcttcatcagcattaaaccctaaactaaacagcgactcttttacatgaaatccacaattttaaaaccttttccactacctgggcttaaacgccgttacttttattctacttgcgcttagaagggggaaaatacataacccacaacaagcattccaccacataccatcccacccgttaacgctccgcgacgaattctgtctcgcgcggtagacgtatctcgctagaaagagggaaaaaaaggtaatggattttgttctttctcttgccgtagatatttgtgcagaatattcgtaatttcatgctgattatagataatcctacacagtaccgacggatctacactctcctcttacgagatgaatctttacgagatgaagctttttctaccttccaagaatggctagagcgcctcaataactaagagtctaatacggaaatatcatgttattttcattgtctaagactgtgcagaccaggcacagtcttagtcaatctcattagtattcagcctagcttctttgtgcatccgcactcctgaataccagactccttcatacttccacatcgtgtacacatggtgtgctcgctgataaggatccttcaattatgccggcgcattgtgcccgttgaacataacatccatcaataggttcgaaaacgtgttcctacaccacccctcctccccaccattttccaggccatcatcgggcg

SEQ ID NO: 2885 - DNA, 730 bp, Emericella nidulans
tgcgctgggtccaactattaacgtggggacccgttgaccacaccgcaggatcacggcatcgcatccttccgttagcacctccggcctcgctcggtagcaagccagccgctatctgcatgggtaccagacgtggctaccacccacctaaccaagtatagatggaagggctcctatctctcgggcactgccggtatacctcataaattcatcgcgccatattattgtaccgagcgttgacggtgtccctttaattaaagaaaatatagcttaccgaagaccagagccatctccctctataactagcacattccagccctttttagtctcttctccttgatccagattgtccaaccccatcttgaccctcattttttttgttctctccctcccatcttatctacctgtctatacgcactgggccactgtatagcacagaaatgaaccctccccaaggcgtaacaaaaaccattctgcgccctggaaacggccgcgatagcccccacaccggtgacaccgtgatcattgactacacaggatatctttatgatgatacacgtggggagaacgagtactttatggggacacagtgcgtacccgccaacgcaaacaactcgcctatctaccttccactactagtcctagcgtgtattctcaggattccacgcttggagggctcggcaaaacagctaactaatttgtaatgctgtagattcgatacctcgcaaggtcg

SEQ ID NO: 2886 - DNA, 1630 bp, Emericella nidulans
ttaatgtttatagtgataagaaaataaatagtgaaagaaaaaagttagaagggagtggtgaggggagagaataatgaataataaaaaagaaataaagatatagaataacgaccgcgcagaattaagaaaagaaaataccaagaaaaatggggaattataacaccccagaaaataattgactgtggggggcaaaaaaattaaaaatggccccctacaaagttcgcagtacttaaaatttttttcccaatttgataagggttgttcgatgttcgatattcatttattcgtagcgggttatggatcagagtaatggcttgtcttgaccaaattatacagctgtgctcgcagtcaggtacttacctatcagtaaccctcctttcagcctcaattcgctccagcgtacgcttattgaaggaagacccactcacgctcacgtttgctctaagtgccgatttccctgttcccgtcctggctggttatacaatagtacataagaattaagatctacagggacggccgagagaacgccggtggtgtgccctgcgatcatccttgccttcgtagtagaaggatcgatatctgggctaaagttcctacaaaccatacaccactgtatcgtatatcgcaagatatgacctgggaaatctatccaaacatgactgggcctcggatcccctgctaggactatgatcagagcgaggatgacgccatttacctgccgtctacatgtatcggtctgttttccaccgctaacgagtgatcgcttgcccttcagcgcagtttctttcactgtataggtgaagtatttctcaatctattgaatcccgacggcgtcaggaaatagcagccccgcagaagccacaatatacggtataaccggtgcaaatctgtgcagacattacggctgtggcttgaattagcccggccaccaacaagtagcagcctctgagctggaccctggcttggcttgggcccctcgcgctcgtggcagccaaggcaggaaatacatgatctacctactgtagtacggtgtacgatagcttcaagatagacggtgaccagcaaaagccgaactcccgaagcacacaagttatcctgtattgggtatacaagcacggccgcataatgcagatgcatgatgctccgcagggccttcacgactcgagacaatatatactagtagatctttcggcacagcgtagcttggctagatacctaattttgtatgtgtgctttgctcttcaccaacattttcactaagagtctgaccacctacttcccaatcccgtcggcggcagactggagactcgcttaacctcgaagttgggtacctactcatgcacaatgatatcagattggatcctctatcacggtctcctggcagtagtagtctggactgcagaagtctagtgtctgcccgtacgtcttaggtaggcgtctatcactgagccgtacatatagcgtgctctgcatcaccgatgtgcccagcgtgcggccacagctagcatacttgctatgtcgccacttgttgctaatgtcccgcacatgtccgagacatgatggattgcaacaggcgaccgtactcaccgtcaatgaatcggatcctaagcctgggtcacctaagtagtgt

SEQ ID NO: 2887 - DNA, 895 bp, Emericella nidulans
tgaacgtgcagaacatcaatatatgtcttgaagagtgtcttctgggttcgctggcgagggttgactcgcacagggttcgatcggaagattccggttacctcaacgcggtcacctgctttgcacacatctactaactcgtcgtaaacacacagggaaactgagtgaggtgtctggccgtcagggatgctatcaggagtctcctgcaacttgataacctgcttatcggcaaagacacagcggttgtgcacgatttccatcgagtttctctcctggcatgcctgacgcggacaaatggtgggttcggcaatcttgccgcggtcgatatccacttggactgaatggttgcaagcttgacagcggaaaaacgcttgatgaagggttagcatggccctctctgagtttggagaaatgcactaaccttctttcatatcgggaatgatgggcgtagctcggatcactagacccttaatgctcaccaacttgtccatatctagtagccgtcagcgatttgggtttccgggaaataaaaacttaatcttaccagccgggtcaaggtctctcatattgactgtggcatcaaggccgaacggaagaactttatatggcttggtctcggcctctgccaccaagtctggaatttcagcctgtggcatcctacccgtctcactcatagcatcagagctgggaacgaccggagctgaactcagatctctgtgattgcttcgggtccgctgaatccgtgatcgcagtcgatccatgtcttttgcagctaattcgaccctgacatcccgtacgctttgaaccataagcggaatggatttctgagggaggcctggaccgatgctggcagtgtcccgcgccgggtgctcccagacactttggattggaccttaac

SEQ ID NO: 2888 - DNA, 1083 bp, Emericella nidulans
ttcctttgacacgacgcatggcttccctctaggattagagtatgtgaagggatcagctgcgccaataagcacagccaattggacgcacaccaccgccaattgccagtcagtcgcgctctaccataagtgcactcttggtctgacgtgttagcacaagataggcggatatgaagcgcaatgcaggtgtcttggacaaggcttccaggaaccttcgcaatcggctctgctccggtatgatcggtcacacttagaagacatcgattgccttgatgtgggttgacaagggccggttaggagagataagttgcttgcgtcgtcgaggcctagatacagtagtactttttgaagttcgagaccgaaagccgttcattggccttgaccaatattccctgttggcttgtataaaatggttgtaacatactagagcagcctatttagtaaactagttcggaccaggatgttgtatgattcttacctttcgtttgtacctggtcgtcacgctggtagctaggacaccattctttatgctgcttgtagcaaggtggtttagtacagtatgattagggttattgagaagactgctatcatccttcatcggcgtagtgccgttgaggatagactttccaaggaaaagcggaaggctcggtggtgttggcgcgtcaccgatgatattgactgcttgctgatagcacgggctctcctcgtctttatcaaggtcgagcagaaactgagggacgactccacggaagtcaccgataggaatttcctccggctcctcttctttttctggcttctcgtcatcaacagcagtttcgaccttcccatccgcaacttcttcgggaagtacctgcggagggtggacccctgagggtgcggatttgtcactctctctccttgaacgatttacatcgtcggcactaagttcgatataattgacgagatggttcgtaaagtcaaccgcggttggtagattgtccgaagcgcgcatctcaccatcaacaataaacttcaagtgatgtgttccgggccggaggtttagtttcgtggacaggacatcgggattattctcactgttcgaaacga

SEQ ID NO: 2889 - DNA, 1642 bp, Emericella nidulans
  unsure (1)..(1642): unsure at all n locations
acaatagtagaatgagattcaatcagccaaagtcaacagagcactgatgaaaagcaagcatatccaagtccgttttcatgaggttcaagatggggctgacgatatgaaggatgttgtttggcggacctgggccgaactggaggcggggggcaggtctggggaagaaattatataaagaaacagacccagtccgaagcactctgtacggagtaaaaaaaagatcggtccgaccaggggaatcttgccaagttcaagccctcaagagataaactccactataacccccaattagcaacaggttgcgcctgcgaacctcctgaagagggtaaaaaaccccgcgcctgagtcacctgactggtcccgtgccaacgctcttacatatactacaaaggggtgtcttttgtttcgagtaatccaaccattgctttgagtccattgtttaagcccatagtttagagcccaaggcaatctcgtcagcagactgcattggaagtaagcggacagctgctgaacaccaatcgcttcaagtgcaaaaataagcgggtacagttactcttcaaatcccgccaccaaattcgagaccccggctatactgaaaacaatccaaaaaaaagaaaaaaaaaaaaaaaaaaaaaaaggaaagaaaagaaaagaaaaagaaaagataaagaaaaagaaacaggttcacatcttaatggtttgatccggctcaacatgctcgacatgaggatgttcctcgacaaaggacatggacgtgacttgttctggcatggcgaccctaaacagcgcctcggctagtatactccaagcattgggtagggaggcaagacaggtcgatgggtagcactcacgcaaatcccttgatcagcttgtactcgtgagttatggtgcctccgttggagacagcgctgtccttcaccctatacggtgtaaacattaaatattctaggctctgcgagagtctggaatccatacgcttggatatcctctgctgttgcgctaggcttgagtttgatctattcaacagtccataagtttccaattacacagttgagggctgaagacgtaccatataggtcggcatcgtgcttgaacaatacgcctgtgttggtatgtagatatggactgtagaaaatgcgggcttgaagggagttgaatgtagacaagaggcttggtctcacgtttacaaagaacagttgttttctcgctggactcaagttacggcgatctagcttggttaagtactgggaatgactagtacgtcattgtgcatgcacaagatagcctttcgtcaattgcagtaggctgatcttgcatcctgtcaataaaacctaggtggagctatatgggatttgaagctagccggtttacagngacgtaagcccaggtaaagcaaatagtaccttatgnggtgtgaaaattccttctatcattgccgaagtaaacaggtacatgccgagtcacctaggaagggattacagcgcggttgccatgagccgctaccagatgatacacaagctttacaggttatgtagntatataatcatatatgcgcaaatagcctgaattaccagttgctggtgcgcttagagcctcggtctgaatacctcgaccagttccgtctggtcgagaggaacgcgag

SEQ ID NO: 2890 - DNA, 1695 bp, Emericella nidulans
acccctagcggtgtggactcgccgtctaaactgtgcggttcagctcgacggcgaagtgcacactcgagcagtttatccccgtaagagaagttgagagaagttgagacgttggcaatctagacaagaccggggttcgcgtacttggtagcgccggggtaggatttgtatgcctctgcgtcaatggggcataagaaatcagggcagccaagaatgagttttgaatgggcgtcgattggggctgaattaggtaagaaaagataaatatatatagtggtgaaataatgatgagtgtgcgtctgttggcaccttgtctggctggtgatcccgaattggatagctaggtaggaaggtgacgggtttaaagccttagagaagggtaggatcaccagtgagggcacagtcatttattcatgtatgtcatgtgtcccttgctatctgttcaaaatcgtaagtatggacgatttatatgcaatatgcccagagtgagcggccactcacggtcaccacatgcctccaaacactgctcttggccaactaccccgacttctctggcaaatccctatacggattcttgggatcgttcaactcctcctccgcactttgaatggtctttatggccttacaagggctacccactgcaaccgaaaacggcgggatatccttcgtaaccacactccccgccccaattgtgcacccttctccaatcctcacgccaggcagaataatcacatttcccccaatccagcaatcatctccaataaacacggggtgaccaaactcgacgaacttgcgtcgggataggatggatgtgtcgtggcctgccgtgtaaatggatacgttaggaccaagctgcacgcggtcgccaatgacgattaggctcgtgtccagggccgtaaagctagccattacagttagctcgactagatatagctaggaggcgaagacaatagggaagagacatacttgaaattcacaaagcattccttcccaattacaatattgcacccatagtctggccaaaatggaggctcgacaaaggtgccttctccaacccgcccaacaacattctttaacaactcgaaccggcgttccccaatcttctcccaggagacggcctttgtgtcgagattgttgtaatcacttgtcactccccggttagaatgtctctttatttcctgagctgtatgcatgtaatttccttttcctctccttattttacttttcatatctattcctctcctctttctattatttcatacttcttaccattatatatactctctcttttactccttattaattttattatctattttaactttttctttttatttatttattatcaaattattatttttttcttcttttaaatttcttatttcttactatttacttctttataaatactttatttacttaacaaacactttattacacttatcctttcttaattttattctattttctactcacacttcattccatttcttattatattattaactttctctctctatcattattcttatcttactctttcatttttaactttatattatttatttcctctaatgtaattcatactcttatttctttattaccctctctttcattttatacatatctctagtacttttcttcaacctcacatactttctactatcaaaattactctacttattttcctctacaatt

SEQ ID NO: 2891 - DNA, 1206 bp, Emericella nidulans
gtagaataaccctcacaaagggatctttcttttctagcacgtgaaggacatggacgatacgcgaacatgaaacaacgcgactccaaatgaaaaacaagcagtagaccttaacgcatgatatccatatgcagttagaaaataagaaaccgagatagatgagatgacggagatgggagagacgaaaataaaactgggggtatagattggttcgtagaggagaggacgacgaagtagcatgataggtagatagatggacagtggtataagtagtggatggtaacacaagactcgcgatgaaattcaaaaaacgatgtgaaaatagaagctcaacgcctaaccagtaaatcttgaaacccagggccatgatctcgttccgaaccaacgctctatgtactgtagtgtagtgtatgattcagatgaagtagtcagacagacagacagacggacggacaaatgaaataaggaaataaaaataaatcattcacaaaagaaagttcgtgattacaattcgttatggtcagggatgcggctgtcggtgtcactgccaggtgcaatgccgggcgtttgcagcatcttttctttttccgacctcgtggtcaccgcacggattttgagttcgggtcgctgtgcgacaaggctgcagcttgtgtaacgcaggatgactcgagaactgagcgctgggattggcggatttccaacgatttctttttatagaaaggtcgttattggtcggcggtggatgtatgtttgtagatcttggatttgcaataccatcgacgtgcatgagggcgtaaattgtgagtaagatattgaggctgtggaaagaaaatcacagagcccacggggctttgcagttgctgcttgctgttgtttcgtacggtagagatactggtacagattggatgatgttctcgttatagttgatatgctgcggcatgggccatgattgcgattggtattgtagagcctaagacaagtttagtttgatgcttaaagaaatcaggagccgtgccgcttacgggatgaatcagactgtccggaatagtagagatgggaaccatgctcgcagttgcagggggcccagtgtcagcgcgctcccattggcagccgtcaagcgtcgcatgcatcgggcccggcgaagacgtcagctccgagacgatgattgggtctggatacgagtcgaccaaaccggccggtgtcgatgaa

SEQ ID NO: 2892 - DNA, 1457 bp, Emericella nidulans
aggtctttgtctctcttgtcgagagcgccgagatcgccatcacgccgtcgcagctttctcttgatttgtagatcttccagaagcgcgtcgagatcggcgccgttctccctaggtaaggagaacgtatgatgaccgtcaagttctcctacctggccttcgtggcgagcacctaatcgtgcggcaatatccgacggggacgtcgaggcgtcaaggtggagggcgaaataatcacgagtctcgtaggaacggcgaggatgaagagatgcggtcgctgcacagaagaggcccaaggccgctgctgcaccctggagacgcattatggaaggcgaggacggaaggagaagataaaaatccttctcaaacggacgagttaaggacagctaacagcctgacatcggaggacagcgcaagcagagactggagagcaatgatgacaatacgccacaagaattgattgaggatagaaacaaccgtctattcatccacagatacaaatgagagtggaaaaaaataaaccaaaagcgaaaaaaaaagtcccctaatcaggggagtcgtgaacgatttgtgttgaatcagcggagcctagaggtgttctctaggctgagaccccgatctctggctttattattagtgtaataccgctccgtactgatcgcctcctgaaccaaaattcctgaattgtaaggctgcgatgccaagctgaggcggggacggaccgcagagttatgccgccagcaatgaacacaacataagacatttgtgcaaaatactctgttcgcctcgattattgtgcaattatagacgggaaacactctatatgccaccatataattgtctctaccctcgaaagtcgcttcatccagcaccaccaagctaagattatgacgctattacagggtagatgtattcagggtagagtatggctctactacacaatgtgctgacaatacaccctgccggaatccacaaacccacattgttcctttgcgacgcaatatgagctttgcctttttatattggacataagtcagatcaagtggaaatcggaccggacgcaatttagatcggtggtgcctggtctattgtgcagccccgcatactgcatcagaagaggaggctgggcccagccacctgggctctctcacaatgcatacgcatcgtcatcctagataaaatctcatcgcgacaatctcattcattctttttttattgcttcgctgcttcattacgatcgcactcgattgctgcctaattgtggtcaatttcttgccgctgactcttgtacatacggctgaggagctggagccactcgcataagtataccacttgcgcgagcatgtgtacaagcactcggctattgtggactctggttcagcatctacacaaggcaacattctatgcgcttcatccgtgaaatggcgatctaggcgatctggtacattgaattctcgatagag

SEQ ID NO: 2893 - DNA, 2093 bp, Emericella nidulans
agctatagccttctttcgaatgtcccatacgtgaattgcgtttttaatgcctccactgaatacctcatttcgagcttcagattgtgccaccgcggtaataggaagctccgtttccaggtaatcgattgcctctttctgtcgagggtcccatatccccatcgtaccatcgtcactagcgctgaccagcatttcttggcctcttttgctaatttcgacactgtttatgacctcttcatgaccaatgtagcgccggatcctctggccagactctatatcccagcttgcaagagtcatgtcagccgatgcggagaatatggttttggagtctcgtgaccattgcaggtcaagaatagcgcctttgtgaccagatagaatgccgtaattttcgcattgcccataggtgttccagagtactttgtaaatgcaagttagtcattattcgagttcatgtcctagtcttgacttacatatagatcgatccatggaaccggatgcgatgtgctgagccgttgggtcaaatcgtacggcgaaaacctcaccagaatgacctgaagtcttgtattagcatagttattccaggtagatcgcattcagcctcacctgtgagctccatgatcggcgcgttgagaccactggtacgggggacctgcaattaccgtcaatgacgatatttcatcggtatttgtgcgtcgatagagctctccataccgcttgtacgagggttccatcttgtcctgagctcttgacaacagctgcactattatcgagtccaccatcagatttctttcgtttcacaaccaattgacttgacgagccaaaggccgtttgttccggttgtttctcgccggacattctgcaagaaaatgggcaatttccaaagactgaaatgggagagaatgtgatatgagaagtctgggggcggtaaacagccagccgtagtaactaagcaggtatcgcaatcaagaaaaacgcggccggtagacctcgggcggtgaccaaatcagcgagacgctagccgcggcaggcgctggccacgtatctaagcgcgtaaagctccgcactccccagcctaagcggggtctcattcatcggcgattgaatccgtgtagtattgcggagatcgattaactccgtgtcccctccctgaacttagtcactgaacatcctgaacagagtctgtgaccatgtcctcaacgaaagtgtcgagaattggagaagagtaagtaattctgatattggattaaccagcctgctaacacgttgatctttcagactctggaagtcagtaagccgccgccatctcctcactctagcagccttgggatagctaccgaacaaatgcactgatacgatcgttgcttgcagaaacaagatcgataaagttaatgcggaattggtgacgctgacttacgggacaattgttgcacaactatgtcaggactacgtcggaaactaccccgaagtgaacaagcagttggagaaaatgggttataatattggaatgcgcctcattgaagactttctggcaaagtccaatgctcaacgatgtgccaacttccgtgagacggcggacatgatctcaaaggtacgatagccgttggtaaactacgacgatcagctggatctacccagtgaagctaatacggatcaggtgggatttaagatatttctgaatatcaccccgacggtgacgaattgggccagcgacaacaaccaattttccttgatctttgatgagaacccgctagcggattttgtcgagttgccagacgatggacgagcgcaggatgaattgtggttctcaaatatattgtgcggcattcttcggggcgcgttagaaatggtaagtctaaaagactcctctccaattgaccgcatcgctagcgctaactaagaattaatataaggggcaaatgcaggattgaagctcgttttgttagcggcattctgcggggggatgtcgcaactgaaatgcgggattcgcttgtgaggtatgttggggggggagggcctccgtagtcaaattgcccccggtgcggttgttgtggttcagtgggtcagatgttcggggctttcagattaggataactatg

SEQ ID NO: 2894 - DNA, 3785 bp, Emericella nidulans
  unsure (1)..(3785): unsure at all n locations
ctattattgagattggtgagcgattcctaatgttaagggacgtatttagatggatcttcctatctagacgtgccgtacgtacaagaaggaatcgctaaagaagaaatgagaaagaaggattgttgttgcaaggaagtcttgtaggtggctcaccgccttcaggacagcgcaggccttggcanagtcactaaggtctaaggtccttgtataggcaaaggacccataacacatggcaaaagtaggtaactacttgataagtacttcttaaatacttactaactatttattttagttattatacttttctgtatctttaccagccaagaaacaacagaagactactatcttttatttaagagggtttttactcttatccagaagattactggatagcctatgcagtttaatttaatttactctagtaggatttatgggattatcatggacatagataccaaacagtatattggtaagcaactacttattaagtactatacaactacttacgaactagctaggacttgggcaataccttcaagaagttgatcccctttattgaccagtactgtggcagctgaagggattaattatattttattaagtcccctttttttagccaatccctgaagtagttgggtgctataccccaagtccatttgaatgcacctgaatgctggtctaattgattgtaaatctgaagaggattatgatcagttatgtgatttattaattggtaagtacttggttactggttacaggggtggctgctaactgctctagccaacaaagagccaaaggtacaagcctgggcagagtacaaaaagcaacctgttatcaaggctggacttaataaacactgttcaaatattccagtatttatctataattctatccagaattatataaacttagctgaatagtcttattacaaagcaaatacaggtagcaagcagttaatattaactgcagcaatccaaaagtaagtagttaccaagcagttcctaactagttacggagtatgtactcacagattctacaactagttctgccaagctagataaacaagatatcctgcaatatataaaccacaccaactttaatattcactatttataccaaatattaaatatagagacaaactatttgcggcatattgcgtgtgaaggtaaatatatatccacccaacaacatacatagcaactatttactaagtacttaatcctgcctagaatcaaggaaacatcgctgttcagcatctacatatctatcttctacttccaagcctgaattagtgccgagtaggtcttaatcacggctccgagttccgagtgccacctggttagctattgttaattgctttgcaactagttggcaactaattaagaactagttcttcgtccacttcatctcgcaatcttcgtcgaacttcctcacagaatataatgacctttgagcaggaaagacaagcattagagcttcgcgaattagagcttcggttaaaggaaaaggaggaggctgtacgagaaaagcaacttcagaatgaggaaaaagagttggagctaatggaacaacgcgcgaggcttcgagatatgaataattaaaaatacaagcagtctgtaagcggtttccaagtgattaggaactggttgcggactaatattaccttataattatggacttgggtcgaatatcacgctcgacatcactggcgtgcctgccttgatcgcggagggcgtgaaatgacggcattcaatccaagttggctgtgtaagccactgaaaacttcagacgctccgtaattaatacgagttgcggtatcgggcatgtgccccgctagccgcatcacatgactggtttcggggcgcccgaccgttcggacgaggccacctcacctgtaacctgaaggatttacaaggagtgcaggtggagatggtgtaagccatcagccgcagcaatgccccatctcgacagctggagaccaaaggaattgtgagctgaaactccttggtctggtacgtggcataatctctctaaaccgccggtttgaaatcaccctcgctttcaagtattccttagcgtcttccttcaagtctgcaggtgagtgaccccggtcatagaattgtgggctttaacaggatagatccatgaagtggtgaaaatgaggcaggcattgcgccatcatttacttctcagaaaagctatccttgcatgcttcctggcctcttcagctctcacagaatctagctcacgataaaggtccccaaatcatatttttataattttttatagtatgactcacccccaacaagtgatcgatctcgcgctttaaatactcggctaccatacgaggcgaggcccgtaatttgccaggcccaccgggtataattcccattcttaaagaggatgtggttatgctgctgatataccgctttctatagtcaacttctagcgttagatgacgaaccgtgtctcggcgtcacgttctgagggtcagcgtatctacagtaacatggcggttggtgagtattagattctcgcaggccctgaaagactgtttccccgatttggctttaacgtttccgtctcgcgttcagtttgtgattggtcagtacaccagaaactgctccagcagcgcctagagattccaacggaagtctaggtccggcgtcgctagtttgatgtaccgcatggttccgcgagatgatttggcctaaacgccagttcgtatggcacccaccttgcccaatcgaacagataagtatgaagagtagggtaagtcttaggaggtcacgctcactataacatccaagccgtcgccacacaagtagtaagccaggcccacaaaggagccccagagccacaggacatcgtctctgataatgagagatgctactgagcctaactggctacgttatgattattctgacgaagggcagagtccatatgatgtctgacttcgcccaacctgacagaagctgatgagacgggccactgaagccatctggccttgtacatctgactatcgtccgacatcctattgtttctgatcaatacttttagcataagggtcctgatataatacagaagcgtcttggatatagatgcacatggcttcctaagtctccacatttgttacccagctgctgatgacgcacaagtcattcatttgcatactgctcccctgcctgaacgggccgtgatcccaatttgacaattgtttattacggaatcttcgacagatgcaaagtttgtctcttgaactcgggaacgaactcattcccctccaagcgcgtgctgcctgcacgcgctagagtgctctgagggaatggccaaaccgtctggcctcggtaatcggaggcaaattgccacatagccacttaacggcatttgatgaccataggagccaggtttatagataagagccagttctgtacccgttctgggccattttcgctcttgtcgtgtttctgggcgatatatcttcacatatcatgctgtaaagaatcgtttggctcgagagacgctttcccttatgtcctacctgcgttcattggaaagaaaagatattattttccacgctgaagctactgaagctaccccacggggcgcttttagtcgcacagggtgttggctccatgaggaacattatatggaacaacagttaacaccacccaacccgtcgtacagcttctctgtcgcttcaggtcgtcacggcattgaaactgcgggcttacaccattgacccttatgctatactgcgcacaacgcgcgtgaatgtctctttg

SEQ ID NO: 2895 - DNA, 748 bp, Emericella nidulans
gtcccgtcccgtctcacccgccgcgccgagcatctctcctagcctcgttccccaaccaaccgatccagctcattcaactgcgcaattgcattcctctcagctaaaatctcctcaaattcggccttggcgctctcctctaacttcgcattcagctggcgccacacattctccagactagccgggacatgtttcgcgggtgtgggaaaacaggcagcaaaattagagtacgagtttgcgcggagtgtacgcgcgagtgcttgtgcgtagatctcttgcaggcgggtaacgcgggggccgggagtttgggcaatgggcggttgagggggtggagagggcgattcgtcgtcccgtaagggattgttgggttctggggccattttaatttttatttttctgttcggattgaatatgttgatcgaattggtggaggaagcaagaggtgtaatagactcttagtgatgtcgagttggtgtgttatgtcaaatcgcggcgcgtagagcaaactggtaaacgcgatgatcacgtgctctatatagacatcggcgaagcctgttacagtgacattcaaaaacttgaaaaaaaaaacaatttgcttttgaaccattaaaaatattatttctcataactctacatggcccaatcctagttcgttaacggcgagtgctgtcatgcccccaagacccccgccggtgacctgcaccgaagtatgtatacaaaaacaggcgattatgtaggtcagaaagagccg

SEQ ID NO: 2896 - DNA, 1186 bp, Emericella nidulans
cttactgcatttctttgcggatgaagtgaacacccgattgttctggagcgcctgcgctccctctgccgctttcagcgcctctagccgaacccatcgaatccaacctagcttttcattctttgcaacaatagaagaattggtcctacgtggccctgttgcccttcttaagagagagcggctgtcctgttattgcctttcaggcgacgtatcagcaaagatatacgggaatgagcttgtgctacctaccggccccagcgctacccgcaaacttgccattagtgcacccgacggcctcatcctcgctgcgagcattcagattataacgaaggcttttgtctctgtgttcttcttccttctgaacaatcctttgattatgcgcagactccgacaggagatcgagagtattccccggttccgtaatcgaactaaactgccctcctcgagggaccttggtggcctatactatcttgatgctgttttcaaggaaacaatgagacttgtcatacttcagagccagctcaatggaggtccgagtcacatttgaatctctatacatatcatccaagcatgtcccgcgtgggacagtgctttcatggcatcctcacgttgtactaacaaacgacgccatatatgagaacaacctttatgtgttccggccagaacgatggcttactccgaaccgacagcggcagaccttgatggaggcctctctcttaccatttatggtttgtcgaattcattacccaaagctggaagctgcttggctgttgttgaaaaagacggtcgtggtgctactgagggaattctgtgatgtaagtttgtcttggttgctctgcagcagtctgtcaatatcgttgaggtcacggcacgattcgtttgggggcttgctaaccagcagcttcctttagatcaatctaacccagactgagggtcagactgttgcggatgggatggagcttcccccctggtctatggtagtggattttataccgaggcctgcaacagcggaggaatatgttgggcaacttctttagaggtgtcaaaatgcttggactctctcggtgcctaatacataatcgtcaattcaacacttgcatcttcctccctcatagattctctatgaccgcactaggctgcccatggctattctagatggcccagccagccggtgtacagcagatgcatc

SEQ ID NO: 2897 - DNA, 4224 bp, Emericella nidulans
gaagatcgatccgtttcggagcttggtcgggacaattataggacagcaagtttcgggcgcggcggcgaggtcaattttagagaagttcgtagcgttgctgtggggcttgaatcatacttatgaaaatggtgatgaggtgcaaagagatcgtgaagacgagaatgaaggttacttccctacaccagaggagatagtccgtgttgatattcctacgttacgaacagcagggttatcacagcgcaaggcggagtatatccacggcctcgcggagaaatttgcgagcggggagttgagtgcgacgatgttgttgaacgctagtgatgaggagttgctggagaagttgactgctgtgcgaggactggggagatggtcggtcgagatgtttgcgtgcttcacgctcaagcggacggatgtgttttcgacaggggatttaggtgttcagtgagttaactaaattccttaacgccttgtttttgggcttggatttacatctgcttcgcatccaacgaggcagaatgaattgaagctgaactggactgactgcagcgtaggagaggatgtgccgctttcatgggaaaggacgtaagtaaactcaaggcaaagggtggtaagttcaagtacatgtcggagaaagagatgctagatttggccgccaagttcgcgccgtataggtatgttctgtttcaagctccgaagtttgcaatatgtgctgcattactcacatctctcaggagcctcttcatgtggtacatgtggcgtgtagaagaagtcgatgtcactgtgctgagcggctagagcgagtagctcatacacctgttgtggtctctgtttgcaagcaaggcagggaccacgcttatatcatctcaggatttttagaaacaggcatagatatcttaagtgtatataacccgacacctagtgagctgggctctaggtcaccaatactcgcagcgcataaatactacctcgatatcaagcagtaacaaaatagatttttacagtatcagtacacgtggtttgcacgacataactccaaaggctcaagcaaatggcagatgctccaatcgacggagcataagcccgaaagaacaggtcttgtatcgtcttattccacacgtctatatccttggggagggtttgtagctttgtaatttacaaaaagctatttatttctttcggttgacgacaaggttgtcaaggtcggcacgctcggcgttctccttctcgatctcgcggatgatggggctgaggtactcgacatcctagcgccgcaatcagtatgtcatctttaacaaaccgctctttagaaggctctatcgttcagtagacggcatatccggggtatcgatttgttgacaaatccggcgtacgggattggtcaaaaggatgcggagactgagaaagcgcttgcgactgaaagaagctcaaattgactcacctcgttgggcttgatgtgctcctctggaggaagaagagtgtgagagacagagcactattaacagccattcggttcagcaaatatccctttcatgcttatcatacaatcaaaccgacctggaaggccctgcggatacggaagatgcggtcgtaagcttccttgggaggaagacgcttgagagcggtttggacggtatcgctttcctcaggaatcaagtcatcggccctgtttccatgttaacctgatgctggattgacttaatgagagctttggtggccccaaacaagaggcgatgacgctatcgcagcaaacccagcaaaatagctgagcagtgcaaattatgctcccacatcaattgtcaccagcgcttgtcctgggttaccagaaaaggagtgcgtactttagaccgagcttcctgtagcccgcggcatcggtgtaccaattggcaattggcatcatccagcgcttcagccaggggcgcttgacgatgtaactggtgagagaaggggccgacattttgattgaacaacaaagagcgctgtactgttccaactgacacaaggaaaagcggaggtgtcggagagttaagctgaacgaaagatggcccgacgttggtgtgcaaaacggggaggttcaaagcgggtgaacctttccaaaaacatccgatatatacctgaggcataaatatagaatgcacgtgctcccgcatatctgttagcttcatgcctcaggcgggaaagtccggaccttctccggcgagaaacaagttccaggaggaagaacctttgcgtatgtaaggcttgaatagggccttctccaactttcattagactactgtaccctaatcttacgctgtacgctaattaggaaccattcctgagctttttccataccgccgacttctccgagtcgagtgacccgactgacaccatctacaatacttcattcttcacctctcgtcattcgacacctgaggccactattttccagatcactaaacccacgatatccgtcttccgaggtgggattggggttctacaatcgttatatctccatccactttctcttcctttttcgatctttctcgctgccatagtgactcgacagaccccgcgcccctgtctgtgcatagatagggcaactttaaatctaggcggctcggcagcatcggctcgcttgataaatccgattcctcgaacctctgcagcggtcgtcttctttcacgacatttacccccccccacccgcgatactcccaatatacctattttactttcaaaccgcggtcttcaacgtcctttgggttccggagcgggcaccgacatgctcgggtccgggatcccttatcggtaaagcatcaaaacggacagctgtggaactgcttgagcgctggctgcaaggatgttttcagaggagcagaagacatcatcggcttccagcgactcgaataagcagcaaatgtcaaattccgacagccctgcgtccccgaccgttcatatgcccccagcggttacgtccagtcggagctccgcctttgtcactcgcatcgagctcttcgctgccggtgtgccggattggtatgtcgctccaatttgcggggctagcgcaggtgtagcttcggggattgtgacatgtccgcttgatgtgatcaaaacgaaacttcaggcccaggggggcttcgtgcggcgagggaaaatggtggaggcaaaaactatatacaggggaatgttgggaactggcaaagtaatctggagggaagacggtattcgaggtctttatcaaggcctaggcccaatgcttctaggatatctccctacgtgggcggtatatctagctgtttacgaccggtcacgcgaatactattatgagactactggtgggtgctacttatttttttttggctagcctcggactttcactgaattcattataggcagttggtggctatcaagaggatacgcttctgtaacggcgggcgcttgctctactattgtcactaaccccatttgggtgataaaaacgcgactgatgtcccagagtctaaggtccacgacagaaggattccgagctccttggcaatacagcggcacttgggatgctgcccgaaagatgtacaagaatgagggcatcctctcattctattctggcctaacgccagcattgctgggactggcgcacgtggctattcaatttcctctttatgaatacctgaaaatggcttttaccggttacagcatcggagaacatcctgatactggaagttcccactgggttgggataagttgcgcaacatttctgagtaagatctgtgccagcactgtgacgtatcctcatgaggttttacggacaaggctccagacacagcaaagaactccgccatcaccttcaccagaggagattgcattccggggtggactgggtggcatggatcgtggacgtggtgcaggtgcatcttcatctgacggtatgcctaacaggcctcgctattccgggattatccgcacatgtcagacgattctacacgaggagggctggcgggcgttctactctgggattggaacgaacctatttcgagccgtccccgctgccatgaccaccatgctcacatatgagtatctccgaaaactcattgggcatatgaaacatgagggagagatgaagctcaggcttgaggaggaaaagaactccacaggggcaatataactgattgagctatgatgtgcatactaatcactgactcatggatttccacgacgtgttcaaaggcttgacgcctgcgttatcccc

SEQ ID NO: 2898 - DNA, 989 bp, Emericella nidulans
actgaacgaaagcctgcttcaactggttcttggagtgctcatcgacgtacttctggtagtaggcgacaagggacttggcgatggcctggcggatggcgtagacctgagaggtgtgaccaccaccggtgacacggacgcggatgtcaacgccggcgaatttgtcggcaccgacgatgaggacgggctcgtaggcctattccatgtgatgttagagagatttgtcttcaggtgaagccgggtttggttggtggtgggtgtaccttgaagcggaggatctcaggctggacgagctggagaggctggccgttgaccttgataagacccttgccttgctatgtgactattagcttcgttgtgttccacatgtccaagtgtagtgttcgcgattcaaaacaagtcaggttctggccaggttcgaatatcgggttcagagtctttttggcgtgcgatcggggtgtcgggtaagataatgcccgtctcttgattttcttgatcccttccttcgctagaccatatttattttgccccaagtcaaatctcacatatccaattcgcagtaccaaaccgtcgtctacccgacccgaatcccgcacgcacataaccagaccatgtttcagaacccaaactcgtgcggacgcgatggcgatatctagttgtgtaggtgtataaaaacgaaaacaatatctcataccttgcagtgggcgacagcggtagctaaagaaattcaatgcgattagcctcaactcgtcttcttttttcaagccatgcgggacgtcgaaaacctacccgtcttcttcttgccgaagcattgcacactcgggacggaagccatggtgagtatatggcccttgtcggtgtcgaaaggggagtgtgctgggtggatttggtgggatgaagttgtcgtcgacgtcttgcacacttctttcgacttgggattgatggggacacaataatccgtgcgggtgaccttcgcttagtctcgcgctagg

SEQ ID NO: 2899 - DNA, 5025 bp, Emericella nidulans
agcatccatttatatcttttttcccggcaagatcctatcctacgctcacgatcaaaggcaatggcgtgctcgcgaaaaaagaagcaaagacttgggcgggattcttggccatgctgccaagcagggatgccatggcggattgacgagattcgtggataaggactgtggcttgcccggggagtctgggcacccagtccgctattcgaccaagcttcgccatagagccgttggatggcatcatcacgggttccacgagatattgggaaagattagcagagggtggtatagaagagatttgtatgcttcaaggcgtgggggcctgcctcgaacagcaaagaagcgaaacgacaaagtttcactgggctgttaagtgggaagatcctagagattcccagagcttctagcgaagtacgaatgccggattatgctggttgttcgcgtggaatattccttcgcaacttctggtcctcgagcttgggacacggccatccaggcgcctataatgacatttggtctagaagcaccaagaaccgccttggagatggcaagtagaacctagaaaaggggcatcagtagcgacactctcatgttggctttgcccagctttttgtccacctagacgctggtgatgtctttaattccatggctttcacatacagtttcttcgagacgggaattgagctcgccctgcagggtttcgacagtgatagaacattcacgtcgggtgaggccgtgactggatcattattgctgaaactcgatcggcccaccattattccaaatatcacaatcttcctccacgtctggaccgtgcggtctggtttattatatctagtgctcaccgtcttgccaggctcaataaggacctctctgatcggtaaaggctccccgtccattcttgggaatgatctgccaaccgtagcacaagaaaatcagcaagtatgtatagaaagttggtatatttgcccctggagatctgacggactgtcctagcttttcaggttgtccaatcgtcttttccctccaggagacgtacctcagcttgccaaatgttatacacagtcaaacagggaatatagcttcccgtttgaaatttctttcccgcaggcgctcaatacctcggacgcgcagcttccctcctcgttcatggatcaatcgggaacgcacggcgcagaggcacgtattgagtattccctgagaatagatctcaaacgccctgaccgttttcgacaacgaatcacaattgaacggcacatcaacttcataccatcagatgcagctcccattcagtcggcttattattggacctctggattcaacataagacggggcgcactttataatcattcccaacgtatactcaagcaggatctggggttccagtgttgatactggacacgatcctgccgtatccattcgtcctgtacccagggggcaacctaccaatgcaacgacgttgacgacgtttcccaccaaagctgggctgcatgccaatcaagttgaagtacatggccatctctgtgcggagtacgtttactgtctctgctgggttataccgtacgtcctggcattcgcctcaagctctcgtcacgctaagtgagttggacaatctcatctcttgtgggggtgaagagggctttacggacctagacagcagtagtttgaagggcattgtcaattccccgccttgagcattgacatcagcaccttgatcaagaagtatctgcaccaccatctcaaaaccttcagctgatgcagcctggagtgcactgctatatcttccaccttgagcattaatgtcagcaccctggtgcagcaatatctgcactaattcctcatgcccttgggacgatgcagcctgcagagcgttgccatacaatcctccttgagcatttacattagccccatagtcaagcagtatatgaactgtcctctcatagccttcagccgatgcagcctgcagagcgttgccatatcgtccactctgagcattgatatcagccccatagtcaagtagtatctgcaccaccatctcatggcctttggacgacgcaacctgcagagcgttgccataccattcaacttgagtattagcatcggccccctgctcaagcaaaaactgcactatcttctcatggccttcaactgatgcagctagtagggcgttcccgtactctccgccttgagcgttgacgtcagctctcttgtcaagcaggatctgcacaatcttctcatatcctctagctgatgcagcccgcagtgcattggcataaattccgtcttgagtattaacattagccacctgctgaagtaggacctgcactatcttctcgtggccttggaccaatgcagcctggaaagcgctgccataatatccattttgagcgttgatatcagccccctggttaagcaggatatggactatcttcccatggccttcaactgatgcagctagtagagcgttcctgtactttccgccttgagcattgacgtcagccccatgatcaagtagaatttgcactatcttctcatgacctctagctgatgcagcctggagcggatttccatagtatcctccccgagcattcagagtgcccatgacggtagttgcatcagccacggaggctatgagcgcgtccagggttgattgcagccccaaaagagctgtataatatacaggcgttggtatatcttcaacagcgcggttcaagtccacggtttttttcggttgtctatccaagtcatggagacgcacccatgtcaggaaagactttgccctaccaccaaaaagtctcagaatcaggccctcagctgccgactccatccccgagccttctctgaaatgatcgtaccaatgcaacgcagcataatgagctaagggaaattcactgagccttttctcatctagtggactctcagcgagctctggctctagaagatatgcaagacaaatccgagccatttcagaattggctcgttttttctgaatggcaaatgcttttgcctgttgttgcagcacacgctctgactgaaggtactcttgtacagagaagtgtgctatgcgagcaacagaggtcttctctccattgttttcactgatcaccacaacttctaccaggccacgacaaatgtcaataaggtcttcctgaccatatgatcgaccttcacgctcaaggtggggaggctgtgtaaggtcaattgcatgagcatcgaccaactcttgtacttttagcggccgtttagacacacagagaactgtcaatatccgttgaacatctgtagcataatcttcatcaatgctacacaggattcgctcatatgtttcatccaggtcacgcggcaaggaacgtagacacttctcaagctggttttggttccgagcacgtttaagatcaatcaagtgacattgaacatatcggaacctgtaaatagcttagccaaattattccattacttggattcggttgcgtatacactccctgtgcttttttggtcaaactgtcctgaatctcgctgtggcgtgatctccatttttggaactttgggtcatggccgagctggtaagaaacaaagtgtgctatatccctatcagcctcattatttctcatcatgaggtcttggtgatgagctggctctagtgactgacggatatcgagctcgtcacggcttgtaactaaaaggtgaaagccaggtaagtgccactgccgcattgtctctattacttttagaacaacgtctctttcatgatctcgagggctttcgtctagtgcatcaagcaaaatataagtatcgtggaatctgctgatggtattctgaagggagttgagaagggcttccattggtggagttcctggcatgtatgttgcatgcagttgctgcaggtctttttctctatctttgagctgtgctaaaagctgtagtaatagcgctctaatcatgccaggagctgtgatctttgactcatcacgaaaggtaaagtagaagaatccgatgcccacattatggcgacgttgagcctcgtggaaagtagattgaatagccgtcgagcacaggactgacttgccgcatccggcaaacccgtttatccaaaggaaagaattgctctccatcaaccagtttttgaaataatggctttcgataaaccagatccccgtgcctgtatgatgtttctcacatgcagcattatggtcactcgtcgcatctggagccataagccaaccacgtattgcagacgagatatgagtcgcgcttatatgttcgattagcagcctgagttccgacaattcctcttgaattgtattgttgcccttgagctgcagtgcatcaagtgctagagacagattttcccgtatctcactgatatcctcttcgagcttctggagagtatttttcgaaagggataagcgacccgacgcccggcaaactgaattagacctttgaatcctgtagatgatgtctcttgtaatttaaggcattcggcttccaactcctgaataatttccttacattcccatattgatctgtgaatactctcaaccaattctcgatcaatccgcggacagcgattctgtaatgcaccatcgatcgacgtgaaaataactaaaagatttccaagattttgcgtgatctggttcaaatcggaatcctgatccttatatgcggaatagaagctgataagagattgggtgacctggataccaagggataacaagccagcaacaccagatgcaatcgatagtggctcacccatgtcgagctaattcttcgtgagcaatccctaacgacgaagtgtatgagtcggatgttatggcgaaatctatcgagatattgagatggtatttttctgttcaaaaatgtgggggatatctgggtcagatgtgggcttgcctgaacacaggcgccctattaaaatgacagttggtatattaccctggctgtcataaagcgttgcccagaatacacggaaaccgccagtaggagtatcaggctcaagttgtggtacatgattgagccaatgacttcagg

SEQ ID NO: 2900 - DNA, 2088 bp, Emericella nidulans
gctttgttagataacccataacgttgctgaccgtcttggacaatttaccacagagacatagagctgacgacactgcagtacaagctactcggagcagcacaatggggaggttatgaggtttggagcttctcacgccagcctcataccaacaaaggaggcctgcctgtgcaaaacaatagacagacaagacattgatagagtctcagctcttaatgtcccagctctgaagaagaccccgaacagcgtaaatcatctgtgaaagggctcgaggatttgggctccgttgctgagaccaagctttgttcgaagagcgagacaatgtgacatattctgactccatgcaaacggagatgctggtaccttgctcagctagccttgttactggctgcggaaaaggtatataacttgattatgtcttccgcttctctcgtcaacgcgcagtattggctggtccgcataggccatatccatgtcaacagatcgaatcaaacaaggtaagtccaattagctctcaccagatctgcgagccttctatatcttctgcagtactgattcttcacaagaattgccttaacacccaccggttgtcaagatataccggtgcgtcgtataccgatacgacaggaattccaacggccacgccaattgcaaaacgccaggtacctgtaagtcggactgtccgtgccttcactgtatggcctgcgtcatgaatcaaatgtatgggaatggtattatccacgaacgggcttcaacgagtccatccgcaaggcagccacttacgccgcgtccgataatggaggcgccgggtcctcgcattctattttgttatattaaagtgatactaacggaggtgtcgccacagttgacacagccctgtcgattccactatacccatggatactgtagggctggatacgccgcgtaaagacggtgtggctagggggtcgtgcggatggaggccaacgctcgggtccggagtcagtggcagaactcggtttcgtcggctttggtatgcgctctgaaccattctttgacaagctcttataatcttgattatgccagaaaagagaagatccctggtgagacatttcaggcattttcggagacaccgttgtgcaaaggagtagaagaagcgggtcaagtgacatccgaataatcatcaacagggtcggtattggtcgtcgtaggtcaatgatacctcacacagatgctgtaacaagtcatgttcgacgttaacgttccctgaacaggccctcacggaacttgcctgagtgatggatggagtgtaccgtgactgacaataccatcgcagttgttgttgcttgccttctaagatcaaggtggatatttatccctgggcccctgtgaagtgttcctatcatctttctataggatgtgcttgggtttcggaatgattggagttcccacaggaggactgcctttctcggccacctcgggggcattcctcatacaggggtgtcttagtgcttgaccctttccctgacgacgttattcttagagacccttcctgtttgtgctcggcgaagtcagagataaatgcttggtttgtcgacaaaaacggttgatcgtctagacgaacgttcagcctacaaaacggtgattataaatcagaaagtcgctgtagtaagattagacatagactcctggctgacaaatatccaatggtaacaggcatttagtgaagggtgcaagtataaaagagcacctgttcgtcgcaggtaatgccgatcagccagcacgaacactgatcgacagaacccggacaatgaagaatgccgttctgtccacactctttgcatttctcctctgctcagccagcgtgcaaatcgtgggtacgccctctggcttcgcagctgggaccacgggaggaggtaatgcgacgcctcagactccctccagcctagacgagtatgtcccgtgcgccagtaatcacactaacgttgtagactggttgaatgaatcacagacgacactccccgtgtcactcccaccgaccgtgaatggagctttgttggtactgaggacacaacatccacgcagtgatgcagcacccggacaactacctga

SEQ ID NO: 2901 - DNA, 1479 bp, Emericella nidulans
gtgcacctggtttgtgcgcggccgccggcggaaagctcggatggggttacatggttcaatcttcccgccagctgacctaagcccctgaatgctgccagccagcgggcggatctcttgcggtcgacccaacgtggtgctgttaccctttgactcgcagacgctgctttcatctcatccgtagagatcgagccgttttcgctagggccagggtatttgaaagtggagatggaccagcaattaatgcgtttcctggttgctgctaacaagccatcagagcaacaaagttttaggcgtcctcatcggtttaacatgtgcttgaagatattcggacaataactaacaactgctgctggcctccaaagtcagggcttaaaggacaagtgtcgcaaaccggtcgtgtcctccaatttagagactattcgctgatcaattgggtttgctgcggatcgatcgacagctgtggactgatcgacgaagctcgacactctcgccatcagcaccatcgttaaattaaagcctccaccgcctcacgtacctcaggaccctctactgtatacgcaaagtagaggccggcaaatcagttcatgtataactcatcttttttgggcaatttgcaaaataggagtcgcagtcgagctttcgtgctgattctcgatcttctgctttcacgcatagatgcggcaattccccaggaaagttcaataatttggggttctgcgttccatggaagcgaatgttactggaaggatgacatcggtcatgcgattgaagtgtcgacagtcaccacgccgagtttatggttgatgagcaacggcgcatattcctcgacaaccagagagcatccacataaccttgctgaatctggaactgcgttgtgagtaactcggtctttccgatcatggcgtgtcgtagcgagccaagtacgaagtacggagtaactcggcgaactctagagcagcggtagatgaaacttggtcaaagtcaatcttacaaaagtaaaaacctatagtcacgatgtcccaaatgtcatcttctgagtaagtctcttgagttcaaaggaagtgatgcgtgtgactccatatatactcagcgtactggacctccaaccgaagtaatctttgagacttgaaacttcgacagaaagagcaacgcaagaggctcgtgcagcacctcatgtctggtctgggaaaggatatgcggtaatgtaaagcgatgatcgaggtgaagatgcggaagatgttgatcagatggagtgacagaggagtcgaccagagcgcgaatggaagcgtgagcggccggccccctgagtgatctgcggaaggatacacggctcactgaatcgcaactcaggggctagtggctcgcctagcctgtctagcccgttcaggaggatcacaacctgactccatccggatatctgcacataaacggttcactagtggggaggacatgggggtggaacgggaaaaggggtaagtc

SEQ ID NO: 2902 - DNA, 1795 bp, Emericella nidulans
agcacgtgactcgggactctggagaaggcatgatgagtaatcgagaagatgatgatgatttgtcaaccctaggctagccctaacattcacaaacccgggaagcgaaatcagccatctcccgcggaggaaaagatgtcttgtctatcgcgtcagtcctctcttcgacctcaacatcgggacaagcgccagacgattgatatatacaaatcgccgtactttgcactatcaatcgaccatcatggccccttctcaacttcctgccatattcaaccccactcctcaggacattgagatgctcctcgcagctcaatgccacttgggatccaagaacctccagggtcacatggaaccctacctggggaagactcgccctgacggtgtcaacgttatcaacgatggcaagacctgatacgttatttggaggaattgagggttttatattcgcgaagtgtgcgggttctaactcgtgcacgaaaacagggagaagatcctcttggccgcccgtatcatcgccggcatcgacaaccctgccgacatctgtgtcatctctgctcgtccttacggtcagcgtgctgttctgaagtttgcctcccacaccggagccaccgccattgctggtcgtatcacccccggtgacttcaccaactacatcacccgctcttttaaggagccccgcctcatcgtcgtcaccgacccgcgcaccgatgcccaagccatcaaggaggccagctatgtcaacattcccgtcattgctctctgcgacactgactcccccaccgacttcgatgatgttgctattcctaccaacaacaaggtcgtcacgccatcgtctgatctgtggctacttgcccgtgaggtcctccgtctccgtgtaccctcgccaaccgtgaggttgactgggacgtcgttgttgacctttacttctaccgcgaccctgaggctgaggagaacaaggaggttgctgaggagaaggttgccagcgctgaggatgtcggtgccggtgccatcgagtctgcgttcgctgctgagagctgggatgctcagggtgctgctgcccctgctgctttcgcggctgccggtgctaccagctgggaggctgacggtggtgactgggctgccagctctgtcccgcccctggtggtgagaactgggctgaggctcagcctgccgagggtgccaagtggtaaaaagctgcttttcaacccggctatatcgggacagttgttgggagagtgtgaagagaaggaaaatcaaatatattcccctggcatgtcaatcctagcctctgttccgcaaatactcaaaaaggaaaaagaaaaaacggcaaaagaattacacccgaaaccaacgtctttttcttccacccaatggtatgctgtcacgaatcatcctctcagagttcagtccgctttacgtcttgtttcatggggaggaattgcttgttcaatgattgactcggtacttgatgagggaaagatacccagttgttctcatatcagtgagcttctgggggaaagccctgtgccgtcaatccacaaggtggacttgatcgttaccttggtttctccctgtatgttatacgtaaatgaaagtgatgaaagctaccattcgtatattctaaaactgcatcgcaaaccgtaagagtagtaagagcacacgggcgtaggcgcttcatatatgtatacaagcagtccaatgggtatcaatgatcaaaattcttgcatacaccttatccactcacataacgaggcacctccctccgtttgtccgcagcagcagtagtagtctggtaggc

SEQ ID NO: 2903 - DNA, 2100 bp, Emericella nidulans
gaatgatgcctactcatatcaactcccgggtgccgttcgccagtgacctcaaggatgatggcgaggacctcccgggaggtcatgaaaagggcttcctggctggtgtttgttcgcttgacgaccattctctgaaccaagaatagagtatacagataatcgaggtagatgtggcgtctcgcgaaggtgatattaggcgattctccattcgggatgtactggtcatgtcgtaggtaaacaggacatgactgccattggttctgggcggtttggataagctcactacagagagtcagtcggtaccacagcggggttggagctagagcctactcacttatacttgctcaaaatcgtcttgtcatcataattccccagcgcaatctcaagcgcctgctctctcagcactgccaaatggaaccgtaaacgcaacaggcttccccgcagcgtgttgcctttcgtattccaccctgaggagtcgagattagccattgcccgcctgagctgctcctcgccagcaatcaggtcttcatccttaatgtccagcggcggtgaaatagagcagtaccgataattaataaatggcggcctcccaacgaacgtagaaagagacttgtctgcgtagaatgcagcagcgaacgacattttccgccactgatgcaggaatggaggacagttttgtgcgcgtgtgctttcctgatgcagaccggctgcatatatggtcgctgtgagattgccaagtttgcgccaggcggcgtagcatatactgtcgttagtggcaatgtttgtgtcatgagagcagggcgtactcgtatccccataatactgcgtacgcaatagcatatcgttgtactgatagaagcccagaagttcattaaccgacgccgctgttgcacagaacaaaagacacgtcctgcttgcctcgaccaagcgtgaacggagcatctccgcgccctgtgcgtcaggcgccacccgcagaacatcggggtcgtcatctgaggtggacatcattgcgatcccggccgtcgccaaaacaagaccaactacctcccagcgcaggttctcgtctgtaaacgaggcaaaatactcttcgaccgtcatggacgcatgcgaggtcagtggatgagccgaggactggaatatgcgctgcaccagatcgcggacgtgcttttcgacgtctttctcacggtcaatggcgtcgaagatccgtcgaagggatatgataatcgctcttatgatgaggtttgagacaacggccatcaagtggccagcgtagaacttgcgaatcaggatctcccatatgttgttccggtagagaaacttgatgacttcgaggccggactcaagacggtaaccgtccgttaatttggatagtaccccgtctggggcatggttaccctcctcaaaggatatgtttgcgcggtgttcgctgaagacggcggaaaagctggtcgagcctagatacccaggtgttgtggaggggcgctggtctgcggctgcaaggcgaagtccgtactgcaccgtagatgcagatgcagatgcagatgcagtacccgacgcagatgttggttcagggcttggcgtactatttaaatcagttcttttgccttctgcttcctccactaagctggtgaacgtacagtgaagattccgtccttggcctcttggcaggacgataagatggaggctgcgatgcatccttggtcataggcgcaggatgataaaagcatctctgcgtaatgtttttcgcaatacatcgtccacaaactggccgtccatggtcacatttaagctttgatttgcgacaaggctcgcaagattggagcaggccattgcgacggattgccggtgttgagtcagtcattctcaaacgcgggatatcaccaccggggctataaagtggacgattcgatcacatataaaaccatctcgtcttcatattccatactgaacctaaagggcgttcagtttgcaggcgaaggcggcaagaggggccccagtgggaaacgcaggtgtcgaccagagaagacatcctcatactaatcaatatccagcacctcgctcgtccaatcatacgaggcgatcacgccgcctagcggaattgca

SEQ ID NO: 2904 - DNA, 3532 bp, Emericella nidulans
agggctgaattaatctaccctatcactatctaattatgtaccagactcatgtttgtacagtccaccagggcgcaccaagcacttgctagattccatcaatgtccttgcgctggaggtaagcaagttgagatggatgaaacaaatccatgcatacaaaacaccagacgccgataccaatcattaacaatgaaggaaaatatttagggaattgggtatctcgtagaattcttgcccgttaacggtggcatacgtccgcctcctccgatggcggcccgaaggtcaaagtcgggattattctcgagtaggacgtcgcgcttctgttgaacagcttgtgccggcatagggggcggacgccacctaggggttgattggccgctccgatattgacgtgaaatggcttacttcgctagcagcaggtgagcccggacgttccgccccattttccttcaatttttgctcaccagaattgcctggcgtcaagacagagggtactcctgagttaccaactgccgactcgttccgactcgtgtacaccgggtcctcatcttcgtaatacatactacctgactgggaacgggcatgccgtggttgattaggttgatatggcaagtttggctcgctcgattggtatgcttgcggtccccaatttctacgggggggcacatatgacctgggtgaagcgattagttagctattttttgagaaacagagaggttgaacagccatactgtgtgcggctataaaggctcgtggggctaacaggctcgtgctgattatcaatggaaatggcatggagttgttgctgctcaggtacttcatcctgagcatccggctcatgtcgcggctgcggcatcatttcaatagcttggccagctgggcccggagctgctggcgccgccattggcccgggagtacgctggcgtgacgaaggtccacgatatccgtactcatcttcacccattgcgcgtgcgttaccatatccgcccgctgccggttgcggccggtatcctccacgtgccatcggtcctgcaggtccgccgcgcattgggcccatataaccaccccgcccggtgagaggagcacgagaattgggcccgtacggcgtccgtaaggtccgccacgaccatatcctccgcgaggtggatacccgccacggccacgtggagcaaatcctgtagggggccctcttcgcgggtccgaatattggtcgcgcactctggagtcaggaggtgggggtccaggaggtccaggcgtacgcattctaggagcggagttgtaggctcctggtggtaacgggttcccgaaatcatctcgaggggcgttataaggaactggatctccaggaatccgcgactgatacccagcgtcttgggcgctcggatcgctgtggttatttagaggtgtacgatcgtcgtcacttgaacgcgtgtttgtgcgaaaggtggcgaacgtaggcccggactctgagctttgagttgcagcgacgaaggtttctttggcttcaggcgcgattggcttgctctcattcaatgcagccgcagcggcgttctgacgattatagtagttctgcccactcatttcggcattttccgcgatgcgcctcttgcgagccttgcgactgaccagagtccggcgcatggcacaagtgacaacaccgcaagtgaccaggataatagtcgcggcgagaactatccagccaccccatgacaaatgcggcacaaagagcagtatatcgaccaggaaagcaagcaacgagacgagaagagtcggaaggagcaagatcaacaaggccagtaagtagcgaggcgaatgcgacggagcgtgcagatgagccgcagcagcgagacaaaggcagatcaaagtgagaaaagcagcgatcgggtggacgataaggatagaagaaagtgatctccgcgcgtcggacgggaggttaaagtcgctgtccgtacttccagtgttttcgatttcctctgcgctaagattagcgacctcagacctgaggggtaaacgcaacaaacctgtggtatagccgatgtggatcgcggtgcaagtgccagctttgcaataaccgaagaccccatattcgacattgtcaaaagttgccaacggaatactcttaacaataggagtcgatatcacggagagaagaaggaggacaaaggcgatcaggagaaggatggtcaatggggttgccggtttgagcaacattgcgaccacaagacaaccgcccgtcggacagagtgtagggaaacgaacgtcaggtactgcccccagacagcagctcgcccaagcggaataataaactctaaaagtatagcattgagcgtagcattgattgcagcagcgcttctcctggaagaaactgtgggtgaaaggaggtaagagggcgaaagagagccaggagggagggcggcagtacggagtagcggcaataaggcagaagcgaagagctcttgtccagacaagagaagataagaaaagagaaaaaagagcctgaaatgaatggagagaatagtgtactaaggtagtagtaactggctagcgacgatggtaaatggtggaataaggtataagcatgacggcggcttgattgattgcttaaggatggcgtcggcaagttggaggaaagactgaatagttaagaggcgggtcttagtcatcgactgtctcaatttccatgatatgcccacttcctttcttctactattgtgggatctacagccaaaattcacttgacaacaagaacatcttcagaatgtttggtagaccgtgacctgcgtctacataaagacgctagaattcttcctcgagtaggcgtcgcttcctcctgtggtggctgagcccagattagaacaagcgatacctttttaatgcatccactactcacagacttcaccatgattcgctgtccgctaaggaggagagcacgagtttaccaggtcgagttccaccactgcttgccgagactgtcgctgtgcgtaccagctcgctgcagaagaaaacatcacgaaaggtagagccttgctgcatccagactcagtcagctgattcacatgctgtgacacagtgaatgttcccttggatatcgtgtcggccagcgcgctaagaggtggctgcttttgcggcaaagacgcttgacccaagaccatacccgagtaagatcagctatacgataattacgatcgggtctttaaccggtcctgtggaaattaatgacgcgacgcttttctccacgacggaaaccggccagccttcctgcaatcaatcttgagagactgaaacaaatcaaatggatggacttcgtcgtgatacgcgaagatacccttgggtttgctccttttccctactattaaacaagtgctgatttgagaaaatggaacgtggagctcacactttaatgccctatcctgtttcactaccttctcttttgccctaccccctttctaaaaggttctgaacttcaacttgtccctcccttatatcttttattgcattttatccctgtgcttattttcagttatacgcttttcct

SEQ ID NO: 2905 - DNA, 1356 bp, Emericella nidulans
tgtgtgattcaggcaactagttgcgaatcaatgcgcctatccatgggtcttgctgtagtatggtgcggggcatagagcttcgtcatccgattccagagctttgtacgcaatataagaatatcctggttctgtcaacatgcatcggtcgctcgatacagaataatcaaatgaccgcataaatgtcatgcaagcgtagtgcgtcatacatctaatattttgatgtaggttgtgagactgattaatatcacgatttcatcataatgcgccggggtcattgaagatccatgctacagcaaccacttcagaatccaggaattggtttatgagaagtgtgtagaattctctaacgcaacggcccatgctggagaaagaggtaaaccagtatgcgaagaatgcatatcaaacaagagtaaagtggttgaagcctgcaactgcctcaaggtccgatgggttccaccggagataccgcaccggaaggatagggcatcttacgaccatgaacatgggccctggaaatctcaggggcaaggatggatttttgaatgcaggatcgatccgtccccaatgggagtcaaatataccctagctgcaactgggtgtcgcgcgtctgactcactcatgtcgatcaaagaaagatatagtgactattcaagcccttctacttcatcatcgttgcggaccgaacaggtgaactttgcctctcaagaagagggtctcgtatagaatcgatttttaagcgtggactttgagattatcgtcccctcttcctcattggagactttcacgcagcgtctcttcagcctctcttcattcgatacacccgacattatgatcattttgacaaggttctcgactaccgaaagttgttaccccagttccatgcgctgtagggatcatttggtacgagattgaaaagcacttggcatttagattagcacatttaccagacaaaatgagcagcacacgaatccagaagccgaaggatatattcttactttctccaaaagcacctagtgtttcatccatataggagtcgatctgatgatagcagctattgtcgggtataccaagccctgggttgaggttgcctccttcatgcatgggctcgatatagaggtcacccgcgggcacgcccgccatcggaaatgaaacgtcaactgccggttggctctgagttgggttggctggtggcggattgaagtgacccttgaatgttgaagaactgcatggctctgtcggcggcagccgcggtgaatgagaaggcgaggcgtgttgcgacggtccctgttcctgctctctggggtttgtgtcgctaccagattcattactatttagagcattttccaactcctgatg

SEQ ID NO: 2906 - DNA, 882 bp, Emericella nidulans
gcagttcaaatgttccgtctgcatgtgtacaagactcgctactatgtcggcaccggactggtttcggtggtaggaacttcgttcgcaacgattacagttgcaaccgggacgtttaatcagatgtactcaactggatactgtccagtcgatggctcaggaaacaggctgccctgtccgaaaggttatggggcactcctagccacctcctgcctttgctcgcttctcgaaatcgggctttccttcatgagcagcaggctgctcaaagctctcttcccgccaatcgtcactggcccaactgtcttcctgattggtgcgagtctaatcggcaacgcaatgaaagactgggccggcggttctggaacctgcagcagcaatccgggcaatggcgctctttgccccagcgccgatgcaccacaccccctgccttggggcagcgccgagttcatcggccttggcttcctcgttttcgccaccatcatcctctgcgagcgcttcgggtccccaatcatgaaatcctgcgctgtcattgtcggcctgctggtcggctgcatcgtcgccgcggcctgtggctacttcgaccgctccggcattgacgccgcccccgtcgcatccttcatctgggtgaaaacgtttccgttaacaatctacgccccactcattctccccctcctcgcggtgtatatggtcatcatgatggaatccatcggcgacatcacggccacctgcgatgtttcccgtctccaagtagagggtgctacttttgactctcgcattcagggtggcgtcctgggaaacggcataacatgtcttctcgccggtctctgcaccattaccccgatgtcagtatttgctcagaacaacggcgttatcgcctcacccgct

SEQ ID NO: 2907 - DNA, 1251 bp, Emericella nidulans
cttatatatccaccactctgcggtacagtatgtgtatccatatccttgtccattcatcttttttctgaggaatttgtagactcggtacaaaggttcttgctgcatttcaccaatggctgttagatcgctgggcacctgttctgcgtgaggttcatcatcgtcgaaaaagtcattattgtccatgggttcatcatcatcataatcaactggctcaacatcatcattgggaccatcttcatctatgaagtcattgtcatcatcacgttttacaaagctgaacgcacgacggtggatagctggagggatcactggggggactctccgatgggatatctggctctcggtaggcaacgcagacactgcgactgttgggaccttgacgcagtcaagcgtcgaaagagtcatccaccctccatgtccataagaacatgcacttccacaagtgcctggcatacacagttcaagcgaagtcggcgtgctggtgacagtggttgtagtcgcagtaaccgagcatccactggtcgtaatggtggtcgttggatagcaggccgttgttgaggttgttgagtcaccaaaagtgaccggggtcggctcacagaggacagtgacatggtatacggttccttcagaagtacaagatgtcgtcgtggtggtctgcgaggttgacgtgctagagtttccattatcctcgtcactctcatcatcagtgtcatcgctatcatcctcggcattgttcccattgtctttatcaccaaagtcgtcattagaatggtgttcgttgcgatcctcattgtggttatcatcgtcattgttatcagggccgggaggcttgctagttggatcaaggacaggagtatctgctatattctcgggtgcaatcaaatcgtgcatcatcttcttgacaccgtcgatatcttgcttctcaattgcatccttgaggtggcttgttatctttccgatacagcccaattgcctcaaaagtttgccagcgacgtcgccagcagcacccgcaatgtccttggctatatttagcgctccgtcaataagacctcgttttcttagtgagtcgcagctgggaggcagctccccacctaggactttgatgaagtgctcaatatcatcttctacaccatcgattcccttgacggcctgggtttggagagaaggactcggcttttcgacccaggcgtcgatgatcggtaagacggacgcaaagtcatcggatatgccagacatgctggaagcgagtac

SEQ ID NO: 2908 - DNA, 1458 bp, Emericella nidulans
cgacctagaagaatgtatatgtccgccaccatcctggcggcccatactatgattatgccgatgtacaacagcaatatggagggtataacgatccatatggcgcccaaccagtgattcgggatgttcaagctcgccggaacacacagattcaaaatccatctgtatttccccgacaaggaaacgctgggatcgcgcaaaatttctaggagaaaatggattgaccattttttctttcttatatatacttactcttactaaaggatcatatatcaactcttgttcgcccagcacggttgccactaatggagttgtgagggggttttagcgcagcactgagccctaagccttcatattactgttatcaacaggccagagtcgattattcattcatctacacggaactcgccgagttcttttttttttttttttttttcgctttctattttgtgataccaatttcactgccatcttcgccgattatctttcccctatttgttccctcgctatcttggtcttgtcttcttttttggtgtacatttacgactgctccttatcatgtgagggacctctttagttctggtttgtcttcaatatctcttctatacctgaacagacattctacttcacctactctccatctttctttgtctggatgtcctgcttttttttttttcttggtgggcatttgctcctctcagagaaggcaaggagtgtgtaaagctctatacttagctagggatccataatgataaactcaaactcatagcgaaaccaagaagcagacttcgtagcattcgataggtttaatgatacggcgtctctgtaatcacattgctgcctgtggagtcatgtaaggagcgcgaagaccggacagcctatcagtggtcgggcttctagatgaggctacaagaagatcagggcttgtaaccgttagcatcaatctcaggcgaccttaaccacctttcgaagatcttgcggagctaataaatactgctcttgtgtagggatcccggccagtgacatcatccgaattgagtcgaatcgcacctgtgtagtaccaagtgcatgcttaacctgagaaagatgataagccaagcattcagtaatacgttaggcttgttcgagcagtgcacgttgtgattgacgcggctttggttgggttgttctccagggcttgcagctttagcgtgaccgtggggcaggaaacgtgggtttgtttgcagcgttgattgggcgggaaccagctcccccagagctctccaccttcagctcgcccttccatcttttgacatgaacacattactctcagcgactgtgtctaaccctctctacgctcgtgtcaaatctacttgtcgttgatctcctagtcgctttccatataggtatgtcgttgaggggtgtgatccatggctcccgccgtgagccggcctttgtcgactatgaaatgtccgctgacgc

SEQ ID NO: 2909 - DNA, 1648 bp, Emericella nidulans
gagcgacgaaatcgatcttcaatgacgagttcaggacctgcacacgctgggtgctcggcagtgaattctctggtaaagaggaagtaaagttccactcgtcatcgtccgttgtcttaggcttctgctcggcagctccagcgagatcaaggagggaagacgatgcgggcggtcgagggcttgcagagctggaagggagcgggctgttgtttcgagggctagcggatactaaagacgcaaatgggtccactgcagggggtggggttgcagtaactggaggttgatgaaatgcaggagcgggtgtcgacgagaacgacgcaggttggctagaatttaacgaaccgaggatatcataatttgcttggaatgcgctaggattctggggtatttggggcgccggagagctcgcttcacgaatgttagtaaacaacttgtgcaaaggacagaaaaacatactctggcctaacgagattccaccggacggaacaggctcgtcgattgatagtccaagcaagtcattctcgatagagctagacccctgtgccggctgtcctgcgccgttggaactaggctctgggtcgaaatcgatcagagacagctcgttgttggcattcttagaaacccctgtagtagtgcccaacgtgcccttgggaatcctcgtcgcagcgtcgaaatcaccactcttcacgagcttataccgctggattgtgcggtgtatgctgtcattgatctccaacagtttgcgcacagcttctgggtcatccgactcctcttcacacatcttctggatcttgggatgcgcactctgaagggcattcgcaagttcctgcggctttgttagaagacttcttcattacggtggattcttcatcctaccttaaacacatcgccctccgcgatccgatcacccggcgcctggctctgcagcatttcttccaaaatcttggctttctcctgaactttggccacctcctctgccgccttagcccggtagtcggtcttatgccgggtgtcgtatcccgccataaccttcatcaaccggtttgcttcctgtagatctgccggcgttcctctccgaatcagctcctgcagcttcgccgactgcgcttctcgctcctcctcctccatctcctcagccgaacgcagattctgcaacccaggtcaacacagttctgacatgcatccgtaggccaacatacatcgctagggttcaaaacagccgcatcctcgcgccgaatttccggaaatacatagcctttgtacagtagtaaccggtgcatatcacggatatgccccagatcatctttataccgcgatgtctgacagattgtctgcctccactcttcaattgactcgagaatgcgatgctggaccctcgtgggccgcagaggccggcatcggggaagcgacggaccaactcatttagaaattccttcgtgctgatctgaagatggaacgggtatccgcagtttttgacacagatgtccagaagctaccggaatcgatctcgtcagcaatgcgccattctgcgatagtcacggagctctgtcttaccgccaatgctagtaacgagacattttggttccgggaattgatcaggcggacaatttcgaatgctgcttctcgaggactatttcatccaagcagtcag

SEQ ID NO: 2910 - DNA, 1470 bp, Emericella nidulans
atcatagcaggtcatacccctctctcccctctcttccgccctaacccctccgtttataacggcctggcacgtcaaacgatctgctgctggctctcagcataccctgacgacgtagaattgaacacaatggcaggctaccatctcccagtcgacctcaagcagttcaagaagctgcagctggatcccaacagcaagaagctgtccgaccagcagaaaaaagatctcctacacaacattggcatcttccgcgatgccatcgtcgccttcacagccaccggtgctgcccgtggccaggcaggccacacgggcggtcccttcgacacggcccccgaagtctgtatcctgctaggctttatcaatgccaatccggatgccttctatgatgctattttcgacgaggcgggccaccgcgtcgcgacgcagtacctgcttgctgccatcgacggtaagatcgagcccgatcacctactcaactaccgagatgccaactcgaagctccccggccatccggagctggggctgacccccggcgttaagtttagctccggtcggctgggccatatgtggccgctggtcaacggtattgccatggcccacaaggacaagaaggtatttatgctgggctctgacagctcgcagcacgaaggtaacgatgctgaggctgcgcgtattggccgttgccaacaacctcaatgtcaagctgttcctcgacaacaacgacgtcaccattgctgggcacccgtcagtgtaccagaagggatacgagctcgagcggacactcactggccacggcatgaaggtcgttcgtgcccagggtgaggatattgactcgttgtacaacgccatggtcgaggtcgtcagtacagacggcccggccgctgtggtcgtggaccgcaagatggcgcccggcattgaaggaattgaaggacagactaaggcgcacgatgtcgtgcctgtggatattgcccgcaagtacctcaccaagcgtggctactcgcaagagtcgctcgccttctacgaccagatcaaggccacctccaacacgcaccagtacctgggctctactaaagagaagggcggcaaccgcgtgatctttggtgaggccgtcaactctgtcctggacgggctcagcaaggaagaagcggcccgccgcgtcatggtcatcgactctgaccttgagggctctaccggtctcaaggctattcaccaggcccacccggaggtctacgtatcatcaggcgttatggagcgcggcaacttctccgcagctgctggtttcggcttcggtagtgacggctcgcgccagggtgtcttctcgaccttctgcgcgttcattgagatgctgatctctgagatcaccatggccagactgaacggatgcagcgtcctctcgcacttctcacatagtggtgtcgacgaaatcgccgacaacacctgccatttcggcctcaacgccttctttgccgataa

SEQ ID NO: 2911 - DNA, 1388 bp, Emericella nidulans
taaatggctgctatagtcctgctgcgtctcgggccatggagatcctacttcagtacgcgcacctccaggacgcacggcagctcatcccagtgtcccgcgcgcacatcgacgcctgcatttacaccggtccggcgagtatactcattgcgcataggtttctttcccaaggcgctcacgttgctatcccaacgacgctgaactcgatttctgtcgaccagcgccgatggcgtgaagttggcgttgacaagaacttggcgagcgacgcaaccgcctggcgaatgcatacgttgccatgggtgcagagagcacatttacctgcgctccgtaccttttagactctccaccaggtgccggcgacacaatcgggtgggcggagtcaatgctgtggtgttcgcgaacagtgtccttggtgcacgcacgcaaaagtaccctgacctgattgacgtctgtatcgcacttaccggtagggcgccgctggctggagtccagattacagaggaacgcgctccgagactctgcatcgatgtgactgtgcaaaagcacgaggcactggaggatgtattttacccgctgcttgggtacgcggtaggaacagtggtcgcgggaaatatccccctaatcactggactggagtcgacgaatccgactaggtctgacctgaaagctttcagtgcagcctttgcgaccacggcttctgcgcccatgttccacatctctggcatcacacctgaagcaaagcagttcgatctagctgggcttaagcgtattccactcgccgacgataacctgctctccgctctcaacggccttatcactgccgcagacgactccgtcggccttgtctcactcggaaacccgcacttttctcttgaagagtttgctcgtttcagtgaactgtgtactggccgccgtaaggcggattcagtccaggtgatcatcaccaccaaccgacagatttacgctcaggcgtgcgctgcgggacatgttggtgcaatcgagactttcggggcccaaatactcacagatacctgctggtgcatgatgtcagagtcagtgatggactcttctgtggtgaacctcatgaccaattcggccaagtacgcgcattatgcgccgggaatagtccgccggggggttcattttgggacattaaaagactgcatcgccgcggcggagacagggagagcaaagtctggcctaaattactggctgtcagctgttaaatcagcgtgatgttgagtctgctctcgatgccatcatctccttcaaaggtcccgtgtgttcgaggatttatttgctacagatgtgcctcccgcaacgtagtcttggcagagctgttctacatttgggcattttcaaatcgccattctccaaggggctttgattaa

SEQ ID NO: 2912 - DNA, 535 bp, Emericella nidulans
gctcgagcatgcactctttaactccagattcagcacatgctgcacctgttgcggtagttctgcaaatctgttcttccacgaacgactccggaatggatgaaaggtccaacatggcagagagtacggcgctcctagagaaccacacagagctgctggtcagaggtgagcgaacgcacggcgttgagacaagttgaagcagtgaagacgcaatagttagcgaaagggctatccgatggttcggtagccatgacgcgtccggttctttcagcagctgctccagggtcacaaacccgtccgaatccgccgcgaggtgcattgaattgctgtggacggaggcctgtgggtaatagtacatcaggcggtttccttccgagacctgcaagcagaatgccgcccttccatctctggcgcgccgtataaactcgcacaggtcatccatcgcggtaaggcggggttcggcttttgttggtggagtgggttgttgaatgactaccttgctgtacgccgttctctgcgtaatcctagtggaagaatt

SEQ ID NO: 2913 - DNA, 2102 bp, Emericella nidulans
ttttccgagatctcaataccgaagatggggcaacaagcagagtgcagcttcaacggcgtcgagctccaagtccgccactgatcttagttataaatcaagctcaaaacgagatgttgagggcattgggcggccgtggctggagcacccgcttgaaaaaagggatgagcctggctcgaagggaagtagtcaagtgtcgtcgctggatctccgtgatctcgcatcgtttgttgaagcggctgtgaatttctctcaggcagacgataccgatccccctccataccaacccttgacagagcagtgcgcgacgccaactgtgaccccaggacccagcactgagcggatgccacggtccgatgcactatctgattccgccgtctcggccggcgaaccgggcatagagaattcagtacgcaaggtcaccaatgaactacctattgcctcaagcttccaccgatctgtccagccattgatgtcgagcgagagattgagcgtaagtatattctatttttgtagaaccctgctggccgggggatgcgggtggacaaccagcatgaaacccaaaacctggagtcaaaactgaagcgtaatggagcagtctccacgaagccgccttaatctagctcttcaactagctccaagagtgcctcagcaccgacgacgccggttctgaaacttttccctgacgccatctctccccgtacttcgagtaagcaggccctgcgtatctctaccggcagatcttggacgccgaagcagtctcttccctcggtccctgcctcccaaagtaccccaacgttgccttcggttttcgagtcaaatgatcgcgagtttcgaacttcatccaacagcttacccaagattcaagaacatgtttcggatgcgcatggtacaaagcagtctggttcacgtgcgccggaacgaccttcagcaaattctagagagaggctcgaaccgcaagattcacagaccaagcatgctcgtcgtccatcgtctctgccgccgggcgctatcgatgcctttcctatccccgcaccagccaaacctttgcctacagtgcctgaaccaaacactcgaattgacgatgtcaacaagaagacgtttctgaatcaacagacaactcagcttattaatatgagaccgcatattgcagagcttccaggaagtatgcctcctggcattagtatttcatctcctagcagtcctgaggataataacagtgcttcgcgtggccgtgattctccgtttcccagactcttgggctccatggacccagcgacaaccgattttacaaccgaaggacccccggtacctatccaacctcggcgcggctcactaggcaaagctggacgaagccgcgaagccaaggtccgttcgttgataatgaaagacctcgctagaagtcgtcatttgaagagcccaagtaagggtcaaatcattgacttacagaaggaggaacaagcatcccaacctcgcgagagtgaggattctggttcaggagctcaagggcgatatcgaaaagtggtctctcccgggccttcctcgccgcctcccacgtctcctccaccacaagacccaccgcgacatactctccagggtcgtcaatactgtacgcctccggcaggtgcgatggcggcaaattgagaattatgaaaacctatcaaactccactgccagcagaaagcaccaattatatcggaagaatagcgtacggaacttcgagatgaagccagagaagaaatccatgaaacaaaaatccccgtgtgaagaagaaacaccccttccatcctcggacgatgaagggccggtgggggacttatactggaacccacctcgtaagaccaccagaagacaccgaagagggaggccggaacctatcattgtcgataagcctgtgccggaacgagggcgatcggtgaagaaacacttaactacaaacagcatgagtccagcaacgctacagaactacagcagacgtagtattgggaagaccccccagacgcatctcacttcgcgtgatcaccacacttatgatctccgtagccgccactcaccggagtccaagcctaatcctacacttgaagggcgtattgagcatcttgagc

SEQ ID NO: 2914 - DNA, 848 bp, Emericella nidulans
gttgctgcacgtagatttagtttatactcaacttcaagtgccgaaaagacataccattgcactctccaggtctcttgtccacctcgccgcctccgagacatcacctacgagcagactgatcctacccgataattcgaccagcgtaccaggtgagatttcgcttcggtcctgtgcttgatcttcttctggtgttctagttgcgacttcactatcttgttccttttctgtctcgcttggtcgacgttgggaggaggctgtgggacactccagctgcgccgctgcacgcgcaagacgctcataagaccgtccgacgaggataatacggtcaacgccctctctgagaaagcgctccgcgattgcgaagccaattccagagctcccacctgtaatcatgcatgttcggccggtgagtctgttagatgggcggaatgaggtgctgccgttgatttctggatcatacgaggtgaaatgacgggtttggagaacggctatcctgaaaccgggctttgcacggaaatggatatgcgtgaagagggaacggactggagagattgtgaccccgcgtagggggagattggagatgcaatgcattgattggtttagatagcctttggagattgcttaaggtaatggaaatatagaaaagtgatgttgtcgtagtagctttgtcctcatgcgagtcatatagcgcactaatcaggttaaaattggagctaccgcctaatagtaagtgacatacctgccaagtgaaagttaacagctttcctacatttcatcaatagtgtatgtcatctcgtgagtcgatcactgttatcgcggcaggcctgcggaaagcttagacaggcccg

SEQ ID NO: 2915 - DNA, 1295 bp, Emericella nidulans
cagttatataagagacaaggtgacgaactgataacgtactgacctctcagacctggtgccaatcttccaccgcggagaccaactaatggacgtcgtgcctgacctggaaatgacttgctgaaacatgtatcaccccttctccgggtttcgactccgtcttgggattgatatagtgacaattggtcgccaatgtcagattagcccaagctacgtctaaacaccttactggagttcaggtaatggcggcgtgtgatggggccgtaattctataggtgcattgcatatgcactatacgtagagggatgagggaaagcgtagtcatgtcctcatccaatagtcctattgaggtacacccgctaacgacatgatcattctccgcagccaacaggctggcgctaatggtcgttgcctggactcactttgtttgaacctgcatacgaatactctgtatccaatccagggttagagggtccgtgggacggtgggaagttggctattacgtgcattactggttatgtcttgccttccattgcttatcttactaggctggaatgattcagtgttttgaggatgaagtacgaatctagaccttcccagaataacgatactttaaacccatagtatggttggtttttctggaccaccaaattagctctttcatactgtttcctcatcgatccgatcttaggcgattgtacagattcagtgtgccctggcgttgttaccaccgttccagttcaagtataacaccgtctgcatgttatcaatagtcctatatactacctggtactagcttggccccaagacaataccgcaactctttgcgtatcctgcataatggcaattgagaccccgatgtcgaaatagcactgcggttatacatactctaggcatgtttgttccgaggcctgtagatggtaatgcgtttggctaccaaaaggaattcaacagcctggtagtttagcaccggtaagttggcctgatggcttaggtttgaattgggtagtgttcgtcagatttgagagctcgcaattgagctggacgccaaagcataagctggtgctttgtttcgtagttgtgagaatttgcgacgttggattgttctgcttctgcacgatgctacagatacgagcagagttagcgagtacaaaaggagtgtaagactgcacgaaaaacgatgtcattgagagatctacaacctatctagcctacagatgatgtagccctccgtccatgcacctcatcgccacgggatagaaagagaagaggtgtttggtaataggaaggcatgaaat

SEQ ID NO: 2916 - DNA, 1644 bp, Emericella nidulans
  unsure (1)..(1644): unsure at all n locations
gctttcttcaccgacaagggaatgtcgcccgcgatcgtagtcgccggcatcgtagtgggcaccgtagtggtcttcctgtttttggagagggtcagatgagttcagggatacgggaggtccagacggttagggattacgcacctttgcccagtaaatttcgtagtaggcgaatggaaaatcgtcaaagcgtccgaacagacacaggacatgcttgtcttcgtggagacgacgcaggtactcgcggtgttcgtccagcgtgcccgtctcgttccaacctttcgcgacgcgggggtcgttctgccatcggttgaaccgcttcaggtgctcttcgttctgccagtccacgaccatgagtgagaagtgtttgtccaggtgcgggatgtagcgactgtagacgagtgagcccggggtaggctttgcagggcgaaccgggtggcgcgcatagatgcgttcgcggggaaatttcatcgaaaactcgtagttctttggcatgacggggtattgactgagagatttgcgagccaggccgtgcgtcccctggtcgaccatccagataggccgcgggccgagtggcgagccagcgccctgccagaaagaagagcgcagcaggatcagggtgtcgatgccggaaggctcgctctcgttgccgaaggggactcgtggagacggataggggacagccagtccagtgcggatgcattcctcgcggacgatctcattgccagcgcccttcagatcgagacggagaacctctcgttgcggatgtgttaggaagatggcgtggattacgttccagatttgtgcgaaagaaggtggttcggtgccggtccattggaatgtggttcctggggctcgctggctgcgtgcccaagggctgttatcgttgtctggaatatctttggcggattcgtcgaaggcaatgtctgtgtaggtcaatgcatcgttgtgtagaggctccgccagcggctctccaggaacctgggagtcatggagtcggagttgaagcactcgtggactggaatcggagacgatgtggattctgtagttgtaagataaggtgagggagtttcacccaaggatattgttgtttggcagccattttattgaattctgaggggattggagagatgaggagaaaagaatgggctggcgcgcatatatggggagacggggagcatagagtggagaaatgtggaagaagcgcctggaccagcgaaacggccgatggccggacacacgtgggactacagtactttaatatgctgcagctgctctctgaagacttctaggaatccatacctaccttcagagcgcagtcaacatgcaacacccaacagtccaaggatgtctggtctcgtttcctaccccagagatcctgcttctcacactcaacaggcccgagaagcgtaattctataccgcttgctataagcgcagacatcatacggctatgggaatggttcgatgcagagcctacattacgagccgcaatcatcactggtacaggtgaatccttctgctctggagccgatcttaaaggtatttccccccagcatcagattccatgcagtatctaaacgcaccacttcactagaatggaacgaactcaatgcccgcgganccgtcaataaaatgaccgccccgg

SEQ ID NO: 2917 - DNA, 2368 bp, Emericella nidulans
tttctgttcaatttagtgtatataaattcatcatcacgtttcaagcttggctttgttagacgggcgggttttgattagggttcgttttttgccatatggatctgtgttagagctcccaaagagtcaactcgctttaaatgcctctgatcttgtatcatgttctgaagttacctagtgtgcagcatgcaaaagaactatatacgacgctttcagcactaaaacatcaacgctatgtagcataatgcgtagcacaagttctaatcttgcccgatattgctagtgtgagatgcttggaaatggatcccatggctatagtacctatgctttctccgcgaacccgtgctcttctaacccctcagcccccgtatcaggggttgcaagatcagactgggactctacaaacttctccgcggcgacgtttagtcttccataagctggtggattacggcgcggttgagcggggcctgaggtggggattttgtagccacggagtctgtaaagaccaaatactgtcagtacacgtcgttatacacagtggatgattgtgtcaagctctggaagaacgtacctcggcccttgacccgtgatctcaggaaactcagccacgtatgtttgctggaatgtgcggacatctgcctcgaatgtaccgcgctcaatgctcttacggacgttagcgaagaagaggtccatagtataatagttgtgaatttggagaagggtccatgcgagcatttccttagcggagaggaggtggtgaatgtaggcgcgatgatggctttgacaagcatagcaagcgcatgattcacttagtgggccagtatttgtagtatttgatcgcgaccaaagatcatcagcgagaggaaggggttcggtggatggatttgatgctgatgcggtatctgatggagccggaaaggagaaggtgaaagccatccctgcatccgacgaatcggccagaaacgggatcgtgaggaggtctgcaccgagctcaacttcgcgtaggagatcatgcggagttcttggcccgctgaaaagaaggcgcgggaggtcacccagcgactcggggacgatagagagcgacgtgggttcgtagagcgccaggccagaaatggatggccgcaagtccgtttccagatcttcaaggtaaagctgctgctgggtgttctcaacgggcaatatcggggcaaaatacgccgctgtcgaccgactgtgttcagagagctggggcccgtagaggttatccgtcgcatgggtggtaaaagcgtgcgtccggtcgaccatcttcactcgctgttttgtacctggcttctggcctactagcagatctgccagcccgaccccgatgtctgggctgaggcgctgaatagctccgacgtactcgttcgcctctagctgcgcatagcccaccgatgtaagtacagcaattgacgtgtctgtatttgccggtccagaagcaattggaggttcgcggcgtgcgccgaaagccaggagcaggtcatcggcggcacaaatgaacttgcgcaaagccgattcatgaggtgcggttgggacatgcacccaccggcccaggtagtgaagactttttatactgcaggtgctgcttctctatgactgatatctgagccccggcgggcattgacttgtcagtatgcctcgcttcgcctttcctcaatctcaggacacgtacaatcttctaggccaatatacagactaccaatagaggtattatcgcgcatcacatcatgtgctagatgagggacaacccctcgcgatgtcagagggatgtagtggggcgtcaagatgggctttcggcctgcgatcgtcagtcttcccagccgcggggagagcactgcggctgaggacctcgagatgctaaaattgagcatttcatgtggcgagtgtagtggtgtatctgatcccatggcgatgcgcagctgaaggagtgagtatgtgcagctgaaagaaaatgtcaagttgttggcagaggctgttatcgataagtacttgtttcgcgactccaattcctccagatcacggtggaccttaataacgagacccctatccacggtatcctcctgcagcgcgtcgactccctggacacttcgaatcatagccttaaattgctgcgactctagattttaagccattacccgctcgaccagtacgattactttcgattgaagtacattcaatctacaatatgagcgtgaatggcacgcatgggggacgcggggccctgattgtcgtcgaaggcctcgatcgagcaggcaaatccagccaatgcaagttccatcacaacattctacaagaaggaggccgtcccgtgaagtacatcaggtttccaggtgatacatcttttgctggaacc

SEQ ID NO: 2918 - DNA, 1168 bp, Emericella nidulans
cgaatatatgttcatgtgtaacactctaggctgccgagtacgcctatatatacattacgaaggccaagttttttagatcagtagtttttcgttcagattattcagtagaatataatcagtagacgaatactgtcaagttgtgtcataataacaaaacaagcagccgtccagtatagcctcgatcgaaggatctgtagattaggttagttttccattttttcgatttttctttccattcccttctctttttcaggtggctttttttatattttattttcatattttatttttatattttatttttatattttatatttgtgttcttatttgagtttattatcttttcccttttttcagagaggctagctagggagggcgtcagcggccggtcaggagtggatgtgtccacttttggagcgcacgggtcgatctggccgccagtatacccgacatttaggtatcagatcacccagttgcatagagtacaagggatcaaaaatcgagtccagtgaggctaatttttttttcttatactcaactgacctatctctcgtgccgggtgacttatgctgaaacaaggaggacttggctcgggttcaaggtgaaggattcaagtttatggcagaaccttattccaggcccgataatggaggtgttcggtaaattaggtaaaaatattaaagcagaggtgagaaataggagtaaaaagtgacttccaagccctatgatcttacacttttctcttggttgacagactggtggaggaaaagtttaccgtcacagcccgagggcccacgagactcaggttatcggcaaccctaagtacctgcagatccagcgcggtgataaacatatctgcctagattgacctccgcatagctgatctggcacattgcttattcaggctaatgcgcgattctgcagcatgaactcatgatcggccaccattgcgtagggtatccatccaatcgcgctagggcaggtgtttggctgaccagacagtttctagccaataatgtgtatgggcagtcggtgctgaatctggcttcaaaggctcttgtgcctgataccgggttagctgagagtctgcgtactaaacagtccgatgcgagggtttgttatgcagtcgagggagtggaagcgaataggcgctcagcacgtcaagcct

SEQ ID NO: 2919 - DNA, 1078 bp, Emericella nidulans
gatggtggccgtcctctgtgatcttctttgcataagccgcattagcgatctatttgtttaaaaccatatgtagagtctaacctgttggtgttgctggtatcaaagttctctgtaatatgcgagctgaggtcctggacggagtcctcccagtggtatttgtctggtatagctttcgtggcctcctcattgttgctatcattaagcaatatctcacggcgcgaatgtgcacggttgacaaagtcggtttcgctcggagccagctgacgcgtcccgggtcgtctgtcaaggagttgctgctcaagattatctgggaacaaagtataaagcaattcggtgcgggtacgttcggtgttgttcatcgacgcgatgaacgcttgagtcttcatctcaagaaaaagggcaccttgctgtttgagaagccgtccaccttcggggacaaatacgtcgagaaagttatcattgagctcagagaagctgatctcctgagtaccaaagatgctggagacaaacgatgccaggtttgctttgcggatgatgtcgacttgcgaaggttcagtgagctcgagctccgtgggcgagaggaacgatttcttggttgaatagaccttttttgtgtggtcaaacagtgaccgcatcgtagcgtacgcctgaccattctccgactccggctcagatacgaaggaggtaatatcttggtacgtggacttggccagcagcgacagaatttgcgtggactgcaaattagcttcctaaccaaaactctgagcctgaattagagaactcaccagattatcaagaatgggtaaactctgaatttttagatgcgaattggccttgacaaaaaccatccccttgggagcgccctgaccggacaaatccggcaactgctggggacccatggcgcactgctcctcgacacgctcggaatgattcatgatgttcgagatgacagtagctacgtccgagtcgatattcgtgttttgctcttgcacaggacttgctccgatctcggtctgaccattcttgctatccgcagtttccaccgaatcgacgacccccgcggcaagggccgatgcaa

SEQ ID NO: 2920 - DNA, 941 bp, Emericella nidulans
catagtttattttgtttaggatagacagttttcctgttgtgtgggagtgcttcaacactggtaacatatagatttggactatgatagacacatgatacacctaatattatttcgtgcgcttggtcagtcttctgcactggtagtcaaaacttgaccggcaagcgtcagtgcggagagccatccgctgcccagagaaagggcaaaggtctagccctccctggcctgccaggatgatgtcacaacttcgcggggttgggtagtcccaggtaactctagctggtcaggaacaggttcttttctctgcatttccgtatataatgccctttccgcccagttttctaggaatgtgcgaagttaatcacgctgtacatccgcgccttcgcaacgacactctccattcctgatcgcgcagcagctggagaagtcaacgagcgcagcttattcgaaatgtctaacgagaccttctacttgcttcccttgaacgacgatggctctccggacgtgcctgggggttttatctatcttcccccaccagaccatccaaagtattcgctccgattccttatcgaggggagcagctcaatatgcagggatgggacgctttggataaatattcctgagattggaaaatcgtttgatcgtcaatcgtttcggccttttaagtgagagatattttccctttttgcccactttctgttgagacgattgtgccaggttatatccggactttagcagaaacattcagatcgatgtcccagtcacctgtcccgggtctttcgcatactatgtaacctactcgccactcccggagtttactatcacatccagcgcgccggtgaagccagcaaggactccgactcattacattgatgtgtctccaaggctcagtcttgcgggcgagggtataccactcaatgctctatcaatattctcggtgaatt

SEQ ID NO: 2921 - DNA, 4625 bp, Emericella nidulans
ataattggagacgctttgtgtatggtgacgcgctgccagattcatcaaatagctgatacattccagtagacgacgtacatacgatttagagatagaaatgacgtatacaaagatttgatgtggctgggctggtttctgcagactgattgagccctggctcctgatggacactaaaccggaaaagggaaccaagatgtacattcattatctacaccgatagtacgtcttgaagcgaagtactctgtactaagcgactcatgactaatagaccaagaattgttatgtaaaaacatgccgatatccattaagtagatacacgaacagaaatcaagaaaggtcaagcaaggaaaaggagaatatgtttgagtgcccgcacaaggagacattacggaacatcaaatcatgcagctatcgctcaatcctctcagcacctagaaagcaagaacagcggcgacaccggcagcaacagcaccgaagctgacgacgttgcggccagcagcaccggtgaactgaggaggagcaggagtgaaagtaggggtccaggcgggagcagagggggtcgggacgagggtgctggagccgggggggatgacaggaacagaggtggtagcaccgccagtgggctggtcctcaggacaggtggtggtggtgacgacggtggtctcggtgatggtggaggaaggaacctgggtgggctcaggagcagtgctggtaggagcggaggagctggactcgccctggccgtagttggggttgctgataccgaactgggtggaccactggtaggcacccttgttagggccggactcgacaacgaggagaagaccgtagtgggtgacatcgggctcgagctcggtgctgggagtccactcatagtgaccgctgttgccaatgttctcggcaatggcatacagaggctggacgttggtgctggggccacggaggagaaccagagagacggagccctcggtggtgggatcccaggtgatggtgtagggcttgccagcagggacctgctcctggagaccaggagccaggatggcgttgccgcttgggccgacagagtagtcgggggtggtgtaggcagtagccatggccacgagggcggagatcagaccggtggagaagaaacgcattgtggtgatgtgttttgaattatcgtgaagagatatagagtcgtaagagggccaggatccgcagggatagaaaaagagcgactggtcttcaaaggagagactggatgtagggatgtcttgaaagaatgactggagggcgcaatgcacgtccgaattggatcaatgagggagaggctgagtaggaaggtgggagcgaggagagaaaagaaagacgaaagaggggggcgcagggaaacggctcatattaacagcacggagttcaggcacaaggtgacaaggtccatctcgcaagctaagccgacacgctactctagtgtctctagcgggagtcctgtatttttgctcgttatttcctgctcaagcctgcggctcatgtttgtagtgggtcggccgcgagattacacgaggaacgagacggtgtctaattgacgggtcacagacacgagcgagcaattggatgtaatggatgtaacgacaacgcgggatcagtccagagagtctgagatagtctgagatccctgcattgttcgtgttaagacaggatactgttggcgacttggaagctggaatgtgattgacagtcctgggcgacaggttcgcgcgcaatgaaggagaccaagggaggggcaaggaggaggagaagctgagaggagaagctgagattcaacgttgacttgctggacgctcactgggccagtccaccggggaaaccattttagtgtgtcgttgggctggagcacgagatgaacccttgaacccaggattggtggagattcagcctagtatcagcagggaaattacacatttagcatgactgtgctattggggctcagcacaagtcgcgagaattgcagaaaagttacttttgcccagcttggctctgaggatctcagagccagcagagacttgaaacgctcgttcgtggattggtaggcggttgtgtctgaattaatgtgttattacagttgggacttgacagctttcactgttgaccagcatcctctatcgaacaaaaacaagccggctgattctcgggcgctgaccgcacgattcacgcaatggagactctctatctggtcctggggaacttggcctgttacaaattgtcattggccagtcgaattatcctcgtatttatagtaagcgagttaagctgaaaggtaccatggtacctggtgatagactggcccgggccctgtaagacacacctacataggaatcgaccatttcttgatgagatcctcgttcgctggctgaaagcctcttttattatttataaagctgcgctacgaagaatgatccgcaaggggcacgtatcaggatagagccgatgaactcgatgaactcgatgaaatcgataaagttgatgaagtcatatcatcccacgttctgaagagatatttagaagcgatccttgagagcatcatctcctgttcctgggcgctaaatggggcagtggcgcactgtcggatcttaggcccaggtccggaaattgtctcagacaattgaaatgaggctaaggctgccgataacctgattggatcgcctttgaattgcggaagagccgattgattatgatgaattgggactggggttattcttagcatatttgagtcggcgggcattcaacctcaaagccaggaagaccagagtaaaggccaaaacaggaccagaaattgccaggaactgccaggaactgccagagcagtaaccaccactgtctgacagattagcctcggctcggcatactgcacaaaaaacgttttgcaaagaaacgatctgtgtaacgctgcaggctctcgcttacaacgttcatcaagtactggcggtctagatgtccgttgggtcgttggtggaatagaggcgtttcgctgcgcctgtcctgcgtgggtgccggctactgcatctagcgatgcgcccagcccattccagcgcttctaagttcgaagaggtttcctaaactggacgcgagaccggtccctgaggctcagatccaaccaatggccagcgtggcggtatgactcagtaatgtgtgcgaagttctgcagttgggggcgtgatgtgagatcagagacgtcggtgtttgcttttacattcagtcctattcgggaaggagggtcacccgccaggctgccacgataatctcgtttccctcccacaacttaagcatcacaacttccacatcaattatcctgaaactggatgatctctctcggcccgtttccggtccctctgtcatttagacgttaatctgactgccgaatgacccgtgccgttggaaatttctcgcaaattgcgaatttccgcctgatcttgatgggatctcgactttcaagctaaattgcgactaaggccaaaaagatcagaaatttaagcctcttgaccgaacggaagttctccgggatacgattctcttggtcgactaggcaaacgctagccttgcgtttagctagttaccactgtaacatcagcatggcttatgactcgatttgagattcttataacaggtaccgcgcactccggagaattgaatggccccataatcgtgggagagacaaagtgggcctccaaagctgtccatgatgccattttgcataaagtttgattgattgtggatcgttcaggctgttgtaaggattcctcgtccccctgaacaggcaagccgagcctgcagacaccaagggcgcaggcagagtgaggtaggtcttgaacacaacttctgttaccgtaccatcgctaaccctgcagcatagataaataatggtagactattttacattttgacgccagtgtgccgttgtctgcacctatggcacagccagtgatctcgcccagggttgtcgggaaattcggcctgcgattccggactgcggatacaacgtacagaaggtaatggagcgctagctttgagccgaaaatcggagatgccgttatggataaggaaagtcgacaaggtcagcctccaggcccaaaacaggctcaccgggttcgaggtaccatgggtccacctcaagactaatggaataggtcacatacacacatgctaactccagtttgtttatgtatacgcttggggaggatgttcgttgctggtatcgctcatatatgtattgcttatatcgtcaaatcgtcctgaaagcctggtatccatcatactatgggcctatacaatacacccgtagtgagccagccactactccagtcatcagtgagcttcgccttttactccacccaggtaatggtctttgtttgaagccactcgtcatagccagcggtgccaccgaagcggccgaatccactgctcttccatccaccgtgaggcagagtcggctcatcgtggaccgtcattgagttgatgtgaacagcactggcgattctagtcagcacattgctctttggagaaaaatgggtaagaacagacgcacccagactcaatctgcttggccaccttagaccctaaacagattgctcgtaacactgccgatgtga

SEQ ID NO: 2922 - DNA, 1488 bp, Emericella nidulans
cgacgacgacgaatccgattctcctccccgcacatctttcagacgtgccgcatcccgttcagaatctcctccgtcagcaggtctaggtctgggtatgggctcagggatgggccgtggtcgcggaagaggcttaggcatgggtcaaaactcccggaataacaatgcgaccaagcagtcctccggaaatggcctcgcggcacactccttcggtgcccgcatgctagccaagatgggttatgttcaaggccagggtcttggatcgagcggccagggtatcgtgaatcccatcgaagctcaggctcgtccgcagggtattggtcttggggcggtccgcgagaagagcaaggcagcgcgaaccgaggagaaacgcgccgccgccttacgaggcgaatccgtcgaagagagctcagatgaggaatttacaagaaagaagaagaggcagcaaagaaaggaaggtgggcgtgcggagggtgaggcgcggcctgttggaagaaagaagcctcagttccgcactgcccgtgaaatcgaggcggatatggcaggtcttgaggtgcccaacgtgctcaagtccctgatcgatgcgactggcagggaacataaggtcttgacctccaccgcaggtctgatgacgccggtcgactttgtgaatactgaacaaagcgaggcttacaagattgcacgccgggctcgccaggatttggaagctttcgcggatgaatggaagggtttgacggagaggaaacaatacatcgaacaagacgaagctcaattagtggatcaactggatacaaatcagcgccaaatcgaccaattatcggcattggtcgctgcctttggagctcttgaagtcatccccgaagaaaacggtgatagcccgcaagcaaaattcgactatgtgactgaccagttggagtcgcttgaaattcagtaccgggccgaaattgtgaatataggctctgggaaacagcgttgcggccatccaccctctattccgagaagccatggaggactgggagccgctcaaagccccgaccttcttggtggctaacctacggcgtctccaacctattctatctcgtaaagccagcgaagggcaactcgtgcagcgctcgtcgacctctccttacgaaactatgatctataccttatggctaccacgcgtacgctccgctttgctcaacgaatgggacgttttcaatccttctccggccaccacgctcatcgtctcatggaaagaactcctgccccccttcgtctacgccaacgtccttgaccagctagtggtccctaagctaacaagcggcctaaactcttggaaaccaaaacggtcatcttcttcatcccactctcaacagaactctcgcgtcccctggtggcttttcacatggctccaatacctcgacgaacgacacacaaacccgaagcaagcaacaggccttctctcggacgcaaagcgcaaattccgcagagttctggacacatgggatc

SEQ ID NO: 2923 - DNA, 2813 bp, Emericella nidulans
tgtatcgatcacccaaccctcacttctctacgcgtggccgggtgtaagcacattctggaatctatatacctgcctaagtgatgcccctgggcatttgaagcgtttctgtctctttctcctaaccgggctatttctgacgacatggaatcttcctcgtaagtacccctcctctccgctgggtagcaagctgagacttgaagatatacgaactctaaacgaccacccaaattgcgatcggcttgcaatgaatgtcatgcggccaaggtacgccctctctatactgttcgccaggcgtatctgaccgagtccaggttcgctgctctggcgaaaagaccggctgccagcgctgctcaaacctccgtctgaaatgcgccttttccatctcgcgcattggcaaggtcccaggaaaacgaagcaaagccaaccgggccactgtgacaggatcaacctcgtcgtctgcgtctctctcgatttcttcttcctctctatcgacaccgatcatgtcgccccctcttccgatgacgtcttactcatatgacagcccgcgggcctatgaagcaagaaatgctatacccattcctgcgtcccatccgtttacccatgagtacgcggccggactttcactggcgaacgagacaagttatgcccagtcctctccaagctatcttacccagtcacgcccggaagaatcgtcgagcctaaacaacctctgttgggcgccggagttggatcagttgggtgggccaggccttttgagccctgaatgggagattgacgcagaagaatcttttcttcaagtgccccctcagccgccgacctctgtacctacctacgtggatgtcacttccgacggtaggaatgcctcagaggcttatgaatccccgactgagagcattccacccagccaatatccactgtaccttcatctccttcaaagcattgaccatagcatgcgtctcgcgaatcagtgcagatctccagggcagcacacttctacacaggatatgatcctggctgcgacacagagataccttacaaccctccttcagactaccgagagccttagctttacacacacctacagcgaggaacaccttcttttctctgtggccctggataagataatatatctgctcaaagtcggctatacagatcttcggcgtcagtggaagtttcgagagtatgtgttaaggcgtcgccgagccagccaaaggctgggtgcggtacggtgcatttgggatggacgttttcgagcaagtgtcttactgtcgcaagctattcgtggaggaggtgaagcgggcaggactctgcctggataggctgatggaggcgatgggatatctggcgatgactggctctagctcatcgtcgcctggtaggcacgaaaggctctgtgaagagatgaagagaagactcgatggattgatggacagtctagagggtgatcagggtgcacagggggttcatttggttggttgactacatcgttcctgacttgatatcagactggcgtacaaatacttacagcttccacatattttacccatccccgtgctcattgcgtattgtgtcgaatagagtacgatgatatctttcacctgccactttcaagatctgtaaggaacgtgaattttgaaccctagcaatgggtagtcccgatattatccggcatatgctctgtttctgtgaaacctaaactgaattatctatattcccaaaagtctcgctgccattctatcttatcagtacgacatgcctcacgctggcagccggtaaagtccttacagcgacgtacagtgttcctgcctttgaagtctacgcaccttgataaaatgaacggcccattatgagcaaagggtttatcttgagcggctacaatagccaaaacgaattctatgcgggttttgatggtactgcttttattcgcagggtatgtgaagagctgccaggtacggttgcataacacctcgccatttccaaaaccatgcgcatactttgcacctagtctaaatggctagggtcatacaagcggccgttggagaaatgagtcagtctggctccgaaatgggcaatagagcatcagtagatgcgcggagactgtaggtataaattctcctgatactggataagtaggtgattacgcgcttagaaacacaagggttcatcctttctactagcaagagaaatatccttcaaatggataaattcggcattctgagcagtttattatacgaccaatgtgagttaaaatctagcccctaggaacatttataattgcatgaagatataacggcgggcagatacaactgcatttagataggacatccggtacctagtagtcttgtgaaaatccccatctccccatatcaaaccaaagtaaatcagtcagaagatagaacaatgctgttgacagattgatctgtctcagtgtgatagctgtgttttacagtactctggttcggtgttacatactgatggctaccagtctttaatgctaaaggcctccgcccccaatcacttagagctccttgctcttgtataaatatgcgtgcagggggccattagactgtatctctaccaactcctattataatcacgtctctctgctcttctatggcaagggagctgcgagaagtcgtaaaatccacgtgtgagacccacgagttggcgcaggctgtaatcaatatgccaccatatcgactgtggaaagggagtattcagactcagtatatcttgtgctaccaactagcttcaaccaacttaataaagacggggtctgaggcgggtaatactacttatcctcctcctagggc

SEQ ID NO: 2924 - DNA, 1435 bp, Emericella nidulans
ccggtgtgtgcgagttatctaaaaagatcattggtgattggcggctaccccggaaacccggaacaggctcaagaatctccatactggtggacatatgcaggaagattcgtcaagggcgctccgtaagcgcgcgaagttcgtgtcgagcacgatcaagcatccggtgttgcgcggaggggtcaaggagagactcgaaggacagcattccacgctctttaacctgatcacacagaacgacagcctgctcagcacaagtatcgcgcaggattcgcgcgaaatcgccgcggcgagtaagcgcgacagctcgagtatgaaaatcattgcgttcttgacgaccttctttctccctgccacatttgttgccgtaaatccaacagcctcccatgggaaaacaatagctgaccagccgctagacattcttctccatgccccttttcgattgggaaaagccaagtatcaaccacgttgcaacgcgccatttctgggtcttctgggcgcttgctggccctcttacactaaccacgatggctgggattgtggcctgggcggtttggcatacgaagaatacaagaaatacggagaaaaaggaaagactgaactttagccaggcgatcgccgacgaggcgatgaatttgaagagggcggctacgatgcggagtatgcaggaagggggtgtgtattgggataagcctgccccagatgcagtctaacgtcggccgggtgtatacttgcatgctgtgtggtttacaaggcttacgagtccatgaccaagatgtagtttttagatatgtccaataatagacgatatacccactcaagctatcttagtccagcgtgatcggatgcatcttcctaaacacattcgtgggatcgtacttcgccttgagcgctttcaaccgcggcaggttctctccgtagatgttgcccaccaccgcgtcgccagctgccagtcagcatcgattggttagcactgtcggtcggtatgttagagacgaagggacagactcacgctctgcataattgatgtactgcggcacaccggccttcccagccgcatcgagattggcgtccgtctctttctcgagcacgtccttccaccgctcctgcacctccctcgcccacgcccggtgctccagatccttagtcgcatccgaccagcgcagcgtgatgataccgttctgcgttgtgccgcgcgatgcaaatgccgtcgctgcccggggcacagagacggtcttggtcatgtcgtagaattcgagtagcagcgcgctcgcggccagatcgggatcggatttgaccttagccgtaaactcttccagcatcgtctttgcaaactgcggcgacagtggcgggttgaagaagacacctttgaaacttttgcggtcgccgtaagtcgccatgggattttgaagctgttcattggctgtacgggaacatg

SEQ ID NO: 2925 - DNA, 1326 bp, Emericella nidulans
gctcgcgcctgaccactacaatgcatccatccaattgttgccgtcgaaggccactgcaagtccgtactcgaggtaagaattgctcgaacgtgagtggttaccgctgaacgggccaggcatcgaatgtactttgttatgtctgctgttggcccgtggagtcaacggccagctcaggtattctcctgccggtgccggcattggtgagtctgcccagtcagttcaaggttaagtgggcttagaacacgtataaagagctattctgatcgtgcactgcagtgccttccacgcgttcatctcaatccatctggtcaaccacctacgcaacggtctatcgatgttcttgagcccattaccgcgcgatcctctgtcagtacccggcataggcatggctacaacaaccacacggcatcctttgaccaagcgcaacctggcaatactggatcgtcttcttcagagtgtaagctcctattgcagctgcatcagagtacaacgaggccctaactgtgaatttttgcagaaacacacttccgagacaatcacctcatgggctgaaaaggtcatatccgaagaacagatgcatctgctttgcacccagccggctacctccctcgacggcatgcacccacccgccggagacgatgccaccgatctcaaagtcgagcgtgacatggccatgttcgttcagtcggcacgcagcctccccactgtggacactaaaaggactgatgtagactcttctaaggttatcgaggtggagacatcacgtccgttcatgtgccttgagagtccgctagagcggtacctaacccccggatctagtgagccgagtcactttagccgttcggctctggcgcacgtggggcttcagtatggggatatggaggggaagaaagagagagctgagatggcgcgcggacatgtggaggtagcgagagacaatgctcttcaggcgcgagaacaagcgggtaaatagatttggagttctggttgagtggcttgtacatcaagacgttgcatgtcagggccgttctgcagaatatacttaggacctgtaacatgccttccagcatcatactggctctgcgcatactgcaaaaatgaaagattcagtagtgattattgcattgattgggtattattagcggagcgcctaacgcttgttttaatcttggcgcggtagacgaatctctcccaaggtgacaaacaacgccgttctctattccaaacctgcatgcaataacttatctgagtagccttggaccaacccttaaatactgacaacacaagtatgcctttaagggttttcgtttttggccaaacccatcg

SEQ ID NO: 2926 - DNA, 2995 bp, Emericella nidulans
gaaaaaaataagagtataaagaagggagagaagggagatgagaatgatgtgttgagtagaaagattaagggaaaaggggtggaaataataagagtatcggtaggtttataaaaggaaagagaaaaggagagaaagagtgatgaagtgataaagttataagaaagattgaggattaaaagtgagctgaagagttagaggtgaagaaaaaaatgaggtgtggaagggccgggttgctagggaccttgaggctgtagcagttagcagaaagaacttggaggtttttacgaaaagtctggaagagacgccgccaacataggttggtaggttggtacgccgttggttataccctaaggcggccaaagtgcatgtccaagttctggccatgaccggagttcaacagggtgtttgaaatcactattgcaggataagacactttaaagttcgggtaacagcaccaatcattcaagacatccctgatgcgcctccaaatcattgattaacaggccttcctaatgagtcctctatgttgtcaaaggcgcatcgaatcgctctacgcaggagtatgatcatatcgactctaaccacctaagattgcggccgcaagctttggtccatggtccattagcttctgttgccttttcccaccatagcttgatatgtgtgaatcgaaggtgagggtctggcttggtttccataagcagcccagtttagatcgagtcgatgggcatagcatcctaggttggacaaatccctcgacccccgtaatgtgcaggcttgaagtaccgggcttcttatttccctctcgagtctgttcttatgctaattcagccctaggtgaataacaacatgtatgctttagcatactcatttttatagtcgtctcatggaaactgcttgcacgacactcctgtcagatgaatatagggttgaactgagccaacctgtcaagtactgtgaaacgaattgcgacttgctgcaatgtccgtatggaaaatgaggcagcagaagacaatcgcggactggttactgaaagtgatatggtcctcttataagggttccagccctttccctagcttcgaacctagtggaacaactgcctcttgggccatgttaaaatggaaaccgttcagaagggcgccagcttttcgtacagagttttattcttgtcttcgtgagacgcgtcttatgctcagcgggttggctgtaatcctctgggacataccgcagcgtcatttctgctgtttacacaagcaagtcataggactccgtaggtggaatccaaacagctaaagaaatacaatttccataaagccatcgactcgagaaaagcagacttgctcgacccattcgcgtgatctttcacgtaaccgggtaaagcaatcatggcttgtgaaaagttcgcgcaatctcgggtacttcccaatattatccacgaaaaggttgggaccaagcttcccctctgatggttaccctggagcttgaacacagccattgacgacctgcgaaggctgctcaacatggccaaacgctcgaacttgccgtcgctggtagcttttcctaggtcatacgggataacacctccgtgggtcttgccactgactcaacaccgaccacaacgtccccaaatctgatatcggtccctatacaaaattccaccacaaatgccaacgagaaacctaaacgatggatcgaaagctggacagcgacgcgatgcgctattcttcgctcgacatagggcttttcgatcctcgcgagagtataggcatcaggattgtttggtttagcttgactggtgagttctcgtgtatctccatcattcgccgcagccatcttcagtggaagtgcacaaatccaacagaccatgtattcctcgtagcgcaggctcgttgtcgtcaataagactatatgctcgtccctgatctcactacgtcgtattcgctcattgtccacacagtcgttttattgtcaatatagaccgttcagagctgggtgtgaaagagcgacagtgagggaaaaataggcttcgaggctgcgcccaatttagctatcgagtctcgttagtcaccaatttgcaccgggctgtccaagtacctctccatattatctcagtacatgcagagtaattagtagagacgccagattaaggtatactaatgcttacgatcggggtgaatcctgaggccgcagtctgcagatctcgccgagagggcagtgtgcccacctgagcagctacgtcgctggccttgatggagctccactactacgtctaattcaaaatacaatccgcatatgcccctgcgatggttccagctgctcaagaaaagtctttgaaatcgtaaggatctaaaataacagctacgctaatggtttgtttcattattttccctatccaatcccaacgccaggcacccgcgcaaattcgaattaaacggtcttgaaagctaaatacggagaatcggaagaatgtcgaagtgaagaagggggtcgaaatggcctcgaatggaggggtatctcaagaaaaaaaaaagaagtcgcttcatccaagtcgcatgcctttataaaactccgccgggaaggttgatctgcgcttgtcgcggctcaaagccagcactgttcggcgctgagcccccgctgggtggatatgcagtggtactttcaggcgcctgttgttgtttccgcagcataaacatcggctttcgcccttccttttctagctgcttaaagagaataagcggccgttcttctagcccgagacaacgttcctgatcgccatacacaatgtaaagagcgtactgcttccaataccggtgatgtaaactttttaagaccgtcgggaggcccctgagcatggacatcaccggaacccaaaggattgaaaattccaccctgcagttcaccccccgtttaactcaaccccgagggaatttcaccccgggttaaaaaagggggtcaacgccagcgggactgaatgggttgctcatagtccggattggca

SEQ ID NO: 2927 - DNA, 1508 bp, Emericella nidulans
gcacctggaatccgcgagataagcgcgcacggtactcgttgtaatcttcatatttataataatcaaaacgcaatgtgttgaaatttgcaatgaaagacgaaagtgctagggtgcagatgggggccgctgatcacaatcagtagactaaactagctgaccggccctgtctgactagcgatgtagcctcgccccaaacctaaactctgaatatgttttggccacagccatcatgttcaaatatcaaaacgctttaagagatgacgtgaatccagccttctatcccgatctaatgcagtcattatcatgagtgtcgtagcagtgtacacctgaccatcatgccccgttctcacttagcaacggcgccggcagagcagggggaggaggaagatgatcatgagcgtagtctggcggaggagcatatggatcgaacgacgttctcatcagcccaacgccctccttcaggtatagcaccaaccgataagccgaattcccgttcagatagtaccgatgcagacgcttactgcgcaggaatccaagccgttcataaagcttcattgcagccgtattcgtgatctcggtttcgagggcgatctatcgaacccgtcattagaatcaatccgtgaatttttgaacaggataaaccgcaattaagccagaaataagcaagacaagcagaatcgatacacacctcgtccgcaccacgcttctccattgcgtcaattgccatcctcacaagtttggtcgcaacccccttcccgcgatattcttcttgcacagccaacatagcgatataaccgcgcatcggtccgtgtctgtgcggctcgagcttcgagaccacgacgccaatcatttgttcctcgccggttgttgagtttgtgtccattgccaggaagcagaggtcgccccattggtaaaggaagtagcggtatacgtagatgctataaggctccgagagatctttggaaattagttggcgcatggcggcgacgtaggcatcttcgtgagcagggttgtagcggatgtagcgaattgaggaaggatcatcgaacggtcggtgtgtcgttgaggccatttttttatgtagagggaggtagtggggatgaagggcgtgtattcgcattcattgcatgagtgcctgagacttgaatactgtcagccgcgtagacctgacgggacatgcagtctcggccctttactaacgctagggccttccccatacagcggccattcccatgtaagatataggttaaaaaccttttgtaaagcggaaactgggtggccttagtagccacatggaattatccatggtggttacttggcatttgtgacaatatgccgtcccatttcccctgacaaccgtgtcagtttttcgttaagaatccttttttctattcctaaaaagagtgggccccttggttcaacgccttttaaatattttttccccccttgggccccgcttattccgttttccccctttccttaaacattgcaatgtcaatttttttggg

SEQ ID NO: 2928 - DNA, 1696 bp, Emericella nidulans
ggcgataatacgactcactatagcggatctcttgaagctactgttcagtagtcttttttgtgttttttgtgttttttcccctgttgactgtcctttgtttactctggaatctggatatatatatttggacaccgaatcgcagcaaccataaaagataccaaggaactgctcccgctttcccgtagtccaggcacaaaatatatagaaggatatatacgtgaaaaaatctatgaaaatatattcaaggaatcatggaatataataatgtagactgaattaatcaataaaatttttttatattgcaccttcgtcagattgttccgtattccctaccctgtacatagagaaccggtgtgctgggaaagtctgggctagaccgagcggaatgcaaggcttgaatccgacgccaagactgaaaatcaaccagcacgcgagcttgcaagcagatcatgctgttgaggcctttcttcaaggttgcttttcaccgcctgctgaatctagtcaaagccatgtgattggtcgggtaagcttgcctgaatccaagttgcaaaattggacctcaacctttgtccacgatccacgcttttcccactccgtctgagacgtggtctgaccttttccgacctcggagcctggaagacggtttggaagccattttgaaaacgaagtggaaagtctcagcagactgtcgaatgtagttttgaaaattaagaactgggtagtaattgtgtagtgaagttctatgtgtattacgagacggacggtgaaagctgcgttgagcacccaaaagaccggcaagctatgacgcatcaccttttaatagaagcttgactggccctaaaagccctcatcagaggcaaaattatgtaatttcgttcacaacagggcccagaaatcggagaagagttttccacacgcggccaaactcaccagagtcggtgaattgaccgtccaattggagagctccgtccgcccgcatcctcaaattttttattctgccattccagcatttctcgctcgtctgagtccccctctcttcttcctatattcctccccgtgctgaagcagcaaacaaaacccccctctctttgtcctccattgtcgctcaaggagagttttggaggctgctgatgctacggtagagtgagtacctaccgaactgtcctcgagaggaccaattttcccctcataacccccaccgcacacgactatcgagaatatgcctgagaccgtcggccacgaggagccggctcttccttcgagccctcaggctggaggagccgttgcctacaacgcgatcagcaaggaattgcaaccgcttcccccaacggagactgccaatggcggcattattcctcctgcatcttcaaggatcgagggtagcacagggcgactgtgtgcgctcgagcttgaggatggtacagtctaccagggctacaactttggtgctgagaagagtgtggcaggagaactggttttccagaccggtatggtgggatacccagagtccatcacggatccctcctaccgcggccagatccttgttatcaccttccctctgtcggcaactatggggtcccctcgcgggagaccatggatgagctgctgaagacattacccgagcaacttgagtcgacccggattaacattgcagttttgtcggtggacatatgccggagagaaccactctcacttc

SEQ ID NO: 2929 - DNA, 1604 bp, Emericella nidulans
  unsure (1)..(1604): unsure at all n locations
ctcgtccgctgaccactctgatgtgccccagtaaaaggcccagcccttttcaatcacgaaattgaacgctctcactgtctcttccattggtgtgagtctatctgggcggtgggcataaatgatgtcaacgtattccagctgcagccgctcgagcgacgctttggtgccctcaatgatatgtttgcgagagagaccatgattgttgataaggatctccccatttgccagtccccaattgagctgacgacgtgttatcgcgttattttacaggccagcttctacggtgacttctgaactcactttggtgctgatgacaatgtcgcttcgtttccacccatatttcttgattgcctgccccatcacaatctcggattggccattagcgtagctttgtgcgtcagtctttgtatgtttacagttcccggccagtggctggcctacctttctgccgtgtcgaaaaagttgataccgcagtcgtacgcctgcttcatgcatttgaaagcaacctctgcatggcataagtcagccttctcccctgcttcactgcgaacaatttaaaacagtaccgttgtcgacgtgtcctccgaagctgtgcgaagaagatgtcagagcccagacctggataagagtgtcgggaaaactcacgttaaccaaccacccagtcccagcgcagagacatgcaatcccgagttgcctacgcggcggtatatcatgtccttgttcttgttgggccacgccatattgatcgggaattaagagcacaacggttggaaaataatgagggtttaatgcggttttacgtgggcacacaccttcatttaaaagggccgtccctcacttcaatncnncttggcaattgacgagcctcggcgaaatactcggagggtcgaaacggtctccacgaggctgtggccctggtcgctctggagttgttctacggagccgcgactgcgcccaaccaccgcgggagacagtcgcaaggtgaggcagcgacctccatctacaccacccagaccagcatcgatatatacaaaaagtggaccctgtgatggcgtgttgagtggggtgaaagacgccatcgctgcttcagttcaagatgaaccgaacgcccaatcaccgtcgagtcatgcactgatcgctgccggcgggacgtttgagggggcgagtgtctccaacctccgcaaactctccaattcaaccgtcttgacgagttgcttttttcggttccggcaaagcgatgaatccgtccaggggcgcggttacaaaaaaggcttgcgatggctgcaaagttcggaaagttcgctgtggtggagggaataccgtgtacgccctgcctgaatgcgcgcatccagtgcacctacaagcgcatgcaccagacccgaggtcctcagagactgcgcgccgcgacgaggtatcttatagagcaaagccaacagacggagacagatcaaccctgctcaccgagcaaccacgatgagactcagagaggtaatcttctacggccagctgtattctgacgcttactaaggcagatgcagtgtaccgctgagtgcgatggngccgtgcttatattgacatgtccgatgtacccgttgggccgatgc

SEQ ID NO: 2930 - DNA, 6917 bp, Emericella nidulans
gaccagcgaggaagagaagggcgaatcgaacgtcgcggaaaaggttcctgtatagtggctttgttcagccatcacagatggacaaagggactgagaggactaggtaccattccacaaaagcggatttgggaattggcgcgcgctcttttattaagagcgctgctgggatgcccgttgctagggttatcagccccagagctctgaatgtccatgcgaggctggtgccttggatgagagcgtccacaatgaaactgatgactgcgccgccgagcccgccggccgcgtagacgatgccgttggcgattccgcgcttagctctgaagtactgcgctggtgtgactgagacgacctatatgaaagcgtatggtggtcagaaccacaggaaatcccctcgtttcagtcgagagtgcctcaccataaaacatagactacaataatcagcaaaccagtactactctcttaatggctatgagattcatacctgatcccaactcccataaccgcccccgcggtaacaaacaatcctccaatactcctgagcgcgaacccgctcagaatctccccaacaccaaggaacacaatcccgagcacgccgcagacccgcgttccaaacttgcgaatcagcgtcgcattcaagattcccaggaacgagatgcaagccacagcgaacgagccgacaaatgcgagagttgacgcagacgagactccgtcgttcacgagtgctgcttgcagaatgccccaactgtaggatgtcccggtgaaccaccatgtcaacactgcgcagccggatactgccacccatccatagccgccgtctgggagctgcgagtcaacttcggcagatgcttgcatcatgcttgtatcgtgggcggagagcggggaagggtctgctcgatgcaggcgttctccagtgccagtcgtcgaggacaactccacagatgtggtcgaggactggacgggtatcgccatgattgtgatgttctgcccgtagcaggctgagggaatgatgttgatgagtatgagaagcagtgaggtgggagtgttgaacctcaccagcctttatcgttccatttccgggtgtggggctcgtccgtcacagggcgtgttgcttagtgagaaagttgatctgattcttttctcagtttccggtaataacaagatgtggatacatatagaagatgtggtggacctttaggcttaaacaagttaagtcttgacaagagtgtcacgctagctgcttttcgttgtcaattagtatatttactctccagggtcgtagccctaacaaggctcagatctactgtatgctcctacagtcaaccgaccacgtataatcaatagtccagagacaacagcgcaaatttgatactacacgaggcgcgggcagcttatcgtccagccttgggattgtttccgtataagactcatactttcatgagataggcttagctagggactctcgcctgaagcatcactgcaacgagcttcagctttatagctatttacttatttccccgtagttccgatgatatatggcctttacttaccgtaatcctggtggagatgacccctggattccgctagaataggcaaagccgaggacactagaggcaacgatttcagaggccaattctggatgctgagtgctttggcatgagctgtcgagcgtccagacatctagcccgcgacatggtccgtatcgtgtatgtttgccagaatttaggttttgcatacggcagtcccggtggtgtctggattttggagtcaaaggcgatcggattctttagtgattcacaaactctttccttcctttctttttttcagattcatatcgacggcttctgctgagttgagctgtacttttcaattgaacgcacaggagcagatcagctttctcgtcgtcctgcgacaccgctgcgaggcattacgactgacggccatttcaatgaaactcacacattctgcaacgggcattcgcggtttccttccttccacaaagatcactattgttatcttcaatcaagatgcggccataagtggcaatcactcgtctttgtagcctggctcgtcagcaaagaaagggttcgtgctctggaccttgacatcgaaaacgaaagtaatgtcatcgccatcatagcaacatgcacaactgaatgatactggttgaaactagcgtcgataaaaaatgccgctagtacagtagcatatgaaatgatgagccaataccacggcaacgaaacaggacagattccaggaaaggttcccgagtcgtggtgggaaggtgcagcgatgttcatgacgctgatccaatactggtactggactggaggtaccgtctatagcgacgtcacgagagaaggcatgctctggcaaaaaggcagagatgatttttttttccccagctacttctttggcaataacgaccagatattttggggccagctgctatgacagctgcagagctgaactttgctgagaaggaagaccagcctttgtggctttcacttgcccagggtgtctttgacgcgcaggtttcgaggtgggatgagactcgctgcggtggtgggatgcggtggcagatttggccgttccagggtgggtatatcacgaaaaatgccatctcgaatggcggattgttccagctcgccgcgagactgggccgctatactgaaaatgaaacgtacattcggtgggcggagaagatatgggactggagtgccacgacgcccctgctcaagtcggataactggactattgctgacacgacaagtatggaaaatgattgtcaggaccatggcgaccagcagtggacatataattatggcacttatagcgctggggctgcgtacatgtacaacctcgtaagtgccttcatatccaggtgagcgaaacgactgacattgtggaagaccaatggtgcccagaaatggagagctgcaatcgacggcttactcgcaacaacatgcaacaacatggagaacatttatcgccgaagatgccatgtctgaggtctggtgcgagcaaaccatgtcctgtgaccgcaacagagacatgttcaagggcttcctttcatcctggctgacatttactgccaccattgccccatacaccgctagtgacatcatccccaaaatccatcgatccgccattggagcagctagacaatgcctaggcgggcgaagctgtggacgtcaatggaacgagggcgactgggacggtagcgcaacgatggaatccgacacgagcgccctaagtgtctattcctcatctatggtggccttttaaggacggagcgcaggccttgacccacgcaacggacgctaccagtagaagctactcggactctggcagaaggaatggtaagataccgttcactaagcgtcctgtcgcggctcgagatagactaagcgcaacgtttgcgacaattctattccttgctgcgtggtttagagggcttggctgggtgctcgatgggaatgagcaggtagagtagttgtaatcgagtttcctgttctatggtctaagcagcgttcattttcacgtcttttcgtctgctttgcctgttcgtttggcgtttgactgttgagcatggtgttcgttagctctatccagagttggtgaatttctggcgcattccggtacattcgaggatttccctgcgagatctatcaatatctgatagacggaataatgtaacgaagctgagttgatgtcaatggtttctggtcagtcggtctgggattgttgtaattgtaaagaatagtgtcggcggtgaaaagcaaacgagcgcgtcttcatcggctcgggtccgttccgcgctgagattcctcaacactgacactaacagtggcactgacactgtcgggctcagtcacagtggtgacagcaacagcgagctgcgaggccattatccctctcagtcagcccattcaatttctcaccagcccttcctcttcgcagtgttactccagtgtttctccggtgttgcctcccctcaccacttttcctctctcctccgcacctcccagctccaacaccagaactgtttcacgaccttccacgatttgattatgttcctaaattcttgaatcaggcgaagcgattaactgctagacatacaaccctaggctttcgacatggttttcctccgcctcaccgtcaaggtctaccctcgagagcaaacccagccctccaactccttctctttccgctcgttgttgggtgatcgtgaacgcgacgatgacagtcgcaattcttccagcacggcgactgcgaagccggctagctttctgattgtgttggagaatcccgaagacgttacgctgggcggactggcaggcatgatcagagcgaaatggaggaaattgaggcctggtgctgagtgagtgttactcttaattgcacaatttcgcttgtcctggtgattattgcagtcgctaattggttgctcgtaccagacctctctcgatcaagaaactgctagacgatgaccatgaagctgacgaccttgataccgatatgactgtcgccgatgtgtttgttgataaggggaaagcgcgctctgacggacatgaccaacggaggactgttcgcgtcattcagaagccggccggaggcggagagtcgcctgtgcgattcccctcggttgctcaagactgggatgcggcggccgagcactacgaaattctgcgtcagaagaaacaaaagcaggaagccgaatctgccgtcaaaaaacttggagctattacggaagagtccggccaaggctttggatcagcgtcgccctttggagcaggtgattgggctgattatacaccaaatcgggtccatcgcagagatattcccgtctcctcagtggaaaaggatgtcgagatccccggctcgccattacagtcatcccagccgatagccaagtcgctaactcgaggaatgtctcaagatctcaatggtgaggggttgagtgcggcgcaaggccaccgtgcgggaagtgaagagctcggggattcccctctatctcctcgcgcgacaacgccaaggaagcggtctacccccagacgtgcctcagtacatagccaggcgtctgctgatcgatctgatgccggggattctgtcgccgttgattcacccgccctccaattaacccgtgaacatgcccactcggtgtcaccgcagaaaagacctgctctagaggcgaccaaacctgatgctgttactttagctgcagaaacagaaagtgaatctgattctgaatccgatagcgatgacggttcggagactagtgatagtgacagggcaagtcaggacaaagatggcgatactgcaatgcgcgaagctactccaaaacagaaaccagagtctcccataactgccaagaagcctgatgaggcaaccacacgtgcgcctgctgtaaccggaagtcaacctcgtaaacggaagaacagtgccgatcagttgtcccctaagaaagagccacgcttggataggactactactactcctccagagaatagtgaaaggcgaggcagcgaacactctgcagacagaccgcagttcaggccgtcgggaagactacttgtgaggaacaacagtttttactggaatcggcgcgccgcctcacctttacagatcgaacatcagagcctcctagccaggggctgggactcggcatcacgaagagcccgagcaagaagccatctgccgctaccaacctctctcaggagtcgacacagtctactggaggtgtcccacaaagcacgccgataccaacgagcagcgcacccaccgtcagaaggggatctgtctcgcgaaacgtctcaacaccgacagatctccatacaccggttgataaggcgaagaacctacattcagcactacgaaaggactccctcacaagctccgcccgccgctctgtttctttcgctgaaagcgatgattttcttgtcgcggattcgcaacccgcaccaacatccacccctatcataaccacaaagccctctaccagcacaccggcgtctcagactcctagctcggagaagagacgctctagcgtctcaatggtctttcctcctggagtttctatggaacgcattgctcaatatgaacgggaagccgaggagaaagtcgagcgtcagaagaaggaaagagcggtttttgaagaaaagatcaaggccgctgagaaggacaatgcaaactcggagtacttaaagaaacttaaggccgcgtttaatacctggcagtctcttgtcagcagccgtagcagccaaaggaagggcatcgcagagcgactcgagagactacaagccgagctgaagaagatggaagaatcttcaaccaatgtgtcatctcagggtaaaggaaagaaatctcaggagtcgaagcctgccagatctcagcaggcctcaaagaatgatactccagcgtcaaagacattgacttcgacgcccgtcaccaacggggacagtaaaatgtcagtaacacatagctccggttggaacgcgattaacaataaatctccttcaagcgatcagaagtccgttacccagaccattaacggaaccaatcccaagtctgctactagggctgcgcccaaggaacccgtcgcgcgcaccgaggcaaccagaacgctgtcaaaagcatctcagcctccttcgacacaatcacgaaactccaccgcctcagaagagctcgacttgcctgcatgaaagttcaagcccgcgctactgccaatgctacaaaaaaggcggccccccaaagccagttgaggtatcaacctcgtctgagagacgtcgcagaagaagctctctgaagatcttcgctttgatctgagtctgatctgcttgaggcgaagcagacaatatcccgttctctgtaacactactgctagcgtacaaaccaatcacaccctcgccacgacttaa

SEQ ID NO: 2931 - DNA, 645 bp, Emericella nidulans
acccagaaccaagagatagcatttggggaggagtcggcatagagatatctggggaaatgtaataggcattgatacgtgacgtcctcttatcagacaaaggattccgaatgatagatatagacaagccttataaagcaacaggaactgccgatttcgtgggcaaacctatctccacaactatccttatgtccccattttccaaaattcctagccatcatgtcaaaatcagcgcggaaattgagcgtggactcgctgaggaggctggagaccccacagaccggaacggtgcacaatgcatacagtagcgtgctgcctagaaaccggggtcttgctacgatcctattcatgtcactctccatcgccgctgtcccatacggaaccggcagtgccctgatgaacgcggtctatggagggggtcaattgtccatgtttgtcgggctgctcgttgtctgtattctggatggctgtatcgccgtctccttggccgagctcgcatcacggtacccatcgtcttcgggcgtatatcactggtcttattgcctggcaaagggccgcaagagatccgcttcctctccttcatcacgggttggatatggctgatcggacactggactattaccttgtcggtcaacttcgcgtcgcatc

SEQ ID NO: 2932 - DNA, 1772 bp, Emericella nidulans
ttgagaaaagagaaaggataaaaaaaaataaagatagaaatgacaaaatacaatgacgtaagacagaaaaaaataaagaaagttgtataaagcaaaattataagatcacgagtatattaatgaattaacatgaatgatgaatacaattaatagaagaacaagaaatagtaatgatgtctgacaaagaaagaaattaaacgagaacaataagaaaatgaaacacagaaaagatagatagataagaagaagggtctgaaaatatattttaaggaaaatgaaaagataaagtgataatagatataaaaaaataaatagaagagagtggaaagtcaataaaataaataggtgtaatattgccacagcaacagtcacattgtaaaaatatgagctggtcaaaataacatctacgtaggactacaatgctttgttggattctatcgagtgtaagcagaaggcttacatggaactcgctacagtatatgcttagaagaagctttagaacctaaatgctagggcttggttgagataccgcaactaattttcaggaaaggcccgaagttcctccatgcggagccagcaattggcatcatccatgatccgagggtgggcagtgggcactcactactgggtttaattgggactgggccactgcgagtcttgggactggcgcagacttgcagtggtgccgcacatcaagcgctcccctcagcacccgaggccgatctcccttcatccctcttgttgagcagctgacatttctttccaacactgactacgatcacgatcgactggccttattctatttgcttgcgttctactgttgccatttgtcgctgctatagcctccatgctgagcccagacttctgactccgtcgtcaaacaaccgcctgcggtccgacgtttcacgcgatacttgaaccatcgtagctatgacctagccgcactactggacctgccttggacgtcgaactctcacctgcgaacttggaataacttgtgcacggcccgtcctctactgctgccagactcaatccggcctcggtagtctactcagccttagaagcctagcagacctcaaccacctacgttgagaatcaatcaaggctgtgattcaactgacgcgcctccaaatggtgacgctcaattggagtgtaatgccctttgccaacgtttccctcgcgtctgaacagtcagcgataactttaaattggtgctgctagcccacgatgcgcctcgcataatcctacctgctccttggttgtgagtaccttcagccttcgttttccccctcgttgctacctgttaagagcgcatttgtttcactcggcctctatcacactactgaccggcgcgtatgcaattgctggcatcgtttcgctgtagtgcttgagatctcttgagcgttacaccagccagcccgcacttatccgcctccatcaacccacctcagatctttgctatagccgccgctgacatcgcgccccaacggccttaggcactctatacgttgtatttctatcaaatcttcgcatctttgagatccgacacatcgaccttttgagtcgactggagacacatatatcacgtttgcctcgaaataaccgacagctccatcgtccttgtcgattattgggctcttagcacctgccccagaaacaagaaactctgccagtccggcggccccttgttttgtctctacctcgcaaaatctagacaaggagaagctccagctttaaggcgcaaaacaagtatcttccagtttcagattgaa

SEQ ID NO: 2933 - DNA, 1979 bp, Emericella nidulans
cgggtgcaatgcaggggtacgtcgattgaagctttggcgcgtgttgtttacctgatctgcttcccttttgggaccacttcttggcctcgctccctgttgcccttatctcttttgcgtttgcataatctcccatgttctctttcttattaattatgcatttacttatttcgacctacaaaagccctcgaccctgttgtcgaagaatctccccttaaacaaccccaccaaacgggcgatcgccacgccaaagcggctactccagatcccgatgtcgcggacattacgggaaccacttttgtacaagagccggagacagactttgaagcgggaattctgcttgacgcgcttcgtgacattgagcaaaacggaaacgatgtgctggagctccttattcctagcaagggcagattggtggacgccgtgaaaaaagccaaccagctcagtgaccccaggaacactcaaagcaagcgcctgctccggttactcaagattctcgatgaagatatcaaaatctttggtagccatacctatatcgacgttgatggcgtcgttcgtaaggtctcttctgcacttgccgataggcgtgaggacttggaggactggagtccggccccgattttgcaaatggcaaactgtgcacggttcgcatgcgagatacttctagcaggcacaaatccaaactcacagaggcaagcaatcaggaacatccaaaaactttttcctcggccgtttatgacgggcctagctggcgctggagaggagaaagaggccggtgagagtgttctagaaaaagagactttgaatcttgctttagagattcgcacccagtctttgatctcacaattggaggataaccaggatagccccggttccgattccaagaatttcgtcagactctgctttttcacggattcgtcgcgaaaatcgccattgcgcggtttcaatctgccaaacttaagcaatgctgatggcactcttcccgcacagtataccgatgacgttcagaaccgctacgaggaaatcctcctgggcgaaatggatggagtattcgatgtaaatgagttgagaagctcttataattggcagcgattcgttctgcacgcagcgcattgggtccgcaaaaggacagatgaactacatgtcgaggtgaagaagcggataagcacacaggctgttcgctacacgttatctaacgccaaggcctccagcttcggcagcacattgggagcttcagaggcagaacccagtggtgagcttcaagaagctggaggagataccacgagacaggatgctgttgcagatggattccctgcaggactagagccgcagacgcaaccgcaaccacagcaagctgagtctcgggatgtccatagggatacagagcggaggcgctcttcgagaccgtacgttaccctccaaagctgagtccattgtttctaacaatcttgcagttcattcttgaattctgcttcaatccaacgcattacacaaagacaagagcgcctccgatctggaaccgaaacatctgagcgtcgccaacaacctgatactgtccagccaggaaccccgacagggaacgaactgcctgctgttgatcgtcagataccctcaaaccgctcgtctcaacatactttgtttcatgagcgcgtcccgtctcttgatgatggtcccacgctggttactgaagaacctgagctaaattttggcgaagattcggagtttgccaacgtagacgagagcacccatatagagagatctcgcagcccttctgttgcccctagaaggacagcgccttggcgaccggagcctacttccagcgctcagacgacagacagcttgatgccaactcagagtcagatggtatgggaggctgtcaaggatggtttatctagacacgccggtttcgagcccacgccgcagtgttacaaaacgattcataaccgccaaccagatgccgcgcgggtatgccgatcctacat

SEQ ID NO: 2934 - DNA, 820 bp, Emericella nidulans
tgacttgtatatcgcagggccatttgcccgacatgtactccgatggattttttactcaagtttgtgtccatgctaccttcgaattggccctggctcacatcatttagtaccttcatagtcgcgagataatctgcgacatgcatattgcagagcattaaaggttggttggtctacaaacttgatgacagctgtcagggactgagagttccctagcgtacgtcggcgcgacgtatgaaagccctcataaggcctggcgacatagatacactgttcagtcatatgaacgcgaagccagccgctctggctcttactaaccccgttgtgcccaatgctcattctcaaggtaggctgggctcgcgggtaagtgacttttttctattttgttaatgctatctttaggcaaaattccggaatcgcaacctcaacttcacgcagccttgttatcagtactcgacttctttcgtcaagctacaacactgttagtcatgctatgcgatgcagcagaatctcgctgacaatatcagttttgctgacgatacccgacatcgcattctggactatatccttcgtcttccactcgataattccttgactcaagatttcacaatttgctctgcaatagaaagaacaataactgccgtgctcgatgctactaccgatgagcatgctgatgaactggtaactcactcctagactctcgagggtttatttcactaacagcggacaggcgactaatatttgcaccgctgttcattccacactgaaagacgcagagctgcagagtcgacttttggagcacattgcgccggtgaatgactgg

SEQ ID NO: 2935 - DNA, 1358 bp, Emericella nidulans
cttcttcaagaccggcaatctttgcgtttccgatatctgaataacgttagacttagtcagacaaggtgtacggttaacccacttgaacggtctaggaaagacagcagataaagaagggcgaggaatgggacgagcctgcggtcaaacttctttactacctgctgctcctctacagctgtatacttcggcaggcggggacgatagaatttcggctgcgcctcgtcgttgtaattgtactcgtcggcatcatcttcagaaaagcgatctggaacggtgccaaaatcagtctgaagcttcaacgaactatttcggccacgccttgactgctcatccaccgatccatcagacaccggggtatattggtcattcgatgttgatgagatggaagctggcccagccaaggatcgaaaagacgccatttagagaagagttggtatgcgtacgcaagctaaaggcccatgactcattgcacgagataactagagaaagaaaaaacaggaaggaaagaaataggacagacagagcacaagagcagacgaagagtgataaaaaaaaaagaaatagggcgcctcaagcttcggggaggcggcacatgaatcgactccctggccacgagtgcgattctcgtgatagcaccttgcgccaactttgagccaatcatgttctgatctacacattagtaattcaccaattaactactcccttaacgtaaaagcaacaacaggagcagatatccgcagtactagggtagaaaagagcgaagaataaaatcaaaatacacgagatcctggtcctcatgcgctatagcgacgattagcaacgggttcgttgtgagtcgtcagaaacgccctctcctcagcgaccaacctggggacggtaggagtcaataatgcgacgagctcgcttattgcctttgctctcagtatgcttctttcccctgttattctcaactcgatgacctttagcccaagtgtctgggccctcgtcaaaatggcgcttgcgaccccatagaagctgggctgtcttgtcccttgcaatggcgaaggtctgttctaggtcaggaacatagaagctgtcagacatgccgttggcatgaaggtagcgaagagtgttctcagccgagtcgcggaggaagcggacggcgctgagactgtctaccccttctctcgcttttgtgttaaagtagtcctccttggcctgatggtagacatctaaaagacgcgccacgcggacatcaggcttgcacgcttgtcctatcgtgctgaggggttgtggtaggtatggggttgtcctgatcgtaagcaggcgaatcggggaagtggcgtgagtactcgccatcgatgtagaaggggcaacag

SEQ ID NO: 2936 - DNA, 1429 bp, Emericella nidulans
aagagcatgaaaccaacatatcagtcagcccgataacggcaaagaaagctatagagtaaagatatttgtagggacctaccggcgtctaagcctgcaataatgcagtacgtataaacttgagcccaattgtcactagaacatcgcaggcacaagcagagccgacatacaattagcatggaacaactcatcaccccttccccattcctacagccacaaatgccaccaggccctgcaacgcctacaggcactgctcgatcataatcatgagagatctttcgaggcactcaagtcgacatcgagcatgatgctgtcgtcagattcgagacccggtacaacgagctcgggagccatgaaacggaacagccgttatttgacgcgcaactgggtgagtcaccgggtaaagaggtgcttttgtatcacttgaagggcctgcatcagacgcttgagagaaggtatgtccagtctgaaccctgtcggcgttgctgatagacggagtaggcattgatcttgctctgtatgagatgaggagcggctttgagtatcgtgcttgttcggtgctggctgagtgtttgcgtgtcattgttgatcagaccagtcggtgcttggttgtggatgagattcttgaggtgatgggcttagagggcaaattaccctcgcagccacggtgaggggctaagccaattacatcagagggattcagaataataggagcggtgtatgatcctatgctaatttgctatggctctccgagttaaagatacctgtacctggcgagatttggtacgagctgttatgctgtccaggccgtgaccttccccagacaagcatgtctcaatagccgtgatagaaacctagatattgacagatattcctagcctgaggtcttgaagaaaaattctagtcaacgacatttgaaacctaagcattgaggttgtctgccgcattccctgctgcaatttaattgcctggattctaccaccccagctctgaagagtttactataatcctacgtgccaaataggtatttggaaggttgatcgttccaagcccataaagcccgaaggattgaaaccctcactttctgaagtattaataggtattattccctggaaaacattaccaaacccggcctatttctttccatttttgggggcccttaaaaaccgggctttgacccaaacctttttgatttttcccgaagccttggagataatcaaaatcactttaaaggggaggccttttgtgagggccccccgaatttaaccaacaccctttcggatatcacttttattttttccctaatgccccttcctcacttagtgtttttgggacttattttcctctaagtgaaagggtcttctcttttttccttctttttgagggggtttttgttttatttccaaattataaaatttccctttcttttgta

SEQ ID NO: 2937 - DNA, 761 bp, Emericella nidulans
tccctatgggtggagaaaaggtgggaggccttacctctgatggccgcctaatcgccaatgttttttggatcgctgtctgtcactcagatggttcctgtaagcgccgactggagaccactgtacagtagcttgcttcgaattgcggcgccgcatcacatcttaacacgacggccgacgaaactggaagctataaaatggctggcacacccctcctagcagcgttattctcggcgcctgtttcccagtctcatcttaccaccttgttattacgttcttcgcctacattcgtatcaaaatactgtgaagcagtgcacaatctctccgtttaaaccaaacccgtccccgcatctggatcttataggtacaacccttccagcataagtacaagacatcagtcttgttcaaaattctggcaataaagccttccatttgctgcggccgcctgtcactgacccattcaacaggatatagggtatatgtgctttgagcgcctatagtacaccaccatgtcgcagcatcagattcactatcctcccccaccgactcagggagcttcgtactctcgtatgccagcgtaccacacatagataatcttagggctaattatcccgcagaacctcaaaacgctccatgtatgccattagaaaccagactttgtacatgacccagtctcatcgtcccgtctagctttcccaccgcctcctcaaccctcccctggctttcctcatgcttcttccggttatccgcaaccttccccgggt

SEQ ID NO: 2938 - DNA, 996 bp, Emericella nidulans
ccctttttctctcgaagcatccacgtccgaagtcgcaaccgcaacgagagcggcctcgccatcattcccgtggaccggtttgagcctatcacggatcccaacactgtttggaaatctccgcgctctggcctggtctatccgcagcgttgggaactaggaatcgaagggcgagggttgctggagatcagcagtgtgttgggtgaccaagaaatggtggatccgggcagcggcgcggttacgtaccttggatttgtgactgtcaagggcgtcattgatggcaaaaatgttactggatatgggagtgcagaggtgaagtttgttcagcggctgccctagatgcttgggtctatcgacgcaaaacctgtccgtgccgtcacctcttatgttttcaagttattgttagaattgcagagatcaattgcagcgtcgtgctttcaagcaccggctgttttaggaagtttatagacaaacatatcttgttcctgaacttcgatgaattcttcttttcttcgcgcaacatacatccccggcctggtttcttactcccgacccaagaaatgcagacaaaataatgctcaccaagtcgaatatcgctgcgactgtccgcaataccgtgcttgaagtgacgagagaagatcgacttttacctaatatactattcgctgggactgcatagaaccgcgggtcctgccccagtctaacttagatatgcctcacgttagccagtatcgccctgacctatgtctctgaagtatcctgcacttgcggacttcggcggagtccaccgtttacgaggcaggaggttgaatctggttgccatggacgcagtgaccagtatatggtaccctggttgctgggcagacataacaatcaccgactggaggaagaagcagtggtgtggccgaagaaagtaccaccgatgtttacactagagctaccggtatacattcatttttcactgggttatcggtatgaataccgtgctgttgttgttgt

SEQ ID NO: 2939 - DNA, 2116 bp, Emericella nidulans
ttatattaagcatgagtatagcaacagaactagatacaaaccaacaaaatcatcctacataaactggtcattatcaatgactgggccttaaaagggtgtagcgccatctggaagcgagcaaaagtatatagtagtattatactacttggccatgcaccaatcaaagctcacagaaatcagatataaaggccctgagcaatgaagtggggaaaagccctacaaagcatgccacatcaacagcaactggtggttacctggtttttgcacctaatctatatataagcttatagtttatttgtcgagtcctcagcagtccttgtatacaataataaggtgattagagggtgaaagactccccgcaccaccctcctatagaataatagtcataatataaaggcactgctggaggcatttgagtatattagcagcctagttatctggcacctgcttagactttatcttttcttcaatttatctctctctatgcatgaaagaacattattaaatctgatatggtccttcaacaactggaagagtacaagccactatcaagaacagacagaatttctcaattgattgtctggcacattcagcattaatttaatatagagcacggccagattcaacctaatgttcttattgagatctttcgattgttcataaccaagaattggatatttgaacaaataaaatctgcatacaagcaaggattgtcggggcttaccctttaattaacataagaaagaacctctagagacctgatatttatacttattattactacagtatttaccagtagaaaggtctgctgcacaggcagcaaatcttcaagaatctgaagaacaaggaagtactctatatcaagtacaagtatagacaagcacccggagcttggaccatcctggtatttagaggtggtattcttctagataatatagagattgacaagccttaccaggacatctcaaagcaggctatgcagaagacttactacagtcatccagaacaaagaagaagtttacacctctttatctgcccttaactttagcaatctgagcaacccaaagctcttcagtaattttcagcagctattgttcagtacacaagtttattttaaatcctccttcaacaaaggcctatgggccccagattatcggggcttgtatgccagatcttgcactttctgagaagagttagcacggctgagcaagctgcataatcttgtatctaattctctaagatatttaagtaaagggaataataattagggcacaactgtgttacagcaagcttctctgctccacagctctattattcagtgcagttattatcaacaattcacagatatcctcgcaattttactcctgattagaagggctaggcatgagaataagtattagtctataaaggatgattttattaatcaagcaattactgttctttcacagaatgatccacgcagaagcatgtttgaggctctagaccatctggaaatagacattgatggccatctatatattacttttaatacttactgttggtccctgtagatgtcccagatgtcaaagaccaggctagacaagatcagagccatctactcctataatcaagccagcttccccagagccgacgcaggagagttctatattacattcaagaggctgacaagggagcagatgctgaatattcttcagagaattgacaaggaactctacctatacagtcacaagacattttctctatagcacacagtaatcagaagcctctggagcgaaagcaaattccttaaaatatcatatcttaccaacatgctatgcagacgtttgaaccagcttgaaaataactttgactatgcttaaaacaaataattaaaccttgatgcttcactgactttctatctccttggtcaggcctataaagcactgggttacttgcacagcgcactgttcttgttcaagatattaatatacttgtaagatcaagttcttgctgctagcaccctggatacagctaaagtagctgcattacaaaagtatatattattggctttgagactgggggagccaaaccgagtaatgcatggcagggaatctatagagtgaatgcactctgtagt

SEQ ID NO: 2940 - DNA, 1371 bp, Emericella nidulans
  unsure (1)..(1371): unsure at all n locations
cgagggtctacccgcggtgcaatcgtagtgcttggatcggcggccccgcacgtcgccatgcccggagtagcgccgtatacggctgccaaacacgcttgtcgggatgattaagactgccggtaagcgactcgggcagcagttgacatttcgccagcgaaatattccaatcgctgatggatggacgcatggcgatcgataacatcccgcatggcatacgcgtcaacgtcgtctgtcccttgtttgtgaatacaccgggggtccaagccgcttttgaggatgacccagagctggaagaagtgatcagtaaaatgcacccgctgggccgtatcgcgaatgcggaagaggtcgcggatgcggttagtttcttgtgtagtgataggtctagctatatgactggatgtgctcttcttattgacggcgggtctacgctcacttgtcttgttttacggagggttcgataacgtctgttgctttcgtccgaggaaattcgttacattctggagcccgctgaaagtgacctggcggtgacacgattgtacgcatgaacatctctggacatacgtggatactggaggatactgaggatcagctgtaatatagtcatcagactgcagtgccaccgtcaacgcctacctagcaataaccggcataagctgctacatcaatgtcctggaagtcacagatacgaggcccccaataatagtactttttgtaccaaacttcctcatacccgtcatcatctggttctttgataatctgtacgaaaacgaatacttcgattatgggttccaacctaaccttgaccccggtgtgcacgagccaagccaaagagaacagaaagaataatactcacctgcccgattccctcattcttggggtgttgctctctccaatggacttccagtagaaaggcttcaacgaaggctacctagcccacaagacaccccttgaaaagcaggagtaaatcagagcaagggcatcaatccagcgttaaaggccaaggcggatgaggcaaccaaangnctannagggctatgggctaagctgggaatggaacctaccgtttgattgaaataaatgagcttgggagcgtactcgtttgtatctaaaccaatcgtgactctttactggacatttacagctgacagccttacatgagctgcccgtggatcgtttcaacacagcctgctgacgccgatctcttgtcattttaaccggcggaccactggccaatcgcatgggaatcgtcgattttcgtatcaatggttttagacaaccatcttgcgtgtttccactggtcgcctaactatagaattggttgccttgcttaacgaccagcacgcatncacctgtctcgcatggataaaaata

SEQ ID NO: 2941 - DNA, 1090 bp, Emericella nidulans
cctccaaactttggtcgacaatcccccatgctcatctctcgacgaagctgcttcaccgctttgatgtgtgtctttactacgtctcgagagcatgaaactgtttgtgacttttgaaagttttgcggcacacaatgcactcaatatgctccgtctcaacttcttcactatctgcctcctcttcttcaggaccttcctcggatcttgcccaatcttgtagaacatgctctcgtaacgtagcctgatttgctgctcgtgattttgctgcctgagaagcagcagattggcggagagcttcgcgtttttgagacaggctatccttataaatcttgtagcgcgggtctcgcttcttggcgaaagccacaagggatctcacggcctcattaaactcgcgaatagcggcttctcgcaagcgtttgttttctttttccatcaaacgacggactcggcggtctggagcctcggagtaacgatagacgtccttccatgcaaaggactttctagttgagaagctgccccatacagcgtaaaaatcgcgcacaacttgagacccgtcatgacgggtcccaaacgatggatagtcaatactgtctacaccttcccagcggcatgccatctcctcctcctgcgcaagctgtgcgaacgtctcgcggaggccaccataaaatccacagggcgcatcagtaaagtccattcgaggactgaacttggaaaacaaattcagaatatcggcagagctcgtcatgcgggcgttatgcgagtagtcagccgcctcgcccccagcgtcaccacctagaaacgcatcacggtgcgagtcataccacgaccgctcgtgggggtctgaaagcacctcgtaggcgatttggatttccgcgaaaaggtttgtcgccgcttcaacgtttccaaaatttctgtcaggatgtagttcaagagctttctttctatacgccttcctgatcctgtggaaatagccaatgcatggtcagctcgttatctagccgggacttgtttatgggaacaaactcttcgggcgacgcattctgttccacatcgagaagttcataataatctttctttgcatcattcctttcgc

SEQ ID NO: 2942 - DNA, 1166 bp, Emericella nidulans
cttcggtagtgcagtgatgttcgctgcttaagacgcaccacgtggagctatctgccaagcttatatcaaccagcctggtaagggcccgatccgagtgcgatcactcgacttggctagtccatcttttcatcattcgttggtcgtttcttggtcaattttggtcaagagtcgagacggcgaggtatgcaggagccctggatggatggatcgtcacccatacattccgtagcgaccacggtttgttatgctggggaacattaaacattgcacagaaatttggatccaatccaggaaaaaaccagattttgcggtcttgaggttctaagttttcgttcctggtggtggcgtccactggaaacctgctagtcgggcaaggctgaaaccgccgtctcttccccagctgttacctaccgtatctctgcagtcaggtttcactcagctcttttcttcgtccagacttccgctcgcacaaacaaaaataaacccgttcgggtcttctgtcgtttcctctccttgtctgtctttacttggtctctgaccgtctgttctcttcctacccgcgacgatcgttggcaacacaattgcattattggctcacgcgacttcaaacgagtgaacgacccacgacgagtcgacgactcacgctcgctctccacaggggactacgatcttcgaatcatcctttcgtaagaggaccaaggttggtaccaaggttgtcgattttatgacggtctaactcttgtttagaagtcgctagtcgatccccctcaccctatccgctcctttatgctctctgagctcatcaggtctttcccgagctgtcgtcactctttaactttcaatgtccggacggcctggcctggcagagaagcgtctgtcgtcccatcgcttccagcaaatcccggacactatgcctaatcctaacgatgttacaattgatatcccattgaccagtgtttccagtcgcgggcagactggtgcgcggaacaatagcacaaatattcccaactccccatcagggggctactcggctggagcggaacacaatggcggcgccgagaagggcggcttgacctcgagtcctcccagcagctcgctcggtttcggtcatcgccgccggaggaccatcaacgacaaaaccggcttgcgcatgaggaccagaagat

SEQ ID NO: 2943 - DNA, 1041 bp, Emericella nidulans
aaggctctactcgcacaacatgtcccatagtttgcatgctccgggtgccggcgcaagtattgtcaagcagcggacgaggagcaggcggcgattgctgggatagtgcgaccaactctgggatggtgtcccacgcctcgctcgtctcgccgcgccataggctccaaatcgtatgggcaaatgccagaaagacgtggatgagcagcaagataatggcaacgtaatcaaaccagttctggggcgtcatggcgtagccgaaaaaccatgcccgcatcatcatctctgtccagtttcggccttctagaaccggcggtctcggaaagattttggcaggtttgccattgcgaaccaaggtccgcgcttgttctgccgatgttatggccccccagtctctgtttttccatgctggtaatagactccaggtgttgcgttggcggtgggcgccgactcgcgacaggccgtctgtgaagtataatgatatggccaattccacagtgaccaggtcaaggtccatgtcaaatccatttttactggtatttcctggaaaggggtagatccctaggatcctgtcgagaagcgcagggtacgcctgggtgtgttcggtgtggtagtcaataggatctactcctgttatatgaagcaacgaggcatcggatactctgggcgataacaggtcgaaccagctaggttggatctgaatgtgcgtccacaaacctgggtcttgcgggtggaagccagtcaggctggtttctaagtagctagcaccatcgagcttggtctgtacaacgttgcgtgaccggtcgttgaggaagccgtgccccaaaatgccgtttggacctgcctcaatgacggaggtggcatttgcccatcgagcatccacagtgcaggtcaatggggctatgttctttccttccgcatttatctgcttcagtagcaggagaccaagagagctggcatcacctgcagttatatctagtggaattgtgagaagcgacggagcatggggcacgagagtgactcccgcggccacttgttgtgactagg

SEQ ID NO: 2944 - DNA, 3022 bp, Emericella nidulans
gcaaactacaagcacatgaaagatctgatgcgacttccccaaagatcgaacccccctggtcgcaaccgttcggggactcgggctgcatatatccccgcacccaggatgtacaaaaatccctggagcagaagccagccgaggccaatctgtcgcatcatctggtcacgcccgtacagttgcagcccgtggacgacgggaaacactgctgacaggcccatgccgacaaacatggctgcacggaatggacgccagcggggggtccggaacttggggaagatcgataccacaatgcagccaaggccaatcgtgcatatcatggaccaatacagcctctgcaattcaggaacgcagtagaagccgtagtagacgctaggaacaaaactacccacaatcagtcctacaatgccaatgtagtcaaacgtgtttccaatgcgcgccaccgtcggggaatggttcgagatagtatggtaaaacgccgacatccctaggcaaaacgctgctcccacgaagaagcagccaaaagcgcgaatatcgccatccgtggcggtttcatagcgtggggcaagggcccgataaagttgaatggcggcagggattgccaggacagatggcaataaatgcgtgtatatattaacagtctcgttgtgaatatatgtcagggactggaacgagccgcgaaacgaatacgacgccggtcgataccctgtatggatatgctgattatctcgctgccaatggggcaactcatcccagtgaacgagtgacctgatagcccgagggggatcttcaaggactgcagtcgcgacagaggctgtctgacagcctcctggatccttcttatggatttcggtaggacgacgctgacgaggtggcatctcgaataagcaatgaatttgaggcgctagatcgcgaccagtaaaataaaaagtctagatgctgtatatattatagatggtccaaagtcttattataatcttatcaataattgtgtagtgatagaaatagaagtaggaatagttgaggctgttgagctcaacatctgttgggacaaacaagacaaactaaacaaacacggaagtcgacccgagtccgctccacctccaccttccccgcggcttcgtcgttgtggatggttcagatcacacaggcttgtgccatgtattgcacaaatatcagctgcaagacgccttcgttccttcaaatcccatcgtctatcctcatcacccggcgacggaggcccggaactccgttctgcataccatagctgacgccattctacggagtataccgaatgtcaacctaaattggctgcagttatgagtggtcgagctccttcagcaaaatggccgcatagccgcctgaaaccggtggcggactcccttgagtccgtaggattcgtgtcaaagggagattgcaagtatgagaccgattgtgtagctagtctgagttgaccgtgactgaattaaccggattgacccgcagattgctagatcacaaagctcagaagaactattacgacaagatcatggctaggtatattgagttttgtgctcgccattccaagaacctagatgaggcctggctgtctcttcctcgaagtgcctcgaacgatgcaacgaagaacccgccagcttgcgttccacagtcaaccaaatgtgcagtgtcacccggtgcctgacctgccacagagttatccaccctccttctctcccttcgcaagcttcgcgaagccgtattggccactgcttcgaccacgccaatctcattctcccagcgggtccatgtgttctccatcaaggtctccattcaagctcgacatccgccgtcctactttccctccctgcgccaccttcttgacgacctgcacactccttctaacccgttgcctgattcggaactgaaggatcacacttcgtatcttatccttgattatgcatgtcggcaggaggatttggtggccgctttcgaattgcgggcccgtgcgcgcaggcaatataatttccactcgcgcgaggttgatcagatcctacaagccatcgcacatgacaactggattgtattttggagggtccgaaaggaggtcgattccgccatgcgcgcaatcatgaactgggcagaagatcgggttaaacaacatgctcttaaagcagtcgggaaagcttatctcggcgttgacattgcatggattgtcgaaggctgcactggtgattcgacttggacatgggaaaagctggcagagagagagaaactaggttgggagaaagaaggcgatagggtcatcatccggaaaccgagatcaaagccgaaacccgagggcaatcttacacccattcaggagaagagcacgggttaattacgatgtatttgttaattgcatagcgtctggagcattgctggtggcgttcggtaaaggattgggtcgtaacactctaatatattcatacatgccaccctgcaccttcgtttgagtagctatcttattcacagtttgaaatcagcgttcggccgatccaaatttgtgtggcctgtgactggttgtctggccaccttttcgacaagcccatgtttcaactgcatagccttgtcagagcacagctcatagactgtcgctagattgaaaatcagactggaaaaggagtgctgtgcctggaccagagtctccagagcctcacgtgcctgagaaaagtcagtacttgggaatcttcatatctggcaggctataatgtacctcgcttagctgaccggtatacaacagacacacagccaggttctgagaaatgatcgcctcgtcggcttccctgctgttgttcccaaggatatcacgccattcaataactgcatcattatagcggccctcatacatactgagaaggggcttaaatatcgcgtcgtcagtatcgccgaagcccttgaatagctgccttgcagcatcgacatcggcgatcgccagtagcagaagcgtcgctcttaccctgttaatctcttggctgattcttctttctcagctctccatgccctcttg

SEQ ID NO: 2945 - DNA, 1607 bp, Emericella nidulans
gtcaatgcattcccatgtgaggaagcacgagtgtacagtgtcagctcatgtgacgtgatgagagacgacaaatgcacccgtgtatcttctgcagtcggtcagtcttggtgtaacagggatgctctccggtcatcgatatatgcacagtcggtgacaagtgcatatcggctgtgtacagtagcatgacgggtcgtgtaattactctgttatgtaagtagaagaggatgatatgttaacaatagagtgtagaggaaggatagatagcaccgttgatgcaaggagtcaggtgttagcaacaatagcgaataacccaccaagtaggtatactttcggagtaaccgcaaggattaacatcgtacaaatggagccaatagccgcaaatgatactaagagcgtcttgcggtagcttccatgatctgcagcgcctgacattgatattatcaggattgcttgtatgaggacactcacggagaaggtgtacattgcgaagcttgcggtgttgatttcggccccaaggatgtaaacaatacattgacctgcagcggcgggacttgaattttgccagcttgtgtttgatgactctggagttttccagatcgcagtacacggtgtcgttttgtccgagagtagaaccccacgttctcgggccatctgctctaaagtgataggtaaaaatgaccctaccaaccattagagacggacttgaagatcttgaaagcagagacaattcttcttacccatagcacatactgtgaaaacctctgctgcccaaccataactataccaccccagcagctctttcttgtttgttggccgggtgtcatcgcctgggtatcgtgggagaagaagcccaggctcagcaattccatcttcctgcatcttgacgcaaatcgtgatggtgcttatagtaatcacttgggtttggaacacattcgaggcgcttttcttattccagtctactctcaatgcatattcgctgtaagtagaagatgatattagtgtatgacacgggagggatcgtgaatactgatgaaaatcacttgacaagacatgcttctgcaagcttttaacttgaatatacgagaggagatacccatatcaatatggtggtactcaaagcaggaagaatacctgtaatgggtagctagccctagtgatgcaattatacggtgtatgggctcaggcgatatcgggctttgataacgatgaaaaagcaggaacgcagcgtattatcgagccccaagtagaattattgggattgtagtattgatattagtaagtacaatacacacataaaagaaatattgttgctgtggaagtgagaaccgtgaggtgacgaaaggttgaggaggctaggctccatgagataaacgcaggctctagccaactccatcaaggacgcaccaggcatcaaggcatcagattcatggcttatctccactgctccagccacacaaggccggtcccgtctgttccatgcatctgcatcacagcgcgccgcaaaccgtcttgatcttcatcgtattcatatccgttgagttgcaaagatcctttcggtattcttccccatagttcctacgctcatatctattatactctgagacaat

SEQ ID NO: 2946 - DNA, 3227 bp, Emericella nidulans
tatcctgcagcttgttacaacttatacctgaactgtaccgtggatttttatgcttttcagttcgcgggccctggcagccactggtagccacttgctggctttgtctgaatctggggaatacacgtggtaagatttctgatattgcttgggctcccagcgctttgaccaaacctgacaagggactggcaacatgatggccattcgaagcaccaccagtggcctttactggttctttttactctgtggctggaccttttgcgaattgtaaatgttgttggccaatacatggagacacagatgtacggcagggagggatttcctgcacacgtcactgcactgatcttgaagcaatgcactcgccagcccaatctctaccccttatgcgatcgaaatctaacagtcatgaggaaatatagatatacatactttgaacgtctatacgagcggcttcgcgggataaaagtcgactaccacccataaacgtagcagtatagtagcttcgagctggctaggagcacacatgcaggccgtcgatgtttaccacagtcgcctgtactttcaggcaagatactgtaggtacatttgttctttctgcaggctcctcacataggacccctgagccccgtgcatgttactagactagctccacgtccatgccgaacctgactgacagcactctaggagatccaaggcgctgtgagattcgatggaaagcttcattcttcatcccattattattggcttacgtccttctgccgtgctgctctctttttttattctaacatcccggctactgtgaggcttggccttgatctatgtggccgatatggctttcccgactctgccgagtcaataagaatgactcaatactatgccttgcgccagactggcccagtcatgtcttcccggtcagcttgctttcgtgctaagatttccaaatctatcttggattaggaatcaaccgcatgtgtcactggcactctgatgttccagtcagaccttaaaatcgcatctatcactcatacgcagacatgggcctccctcttccgagacattagtgtaatcgctaccaaagggttcgtttgcaatgagttgtacaccttgaaccgaatacacctgaaaaggatgcgggcgagtggaccctggatagcgctaacaaatacgctgtcgtggatcttattcgagaccactgatggcctgtcaaaagtactggcggaattttgaccgcttcccccagaagtgtttgatggtggaggacgttacggtcgttcaacaggctgcctagcaggacacaagcccttccaagcatcgcgcaaacattcgaccccatttccccttgggatcagagacagctatagcgcgctaaaagcaactccgcaaacgtaatcggcggctgcccgctctacaaccgccagcaaaacagaaggttggcgataccgagcttagcttcccttgacgccagccgggataatcgcgcttaattggggagaggagggatttgaagattgcggatgcgattgacccaacaattggccgcaaccacagtcgggcaatctctatttccctccctagagggatgatagacctggtggtaacgcatcaggtgaatcatgacacttgcatggtgaaacgtgcaaccgacgttacttcttgtgaaacggaacttctctcaacaccaggatgcactttcttgctgtctggccctcaagcagggagtttcaaatggttcaaccgggagcactaggccagcatgcgacacggacgattgcagcctgatgatcttcccagtacagctcaggcaaaatggaacaaagagtcaggtaagagaatgatcactgacctctcttgaatggctggccaatagggcgacagaatctgtcgctgggaatattcgagacgaggtcgcatctggcctagttgggatctaccagcaggattgcgacagggacggggcagcaaaaacaaaagagagacgaagagaaggggggaaacaaattaaacaaaatgaaaacaaaaaaaaagtaggcaatcaaaagggaaagaaaatacctactccgtacaggcacatgggccttaaatctggacttgtatccactcacaccttcactctagaggtaccgtaccgggccctttcccaatatgcttcgttgatgggaaatgttgaacacaagcggatatccctgactactgatcgcatatcgtctattccttctgcttaagatttcaaaagtacttctactcccgtgatcctgccctgctttttactacatatgtgagtccaacggaaacgaaaaccgatatgtttccctcatcactgatggatgaagtcatggcccaaacattctaccctgctgatgacgaggtcagcttcgatgcacactcgaagcgggatgctctgtcaatgtcccaacccctccaaagtgacagtcaacaagatatcgtggacaggaacttaggctgtatcaacattgggagcgagattgaggcgaagacgcggggcgccacaagacgacggataccagtcgcagtgggtaatgcaaaatatgcaagcaactgacacggctaacagtaatagtgcatgagatgtcggagacgaaagatcaagtgcagtggcgatgttggtgatggccagggttgttctaactgtcggagcgctggaaatatacaatgtcaattcttaagggcaagctagcttcctcaacccactacaacccttgcacctttcattacgacagaagagctaactggatgtaaaggtgaactcttccattttgcaggcaaaggttcccccaggacctgggtggccctatcctgcaagtgatatggcctcacggatatacgtgccttccgcaaccccttctaaaatgggcggattccctataaatcattccaatcatcgtgtctcctcatcatcaagggcttcagactacggagtgaccccagacactcagaatccctacggtcgacagccctttggcattgaccctaccatcaattatgatgaggagtcctcaagcccgtacaatgttcagacatcttccgcctatattctggcaaactctcctcaggtatttatgccaaattattgccagctgggatggaattccaaaaactgggccggagttttgcccggggagtcgagctcccaccgaaacatgttctcaaaaatgatgcagagaattcccttaaccatgcctatttttatatgaacccccggacaggggcaa

SEQ ID NO: 2947 - DNA, 1945 bp, Emericella nidulans
acacggacatagccgctgacctgtctacatctgcatcttcagctggcgtattgatccactgcacacaaggaaaggaccgaacagggcttatagttcttctctcgctcctcttaagcagcgtcgtggatgccgatgtcatagcaagcgagtacgtgctctccgagaaggaactggagaatgaatcgagcgaggagaaggaagagcggatgaaggagatcagagcaataggactggatgaggagtatgcgcgatgccctaaggattttactcagagggttgcgaccttcattgaagagaagtatggtggtgtccgggagtatttggtgtctgtgggcgttgacgaggagattttctagagcttgaggaggcggttataggcgtgatggattggatgtttgaatgtttggaaaatagaggccaaaaggaagaagtgtatccaagttttataattaccgttgtctatataggtcgcaaatcataaccgtaatttaagcccaagtccaaagtgtctaaagtgtatcacgaacccgcaaccgatgaaagaccaaatgcataagctacacaaacttaaaatgaaactaaacgtgcgccccccggtaatagttggtgttcctattggcgttcggcccggctgaatcctgcgttaggggctcttcatacaccatctcgggatgatccgagtgggcggagtttatgcgcttctcgccttgaggtacgtggtttcgcgtgcgaacggacggcaacagatcgaccacaaaagagaggacataaaatgtaaagaccagcgcgattactatgaggttcatagtcagcaggaatcctattaaaggaagtgaaatacataccccattcgagcaccgcagctgcattcctgcgatgcggtctatgccacccgcagataccaaaggcaatcgccagggcgacctcaacaacgatgaagaatgccttaatcgcaaaactggccagtagaacacgatgctgggagcggtagaagatgccaatacgaaggtactcaatgcagatgaggatagcgctgacaagatatgcaacactgcatggcggtttattagcccaatgctgctgttacacaattttcgcaatgcgaggcgcaacaactcacaggaacatcgccagaaaaccactgtgtagatgcgaatgtcgaagggtgtcatagacagataaaagaatcaagcccagagcgccggcgatcgaaaaaaatatagacgcgatagcgcaaaacttgtcaaatcgccctttgttcggtaccagctgcccggaatgccgcagccatcgctctgagacaaacgagaggtcgaggaacacgactgtgataacgctaccggtgatgaacagcggcttgagaccctgcgcgccgacgtctgatatatacctgcgaaaccgttcagacaggtactttgcgattggagattccaaattactcacgcgattgtttgtcctggttccatgctcgagtagatagggtagccttggacgcaccaggttcccagcattgcggcgagcatggctaaaacgtgttagttgctcctgctgtcgattcccatctcgtcgtgttgacgtacctatccacatgcacgccgaaatcacggggaagatccagaaagaaataatccacatcttgtcttgtgtatgaaactgcgcctaccacctacgattgcgcacggtgggtggaaaagaatattgtgtggtggagaggtcgaacgcgaagatcgtagggacttcagtaaggaggacaatcatagtataaaaatcaggagcgctggggtattacgtatgctggtgcaccatgggtaggtataagtcgggacccgggtgcgtggagccactagctcacgaaagcaataataaaaaagcatagcggaagctgcggatgtggctggctcacgacacagtgatccctatagtgagtcgtattatcggcccgatc

SEQ ID NO: 2948 - DNA, 1827 bp, Emericella nidulans
  unsure (1)..(1827): unsure at all n locations
cacaccacgatgctcacagtcctttcctacttcggagtgcctcatttatggctagaattttttcgtactttgctggaagcacctatgaaattcgtccacgacggtccaaatgccactgtcttacgccgaaaaagggggatcccaatgagccatacgctctccacggcaatgggagaagccgtgctattttgtatggactatgccgtaaatcagagcactgatggggcatacctataccgactgcatgatgacttttggttttggggccaagagaggacgtgcgtgaaagcatggaccgctatgaccgtttttgccgaagtcatgggtcttgagttcaacgaggaaaagacggggaccgtacgctggcaaggggctggcgagaaactgccacaaatattgactccacctcctgtgcagcctgaaggggaggatttgcttccatctggcaatatacgctggggcttcctgaaacttgactctcaagagcgccgctttatcattgatcgagaaatggtcgaaaagcacatagccgagctccgacgccagctttccgcctgtaggagtattttcgcatggatacaagcatggaacggctactttggccgattttttgtgaacaactttgctaaacccgctgtttgtttcgggagggagcacatagacatggcaatcacgacactgagttatatcgaacacgcacttttccctggaagcgacggtggtggagtgaccaacagcctccgaagacgatcgctgagcggttcgatgtccacgatattcctgacggtttattttactttcctatcgaacttggcggcctgaatcttctcaatccttacattccccttcttgccatgcgcgaggatatcaagcaaacgccacaccgccggattcaaaaagcattcctggatgaagaggcagcctatctttcagcaaaggagaactttgagaagactggccctcagaacccccaggcctttgtgcttggaagcaaaagcgaatcagccttcccgcgagagttcctttcccttgaggagtacatgaaatacgccgagtgctttagccgcccccttttggacgcctatcgggacttgatccgcattccggatcaaatcagcgttgacctcacacttgctatgcgtggcatcctaactctgagcgcgacgaggacttcagcgaaaaccatctctggagactggcggagtatgtcaccttactggaagtggacggccgagctttatcgggctgggatggtgaagaggtacggtaacctcgcagccgtaaatcgggagttcatgcctgtcggtgtggttgagacactgaaggagggaaaattccgctggcaaggctgatttggtccacttcacttgtatactagtttcacgaagtcacgaagtcatgataacagacaaataatcgcgcagagagacggtcattgaccgtttgattcaaatttatctagagcattccacagtcgctgtttttcttcatctcctccgaatattgccttaactgctttgcgagagatgctgataaggtctcttcgattcaattggaaatgctctgcagccaagaggtactcatttgagacagggctacagaagaagccaacatcgtccgtctatatggtcagctgagcagaacataataatttagggagaaactcacgcaaaggatgaccgggcactcctcgtgtctccaatacccaaaatgatgatcgaggaacccttcatcgaacatcttcgcatgtacattacaagatatgcacagttaccacccgtatngtttgcgcgcaatttctgataatatcatctgcacatgaataca

SEQ ID NO: 2949 - DNA, 1326 bp, Emericella nidulans
acgtcagagggacgtgcagatatatcatgaaaggatcagaataccttttggaatcacgagaggagcatttgagttcttcttgaagtactcgctagcccttttggcattttgcgcttccatgcgaaaatccaactcctgtggcaacgaaagatccatttccttcgagagccattccaagtcatattccggaaagaagcgcttcaacatcgagaatgtgaaccttgtcagcgcaaggtcaagcggtgcccattccgccaatgctggatgttgcaccttcaccgcaaccttctcgccagtttccttcaatgtcccaatgtgtacctgtgctagcgaagccgcgccgattggggtcggttcaaatgtcgtaaagagttcatcaatccgttttccagtgtccttaacgaacatttgctcaatcgactcgaccgacgaaacggggcatttatcttgaagaggtatgaaagtcgtcgtccactctagcggaagcaggtagcccatgctactcaagtgttgtcccagcttaatgaagatagagccattcctttccagcacatgtagggttcgatcggcgcaacgcttgtggcaggcgcgaatcgcctcgtttcgttcctcgggtgtacacgtctcttgcttaagagtcactcgatagctatattgatactgcgtcagtgagtaattccacctcttctagtcggctaacttactcgttgatacaaacagccagcgtgccaacaaccctccccgttcgcgcggcagcgtggtaaatgtgtctgatatcatcggaaaccacgacccctccaacaacaattgtccctccaattatcccatacccgatccacttatttctagactgagaattctgagactgccttccttgaccgccagccctctgttgggtttcgaatcgatataaagtctttgtagaaaacggcgttcggaagttgtgctgtgggaaggtcgccttattgaacctaagtgagctgaatagccaataacggggcggcttgtatgaattccacgttgcaagctctctaggagcgtatggtgaagcagtatattgaagaacggacgccgggtcaccgagagcccgtagtggggtgcggagcgccaccctcatgccggacatgaacgactccgtagagagagcagccacgagtcaagggagaaaagtctgtcgggtgaagtgttcatccgtaccccaaggccattgggcgaaagatggaagtgtagatgaggtagttctgaagggaaggagagatagcggatggcggaggagacaaaaattgccgcgtggccgttgcgatgctgatcgtggcattatgtttc

SEQ ID NO: 2950 - DNA, 845 bp, Emericella nidulans
catgactcgtacgggtggccgccatatacagctatatggaacttgttggatgtaggaaacagtccatcaaaaccccgacaagcctggtgcttgctaacatactacagtacccggcatgcatcattccctacggaaaagcgagcaaagaactcgatccagagcctatggtagtgggcggtggtcagccaggttgtatgtcaaccctacttgctaccgttgaggtcgaatgggaggctgacagtaacagacgatcccgaagctgtggatggagctccttgtgctctccagattgttgcgcctcgattccaggatgagaaatgtctcgctgcagcgaggattattgatagggacattcgagtctgatccagtaacccagtgaactttgtctttatttatattatttaacgttattctacaattctaaattattatatttcacttcttgtatatattatattcattcattcattcattcattttatttttttattcttttaattttattattatttttcttcccccccttcgctggttctaagctcggaagcccgccctggaactatcatttgaaagtataactgggtgttgtgggaaaagcccaggacaagggctcggacatgaccttcattactatttagggagcagatgcaaccgatcattctgatcagttgttttgtacctttgtcaagcggtctggtctataccagcgcataggtatcccagcccgctaccccaggcatcaataaaatgatcgactcgtggcagtggtggcttgaggctctcttaacgtatggaggcatcctcctagttagcgccgatagtgtgggtttaaacatcataatgcg

SEQ ID NO: 2951 - DNA, 1073 bp, Emericella nidulans
gagtgagagagcatcttgtgaagcaaggccggcttgctcgtagaaatacgccgcatacgttgcggacgtggagaaggacgcctgttgcgtgatccagatcatgcatgtgatttccgtgcgtcggaggtcgatgcctcgaaagcagtcgaggtaggccattcggctcgtgcccaggaatttctcggcctcgtttgtatgctgcatcatggagactgtgccgtccacattgacgccgccgtgccgtgactccgttagttgaagcaacacttttctggcttcgtgaggccgttctttgcggatcaaccaccctgttttagaatcagctcggccctgaaaacgctggagttgcggctaggaagggagggggggtggttgtacatggtgattcgggagcaaaatagacaccaataaaaacgaggacagccagcacccactgaatggcaaacggcccgcgatatgcccattcagatttgctggttaccagaagccgagcgacgcctacggctgaaagctggccgagtagccagcacatgttgacactgctcagaaagtacgcccggagcgcgaccgggatgacatcggcagcatatgtcgtggacagagtctggaagatgccccaggggattcctgatgatggtcagaacaaacgttccattgacaacagcgaagcgtctcatgtttaccgcagaggacctgcgccgccagcaacattcgcgtactcacagcgaagaactcgaggaatataaagacagagagcacagccaaggcgccaaggattgtgcgacggtagccaaagtaatcggccaggtacccgttgacgagcaggccgagaatctcgccgaccacagccccggctgtcaggctggcctgccacgtggacgagatctcatgcgtaccgggttttgacgggacaggcgctccatattttgccctgaaggccgggaatgtaaagaaactggcgattagtgcggtgtcgtatgctgccattacgattgtggtgcagagcacaatagaccacatcattgccttggggtagaggcggcacccctcgagaaaggagagcgctgctcggc

SEQ ID NO: 2952 - DNA, 1331 bp, Emericella nidulans
cagtctctttgactggccctgtgcgtcattacttcctaataactaagagcattctgcaatttattgagttttaaagaaacgtttgtggccggtatcagtttaggataccagcattatataggagatattttcgatgttgatcgaagccttaatattaccccatgggtccgtttagtctgtatccagaatggttggtagtcactcttaggagtatggagaagccaccgctgctgttttgcggcctctttatgtctcggggacatatctgcaagtctggttcctaaagctctacagttcaggcgcgttcctcgcctagttagtcaagacttatgtgatagacaacgggcatggagttccctacgtgatcttcactgtctaccggctttcagatgtactgcacatatatgttcggcgaccggccaaattccgggtttacagcacagggactagtaaagattttccattttgtaaaatatgaaggccgaacggaaccggatatagtaggtttacttgagagtacggtgtgctagaccattcgtgccgcgcctgcgtggggttatatatcagataattgatattcctgttactcagtgttgagtggataacatgttgagaaaagtaccatactagtacttcccaggcagccatccacttctaggactgagacatgcgagagatacaccagctaaagaactaactagctatgatggaaaaggtgtagccataccgcgagtgcatgaagcaatggcccatacgccatctccatccgccgcactggcgaataggttgccaaccttaaggttccacactacagtggttggaacttctctattgagtatgaggtggttctcacgcattccaaggcatcttctcgctgattactgttcgctgcgaggccttctagccgtaaagcttctagaactggcacatctccgaatagggcgaacgaacccttgtcagcagcgtaacagactatcacgacacggccccagggtacatatcaaaccagcctgccttatcactgtggaccaggcaatggtaccagatgcggggagaagaaatacaccgtagagcggcggtttcactttaacaacctggctctccgcacgaggaagcatgattgtccccgcacggagccattaaatatacgtcctttctatcagtccactatttttcttcatttccgcggccatacgatataagcctttcgtggaatcatgaatctaccctccgataagctgatttcagaggcaatgcatgccgatctgctgtcaatgagaagacaccttcctacctgtaagcatgtgatggttcggcgcgcattgtctgac

SEQ ID NO: 2953 - DNA, 1723 bp, Emericella nidulans
tcatcaataatgcaattactccaactttcaataccgtcagtaccaaatgcactctgaccgaggattcaacggaattaggattgatttaccaggcctgcgagaatttgaaagcatatacatcaactcatcccttcctctagcatatgatccactggttaggcaattcagcgatacagcaaacacgaaatcggccaggtacacatgtaaatctacggccgaggaagacgctggcctctctatgcgcgtgaaagtggctattggagtggttattggcgtggttggggctgggatattgggaggtttggcgttctggtggaggaggagaaggcacgggttgtccaagtcttgtcacgttagccaagttgagctcacagacttgtctcgcggtggagttcgtggacagaggaattgggaacgggccccgaatgatgaggcgccgcctccgtactctccgcgatagagacggtggaatgcgcatatggaagtagtgaaaatgattagtgtatataataactgatactgatcacgccggttcacgagcttaatttgaacatgggaatgtttatttttgtatatcagctgtagtttcattgaaccgtactgaaccgtactgcaataattacaaatctcaattaaactattcccagcccttgcaaattccatgtcaaagttgctatcctccagcctctctcttgttacctttgcgcaaagccactaatagcagcgtgtctataacatatacagtcaattgcgttctagggaaaatcaatatgaaggtacatacgcagcaaattcggatggatccagctccatcacattcaaccaggccactagatcgtgttagtttctacctgcatgatggttgtccttgtggtcgacggccaggtgggctactaaccggtcggcacaactctcaggagagaagacctcctaaaagacatcagcagagctcgcaggggtatcctcagtccttccagtctggatccggtacgcaaacagggactggggcatacatacaacgcagttctcaccttgctgtctcttatcaagggaggtcttttcaaggcccaccgagggtgcggcataggcgagggccaggaaggccgggaaggcggcaatgagacgcatcttgtatagaaattggggacaatataaggtatagttggtctggtagagtgaagatggtgtgatgataggaaagaatgatgaattcgagagaatgagacggctatttatgtgcttcttctcctcccctccagctgcaccttcggcggccgttcatatgaacgaagtacagagtaagaattcaggatacgcggtatgatctcagctgagtgagaagagacccaatcgagccattgtattttccaatgaacattgtaagaaaaagcacacgggatagcttcaagacgaagaacaaccttgacccccggcgtctcgggctgggcgactgaactgatagctccaagcccaagggcattgttacattcttccaatgagcagcgtcattttgtggcgcagatcgtgcggaggacatccgccgggaggccttacatgtcgatcgccgtctgatttcagcaaataaccactctcagcgtggagccaaggggcgccaattctgggcggatgggaaagtgacggaggctgagaagatccggcgaataaaagggttttggcccctagcaagagtgggtaaatgcctcaacgtccgctgttgtttgaa

SEQ ID NO: 2954 - DNA, 1617 bp, Emericella nidulans
accccatattatacactgtgaaccaagacgtattaattttttccaaagaaaaaaaaaaacacccccttttgttttaaaaaagaagaggtttcaccctctccccccggaaaaacctctttaaaatatttcaccattccaaaaaaccccgagagatgggctacacacttgtgggtagagagtccccgggaaaagcttttctagaacaagcggctcgtaccggtttctagtcatagtctaaaacaggctgcgagaaaaggctctttgcggaaggcagctctgccagaaagttaaagcttagtatgtctatttctccttacccagccacgttgcgagggctacaggtgatgtcaaaacacttctacagacggcactctgtcaacgtttcgctctacttaaaaagatcgacaggacaacgccaagtcgagttcacgtccccgagcatcgcgctggaccttccgactacggataataagcggtacaaagatagctacgagctgtttgcgccgattgacccggagaaatccacgttcaaggtgctcggcacgaagctagagttgatgctcgtgaagggagatggaacgagctggccagtgctacgaaaggatgatagatggactggggaacggatccagattggtagcgcagcaagggcttaactcgacttcgatatcgggtagtagatatgaatcacgatcatattcatgttttgcttagctccaaataagccgtgtaggtagtttgtgtagagtagattcgtcgcacgacgcgcaacattggacacagccgtcaaatttcgtcaatcgactggcatggcatagtctagagatctccatcgcaagagagtcctagcacaactaagtttgcggcagcgtctgcagagtctgcgcgaagtacttgttccattgtaccagacagatcaagaacttctctagcaatccagcagaaaactcttcaagctagaaactacaacccatcctacgaagccagcaaataccaccaagggcaagcaaaatagtggcacgccccctccacagccaaagcgcatgggcacgccgaaaggcacacctagcccagccatgaattgtaagggaaaaagaagggcgtgatggtaaaaattcctctccagagctgggaacggaagaaaacccacatagatttctaaaaaaactcacaggataaccctcagcgagccgcacgtggcggagctccggttttaacgaatttacatgttaagtaaaccgctactgatgatggagaagaaaagaaaagaataggaaaggaggaaggatggtgcaaacttttatatgactagccaagagtgccgctaggttgaaagcggttagtgctggacttagtctcggagttttttagggtagccggtgaagtgagggctagggggagggcttgggagctcatgtgactaagggtggggttaggcagaaatctcaggcggtcagtgcttaggaggggaaatcacatgcaaaatgaatggctagctgcatggggttagattgatactgttaagtttggcccgtattactggctttaggcctgatatagtgagcccgatggccaaaaaaaaaaaccccagacgcccggacaattagcgactgactt

SEQ ID NO: 2955 - DNA, 1216 bp, Emericella nidulans
  unsure (1)..(1216): unsure at all n locations
gctaaaaattccggccctatctgcccgtgagaactgctccttcatcacttgatgctcccggaacgtatcatatatagatcttcgtaataggccgcttcccagtcgtatgatcgctgcgcatttgtgagatccccgtcaaagaaactgaggaggtttattaagggatccgatgcgctggaattgtccattacggagagtcttgccgaaataatactggattacgccgccagaggtttcgctcggcaagctgacaaccacgtcaccaagacggatatctgtatcttcacgaggtactccaccgccgataccgaccatcaatccaaagtgcagacggggaaatgtcgggagcatctgagcaaacaccgttgcggcagaggtagtcccgtagacgccagaaggaaggcaaaccactacattgtggccagcccgtcgaccgagggtataattgttgcgatccgtcgagggttgcgagagagaactgtgaatctcatctaacatgacctttgcagctgccattcccagcggcaatgcgcagatccaggcaacggtgtagtcatcatgtgataacttcgtgctgatggtcatggcccacagatactgaatgtgacagcatagatgaagtgaagaaaaatagaaagcctgttgagttcgaagagggaacagtttcgcagattcgaaggttggggctgagcatggagagggttagcagactacagtgcatttgcgcaaggctgagaagtctgagaaggccccaaatcagttggcttggcacctgtggctcaggctcaagaacagatataacgataccgtgctgtggaattactctagatcatattggtatgttcatgtttgacaattgtttccccagtcatggtcaatatcagagacacccccaatccagttttctgacgtactccaactcttctcttcaactcattccttgacttccatttctgcagttcctgagccaactctttcaaagtatcagtccgctttttgccctgattctagctccatatatgtagaggacaacgggtatagaaaataggccccctgcaatagagcccaagagtgtcagtgcccattgaacaccaagtgactcgaactacaaaaagaatataagcgctatgccagattcttgaagggtaagattangtaccatacaagttgcaaaaagcggaaacccagagccggccagcgagctgaggaacgtatg

SEQ ID NO: 2956 - DNA, 1149 bp, Emericella nidulans
cgtggctgtggagaagatgccgagacaaacttcgggtaagactgacatcaagcgcgtgaaaaaatgggtcaatgagctggatgagcagactgctgagcaagctcttgatatcgagacgacagcgcctgggctcacagttcctggtagtgaggcggagaaggtgatacaaggagcagtctccaaagtcttgaatatccctgccgagaagattgccttgaaccgatcgtttattagcctcggcggggattcgatcacagcaatcaagctaatgaatcaactgcgagatgcaggggtgaatttttcaatcaaggaactgctccgcgctgggtcaatcggtgaactcgccggccgagttacatccatcagtgagggcgagaatgtgaacccgctattatcccttgtctcccagaagaaagagaagaaatactcacttctgcgcctcggggacgctgaaatagaggcactgctcgcacagcgtcttgctactatcggtcttaccgatttgactcgggtcgaggacgtctatccttgctctcctctacaagaaggtctttctcgtcgcacaaaccaagggcgtaggaaggtacgacgtggtacacatctacgaagtgaccacctcaaagacgcatcagtctcggtcaaccctcatgtacttgccaaagcctggaaagaagttgttcgtcggcatcaaattctgcgaacaatctttatacagggtcttgaagaaagcactgcatttaaccaggtcgtcctacgcgaggtgcacaatgccccctttgtcatcgaggatgtcaagagcaatgatgccaaagccctattgcagaaccttgccactccagagtacccagccttcgagccttggcatagcgtgacgatctgctccgacgccaatgggactgtttgttgtggtatccggatgcaccacggcttatttgatgcgtcttccatggatatcattctgcgtgaggttgctcaggcttataatcagagactttccactccagcacccttgtaccgggattacatctcatacctgcagggactacagcaagggggcaatgatggcctcgcatactggcaggaatacctcaaagacctcgagccatgctacttccccagcatcaacgaggaggccctaggacaagaaca

SEQ ID NO: 2957 - DNA, 1724 bp, Emericella nidulans
aacctctttgccacatgaggcggtccacgactacgcctcgtctgagcgccctagctcaccggatgcttcccccaccaaccagcccaagaagaaggaatccactggacgcaaacgcagagttcctggcgttagcggcgctcaaaccatgaagcgcacccgctccacacagtcccagacaaacccattgaaggctgctgtccagcagacatccgtccacaacggccagaacatccaggccgctgaacggaactactataattgccaccggcgtctccttgagcaactcaacaacatcacaccccaggactccgccatgcatgacaaggtcaacgcaagtctccaagaactcattacccttggaattacataccgccaggcccaagccagccaggccgttgctcaaatcggcaatggaattcccgcttgaatcagcatggccatgagcaaagcaagataatttttgcatttgctgccaatttgttttctccttcacaaggatgcccactagatcaggactgcttggcatattccatggagcttggaggcgtttctaaatcccagctacgggggcactgtgcctccttttatgaatgctgaatgaaacggcctacaacaaattattttcagactgccaggaataatttgcattgcacctgtgtctaattccaagggttcaaccatgacccaggtctggtaagaagcgcaccatgttcaatcgcggaaggaccccgtttggactggacgggctggtcttgtcctggctatccaggcaggcaaaaaccaacttcattacaggtcgaagtcgagttccggtgcgggactctagcgcccttgcgctacccattattctttctcacattatctccgagaatgctttttatctttgcttctagttttcgacccttctttgcgctatcgcccagtttgcgaaggcttgattctttatatcatttcgtattctgctttcctatatttgtggtggattttgcaaattacttgcttgcttctcttcctgaatttctcctccaccgagaatccattggggaagacgaaaaaagaatcacaaaaaaagggttgattcaattcggttcgactgagatttgtatacagcgacggacagcgcagcgctttagcgaccgacaaaaacaaacaggacggaatggaaggaactcatttcgggatattatagcttctatatgcgagtttatgtgttatttttaattgtttttggattggtttttgtggaaatacttctgatacttcttgtgcgatgcagtcggggtgcagttgatctgcacttcatgagctttctgtgctcttgacgatgggcctgccctgtctactttcgggttatctatatagtgatgatttcgtaaaatcaggtttatataaacttcactctcttctagtaaaaaggtgttcttaacgctttccaaagtttgatgcttcgctatatgcagtttctctagacaagataagcaaccctattaaacagcccaaattcgccaaacaattccgacaggtaatgaactactgaacgggcttactaccgctcctcaacctcatcggcgaaatccgcattcaaaaaccttacaaacgcatcccctatttccccctctcttaacccacctcctcccttgacagccgcgtgtggcccagcaatgtacgcgcgattcagcgaaatccactgcctgcgtagactttgtaaccggcgggagtgcaag

SEQ ID NO: 2958 - DNA, 1311 bp, Emericella nidulans
ttaacataacaacaaaaaaaagggggggggcgcgggtttatgatgtctctttaaagggtcaaaggggaaaatccgcaaagctgagcgggaacttctccatccgggggggataagggaccaagggacgctcttaggcttggaaaacagtcgggggaggagcacttaaaaggtaggtccacctggggggcgaacacttgtgcaagagatcgtttcagacagtccagcaagcccggtcgctaacaaccgaaagccaggcgttacctgagccgcggtcaattctgagcttcgggccgtcgcttcatagtcgctcgtgaagtgtaggatatcggctttaatggactgtcttcacagggggacggtgcctgggagcggatggtaatgggtcgccagaagagaggtcggcagtggtggcaatgtcgaattcatcctcgaaggatgcaccagggcaagcgaagtcaggaccttgtcagagaggttgctgctttgcacgcgatacttgataccctcgaacttgacctcatcgtctgcaaattgtcaatatgctttagcttactgcaggaagaaaggatgggatggagcatactgtcgcggaagagagagactttcttgacaggagaggcatctttgaagaagttcaggtgcatgaaggtaacctcctggctaccggtgttctgcacaacagccttgatgcgagtgttgtcaacctgggagagggtgacctgaagcccagtggtgctggtcctgatgtcgaccggagaggcactggcagcctggagcacagccagaagagcagcgggggcaatgaacttcatgatgggtgaagatctgaggagctgatcgacttgactggttgactgattcaataaagtagctgatcgtagctgatcgttgctgcttatgggatcaaccacaatcgatggggatcacagcgtctttatacttttctcctccccctccccatcactgactctaagcgaacaaaaggcatactcatatctacatccgcggccaatgctgcattgagccatagccaaggacactggaaagacacggctgggcgtgaagcctcggtgacaccaaaacagaaggtggtatcctgccgtcgtcttgcattgccaagttcgttcttactgtgaaagtatatcgaagctatttgatgtcccgtccagtagcaaatccagacgaaggcgcaatagattcaccaattagggcaattggccgggcccggcttgaactgcctagattcattgcaacccttccagcatggcccgatataatgggggactatgaacccctgggcaagtagtgcac

SEQ ID NO: 2959 - DNA, 1526 bp, Emericella nidulans
aacacaacgcgggagacggccagtgactgcctcgtgcccaacgagtcacctttgttcccagaccgcccaacagctgccgggctcagcttttattctggaagtaatccctcgcttgttggaggtgaacagaacactgggacttactgatgtcatatctgagccgaggcctatacattcaaattaatgaatattgagcttaaaatagtctcaacggcgccttgacccttgactcgaaaatcttgactctggattaattaatttatattgcgagcgcctggatggaccctagtcgctgactcgtcgcctgcactcgcaaagggctatctacatacagaatatattatagcactgaacgctggtgctagctggtgcttgctggtgcggtgtattgtggcgtagtgatgtggcgctggcgtcgtcttagttggcccatggagaccgaccaagggggaataagtgggctgtccaacggtcgcagaggtcatgatagacgaaactggctgcggagtgacggaagagagcagcgtgcccactgaccaagaggctaataactattggccttgggaattgcgatttgccggcaatggtgtcaaactcaaaactcaaaagttctttccatagtctcaactaccgccccgtttctcgcgtgggactattgaataatgatccccccttggaccctgggggtggactggagagggttggcagacgccattataacacgaggaccacctgctcttggtgcccagtcttggtgcccagaggccggcctgggctagtcgagcattggagtggcggacgaaggctggagtatataatctaagtagtggagtagactgcctagtagtacgagcatagcctttttaacgaagcgtattctggtgagaagaggatatgttaccgcttggcctgggcctgtgctgtcggtgggagtaacaaatttaaacgggatgcagagacgatacaataaggaccaaagttttaagttgaaggtttgatatcattcattatcaccctgttattaacaggagaggatattatgtgtgaagactgaatgtagacgcctcagtccctgggggacttcggagtgctacctaccttgtcgctcgaagtggctcccgcgcggcgcatggcgacaagtctctcgcggagaattctctctcgtagttcggtgctagaaacgcgtgcttgctgtgcttgtggttttggatcggtgcgctataacggcgttagtctgtttagaaaaaccagttgaccatgcttagttaccctgaagtgggataagagaacacgactgggatagctgtcttaaatacctttctatatgggactcattcacccacctctttagcaggactcttcactttctcaacatcgggaggcggggacctggacttgcgtggtgcgtgctcgttttgatcagccattctctgtcgtttctcagtatggaaaaatacagaagaggaattgcgccttcgtcgcgcgatgggagcatatctctcaatggaccggagacgcttcctggg

SEQ ID NO: 2960 - DNA, 2077 bp, Emericella nidulans
aattcttgtagtaagtgatcttcttacccacctgggcatgcccatgtgcctcagccccaaagtaaaacccacacccatattagaaagtgccaacgctatttcatgtgttcttatgcgccagatcgccgcaattcttcctatgataatcatcgtcgtcctccgtgtgtacctcgttcgcgaaaacaaacggcgcgacaaactccaggccgctgaccaagtgtccagtaatggggtggtcgagatactggattcagatgggacgcaggttgcacgcgtggtggataacagccagatggatcttactgaccaggagaatttgaccttgtaagttctttatgtttgtattgattgtgcgagtgaggagatgctgatcttggtttactatagccggtatgtgctctgactatctgcgctggtgctaggtgctaggcgcaaggttcatcacggctggagcgtgcattccttgaagagagtgtttaaatgcgagggccttttgtatgagatctctctgtgataactgtggcggccagaactacacccttgattgtccactcctttgctgcacggacgaccaggtactgcactggcagtaagagagaatctgcccctgaatctgcccctgaatctgcgtttactgccccattccaatgcttatggagtcgcactaagaaggagcgaagatttgacattattattgtagaataaaaggaatgctgatatacctccgctacaatttgttattgcgtggcactatagtggagtttttcaaaccatggaaataacgccgcatgctttcggttcagcatctagacctctaggcaagccttccattgatacaaaagccaggtagcgaaccctttctgaaacaaaatggtcagacaaccctgttcagacaaccttattggcgtcgttcatcgcatcgtcatggtggtatctagactatcatgtgctttttaaccgtccatgccaccagggacccgttcgatctaccactgagccgtataataaggaaatatataaacctcggccttcagggttgtttgcctgagaagatatcaatgctcattcccactcgattaccccagtaattttgttgactttcaatcaagatgcctcattattccgagtaccctaccatcaccccctcaacctccaaacttgactacatcgaggctctgaagacggctgtcggtacagaaggcttgagaactcttcaacctgatgaagctaagcctccggggttcgacgatctgcaacaatctctagcaagctctactgcgagcactcccgcaaggtatacctgttcaacggacaaacctcttccggttacccttcgaaatatcagcaatagcgctgcccttcatgtcggctttggaggagtcctgccacgctgggcaagagacccccctcagacagtcaactttgcggcatttgcgaacggctacccgcgccctgtgctcgctctcgtcggcgcaaacgcgctacgagatgccgctgacgagtggaacaagctcgatctaggagtcaagtttaagtgggtgaggaaagattgaacatgctttgttcggcccttcctacgcggggaacaagggaacctgctctcataggctttttttcaaaccaggcttccttggttatttaacgttttttaatagacttcaagcccggaaagacagcactgaaaattcttttttgccagccttcaccggcgtgttccccccatttttccccaccctttaaaatattaggttctcttttgtccttaaatccttcttggtctggattgacttttctcatatcacatctgttcgaggtttagactccctatcctcattctccccattgtgggcatcttcctaactacatctctatttacctccacttacttattcacattctatttttcctttctttcctactcctgaacttatcgcatatctagtctttcttacctcacttcactctacatttcttttataccatcattcctccttttttccttatcctccatctcttccttatacttaatccccttttctctccatcctatacttactcatccctgccccatatcact

SEQ ID NO: 2961 - DNA, 1149 bp, Emericella nidulans
tatacagataactcttttgttcgtcgcggctcggagtcgggaggtggggagcttggaggccgtctaaactgctagcgtttgatagagcatcgtcacatgtaatctattattacaggattacacagtcgactactgtggtaagatggccaagttgcgacgacgacacgccaacgccgacgacgctgtaattccgggcttcctaggttgatcatcgggttcgtgaacagacatagcaaagaccccgatggatctatttttgtggtgtactgactctatacggagtcgcctataggctatagtgaagcggaatatcgacgctccccaccatgatgcaaggcacgggagatgaaagttctctattccatggtcatagcatcctctgctatatctccaccgcgctggacgacttacgttgtgggcttacggaggatggctgtccagcccattattaatactgtcagcctcgacctgggaagtgggcatgtattatttgtgctgtgctccgtacagagtacagtatcgttcagggacattatacatggaagaaccaccaccgggtccatttgttaccagtaatcggattctggtgaaaagttcaatatgggcccacccgccgctccagtttgggactctgggaccttgtacttttgacagcaggagagctcagaaattcagagcacgacaagagacggcagttgcaaagcgttaccacgaggcatactccgaattcccctcattttgctttctatctcttcgcaggacttccctccccctctcagtacggaggagcggccgtctagaagtcgagatggccagtgcgggagaccgtagacgagagactgcccccctggccggaatgctgggtcggccgtagtggtttcatctttaaagtttgggagcccaagccagtcagagcgtcccactagcgacgataatgtgcgtggtggctccaaccgccgctctccgcgctgtttggcgcgcccgtttggccctcatggctcgtggaagattgccatcatggctgttacgcgcagcacgaccagacactttcccttcagatggtctcgaggaaggcacaacacccttttggttctcgaggagctaaaagtgttcgaatctgcacggagtttattggtatgaactggtgtg

SEQ ID NO: 2962 - DNA, 613 bp, Emericella nidulans
ttggaacgcattagaacgcatagctgcaggttgcacaggcgcaaggtttcagagtcgcgagcatgggctcccgcagtaccaagccgtgtactgcgacgctacgtggcatctagcggtgtcgtctacgatcctggaaggtggagaatcactggaggcttggagctaaaccgcggggcatagtgcgtaaaacggtttctggcgctcgtcataatccatgcaccgaggcagcacgtacgtcctgcttccgaaccctctcccctccaggaaggattcaggtatgttgcgcactggccaggtggccgtttgatgaggtcaaacggggtggaagactgactctttaaagcgtcgacctttctcgcccgctgcgcgtcgcatcgccacgcatccgccgggggcattcaagattccgccgagatctgccaggaattctagatagctagggcctacgcttgaaaaattccggtatcagggcacagtcgtgctgcatggacggggcagaggggcaattccgggatctcgttagcataggagcccctatccgggaggtacttaagaaaatccagttcctcgtctctcatatctacatgccgttgaggctatatttaaccttact

SEQ ID NO: 2963 - DNA, 959 bp, Emericella nidulans
cgtcctcagcgaatttgcctcgacctcaacagaagaagagcacattaccgccttcaacactcgggaaacgaacccgagaagaagatccctctgtcgtacccgtcgaccagccgccagatccaggcccgtgcccagaatcatgttcaggttcaagttcaggttcatgctcagggccaagctcaacgtggaacatgaacgaaggtctgaattttgatatgaacgagtgtctgttgccgggtccaaggaatcgggcgttgagacgcaagatacagcgcgtgggatgggacgtgctaaagcagtgggagatctgggggttggatacgcaggagctttgattatgcttctctcaactgcttttacttttctaatgattgaaaccaaacccttacgagcacaacgcattatgcacctctcacgcaccatattcgctctttgctattcagctgagcgcaattccgcccatcaaaacgatacccgaaggagccctgatgctcttttccattatttatccacctaccagcatattcatctaccttgctacatactataatatacccaggccgcgcaacgcgtcaatacagacaacataaaccgtcaaatccttatctttactcatcccttttatacttcgcaaacgagtacaaaaagtccaaactatgtatctcccaatgttgctccttgctccgtctttccttttattctggctgcgctaggcggaaaccgggataccatactgcagtcatagcaacatatcgcattgtcctgacacctgtattcgtttgtgttccgttccgttccgtgtagttctgcggacttgtactatgcgcactgtttataccattctgcagccctttcattcgccagtcttcagtccgccggagttaggcgcagctgcatatacatgagggatcatctagatatttgatctttgtatagaattaggaatgggttatgataga

SEQ ID NO: 2964 - DNA, 1077 bp, Emericella nidulans
caatccatccaagttcgcgaggtctccgatttggaagattttgtagatatccgtttccttctcagtgaaatgcagatgcgcctggatttcgtcgcgcacggcgcgcaggagggagtcttcgatcagagggtgaatgacgccgtgcaagtaactgaacaatcagcgttggggcgcatcgaagcaattggtttaacgtacggcccagattcagcatataacttggtatagttctcttgtacggacggctcgaagagaccgtcgcggaagcgcaatgcgacttcctcgctggaaagcgctcgctttttggtgtcaggctggccattgccatccacggactctctgctgttggtcttgcgcttcatttttggcctctagaaagtgaccgacttgatgagggtgagtttcaaaaatttttgtgctgttaattgccaacggtcccgtgccaaagatcaggccatgctcaggctactgtcagtcggtgtggctaaggcattggagggtccagtcaaaagctttgcgatcatagaatagatataatagcaactatttgacatttttatcttgtagttgatagttaaatcatgtctgcccgaggagagcgtgtcaaatccttgcggagaaataccgcgttcgcgccatttatcgtgaatgtcgggagtcccgataagcactcaagcacgcctccatccagccaccatcttcacaatactgcctagcgaccctttcactcttctggggcttgtttggcatgatactatggtctagacgattttcatactcaagtacatgtatatggaaagagatattatacctatctgtcgcatatcaaacaccacgatggaccaacgtcatagcatcagcccagtcaacaccaccgcggtgcccgaatcagctatcaacagacccagctcagactccacaggcccgacagcatcgcagcaggatcacgcggaccaggttaatgagactcagcgtccaggaacacctcctcgcccgccatattcgcctgtaacgcccgtgttcgcccatctcgcgccggtccaggacccctctacgaacgggatgacacaaccatag

SEQ ID NO: 2965 - DNA, 1654 bp, Emericella nidulans
cggggtaccaccttgcctactttacgccagcatttctggagaatgaactcggtgccgatggtaccgatacgagctataacccggcgcatccatttacgcggcgcatgtgggccggcggggaggtttgctggccgcgggatagtaatggcagtgtgaatccattgagagttggcgagaaggttacagagacgacgagggttctaagtgcggaggcaaagactgtaagaaagaccggggaggagatgattgtcgttggagttgaaaaggagttcagtaatgaggccggggttgcggtgattgataggaggtatttttctattctctcaatgctgtgatctggctctgaagctgtatagaaactgggtcttccgcaaagccctcccaccaccatcgatacaacaaacccaagaccttcccccaccaacccctccctcttctctcccagccacgtctacgacaacctcctctccagacggccttacccacacacgcaccctccgccagacggccgtaacgctcttccgcttctcagcactaacgtttaacccgcataaaatccactactcgcagccgtggtgccggcaggtcgaagggcacaaggatatcgtcgtgcatgggccactgaatctcattgcgattctggacttttggagggatgtacggagctctgcttgtggggcggatgttgatgcaaacacatttttgcctgacagaattacataccgagcgacgagcccgttatatgcggaggatgagtaccggattgtgctgaagaagggtgagggtgaggacggcaagaagagtgccgtggagattattacgcctgagggtaatgttggcatgaaggctaaggttgtgggtgtatagcgtaaagcaggatacgatagaagctggttagctttgtatacctttgacgttattgtcatctctcctgcctatactccgtacctacaactctcaaccagtgctgacaacccaagctatcttccgctggctatttgcagtgcattggtcaggctaaacttaccagacaggtatatagaacgcacccggaggcgtcctcagagataattctttaccaggctctggaggtggtgcaatgacaaaggttgtagagggcagaatatacgaatagagtgcaatataagagcaaaattcagatccccttcggcgctgaaatatccccagaacaaaactgtagcccatcaacccatatattaggtaatgctcaaattttgacgcaaactgccatgacaacatgccttcattcactcatacaacacttcagtcgtcaaagtccttctataatgcatcgaccccataccctatttcaaatgtccttcacatgctccgaagccatcaaagctgccagagcatatcgcataccattaaggcagacccaagccgcggcactggcacaagcccaaaccccaactcactgaacagagcaacgacaagcttaatctgaataccccttgaacaagcaattccagaaatcccccatgaacgcgtaccggtctcttttccaccccttgacaataaactttcggccgagtttaatcagttttcggacttgcttctctgtccctacccattcgcgcgtctgctcccccaaacgataaagtgcacgccgatgtggatgagcatgcggtaa

SEQ ID NO: 2966 - DNA, 751 bp, Emericella nidulans
aggcgctcagagaacttctcaaacgcagcgacatcggagagtcctcccaggaagaggtcatcatagagcacgcccacagtttcgaaaacaccatccagaacctaaaagaagccgcaaacgccatcacaggcacgatccagtttattgaaagccaccgagcaattctcgaagccgaaagcatcacccgacttacagagctcgcattcttgcttatcccgctttctttcgcggcctctctattctcgatgcaaatcgatcaactcgcgactcccgtccctgtcggcaacttcattgccttcgcgctgtcgctaagcacgtctacctatgccctccgcctggccgcccgcagcgcatgggtccataaccaaaagcaacgcatcctcacttccatccgcacgcgaagctccgtgccccctggtgcccctatctccaacagggtaattttcgcatgggcattttctcatctcgcaccaacgattatactgttactggtggtggtgtgttttgtggtgccgccgtttgtcgttatctggaggcggcccctcgacgtgggactcaagattgggcttacctttttgtttctgatatttatagtcacagttgttggtatggtggtcttgttcgtcccggagtttcgcaacacattgagggatggaatgcagatccactggtataaaactgtaatggtggaggatggacccgctgaggagagacggccgttcgggcgatattataaaatggattgcagttc

SEQ ID NO: 2967 - DNA, 1550 bp, Emericella nidulans
cgcgggcgatccccggacctaggcttacctgggatggtgagacggtcggcaggatgcagccctactctgtatcgagagtggtgctagtctgaatgtagttgaatgtcactggatgttactggatgttactggatgttagctggatgttagtattcaggactggcgttcctgatctttcctttttctccggttaaccgtctacggaaaggcttcttgtgaccgctcgctgtggcgtacgggggaaatcccgggtaccgccacccgtcatgggagctttgagacgaggaccctcagctataaagctctgttgcagacgagcagctccacatcgggcaagataggaagcaatccgattcatgtgcaaaaggcacagtcctaaattaagagcctgagagctgggctagaccagggcccgcgtctcaggagtcgaatccaggtgttgtggagaggattatgcaggggcttgaaaccgggagaattaggaagaattgggaacgcttgcatgttgaacggcaggcgcagcaacaaagattccgacagcaataaatgcctcatagctggtgccgaacctcgataatagatcagcgatagtgctcgtccaacttgcccatttgcaacatgccaatttgccaatatttccattttttccaatattccaatttttccgaaatttagagtggcctttgtgggcacaaacacagttttttcgcgaaaactgcacgttcgcgcggccggatatttatcctggacttgtgcacagtccgtctcggcgagatctattgagttgggattcttccgagatggtgcctaacatttgcgtatcgcggcctatgagtcggtaaagactcggatgccatctcgatgcagtccgaagcgatagcaatcggcaatccaataacctcgtctctagatatcgtcccctccgatgcgagcgatgcaatgatcccatattaaatgccgtcgtatttgatacatcaccgattcaaccggtcctcgcctgctaaggagattactgtgcgagcggtttccatggttgagaggtctgtcgttcttggtgagtgcagctacacttgaaattatcagcgttttatggtcttctggatcggcccagatcctgttcatggttgccaatcttctaagttgtagtctaatttaatgcgttgtgcatgcgctactaaaggcttcaagatggtccagggctgagacacactttgagcgtgtttcttgaatgactcagttcttcattgatgtatatcacaagaccgccgctagacttgaggagctgctgcttcgggagacgatgtctgcatgtttgccaggtatgccaggtatggtattgaaactccgtcagcgctagttgcgcttcgagcctcacttaaccaagacgaagactatcagacggtggggatcccgcataaaatagccggcgttgtgcagacttgaagcggctggctttgcgctgtcgacgttggccgcagcgtcttatccgactattatgaatagagatagggtagcgcctgagatcctgcgcgttctgtctacccgtgcgt

SEQ ID NO: 2968 - DNA, 359 bp, Emericella nidulans
ctggccgctcttatactctacccatgagtcgttgaccataacaaacaagctttgtaggtccagaacatctcagaccggtacggtacaaattgagcaacaaatcaacgattaaaatgaaaatgtacagattactcgtgtacacgattaaagtgtcaactccacagctggcggaagtcaccgaagactccagtatgataggtgaaaacatgaatctggaaatctcagtcgttgaagttgcaccaaatctgtgaatgacatccaggtctatcggcggcaaaccaaccattcttattgcatgtcgacgccgtgtggctgtggcagtgcggtcgctgatccatcttggcctacgtacagttagc

SEQ ID NO: 2969 - DNA, 1161 bp, Emericella nidulans
ctgtagtaatggaactggatagcccaaggattcgtgatgttttctggaacttcaaaccactgggatgtcttgatactatcctggccacctccgacaaggttaacaacacgctgggaattgaacccgccagcatcagcaattgcctgaaggaaaatactgttcagtttattgatttcggcgccgtcttcagcggtgttcgctgggggttcgttgatggattcaaaagcaaccaaattgggcttacaccccaaagtggtcccgatctggtaccacaggcgatagaatttctcatcaatcaggtctaggtcggcgccggaagcagtgacatcggcccattcccacgaatctatgtacaatgtgaacagacgcttttaacttggggaccataaatagctgctcaccatggtggacattcacgatggcatacaagtctcgagaagtgatcgagtctaggacatcagagacgcgttgcagccatgccgggtcgacagtccagtcaggagattctccagtgaaatgatgggtccaggtcactacgtaacgtgagtatgctgtacaacaagtggctaatgatgtctgtacctggaagacgaacgctcttgaaccctgactgtttgatgaggtcgagcgttgctgcctcaacaggagcattgttccaggaaccttcgtctggaatggcgtccagagtattccctagattccacccaggatggatgtttgcaacaaagtcctctgcggttatgggagtaaagtttcctgaacatgtaacttgggtgtatgcaacctgcaagagagcagaaagccccgtgattgatagtagtctttgcattttgactgtgcacaagtccgcctagatattttgataagttcggatcaagtatccaaatttataaatgatgccagaactctaggggagattgttcgtccatttaatccaggggtcacccatattgtcgtatatgacaaagattatcccctctatgtaaaaaccgggacaagatataccgaatattgcgaaacaggggtctaaagtggagagattccgggtgaaatatgtcattcgagcttcctgatcacggaagaacgggccgttctgtataaaggcccagttaaggcccgatggggttatgtcagtcttcaccagtcaagagagtatgagga

SEQ ID NO: 2970 - DNA, 1713 bp, Emericella nidulans
gccgacgcgtggggggatctcgtctggctgcgaggcgatggtgtctgcagagcaggtgttgccgttgctctccagcatctgatccagatcaacgccgacctcggacccaaatgctgacgtcgacgtcctctttacggccggccgtgttcgtccctcgtggacgtgcgtctgcgcgtgcggctccttctctagctgacgttggggttgaggctgtcgctgccggtcaccatggctaactgcagccgcagccgcggtcttcctctgcatctccaattcccgcaagtacctaagtataacgatacgcctcaatatcgtcgttaatcatcatccgcatccagacgcacctttcaggcaccatgactttgctgacggtctcgaggaagcggcagtctacgcggcggcgctgacagttggcgcagggctgttcgcccgtgcatttgatcttgctttggcggcaggcgacacatctacagtccaattgtcagctatatctgctttctgtatagagacagggcgagggagacgaattgtacgcatttgatgtgcgtttcagcttacgctggcccgtccgggtggttgccatggtgaaggcagttctggcaagattgagacgaggatatatggcagatagcaaggcatcggggaatgagtggaagtgaaaatgtggcaggcaagagcgtgtatcgtggtcctactccaatgcaggctaggcagctcgccccgcacgaggcgttcgcctttggagatcgcgtggggaatgacctgcccttttgagtgaagaaagcccgaagattgctgaccctaatctactgcatgcatgattactgttaaatggttgcataggctgcgacatggatagtggatttggatcaggggagggggagctactagagagctcagctacaatggtgataaagcagacaagccgtgccttatctctcccagggtatccgtctcgctatcgtgccggatcctgtggataccgccgagctgacgaagccctgctctagccctttttgtacagctcatcagctccttgcactgcagttctcattgggcgatcggcttgcgaacccgagatggcggggtgagggttcgcccgagatatagaaagtagacaaacagttggcccaaggcacgatataaatcaccatgtcctacgcatcctcgctgtatttcacccgtattagaccccaatttggaaagatcttgtcactgctcaagatgttcgacctcctcgtcgtaggcgccggcctgagcggcctgcaggccgccctctccgcgcaacaagccgggctcaccgtcgcagtcgttgaagctcgcgaccgcgtcgggggcaagatctggagtgtcccgctggcttcggggcgtgggtatgctgacctgggcggcgcctgggtgaacacgacactgcagaagcgagtcggcgcgtatgtcaagcagtttgaactgaagactgtcgtccagcgactggaaggcaaggccatcatgcaggacggtccgcagagtcgattcgagtttccctttggggtgacgccgagcgaggttcgtccgtccctgcctcccgtactaccccatatcagcctcgcctgcagggcccataagtctctaacgaacgggtacagttctcagcagaagcactatgcgtgtccgatttgctgctgagatcctagtattctatagtgtcacctaaatcgtatggtatatcatagg

SEQ ID NO: 2971 - DNA, 2338 bp, Emericella nidulans
aacatcggcttcgcggtgccaaaggcaacattatacccggtctccgtgagggctgcgactagccccgaatctctcctgcgcctcgacgacctttgcgctggcagggaacgtctcctcggtcgtatacccgacccagtcgttcaacgcacgactggttaccagtagcgccgacgacgcggtatgcgcgaccatccccggttcgggctcaatgaagagccggtttgtcattgcatggcgcagcatgcgcttcaggtggtcctcgtcgacgcccgtcttggccgcgacgtcggcgtagctgacggcgcggtctagagggattgccggcgcgatcttgaagtggtagatccagcgcaggctggacatgtcatggtagcggcatgcgagccagcggagatgctcagcgggaccagtgagcaggtcgatgagggactgcgccgcctcaatgagagactggcgggcatgctggacatttgcaggggccgcggggaaggcggccggtgcatcaggagcgaaagagggggtgggatgattgttggatagcagaaaggtgtcgattagagaggcgcaggaggagatttgggatgcgagcgcggtcagactcaaattcggcgaattggtttcattatccctgttcgccatggtgcctgcaattgaacgtaatgtatgtgtaacctagtacttgcttattctttgtctatttttcctttttttctattccccttttggtctgctgtggactatgggggagctttaggccccggcactgccaatcagactgcagaagagggcgatggatgtagaggaactgaaataaggtttgagaatcctagcacgcagcagagcagggagttcaagggtcaagctcaacttaaaacaaaagaccaatagctcgcgcaagctgaggagcaggcttcaaaagactgtggagtgccgcgagggtcgggagccgaggggggccatgcgaccacttccacccactctcctcgggggaatcggatatcaaggcatggatggggccgcgtgatccccgccatcattgatacgcagacaggcaggccgaaggatcttcgtgggacccctaaaccgcgttgttcctagtgagacggactaattccccttttccagccgcgttgagtgtgggctcattgggctaatgcaatccccactgccgcaccggttttcaatgccccgatcttccgatcgattcctctgtgggctgtcccatggcctttgagaatcatcgagacctggatctcttcagactgcgagaatccgtacacgctccctcctggactggacaggatggcagatcaaccgcctgcaggacagtgcgccaccgtcgctgtgcctgtggataacgatgtaaggactccatattctctggagagcagagcagtagcggctcttggtactaactggcaggataaagtttccagacgacgatgacacgtacagctcagaaatgcaagccaagcccctctcccatacctccccctacctagagataagaaagaaaagaacgaaagaagaaaagaacaaaaaacgagaaagaaaaggtgttgagtatgacaaagtcaggacgctaataatgtcttcagtgaaagctatgcaacgtctgtgaactcgtcagtgatgaactaccactggcagtatggtcgacgctatcatgcttttaaggagggcagttagttctatctgaattcgtccttggatagttgactgatgcatcaggctacaaattccccaacgacgagcgcgagcaagatcgtctcgacatgctgcataacatgttcaggctggttctggatggcaagcttttcctgtcccccttaaaagacgggccgttgcgtgtcctagatatcggcaccgggacggggatctgggctattgagtttggtaagttgagctgactttggattcttggataagacacctaactctataaccaactatcagcggacgagtttccgtcggctcaagaggtagtgcttcatcccattatgaagggtaaagactaaattttgtaggtcacgggcaacgacctgagtcctatacaaccgccgtggtccgttccccatcggcctgacctacacccttatctagtctggaccgtctgctgagctatctagggtcccacccaacgttgtatttgaggtggacgacgtcgaatccgagtggccaccccggccccccttcgacttcattcattcgcggtacatgtgcgggtcaattgaggactggcccaggctcgcacagcaagcttacagtcagcatcaagcccggcggctggatcgagttccaggatttctatctggtagattactctgaggatggatcc

SEQ ID NO: 2972 - DNA, 4157 bp, Emericella nidulans
ttctcgacgaggccttggatacagcaatcgacgacaagacgtttaggtctgacgacctcgaattcacatttgcggctcgcgtaagttcaacccgctctggctggtactcgaccaggcaatccttctatgtgctaacttacttcccgtccaggcatggtctgattgtgtttcatttggagactttgaatcgtaccgtgaccgattcgagagaatccagcagtactttgctccgcggttccctgatgccgtcaagcttgggaatgagatgatgaaaagaattctggagaagactagcaatgagagttcgtaacggtggaggaccaagtatgtattatcgtcggatgctcaagtgaggtctctagacctccctacgcaatagtttgacaacttggctgaaggaactgtagagcgtagaagcttctataggtaccctgttgagataatctaagcgatcccgtcgcaagtaaattcatccggtgaactgggactgtacctggttcctgaatagatattgaatagagctgaatgtacaggtacggacccacgactgggtaattcatgatagctggttagtcagcagtcccaggttgacttcgtacttcttgagcccgaaaccgactgacaggatatgctttgatagaaggcagctgtcctaaaaaagaaagagctaatggattattgacgcccatccgattgcttagttcgtcccttgtcccgtgtgacttgctttccgattcgactagcgacgtccgcgatcacaacgccctgtcccctccaacacatcggcggcaacactcgaaacgagcacttctacgttcgccagttcccgtctgcttttgtatactaaagatctgtcgtgtactcaatgcggctctttactcctcatccccttcgcgacaggtgattgagacgcctcgtttgcggctagatggagccccatggcgtccggatacaactcgaatttctctgggacgtcgatccaacaccgcgccgccggcgatggacgctccttgtctagtcaggatggcggacttgcggatggggagatggccccgccctgctttctcgaaacccgggaggaattcgtcgtttcgagtccggcgggagtactagcattggccccgggggagggtcgcttgcgcctttaacaacaagacccggcagttttagcgcggaactgaaaagcatgaagtcgtctcgaagtaccactccgcgagctgaagtacggcctgactacgcacgaagacccagcagcatcgactatgacgacctaccaacctcagaagaccgccaggccgcgataagagataggatcgccaaagagatgaaaatcaagacaggaacggagaatatgttggaagtactgttgacaaaaaatccaaaacagacgcgggagcagagactaagggcggagtcggagctgagctcgtctaatcgtaagctcgctgaactgcatcatgaacttgaggaggaacaactgcgtgcgcaggcgccatcaacccctcctcgaagtcgtctctccggtctgtttcagggcccttcaatacggtcaccctctcgcgcgaatatgtccgatattgagcggttggacgataccgaggcggagatggagtcgccaacctatgtccttgcggagacccttcaggctttagaaattgagttaatgtcaccggattactacgtcgagcgtgcgaacagtctagtcgaactcttcagacgacatcctacactgaagtatgaccttgcttggtcggtattcggcttacgcgttcaagttatgcttctaagtgatagcaaggaagttgtggcggccggatatcggttgactcgctatgccatcgcagatcggaaatctcttcagatgatccggtcacttcacacagatgagctcgttatcctgtcattggtcaaggaaagcaaagcaaatctcgagcgtgagcaagctctgaaattcgtgcgtgcattcctcgatgtcaaggatggagtgaaggagatttcacgtgctgttgttcggacaatcgtctccgtagctgagcaccatgatgatcgtcttcgaaatatttcgcttatgacgctcgccgaaatcctggtgaaagaccctcaactaatagcgtacgctggtggcttttctccgttgcatgacgcattatcagaaggaacatttggggcatcagagagtttgataacatgcttcctgcatgtgctcgatactccccacagcaggatgcatttacggggagggtgtgaacttgaggctgtactcgcaccttttaccgattcattgtccgacaacattcgcaacgggcgtctaaagtcatcagcaaaggcaatatccgcgatgctaaagacatggccaggattggtgattcttggaaagaacggggcaaagcctctaaagtcgcttctggagtcattacattatccggaccctcaggcaagggatctaatcatggaacttctattcgatgctctgaggattaagccaccatcgtggtcctcctcgtttctcgctggacgaagacttacaacatacggccgggtcgcgaacctgagatctgagtctgacacaagacaactccggaacttctttgacagcagcgaaagccaatttgacctaactgctcacttctccactctcattctcgccgctttgatcgatgctggattgtccaaggtaatttattcccaattgagtggcccatgtgtattgacatcccgcaggcactatgtgatctcattgaagaggaggaagatttgtccctcaggcgaaaagcgaccctgcttctgacagaagttctaaagctggcccaccattctctaccttcaaatatcagtgcgaagctccaggtgctcccacacttgataccgtctgccattagattcgatgtcgagaaccatgatgtgtctacatctacaatctaccaaatagaaagtatcaatagaacattggcccggtccctcggtggtctcgccaatggagccggcagatatagcgtggatgttgatatatccgcctctcttttgtccggagatcagaacaaagacaaactgagcccagccatggatgagacacaattccgcaacgcgattctggagacgcatgtcttgaatactgtgaactacctgaagtggaagtgggatttgatccaccgcatcgtggaaggtcctctctcaaaccccaagaggctggacgaggcaatcaagggatcaaagttcatgaaacgtctcatgggattttatcgtcctttcaaatacagattctcagtgctcccgaatacgaaaccaaatcagcgatatgttcgcactggttgcgccttgatgcgctgtctggtgcagacgccggaaggcataaaatatttggcggagaacaaattcctccgacaggttgccgaatgtcttgcgcaggttgaccatatgagtggtttgacatcgtcggcgccgttgttctcgcgagaacaaatggcaaacacactgagcggcggctactttgccatgctagggacgctgagcgccgaccccaacgggctcgcgatgatggaacgatggcatatgcttaatatgttctatcatatcattgaactccgggatcgcgacgacctaatccagacgctcatcgggaacatggattacacccaggcaagccatctacgggttatgctatctaaagctcttactactggctccaaagatattcgcatttttgggacaaggctacttcgaaaatatactgtggggaatgtgtcacccacatcagttagcaatgcagactgggtcatcaagctccttgtaactcaattatatgaccctgatgtctccgtctgccaagtagcagtgaagattctggaggaggcatgcaatcagcgcgattaccttgagtttgtggtcaaatgtcggccgtctctggaccatctaggtgaaattggtgcgcctctgctgttacgcttcttgtccacttcagtcggctaccattatcttgatggactcgactatatcacgcaggaaatggatgattggttcctaggacggaacgatgcatacgtcagcctggtcgaagccgctttgtctcgagcctatgtggaccatccccgtagaaacagcttggtacctgaagatctcgttgatcaccaggatattggtcttgtgcctccacacttcta

SEQ ID NO: 2973 - DNA, 1559 bp, Emericella nidulans
aaataaaacataatagagagatgaatgctagattgcttatagataatagaaatcataaagtaggaaagataacagaaggatggagagaagagaggacgccatgagaggaaagaaaaaaatgtgataagatagaagaaaattagttaagatgtgtaggaagcaaacgtattcggttcaaatatagaggggagtcaaccataagacggcccgtcgggtatcgaataagcattagcagtttaagagctagaacaaggggcagatgccccccgcaaaaaacacttaggatccggtgacaaaggtagagccccaaaatcacggtaacgggccactcaagccaggggtcaatcggcccggacgggggtgtgcagtaagcatgggcgtcccaaggccaagcctggcaaaaaacaagtaggcctcgggaaccgggccttaacttggggcaaaatatccgcattgataaggaggcagtgcttaaaaaatcgacccaattgagccgcgtttctggatctgcggaaacgtcagtttcggaacaatgatctgctgcaaaaacccagacgtacgtcctcctttcactccactctatgttctagctaacttgctcagtgtgaccgagaatggttccatctggactgcgttggtctctccgaggtacccagccgtacagcgaaatggtactgtcctgactgccgtgtcaaatttaacaaaggtgcccacggaatcatcagacatagttcgttacgccggtagatttaggaatagcctatggcggcgaactgaactcattgatacgaggctacgatcgcgttttttcctattgctcctgtgcaagttgttttgttctgcttgtttttgatctgaattggcgaatctttttttttcttcgcgcagcatggcatggcggagtgcacggcaaaggaagggagatggcgctgggagttgacttgtttacaatctacctcatataacttgagtgtttgcttgtctagaatccagaggtgctgcttagaacaccgtaagcggacgctggggatcgttctacgccaacactatttacagctagctagctaggtacttcgtttccccaacactttccttgtacagtagattcagaactactcaaggcattacctattcctttcatgcctctatctaagctcccacttcccgtccttttcgaaaatctcaacagccctcttctcgtccaaactcacccttcctgcatgcaaaatcgcagtcgtagcaatcgtgttcttcagcgtgggcagtggtcgattatccagctccttcaaggtgactcttccttcattaagcgctgtgatggcgtcaatgaatttctcgaaactgatataaccatagcctgtctgcccgccgaagttgccctcttcgtcgggggcgtaacgcatgtagaacctatcataagattgttagaggtatttattagggcaaggtggacaaagacgcacggatttatccaggcgaggccggagtcgtcgcctgttacgtcgtagccgcgctttgcttggttgacgcggatctcgcctgtagcacccatgtctatc

SEQ ID NO: 2974 - DNA, 1074 bp, Emericella nidulans
ggagtggggggaaaagatagttggggggggggttgtgaggaagaagagtggggaataagaagggatggtgggggtcaaggaagaggttggggagagaagggtgagagggaaatgggggatgtgaggtgggaggggaagagggaaaggatgagggggggaggtgcatgtgtggaggggagttgaggttaagaagagcgaagtggaggggtgggtgggagggagttgtggtgaatagaatgtgacagtgagaggagagaagaagagaaagtagtagtagctgaaaaggggtcgggcgctatcgaagtggtcggtatgccgcagggtagagaggcgcaacatggttgaacaggcccccgggcgcagtataaccgcgtcgagcaatccagcaaaatgccctctgaaacggacatgccgagatcttctcagaaaagcttgtgaaagggatgcagctgcgataagcatgttcactaagccccaccgtccagaccctgcgatactcttccttcaaactcaacgaccctttccatccattccgtgcctctctactgaaggtgctggaaccaacgatggcgggacctctctcgtgtgaggctcaaagtttaggcttgtctgctgtttgttcggtgaaagttcctgtaggtttgacactcatgggtaaactgatcgggttttgtgtctctggagaaagaatcggagtgtgttctgctggtgtgggctggtgaatgggccgtttcccttcgggggacggtccccccctttttttatacgtctccccctcttgttcagtggctctgagtgttaagtggctaactgcattgcagggttgatgatttattgggttgattaccctggttttaatattctcgagccttgactcttgcagcaacacctagcctcataacataaacaacttgataggaagcggacttgccattgggccaaagggtacgaagcgtactggtatcatgtgttcggagctggtgaagattatggatgaggtataaaaaaaagtcgtactttgcattccagttggaaactagcaagttaagttagggccggactcttaactatggg

SEQ ID NO: 2975 - DNA, 2012 bp, Emericella nidulans
cgcgtagggatatcaaagtgctgtcgaccaataatagtacctcgtgcgcaaaggcgcccccctgtgatgctgtgccaaatatcacgaagccccgggttctggtttagcatctttgctggagttgtctagtcctgtcaggtattgtttgactaatgaaggggtatgacatacctttgaatagtcattgcatttgaaaagatgtgtcgttcgaacaaggccaatattatagtcccacattactgtccactgtttttcttctcccggaagctggaacgtgtactgaaagactgaggaaggttagctattatttcaagaactttccagaatcttgctcgcaggcttaccctcaaagctttctcgccctgtcctttcctgaaatgatttcttgtcgctgttatatggaatatgtcttggatagtcggcaatatttccaagaggatggatacggaagtcctgatgttgacaagaaaacttgccgtctcggtcttcgtaaggaggatagcgcacctcgcctctgggttttccgcgctggaagatcggggcatctttggccatcttctgcttcttctgacgaggagaacgtagcatggcagtgcttgaggagattgtcggcgaaggagtgggaagaggacagcgatccgagctaggaaggctgggaagaggattgaggagaaactgtatagaagccattttatacgcgagaacttctccaccgtcacagataaaagcgtcttgctgctatgtcggtgaggttgcccgtctgcgaataatagagcgccagagaaggccgcaatgctcggaaggcaagacagaggcctgatttatctgccttgcggattcagaaactctgatcggtttgaccgcccttgtctgatttaagacacagggaccaaaggattctagaaggtctggtgaggtctcaagagggggtgagttacaatgaatgaggatgacaaaaaaagggctatggaggattggcagcgatgcacgagcgtgtttgaagccgacagatagctaggcgaccatggaactggcatgagaggaagaaagagtgaaagtagagaaggaagggagggggcatcaatgatgagaggtgatctcccttttgttgataggtttgttgagtgaaaggctttccacgagtggataggtgacggcatctggtcaaaagctgtccagatggcttcccctcctctctgtttgaccgattgggatatggaaatgcagggcgtgaagtcctccgtctcttcgaggagcagcggtgaacctaggtcgtgagtcaaataccaattctagacacccagagttgacagatgtcttggatggggaaagcgtccggcatgaaataacctctaccggttcttaatcccaggaaggcatcacgaggcacacattaagaacgggtcaaaggttgctggacgatctgccatacttaaaccccagtttgagtatagtaggtactcccatgggcgtacctgggtaccctgttttgcaacgttctccatttagcgctcattcaacggcagtgccagacgaacctatcctcaagggtacgtctgttttgtcactagcttgagaaccagaaaagccgctcatggcatgcaacttgtcgaggcttcagctgtttcactcgttgtctgcagctacccaagactaggctgacgcaggcccagcgagagaagacatggtagatcacgtttcagggactcctgcaaccatgtggaggtcctgcagacccgaccgtaaattgaaaccaggcttacggccttctgaaccagatactcactccctcgcaaacagagagaagacagcggtctggcatgcgtggtctgtacgtgagaatattaggtgctgtcctttgagagctaataataggaccagaggcatgtattgcagcgcatcactcgccttcagacatagacatgcatggtctctcgtctctcccgttcccgagtcatgaaatacagagatattgcctgaagatggggtcaacattgaaagtcttgtgctgt

SEQ ID NO: 2976 - DNA, 1169 bp, Emericella nidulans
cagaatattgatggctttcgcagaaatattccaccagacaagatcatcatccagaagacctcggtatctacccactcaagcgtccaatgcatctgacaggcttgataggttgctaggttctagcgaacgagaaggtagcggttcgcgatctggaaatgtcctacgtgtacctctacctagggatcagacttcattgtcttttggccgtgacttcgactccggctgcaatagaattaaattctcttcaacttctcgaagtagaataaaagatttgtccagcatatctgggaaaagaggacgccaattttgtgaacgtagaaggtcaggaccgtcttgcatttctggtaccttgcctttataaaggtcagttatcgcatcgatattttatttgaagtatcacttgggctaaatgatttagacttgtagtgaatataaccgcgaagtagattagaggagaggccgtctattgctttcttgtatgcggctataccattgtttgcggcgtgatgaagctggactaggggctagatttgtgctcctgctagaggacggctttgagagattccttgaactttcatcgatttgaataaacatcggttgtggattggaaggaaagagtgagagcagctatttcttgcctttcgtgacttgttacaatattaagtagtgtattcctgaggcagggtggcaatcaagtgagtaaatcgaatgatcaaagtaccctctgtgcttacagaaggttcgaaatagatttctatcgttcttcaactgactgtgtagacggcgacttattgtagaagcagaagatatagaagagagagattgcgcagagcgagctaattcagaaatattatggactgttgaatgttcaagaagatgtgatggatgtcgctcttgccatagcctgcttttggcaggagaagcagcctacagcccgctgctatagccgcacgtgtcacggccctgcgcgccatgatattaaatcctgccatctcaactcaaaatgcctgctgtttcaaagtagcccttaccttgtgggaggtttcacagccctgcgcgccgtgatcatgagccagcatgaatgacagagctcatcctggcacggtgctcaaggtgagtgtcgagtggctatccagttcatcatgtacactgatatagagaagcatgtg

SEQ ID NO: 2977 - DNA, 1171 bp, Emericella nidulans
  unsure (1)..(1171): unsure at all n locations
ggcatattactgccatttacctgtgattcttgtaccagcgactccgagaagctaactttcttagagagaactgcactgttagcaaacaggagttcattgtataggatgcactattttcaaggatcactggtcgcagaaggacaattggaagacgtgctgatcgatgacggtgcgctcataggacgtgttgcagagcctagctctaacgatacttggatgaggaattaacaggccacatgcgtactaatttgcgactggtaaagcaagctagaagtcccagggatagagctcgcgttattagaaacgcaccgtattattgaagtcatcgctaaatcaggttaactgctagccagcaagcagcaccatgttaaaagagatagaagagcacatactctatcatgtgggaagcgacccacagttagatgtactgaaagtatcccggagccccagaggcgaggtgcaggatcggacctgcgcctggaacgaggtaggtaagctacattggacggggtagggcgacttggacgatgccaactgagtcccagaggtgcttacgaaggcagcatagacatcgatcgcatgcaagactgaatgttcgcgaagaagacactaatgtgactaatgagaactaccccggctgggtcatctcttagttatcaatggctggtcctgcatgttgggtgtttgaaaactccctgctcgcctgtaaggctgcttgcggcgtgctgcgagtgtattatcttagagccaatctacggtcggaaggccatcctagctgggagaaagcattcccactggcactttcccgcggtgggttgaggtggaantttaaatttgaggggtgggacccccccccccccccgaagctttagtttgcaaaatcatttttttgtggtggtgaggtttgaatttttctcgacgggtggggcctctggcctattagttggagagcagtccgagtccaaatagttattccctatttctttaaatcttttggtagtggttcttgttctgtagtactcatttaattgttgctccctcctcatacctatttctcatttttagtatcatcctctcttccatccttcactttcttctctcaacattacttgtttcgcttgttcgatccacccctgcttctaatccctcttttctaatattattctatctt

SEQ ID NO: 2978 - DNA, 1244 bp, Emericella nidulans
  unsure (1)..(1244): unsure at all n locations
atgtgaataaggtacgtttggcaccctacctaattctcgcctctttatgttctgcaatcagtggctaatattgttgcgtgtgcgtatagctctctgccaaacttgccgagctcgcggactccccgaccacaatcacactcgacggactgagacaattagagcgaaagacggcgactgtatatacgctgcttaaggcgagtgtatacagtatcctgttgcaggagcagattgtcaacgaaggggagtggcagcagcaacaacagcagcaggatgaggggcaggagtatgctacggggactatgaatgcgggagaggaggggatctatatgggggagggggacatgagctatcagcagtactaaccaacgcaaacggttgagctgggggttgggcgtttcttggaatggttctacatagatattgatcaggttgttctgggtctgttttttcagtctagctttggttataccccttcggcggtgtttatgaaatgcttcaaattcgacacaaaatggatgggacttaatttatcgattcctagtacagatacattggtaaattgttgaaaatcaggtattatatacatcgtcaggacgtaaccagaaacctcgaactggaaaccagacaatgcgcccgcagcataatcgtacaataatagcagtaatctagtactggagttgacgtggccggtcttctcttcccgagtagtagaccttgcgcacatcaaccagcttcttgcctcgggcacgggcaatctcctccgggtcgcgctggctcatcaaggcttcgtatgcggctttcaccgtgttcatcgggtttctggctcgctcgacacgagccgcaatgtcgctgataccggctgctcggcacatctcgtaaatcaagctctggcagcggagtccgaaacctagattggccttgttagcttcgctgagcggaaatgtagtattgaaaaaattaccgggaggacgggtcatcagtttcagctcaacggcgcccactttgcccttcacatcgccaaagatcgtgcggttctcgtaccgggggacaggtttcatgtttctaatagcacggtatagcgattggactctcgcatccgtggcttcctgtgactttccttcgccaataccaaggagaccgtttccattaccggcgacagttaggatatatgtaaaatcactttaccgaaacgagtctggtttgtgacgtgtttcacgacaagagccttcgtcctaagancgaga

SEQ ID NO: 2979 - DNA, 1788 bp, Emericella nidulans
actacgggccgtgagtgttttggaagctttcttgaaatttcttagccattgttgggaaagatacatagaagagtaaagagacgtacctgagccatcgcggatctattgggaggaatgtaggcgtaatcaggatgatgcgggctgtcgctcctgcagataactgtgccgtatgcgaaatattgagtaatagatgaaacaattaaatggtaaactgcataattcttcgtgtccaaatcctcctttaactgatcatctcattgtcaatacgttgaggttgttaagttgggaagccgtcaagtgccaacagtaagtagtgcgacagaccagttccagtgcaggtgccagcggttgccctccacaaccggccaagcgcccgcgccgccagcaagtccgcctccaccagccacgagccaaatcgccaaatgcaggacgaagacgaacccggtcccgaaagataaaacgcaaaaacaccatcgagttccagcttcaagttgagcgaaagcgagctagagcgctacgttcactagttcttagtcgacccctcttctctagcacttcccaaacctgacgacatgcaatttgggcttgccgaagactttgtttagcctgcgcggcgtcacgagtcgtctcattcaccactcgccctctctacgtgctccagattttgtgaggaggaaggcgagggttccgacaaagactatagggtcccttgctatatttgttgtttttctctttaactatactccgtgcttcttccccttctttgagatcttgcggtacagatacacttttttcggccatttgggactgaaagaaacgacgacagttgtttcctttacctttgtcaccatttctaacttcgtacgaggaagaggtagcttaggtttatcctgcctgatgctccctctcgactgacgattatttccttacccttcgatatccgatcaatactttaattttcgtcggcatccaataccctgcattggcctcgattccctcgactaatatgactccgtccacatcacatatttcgagccaactaaggcagctgatatattaccaatctgacaacaaccttgctcggaacgcgctgttccttgccggtcgtttacacgcctacgaacctcggacgtctgaagcttcgtacctattagctctgggttacctacaaaatggtcaggtgaaagcagcatgggaaactagcaagcattttgggtcgaggggtgcgcatcttggatgttcttacgtctactcgcaggcttgtcttgaccttgggaaatatactgacggtattaacgcgctagagcgaaataagggacaatggactttgcgaaaccactggaggaagcaaatcaattatttatacctggttggaccttggctactgtaatggcaagccaaactgatacttatgggctcttaaccggtttgataaacacagggagaagcgacaacacaatatgcccgatgctggtgcagtttttttttgcaaggaaattatggcaggccacatggaacacaacatggctgtggattggtacactgcagctttaaagcttaatccctttatgtaggaagcattcttgtatctgtccaaaacggtaagctctattgccctaatggaaatttttttttaacaaaattgccaaggggggattcgcggtttaaactatataaattactccaatttccaaaaggattccttttgccctaagtgtaatccatttaccccgcggctcctctacaatttccatatcacttgaccccccggtctattgaaaaaactta

SEQ ID NO: 2980 - DNA, 577 bp, Emericella nidulans
tatataaaaggtatcaggcctttagcttttaatattttgataatataataaattaaatattctattaaaatctttgcatccttcaggccaatattatagataaaggtttaagagctaattatttttattttttgcaaaatctttatctattagtttttcaaaatctatgaataatattgggactacacgtatagattatatctaaatttaataaaagtataatatttttaagttattaatctagttgtaattaataagattattcttaactttatgtatatctattttcttagaaattatctttcctggaaatgtgtttaaaaataataatttataataagttactaggctatatattaaatatatagctttttaattagagcaggtattttagagaagatattattaataatctagaaggtcttttagtgtttggttaaaggtttactactctaactttctgtataccgcaataaggtatatactgaaatataaatctcttctaatagaaatttttattcaactactatattgaatcaatattattaaccagataagcttaaatatttattttagt

SEQ ID NO: 2981 - DNA, 944 bp, Emericella nidulans
ggtattcatgtggaggtaattccgaagctatgatccgggatcggagttcccctgggcaaaatcttcttcttccatctctcgcaggttcggctggaaaccggaaacttctgcgagtcgcttttttaggttgacgcagctttgatagataccctcattgccgcggcggttgatgatgttgtcctcggcgacggggccgccggggttaaggccagcggtgtcggccattgcgacgtccaccgactgggccctttaggaagagggggcggagggggaggagaggcggctgatcgactagcgatagggtatgggaggttcaaatctgcgcagcagtcgaagaaaggacagaaaaggatggagtagtagcggccagcggaggttgtacgacagttgtcgtcaagtcaagcatggattactgaagaacgccgccgcgttgagccagtggaccgatgcgggacggatggcgcaagcgagcagctaaggaagggagtggagatagcggtgctcactggcgatggtggtggacactggcaatgagcaacaaaaggtgatttagtttcaatggtccacagaaaagtaggttgccagaagactatagttcgctcggagacaatatatgcgaatataactctggtccaatccttgttcacctcttcctggtcagtttaaggccggaagagaattatcgaaagcgatccctaagatataaggggacagtgtgggcgtttggcattgcagtgatcctgcaaccatcagggggtagctaattcagagcacaagctccgtctgctattgaacaaaggggtataagaatgtaggttggacagtaaagacgcacagtacattagctcctgatagccagggctatgcggttgaggataaaacacaagaaggcgctcggtcgaggagtcgcagtgatttgacagcgagggagcacagatcgtaaa

SEQ ID NO: 2982 - DNA, 2154 bp, Emericella nidulans
cctgaatgacatcgtgttccacgaaagatgttcacacagtatgaaagtgttgccctttcgttccgttcctgaaagtaccgaacaatcttaattgctgctgaggcgtgctctgaaaaatcctgtacctcaaaggtgtcccctgatttgcagttgtcgcaagaagcattgcagtcctggcgcttaaatgattcgctaaaatatgcaagtatctgaactctcctgcaatcatttgcattctcacagtatttcaccacgtcattcagcattctggtctgtcgacctttttgtacgtcgtcagaatcctcgttcttttcgatcatgctctgcattgtactgacatcccggtgagagaaataaaggtagcagccagagcgtctgccatcacgcccagcgcgtccggtttcctggtagtatccttccaggctcttgggaatgctgtgatgtattacaaatcgcacatctggcttatcgatacccataccgaaagcaatcgtagcaactataacatgtacatctccagcttgccatcgttgttgagtccgtgcgcgcgtttccgcatccaagcctgcatggtaatgctcggctttgatgctatagtttgttcgaagggcttcagctaccttttcgcaggtgtttcgtgagaggcaataaacgatgccacatttgtttcgatacgttgacttgattgtgtccgctatgctgtcaagaagttcggcatgctttcccttgcgacgaacctcatatgtaaggttcggcctgttgaagctttgggtgaatacttcgcaacctgcattctaaggttgtgtacacatcgaccttaacattttccgttgccgtcgccgtcagcgccatcaggggaacaccaggtatccgtgctcgaaatgcgccgatctgtttgtagtccggacggaaatcgtggccccattgactaacgcagtgggcctcatcaatgacaacccgcgcgagcttctggatgctacagagcttttcaatgcggtcagtaagagcgtggcttttgctaatcatttccggtgtgatgtagaggagctcgatgtgcgtttcaggattatgactagacagggtgctcatgatccattgacgttcttcagatggcgtatcaccattgatcaaatatgctttgatcttattttgtcgcaagtgggagacctggtcctgcatcagactcagaagtggcgaaatcacaagggtaacgcccctggttgagccgctggagataacagacggcagctggtagcaaagagacttccctcctcccgttggcattagcacaaacgtatcttttccactcaaggtcgagtcaattgcttcaagttgattaggtcgaaatcccctaaggtgaaatctctctttcagggcaatcttcacatccttcgtccacggatgctgaccccaaagtgtaccatgagtttgagatttctgcgtggcgggcagcctgcggacatttcctgaggtctcagcaaatactggacgactgcatggttcatgtctatctttggtgaacggttgctcttcctgacaattgtctgcggcttccagaatatcctcatccaagacatccatatcgaagtcgtccgaatcttccaccggcggcagagtagaacccatctttccggtaaaggtcgtctcattgtcactcgttacttcatggtttttggtacgattagcctccggaatcccgagactaccagtaaaagagcttgttcgatgatttgaagtaaccaggcgagtttcccttgcgtcgtaatctggtctaaaggcactattgttagcgacaggactgttgcgataacttttgttctcagcgccgccaagaatgctaggcgctgtagttgcaggtaaagaatgtaatcgctccagttcgatttctctggtttccagagagaactctttcatgaccgagaacaagtccgcctctcgtaacaggagacacatgttagcctccatatctttcaattgcgacgtaagttccttctgctgttcaattttcggcaacacatccgatgtaccttggttcagggcatgcataatgacatctttcagagcttttgattctgcttcgcgcgacaagtaggcagacttctgtgcagttaaggccttaactgctcggatttgagctgtgagtgtgccgttctt

SEQ ID NO: 2983 - DNA, 227 bp, Emericella nidulans
acctctagggatcaagagatccttccacctcagcctcttgagtagctgggaccacaaatgtgcaccaccatgtccagctaatttttaaaattttttgtagaaaggaggtgtcactatgttacccaggctggcctcaagctcttaggctcaagcaatcttcccatctcagcctcccaaagtattgggattacaagtgtgagccattgcacccagtctaactttttttt

SEQ ID NO: 2984 - DNA, 1477 bp, Emericella nidulans
cacgcctgccgttttcacgcattgagtcaattgattcattgtcataggttgctggagaatctgggctaggaaagaccacgttcatcaacactctgttttccaccaccatcaaaaactatgccgaccacaaacgacgacaccagaagcaggtcgatcgtactgtcgagatcgaaatcactaaggcagaattggaggagaagttcttcaaaggttatattgaacggccctggtccaactaggccactgctaacaagaattgcgctgtatagttcgcttgactgttattgatacccctggatttggtgactatgtcaacaaccgcgattcctggcaaccgatcatcgagtttctcgacgaccagcacgagtcgtacatgttgcaggagcagcagcctcggcgtacagacaagatcgatatgcgtgtacacgcctgcttgtatttcatccgcccaaccggacacaccctgaagccgctggatattgaggttatgaagcgcctgagctctcgtgtcaacctcattcccgtcattgccaaggccgatactcttagccccgctgatctctctcgttttaagcaaagggtacgccgtcttgcgccgtattaacaaatccgaaggtgtaaagctaatcgcatatcatggttaacagattcaagcggttattgaagcccagggcatcaaaatttacacacctcccattgaagaggacgacgagactgccgccgctcacgctcgcagcctgatggcggccatgccgtttgccgtgatcggttccgagaaagatgtgaagacgaacgatggccgcgtagtcaagggtcgccaatatgcttggggtgttgccgaagtcgaggatgaggagcactgcgacttcaagaagttgcgctcaattctgatccgtactcacatgctcgaccttatccacacaaccgaggagcagcactacgaagcataccgtgcccaacaaatggagacccggaaattcggcgaggcttcggcccaggaaactcgacaaccccaagttcaaggaagaggaagagaacctgcgcaagcgcttcaccgatcaagtcaagctggaggagtcacggttccgacagtgggagcagaagcttatttgcggagcgagatcgcctcacaaggatctggaggctacccatgctgcgtatgtcccttgattttctgtatatgctcgtccaggatcgttgggctacttggatcagcatcaaagtttcgaagcgagaccaaagccgcaagctattgctcgtagcacggcgcgcttacatttcatacactgaagcggggagtgccgttacgccgggaaagcgagggcataactccaatcttactcgcccccctgcgttttttttcataggcaaattgaccggattgcgaggttctagtaccaagggtacgccacatgccgttatgtgctcccgagtgttttaaaccctttccctaaacaaaaattatttgtgtgggggt

SEQ ID NO: 2985 - DNA, 1589 bp, Emericella nidulans
  unsure (1)..(1589): unsure at all n locations
tcacttgagtgaaactacccccgagtataataaaaatagccagctgcccctagaagaatctattgtttccctaaaccacccaagtatttattaaagtcagaggccctggccgtttagtccctcaaagctatgccataccaattatggaggcatctattaaccgttggtcctgaccaaattgcccctctgtcagtttctccaaaacctactagtacggctttcggcttctttaatgtccggccggtggtattagccagtatatatcaagcttcagtcatgtcgaaatcatcgttccataaagaattcatgccttcatgacaagaaagtacagcctagcccggtaaacaaggaacggtcacaacatcctcatgacgaggcgtccaagggaagtgcgaccgagacctaattgtacccaaagggaaggctcttgatccatccatcaggcacagacggcccatgcccagaccctccctccttggagagccaacacgatcatgtctagactcagtaaacagaatagaaactcctaagagcgcgatacgagcatatgtggtgtaattggacttgagtccttctctttaggcatattctttcaatgttagatgcgtactacgtagtaagtagttaggagctcttatgatgttgcttctcggtgttcaacaaaacactggatgcgggtctctggcagatttagaaaataagataaatatattcaaagtcggtggtcctgtaggagtattttaaggctcattggtaaagaacgcagtggtttgattctaataatagctgagagatggctggagacgcacgcgtcaggcaacttcattgcaacctaaataccaggaccaagcgatattcaaagaacctagatgggaaagggtatgcgtacggagatggtagccatgtctacgcgggatgttgttacatatggtgggtagaacctcagaagagttgcgagccagcgaaataagcagaaggcaccagagtaggtattgaacaagcataggccactaagacgctcacgaatcatatacaccagaaccagaaccggagtcagaaccagacccaaaataaaaggaacgcaaaattgtataatcaaccacatgttggtggcaataagagagttttgttgcgaagatcaggaattggtattcataggtgagnaaaagggagtatacatagcgtgtcaggggtgggtagaaagaggatagccaggggagaaactggttcctgcaggccctctttatgtggccgcgttgctagccgctgctgccttcgcgagccgttcttcgacacgttctttgtgttgtcgatttcgaagatgaacctcaaaattatccaccgtcgtagcagggccaggtgtatacagtttcccgggacaatcgtggcacctgatgcgtggaagatagaggaatttcaacttctggttggcttgagcctgcgagtgggtgacgggttgcatggtttccgtatctacagccgtgtaccgcatcactgcttcgaaaaagtcaccccggcccgcctggttgagtcgattgagtcctgaaacgaaccaactcggaggggggggctagaataaaagcatcagt

SEQ ID NO: 2986 - DNA, 4699 bp, Emericella nidulans
atcctgcattcctcttctctcctcatgtatcctttgtatcgcctccacagccatcaatctcctttttaatacctaactgtttgggataacggtgtcagcccgtccttggttgtctttctgctctcgcctttcaggaaggctccgcgtcgcaaaccatcatgggcctctcgaaaaccaacaggattatgatcctgttggtcattgatacggcgttctttttgctggaattgattgctggtttggcaccctaggttttggcatccgcccgtctacttataccctctaccaggttactccgtccactcgcttgccctcgtcgcggattcgtttcatatggtacgactcatcgaacctactctctacatatcctgacacgctctagctgaatgatgtgatctcgttgctcgtcggattgtgggctgtcaaagtggccaaccgcgaaacgtcatccaagatgtacacctacggagtgagtgtcgtcccttcctaccccgccctgttggaatccggcctgactgttggatacagtggcaacgggccgaaaccctgggtgcgctagtcaatggtgtatttctcgttgctttgtctttatctattttcctcgaagcgatacaaagattggttgagccacaggaggtcaggaaccccaagcttgtctgcggagtgggatgcgccggattgctgtcgaacatcctgggactggttctgtttcacgatcattcgcacggccacggccacggacatggacactctcatgaggatgcggagggcgttgatgccgcggagcaaggccaggtccacgatcacggccactcgcatgcggggcgcgatgtagcggtaaggctacctttcggcacatttctatgcaagcaatgcgctcagtctgactcgttcatagggcgcaataactgaacccaccgccgcttattcccggcgacggacaattgacagccagcaccgcagctctcgccgaggatttgaagagtattggcggccacccggctagcatgaggcaggacataattttcgcggctaaccgaaacaaatttcccgatgaggacgacagctatgagtcaaatgaacgcgcggaggacggagcgggagataatggcgggcctactgaacggtcgacgctgataggccacacggaccgagcagcccattttacagacgagcacgcttcttgtagggaccaaacgaaaaagaccctcacgagactcacaaccacgctcagcctaagcccaaggacaaaaagcacggccatgatctcaacatgcgaggagtctttctccacgtcatgggggacgccctaggcaacattggcgtcatcctgtctgctcttgttatctggctgaccgattattcttggagattttatgtggaccctggtatatcgctcgttatcacggtgattattctggcgtcagcaattcctctctgcaaagctgcctctcgcatcctgttgcaggccgtgccacatggattaagcattgaccacatcaaggaagatattgagagccttcctggtgtcaaagggtctcaccatctccatgtatggcagctcagtgacactaagactgtcgcttcgatccatatccaagtggacaccgagatcaaaggcgagggttctgagcgttacatgcaccttgccaagcaagtaagacaatgcttacacgcctatggcatccagtcatcaaccatccagccagagtttcctcgcgacagtgatacagaagacaaccaggtgggctcagctcacctgccatcgggcagtcccagccgcaccccaagtattcgagacggcgatcctcaggcctgcctgttagaatgcggcgatgagtgcgccggcggtcactgctgtcccacaaagcccacctagagtcctctacatccgttatcttttggcctatttatactcttgtcttattactagctgtttccaaaagagcctgccccgaccttgcattgtttataccccattcctcaactgtgtcaaattactcctgttgcgtcatatgactacttatagatagcctaatgctacgcatgatacctactctgagatattctgcaccgtcaccattgcttttaggccgtcgaggatagttgacttgcgcttggattgggaccgtgatcagttttgaccgcaccatggaatagtgagcaaaccgtatggaaattttggatatgtctgataatctaaagtcagttcacaaattcagaaccggtcttccctaacagagtacaagtgttggttaaccaagcgtagataaatagtctcacgtgactaggccctgtcgatcgttgaggctccctccctgaatcccagctatttcggggtcgagacctggaggcttccccgtgccacgactcatcttttatggctccgtcctcagccatttcaaccatctactacccttgaacacgatgtcgtcgcttacccagtaacgtacttgcagtaatcataacaagctgtcacaacgggctttcgaacgactccctttaaccagcaaagtggcctcccgacatccgcggagcaatgtgccgaccttgagcgcctttcaccacccggttgagcttcgaccatgagttattcttacctacctacgagcacccatgcttacggtcctgctcgtcgagagattacctcgtccggtattctccaatccatacatgatgcgctgccgcactgggtttcgcaaaggatgtcgtcggtcgtccacacggcgtcgaatcagttggaaaagtacaagagtcggactgagctgaaagcgctcacattgagaataatacgaaccctctttacggtcacaaatggactgatcattatatggatatggacgctatggtggggagagcggaccgtgttccgcgacagtgtagatgcgtgcgcttgggacgcttgggagaaatgggtgagcttgtcgcgggcattattcattgaggtaatggaacaatgctgatgtttcttatttagccgagcaatgctagacctcatcatgtcgccttcattgcagacccgcagctcgttgatccgcacacttaccccgaccgcccgtggcctctgtctaccctcaccatcaaatttacagaccagtacatgcgtcgctctttctcgtcaatacaacacacgctggacccggactcggtgttattcctaggtgacctctttgatggcggaagggaatggtcgacttcccgcagcagcagcccagaagagcgttggagacaatacaacgatgatttttggaagaaggaattccatcgctttgttaaaatcttccttggtccgtggagtagccaggagacacagtctacgaactcgcgaggtcggagattgatcgccagcttgccgggcaatcacgaccagggtttcggctcgggggtccagctaccagtccgcgatcgctttcagaacttctttggcaagggaaatcgagtggacgttatagggaatcatacgttcgtctctgtagatactgtttcgttgagtgcgatggaccaaccagatccccgtactggaagtacgggtggtggaaacggagatggcgaccggccaaaccaggagatctggcaagagccggaagattttctgaatgccatgaaggtacaccgcggtcgcgccgaggcggacgaactgcgtttcatgggggaaccaagaaagggtcggctgttcaagcatgaagtttccgaagtctcaaagccttcgatataccgagaagatgacccagagattatcggatttccggctatccttctgtcgcacgtgccgttgtaccgcaagccagccacgccttgtggaccactcagagagcgatatcctccctccgcagatggcttagaagaggacgagcaaaacgcgcttaagatcagtggcggatatcagtatcagaatgtcttgactaagacaatctctaacgacatagtgtccaagattgggcccaacctagtccaggtatactctggcgatgaccatgattactgcgagatctcccaccgcgagttcagcggttcgccgaaagagatcactgttaagagtatatcgtgggcaatgggggtccggaaaccaggctttgtcctgacaagtctctggaatcctatcgaccctaccaccgggacctccatcgagtcttccagccctggaagcaccatccaaaaccacctctgcctcctccccgaccaactttccatcttcatctactacggcgtcatcctagcattcacccttaccgttcttctcgtgcgagccgtcatcctcgctctccgccgcaccgaatctacaaccccggaacctatccttccgctcaccgaaaaccccgtaatccgcacccgcagccgagctgtttcgcatacatcctcttcgagcatcccaaacaccgccttcatcaaaccaggcgggctagctagccgcgcgacgaataattacaatccccgctattccccgccacactcgtataatgacccctcggcctaccccagctctgactacattggggaaaccgatacatcgaaatggaagccgagccacgcggatcgcgcgcggcgcggaagtgagacgctttttggacgggcgtggacagagttcacccgctcggtcgagaacgttgctagggttgcgctggcgtggtatttctttttgatttgaatgtggtgagatttcttgacaaggcgttatcatcgtgcatatagaggtcttgtc

SEQ ID NO: 2987 - DNA, 1349 bp, Emericella nidulans
aagaagcgtagatgaagcagtagcaggaggatcacggatcaagagttctcaactgctgggtccagatcgccccgtggagaagaattaatctcgatgaccttacgagtcaggacctcacggctcccgactggcgtactcttaaaaggacctgatttctctgattcccgcctcgattacagtattggctcctttctttgcccgaggtcctttgtaaacaggacacagcacttaactggcactatactccgcaccgagtgacgattattggcttcagcggacagggccccgtaggctattccgagtcttctttgccgtttacagcgtactccgtagggggccgacgacggtgcttgcttctgctccaccgagcgatctcttgtctttgagacccagtcacggcccggcatcagcggcagtcatcctacaggaagaggaagaggaagaggacgaagtggaagaaggagcgtttcccagatacacattcagatacacattcgacatctcatacgcaggaacgaattctgcatctaagaccaaatcccggatttcgtgctggcgcctcactaggagcggcaagcaatatttcgatcggtcatccagatcctggcttgtcgatggcctttgcagatctttcgactcctctagcctcgactctagcctcttgggagaagaggtgtccacaaggccgccaccatcgttccctttcccaccggttgaccgaggaccagaaaaccccgtaatacccaagccttggagcggaagctagccatcagtaataattataattatcctactaataattataatgctgattatttttatctttatttttatttttatttttttttgtttggtttcatttgatttaatttattttatcttatttttattatactatattattttattattattattttctacggctgcttagtatgatatcatgcatccgtagtggccttcctattgtggttccaatcgccgaggtccagcagaattgtccttattcccagttcactaaagaatggcatagatcggaaagccgcagctgaggggggaagggttcggcacctgccagggagtctagagacgctcgagagccgtcttttcaggagaccgcgagcaagacgccactggagtccagcaaagaatagcaccggttcccattaactcaggtagggaaatgccagttgactcgcggaccaggtagagttcgacagcagacatagtgtctatgcctatatgttgctaatatccgtagttcttggtgttgcaacagtcggtaccgcaccggaatgtcatgactcgcgatgtaaactttgaggtcttggtcgatctgaccattgatg

SEQ ID NO: 2988 - DNA, 1281 bp, Emericella nidulans
ccatagctcgtatcgtccggcacagacttactcaatatagctcgatggtaccgtcgagtcgcagtgcgatctgacgatctctgcatcgacaagtgccgccagtcgcagtcgagtatgatacgacatacggtatctgagcgtaagttggtgaatgggcagccagtggagagtcagccaaaggcatgaaatgaccccgaggaggccgatcagtcgggggaaaacgcgacggcgctgacgggtgctcggaacggtagagagagggaagtggtctctgcgatctagatcccctgcctgcttctccatcataagtgaagggcaagcgttcgttcgatgtggtggacaatcaaggggagagatgcgatgatgggtcgatgtcgatgatctaccgcgaggtctggagtctggagtcgagtttggtctcgtgtgggggatgaccgcacacgccgagacccactgcaccggaatttggcgcccaaacacgaaaccgcactttgggtctacatcagctgtatagaagtggccgagaacggttccaacagtggcgcttggtcatcctgatgattttccaccaacaagagcttgatttgtgcgagctcgccgcaggaacactttttcgctggcctctacggcgcttattgccaggttcgcctatcgaatcctgcattgtcggcgccgattaacagccaagaagaacggggtttggctcaaagtaaaaggaacggcagaaagcaatacaagttacgtctgatagtccattctcggtcacagcgcaggtacggctgctaagggctctcaaaaattggcaatgcacagacgaaacatcacggaatcaaaaacacctgccctgaaaggataaaaatgtcgcatactgctaccttacaaggtgccttattgaaccgttaaattaaattgctactgcttacaagcgcttacggtactcatttgtccacccactttctcgaagctaagcctgcctcaaccgccaacttcatctcttggctacctatcttggccacacactctgcggcgctcccccaagaccccctcactgtgggatctgctccattttcgaggagccacctaactcgctctactgcacccgccatgacagcctcaacaatggcataattggacacttggtttccctctggggcccttgataatgactgacatgcggtccgcgttctacaagtaacgccatgaccggaatcctacttctgtcgaagtccttgctaagggtttgatagccattacgtggattccaatcgggaggacgggctc

SEQ ID NO: 2989 - DNA, 4755 bp, Emericella nidulans
gggaccattacgcaatgtttggtcttggagtttggacccctcctctcgggacccaaatggggcagcctaaaggtgggttcgcttgtaggaattccataacgccttctctagctttgtgcactagcggggaatctgttttgacattcataccgggctgaaccggccaggcacatgatgccacaggtttgggagccctttcgacttcgacgagacacatgcgacctaacacgagccaaaatcagtacagctgcccgaatcaatttacagtgttcgaggcttacagtttcccgcgatcattagcttcctataaagtgcgttagtagccgacaacggaagagggtgagggggataagaggaggggctggcgtactcatggtaacagtatctatcatagatcgttagcatcgatcaggtatgaaagcacaaggtccatatcaaactatacctaggaattgtcgctccggctttctcgcatgcttgaatgagagccgagccagctgcgttgcaggtgagtaccgtccttcgtaaacatttcagcaagatagatagttaccttctaccgaaacctttttgccatctaatgcccggaagtagtcagcaactgatccgtactattagggatggtgtcgaggcataccaattgtaagctccacctcagcagagcgaggaactgtcgtcacgaaggtcctggcagtgttgacctttggaacccggacagaccgggcggccgcgcgaaacagctgcggccgcatgctgtaaagaaagaaacaaaaagaaaaaagaaaatggttaactagagggtgacaatggaatgaagtggccgatgtgcagcttgagttgaagctgataggtatcgtttggttaaagcacttttggcgtaaggttggattctcaagcccggcccgggcgttcactcgcaaattgccgccttgagattggctcggcagtacggggaaactcagagtccgaaccgtaccctttttcttgctttctcagcaatcccggttcggtttttctttctttcctttccatctcatttcacgggcatgtttattgtaggaggtagggcgtcgccgtctctccctcctctgcatcatgatccaagagcaagatgcactgagctggagcacctgaaggccatcgtttccaattactggcgaagatgcctactgaggggtatagttccttaccgacagcggcaacatttccatttaagagccagccaatgtaacttaagttcgctttcttcctagatcacacacacttccattgtttacgcctttcgcttgatcatctggaaggtgcgatgaataaagaagtaatgataggatctcgtaaatttgtttggcaatattggacctcccgtaggtacagacgcaatttcagggcttcatgcatttatgtgttggaaaagcttgcaaagtacctgcaattagcaaagctacacccaaaaatcgcgtgtttctatttgtgctccgaatttcaatacgcgcatttgaatctctatatctataaagtcagaactccatcgatggtacacaatagaagcaagttagcttcaacccaggacaccaaatacaaagcaatagatttattgagctaggaatagccgcttaagagtcgcttgactgccaggtcgtctcctgctttgtaccaggtggcagccaagctttcgtgttgctactcgctcttgggcgtgcatgaccgacgccgtcgtccttttttgagttactggagatgggaaatgaacggtccaagacgtgctggtcaacaggcctcccttgtgggatcgcatagccattggatcccctgagtttgctcgctccgcgggtgttcagagggagaatgggatttttgaagtgaaagtggtccgcattggctttctggtctgcgacgtcatcatggctattgcggtcgtataggtatagcccaaggaagggtgagggcaattccaaagccctgacgggcgtagtagaattaccaaaccaaacaatcgcgacaacgatcacgaaaacccttttgataagtgacgcgacggaatatgagacaggcgaaaccatagaaaggaggacgaacgccaagatattctgagcaaagtgagacaccccgttgaacacgaattcgaggaaaagggcgccatgatccaacgatccagctttgttcgtaagagagatggcgccatcttgcatcagatcagagaataaggggtagccctcggtgaccaaccaaatgggtaatgtcaggataaaagctaacccagagcaatagtagagtaggttcaacttgtccagtttgcggcgaccagcagactgtatatctgactccgcacgctcggcttcgttgaagagttttttagagaatatattctgtgatacgaaaacaagggctgcaaccagcgcacataggatgccgaaaaaattcgtggagaagcctgtggaacaagcaagcattacacccaaggtcagtggcacgagagataaataggtcgccttagcatagcgaatgcggaaaaggaagcggtatgccagcacggtgaataatggcgaaagtcctttgatagtgtgcacaagcgaaactgggatttgcgaagtggccattgaactcaagatatgacctgctagttggaatatggcgagaggtagcgccgtcattatcacatcgcgtgacggcgggcgtatgttgttcttgagagccggtatgctggttttaagccatggtaacttggtggacaggtacgaaagtagcaggcaccacaaggacacgaaggcgaactggaccattgtgagagtaatgggcctcggaagcgcgttcaaaatggattttgaggacgtattcgttaatgctgaagtagtataccagaaaaggcagagcatctgcggacgagtaagcgactgcaataggcgacggggttggaaagccgtactatgagcctgtacgacacaggtgctctaagcgcttgagccagatcttgcgcatttgcactaacactaccattgcgagtcctgatggcacttatggtttcgctgatgctctttctcggccttcgtttggaatcccggactggtttatagtcccagcgatcactgggcgcatatctgactgttgtgtttgggtaaagtgttgtcggctccgcggtgccaaattgctcgtcctggaacgctggaaacttatctattggactggccatgggctcagggctagatactctgactgatgtttgcaggtcggtttgtcgtatcgaagagcgccgcccagtcccagtcactatagtcgtggtcatttccttcccctttccgggcacccctatgcgacggacttcaaattggtagcagaatgagaaaagcggtcaaagccaggataatcgaaccatgtacgttgctcaaaatcgggcgctgaggcgggatacggcgaggttgccgctccggtagcacttcgaattccggaggtattcgaaggctagattatgcagctatcaatgaagctaacactggtcgagtaagctgtggaggatgttataacatgagtgagctctaagcagatgttcaggtactatccattcttgtcaccagcgttatcgaaacgcgaactcatcacggtgttggcggagttcttaatgtctgacgggacgagcaacccactagcgtaatttggttttagcgcggtctgagatgacgaatcaccgaatcactattgaccagtaggatttgagaaatggacaacgctgcgagaccccaggctctgggtctcccaggtcccgtgagtcccgttaaagtcagtcaaatgctcgccatgtgcctagtaaacactggaaaagctataatagagttatgagattcatttccccacacaactacttgcgaacatattaactataaattgagagagaataagcagcagaacggactatttctagtatctgcctaccttgacaaatagactaaagcagattgcgaggagtttctgacccagggtccggagtcctcagggtacattaccccccgcctcattgagatagggtcatccccccagggaggatattacagccacgcgccatcagtttttagtctccttgacattgagaatgatgttctgcctaggacacccacctgttctcctggcaagaatgcttatccttatagcattgtgcaacagtgcattgtgtggcaggactcctagccaacaggactacacgtcacctccccaatattctctgaacaaggacttctcagatgttcagttatccgaaaagtggcaggtcctcggccccttccaatatgggacaagaggttcgtcttcatacgattaaatctactaaacgaagtaatatgccaacgctatctttaaaccgacctagaagccatttggggggcagatcccctagagtaccggggcggatttcgaaacgtatcctttgatgaagaagttgaatatagcagtcctctttccacagacggattcgtgaaatggactcatgttagggccaacatcacgaataccaatgctgaacagagcagagcagagcttgctgtggccttccctcaagtagattggggattacttcaggctgtctacgggtggtctgcgttgcaatatcaggcctggacgcgcgggtatatgtacttgaatgggtcaaatcatcaagcagtcgcaattttcacggaaggtattttggagctatcaattgacggtcaacggcacttcggtggtgattctacagttatcgcagagcaccttgatattgactattgccccggg

SEQ ID NO: 2990 - DNA, 1547 bp, Emericella nidulans
agcgcccctagcataggtgatttactcttctttactaaatcgagtaatggtgatctagcaatgtatctcatctgctttaatcggggtaatgtgaatcgtttgcagcatccagcagccatcttactggttgcaatctgcatggctggcttcgtatagccatgtattgatggggagaatataaccaccgcaaacgtactcaatctgctgtagggaagccgattgcgtacagtagtttcttctgactgaccgtaggagttagatttatatcattgtaagagcagcatcctgtctccaccgtccgcaaaatcatagggcattccgagcatgttctgtgagcccggatgcgagctctcctcaaagtaaagcaccgcctccatagtctcgcaaacggcggcttctggtggctgttttcgccagcctgtctatcttagttgctctccagcgtatatataaagtggtaaaagaagcgtttcagcttcgaattgtgccattatccaaaccagcatcgttgttatttcaagatttaccaagtccttgagctcaaaatgaaatcctccaccattgcgctgcttagtatgcttagccatggaatggccttgcccacaccccaggcaaccgagggtgagaatgagcagaacaaccaattacttaccgctaagctaaccatatgactgaagaccaagcgcctaatttagatgcgcccactacatgttccagcaacccaggcactgcagtcttcccaagcatggccggctatccaggcttcatgggtggctggcccggtgttctgggcactgcaccctcctctggcacatacggcaattctggtttctatggattcccgggcttcggtggcttcgacgggtctcacagcatgcctggaggtggtggcggagcaccaacgggatcaatcacggcaggacctgctgcagccagttcccctggcttcggtggtttccctggctttggtggtttccctggtttcggtggctcctctggcttcagtggattcccaggctttagtggattcctaggttctggtggattccccaacttctttggtagtagcttgaacccaagcactactacccaaggaggcatttcgcacaatgcctgcactcctgtgccacacccccttactaaaggcgaagatttggaagacgggccagaaaatgcaaaagcggatgctcctcagtcaacacccaaagacgaccgcccggccgataatcctgacaaggccgagatgattgacgccacgatagaacacattgatgcacctcaggcggctacagcagccgctgtaccttctcccacggcagcgccctagattgagtgatggtgcaccgggcatggggaaatctcgagcctcaactcctacagggaatacggaagtatttactgagtgactttcgatcgtggcttttgaaatgtgagggagtgatgtgccctaactttgcttgtagtgctgttatcggatagtgttggggaattaatgggaatgttatttgggccaacattacggattcacttgcggcgaattcatttat

SEQ ID NO: 2991 - DNA, 2530 bp, Emericella nidulans
attttctcgcgcagctccggctcgaaaacctggtgatgctgcgacagcatatcgatgagctgctggccaaaatccttcgttatgtcgggatagcagtctgcaacatgggcaatgaagtcgataagttcacgcagcgagatcagacctgtgtctgtggcggacgagggcgctgccatgaaaatttcccggtgactttcatattgatagtgctgggcgcggaaatcttcgatataggacctgaggagaaagaatggtcaggatacgttcaagtttagtcttgctgcttttcatgcgacaactcacttcggatctctgcggattttatgttgtaaattgggcctgtaacggaggagatatattcattagcgacagatgaaatttctgggggacaggcggccgtgataaacgtaaagaggagtaatacatacaaatcagcctcgaccttttccagggcccccagcttcctcttgaccattttttcgtgaagaaaagaatcccaaggtattgtccttgatgaattagagggagtggccgaaaaaagagatgttgagagatcgaggttgtcgcgccaagaagcaactttttttcagactgggaccgtatcgataacgttgtcggagggtctgcgccctcgacatttaaccattgttcataatttaaggacttcattacagcaatctgactctttaggtggagttgaacagaagacttcttgagtttattattctactgtatcattttcattgggatttcagaaatgataacttggttagacagaaaagggaataaattttcgtttaatagggatgttcgtggtcgcatccaaactactggaggaaagccgtccgattctctcatattttttggatctcactccctttcgtgactgtgcaggtatatacagccgtgcagacgtttgcaaaacgactgaatcccagaaactccccgtccactccagtaagcatgaaataggaccataaacggagaatacacccaacaaaaccgttttaccggttgctcttagccacacgctcaagctcgtccttcttcttgatagcgtaggagttggagctgcccttggcggcgttgataagctcctcagcaaggcactcagcgatgctcttgatgttgcggaaagaggcctcacgggcaccgatggtcaggagagcgatggactggttgacacggcggagaggagagacatcgacggcctggcgacggacggtaccagcggaaccgatacgagtgctgtcttcacggggaccgcagttgacaatagcatcgacggcgacctggagggggttctggtcggtcatgatgtggatctgatatcaagtcagttttctgatccattattcaaatactcaaccagtttgccgtatgtgggtacacatacgatctcgaaagcgtgggcaacaatgcgaacagccatgagcttctttccgttgttgcggccgttcatcatgatagagttggtgaggcgctcgatgatggggcactgagccttgcggaagcgcttggcggcgtagcggccagcggtgtgaggcaggtagacgggagagcggatctggatgtagtcgctgtaggcaattgcaggtcagcgcgcgtttaccctcgatggtactgtgtaatcctctatcccatgctattcccttgcgattcagttgcccgtctgcatcccttcaatttctctcccaactgaacgcaataagaccggtattttgccttaaaaaaaccctccatcgcagtaaacgcaaggggacaccaaaaaaaggagatgtccctgatctcaacatacctcggtagcaccacttgttaaaaagcttaacggttcccatctccgcgagagcatccttgggcagggagtcgtaaaccccggcggggatatcgacctcgacttcaccgtgttcagacattttggctccgtatgcacctgttgtcgagggacggattcgtgaggtgtgtcggacggtttcgttggttggcgatcggtcggctgaaatgtttcttcgacaagggaaaatggaggtgcgcttcgcttagcactgtgggtgggttagggcaggccgtgtagcgaatcaaacgccgtctgtcatgtgagcatcttgccaatagtctgggcggtgatagtcctaatatggttagactcatcttccaagttccagccttcatacctacttctctatacataaccataatcccatattcctgccctactcggtggtatttcagttttctggctctgtcccctaggatgagacgaggcacatccggtataccattgatacggcggaaggaattcaacagcggctatatactcgtctgaatttgcgtcgatctcaccctgtagtcaactagctgcttgttgttacttagcatgctcctctgctcttttgagtgaattggctttggcactatattgatcctgggatatttcagtgactactccgtattcgaagttatatggtagccgcttacggaatatgggtggggcgcattaaccatttaggagacttatatatatactcga

SEQ ID NO: 2992 - DNA, 1172 bp, Emericella nidulans
ggacacggcccgaaacatcagtgcactcttatcgataggcacagccgaatatcacagccggcggtaatccccacttcccctctttgtgggggcgctgcatttcaaagcagccaaagcaccccatatttcatcatcctggccagcttttacacaacaagaagattagaaatccaccgcgataaagtgcgctatataaccccgctctccctctctcctcttcccttcccgcattgcactctgaaagatcacgcccgtctatcagcacaacatggccgcccccaagatcatcctctacacaaaccacctctgcccctgggctcaccgcgctcatatcgccctcaaggagcttggtctcgagtatgaggaggtgattattgacctcgacaccccgcgcgagccctggtacctcgaggtcaacccggtacgcaccccttctgagtgacatttgcttaattctctactaaccataacgtacagcgcggccttgttcctaccatctcctacaacggcaccgctattcccgaatccgccatcgttgcgcagctcctcgccgacgcccaccccagccacctccttcccgcgtctaacacccccgaaggggccatccagcgtgcccacgtctcctttttcgtcgacaccttcatcggcaaggtctggtcgcaggcattcgcggcccagaaggctgcgagtgaggaagagcgcgccgccgcaactgagagcattgtcgcggctattgagaagaacaatgtcgagggtttgctgtacccggaggggactgggtcaggaccctttttccgcggtgcggagaagttgacgcaggtcgaggttctgacgggaagcttcctgctgcgattgctctcgttgcacaagtatggtctgctttccccagagctgccgagccagttggagaagcgggtaccgaagttctataaatgggcgcaggaggtcgtcaagcaggagagtgtcaattatatctgggatgaggagaaggttggcactcggacagcgaagaagttcggcgctgcaaaaaaatgaattgtagggagatactctataataagccctaatgtggcaggtgctgatgctctaatgattcaatgtgagaaacacctccttcagcgcttggccatgctaaccgcctggcacctatacgtgcaacgctgctcttgtcg

SEQ ID NO: 2993 - DNA, 1444 bp, Emericella nidulans
  unsure (1)..(1444): unsure at all n locations
agttgatggtatagttgcctgccatatcttccacatggcagttgctatacacgtgccacgaatggccggaaggatctcaggtgtatggactatttattctgtgcggacggcgccagccgcagtcccagagtgcctagtcttgattcgggaacccattaaactcaacgtcgtttatgttctagcgactggaaatttgacgactgtagcatttttttcacgccttccgtggctggacatgtgtacttgaaagccgtttagctattactctctagagagccaatcttcggtgtggcttggccgatttctctccaagtagccagaaatatgtctaatcgtatagaggaccgactcggcttctgccgttctttctgtctcagacttggactatgggcagaaccaccttgtgcattccacaatccatttcaggctaaggcctgaatgacgccttgctgcatctgagcaaccctcagaatccaaattctggctcctctagaagctcgtcgaaccaaacatcaaaccgcggctcattcatctccttaggttctacaaatgacccgttatcatagatctcgattcccttttggatcatcaatgctgcagatccgaaaagagccagggtgtctgtttaattgtacgtatggcccatgtcagccagcattcatgtatcttgagggtcatctagggcacctgggaaggaatgaccatgtttgaggctccatacctgcatttttctccggacccaatgtttctgggtcagtgctgaggtctgttaccatcttcgcgattctctttgcgtttttccagcctattaaagagttagtagaagtatataggcaacttcacagcggagttcccgctggagtcccagaacccaacacctaccatatccatctcgaccacctacatctacaggtatgaacttatctggtcctgctgcgccgcgtgtatgcatcaactgattggttcgaggagcaatattagtaatggcagatacaatctgccggcacaccgacacgttttcccggggaaaagaaggttatcgacaatttactcacctcatgaagaattactttgtcaaacaaagaaacaagatcaatgggcgtataatagcgatttgtaatccatttatcgagtaaggtagcaagcttggcccaagttacagcggatttgtctttccaccacgagctgaacgtcttgtattttctcttcatgccgtactcgaggaaccacgggcagaaagtgatttcgcagttttcagtctcgtcatagggacacatagtccacgcaagatttgttaagcattcgagcaattcggaaatgtaattttcggcgagaagttctttggtatgcgtgttgaataacctgatgccttttgtcctgctaagttgtttctttatgcgtcgcgagtcgcagtaaaacctctggcatngcaatgaagtcaggt

SEQ ID NO: 2994 - DNA, 940 bp, Emericella nidulans
ccgtcgacgtagacagcttttgggtgcattcaagctcttttctattcaacctaaaccatttcgagttctgatggcaacgtgcttgggctggtttttcttggatcttcctctctacgggcccgggctgataagccgcatgttatcagcaccatctggcctggcagagataaccctgatctcgacatatgacttcctccttcaaaactcctaccagagcatggtcgtcgtgtcctctggcgcggtggtgggaaacctcatagctatcttcaccatcgaccggctcggacggcgcaacatccagctcaacgggttcttctggctttatatcttaaatatcgttgttggaacttccttctgtcaccctgaacagaggacagattcttcggcccttgtagtatatatatccctgtgtcagatcttcaactttggtgcgttcttctcctcctacttgaggcttgactaataggacctattgacaggaccaaacaccacgacttacattgtaagtatacctagatgtgtctgactgagaacgttgctgacatcgtattatagctccctgcagaactctttgcaacgcgccttcgctgcacatgccacggtctagctgcggccgcgggaaaacttggttcagtaatcgcccatatatttatatccttcgtcgactacggatcggctcataccataaagatgattctaggaacttgctggggttttctcttctttggtaagtttgccgatgtgtgatcgtttctacaaagccctgtcaatacgaatagcctatcggccttcatgttgttcggcctcgtcgccacctatttcttcgtcctgatgttcgggactctgatggaaaaattaagtcgcttgagaagttggctgatgaaaaaaagacggactcaggacctttgcatgagactcgtggggcagggggtggttgttc

SEQ ID NO: 2995 - DNA, 546 bp, Emericella nidulans
acatccattccacgtgaaagattccgtctgcagcctctttgacagcctcaattcgtgcatgctgcagtccaacctcacggaatttggctttccaatcctcgaattcctcctttagagagtgataatcctcccaatctttgtacgtgacgccatccatcagggcccacctcatgccaatttcttgtagtccgagatcccggacgtcatcgagaacagcaagcgtagagttgactgcgactgaaacctttcgaataagctcttcctcaaatgagacgtgccactccctaagggtgtgagctcggtctctgatgataacggcagagtttcgaacgccctttagtagttcctcgaccgcggtttcttcttccgccggagcgtcagtagatggcagagactcagtcagcgcattgatacggctcttgatggcggctgtctgctcttccacgacggtttccaatgccattacaagcttctcaccctcggattgtgctccgtccgctaagtaggtatcgacaatttcaaccacacgactctcgagattctcga

SEQ ID NO: 2996 - DNA, 2248 bp, Emericella nidulans
atgaggcagcaaactgtctcttgagaactggcacactgttgcattgtttctggcctgtcctctgaaaacatgagtttttctcgtgcttttcgggtctttgcaagatgcttcggatgagggtttttctgaagcgcaaattgctgactcgaatgactgtctggtaggccccttactcgaagaccgtcaagtccagcgcgtactacaggtaagatcgcaaattctcgatgcgcaaactgcctgctaataaaatccacagtcgctaccagaccaagtaccgccgtcgcagagagggaaagaccgactactatgctcgtaagcgcctgatcacccaggccaagaacaagtacaacgctcccaagtaccgcctggtcgttcgcttcaccaaccgcgacatcgtcacccagatcgtctactctgaaatcaccggtgacaaggttttcgccagcgcctactcccacgagctcaagcgctatggcatcaccaacggtctgaccaactgggctgccggctacgctaccggtctccgccttgggcgccgcactctcaagaagctcggccttgacgaggatttcaccggtgttgaggagcccgatggagagttctccctcactgaggctgccgagaccgaggagggtactcgccgccccttcaaggccttcctcgacgttggtcttgcccgtacctccactggtgcccgtgtcttcggtgccatgaagggtgcctctgacggtggtatcttcattcctcactccgagagccgtttccccggttacgacatcgaggctgaggagctcgacgccgagactctccgcagctacatcttcggtggtcacgttgccgagtacatggagggcctcgctgatgacgatgaggagcgtttccgcggccagttccacaagtacaccgagaacgagattgacgccggtgacattgaggagctctacgccgaagcccacaaggccatccgtgccgaccccttcaagaaggacgagtccgagggccccaagaagactaaggaggagtggaaggctgagagcaagaagtaccgcaagaccaagctctcccatgaggagaagaaggctcgtgttgaggctaagatccgtgagcttgctgcttaaatgttttttccttgaccggaaggcggattgatcgtacttgatgcctagctgagtgcgatagtcaaagcagaaaagtttacttttgtccacaatatagggcttgccagtcgtcgattcttcagatatcctgcttgtagcttgatgactttatgacgatgtttgttttttgtctagggcttatttccggagtattattgggcgcgggcaatcgaatgggtttattttctcttaaagctcaagtctccaatatattggccggcatgtccaatagtaggctcgacctgtatactataatggttaacccaagccggttcacctaccacagctcttaaccgaacttcttgccaggtatatcgggcattttgtaactgcggatggatgcaaaaaatgctctatcctctgtgaagacatctacggcacctacggcatgtttgatgccgcgagagccgacggaatatgattcccaatagggtaacctctcttgtgatccgccttccacaaaggagggtctgtcagacgtacggaggatctatattaatcagagaacacccgcgagtccaactaatggatactcactgcacaaattgcgtgcacgcgtagtcttgaatagcctatccaagactctggtccctgactgggtcagtaataataatggaaaataatggaaaaatcccacatgacacgatattcaggcgggaattttacggcactgaaaaatcgaaaagaactattcaggcaaaccactaagctggccttaaaggagtcgaacagcgatcagcaggttgaatcgcctgtcgtttgctactccactagcagccacagccatcgatcacctgacctcaacatggtaatgcttttactagtgcgttctataaaatacaagacgagtggaaatcaactgccagttactcgacggagcgggcgggcaaaaagaactggatcaagcgtgcagtaatcgccctcgcatgcgtcttgccaaccactgattgcaacagttgtctgcagcaaaggtattctgtgtaacgccgaggaagatcagacagtcatgggcttttgaggcaaattctaacgtcctgcgtttttgcttgcatggcctgccttgcagcttgcgacatcttctggaccgtgga

SEQ ID NO: 2997 - DNA, 2750 bp, Emericella nidulans
cccaggatgaaaagagcgatccagcgcttgcgattcaccaagcgaaaggagaattggcgttgaggcaaggcagcgctggtccagctgcgtttctctttatcaccagcctctccggaagatgggcatgtctcccaaagaccttggattaggtcggcctcagccataagcataccgcccaggaaaagaacgacatcccagcggccatagcgcatacagaaccataccaacatgctaaccaaggatatacgaacggctgtcttcacgcgcgctgtagcgagaattgtaaggaagagaacgatagagctgcggaactcaacgggaatcgtccacaggtgaggattatagttattataatacaaggcccagtcgaacgggtccataaggcgcgtaagcgtataataccagtcccacaactgtttggtcagagatctgaccatgatcggtggatgttgttcgttggtacccctgatcgtgtggccttcaaaaagaactttttgcgaataattgtatgcgcccaatcgtacggctaccaagacaagaaagatgccaacgaacgaggggatgtataagcgaaggcctcgtcgtaatgtcgaagaagccagggtaacatatgtctcatcgtaagcccgactgcggaccaatttgagcggcttataggaaaggacatagcccgatattacgaagaatatggcgaccatgatgtgacccgagaccaggacgtggatgataggcagctgatacagatgccagttctcattgttgaatccccacccaaccgcgaccttccaagtataggtgaagagaaagtgaaagttgaacaccaataaacaggcccatcctcgcaaaccatccagcgcacgaactcgcatgcagctttgtctgcggcgggggctggccgccgaccaagtgctgtaaatagctgggggtgatgacgatgcccagtttagtgaaccagtcttctagatattcctgccagtggtcggcaaagtgttcgaggagcggacgcagctttgctggatcataaagaacctctgaagcagagaagcctcgaaagctgggccatgcgagagttcgacttcgggatgcgcgaccaaagccagattcgacgtcatttagggggacattgtggatggcgggggacgactgcctctcgttctcgacgttcattattccgggagcgctgcgagtctgggagcttgaggcaaatgcagagcctcgatccagggcaactgatgaggttcggtctaggggtgcgcggtcttatatgcaattgttgcgatagtggagtctgggttctttgcagcaggtgctgatacttatgggtccgggattcgtcatcggcgattgtgtctgacagcggtagaacggagcatgctctggagccctctatgatggaataatgctcgcggggtctgaacttggtacacaaattgaagtgagcgagagaaagcgaaataaaagtccacctttgggggcggaggagagttaaggccaaatggcgagtgtcgatccggatgatttcaggacggcgacgtttcaccattattagggtggcatcagggacggaatacgaattggctaagaatcttttacagatctattcgccctctcaatgagagtttctggttatattagatcatttatttaaccgtttacttctgatttgatcacaacttgagtgcaattggcgtttgactggagtacatcctaaatacaggcaccttgccctttatagcatatatagagtagtcaaccaaagccagccaaagcctgtcaaagcggtgaggtgagcggagaagaacagaccgcaatatagttacacgtgatctgtcttgcaccgccgggcagaaaacgtccgagtccgaaagcggaaactcccaaaactcaacagccacgcagcagcatggtcgaatctttgttatatagctagtagatggctttctgtttagaattaagactatacaagctgcgctgcagtaagatctgtattagtagactcgtaagaacgacggatctgacaaggagaccctgcaagacatcctttatgagctggcgaatatttggtcttgtgcagcgaaagctgaatacaacaccatcttcctctatcgtcaccatccattctatcaataaccttcacgacctagagcaatgtctagctgctaagtcgctggctttgcttctttgaacgctctgatctgcatcgtcggtcgtcctttctttttccaccctgccttaaacttcgtctcatcctgcagccccctttcatcccctgtatgtcttgttcctcattgtcattctcctccgtcgcctctctccgtcattaattctagactggtaccccgttattagcaccgggccgttgtggagagggggcttgctgttgttttcgccgtttcttgtctgctccatcaattctgctcgctatcggtccgagttttcttaacagaactcgcaatcgctatggatttgcgcacgatcatgaacagcgaagccgcgggcacctcccaacggcctccatcccccacgttgcatcgatcaccgccgcaactcacccgcaaaccatctgagccaacctatccggcacacgagcagtttccgtcgtcatcatcctcgtcttcctacccatccgggtatcccaacgggccagcgcagcaacccgcgccgctccagcgtcccaaacctcgccagaccgagctccatcctacggctcactgcaatcgccctaccagtataactctacgggcgcgcag

SEQ ID NO: 2998 - DNA, 1339 bp, Emericella nidulans
gttgaaacagcttaatcaaaaatccagaacgcattctgaatactcctcatttggtcaatgaatatagaagctagaggaagtttattttcgtttcctcaagcctgttccgtgaagcgttaggtctgtcaacgtggatagaaaagcaacagcaacagccatcttattacgaattaggctaaactgcaggggcaggctgtgacagtaccttgcaagatacacattctcaatcattcatggtagtgcaattagacaatgccgggtcgccggaagtaaggattggggaatcacagaattttgcatagatctgtgatcagcttttccgggtaattgcgcagtgtgcagaatctgactaccacacatctgggccattgttcctttgaggctgtattctctcgtccttccccatacgtatctgggttgattagcagttcaccaattttagccagataattgcaatgaaccgacttaatgaccttcggcacagccttcgctaaaggtatgatatcttagggttctgatggcggctcctaggccgtgtcaggcaacggagatggcccatattctcttataaaatatctattcctggctagtcagccactggaagaactggttttcagaactttctaagcacaatgagaaacctgaacttaattttcacaaagttttattcaccaaataaccacagcggaacgaagtagaagcggagcttcaagacgcattgcaagcacaaaaaagagactacccatttatatgataaagaaagacgacgacgtgaaccggccaaccaggaacctcccagttggacacaagatgaaaaggatacgggagttgatgaagatacggaggccgagggatttaatttgaaagattggttagggttggaatgatattccgacattaccgttattgctgcatccccctctccttcgactctacctccctgaacaacgatctgatctgttcagcaaaagtgtacaaccatgaaagaagtcttctgaaaaacttcaaaaatgatacaagtacactttctcctgattcgaaacagtatgatctcagttttctcttgggggaatatgttgattacaaaaacggattgatacaccgttgttgagtgattaaactaaccttttaaggtgaatcctgcaatttaccagatattccacatttgggatgtttatagttactttctgcagatggaaaagagcctctgtacgtgtttgacaaggtaagtcactcgcttgcaaatttggaatacttccttttccctaccgagccagtgaggagtgcttgaacaggcttcattataatgccacacaatataggttcgtccaaagcaaca

SEQ ID NO: 2999 - DNA, 901 bp, Emericella nidulans
ttttttcttcctggacccgcgttcttggggctttgggtgctcgcgcactcatggttggtttgccctcaatcgttatgagccgcgggcttactttacgcagctccatcagcgtattggtcgttatgtgacttcgtctcttagtattagttgctttgttcgtctcccaagccgccgtcatcgactcgacgatgctatccgtcattgggacaacgttggactgagacttttcctgctcaatgctacccaacaaaatcgattcatccacacctgtgagtatcgtgcgataccaacccagttgcaactcggtgagtggcaccgaaaacacagtctctttcttcggtggtaaatccagcccgatctgagaatcacatttggttcggcgtagcattacaacttttaggaagcgggtaatgtggctgagaaatatgctgtcaaactttccgtctgtcaaggaaaacgcgttttcgaaaagcttggccgtggctggcacgaaaacatccgggtacagccaatgtaaaatagaccacagttcagttagatcgttttgaataggtgtgctggaaggaggaatgtcagttcatgtaatggcggtgtgcttgactagtgcctaccctgtaagcacaatcctattctctgaacgaagtctgtaaactccctgcgttcgcttagacctgctgttctttatgcggtggccctcgtcgaggaccacatgtgcccaaagtgtcttctgaaagaaccagagatcactgcaaagtgtctcataggtcgttacaacaatattccaaggctcggccccctgttgtctgaagcatgtgcgcaggttttctctttcttcactgcctccatggtatgccattggcctgagcccagtcgtccacctagagatctcggacatccaagt

SEQ ID NO: 3000 - DNA, 3063 bp, Emericella nidulans
aaaatgattgcaaagagcggaagagaagatgaagagtattcttgaagaagttggataagagtgaatatggacgcgaatgaataggagacaaagtgaaaaaagtacagttgtgaaagaacaaagggccattaaaaataggagtgaccctgtgttccaacacggagggagaaagggcggtccttacatacctagccttaagccactagtcggaacaagggtaatggccaactgctgcactccttaagggatggtgaactctacactcaaacggcatgcgggcagaccacagggtcccatcaaccggcaaccaagatgcaagcaaacaaaaacacaatgtccgaagaatcagtcgctgtcagatgagtaactatgagccatccccgcgtttatccgctgaaatggccaggtgggacccgatttgaattcacccacggcttcccctgcccttcaaacgcaaaacgtgccggaattccccaagcaataatcgaggcagccattgctcgaggccagggactgagcattaccgaagaagcgctggagccagtaacaattgaagcaatcctaccacattctgttgccgacgtaatcgaatgcctaactgagagcaaggctcggctattgcaggatgtacggcatgctattaaaaaagctggcggcaccgcgaccccgactgcatacctctttgagaagaaagggcggatagtgtttgagaaaaaagacggtgtcagcgcggacgactgcttggagcaggccatagaagcgggaccacggatatatcctcagatgaagaagggcgtattattgttttcactgaaccaacggcgactaagaatgttggtgaaacactttccaagctagctggtctaactgttgaagagcttgaaattatttgggccccgaaccaggatacgctggtagaattgaaggacgaacaggtacaggagattgaggagatattagcttttctcagggacgaagccggtgtccgtgacatatatctgaatacgactcaagctttatgactgtagcattaggcttggtatgccgtctgtacaacatagtcacccattagatttagataccttaatagactaaggagatttatttagcgagccatgacttgatgtcatagtccactgtttacgcagaatttagttatcgttagctctgtctgtcatagagagagttcctgtctaccggaaagctactcttttcgaagagctttcatcgtcgtgcgcatcaaattcgcaattcccacgcttcccgcagcatccatccagtcgagcatccgcactctataatcttgccaggtcatctgaatccctccttccttctctagcgcactcagagctctctgcgtcacaggcttccgtagcctgggttgagtctcgccaacatcattctccttctcgatatcagaaaagcagcaggcagacatattgcacagcgcggcatgatggctcagagagtataacgacccaactgtataagagaatgcggattcgcggctcttttttcgggctttgtcattgacttcccggagatactgtgttagtgcagctattgttgctggcggtatcaaacagcccagcgcgtttggatcctctgagttaagagctcgattccgccatacaagattgcaaacatccataatatatccgttgaactggggaacgagcttctgtgtccaaagcggatctttggactggagcgtctcggaattcattgataactcaaaggatgacttgtagctgcacagtatagagttcatgctcgagataacaaagctcacggggctgaaaatgagggtgtagacagacggcgcaagagggacagtgagtttaatgttcccgttagtatgtgcgtgagagaacagatctgccagtgtgaagtaaaatccgagaacagacagcgtactggatctatagtctccgcttgtgtctgaaggctgttgtactggactttccagaacggaagaggccaacaattcagcgtgcaagataagagcgctcaaacgttgcgactgctcaatgtcgaatgactccgttctcaacttgatcccccactgacggataagtccggagtaaaagtctaacaagctcgccttggaagacgctgtatcttccagcaaagcagtctctagaggagctaagatctcgctccgtaaagagtcatggtctctgataggaaggtactcgagcaattccagtattaactggcggttttcgaagccattccagattggtaaatatgatctcaaaaacgttaggaaggcttccgggatattctattacatgttagcaggctgccgaagtagtttgggtgagaatcgatacctttgtgtactgtgcgtaaccaacaactagatttagcacgtagcctagcgtctcaacaccgtcatcaaagtctcgcgcagactctaaatgctcgctcaagaaggcttgcaaccaatcattgagccgccggtctgcaatttccggttgaaccaacaagacgcatttttgggcaaaatcatgcgtaaatgtggagattatctggttaggtagctcgattttgtcaagccgttcgacaaaatgagtaacactgcgcactcctccagcgaagttcggttctggttgactcgagaggtttgtacttcagggacaaccgtctgcactttactcctcttcgccaggcctcgatgtactacctggaaactgttggacccatttccctgagttcgctccaagttcgtttcctggatttgtcgtgcatgagtcgtccattcaggatcagggtgcttaaagaacaggcctttcatgccagtattccccacaataacatctggatgatagttcttgaaaacccttagcagtgatatgagttccctatcatcgccacctgacgtgccaatcagttccattagagcttgtattctgaaaggcttgacatgctttcgcctggtaatgtaggaaagaatatggcacaggggcttgcgcaggctgatcatgtcaagatggttaaagagcacagcgtagagcttagacaagtgagaccgatcatcaatgaattcataaacgagaa

SEQ ID NO: 3001 - DNA, 777 bp, Emericella nidulans
aaaagcccgtcgccgataatcctggcttggttagtaaatcttccagcggagggtatcagcctccttgagaccgctggtaagatgagaatggcattatcatttatgcagtagacactcagcttctcaggtgatggaacgtactccatatgtttagctggagcagtggcgacagagtgagatcaggcgaggaagctgagacaatgtgggcgatgtcatgtccagttcaagggtgctggagaacattcaaatcgctgcctcaggccaacaaattcatatatattgaagattcgagatatgagattcggggatcgatttccgacagcacaacttgacatttcgaaaacgtgggaggagagacaagttatggccgagaaagtcaggcagccttgtttttgcgcaaacaaattcgcatcagcgtcttgatatgtcagcaccccctctcttctttgctctcatgtcaagcctccaaattcaacacttctaaacgtccgtcagttccaaaggccaccaaaggtccgttttcagacgcaatggcgctcgtttctaccctgcatcacgagcttgcattaccggtgccaaagctggagccagctacaacaagcccactctttgtctcgaatgaaaccagcctacgccaatctgcagataacactgcagaagataccgttacaaacaatcatcaggatgcacccgtttctcctgtacaagcagagccgggacagacacgacaggttttcgagcgagcccattgcctgaaagcagtcgataccgccagtt

SEQ ID NO: 3002 - DNA, 2855 bp, Emericella nidulans
ggattgtcggtaagtcggacaaacgtaaaaaaccgtttaagaagggcgaccgcatcgccggattcattcatggctccaaccaagtgcagcccgaagatggcgcgttcgcagagtacgtcgttgccaagggggacattcagatgcatatccccgacaagatgaggtttgaagaagccgcaacgctcggtgtcggcatcatgactgtcggccaggcactgtatcagagtttaaagcttgccctgccgactgaacccaccaagacgcccgagccgatcctcatctacggcggctcaaccgcaactggagcgctcgcgatccagttcgctaagctgtccggctacacggtgctcacaacttgcagtccgcacaattttgatctcgtgaagagtctcggcgcggacgcagtttttgactacaaggatgccaatgcccccgccaagatccgcgagtacacgaacgacaagctccgtcttgtgcttgacacaatctcgctcgagcccagcgccaaattctgcgacggcgccctctccaccagcggtggcgagtacagcgcgcttctgcccgtcagcgtcgaccgcgccaatgtcaattcaagagccactcttgcctacacggctattggcgaggagttccagtttggcgacaagacgacccctgcgaagccagaagataaagagttcgcggcgcgctttgccactattacagagtcgttgctgcaggatgggaagatcaaggtgcatcggcataaggttggcaagaacggacttcagggggtgcttgaagggttggaactgtgaaggagaataaggtcagtgggtaaaagttggtttacagggtgaaggatacgccgtaaatgtaatttatgtcttaaacatctatatctgacaggtctggctcgtatcgtgtaaatagatagaattgagaccagcagaaaaggaataactccgcttcagaaatgcctcctaacgtccaaggcttggccctgagagtgcctaagaatttgacttgtttattttcttctgccaacccagtttatttctcgtgggaacgtactattcaataggcttaactgttccaatcttattacatgaaccagtcagttagggtatggggcgccaccggccccagttaggtctagacgccgcaaccaaaaaccccagtctcgaggtaagtgcttgaaatgtctcaaactttgggtttttgggattgctagtcatacacgctcacgaccgacgaggcgggacacattcccgaagattctgcattgttaaacccttcaaatattaaagatctgcagatatgaaaggcaggaatgcgctctctatctatccacattgctcttctccaattctgtgtactaacttcgtatcatcatgggccttcaagaaagtcctcattgtcggcgctacctctggaattggccgggctattgcaaccagaccgattgagaaaggcatacccgtcgtgatatccggccgccgagaagagaacctgcaggagtttgttcgccaacatggcagcgacaaggtcaaaagcaaggtctttgatgtgacaaaattggacaaagtaaggagaagcatgcaatgtacaaggacaagctaacagctcaagattcccgttttcgcctctgaagtcctcatcgagaaccccgacattgaatgcgacttcgtcaattcgggcgtccagcgcccctttgacttctccaagcccgacactgtcgacctcccgatgttcgaccaggagctggtcacaaactacgcatccgccgtatacctcagcaaagccttcatcccccacttacaggcccggaaaatcagacgtcactcatttatacaacctcacagatggcccttgttccaatgatgcggtgcccgaactacggggcttccaaagctgcgctgcaccactttattctcgctctccgcacgcagctgcgagatggtctggtggtagagatctacccgcctcctgtgcagacagagctgcatgacacgaagcatcagcgatctcaagaacggacatctaattgggatgccgctggatgattttactgacgaggtgtgggcaaggctacagaaccgcgaggagcagattgctgtcgggtcagcgcaggaaatctttgacgcgtttgagattaagcggcaggggctgtataaggagatgacgaagatgttggctgggttatttaagcagtttctgaggtagatagtagttgcgtgcttgagaagaatgcgaagaatttgttgttttctcttctcctttccttcttcttccccctcctattccttttcttttttaccttgtccctttcacggtggtgggcttgagacgatttgctagctgtctactcgccatatactctgtacattcagtcaggctcggactattaattcttgctactataaaacactagatatcactgttcccctgcctcatactacaagagtacgctccagattgatccgatgctcaatgtcacgagttacagtcgttgatgctaacaggtagtattagactagaagaattagctagagaattaaaacacagtgaccgttgagcttcctagtgtaacggaccgacgttggtgccaaccttgattcgtcattccggaagtcagcaacaatcatacgagaactggcctgtacatggcttatcccggaccagagattcaattggcagttggttcctagtggactggctcgtcttaattcgggcaatgctcgaatcaagacttcgggcgtagctcgtcacactcaacataatttcccgcactttctgagtttttctaaaaaaaaatacacgagttaaaaatttattttgcaacttcatccacgcgtctaccaccttgttgctgc

SEQ ID NO: 3003 - DNA, 1696 bp, Emericella nidulans
agagaagatatgaaaaataggagtaagatgaaggagatattagaagaataggttaggaggtgagtaataattgaagagaggaaagtaaaaaggtaaagagaaagaggtgtataaaaatattcccagaggaaggggaattatgaagagctttgtggccaaaaataagtgaaaggttgccgggaacaacgtcctttaatatggcgactagtttgaagcagataattgtgtaaaaagccattccgtcctgtggttcgattgcagatgtagagaaatggcatttggtgcagtatgtccctggcacaaggtacttttgggacatttcaagattaatttaaaagtgttgaagcgttaccaatttataaaattcaatgttctcatctcgcttggtaattaaaaaacttttcgcattagctgcatgtagcttttgggcacgatataacagcgactaactatgcttcatcctttgggtcgctctgctcattaaacaccacttgttctgtctcgcctgttttcccttcggttcctgcattctgctgcgcagtgcctgtgctgctggtttttgcgccgctgtctccacctctaccctcagcacgtctcgacttagcgccttccttgagtttttcccatcggtccctataccgaccaagcacgttgtggagcttctcattctcccgtcctactttctccagttccttttcgtggtggcggagtgcttcctcgagttcctttatgcgcttttcttgttctgtcggcgcggcggttgccgtagagggacctgtcgaaggtgaggacactgcagacacagattggggtccatgctccggggatgggatattctggtgatgcattgccttcaaagattgttgcaaagccagggacgatgactgtgcgttgacctcccacatgtgtaaccgttttgataaggtgtcagagaggtgacgtagtgcttgattttccatttgcagctcttccaaggtcttaggcgactggaggctcgttagtttgtcgttcccccggcctgatttgcctttgcctttggctttgcttgcctgaagcatttccggagaggagggtgtctctcgagcatcaacaaagtcatcctccgcatcatcgacactgttccgacgagcttccttttcggcacgggttaagatccccgcgtaagacacagtaccaccggttgtgggcaccacgtagaacgattccgccggatttcctgtccccatcccgcccccagattcacgaatcgcttttaatgcagcacgggagaatatcttgctgatatcgggctccgccgaggacacagagcgatctgatacggccgtttgcctgtcgagtctcgtttccgccgatgatttgcgaactgcacttgcattgttgacgctatccagtccgagagggagccctgcaaatgctagcggtgctgaaatcttggagatgaggccttcaaaggtcgagtaaaatcgctgaaacggctcctcggtcgtagactgtcggtacgattgttgggtcgagtccacggtctctgcgggtacgaattgctgggaggtgatatctgtaggactgccagccggtggtgaccatggctgcttttgacccaaaggacggttcacgcgatctctctgtccggcggcctgggcagctctcaatctcgattctcctgatctgatttttgcgggtccttccgtcactttgc

SEQ ID NO: 3004 - DNA, 1443 bp, Emericella nidulans
aatttcttcttcaatctacttcaaatccatagatgttggcgaatacaaactctcgatccgaatcagcttttcttgcttgccagggccccattgtgctgcatactttggcaaagtgtcgtgactagatacagctatccttgaatctagaattgtcatgatgatttaaggatcaggcctatataaagctccattcccaagcacagaccatcaacgatactcgacgacttcacaatcccagatctgtccccttgaccacaagcgtcatcattacttctaactatgcacaatgatatagtaattgcttatacataactcatcatctccccttccccttcagcccctactgacggttcatccagcgtgagagccatcatacaaaggccgacagtggtaatatcacaattcaagctcgtccgtagcggttactcactcctcgtcaactcccccacggtctctgacttgggcaccaaattcaccggccgcgctggctcctccccactccccaatccaatctgtgcatcagatgatggagaagctgatagaatcacgcttcgaccaatttggaaggccaccggctggggcgtgtgttttcgactcatcgaggtaggaagggaggtgtcatgtctcctcgcgcggcggctagtggcctcaacattatcgtgcgtcgccgtgctgtgcgtgtgcgagttcctagctaacggaattggttcgttgtcgccggtgctagtgctaatcacttgcgagatagtccgcgggagatgatagccagctttggcgaagggaatagagagaccatgaacgactatgctgcagatgacgagaaaccagaccaccacttcgatggtatcagagacctgctgcgcatcggcgcgaatttcgccattcacggtgatcctattcaaatattccctgctcactgaaagatagaagactgcaccgacgccgatggggccaaagaagccgacaaatgtagtctggaacagactttcgatctgttcgatatacttgtgcatggcgaaaatgataggcatgcgacggacaagtaggattaggattcccaggggaatagacggtatatcgggatgacttttttttctaggagagatgcctgggcagacggtaccaacccaatgaagactggtaggtgaggagcattccatggttggttgaagagagtcgtcctggtttctaggggacccggctctgtggtcagcttgccttcccattctcaaggggacgttttttgtttgaacatttttgacgatacacccacaggtccatgtcattattttactactctatatagaataaggtttctttctggggtttgcgttctcttttcatgtatgttaaaagtattttttgtcatgatttctttctcgtgatttcttaatctacattttcttttctttatattttatattttttatactattttgttct

SEQ ID NO: 3005 - DNA, 597 bp, Emericella nidulans
tgactaatacatggtttgcaggctctgcagcatccgtatttctctagctcgaaaaaatctacaacggctgtctaatttaggcttctgccgacacatacacttcgcttattagaccccgtcaaggttataatcaggcatatggaaggttacatacggcctgtcgtagcccccttgagatatgtcgagctatattggtatatcaatgtggctcatatcacaaacgcccatatgcttgtcagccacggaaataccgaaattttcaagttagacaggctagccttctattttgctaatcaaattaacaaaacagatgcgattctcttcaaggcagtggtttcggctttcattctatatgaacggcattcaaaatcgcctgaaggttggtcaaagcagggcagtagtcgagttgggctcattatgagatgatggagacattccagatacggaaacaattgtgattgcgaattcgcgcagggtatggaaggatacgaaaagatgaaatattgtatatcaatctggtcctcctattgagcactccttctccgcaagttcaccgtcgtctgatttgagacgcggactcgaggcaaatatggcgtc

SEQ ID NO: 3006 - DNA, 1433 bp, Emericella nidulans
  unsure (1)..(1433): unsure at all n locations
tacgccgggataagtccaaaaagtccgtagcgccttcgctggaaaacaggaaaacaggaaaagtgatgtgagctgaaatagagtaaggaaatcgtgtcgcatgatgtgtctaaacctgttccgtgtttgtggcttggctcttggacacgtttgttttctcgagggccattccatccgcctggactgcatctgagctgaaaaagccagagtcaagggttcgaggatcagggtactggaacatgtctttttgaatgtcggcatcagaaagaagtgcgttgatgatgtccgcatcatcattgttctggttcctgtccgatttggatggggaaagatcagaagggagccaatctgcccagttattattcgacacatttctggaatcgagtgcgaataatggatctgtgtgaagcgccgagttggcattgtcggagaagatatctacaatcatctcgtccatgccttgaaatgcagctgtgccgaagatatcatctgacatcggcggaaggtcaggaataagcgagcgagatcgcccaggtgtccggttctggtggggaacagacccaggactgctctggacgcgctgcagccgacgtgcaggagttcgagttggggttatatcaatagctccgtctcttcgagacttgacaggcgagatatagggaagtgagtgtcgcttgtccgatgtagtcaggcgttgatttcgtcgcttgggggtgggactagcacaaagctcaaattcaaaagagggaggctcgtagagccgctctaagtcattcacagcctggttctctttctcgccgggctccttgttcgcttcttggacgccggggacgcgtgagcctcgcttaggactgttcaagaccgagtcgcctaatgctcgcaaaggacccccctcgttctgcgaattaggaaacaatactctcctcactgacttgggaggcaggtttctctcacccggggctgaagtattgccacctgcaagattcctagcagggctggattgaattgcccgccgaagcgcttcccttgcatccccctcatgccagcggcttcctgctctgtcagatgatttgcgaggttctgcactgtttgcgcggcggcttntagctggcggttcctgagcatcatcgttcttttgtccttcagtttcgcccgccttaccagcatcattatccggacccggggtagtatcatcatcagctgctgggctcgaagcgtctgatacgcctggtgaggaagcatctggcttagacggctcgcttgtgctgcggccaccggggcgcttattagtcgaaagcggcccagcatctttgcgagtcctgcgcggtcgttttcttttttcgtagctagctttgttccacctattctcagggcgcatgcttttgcatttctgaagccagataccacaagcttcggagccattagtacatatg

SEQ ID NO: 3007 - DNA, 1357 bp, Emericella nidulans
aatgtagaactgggggagcagaaagtgcgcaaggttgggcggcctgtgtgcgttgttgtcgacgaggtggacggatggtcagcggatccgggggttctggtgaaggcggcttcatgaaggccttgaccgatctcgttcttctagaccagagaaactcagcacgcacatccgagcgagcatctgacggacgtaagagaaagggtgacaattttcggttccttcgtccgcttattctagtctgcaatgacgtgtaccatgcaagtttgcggccgctcagacaatcttctgtcgcggaaataatccacgtgcgtcaggcaccgttagagaacgtcgtctctcgcatgaagtctatcttcactcttgaggggatcccgtcggacagcgacggagtacgacgactctgtgaagcctcatggggccttgcaaagcgaaagcaacgcggcgtgagaagcactggtgcagcagaaggtgacatccggagcgtcctagtagctgcagaatgggtagcccacaagcttcgaaatgaaagctccgctcctttgaggttgacacgaaactggcttgaacagcgagttctcgcagacgccggaggcggctcgtttttcaaaggcatgaaccgcggtggagtacgcgacattgtggatcgagtctttactgaaggggccgggttcccagacgtaccccttggcgatgaatctctccaagacccatacgaccgctcagaggcggtttcagtggatgtcgccaatatcaaaaagcgccatgcaatcaggaggctgtgcgagatggtcgacgccagcggcgaccatgaccgctgtacttccgagtgtttctcctcatacccactccaaccatatcaagacgatacgttcctcaccaaaccgaacgccgcttacgactggcttcacttccacgacaccatctcatcaagaatttactctgcccacgattgggagttgggtgcctacctcagccaggcaacatcggccttccaccttctcttcgcaaccgcgcagggcaaagctcaacaacagtacagagaaatagacgaagaagaggaggaagcacatcccttctctggcccgcgagcagactatgcggccttcgaagccacgaagcaaaaccaagccattctatttacgtttcagtcattcttttctgcgcctatttttcgactttttcggttcgttaataattgagccacccaacttatttctaacgttattcgcattgctcttgcagacaataaacctgtcttcgtgcgccgaaacgagcataatattgttgtctagccttctttaggagagtgatgccctcttttttcattttcggggtcgtgttatgactcgtcctaggt

SEQ ID NO: 3008 - DNA, 631 bp, Emericella nidulans
ttgcgcgatatttcgccgtcgactccctatattccgaccttggtacggggaatcagtgcaaatacctctatcctccgcaccgtaggacggctgtttcagtttacagaaattgacctgtccggcctggtcactggcagcgtcttaacagatctgccgccgtaccagtggcaatacgatagacgcttctggtctgaatcacgagtctcacgaaattggcgattccgtcaacatcctcatcacgatatacttgggtctcagattccagacggcaatgagatggagcctctctggcggtctctaattcatcttgacagtgttccatggcttcgagaccatgtcattgacgggaagacggtcttcccgaggtcgtcttatatctcaatggcaggcgaagcgattcgtcagctgacagggagctccgatgtttcgctacggcgcgtatcttttcttgaagacattacattcgatggaaagcaccccactgaagtcttgacacagtttcgacccatacaaggtaccgaatggtatgacttcacactcacgagccagtttgaaggcaagtggacaaagctctgtatgggacaagctcgacgaggctatgatctcccttccgatatcaaacagctgtgcc

SEQ ID NO: 3009 - DNA, 1560 bp, Emericella nidulans
ctcctgagcgtattttcggcctcttgcggcaggattattaatgttgactagtcggggactcgtcccgtcatctgcggtggtttcccgcggaattcaaacttcatgcaacaacattcatatttgcagtatatcaccatggctgctgcgacaaatcgcttcagagctctatactcgtcctcaagggtcgctactcctcaagcgggcagcgcatcctatctcagttatcggggctatgctactacggatccctcatccgccactggcggagcttcgacagctggcaagagacggacaacattcacggacaagctcaacgcgggaccttcttttggagactttgtctctgggggaagagacaatgctcccctcgatccttccgaagcttatgctcttaagaccgccctagttgggccggctggccgcaagaaggaaatgactcggttaccatcgtggctgaaaacgccgattcccgattcgaagaactaccagcgcctcaaaaaagatcttcgtgggctcaatttgcatactgtatgtgaggaagcccggtgtcccaatatttccgactgctggggtggtggtgacaaggctgctgctactgcgacaatcatgctgatgggtgacacttgcacacgaggttgtcggttctgcagcgtgaagacttcacgcgcgccgccgccgcttgatccgcatgagccggagaataccgcggaggctatttcgcgatggggactgggatatgttgtgctgacgagtgtcgaccgcgacgacctagccgacggtggtgctcgccacttcgcggagacggtcatcaaaatcaaacagaaggcgcctaatattttggtggaatgcttgacaggtgattatgcgggagacttggaaatggtcggtgtcgtggcccgatcaggtctagatgtctacgcgcataatgtcgagactgttgaggccctaacaccacacgtccgcgaccgtcgagctaccttccagcagtccctccgtgtgcttgaagctgcaaagaaagccaagccatcgcttatcacaaagacctctcttatgttgggacttggggagaccgaagaacagctctgggatgcgctccgccaactccgcgctgtcaatgttgatgttgtgacgtttggtcagtatatgcgcccaacaaagcgtcacatggccgtgcacgaatatgttacccctgaccgatttgaactctggcggcagcgtgctcttgacatgggcttcctctactgtgcttccggtccgttggtcaggagtagttacaaagcaggcgaggcgtttattgagaacgtcctgaaaaaaggaggtttgcgccccgtagtaagcatacacggtccagttgtgagcggccggaacaaccttattcatcaatttttattcacatctttaagggcaggttggaaatgtggtggtttaatgcagagttttttatttgggctctattgtggactatgttatgcatcagggcattaacggggggtgaatatgtgcccaatttaatccaattcccccttttctgaattttttaaccccggtggttgtagggtg

SEQ ID NO: 3010 - DNA, 788 bp, Emericella nidulans
tagctacccccgcccgcctgccgacgttgcacacgctccttcaagatgaagtcctgacatcgtatattggctgggatctggtgaagatcctgcttcccatgcttccagagtcgcaagaatgtcttaaggatgtggctcgactagggaatcccagagaagccatcttacgagtatccgacgctcttatgcagctacaccccgcggatgaggacgaggaggaatcagaccaacagctagagccacaccatgcagacgttggacagggaagcagcgtgactaaagcacctgcagggaaaactccacttcatgtccacaaattcaacactcttgttgccatgctctccaccctccattcccgtatacagacaaaatctcccagtcgattccttgcgacatccctgcaggcagtactggaagcatacacatcgatgccaacaaacgagactacgatagccctgctcgagtttttccgagacgtttcccctacgaaaagacccccaccgccgcccagggctccgagcgattcgacagtcctccgtgtcgccgaagcgtctgctccagaccctgaagcggaagtgatgtcgcctagcccggctggtaacgaagagagcgcgctcatcaggaggttcttgcagtttggtttgattgagcttcttaaatcgtatcttttgagctgttcgggtccgatggatcccggaatgtcgtgggctgttcgactacaagagaagttacatccggaatcgcgtatgccaggtactggctcgcctacaaatgtatacgtggataat

SEQ ID NO: 3011 - DNA, 1318 bp, Emericella nidulans
  unsure (1)..(1318): unsure at all n locations
gattggaaatatatttggtgcagactccttctcgtatcttcttgatcacggttcggtacttgacgatggcgattaaaagttcgaatcttgccccgcctactgaagttcgcttcagttctccgccactgggatgctgaattgcctcgctcggatgattggaaacgtggacgttgcatgctgccacgggatcttgacggtgtcgaactcgtgcaggatctcaaggatactacgtcttgggcgcgttgtgtagtcccagaactcgtcaagatactccggattggtaaattcgagcaatcgctccttgtgcatctcatatgtggtgtagtgtgcgattgctgcgaagaatgaccggcgggggattgctctaatatctaagtagttgataagtagttcgcgcagggtcagtcgcgggtaggaatccaggctgtggatgggcggactaggcagttcattcgtcgaacgagtgctatcgcgagggactaaagagacgagctggtccgcttgctcctgccagcccatcatctcaatgagactttggacatcctcagcagtgttcttcggggttatcgttaatacgtcccctggagcatatgaaatgggatcggagacagtcaaaatcagatgacgcacgtcttgccagtgcgtctgcggggtcacacgtttgttctggacgagagttgccgtcaagctatcgtgtagtggccgatggtcattgtcgagacggtacgagtcaggaaaatcccctgttactgccgcgcccattgcatcagggggactgacatcctccgaagcggcttcctggtctcgaagtcgtagaacccattttggcggtagctggacatcgtctggtatcggatcctgccccgggggaagaggatacttgtccagcaagtgcttccgaaaccctgccaaccaaggaataaacgtaccctctaagctgcgaccatatcagcatacagtatttgatagctgggatcgggacataccccgaagaatgttggtggtctgcttctccaccagggtatatctcatccgcgcccagctgtaacaaccttttatacagtttgcgcgcacgccagttgaacttggggtacgagctatcccccagcccaaaccacgtgaatctcactccactcagaaaagtcggcggcacttcttcaaaagcagcgatctccaaaacgtccgagcattggccggcagatctccttgaccggttgtcgaaacggcaaagacgacaatggtatacgaccttaacgactcctagcgatggccagcctagttagtggtgtcatatcagagtgcattanagacagagaca

SEQ ID NO: 3012 - DNA, 1396 bp, Emericella nidulans
gtagcaaagatgagctctggctttgctaatcggaggaaaccccgcaagattggcggggacgacggcaatgatgatgaggagcaaggtaagtaaccgccttcatttggtgcttccaacctcttattcgcggagttgttgactaactatagtatctagacactggcccaatcatcaagaggccagttagtttgaaagtgaagcaaaaatccaaagcgcgcgtttcgttcggccctggtgaaacttcaatgacggagggagacgacggcgaaagagaagtcatcgttccaaagaaacatggcttgggcagacgagtagttgagaagaacgctttccagaaatcgacaactccgtccgcactaagcaatcaacttccacttagagttgggcccgaacaagaccgaccaagttacaacgaggagtacttaaatgaacttcgaaacctgacggcttcaacacccaagcctacggccgattctgaaaaccagaatgaagtggatgtagcggccaagttcggtgaagtcacgaaagtcactgctccgtcgctgattcccacggaggccgagatcagagaaaagaaagctcgacgcgcgaggttagcaaaggagcaggacagtcatagtctaactgaacaggattatatatcgctggaggaaaatgcgggcgatgactgggaattggtcgacagagaatatgacagggataccaggctcgtgcgagacgatgaagacttcgcggaagggtttgacgaatacgtcgaagatgggcgcatatctctagggaggaaagctgaacgtgaacagaataggaagcaacgtgaagcaatgcgcgagctcattgaagatgcggaagctcttatggacgaggaagactcggatctagaggagaaggcagcctatgaagccgctcagacaagagctgcgatgggatacggcaatggtcccgtagatcggccgaaaacgccccctaagatgacatctcttccccgtctctcgacatgcctcgacagattgcggatgaatcttgcggttttggagaagtctagaacacaaatgataaaccggatggaggaactgagaaaggagaaagccaatatatctgtcagagaagtcgaaatacaggctttgatcaaggaaactggtgatcattatgagaaacttaagcaagaagccggtgtcactccgggttccgaggctgagacgccagggacaacagattttgagagctcgcgcggattagagaatatcggagctccatccacggctgtatccaagactaactcggaaagtgagacttgacctttactggaacgaagagtgcctaccggcttttcgccaaaaaatctcattacagaaggtgccactcacaccaagccgtgtcgaccggactccgcacacca

SEQ ID NO: 3013 - DNA, 3506 bp, Emericella nidulans
gcccccgtcttttcccgcacttcattaacgtccactccaggcgcaagctcggtcagggtaagctcgcccttttggcggtcgacttggaaaacgcactgttgtttgttagcaacagggcagcaaattttgattcagccaagtgtcttaccagctccgtgacgatcgtgctgacacagttagcccctgtcagtggaagagagcattctgtgacaattttgggtaagccatctttcgctgtgtgactggttgcgacgacaatcttggtttggtcggggtttgagattagatccatagctccgcccatccctttaaagacctttccaggaatcatatagttagctaggtcgccgtttgcgcttacttgaagagcctgtgttcagatgttagtatgaatttgcacagggaaagtattggctgacccctaggattgaaacatcaacgtgtccgccccttatcatcccaaaggactctgtgctgtcgaaagttgcagcgcctggcagcaaggtaacgggtctctttacccgcattgataatgtccctgtaaacagttagaagatggctccgtaaagatggagctccacatacgcatcgacttcatcatcagttgggtacggtcccttgacttatttagcttacgttctattaccgcgccgctcttgccttaccattccaaggatgccattctccgattgaatccacaccttgacaccctcaggcagcatcgacggtgcgagtgtgggaatgcctaagtaaaaatagcacagttgacacgcattttagagaaacgtaccgactcccaggttcacatagtacccctgcttgagttccttagctgctctttttgcaattcggtttctctgaatgatagccggcgatacacctgctgccgtagagccatcttcctgcgattgtcggagtttcctgatctcgatttgcttctcagctgtcgaaggaacaatcctatccacaaagataccaggcaggtcaacatcgttgggatcaattgaaccaactggaacaatgttctcggcctcgacaatggtaagggttgctgctttggccataataggcccgaatgccttggtggtgtagctggagagagaccgtcaggtgcccgtttgatatataaatggtgaaattacctaccggaaaacgcagtttccagcttcgtctaccttccacgcgcggagaatggcgacgtcgccggtaagcgcagtctccatcaagtatgtcttgttgttgaaaacccttgtctcccgcggtttgccatgttccaacacattgccagatgcatcgacacgcacaggaattctgccatcctgaagaaaggtatctatgcacacatatttagccgagccccaatccacgtagagacggactcacgagcccctgtagcagtgtagaaagcaggaattccagcaccccccgcacggaggcgctccgccaaggttccttgagggcacagctcaatagcgatgttccctgtaaggtatttcttctctagcgctttattatttccaaggtacgatatgataagtcggtcaacctgcccggactgtgtcaaggtagagaggccacctttgcctggcgcgccggcattgttcgagactgcagtgagtgagtggatattttcggcccctcgtcgagcaattgcggttatcagagtatctgccattgtcatcacacacatccaagcccatcatagtaggttttaatcacctgccactccacaaaggccgaagccggaactaaggattgttgagccgctctcaatatcagccactgcgtcatccgcacttctgaacagtttcgaggctgctcgatcgatttttggagcgcgagttgttttctcaattgtggttgatgcagtagaatatccaacgcgagttattggagaaggagttagtcgcccgcatgttctttggtatacgcggaaacaaagttgcgcccgcgcaacgctcgtcgcttttcgagacagagtcagtgctgggattcgaagggttgccatctcacttagtagtagtcaaacaaatagttgtagagaaaatcaacgaccgcatgtaaacagataccgatgacgttcgtttataagatccgactctcggggctacttctggaggccgagatgtggggtcacgattcggccctcaagaatatcttctcataccaaccattcctagaccgtcacaaattgaactccgggttggctatatcgagccagttccaactcatcagatcgtcaagtggaacatctggaacactcgcgccaaaagcagtgccggctcgattgacagcatcaatgatctggtcgtcagacatagccgagaactgcatgggctcggaccagaacatagaaggcgcaaagctttgttggaccggtgaagaaatagcgctaaacgcatccaaagttgttgatgggagtgcttctgtgtgtgaaatgcgaggatcactctgaggttgcgagtccaaagcggccggtgtacgtcgaacaagctcacgcaagaacctcccgtagagcacagatgccccattcctatgactgggtgtgcttccgatcctttcaaggactccagcagtttcctcaattaggttccggacacttggggctaagctagaattgctatcggttggcattgaactgagactcagcgcagagcacgcagcaaaggaaatcatgatgacggtattgtttggcattgactttaacctcccttcgccttgaattgcggctcgcataacgttcaaagctgaagaaaggccagctgcacggaagaatcgtttgacttcaataggtgctgtagggtgatttattacgccgccgtaagtcgaaagctgtgtgtgcgtcaccaggatttctacgtatgggggaagggcgcgtgcttgaggaattagcaccgacttgaaggttagatgactgggatgaccaaactgacattgaccctctccgatttctggcgcccaagcttcgtaccattcggtatagaagcattctatcattgtcttgattctaccgtcggattagcatatgatccagggtaggatgtgggttacatgcgattgtgccgccccagaaccagtgctgcttgcttggttattatcacaaatggacttgacccttctgaacaacccgtcctagtgcgctgccggtcagacattatatcggatagggtgaagatgggtcgaatgtttaccaagtttcttcggagtatggccattgaattcatggcgccgtcgcgaaaatctgcaaggtctgagacatgccatcgatcgcaattctcagtcagggccgtcgacggcactgtatagctcctcccccgggccaggcagacactgcaggatgttagatatttatttaaactagcatggctcctgacactagactcagcctcggtctaggacgaatagtgctatgcaagccctttctcgccttcgtaacagtcttcgtgcccaaattcgaggctggggtcaacctcttcgaatccatctatttgcaggagccttcttgc

SEQ ID NO: 3014 - DNA, 2390 bp, Emericella nidulans
  unsure (1)..(2390): unsure at all n locations
gcgtttgtcccgtctgaaacgcgttatcatgtgagatgcctcaataaagaagccgccattgtgtctgtctgcgtacggcgagttcttgatggttcttcaccagagttggaggagagatcttgcgacttttcgaagggccggagattgaagcctaggcacctgacctgtccggaaatggaaggcaggtctccagctgggattagtcagctatgacaatcgtcagaccaggactctcacctggacggatttgttcatagtcagcaacaccattgagataagccaaatagtgaaatctgttcccatcgaccgtcaatcagatccatggcgcaggcgtgcgagaaatgtcggatcctcaaagttagatgcgtccgaattgaaccgggaaagccatgtaccaagtaagtctgtacgggatatgtaggcaccaactctgatcctcttgccaaacagatgtattaaagcaaagacacaatgcatagtcccagagccgaaacaacgagttcagcaaagacaaaggaggccgtaggtgctcattggtttgggagaaagctactgactgcgaagtagacgtctcgctgatctggagacaaaaataacggacctactcggtcttctgtcccaaaattccgcggcgcccactgtcaacaatggatctgttgagagtcctgagcgcaccgtaagtactgtttgcaccgctagtcaagctcaagattatacgggaggatggctagaccagggggtccttgaggagctgaatatggactttgtccagacgttagacccaaatacagcttcttcttcttcttcagaaatgatatttgaaacgcctgcaagtgccgagagcagttggattacggacctaggactcagcctggctgtcctcgagcatcttcttgatggctttcgctccctcgcgcgctatttcccctttgtcatcattccggctgattggaccgtcacgtacagggccgaagacgggcctttcctctgctctcagcggtggatgtgtcgctcgagattcagtatctccagcaagccctgctgagggaattgaaagtaaccctaagccatcgtgtcgtcatagctggggagaaaggcttggacctactgcaaggattacttgttcacctggcctggtttgttttgtgctcccgttccattcagctgcagaactgactgattcaggtttcatttctacctggacccgcgaagccggcagacctaccaatatctgcagctagcgatcagtatggtcgttgagcttgatcatagagcagaaaattgctgacctgatcgagggctcaactgcaccaggcgacctctgcagtcgtgaagcatgtcgtgcctaccttggctgttattatctctccagcctgtaggaattcaacgttatctgcgaagttgggcttttagctgacaattttcaatagtatagcaacagccacatcaaagccagataactttcactactcagagctcttactgcgttgcacaaggatgctgcaacacgagcaggagtccccgaccgatgaactcatatacccgttgatcaaactgcaacagttggcacgggaggtttgcgacacatatcagtcaggaatatctcagatcaatgcgtcccatcctgagcggttcaatgctcggttggaagagtggtggacttccctccccgcagactttcgatgcgcaggcaagaccccggtgtccgttgaagtctatatttcactaactgaaagtactagccatgctaacgagcggataccacgctgtgaagatcagaatctttgatatggggctggtttacaaatacggacagagaaagcgaccccctaaaagcctttcaggcgactcgatgacatcggcaagtttcaaagtggttctcaacctaaccaaatgtcttattggtgccaaagaactcttcgacgtgtttatggtaattcccgaaggagagcacgataaattgcctctttcaatatggtaccagctcatattggccataatggtgctgtacagactgtccgttggactgccggagacttccgactgggacagagaaattgcacatgatgctgtgaatttgcccgagtctctcgataagctgatcgatcgtctacggtccgctgagtctaaacgacgagctgagagccagccctcaaacgacaagtgtcttttcacgatttttcctgacatggttgagagcgtgaaggaatccctcatctcggctagcaagtatcccactcagaataatgcttgcgaagtctctgcacatacaagcttcgtcagcagcaattgcgcgcnctctactcaaagacatagatgtcctgcaatgcgcaatctacggaggcaggccgcttgaagtacaatggatgatgccagactgcagcgctgta

SEQ ID NO: 3015 - DNA, 2547 bp, Emericella nidulans
  unsure (1)..(2547): unsure at all n locations
agcgccatgagcactgtaacaaccctaatcgaaatcattttttattcattttcccagatctaatgcccaccgtaccataatgtccgcttggcagcagtatcaaccgcctggaaggttggatggtccggaattactgtggggataggagccaccgaggtggtcgtagtccatgatgaggtcgggtcgtgcgaaggaacggccttggtgacggtctcggtcagagtctgcgtgactgtgacagtctttttcagcgcgtcttcgatcatatttgctataccgatctgtttcgaggtgggcgataatgatggttcctccactaagccgtgcgtagccgatgctactggacccggggctggacgcatttataggctctcagcagccagcgacgatgatggtgacatccatggtctcgacctgagtggaccaaagactgctgggtcgattcagagtgagggacgtcattcgccaactgcgcgcatccggggtggcatggcagcggtggtcttacatttcaatcgtcatactgacaccagaacgtcgtcatcgggcagagagctgccggagctctctggaacatgaaggaaacatcgatggacattggtcgaatcgtgagctcgattcggtcgctgcaagcagagtaaaagcaagtcagctgagcattgcagtagctgtcaagggcgagtcttccagtcatcgtctcatcgacgcgggaaggactgggtcttggcggagccggcgcaagttccgatcttgccactgacgacaagcagcatcctgaaagttggactggcattattattgggacgtattactccgagcaagtgccaaagagtggtccatttctaattctatttataatatacacgactcaatattagaatcaagaagacacaccgcacgcaacaggggtgaccccgctgttttattgtacgtgtctacagggtagtagagagatcgaaaatgcgcatgaaaccgatccggtcaagcagatccatttagtccctggacgacttcttcacagngattgcacgccttgtccgcggcggcctctgcttgcgggatgacgtaccgccagcatcgagggcacttggatgcctgcgggctgtaaacatacactcttcctttcccaccgatcggaagttcaaactcttcgctatactgccaatcggcgctcgctatcgtgtcgggaagggcttcttcgctaccggtaagcgtgactgaggagacgacaaagatatcagggagctcttccagctttcgttggagcacagattgggtagcagtgttcgggagctggatatgcacgaaagattgcaaggatgagccggtctgcttgtttcctcttgccttctccagcatactcttgatagcggagtggaccgtgacgatctcctgatagtctccactcagggacgggtcctgccattgtgggtcaggtttcgagacagtgcgtctcagagggtgctcaaatgcggccttgagcgcctccggggtgtgctcccaagtttcctccaccaataacggtgtaatgggacctaggacttcctgtagatgttggtaaatgtgaaacagtgtcgtttgagcagcccgtctgctaggactgttttcggcataagtatacaggcggtctttgatggcttccatgtaaaaagcagagaactcgaggttcgcccatcgattgacagcactgactgccttgtagaattcaaacttctcgcaggcagttcgcgctgcaagcgtcatttctgagaggtgtagaagggcgattcgatccaccagcagaagttgatcatactgaaccttattttctgggcggaagtccgaaagggcaccaaggagtagcttaaaagtaacgcggtacttgtgcaaactggtatggactgtttgtagaacttgcttgcccatgacaacgtcgcgagtgtagtcactgcttgcggcccacaatcgaagagcgtccggacctaaagcgtcgtaaacgggtttcccatcccccccttgcttttttccctttttctgcttcagtggaggtagaagagtgccggccatgatgtcctggggttccatgacgttgccaatggatttgctcatctttcgtccctcctcgtcaagcgtgaagccatgggtaatcagggtcttgaatggagcacgaggcgcgtcagtctggccggaagcaagctggtgtgcgacataggtgagaagtcccgactggaaccatccgcggtgttgatcgctacccttgagataaacatctgcgggacgacccatgttcaccgtaaggggtttcaacttctgcccacttagaccgctgtcgaacaaacctccattgaatccgcccgggtttatagccagacttgaggttctttccacccgggcggatccaaggggaaatggcatcttgggccacatgcctgggtccacctcatcaaacactatatttggaaaccttccttggaagtccgccttcccccctgtgaaaaagggggaggggcccccggccggacgggggccccttattgtttcccaaatttcaccttgccccccccggtc

SEQ ID NO: 3016 - DNA, 1155 bp, Emericella nidulans
gattctcaatagttgttcctaagccagcatgtgggggtccctggcggttctagtggaggaggctatgttggaggcttgactcagtcagagcgcagatagcaggacttaaattgccccaaatatagcaatggctttctgtaaaagcggcgggtgcaacgttcttttagggcaaagggttgcccaagacatgcttcgagaattaaactatcatttattttgagatggttaaagctggcagaaaaaggcggagaaacaggtgcttcagatcgaggccgaggccggagaagttagttctcaagaaccaatcatatccgatcggcatcgcggccttttacttcccgcatttaacctccgacccgcgatgaaccataatccgagtaaatgctttgtaatgtttctcacattcggggcgcagattatactgtcatgggtagtatctgcagtgtggagcaacttgatgacatgaacgggtaattggaggtggatatgactggccgggggataaatcgttaaaatgagctggatcgcagaaccccaccattaggcctgtgtgcccctccaatggcatcatcgcccctcgggggtgctggatggtcctgccctgccatgctgtccttgggttggagatgatcatgactttctttctttaaattccaccaccctgccgactttattctctcaattttccctactctttcatcctctttgacctagcaacctaagcgccatgtctctcgaacacacgaagtaagtgattctgtcctcattgcacaatttcaacgtcgactgggaatgaatactgacacgctttcccgtcccagaaaggtttacacccttaacaccggcgacaaaattccagccattggtcttggtacatggcagtccaagccaaacgaggtcagagaagctgtcaagaacgcgttgctgaagggctaccgtcacattgatacgtaagtaacttcatgatacttcgaagaacagcatctgactgcaatccatagtgcgcttgcgtacggcaacgaagctgaggtcggacaaggtatcaaggattctgcagttccccgcgaggagatctggatcaacacaaagcttgacaacacctggcaccaccgcgtcaccgatggcatcaacggcgccctctagcaataaggtgtt

SEQ ID NO: 3017 - DNA, 3302 bp, Emericella nidulans
aacgcaacaaatatgaggacattcagtgcgtggagacacagagggggaaatggactgcacaagtgccgtactctgtttgagtgctgaaggttccaggttcgggcaggcggctacagtacgcatgatgtcattgagccggcgccatgaagatcgtggcagtgacgactgagtggcaccatctttttgggaagaattgtcattcgtctggaagtatgttgcggaaaatcgcagtaatcacattcaggttttgcgatcgcacagcgcgattcacgacccagaggaaaacgcccattgctagaattagctttgcaggtcctacactgagtctatctgtaaagccgaccacagctcaaaatctcgtagcagttaagcatatcagagagtggattatgccggcaccactcacttgcgacaagctggtcagccctgctggaagtggtagcctggggtcccccgggacagtgtcccagcacgcgataccgcccgtctgcgtccaatttctccaacccattagcgaactcgtcaaataccgacggtaatgtagactcctcgtcgaacaaagtcttcatctcatcattgaccgcggtagaatggcggattcgactaccttggcgcttggcgcggacactctggcggaatatatgaaccagattccgccctaattgggcccgacttggtatactagcaaaaacactggcaagtaatagaaaggtgttgtctagaatgtcaaatttgccttgtcgctccactagcacgaatagggccaggttgatagcgtacatggtcaaatggtgagcatgagctgtgccgtaattctgtcgctgcatgcgcacaagtgtcgcaattgctcgcgctgcagactcaatggtgtcacacttgttgcgctctagcagtgggctgggactcgttaggctttccggggttttgagaccttccatggggggacccaggatctcatcctcggcatggaacagtagaaggatgatgatcagagtgtgataccgcattttcatgacaagtacgtacggcggcacctcgtcgtctcgcttgaagtgggcgggcaatccctccgtccattcgcgcagcctccggaacaacacctccttgatcctgattagttccgtagccgatggtactcttccgtgactcgcaaagagccactgggacatgtcccgcgcgatctcgctcagattgcacgatatgtcgaagtactcattgaggtatgactcctttggctctccacttatggggtatggcaaccaacgagtattctggtcatgtctgttaggccgttcgaggttgatcttgtttataagactcgatcgtaggaagccggtgtgtacaatcctacagggttagttcgggacacataagagctggaggtaagacacacgtatcaatctggaataagccccaggcagtccgccttagtgacacttccatatcctccgggaactcgttgctcgatagggctggcttcctttcaccaataagtcccttggcctctccagtccaaatggccaaatgcagcattttatacccgcaatcattcttaccgcaaagggagtatctagcggagtcagcatagcacagtctctaaagagcattgaataccaacctttcacatagcaggaggattccttgaatgtgggtgagtgatagtctgggaggctcgatttctcttagccgctcggcctcagccaggaagtcattccccttgctcatgatatctccctgtctggcgtatgcctccgaatagtctgaaaaatgctaaacgtgttaacacctgtctgttacatacaaggtgcggcttacacatgcattcgcgagtagcgcgttcaccaagaaggggctgcaaaactccgagttgatattccccccaatcatgtgcttgagaaacacatcgcggtccagaaaggtattgaacggatagtcccatgtaaaataaagcgagacgagatgagagacgagatcagagtcggtcgtaacgttcgtccagggttgcgcggggactcgatagggagcatcaacacagaggtagtgtatgtccatgacttggggccgccacgactgcataaaatcttcgttgatcatacactgtatatcctctaggttgctgactggttcttccgtctcatcaccttttctcccagtaactttgaggatgctcccaatgcgatggcgtaactcttcgttggtagcgtctcgtcggatcatgtccaccagttcgatggcagacgatctgtcctcttcacgcattgccctgagaagatcgttatacaagccgcggtagtagtccaattcttcagctgtgcgcttggccgccacgcggcggcgctggtcaagcgtttcgtcgaaaacacaatctctattcaaggtgcggcaggtgtcgcatggctgcttacccgagcactgggtgtgttaggcgggttggtctcgctgggcgggatgcttgcctttcgcttcgattttttacaagctatgcatgccattgaagcccgctgctgcttcttgccggaatcaccggagcctcggcgctcctccatcggagagtcatctggggatatttcgcatcgtggggaagggcctggagcgagttgtcgatgctgcgttggggactcggtcataatcgttcaaagggcggcgatctgagtcaagtgaccattatgccaaagagagcgaccatttccgtcacagatcatcctagccctcctcctccttataaattaggagcttgtcgattcaccatatctcgtgacgtatcgccgcgttagcatgtatgtgtggatcgatatccgcgaattgcaacaacgcaactcagccatcaacttcgcccattggcggctctggcagccatctcccggtcaacatcctagaagagaccacggatctgagggcacgaagattgaaggtggtcaacttgtccgcctattctgtactttcacgtgatagcgatggtgagtggtgcgaaccatctccgaacggtcgaggccttcttagtgtcgggggatcccaactttccgtgagacgaggagtagagcaccccgctcatcagccctggccggattgatgcggcttttactggggttgggcacggtattatttggtgtagcacatattgaaacatcttgtgatttgtggcaaacggacacctaccccaacaaccctaagtattcttgcaggctgtctatcaactttgtttctcgaatactttgtcacaatgccgggaattagtcccttagatagagcgcgaccaagctcttgattcgcagatacctgctgttccattaatgggggtctaa

SEQ ID NO: 3018 - DNA, 1053 bp, Emericella nidulans
aaggcgcaatacgctcaatcccatccggccgagtttggtcggtgcattggagttccagtctgttttgtcctccttaaaacggtcgaggagccacaatagaagccactcaatcggtcttgagaggtactcagacaattcggaaagcgtacagggcgatcgttcacagttcgacaatatatccatagcatctcatccccaaagcagccgcacccagggcaacagttttctgtctctcgatcaaggaactaatcgaactcgagcggtctcggcaaacgacgctatgggtttgaaattagacaccaatttcttcaccagtgacaatgcaccgcaaccaaaattgactgtgagcagaccttcaatcgaggatggatctaacacggagatctcgcatattctcgagtcccagaatggcacagagtttaccaggtcacccacgtctagtgcattttcatcgcgcagtccaagcctgggcccaagaccagggtccagcgtccataatcctactctactcgcaccacctgatgtcttccagtccctcaactactccgaagcggcatcggattcccgctccacgcctcaagtatccccaaagggtactagatatgttacggatgggcaggacaacaactcatcaggcgcacccagtcccttccccccatttcaagatgtgcctgggtcaccattatccacggcgccaagcattcgtctgcccgcctcattcagtccagcagagccgttacagtaccaggaagatacgtttgacagtggcagtcgacttacatctccggttaattggtggcctcgatcgcgctctttactgcggctggttgtgtctacactcttcccaaccctggatgggtggaaagccaagacaatttgggagaaaattctaggcattgtcgccgctcctagcgtgttccttttgacaatcaccctccccgtggtcgacccagtatctcccgaagttacgtctgctactgtgcctgtcattgtgacttctgcagaagatgatccgagcgcagcaacgcctattgtgcgcctaccagaggatag

SEQ ID NO: 3019 - DNA, 1677 bp, Emericella nidulans
gctagacaggcaacggttggcgctggtccgattgagctccgagcttactacaagccattcgtatataaagccctttatgacggccgaaagatggatatgctactatacagattcagccttcttgcctttgggagagcgtttgatactatacgcaaatcatgggtctccgtgtcaaagcccttgcagtggcagctctggctaccctcagccaggcctcgccggtcctatacactcgcgaggacactacctccaacacaacctacgcctttaccaacagcaacgggctgaacttcacccagatgaacaccacacttcctaatgtaaccatcttcgcaacaggtatgaccgtcccttcactttcccatctctttccaacccccttcagcaaacagcaaactaaacaatagcaacaacaggcggcacaatcgccggctcggccgcctctaacactgcaacaacaggctaccaggcgggcgccctcggaatccagaccctcatcgacgccgtccccgaaatgctctccgtcgccaacatcgccggcgtgcagatctccaacgtcggtagcccagacgtcacctccaccatcctgctagagatggcgcaccgtctcaacaaagttgtctgcgaggacccatccatggctggcgcagtcgtcacccacggcactgacacccttgaggaaacggccttcttcctcgacgcaacagtcaactgcgggaagcctattgtcatcgtgggcgccatgcggcccgcaacattcatctctgccgatgggccctataatctcctgcaggccgttactgtggcgagcacgaaagaggcaaggaacaggggcgcgatggtcgtcatgaacgaccgcatcgcctccgcttactacgtgtccaagacaaacgccaatacgatggatacattcaaggctgtggaaatggggtacctgggtgccattatctcgaacactccgttcttctattacccggccgtgcagccaagtgggaagacgactgtcgatgtgtccaacgtcacctccatcccgcgcgtcgacatcctctactccttccaggacatgacaaacgacacgctctactcaagcattgagaacggcgcgaagggcgttgttatcgcaggatctggtgctgggagtgtcgataccgccttctcgacggctattgatgatattatcagcaaccagggagttccgatcgtgcagagtactaggacaggaaacggagaggtgccgtattcggctgaggggggtatttcgagcgggttcctgaacccagctaagtcgaggattttgttgggattgctgttggcccagggagggaagggcactgaagaaattagggcggtgtttgggaaggttgctgtttgattcccgactgcccagggcttatgatgtgatttgatgagatatggtataataatccgtatatatccagtagatatcatggaagatgatgaatagctgccgatatgtttgtgtatctactcagtatagtctctggcactacggtgtatatgagacgacatcgcagacaccgcatatgccagagatcgaatattctatagcgagtatactgtggtatgcgagtcaccttgattgacaccagcgacctggctaacgacaccgctgcataaatgaggtgacgccgtagtacgacatggccgacctcatat

SEQ ID NO: 3020 - DNA, 1349 bp, Emericella nidulans
ggtcttcatcatccgaacattgtccagtatctgggaactaccgccgatgatcaatatttgaacattttcttggagtacgttcctgggggctctattgctacaatgctcaagcaatacaacaccttccaggagccattgataaagaatttcgtacggcaaatccttgcgggtctgtcctacctccacagcaaggatattatacaccgtgatattaagggggcgaatgttctcgttgacaacaaaggtggcataaaaatctcggattttggtatctccaaacgagttgaagcatctactgttcttggatcccgagcaagcaatggtgggggccatattcaccggccttcgctgcagggtagcgtttactggatggcgcccgaagtcgttcgtcagacggcgcatacaaagaaggctgacatttggagtctgggatgtctcgtcattgagatgttcatcgggtctcaccctttcccagactgtagccagcttcaagccatatttgcgattggtagcaacaaggctcggcctccagccccagaacatgctagtaagcatgccgttgctttcttggatatgacattccagctcgaccatgagaagcgacctgacgcagacgagttgctcaagtcgcccttccttgctacaacactgtacctgaaatcctttacgatgtcggatagacaatgggcgttttttagcattgagcttggagatttggagttcgaattatgtatcagggcaataatacttttggtcttttgcgtattctttccccttcgatatgataccgtccctcttgattttaatgctggcgttgattaaggtagatttgggaaatatatatatcccccaagatattgcgggtcatcaaaacccaatcgaaaggttcgtggcgtcagcaggggctggttgcggttttatgacctttttcacccgggtccactgattttcatttataaaaatatagcgtttaccttttacctgttgtaatctgaagcttctcgttgtaggtctcattgaccttatttgattccttgctcgaagttaagcatttctggtttataactcactcacgcgacaaaacaaccaatccaatattgcgtacaggtaaattctagagaacatgtgtaatgaaaatactaaaacaggagtaggttacacgtattctagctggtctctcagtgcgggttttacgccagttcaagatagggagtgttaatggttttctttcctgttcttaaccctatcccctcccatttcctattcctattcctactcatcctcttctcttctttctatcttatactttctgtactttctactttctccttcttttcttatttcctttc

SEQ ID NO: 3021 - DNA, 1279 bp, Emericella nidulans
ttcttgcattcacttataggctccgaacgagactcttctgcggaccatcactgaacggtgcgacggagtattcgttacgcttgagcaggcagtagaggaaacagaaatcccccgcgtcaagcctgtccggccagttgcatcattcaaaggtttcttacaattaggtaaccctgaagaatacgacactgcggtccgcattcctgttgagcggtacccacgaacaatggtagctaaacccccaacggccagccagttcgtcctgcgatcagatttagccgctggacaagaaggcccagtgtcatctactgccgttcctgaaacccagcctgaagatggtagtaatctcaccaatgtgaggaacttgagaacttaccaggtcagcgacgagagtgcccctggtggtaagatcgatgttgaacgggacgacttggccaagggatatgagtatggacgtactgctgttcatatcagcgagaccgatgagaacatcacaaggctggaaaccactgcggctatggagctagtcggttttattcagagcgaacgggtacgtactgctcgaacctacgactcgccttccgcgactgacattcccagtatgaccgatacatgcatttgtccaatagtcacatcatcatcgccaaccgtgctaatgacaaagcctcacttgcactatcctccttcatccatgccctgtttgaacttgagagttatgccgttgctcgtctggtcaccaaagagaacaaacctcctaccctagttctgctcgcaccttccatcgaaccagactacgagtgcctcctcgaagtgcaactaccattcgccgaggacgtccgaacataccgcttcccacctcttgaccatgtagttaccgtgtctgggaaggtggtaacgcagcatcgaaaccttccaaatgacgaccttcttgatgccatggacaaatacgtagatagcatggagctgaagggcacagacgaggatgggtaaactacccaacatgcctcgatatgtacacatcgctaacgaatacagagacctggtcaatacgcccttcccaattgatgactccttctcgccagttctacaccgcgtgaacgcgctgattcgctctcgagctatacacccaaacgaccccatcccgccaccagcaaggatcctcactcaattctcgcaaccaccagagcacctcctcaaaaacgcagaggccatctcaagaggcttattgaggtagctgacgtcaagaagggtactaagcaattttccccattccacaaagagt

SEQ ID NO: 3022 - DNA, 1961 bp, Emericella nidulans
ttatgatcggagagattgatacgctagctgatcgagtgggagggaagttacagaatggaattgtcgaggttgaagcatataatcaggaagaatgaaggtgggtattatcattgcattatccagtctgctttgagggtttcatgatcttccagtctgctaactagggattagatacgatgtcgtcgttctgcatcgctgtcctcattttcgtcctcgttctgttattaatactagtcatcgccctatagtttgggggctgtgaattgctcgaaattctcttttggacgtttagaccttggccttcttgcgtgggcgggagtcttcctcttcttcgtcctcgtcatcttcatcctcatcctcgtcgtcgtccatatcgaaatcgtcgggatgctcttcaaaggattgggcttaaaaacaaattagctgggatcgtctcggggagaagagaaagttataccatagtacttcagcgcattgggccagaggtcttcagcaagggcaacggccaattcgcttccggcagggaaggcttcgatctcttcgaagtcgtcgtcaacgtcctcgtcttcgtcggcctcgtcatcctcgacactttctcctttgagaagcttctcaaatttctcctgttcctccttggtcgccgccgcagattgttcggcagtcacgtcacttccgcgataaccgaagaagttgaagaagctttcgccggaaggatgtcctagagggtcctcatcgtcgttctcatcatcctcatccctctcaagggcctccacctcagcaagcttctcttggagcttcttgaactctggcaactccctacgagaaccacccttcttctccgcctcaaacagatcgcaggtggcatctagcagacccttggtgacatccatatccttcttccagttgatgcggacaggctcggaaacaagtccatcccaggtcctcttcttaccactggcagtggtgaaaacctgctttcgccagtatagctccttgaccagcttctcattctcaaagacggggttcgcatccccggtgtgcgactatagagtagcacgcatgttgccggtctagcccagatctttcgcgtgactagtagtcgctctacggtcaagttatctagggcatagtcaaggatcgtcgcatcggcgtgagtaatgtaatggtcgacgtctccggacgcattggtctccacgcgaaaccagaaggtgctgtgcacctcagggtgcgcgacgatcatggcgcgctaatcatacaggggaagaagttaaacgatggagcgacgcactgtaatttggttcatgttagcatgcacactgtatataacattgattaacgtataataacatcgccggcgctttgcaaaccatgcgatgcgctggacaacgagcctatcttgtatcaagttacttactctgctcaacctctgcgcgaacaaactgctgctccaaaaggccaatctccctcgcaacctctgggggaacaacaggctcggagatgcgctccgcaagatccttctgctggtcgttcgacatgttgatgtacagactaggtttggtctggcgtaaatgtgagaattatcaattggtcgagtaaaaagaatgaagaagaagagcaggaaatccccgtcaaacttaggtcaatcaggtaaacactaatcaggggccggggaggagacagaaaaatctgagctctgaaaaattgttttaattgcgctgcgcggctacgacctgagaaactaactccgacggagttggcgtatttcgtcactctttgccctttccgggccgcgacgcgacgaacagggcgctgctttaagccataagcttaaagcggcgtgcgttatctgaaccactgcatagagcactccgtacaatgatctgtgtggatatgctgctcgcaaactagtgacgagagatacgtaagcgccctaaatagttacgatgacaccgacttcttgg

SEQ ID NO: 3023 - DNA, 3292 bp, Emericella nidulans
gaagccttcataagcgtcacagcaagcctccagacatcgagataaggctgacgtctccatcaggcgctacgtaacctaaaccatagcctatttctgatgctcaacaagctcagggagccaaccgtaagcctctggtgtcggtggagtgctggacgaggaaggtttttgataagcctgctctggggtcgttagtggtgggcctttggtagtcttagtttccttattttgaatataaagctttcttgtctactaagcttcttggagggcgttacgtatacgtaaagcctcgccaccgttggaaaggtcaagacgttcccatcaatactccacccgcgctaggagaagaaaggggtttacgcctttggcaggccgccggtcatataaaaaccccatggagtaaagatcatgatgctttggcgcggtcggagcttctctgcttggattacatttatagcgttagttggcatatattactggcctcaacattttaggtatttctgagttcttgtgcccgttccacagcctttcaggtaatagaaccaaagctgcctgctattatgaagacagaacagtacgatcaaggaaaggttcagagatggcaaagagcaatgctgttgtctggcctacgtgcattccagtttccgttaactccgccgtaagtccatccgcccctcgtgacgaaaaccctaagtccattagctccagcgaatataactgcaactcctcgtcatacaatttccgatatacttagcaagcaaattataaggggtatctttgaattaatttacgaaattcattatgaagattatccttacaggcacgaccggcttcgtcggaaccgaagtcctccaccaagctctccagcatccctccatcacatcgatcgtcgttctatcccgcaaacaacttcctgactccgttactacggacccgaaaatcactgtcaagattatcgatgactttctttcatatccagactcgcttctccatgacctcataggtgccgaagcctgtatctggtaggcctccaccgtttaccctctctgcatctcactggatacctatctaacgtatgtatgcaatataggacccttggacttccctaccactccgatatagccttttatcgcagagttaatgtagaatatacgctcgctgccgtaagagcgttcactgagtctctcacgccgagcttagagaaaccactgaggttcatctactgcagcggtgcagcggccgttcgagaccaagaaaagcccttgtggctgatgccacagacacgcaagatcagggtgggtctctgctctacttcatcctttgcagtgttgttctacttttccttttctcacctggatagcttgcttgatgaacaatctgacgtggtgatagggccaagttgagaatgagctccttgaacacgccgaaaagaatgctggcaaggttgaggtttatgttctccgtccggcgatgattttctcaacgggctggtcgttgggctggcttctctctggtatgacgccgtcgattgcggtggatactctgagtagggtcatgttggaccttgccgttaacgggggaagggtggggagggtagtggaaaacaaggaaatgaatgcatgggacaagacgtagaagtatgattgatgtctgggatggtctcattctcgtttcgagatcgagttccgtactattcggcatttctctggcagtttacccagtctgatttcgctgagggagctagcaccctcacatgtcattagagcctggcagcggttttctggcatcaggacgaataaacagaggccctgcctgtggcccaacgccccttcaccaccatggataatggaggctcagttcgagcgagtctgtatgtgaggtgtggatgccagtattggcgcagaactactttactaggtctgtgccgtttcatgagggccgacgctgcaatgagcaaggtttgagttgtatgaggtatggttgattgttgttatctgaagtgttaacctgaaaatatgactgtctaagactaatctgatagtcatgacgcctttttagcttagtgatatattttccccttccttccccagtagtaggaaagggtcacaacccagtccctaatacctgaagcccttaattcttgtccaatccgtatgctgttaggaatttaatgaaatacttatagtgctggcttacgtgactctgcccacttaactcaagatccaccgtgcgttgaatgaaaagcagtcagtcagccatcatccaccacaaagtactacctcaattcctcacattggagcgctaggtctctcatccagccaggtaatacccgccccagctgccgctcgagtatttcctccttcagtttttagccagaaaataagagccagccacgccgtattgacggggcagtctcgggttataaggggaaaagagaatagtcatacattcaaaggggccagtctaccgagctggtggtcgggcagtaagaaaacaaacatgaataaataagtaaaatatataaataagaagttactgtatactggctgagacttctcaaatgtggatagaacaatcttagaacaaaagaggaagcgcttaggatgattgaactactgatgtcctcaggctgctgtgacagtaacgatacctcatatattaccagttactgctgggcgagtgttggcttacatatgagttggaagcggggctgttctgtatcgtaaaccagtgactttcactggatgctggctctagctctttctgttaatcacccactcaccagatatacaaaaatgagcgtttgtatctgccttgaatagccatcacgataaatatgaagcagcgttctaaacatatcccatcaactggctaactcccctctcgccaactcagagcagctgtctgctgctgcatcggcagctcatattctaggcctctgatctcagctgcgcaaaatcgcttcgaagagagcttcaacgccctgttgaggcgacaccttggactttgcacctctcgctgattgtggtttattaccctattaacgaggttcgaccgtcgagccaccgtcgtgccaccatcgggccacccggtggaatgggaacaggaaccacagcacccagctggacggaatcttcgcgccaccaggccatagaggatacaggagcgcgatatatagggaatatacgcatatatgcgtgtgtgtgattgggctaaatgaagagagaaatggccctcgaaagccatactatctacctacactgccagcatagatggacaacctgaagagggcatc

SEQ ID NO: 3024 - DNA, 600 bp, Emericella nidulans
tgctgcgatctgcaagaagaccttgaattgcagtgtcaaccccctgtagatcttagatttgggggagagccactctgagaaaccctccagtgggcggtagaacagcctcgaccgaatgtaatccttggaaaagggtgatgggcctggcggcgctggccgtgttcctgcatatgctgcggagggcctgatgtgttgggcgagaatttgaaaggatgagggagaatcatgatcatatgtgcgagaatagaaaccgaaccgaactagacttggccgtcagtacgactcgtccctcgaacatctagataaaagcaaagggcaaggctgcgtgaggttatcgaaaaaaattccctggaggcatacccgaaaagcacccgctaagaacccacgaacggcctcagacgtgatctcttctggcggctcaacatccgctctttgcgaggaagggggaggcattgtgatagcctaagatcacgaagtcccaagctatcattcttttccctaaagattgcggcgtatgaattggacgccgctccaaatcccgagcaatcgcgatgacgcagccgggatcaacattgctccaaattccggtaataccaatac

SEQ ID NO: 3025 - DNA, 102 bp, Emericella nidulans
ccgccatcggagaaaaccatagcagtcaactacccgcccttgacgcatctagagaccattcctttagtgtattccttaaaagacaagcttgacatggaatca

SEQ ID NO: 3026 - DNA, 1550 bp, Emericella nidulans
gcgctgactgtgggtattgtgccctggactcttttgccaatgacgaagacaaatgatgcgctgcatgagagggcaaagaaggtctttgtcgtcacggaaaagacggccgatgaagtgaaggagttgttggccaaatggaaggtgcttaatgcaatccgcgggttgttaccgctggttggcgggttggttgggtttttggctttttgaatgatgcatcagtatagtaatgaatgcaatgttgtgcagtgggttagagtgggagggtataacgcgatcattatgaatattaaacgtaagtatgtacatatatggtattattcacctcaatggacctccagccgaccttttgttactcgataccctggcgtacacgatagccatcagcctagacctcgaacttctcgcgccagcatccctctgagatcttccgcgtctcttattgcagctccgccggtggcggccttgaggccggcagttcttgcatcggcgcctgcatggaatgcttgttcccattcgcgtacacatccgcgacccgcttatcctgctgcgtcggcgcaaacgcctccatcgagttcggcatctcgcccggggctacagcaccggaagaaccagaccgctgcgatcgcaccgagaaccagtggtatgccgacgcctaacccgactccgagaccgacaccgaggttgctgtctgagctgttgtcgctgccgctgccgcccgttggtgttgtggtcggtgttgaggtcgtcgtaactgtacttgtagtcgtcactgaggtcgaagtcgatgagctactcgtgctctctggcgagagactgctgactacaaactcgacggccggaatcgagaatgtctgggttgagttattgcagtcacatcctccgtacgcggtgcagcagaacgtctcggtgccgcaggctgtgacgcgtttccggaatctgaaaccatccacatcgccccggttaagtgggattcacttgagatgagcagttgagcgtaggcaagacatactccggacgtttcgcactgtgtcgcgcatgtctcgacgtctccgttaattcagtcctgtatgctgcatgtgttttgccataatgtcattccgtcgtcgtcaagccgcccgcagaggccgttcgttgcgcagtactctccctcgccgcagcattgcgctgggttgccgccctaagagcaagtaatgcgcgttacatcctcgttgccgtcgcggtcgtagcacttggctaccattttggcgccgatcgggcgaggtcggcgggtaatgggacggtgtactgtgctagagctatagctagggctggtgctgatgctgccagatcttctcccgggatgaatgcgaggatggaaaaagtgtggatcgcgagacgctgtggtccacgggcgattgcctcaagaacgaaattaagaatccaaagaagagccgatccgaggcgaaagggaggctgagcgtgggatcgctagacgaagacctaaggccaaaagatgccaggaaattgaagttttggcaagatgcggtaaggaaccaaagccctggtaatcg

SEQ ID NO: 3027 - DNA, 2834 bp, Emericella nidulans
tcttgcatctcacacctgtgtcgtctccatttcttcttcatttcttgtttgactttcctttgatattgccatattcttacaaccacctcacgcgagtatctcatttccttccgattcgctttaagccaatcagtcacccctcttgcccgctcaagcgaacaaacggaccatcctcgctcgaccagctcgatatccaacctgaataacggatggcgggtttgatgggcgctgattgacgagcgagcccttctgccctgctccccgtagcaattaacatatggccagacaaaggcccaacattcaccgccaggaccctcttgaggactctcgcgcactgccctcgtctgctggtgcctccgctactgccgccaggtacataccagatcctttctcatttctaccccgcgttggcctcctttcttcgacgcactgtgttccgttcattcccttccccatcccggtatcccagcttcggtatcccgccgacggagtttcggcaaacaagtattgaagaccggctcctttggacctctggagcacggagctcttggagcttacatgtcctcatgaagatcgccatcaattgtttctaacatcatcatcaccccgcgatcacacttttttccctgtcctctctgaacccttcgtctagtatcgtgcttcgtgagtgaccagtttctcatgtcctccagaatcactcgctcggccgcgagacaagctgcagattctcccccgcccgccggttccggtccctcttctacatcccccgccgctggttcggccccatctcgaaagcgaaaggctcccgcacgccgcggtcagtcaccggactcctcggagcggccaaatagtcatcaatctccccatcgaaagaccaagcgacaacggcgtgcaccttcgccacgagcggcaaacgcctctgctgcagcttctcgtcgtggtacccgaaaccgcccaactatgtcacaccctgggtaggctggatctctctggcgcggaagatatacgtttactgattggtttctgttcgcagtccatcgtcacacccggcggaggaatcttcgaagaagccggcctcgcccccgcaacaaagaaggaaatctagtcgacatgggaaatcggctcaaggtaagatttacatgagcaggaacttttcaccttccgcttgctgttgttaggatgcgtctatttactgaaattctatgcgaaagaccgatctttagctactcagtcacctcccccgaaccggcaaaagaagcgctccagaactcgtccagatgtcgttatgaaagaggcagatgacgaattagaggaacgggagaaaagcgaggaacatgaggcttccccaccaagtgacagcaatgatggcacgaacccttcaggtctcgacgatgaggacgaagaggaagatgatggagatctttttcataacagtctgttcggagcgcgaggctcccttggactccagagtactcttcgtgcccttagcggtatgatgtcgggcatgtcatcccgcctacgggatatcctccaaaatttgagaatgaaggatgacccgtcagttcaacttatcgcccttcaggagctttcagatctgttacttgtatcgaacgaagacaacctatctggccagttttctcctgatccttacgtgaaggagctggtatctctcatgcaaccaaatgattttggggaagagaatccggaaataatgcttcttgcgtgccgttgtttggctaacctcatggaggccttacgcggctctgtggccaatgtcgtttatggcggcgctgtaccgatcctgtgccagaagctactggacattcagttcattgacttggctgagcaggctctcagtgtatgtcccttgcatttttcttcttttactcttgtgcttcgtgccgtcttccgttggtttttgacagtacatcgctgaccttacgacagacattagcaaagattttcggtggacttcccggcgtccattgtacgagaaggaggcttaacagaatgcttaacataccttgactttttccctacgagtacccaacgatccgcagtaacaacgggcgccaatttgttgccggaatttggcgtacgattccttccccgtctgtgcgagatgtcatgcccaccctccatgaacgttctatctagcaatgatccgaaggtcgttgaacaaggctgcctatgtgtttctcggatagtggaaagctttagacacaaaccagagaagcttgaggagcttattagcccggagatgctaaaggcggtccttcgtctgctgctgccaggcaccacaaacctcatcggaccgcacattcatacccagtttcttcgagttctggcaatcacgtcgaaagctagcccccggctgtcggtagaactgctgaaaacggacgtagtcgacactctctaccagatcttgactggagtctcgccaccagaaaacattgatgaccaagctatcaagatggatagcgtacttgtgatgcaggctttgattcaccggccgaaggagcaagttaccgaaacactgaatgttatttgtgagctcctaccaggtgttcccgagcgtccaaactcgcatgacgctggtaatcccgaggtcgctgcaacatcggggtccaagccatcctcatcgaaggggttagctgagaaacgacggtctttgctcatgggctgtaaatctgagctgagacggttcgccttggtcttgctccccacactcactgatgcgttttctagcacggtcaacctggaagtacgccaaaaggttcttgtggcgcacgtcaagatgttgcaaaatctggatcctgctttgattgaggagg

SEQ ID NO: 3028 - DNA, 3795 bp, Emericella nidulans
cggggctgcattagaagcctttcgtttccagaatggcctcctctcgtcaccatttgtctccccagggtgggggctaggagacctcccaggccgtccacgggacggtccaggaggtcatgtatttggggtcggtgtccttggctagacggcggacagcatcccgtgatcccgagactcggcctaccagttcagcgacccgcgcccattcgcgctcctcggcctcatttgtcacatggcgctgaggggggaattgaagtgccgtgcttgggtgcagatgtctcggggaatgaccctcatcgccggcgcccttggaggatgaggccttctccaagacgcgcttccaggacgtaaattcggactcattgcgagcgcgtagatgccatacttcagttccggagtcgatggagatctcgcgagaagtctcattgcaggccacagcggctagactcaacggaattgagccacgcagagtagcagagttggcgtcgtggaaataggacagcgtagacgtcgaaaagtcgagggagaagaaccgccgcgcccatccctgatggcgcttacggcgacgcttgagcagaagcccggtgtgtattgttgtcccatctccctcctggacctggatttgcggcggcattttggccattatgctattgccccgccggcgcgacgatgaggactcggtatcaccacctggttggctggccgcatgtgtagtaggaaccgattgtggaggtagagcagttgggtaagtaagaagaacgagggtcacggttttggatatttgcttcgaaaatgtgttgtcaaagacaagtgcgtaatttccgccctcgttagggggcacatcatatgtcccctggacaatcttatccgcctcacatctgccaacccatcgaatctgcttcagacccatggccgtcaatttgtcgctaagcgaacgcgaggcactctgcctcgagctggcaccgccatttgcgaggttctcactcgaatcgttgctcggggtatcagctgaggtcagactaggggtactgagaatgccggactggccgggatgctcatacatgccgaagttcagcgacttcttgtgcggttgaatgctccaagagatggtatgcgcggatttgacggggacccagcggacgaagtaagactgtcgggtagatcagtcgtcggtcagctgcggaaaccataactcttgcgcgttcttggggtcgtaccttgctatggacttcaagctcttccatggctgccatgactgcacgagcgaacagtaggaggtcactgaccgtcaggaggaagcgttgacggcaaggagccgcaattaaaggcgcgatggagggaacgggggtgtaagatgggtgggtaggggattatatcggtgcctgaggacgttggagaggggtggagcgggttcacgagaccattgacaatgacggcatgggacaacgagataatcatgcaaagaagcaggtgataacaaggacaaaagagatcggagaatatagtaggaaatgagaaaggggaatgagaatcagccgaatggggcgaaagcggcagacttgtcatcttccgcatgtcattctttcataaataatgcggagatcttaaggctgtgggacggagcctcctataaacacccaggaacctcagggcatcgtcacatgggctgttgctgccattcaggaaccgggcattccgaccattataaatctattcaaaatcaattcttcagtggagcacctactccataattacttggagtaaagtggatgatccaattcaacggccaagtctagctttcgtccttgaagtagtagtatagtgaccttatccccgcaaaatcatagaaaatattacccaatatagaagaaagatatgctaaataagaatatgcaaacacttaaacccttgatccctcagcgtcgtttcccgctttgcatgttagtgaacaacagcttgaatccattgcacaatgcccgcatgtctggataaggattgcgctgcagctcgtacccttggggaatcaccttgaccggccagctatgcacctgcgcgtgctctccggccttgaagcaaaggaagaagtacccggcatgcttggggtctatgcagaaggcgtacgccgaccggcgcgggttagccttagtataggtctccagccactggtctgaactgccgttagtactcaattgaatgtagaatgtaggaaagtgacgtacaggtcgaatctttgctgccctcctggtatttctcatgcagcatcatctcatccaccttcttggccatagctttgacgtggttgaagatcagatcatccagatcactgtacgtaaatcgacccccaaccttgagtgtacgcccgacggagaactcattctccttgtccagctctagcacatcaatatgctggaagatgccgtctgccaccttccaggtgacggccaagtggtcgggtccctttgaagacggtcggataaccacgtcgccgcgactctgagacccgaggaactccactgcctgcgtggagttgaacggacggaataatggatgtttgatgacacgcatcgtacgcccgccgtcctgtgtcttggcctctaacgcctctcgatcctgttcttcctgacggtaatcccattctcccgcgtgtgctcggtcagcggcgggcctggacggccggctgacttgttcttcccgcagcgacacgttacacgtaaaggtcttgcggttcaggaacatcaccttggccggtactgtttggtgtagggagtaaattgctcttacggggatgtcgtaacgatcagtcatctccgattctccaacaagtgcgtcgacaccgcagtccagcttgccttcaatgtggtcgtccctgatgctcttgatagagatcggtaccaccatgccctccgccaatgtctgtgctgtctcaccggtgagcatggtgaagatgtcgtctgtgctaaggaagacaaagtgttttcgtagctcttcgtaaggctgctggagttccgcgcggatggtttcgagcgtggcccgctttcgctggttgaggttcttctccaactgttccgcgtattcttcaaggatcagatcatttacacgatcctgagcatcttcccggaagagcttgcggacaattgcaccgggcccgttctcgtctgtttctgcctttatatcctcttcgtccaactccaacgcgtccgctgccatcttgcgagcgatatcgtagtcttccggatgcactcgagtgttgtcgaggggatccgagtctgcgtccgcgctttcgtagtcgatatacagaaaactcgcagagttgttccatacttttactcccatggcagggtactgtaccccaactccaagcagagaaaaccggctgttaaccacacctccagtcatgttcactatctttaagaggtgtgctgctttgcgtgggcccaggccgcatacgtatgggagaaggttggcagtagccgggtctgacacagcttcgttgatatcgactccaaccaggttgaccatgtcgaccagcgcggtttcaagctgcttcagcagtagctcctgcgccaccagctgctgcccaggcttgaactgaatggacacaatgtctcgacccagcgaagcatactcctttagagggctctgcagatacttggcaagtcctacacaataatgagtgaggggagcgaagctggggtggtctttcttagcccgatcactgttttaatagagtcgcgccacttcatcgttaacgatcactacttccagccggtcactgacctccacatcacggtcgta

SEQ ID NO: 3029 - DNA, 1559 bp, Emericella nidulans
  unsure (1)..(1559): unsure at all n locations
atagtggattgcttggcttggatggctcagaaagggcgggaggagatagtgagggttgtcgactagcgttatcacatggctcctctagagagggcgtaaacggcgacggacgggtttcatgagggtctggactggaaggcagtcgagtcgacacggtgagagtctccagggtgaggttgatgcgacgggagcggggagaggcgggagagaaagagagagaaggagagagagaagaagaagaggagcaaaaggcaaaggggaggggatgaactgagaagatgagcagaggcggaagggacaataataagaagtgagaaagacaaatggcagtcagaggaggctaaagcagggcgggctcttattggcagtgtatatacaagctgcactctctatctgaccaagcagatggggtaaactccgaccgagtgcaggacagcgcgacaagtggcgagttgctaccgagcggggagctgagcggatgacatgcagaactgggttccttaaaagagaagaaagagagcgagagcggaaaagctggagactgcgagtgcgagtgcacttcatatggggatgccagcaaatctgaggggagcatgagctggcaggcggtcactggaatcgtccaaatgcctcatattatgcttgctataccttcctgggtcatatacagaacgagatgcgaaatgacaactcgagcacagtaaataccgcccagtggagcaaatccagcgtatttacagggtcttcttcaaaaacaaaccctcctatcaataataacaggctgacaactgacgagtgacaatgattctcatcgattctctggactcaaacagctgaattgaccctccactgtgctacatgaagaacaagttgatgcgttggcagcgcatgcatgaaggccttccgctctcctgattcgtcgcccgcccccctctgcgcgtcttgctgtccaccaagaccatccatccaaaattcgaatgcaattcaaaccatggcctctcattcttgcgttgaaacaagatcgtcccggacgaaacaaagtcgtagctgtcccggctaccgttgaaagtcaaattacctctaccaaaaggtattacgagggactcagcttcgatctagttctccacggtttcgaatctttcctgtgaagcggaatcaatcagatgtattaatggcaacagcatgtgccctcttaaatcaactccatctctggctcctttatgtatataataagggtaaatatgttcgctcctgtcaccgccaaattcctcttattctcgcatcggtccatcgtagccggcggggtacacttcacgtcctgcgctgtgtgcccctcttaaaagcgtcaggtaccacttcctcgctggacttctgtgcggtctagtcaagcggtggaggtctgtaaccgaaaagaagcagtcatgattttatacaaccatccgctctttgacggggttgcagtcacccaagacacagcagtagaccgtagtcgcagtattgtacctagttttatcgcttagaagctaataatagnggcgttatcattttcatcatatctc

SEQ ID NO: 3030 - DNA, 2396 bp, Emericella nidulans
  unsure (1)..(2396): unsure at all n locations
gattatggtgacactatagaatactaggatcttaaacgtgctcctatggctttctgtcatgtacttcacggatctcggattgcgagccggagagccggtttctggtaatctgcaaagccgacagctgagcaattgggcaggcagcttacagcagcgacgcgtgttcatacatagcacgagcgctgtgtgaatgtttgatggctaatctagaggacgcaacgcattggtgcctagggtcgcaacagcgcttagatgctcctgctgaagcatggggtattgcaaccgtttaaatgctgggatttccaaagtctagaatggaacgctctgtttaacttgtggcgaacggtacatntttcaatttgctaaagccaatttgagattaactaaatatagaactttccaaaatggaagaagcggccaaccaacttgatcaatatcatctgccccaaatatttgcccagcctcaccctgtggcctgtgctctgcagcgactttataatgcgaccaataaacacacagccctgtccagcattacaaattaaaaaaacgccatggatgccaaaagttaaacaatacattattcacgtggcttagcacgctacacctgaacgcctgtccatggcagcttttaaatgttatcgccctgcagttgcctcgatttctcagctcatcaggcggagagtcaatcgcctttttttttttttttttatcgaaggatatggctagagtactatggcttccagccggccttgccacagtccatctcaatcggatactcggcttcattgagccccaaggtccgcctttgcaggcttcctaccgtagacaacagtactatcaaggtcagcccagcgcctgaagatatttttctctctttctgagggaaaaagggcaacagaccattcctgatatgcatggattcttggagtgcgaaggccctttcgcatgcgcgacagatatagctcaacttcttcgcgtgaccactggatagcttagccacagtcctggatactggacggggagtgtaccttgagaatggtggttaacaggtacatgctccatccctcgatcccttcttcccacagcagccggttatatagtcccagctgcttaagacggtgatcgctggcccatccgccaatggggatcttgtatcgtcgctcgaccacgtccacaaaaccagccttgatcatcctgtccctggactcgtcgacgatcctcaaagatttcccaaacgcctcgccggcttcgagagagacccgtccccattcctcgaagatcgtccccacagtagtcccgtcgtccgactttggtactaccgattgctcgacttgctcgatccatccgccgggcttgactgatcttgttccataggtatttagcacttcagctcgccagagggaggctcgacgtaccgtaatgcctgtttatagaacgcgtcccagtccgcgacgcagccgtacagtccacggatgtgtacgaaatcgaacgcgttgtctccgtacagccattcgtcgcagcagtcgtcgacttcgaactggacattcgggggaacccaacggggctggattgggggagagatcggttccgataaccgctgaggaaggatgaaggtctgcgaattctctgcgcgagtgagtatttataaacaattctcaggctgcttgggatagggtcgcgactatacactgcccagatgcccgtccctgtcccaacatcgaggactttctgtgcaacgtcaataccgccccagcctcaggacgcggtcgatcactcacctgcgcgtcgtccgggataggcgctagatagagccgtccgcccaggacgaggttgtagacatggtgtcggtttgttcgtcagtcttgcgcagccggcgtggatgggaattactcacccgaaatccagatggtcctgcgccttctcatcattaggtcccctagtgaatttaatttagaaggatctctaatgcgacccggctcctgctcaccagtatgatccagcgcggtaagcatggtagcgtcgcccgttctcgtagcggtaatccacaatactgctccgcagcgaggtcaattccctagcgcagcatcagcgaccgcgtcgatcagggtcgggtcgtataagcacagacgagttataatcatcgctataagcggaatccgtgtcgtcgggatgctgacgtgccgaaaagaatcagctccgctccaaatctaaatatatggggtgaagccaaagtagcgggggaagctacccctggcctagagaaatactgctaaaaaatgaaaaaacaaaaaaaaataaaataaaaatttggaggaaaaaggggtaagggacggctcgcacattgatgtcgacctcgagcctgtattcctcaaccatgcttgatggatcaaatcact

SEQ ID NO: 3031 - DNA, 3107 bp, Emericella nidulans
  unsure (1)..(3107): unsure at all n locations
tacgtgcctacatagtaggattgcataatccagtgcaggatgccgtggacccaggtgaagtttccaggcccgaaaaggtagagggcgctcgggactgacgtagtgaagtagaggataagatgtgtgagcatgacaacgtctgtctcgacacgaactatctgtcgcgcagtcgcaatgtaggcttgtattagcctttttagtatgctaggcaattttgcgagatctttcatgtcccaggtcacgaagacggtgggctcgaactcggccgcttgagtgttgttcagagcttggagtctcagtattgtgtctttatcggaatgtgtctgatttgacgcattttgggtcgctatccaccttgtcagtatgagcttactcgggccctgagtagagcgtggacatacatttccctctgttccgtgctcccgcgggatcgtttcctttttcttcgggctgaagactgccactgctgccgtggatctcggcatcatgcaaaagagtctttaaaaccagcagatccggctcggttagatttgggtctataaaattggaggggtccatgttgggatggcctccttactcagagtgcggtgggttgtcagaacgtgcagaagactgtcagaatgttaaggggaagctacgggtatcggcccatccgtcaggggccagatccttagacttgttgcctaacaaagagcctcacaatggtatctacattgcgggaatcccaaacgttttgacatgtagggagaagaaacctaggtcagaatattatatacaagacctgcagacagttgcttaactagaccaattagaaggtgaaaaagacactgacaggatcttacttttccgtaaatgtgcttagtaagagttgaagcatgaaacctcgaacggtaagacgccactctacaaacatgcttcacgaacaggatcttcggccttctcggcgggagcaaatcttgagtcagatgcgccttcccgatagcttgtcgttaccttaggggctcgagtagcgttggtggaattgactggcacccatgccaatgccacatgacttgaccaatcaaattcaatctacggatctacggatctaccccacgataaaaaaaaaattggcggggttgatttgaagagagggaagctgcattcagagcaaaggcaaacgcagctttcaaactgtgaaaataactgctcttagacgagctgtaccttctatatctagttcaagtctcagttcggccactgttactacaatgactctttcaaagttgcaaggggtcaagctccccgcatcggccgacttccacggtgcgtatgaaccatccactccatcgcactgctatagtcaactgatgagggaaaatagtccacctccgcgatggggacatgatggaattggttacccccaccatcagacaaggtggtgtcaacacagtcttcgttatggtaaggagataactttactgggggacgagaagcaagagatgaaacgatgcgccaactgcattgatttgataagaacgccaaataacatctgatgctatgatagccaaatctcgtaccgccagtcaccacagtcgaccgtgcgctcgagtacaaacagcgtctgcaagcgattgagccaaacgtaaatttccttatgtctctgtacctgcacgagtccatcacgccggaaactatcatcgacgccaagaagcgcggcattacgggagtcaagagttacccggctggcgtgacaaccaactcctctgccggtgttgtcgactacgagcagttctaccctgtattcgccgaaatggagcgccaggggatgatcctgaatttgcacggggaggttccctctcagggtgatgtgaccgtgctctcagccgaagagcgcttcctgcctaccctcgtgcagttgcatgagaagttccccaagctccgtattattctagagcattgcaccaccgctgcggcagtggaagctgttaagaagtgcgggccgactgttgcgggaacaagtaaaatcgtaccttctgggttccacgtgcaatattgtctgaccgtgttgtagttaccgctcaccacctttcgattattattgattcttgggcaggagaccctttctgctcttgcgagcctgtcgccagaacccctgctgatcgagacgctcttctgcgcgccgctgcctccggcaactctaagttcttctttggctcagatagtgcaccgcaccccgcagcttccaagagaggaggagagaagatcgcagcgggtgtattcacccagccgtacacgacncagctcgtggttgacgccttcgagcaggcgtgccgaaacggcgttctgaaggaagaagatatcacccccgagatcatcgagggcttcatgagtaagttcggccgcgctttctacggcctcgaggagcagaaggagttcattatcctcgaaaagaaaggcgagaaggtgacaaatatactcaagtcggataaggtggacgtggtcccattcagaagggatcaggagacatggagcttggcttggtccgcatagagcgctttcagctgaattccataggccgcaaaagtatcccttctactcctcctttctatccgcctgtgtaagcatactagtcacggcctcgagtgcctgtgcttcggagatgttcactctgcgtccgccaacagtaatgttcccatcattaccaggtagctggccagaccgctcaagatgtagtctgattctgctttcaatgtaatctcgtctctcatctgacttgggttccttgtctttcgccaggcccgattccggtaaagcggccagcttaggccggagctcttttagcatcgcttgcagagcaggaagttgtgacaaaatgaatgtagttttggtcgtcaacggtgtgtgctgctggttcgatcctgtggcaacgccaacgcgtgattgctgagcagccggactcgctgtcaagaacgacaagtccagatctttcttcgtaagagacgtggttcactttctttcgtgtccgttgcagcatccgaggcttgcgtcgctgacaagatcgctttaagctgcgcgatcattacttcgttcctcgcgctctcctgcttcaatgctcggtttagttt

SEQ ID NO: 3032 - DNA, 562 bp, Emericella nidulans
gcatgactgatatagtggcctcttcaccattggcttggagccgggcttcatccccggtccatgagggcgacagttccaatccagcttctgcgtatagatcccagaacagacgggaggcgtcgaggtccattgatggtctggtgaaccccgaccatggccatggcatgccgaggatgacctggagcagtggggggcgtctccgtttgcttctttggctaggggactaggtgggggtcttagtcggggactgcgtgggaaggaggataggcggaaccagggaaggcgccggggagctcgacgtttgttccgaagaggtcttctatgaatcaagttcttagctgagtcgggcttggttaaattggacgctaatatgaatggctacgattatactatattgttatataccctgatcgtcaatcgattatgtacatacattcaacccttcaaccctctaccctctactctaaagagacagggacctcgtacgaaaccctactgatccctttctgcctactaatcttcctaatcacaatccttcccgttcttttcgtgctcagcacat

SEQ ID NO: 3033 - DNA, 2093 bp, Emericella nidulans
tggggattattggctgtgtagaaagacttactgttgatatattcatagcccaaatccttgagtcctaacttcacgacttgcgctgcggcagtcagaattacagttgcgttgatgtcacactcgtgcgcattccaagagctccaacctagagctgggaggcggccctatattatcaagtgaggtcgggtcagttaagaaagcttgaactgcagcggaatcagggtgagaagggtgagagaggaaggaaagacaaggatataccactccgtcaggcctcatgagcgcgttggctcgggaaatcagggtgatcagtgctagaaactcgatcatttcgcacgttactcctggctgatcgaggtaaaggaaaatttgaagaagcagcaggaatcatacggtctttatgccaggcattgcccagaactgcaaggatgcaggggtgtttgtctctctgaccaaacagccatgcctgattgggactggaatctagtcttcgtgatcaagagcttgtttgctgtcacctaagaagaacggctaatcaggccgcttgctgataagaaagaaagcgacgacataattgaaacggattcagtattgacaagcgcaagcccagccctaacgccacatattctagggaaacagaacagcctataagaacaaacaaacgcattcagggaaattgaacaaagcaaaacttcatctagcaagccagcatattcacatccccggatcgccgcatgcacatgaatggatggcatgaactattggctccccttctccctcttcaacccctcttccacctccgtcaacagttgacttaattctttcgcgccctcactgttcttgccctcaagctccaaccccctcgatacaaagcttttcgcctcctcccacctccccatttcaaccaagcactttcccccgcgccaccaagccttaacattattcacgggccgtccctcgacactagccctggcatcgacaagcccctcaacccacatctgctgcgacatgtacgcctgtgcgcgattcccatacaacgcagcgagttcctccctagccacggcaacgggctcccagccgggccgggcgagcgccatttcgagcgcgaaagtgtacagacgcacagcctcggcgtagttgttcttgcggtaggccatgttagcgctgtcgcggagtttgttgatttgcgcggagcgtttggggttgaggggtaatgggggcgggggaatggatggggtgtccaggcttaggagggtgcggtggagggtgttgagggtggagagttcggcgttcagggcagctgtttgggaaggcgtgtatgttgaggtagcgttcggggagagggaaatcgctttagatgacgggtcgattgttagaggatattgattgaagagatcgattgattgggccatttttgttgaagtctggtgtggtcgttgattattgtgtaggtatatgatctgggtggcattagcatgcggaagcacaccaccagatggaacgtaccggttggagagcaatattctagagcgcgtaatatataagcccttgggtacaaaagccgaacctcgaaaaaagaatatatttagtttgtgcgttgagtgatcagggggataatctaaatagctttttgaagtcgatatccgcaagctgtccagaccgggcggtggcctgaacaatagatggttcacattcaaggcggtgggaaactgccatatagtaactcgtacctgaagagttgaaatatgtgtcagacgctatattctctaccaggctgaaaattcagatttagttatacattcaagtcaaaccatacaagaatccagtctgagagtcatccaatcgtcaagaacaacactttgcattggaaagggaatcaaccgccgcaaaatcatcacatcgccagaaatcgcaaacacatacaagttcagcaaaagtcgcctaaaacacgtaatgcagtacaggactaagctgattcaaaggcgcccaactccgctccatggtcatatcgggggatttcgaggaaggaagtaatcggaggagtggtttcggagtaaattagcggtggccgtacccgctcacagtagagccgt

SEQ ID NO: 3034 - DNA, 1832 bp, Emericella nidulans
ccgagcagacggtgtggttgttgaattggggcactgtaacctccaattcgacgaggctgtcaaaattcttgctgcggtcaactgttttctcgctgccgttttcttccccgttgtcgatataagttctgacagctttgttgtagacagaaagaattagcgatggcacgagtagataaaccagaggaaaacatacccgacaataatatctcgtggagtaacacccccccaagcgccatccttgagctcgtctactccagaaagagtagcaaaatcgttgtaggtgtcgccgtgttggccacacttgacgccagtctgtgcattctcacggcaagatctggactctccgtcagggtcggccagcttgtagagcttgcccccgtagcaggccgttgcgagcttttcatcatcaccgtccgagtctgacgtgcagctgcgctgggtgtcaataatgaaagggtggtgcccggatgcctgccacagtacgggaatggcatatccgtacaaggccttcgcgaaggcgtcggtaactgtatcatttcctgtctttccgtcaaatccatctccatcgctaaggtcactggcaccgttgatgaagtggccgtccgctacaagagacttgagcgttttgatagagtcgtctgagccgtcgaatagcgtagccaagcccatggtgttggccctatcccagagaccagcgctttggcctaggtaagtcataaacgcgtcttgatcatcatccgaccaatcgtcgctaggttttcgagtgcgctagttagctatgaaggttttatcaaaagacggggtcggaagaaaagctcttacggatcctcagtactaacaaggctcgtgcccacctcgacagctttgcccaaaataccctgagtgatttcttccgctttcgacttgccctcatcacccagcgaagcgataccaggcagcttctgtagaactgttgtctgcgtcaaaaaactacatgggatggctattcgagaacgaaacacataccatatttgaagaatttccctccaaccattggagtcgcgtctgagatcaaatcaaacagaatgtcctgccatgagaaatcgtcctttggtggaaccggagcaaatttcttcgtaaagtctttgagcgaaggatcaactaccagggccatggccgacacgagaccgtcatggtacctttgatacgttttactgagagtattcaaggattcccagatgagcacttcggcgggagaacggccatcctggcagtcgatatttccaccgcagccttccacaatttcccagcacttaccgtagccctcccagtccatcatgtacgccaagtatcccgtgaatgacgtttggttcacattgtcccggtagtacttccaggccttcaccatgtcgtcccaggcttggtcgacgtcgagcgcggcccagcgctccgaaggagtgtaataaggcgttccctggtagtaattattgtcacaggtcaagctggaccagttaccgtcctgaagattattagattcaaggggattctgcttcgccatgattgcctctttgtaatctgaccagttgcccactggtgcgtcatgccaggtttccaggtccgttgcccagtttaccgagccacccatgttcagtgacttgtatctgctgactcgggactcgcggacctctgggctcatgtatgcgacccattggttgtcatcgtagacaaggatgttgctgtcgctgtcctcatcgaggtagtgtgcggtaacgcggcttgaagcagtgtcgcgggtattaagccccgaaggactaccgctgaggatcctcttatcacgccatagcagatagcca

SEQ ID NO: 3035 - DNA, 553 bp, Emericella nidulans
cttaccatcaggtagttaatagggatacatccgacaccacgaagccaaccctccatgtaggagagaccgatgttcaggttcttgcggataccgtcctcggtgatctttccgggaacgttggtgttgaggaggtcgttggcggtgatgttgacgtcctcgcggcggacgtgcatctgattgggggtgggcatgtacttgttgaaaacttcactggcaatcgaagcgagacctgggtgcgcaacccatgtgccgtcgtggcctgcacgaacttcacggagcttatcggcgcgcacgccttccatggccttgtcgttggcctcggcgttgtctttaatggggatttgagcggccattccaccctgcatacgttagtacggataccgaactttgcaaaagaaagggcataccatagcgtggactcctcgcttgtgacaggtcttgatgaggagcttcacgtaggcatccatgaaaggtacggtcatggtgacatcagagcggtcaggaaggacaaagttggggtgttggcggaatttcttgatgaaggagaagatgt

SEQ ID NO: 3036 - DNA, 779 bp, Emericella nidulans
gatatagactactatgcgccctcctggcattacaccgacaggaacaggaacaggagcaccaagtttttgtcgagcaggaaggcgagactgtttatgacaccgagctcgcgactgagcttcgaattgtcatgtacgggacgtagttatgattcgcttgaagagtatgcatatctggcgctttgttcctattccattacgtgggctatgggtaaggttattgtactattatatttgcaagatttcaggtcagggcgctggaggtatatatctggaagcaataagacccatattcatcgtcatggtttagtatccatagattaaatatatgcaagtactatgggtataagaataagtattaaaagagtatgtgaaacaaacagacatccacccaaaatgcccagaaactccgacttgtaacgagaatcgtatcatcgaaagaaaataggctagagatcgtcctccggcgcaaggtcccatttacgagttgccatcttcctctgcttctttcccggagtattgacagcggggcttttgaacatgctatcagctagctttagttggtccatcttgcggagcgcaacctcaatgtcgctctcacgacccaggatatttgcgttgcgggaggtttccagcgcacgattttttgaactagatttcttcgatggcgatctgcagttcaattcacgctctaaggcggttatcttactgcgcagtcggtcattctcgaactcgagttcttgcactcgctcatcggaggatggttgcggatcttcgtgaac

SEQ ID NO: 3037 - DNA, 1767 bp, Emericella nidulans
catccgccatcatgcctaaggtaagatatactaggaggctcaatgttttgactgccactaacactaacacgtttgtgattcagatcacagagattttcttcgattgcgataacaccctcgtcctctcagaggaactggccttcgaggcctgcgccgatctcgccaatgagatcctcgaaaagcagggcctcaccgtccgttacaccggtgaagagctcatcaaagactttgtcggccagaacttccgtggcatgatgcagtctcttcaggccaagttcaagttcgagctcaccaaggaggagctcgagtcatatgttacaaaggaagaagacaaggttatcgctaagctgcttgagaaggccaagccttgtgttggtgccactgagcaggtcgagaagctcttcaatgagaagaagtacgatctcgccgtcgtttcctcctccgctctgcgccgtgtccgtgcttctatccagaaggtcgggcaggacaagttcttcgaccacgacaaggtcttcagtgccgccacttctcttcccaagcccacctcgaagcctgaccctgccatctacctccatgcgctcgagaagtgcggaaagacgccagaggagactgttaccgttgaggacagtatttctggtgctctgagtgcaattcgcgccaagattgcagtcattggctacgtcggcagctacaccactcaggagaagcaggaagaaatggccaagcgtctcactgacctcggcgctcaggttgtcatgagagactggagcgaattccctgaatgcctcaagaagatcgaaggcgaggatgcttccgtcgcttctctttaagttgctttccaagtttcggttctacacgatgtcacgacagcgggcgcatttcctttcttcaatttcgggtatttcatttcagttttctgaagattactctacaaacatgctcccgcactttgcttttaccaaccgcgggagacggtcccgctctcctttttgcggccaagtcttagcagggagcatatctgcgctcggccttttacatccagattctttcgggtgggtagacgaattagtgatcccttgattaaagcatatacaggttctgatggacacagaagatacccctagtctgcaacagccaattaaaagagaattaaatctggcttccggtataccattttacagttacttgcgttgcttaaactactaaaggctccctgttccccactcttatccaattaaacgagggtcgggaccctaaccaccacctttaattccgttggacacctaaaacgcttaattggaagcaactcatccaaaggggccccctaaaccatatttctttcccagatgaaaaacctacccattactctcccactgtttcatttgtgccgcttttctatgaggtattaaccggtatttcccattacaattgcccaagtcttttattcaaaccactataactgtgaaattcgtttcatctatagacaatcctacttaatatctggatttcccttatttccggtttcacgtgttcgtttcatagtccataaatcttacttctctctaatatacctttcacttattcttctcttaccttattattcctttatacctatactctaatttatctaatttctttcaatgtactatcttcactattacttctctgtactcattctctctttaacttttatcttttatttctttcactcaattctatcttttcactcctcatctctttctacatatttttttcctcaattctctc

SEQ ID NO: 3038 - DNA, 1705 bp, Emericella nidulans
gccgtcaagtaaaagccggatctacacggaaatgttcctagagactatgcggaacgaagccagtacagggaggagtttgcaggcatcttcgggtttccgttgctttgatggctaatcagtgatcgatgtctttgcttcctgcctttggagcaatgggagtcactttatatcttgaatgtaatatctcaagagcccttgatcttacctccgtgccagtgcggccttgtgtagtgggcattgtaaatactgcttgactgcgcatgataggctgatgccctgttcgacgagctacactggccagtgaacaacaaggcgccatggtaatccacgtatcagaatgacaacataactaggaacctagtgacagcccgccgatgaatcgctcggatgtaactaatcattgaatttctgaatcagcttcaatggcagctgtcccgaatagataatgagggctccgttcattcaaatagcctcctacttagtaaatatacacaaactcatcgttctcccggtctgtcaaatccaagaacgcattattcccagtctgctggtcctgaccatcctcacccgcacccaccgcgctctcatccgaatccgcctggtgaaagttcccatgcatcgagcggtccaccatttttgcgggcttcccatttgccagacgccgccgttcctggcctttattcatccagaacagcagcagccactgcattcctacgacagcaaccaaggccgaaaagatacctaaacaggcctgcaggcccgggagatactctggcgagtccttgtcgttgaagagcagcggacccacgatgtttccaccagccgaggcagcctggtatagactcgtgactatactttgcttggtcataccggcggtgttttccacaacccacgcaatgatgatcgggttcccgccgaagaggaaggcaagcaggtagtaccctgccatgagggctccctgtgccgagtcatcgcgtggcacggcgtaaagaactccaagtcctgcgacaacggggagcataaacagcgcaagaacaacgctttttagccgcgctttctgtgcgagatagctggccagcaggatgaatatccattgaaacgcgccgaatggcatattcagcagcgtggtcttgtattgtcgaaacccaccccctgaggatcaatggaccaaagactttggtgaccccgcaccgatgttgagcaagagcgccatggcgacccaaagtaaggcttgagtttgagccctgtttgacgacctgtgcattttgacttccaagagccgtgccgtttggttgctcgtgcccgtcatggccggggttttaatttattgagaaatttcgttggtttgtttgtttgaaacaaattaattgctgtaagtcactccacccccataggtattcttgtcccaaatatctttgtatgataatcatttgtaaagtacaggtgagggtcttcttgtctcttcctctctttgtatttcctcataggtcgctcattcttttatcttttttcctccacattttccatcctattcttttgattttacgttactctttatatttcatccaatttcattcttatctatattccccctcatcaatattatctttcctatccatattttgctctcatcattgtttgaatcttcttaccatatcttcttctgttcttatcctctcctctattctgttattcgtactcgtat

SEQ ID NO: 3039 - DNA, 4865 bp, Emericella nidulans
gaccgaatctaaatatacctacgacatccgcgcacccataagatcttcaaatgtcggttttcgcagcggtccgcagctccttggtgtgactcgacccgtttcatacgaccgactatgccggtatcccagcaaatacggactcaggctcagacccgtcaggtctttttttcgtcatacctcgttactcctaaagagctctcagatgccctgaagaagaatccgtctacgaagatctcgacttctccccgcgtaatacccttatgcgcagcttggtttatgcccaatgaccctgagggtcgcacagggattgatgtttttcgtaaacaccgtgtaccacaagctcgcttctttgatctggatgctattaaggatactgagtcgccttacccgcatatgcttccaactgcagagacgttcgcccaagcaatgagtgagcttgggattcgacgtgatgatgaggtggttgtctatgatacggaggagctcggaatattcagtgcacctcgcgttgggtggacactcagagtgtttgggcatcccagagttcatatcttgaacaactacaggttatgggtgcgcgatggctacccgacagagaccggcgagcctcgtcaaccggagaggacgaactaccctgtgccttcatacgactcaaagctcgtgattccatttcgtgagctgaaggagatcgccaaggagcatcgcaaggagggtgcgaaagaagttgaaatcctggacgcccgatctcagggcgctgggcgggaactgaccctgagccgcgccccggtctatcctctggacatatccctggatcaatgagtctcccgtttcaggaattgctggatcctgagaccaagacataccttcctccagaccaattacgaaagattttcgagtcgcgcgatattgatgagaccaagtctatcatcagctcctgcggtaccggcgtgacagctactatagtcgagacggcgctggggctggccgaatacggtgaccctagtattcgaagagtatacgatggaagctggacgtaagtgatctttcctcaacgcggcttttcatttacttaacccatgcacagggaatgggctcagcgtgttagaccaacggatggattgattaagaaggcaacctaagcagatagcagcgctgatctgcctcacttgccgcttgttcttacctctttatatgacgcggtggtttgttgaagtaatgcatgttcagtttcgcgcataggttgagcggttatccatcttatagagtgtagtcctgagtaacctactaggtgttttagattttctgagcagcgagatcaattgctaagcgaaataaattgttaaacctaacaaagatgtttacaaagaaaggactataaatacttccgggctttctttgtaacgagtaacaagatgcttagtaagaggcaacaggaaggcccgcgagttgatccggtactccttcggtggctttcaatgtcccatcacttcggccgcaccctacgtcagccggaaacacaagatgctgccgatgagaattcttcatgaactaggatccgactgtaagtgcattgaagtttggcctcgttcgtcgatggacgcagccgcttatgctgaaattccaacccgctacgcttcccccacattcctgatctctccgccgacaacgatccacaacctctctcaagcttcggctgacccaacgttgtagtcgcagtttctagaacaggctacttggagtagggcgtctgcgcctacagcggcctcgatcgatcacacaagcgcctgcgtttgccgactaccgccactgaagcgaacaccatgtcggccgcacgcaaggtcttccactgtgccgtggatgaaacggcattaacgacgaacatcagcgagataaaaaaatgggccaccaacggagctatcactctcatcgttcctctttacagtaaggccgtttggatttgacccctgcctgccgcgtcatccgctcactccctttccagcacttgagcgccttcatgcattgaagaaagccggatcccaggtcgccatcaacgctcgagaggcagtgcggtttcttgaccgcgcaacctcggacaaaggcaacgctgcttctgaacgagttatattgcagggcccgatggaacagtttgaagactggagtgaggcggagaagttctttttaccggaatttgaggaggaaccagaagctgccgggagattaggctcagcggacgagccgactctgcaggacaggcgcgaggagaaggacagtgaccgcaggaagagcaatggtgctacggacgacctatcacggatgctcctcagcaagctgaatttcaagaaggacccggatgccgcctcggctacatctactggcactcatagtggccccgcctcccggccgtcctccaggagctcgcgaacaagtccagactgtgtgtatatcaatgccacgaatggagacgagtcgaaggattacaagagcaacggacaccgccgcaccgcctctgggtgtactatccccgttgtgccgcccgtcttacggcctttgcttagcgcacttctttggaaactacacaaaagtcccgatgcatctaatgctgctaaggctcctatcctagttaccaacgaccgtactacgcaaatttgggcacaaaaatttggtattgctgtcaagaacatccatcagttgcggacttccattcaatacgaggaaagggaatataaaaaccgatgcaaatacgtcgagaaaactcaaaacaatgagccgaaacccttgctctcctacgaagacgaaagtgatgaggacgagctagtgttcgtcccccgcggccgtggcaaaggcgtatcgaaaagtggtggctcccgtggaagcaacaatcgcaagacttcaaccactgccaaacccgtcgcgccatctctggagagtacgatagaaattccaacccaaccaatcgaccccaactcgttcagccggtcgctgggcgtgccctcgaagcagcatgccacggtcgatttgagtacccaggccggcgcctcacgtggcttcgcaggcgcctcgcggaacaatggaaacaaccggcgcggaacgtctcgtggccaaactcgtggcggcagcccgtggccgtggcaagctatgggttccttgatcttacgatggtggtccgtcgaccgttatgatgcgacggactgacaatcaatacaactacgcgattgaccgaatggttgccttatgaagcagaaaaaaaaaggttgtatctgcctagcccgactcagttctctgtcagtttcctttataggtaagacatatgggttttgagcggatgaccatggatgcaagagccggaggatggaggtgtcaaatacggtacttattccacctcgggattcgactacggagaattgtgacatggcctagatgggttcagattgagttcaggtcaggtccagtccaggcgtccactttgcgttcctatgatcgctcatatcatgtcatgcctttactcctttactttccgtttatcatggaggaaacggggctgctgtttcatctgccgcgtgggtagaaccccgtgtcccgaccagatcagcatgctttgcaagaggtaggctattcaacatgctactcttagttagttaccagcatacatctctgccaagacaggtgtgctggaccgtccttcttttattgtcccgcgttgattttgtcggcatcaccagactgagactggatgtcagttaccttacttagctcattgaatacttcacatatctagaactcccatatgagtaatcctcttaacaaagtgtaggtaggtcggtttaccccgcgatgatcccgtgggacagtccaatcacttgacccggccactcgcttcccctcatggccgcgacaaccatgccgtgacgatgagactgcactagatcgtaccttgagatcgtacatatatcccgacctgtctcacctcccttactctctacgcttaatccatccaaagtgaactgagaaacatactgaactccattttatctgtaccaacaaaatctattcatttccaacctatctccctacaacaatgtccacctcattcgaaactccctccaacggcacgcccgcaatcgacacaacctccctcgctacctccccgctcgaacgccgcgactcccttgagaaacacctcctgactcgtcccgacccgaaagacctcaaggataggcatatcctgctcgatacgaatgttgctccgtacgtccaacgcttatctgtactatctccctgtatctgggtggtacgctggttgtacaattatgctaatcacgttggcggattatccagatccatccaagcaatgcgccagaagcttgatcgccagcagctgtcggataatttgaagaagagcctggagcatcggccagagagggaagaattggttgagcgtgcgtatccctgttcctatctccattgccttgggcttcttcattctattctcccctgagtttcgtcagactagttccgcttgtaacactaggcatgtgctgacagttgagctgggatacgtaggccatatcctccccgctgacgaacaggcgcctgttaatcagtgatcacctgacaaacaagggccagcgtctcgctgggataaattatcatgaagcaggatagatacatcgtctctatccttgatgaaataagtttacgtcatctatacttaggctgctgggacggcttgaccttggttgacaaggaacgaattgggacaggagcaaagttgctggataacttaagtgtttccttttaacatatctcgggcttttacccccaaacgtattggaaattattaatgtccgatttgtcacaaatatata

SEQ ID NO: 3040 - DNA, 2846 bp, Emericella nidulans
catcattccgcatagtctgaacactcgcggtgagacaaccaggtcgccagggcatcctcctctgtactcgcgtgtcaatacactaataaagccctgcgatgacctcgacaaaatgcctaaaaccatgactgcatcgcctagcgacaaccccttccccaagaatggcacacaactctccggtgtaaccatcaggttgttccttctcgttgactctcccagtgacggattgtctcttagaacgatggtagcccactaaacgatgagtggacgaagtcagcgtttggctccttactatctgtccgcaagctgtctcacccttattgcgttgtctgtgctgatgttcttctgttgtaatctgtaagtgaatggaatctttttcacaatgacatggaatgcttccgagcagcttccctagagcagagaaagtcaagcccgtcaaaagacctcgggatatcaacattttaactgaccgcgttgtagacatagctcagccgcctgtcaaggtacagtggtctcgcaacgatataggacgaccaagtgacagatatctcaccactgagaccctgtcgccaggcctcgggcaactctcccagaatgttgcaacttcgcagtaacatgttgctggttgacaggccttgtgatcgtcaattctgcgcaatcgagtctctccgagggatctacgggatacgtatggcggtttttacagctgcaattcagaaatctccatagcgcgtcgatttcaccgtgtctcctaccgtttgtctcgactccattctgaatgtgcaaacggaaccccgcggcagattgaactaatcagacctaggaaggcatggcagtgggcctgctcgcctggcctggcactaatagaagactggttacaaccaagatcagaccctctttcttcgtcaacgacgatattgacttcgagacaccaagagctcagaatctgtcaaataccaggagcttcctcccgtgcgccgacaggaaaccctctattgcctgtcgagtgtccaaactcttgatgagcattgctatttgtcctcccgttccctctctcacatccgcgctaagtggtctcgcagcatagcaaatctcgccccagcaagctcaaaaccaagaccgtttcgaccctagatctggcagaaacttctatcctgggaatctgatctctcaaacgcatcatagctctccagcctcagtatatgggccctcagggtctcatcgccgccggttcaccatcacagtaaaataggccatgacgaaacttgagcgcatttgtatatcttcgatggataaaaaatactgcctggtctcaggagacctagcagggctctgagtgcctcctgatggccttggcagcatgcacgagcaacgacacgataatcagtttgaaagacgctaatccaggcccaagttgatggggtcggttcgttgccaaagaccttatacggcattccctcgtttgtttgcgcttagatgaccaaagtattcatgtaccttcttgaagggtgctgaccatctgttgggcaacgtatcggtctgggtcttccagtcatcgttcgcaggagatgcgctgtggtgctctgtcccagctcctatccagaacccgcgtcttggaaaatcggtgtgcatatttgtgcgtcaaggttaacacttcccaagtccaatctctgttgatagtactccttgaggccgtcctttgtcatgtgagcccggattgaccgcttctagcgcaggcctgtaggaaggttgacgtcgactgcgtggatgagacgaatgtcgagaaggagtatcttcaataaacccaacttcttctcgtaaaggcccacgccgagtaggacaggattactttacttcatcgccatgagaactaagctcaacacaacgtcgtttcggttcaatcatcacccttctatatcaataggcaaggctcctgcagtgcttttcaagcatctcaatgcaaagacctcgcgagagcgatcccctgccctggcccagagaacaccatggcccttcaaaatgtagataagccagtcaaagctgggaatctggctataagtctgacaatgtagagattgagtagatgtttcctgccaggaaggctgtcgacaagactcgcgatggaggggcagaggtgcgaagaatgctatagtaaatactaagtaaatgcaacatctcgtgtcagagattggtggcccttaaggaataggccgtcgagaaaatgttgtcaatattgtatagaaggttttcacagactacaaagtgttagcagatgatgctccactgaacaatatatatatcctagcaatccaccaaccaatcaggtgaccaatcttaggcggacttgttcttacttattgagagctaatgcaggggtaccagtacgtgtttactgggacttggaacaaggaccctgttgctggctgccagggtccttactatagtaaaggcatatatgtagtcgggatttgcctctacatgcaattaagcactacgacacaaactcatctaaacggaaaagtggacgtcagaagaaaatcatacccaagttcatgcgagtctataatgtcggtaatgtcagtaaccaccccaagaacaactgtcctcatctgcagccgcaaagcgcgggtgctggccgcgtccctagatcccacaacacgaatagatcccacctaagagaaaggaaaggatggaaattatgtatagaaaccaaacgaatcaaccggtcgatggaatgccgaaggaaaaaaggttaaagggtgcaaagacgaaagaggaaagaaagagaataaccagtcatcagccgaatcttcggtgcaaacgccatcgcaaagcagggcgtcgac

SEQ ID NO: 3041 - DNA, 1446 bp, Emericella nidulans
agttctgcttccttcaccatgccgattgcgacacactctccgtggagaatttgcggcgtcagaatggcttcaatgcatggccaatagagtgaccccagttcaaaaggttccggagacccccctcacgttcgtctgctgagacaacatacgccttgtgccgcgcagatgccagaattcgggccttcagaatctcttctatgccctcaaaccgatgttctcctggcctgacctcgcgacggaccgccttcaagattgtctccgcgttctcttctaaagctgtaaactcttcttcgctagagattgctgccgtcttgatgacctctgccataccattgatgaactctctcaccggcagcgtctccaagaactcaaggtcaatgtagattttcgtcggttgccagattgcgccgatcaggttcttacccagcggagtgtcgatggcagttttcccgccgatcgatgaatctaccatggccagaagagtagtgggaacctgcacataacggacaccgcgcatgtaggtggaagcgacgaatcctgtcagatctccgatgactcctccacccaatgcaattacaacggtatcgcggccacatggagggttctgactcaacatccaatcctcaatatcggccttcgtctgtcgggacttggaaacttctccggggggagcattataaataaggaggcgtggggagggagtaatctcgacgacagcttttcgaaaagcttcttcaaagctgggggtgtagatcgatccgatattcgtatcagtgacaaggacgtaggtggtaaagagccagtcactgatcaggtcttaagccacatagtttcgccaaagcccgtaatcagcgatgatgctttcccggccaaggatgctgatttttgtagggttcgacatggtagagaacagcgaagataatagagtgaaatgtcggtgtctctagttcatgcttgagatatgcttgcgacggagctcccgagcgatctctcaattctccaactgcgaagactcgttaatggcagagaactataacctaatatacgagcgaaaggttagatgcttttgttcgcaaccgactttgaagctcagagatggcctagctacgagctgagctcgaggcgcattcagagcgcaatgagtggtgcggtaccggagattttatgggagggggcgaggatgagtaaaaggttggaactgacctttcagaaggaagatcgaaagcagaaaggagcacacctagcaagctcaagatgaattgagattgaaggagtggtggactgggtgttggaggtgtgggctgacgaaaagtgtacgacttgactcaattgactcattgaaaaataatcccttggggatttttctccccgcagctccgatgtcgtcgctcggcacacttcttgttcgtgcatctacctacctactataactccgcacaaagtaca

SEQ ID NO: 3042 - DNA, 2150 bp, Emericella nidulans
gagtgcgcacccattcataaaatcagcgtcgtcatccaaaattttgccggataactcgtcagagcaagccacgtttaaatcactatgcaccttcctatattctaagcgccaattcttgagctgatcagtatcttctgcatccaaaatttcttgaagcttaacgtgaagctttcgtataagcgaacggaactcaacatagtcgtccccatcaaggagagtaccgtcagaacggagaattttctcgactggttgttcttccacagacgtgattagatccactaatacgtaataatattagtatttaattaagatctacccatgggtagaactttaccattggacaaagattttttcagcagacgtaaagttttcgctggtaaaggccgttcaagtcgattcttgacaatacttgtctggagagctttcaccatagccctggcctcatcttccaggttgacatacttggggggtcgcgccgttagaaagcctttctttgcaggacgatcttgcagaggttcagttctattagaacgattgatagtaaaagattgcaaatcctcgttccaattatcgatatcagtttcataaccgaacttagccagaagcatggcaagttcctggagaacctcgaccgcagtctcatactcagcctgataccgttctgggttagaagctacccatgggtaaataattcagctatggtgaaaacgtactggtgaagcaatcaaaaccaatgtctagctggaattttcctgggcaggttttttcaaccccattcgcaagtcagaatcatttgctgtttcagatgccgataatggactatagcgccaagaatatctccctgtaaagcaatatcactgcggataaccattgaattgaggcatggggttttctgcaacattttattctgggagaaattcattttacagaaaatatccccccagggagtgtatggctcataagcggcagtctataggtgtgttagattaggatctacccacaggtagattatttgaactagtgaatacttaccaagcggttaatatcattgaactcgctcataatgccttgaagacaatctggccgtgcgtcaataaccaattttacaacctggatccagtgcacatattggaaacgacgaaggtattgctggcgggattcctcggcattccgcatcttttgaccttttttaggggtattctcttcatctatctcaagattatcccctagggtggattcggggacattcagctattttattcattattagtatatactatattcagtattgtagggagttaaaggatcttaacatacaaaagtctgaagattgggatcttgccacaagttttcattgcggactagttcccacagattctggagaaattcccatgccttatgctcaggtgtttctgaggaaggagccgagtcatcttcatccaggaacagaaactgttcaatctgatgtagccagctaaatgacatccattcatggcttgattttgatgggagtctccaggtcggctcgatccacatcattacatgatgtaataccttggatacaactgacgagacatttttctccagatcaacccaattgttcctacaatcttgtgagacatttccaaccatgggtagaataaatatgagatcttaccaggtggggcagtagagattttgatgggcatggagatgtctgaaaacatctttataggacgcatcagagagattgacaaggaacccaggccgtctgttagcaaactcctgattctggataacaatgggggattccagtttgggaagttccagcttgctggagtagtcacttgagattggaaatggttgcttccgtctttgcacagaaccattggtaaactctgtccaataatcctcgcgtttggggaaaaaaagaagcctcagctgggagagtggacggccctggtccagagcaaggatcatcttccaatcattatatacaatgagattctgatgtttagccccaaaaatagtagagcaaaacttaaggaacttctggaactcctgtttccacacctaccctatagttagatttccattagaatgaaatatggggacttacttacctctgtctgcttgcctgctgcatcgagccatcaggacagttcgttgac

SEQ ID NO: 3043 - DNA, 1169 bp, Emericella nidulans
  unsure (1)..(1169): unsure at all n locations
ccagtattataacaatctcaggcgctggatcttctacagcgcggcaatagtgggaatcggccgttgtttaccgggaagcacaatgttgtccccgggtatgtggttgctggtaatgggacgatgttctgcgaggttccgtttatattctacaaagtaggcagaatgatgagaaagaggagcaagtttgcaaagtatagcgttgaggtaaaaagatcaacgagggttgaggggactgcgggatgcagctgggcgtttagggctggctgacaaaaggtagctctagccttattcatgtttttgatcttatctcgtgtccattcatgcccaccttcgatactgcgtaggcaaaaatagttcatgattattccttagctgtctatctagaccgtcttgcgtgcttgctttatgcattcgaaccgtctgcaaccgtaaagccttgctacgctgatcgcacccctcgagcaaccagtatgtgactgatccctaagaaggcctgatctagcattcagtgatgccggantatagctgatcactcacccccaacgaccccccaccacgcaatccccaacgcagcgcctgcaacgatcgccacggcaggcggcaccctaaaccaccgagttccactataggagacagcagcaacaacaacccaccatggctccctccccaaactgacaccttcctcactcgatcggccctgccgcagatacccaatctcccatagtcgatacacagccgtaaacaccagccctaccgcggcggcattgacacctcgcagaaaatgaacgacgtacatcttccgtcgcagagcccgccagaaactctgtaccgcaacggcaagaattaagcccgggctaaagatggcaaaaccggatagcatcgcgccgaggacgctgtgatgtgaggcggagagagtgagtgcgcccagaaagactgcaaaattgaagttaggaccggggaaggactgaatgatggctaagccgatcaggaagtcacggcttgagacccagtttgggtcgacgacgtaactgcgcaagagggggatgactacagggccgccgccgaagataaccgtgccggcgaggtacatgttgctgaacagggagaggggtaatgggggcgaggagaggcgggcgcgtattgtagaatgtaataacaggctatacgaa

SEQ ID NO: 3044 - DNA, 2120 bp, Emericella nidulans
  unsure (1)..(2120): unsure at all n locations
ccgcgaactgcagaagcagcaagccccagaactgacctaagatcttgtgatactggaagccagggtctccaaacttggccatccagtcaaagttctcgtggcaactgtgatagggatatggttccccggtgaacccaaagtctatactggaaatacctgcaaggtcttgaaaagccacatagtcacttccggctcctagaggtgcaaacctcttgttcttttgctcccaaatgtcttttagggtctcgttcgtaacgggatctgaaattcggcctaggacttgcatgacaacgcgctcgtagagaggacagccggaagcttcaaagtccgtgccgctgacaccgacgtccacgttgatatacgcgtacgcattcccgtgcaaattgtccatgctgtcctcgacatgctccgtagaaccgatcaggttatactcttctgcatcccagctagcaaactcaatttttcgcagtggccgccagccgaacgtcaggagttcaccgaagacgcgcacaagttccaggaaaacagcagttccactgcccgggtctgcactccctaagcaccacgagtcacgatgattgcccacaatgatctttttttccggttcttccattccgtgaatccttccaataacgttgtaaataggctgtcgatccacttcatcctgaaggttcatgagattcacagtaggcgacttctcgtcgcctgtccaccattgcttgaccttgggaacaccgccaacccatttcttcggcacctttgacccgtgcccttcaagcacctgcagaagcctctgcgcgtcacgccatgccagaggaagactcggaatgcctggcatgcctgttgtttgctccagactcaacctcgttttcatttgtggcgtcgacgcaaaccctggagacagtacgtccccaaccacatacgacatctgactcacggcgcccctttgaacgccatccgcgggcatgaagcggccctttgggtaggccgcacctctaacaaacccatcatcagacgggtcggaatagataatacacccggccgcaccagcgagttcggcggctttgaccttcagagcacgatctgattcggtcccataataccggacgagagcgatggagccattcaaattgatccctttgtccgccaaatactggaaatcttcccgggatccatagtttgcgtagacgagatgaccggtgacattccctgattttgaatgtccatgaaagaccggtgtctcgctgtcattctcctcaagaatagcctcccacctgagatcgggtgggtcaataatagctatccgccgcccgtcttccttggggtaatttagatacacctcatacttctccatttcgatcgtctccaagcctgcttcctcgaattcccgctgtatccattctgcaagcacgtagcttccttcggtaccggccatgtgcggaaactcagtcaccctcctcaagtattcagcgatattcgtctcgttgatatggccctggacgaaattctccactgacgccgcgctatatgactggcccatcataaatcgtgaactaaaattaaacacatccgagacaacgaacacatagatgacagcgatgacgagtaataaaccgaacaggcgaagcaggataatgcatccgttagagttgaaactcgtccgagctgaattcaggttgattgtgaatttgaaattaggtaggaaccggcgaagcgggagatgtatcgacgataacgtcctgccgagattactgaacggntttgaagtcgagaccgtaatcgcgaaccgtgagagctcttgtgacttgcattcttaacatncatctgattaagctccccgcggcaattcttcagcgagcccctttcgaagcggcaggcgagagctaagtcatcacgctatttcgccgactcacccgagggttgtagcataagcccgattaggcttncggcaangataccgttttgaagaaggccgcgtttgggccgtttgaaaaaggggaaagttggcagctttggcggatcttttttaaggtggggaaatttttttttttttttccaatttgtttgccccccttttgggaatttttccccccttttttggggaaattttttttttcaaa

SEQ ID NO: 3045 - DNA, 7041 bp, Emericella nidulans
attggataggttttcacgtaaggagggagggacttgtggaaggaggagtcgaagaactgtatgctctggacgttcgggagctcctttttgcatagtcggacgatttcgagcgcggcgaagttgtgcctgcatttgtggacaagaacaagtcagactttctgtattttctatctcgacaccagtaggaaacaagtgaatgcacatacaaaggcgccaaatcctccaggtcctccagctggtggtatgtttcctcgttgatcaccacaggactctcaaagtcgccgccgtgtacgacccgatggcagatataagccaggtcgtcggcactagcaacatctttgaggtcagagtccgtgaagcagcggtgcagcaggagtttgaaagcgtctggccctgagctgatcttctccttcagctcttctttcttctgcttcgagccgacgctgtacttgaatgttgcggggggtgcggtgatgccggagacttgtgcggtcgcgataacactgggggttttggtgtagctgtagaaagtgattttgacggaggaggagcccgcgtttacggagagaatagatttgcggggcatgttgaaaggttgctgattttgttgtgatggtctggtagaataggtagtgtatagtttgtagtcgtctggatggatagcaggtctaaagtgaaatcgacttcgattagagaatacacgtctgagacggagctgattatttgatcattttcagtgcctatatcttttccatcttgttttttgacgttgttctatctccgcgctgtctcacaatgcttgttgtcggccgctttgtgatgtcaacctgaacacggtgacgtagtgcagccgtctctgccgagtctggccagtctacccaacctggctttaggtatatcttagagcagcagtacaaaaacaaagatatctcgagcttccttaatcttaaactgattgaaaacaatatatcaataccctctacatagccaccacaatgccaggagaagtcatcgagcgaccaaacccggcgccaaagccgtcgcatgtccccgatttagtagaaaaactcataattcccgcgcagaagacgaagctggagaaaagcgattgtgatgcgttgcacaagtatcgtcgcgcggcggcgtatattgctgctggtatgtttggctttggatggattagtcggtgcatgggcgctgacgcctctatacagcgatgatcttcctacaggataatgtaatgctgaaacggtctctgacgaaggaagatatcaagccgagacttcttggtaattagccctatcgaggctcatggctgggaatgtgtgtactgaccgatgtcgtaggacactggggaacatgtcctgggttgatcctcgtttactctcacctgaactacctgatcaagaagcagaacctcgatatgctgtatgttgttgggccagggcatggagcaccgggcttgctagcatcgttgtggcttgagggctcgctggggaagttttatccgcagtataccaaggacaaggagggtctgcacaacctcatctcgacgttcagtaccagtgccggactgcctaggtgagattctattgatctagacagaagccaaggaagctaacgtgttgaagccacatcaatgctgaaacacccggcgctatccacgaaggaggagagctgggctatgcgctgtctgtctccttcggcgcagtcatggataaccccgatttgattgtaacatgtgtagttggagacggagaggcggaaactggtccaacagccacgtaagtttgtgattccgtgtgctgaatgtatcctgctaacggttgggtcagatcatggcatgcgatcaagtacatcgatccagctgagtcaggagccgtgcttccaatcctgcatgtgaatggcttcaagatcagtgagcgcactatttttgggtgcatggataacagggagatagtctgcctgttcacagggtacgggtatcaggtgcgcattgtcgaggacctcgaggacatcgacaacgaccttcacagcgctatgtcctgggcggttgaggaaatccgtaatattcagaaagcagcgcgctccggaaagcctatcatgaagcctcaatggcccatgattgtcttgcgaacgcccaaggtatgcacccatccccttggcttgaggttaatcagctgacgtgtgttagggttggtcagggccgaaagagctgcatggccagttcatcgaaggatcgttccactcccaccaggttcccctccctaatgctaagaaagacgatgaggagctccaggctctgcagaaatggctttcctcttacaaacccgatgagctgtttaccgagtctggcgacgttatcgacgaaatcctatccattattccttcggatgataagaaactcggcatgagacccgaggcctacaagactcatctaccgccggacctccctgactggagacagttctgcgtgaaaaaaggggatcagttcagcgcaatgaaggccattggtagcttcatcgaccaggttttcgtcaagaacccgcataccgtccggttattctcacccgacgagctggaaacaacaagttgagcgctgccctatcacatacgggaaggaatttccagtgggatgagttctcgaatgcaaaaggtgggcgggtgatcgaggtcctgagtgagcatttgtgtcagggcttcatgcaggggtatacattgaccggccggacgggcatcttcccatcatatgagagtttcttgggtattatacataccatgatggtccagtatgccaagttcgcaaagatggtacgtaaagtcgagtacagtcagcgcttcgtgctaaccagcaaacaggctaaagaaacggcatggcaccatgacgtgagtagtatcaactacatcgagaccagcacctgggcccgacaggagcacaatggcttctctcaccaaaatccatccttcatcggcgcggttctcaaactgaagccgtacgccgcccgcgtctacctgcctcccgacgccaacacatttcttaccactttgcaccactgcctgaaatcaaagaattatatcaacctcatggtcggctcaaagcaacccaccccagtctacctgagccccgaggaagcggaaagccactgccgagccggagcctcgatcttcaagttctgcagtaccgacggtgggctccgcccggatgtcgtactcgttggaatcggtgttgaggtcatgttcgaagttatcaaggcggcagccatactgcgagaacgatgccctgagctgcgtgttcgtgtagtcaacgtgacggatgtattcattctagagaacgagggtgcccacccccacgccttgaagcacgaggccttcgacaacctcttcaccgaggatcgctccatccatttcaactatcatggatatgtgaacgaactccagggcctgctctttggccgccctaggctcgaccgggcaaccatcaagggatataaggaagagggaagcaccacaactccatttgacatgatgcttgtgaatgaagtatcgcggtaccacgtcgcgaaggcagccgtcacgggaggagcgaggttcaatgagaaagtcaagctgcggcaccaggagctttgctctgaattcgatcataacattgctgagacgcgcaagtacatcatgaacaatcatcaaggtgagtgagctgcttctgatggatattatttggattcatcctgacatcttagcagatcccgaagacacatacaatatgccctcatttaactagcagatggaaactggagctaggcatatcagcgtaccgaatcagaacacatttcacggttaatagtccagatcgtcttgcttggtagtgttgtaagaatgtaggaagctaaaacagttgatggggtgagtctgaatcgtaggaggacaaatgacaggggcacgggctgtaacacggctcggttgatcgtcttcctctcctcttccccgtactctggagtcaatctttctgaacaatgcatcttatcatcatcgtcatcagggcatcccatccccctgtcctgtcgcatcctctggtagcgctggtcttatattgctttcattcctattgttgctgggctgctttggggggtcaattttctcagactctaagaccaactgcctcgactctctcccgcccatcgtgtcagagatttgtttcgcaagggtgcgatccttcgcgtcgaatttttgagtcctcgtcagttctcacagacaccctcggtatttgtgaccggtcatctggctacggaatggtgggcttaaggtgacgagaagtctatcgcaaggaggttcgtcgggccgttgcagtcgacaagatcctcacttggctggcctgatgataagatgatatcgatggcgttgcaagatcgatctttccagtccatcaataaatccatacgccaataagaacaaagcgatgcagttcgactctagcctttcccggcagacaagaaagttgccgatctactcggaccaatttccatcaacagctaaaccattttcaacaaaccttgcgaccatctgtcaacctctgtggacttttcctaggctgaagcccacccaagccttcaactgccgaataacacacggcccgaccgaggccagggacaggagtcgaacaaatcagactcctacgtgtgggactgctccgccagcaaccgaaggctgccatcatggaaaaacgacggacatccaaatctatccgttcccgactccgggagcccgtttggcagattttttggcgatgcgcaagtagttttcgcgatcttcctttcgcgtcatgttgactgtttcagactctgtcagagactcgacctcatggccaagccttagcctataatcctcgttcgctccaatctgatatctcgcctcgcatacttctaaaagacgctgctgccgctcgtttactaataatttggctccaaaaccaacagcctatcctttcattcgctatatctacatccgtgctctatagtctgtactattcactcagtttcaaatccgacgagcgcccttacgcaatattgatcggctctccctggatctttcagtcgttaccccgtcttgaagtctcttctttctctcatctacaagttgttggttaaagatgtccgacagcaacttggacataagcaattacatactgcctaacggcaccgtcccttatgaggtcaggagacagctgcagaccggttgccatgcctacatcgatgggataggcactccttacggttatgtcccctctctcgcagcaggcatcgtctttcttgtcctcttcggccttacaatggtgggccagacagttcagtttgcctggaaacggacctggtggtgcgctgtattcgctgtgggaagtctcagtaagtacttctttacccttcgctattttataccgtcttctcataccataccaccacagccgaagtcataggatgggccgggcgaacctggtccgcagaatgcccatacaacaccaatgcttttctcatgcaaatcacaaccctgatcatcggtaagccctccactatatactttacagatcttcgaacttgggagaagctaacaaatccgaagcgcccaccttttacacggcaggcgtctatgtcctccttggccgcttcatcgaactccttggccgcgactcttcaatcctcagcccgcgagtgtatctcatcatcttcgtaacttgcgacatcatttcgcttgtagtccaagccattggcggcggaatggcgtctgtcgccgctgcgcaagaaaacggcaacacaactccgggcacaaatatcatggtcgccggtatcatctttcaaatggcatcgattactgtcttcgtcctctgcgcggcagattttgtccgtcggaccctcgtccgcggctcttgcagaactataccaagacaatcgtgccgctgcttgcggcgatggttttctcgtactctgtatctatgtccggagcatttatcggaccattgagttgttggaaggctggagcgggtatcttattaccacagagagattcttcattgcgcttgatgggtcaatgatggttcgtactgtcgccatattcaacctgatccatcccgggtggtttttgcctgagtctggacatggaggaaaagggtgtgaagatgggagcttcacggagctgaggtacctgggttaatttgacttgactcttaccttgttcgctttataatatcatcgtatatatttctttacttacccgagcacctttatcgtgcacctttggatgcgctggataccttggatctaaactagagcaggtttccatatagatggctagctcgtgcaatgcggaagttttacaggataccgcttgaaaaatagaaacagacttggaattaacagagctaaaagataaaaacaagatattaaaacccagccttgcgtattcgtaaagtgagaaggcaatacaagcccgaaagccgcaaagacaagattaggacagtggaacaaaatgaggtgagcccaagtccaaactgagtccccctagctgatacagtataatcccatccgacttcgccaggctaagcgaaacaaaatcataaattcaattcggaataagaagccaaggatctggagagtttgactaaagtccatcaacagcctcaatccaaccatagaccaaccccacgaccaaggtagccgttgtccatacgaatcctccacaccgaagcgccttggaagctagcaccgcttactgtccctgcaacctgaatgatagtgttggccatgagaacagtggctagagtcaccgttcgcttgataagcaccctggtcctccatgaaagcgcgccccaagtcttccgatagacggtggaggcaaggtactctccctgctgaggaaggacgctttttcctttttcaatctcggtatcctgtacggccggggtgcccgcagagctaacaaaaaggaagtccctcgctgcccaacccgctgggagaagagagaggaaaagagtcggaaagccgaacagggccgtcc

SEQ ID NO: 3046 - DNA, 2284 bp, Emericella nidulans
  unsure (1)..(2284): unsure at all n locations
tgaggtcagtaactatatctactgacaggctagttactgacgtcttttatacttcacataggaagaggactttagcacccaactctataaccggacattactatcgcattttgcatacgagcatttccccagtcttttgaaccgtgcgatttcctggatcgatgagcaggaatccattgacgctgctgcgaaaagtgcaataaaatctcgtttattatttcggcaagagttccttctgggcctgcagcaggatatcaatattttggagaccaggtccgtggacaagctggcgtcttgtttgtctattatacctgctctgaaaaaatcagcccaaacaagtcgaccggtgcctgaatcctttagctggaagatacagagaagattggctagcaccgtcccccctaggccagtggtgaaaatcagctttgaggatgcgctggcgcatctcgaacggctgtgccaggacggaattcacctcaatcaaattcttgactacagagggccatacaatctgaaagtaagttttcctttgcgtctgcatgctgctgtttctaaaagtttaggtggccatttggacccttctctcccgtaaacctcagccatcagtgtacattcgatcccttgttcagtccattattatggaccagtctaccgtcctcgggtctgtcccagttaagcagtttctctacgacgaactggcggcgcttgttctcccttccagtatactgctcgaggcaagccttgacgaaaccgaagttccttcagacccccgctttcagatcgctcaattgatggacggcttcgttagacgattttctcaggtacgcacgatcactcatgttgacttatcagtactaatttaagggccagccatttgtggatacattccgaagtgcatgtttgaatcgctgccgtatccgccgcaccgtctgtcatactctcgccgattgggacaatctgcaaatggaggtccgtcttctagtactggaaaccatgacctcaattgactgtaataggcccaagatcttggcgagcagcttcggactcaangcggagggccgcaattatcacttccaaatggagacactacgtactcgtaccctcttagcagctgggcctaccaccagaagctgatccaattccgattaattctccaactcgggttcgagctgtccatatacggtccagaagagctccccggaatgtactggtatttatcgcacatctgctcgacccatctcggtcatattgatcgaatccgaacattcatcctcgcggccgtccagcggaaccgacgctcgcccacccaacacgccaccctccgatcatcattcctcctcttcgaccgactaacgacgcagatcgtcgccatcgacgccttcgcaatagctctgcacgccctctatgtccttctatctcgccatagaattctacccactgcctcggcgcctaacgcctactcaaacgaccaattccgttacgagcttcgtatgaagccctttcttcaaatcacgctccccgaactcgtgccctatgaagaataccgtcgcgaagctacattgcagggtgacagcgacgagattgtcatggagcgcgctaccaaggccatcggcgaacgtcgaaaggcctgggaagcgacgctcgccaatggcccattcgacaatttcaatgacgagaaaccggatgcgcctgctctcgaagaggactggaaacgcgacgtgaaggatacaatgcgagcgtgcattggcgctagcattgctatcgagactgtaaagaaagcgattgccaataacgccactggcgacgcagagtcactcggtcttcgagttaacattcccgatgctggctccaagaatcgttggcatgactggtgggccgttccgcaagtttcacaggtacagacacaatctcccagtacaacttcaaagtcatgaatcatgagagatacctttcttacaagtactaaacatacaactgattccggcggagatgattcccggcctatttttgagcagtgagctgagcagtctcaaaatgattgatagaaggtggggataggacgtttcggcaggattatctattagataatgaagaccaatattatatgcattagatacgaggttatagaacctgaatggatgaatatttttggccacaggcgataattaggcaggtatagttccctcaagacagcttaataggccccccggggttggcctcgaggcagtgtagagcagggcgagccgcattcacactcaacactcaagcaagtgacattcacccc

SEQ ID NO: 3047 - DNA, 2236 bp, Emericella nidulans
aaacttctcgattaattaaactcatataaattgcggaggatggggatgataatctttatgcaagaaagtgacagtaatacaacggtgctgaccaaagaattgtgccgcccagcctgggtattgtttggtaattcagtaataatgcacacgttcccgcgccttcgaagagtgcatgtcagcctgcgcctgcgcttcagaaatgctcactgtcctctactaattgctctcctcaatctttcactttcccctccagctctcccaactgcatgagggttattcctcttgatacccctgccttaatatatctttcatttagcatattcatggctcatggtgtttgatttatctcattcgttcctcactttctcattcctgccgcctttcccctgtgttgtgtctaccgaacgtctccggctcgtctcgacctctatccgatcttgacattcgttggccgcgcctctgcggattacaatttatactctcctcccttaccgttcgtcgcgccatactgataacgagtacgccggcatactggctgtgttgccgggtcggctcgtcggagcggaggctccttaatatcttgcatctcttgatttcgcgactatacgtttactacgaacgtgtattataccacagatggcttcagacttgccgcctgtagatttcccggctccttgtcgataagaagatcgttgtagcggcgggcctccccatagttgcctagtttgtagttacccagcgccaggtagaagagacattcgcggcgtcgctcgggatgggcgcggaaaatctcagacaggagacgaacgccctcttgctggtcagctcggaaattcgatttgatcaggccctgtacagcatgttatgtcagtagagtccagacatcttcgtttcttgtgtggggaatgaaggtgcttacccaggcatagttgaacttagtctgaacaccaacgtagtcgccttctttttcatactgggcgcgaaggacttgaagctctgctggcttcaacgggctgtataggctttgttagctgctgccgcgcaataactaataatgtggagaatagacctttcagcatctgcggcatctggatttggtcagtaccaaatagctcgcccttgccagtttggaccacgtacaagggagatttgaagaagtcatattgctggaatacagtaccactgtctgagtcttttggtaagatatgcaaaagagttgtgatgtcaagaatcggccaggccaggcagcttcactgctccaggtgacgaggcggtgcacgtggagatgtggcgttgccctcccaaccgttcccgtatttaccacggatctgtattaagacagcccctcactatcgcatctttttaaacacagcggcctcatttcgaccctatcatagtcaccatgttgctcgacgagaatccgtctacggtaagcgtactgctcttttatgtgcggcttatactgagcaacgtcagctcattcaccacacaatcggcaacttcaacatcgccccggacaaacaagccgtctcccgcatcaatgattcgctcgcgaccctccagcaatcgcgcgagctgcgcatgcgcgaagctgaatcctccctccgcaagctctcacgccatctccagtccctaagcacacaacatgaggaggccgtcgccgctcacgacgcaagcaaacatgccgccgccatggtcgagctcgacacgaagaaatttcgcatcgccaaggccgcgtcggaactggagatcgagagtgagcgtcttgaaggtgagctggagatgttgaaggagaggctggcagatctagaggcgcagggcctcgagggcgatgaggcaacgcggagggagagggaggctgatgatgctatcttgtatgtcttgcttgtcattgggcttggttatatttctaacgaaacaggctacgtttgaagatttaccgggctttgggcatcgatatcgagcctgatgaagcgggcaacttcaccaaggctgttatccgtaacagccgcaagggagatgtgcacgttgtcaacctggatccgaagttctcgcgctttttctacgccaactacttctggtcaactatgcagggttgagtacttgtttggcgttatggtgtaggatgatacccagctggatctttgcttttgtttatctattatcagatctcataagttcgtaatacagtacagagttatcgtacaattattatacacgggcggagcgagccgac

SEQ ID NO: 3048 - DNA, 2328 bp, Emericella nidulans
aaaaaaaaaatgcgggaatttggaaagaaaatttttttgaatccaaaattctccccccaaattttatattaaccaccttttaaacaaccaagcccatggtgttaagtttcccaccaccgaatccaaaaaggttactttcaaaaaaaaaatcaaagccatttgcccaaaagggtggtttctaccaacggcttcccccttaaatttcttgtaaaacccccaccaaggggttccctcctgcctcaaaaacactctgaccagtcaacaggttgttagaataaaccacaagtaaagttccatccctcaacgaaggtgaataacacgttcaatccggccaccgtgagtcaacgctaacaactgcaccgggtcctcggaaaccgcctcgcgacttcgacgttgcacagcagagtactggacagtcatcaacagcctctcctacgctaaatgttccggatatggctttctctccggcttcgggctcggccatggcccaacctcagaccaatatatcccccgttcggaatagtcatgcgccatcgttgagttcgtccatccaggtttcaaccaacacgtcgaacgtagtagattgttccacgcctgtcgactctatgaatctggacccccaccctacccaggctctaacaccaggtcacaatgggacagagccaggtgcggctcaagtagacttgaacaaacttttttccgacggattcggtatcacatttgagaaactagcagctattggtgggtccgacaaaaaagctcaacgggcaaaggtgttctacatatggtaccctgaggactcaaaagtcgttaaagacgaaaaggacttaataacgagatttttgaggatccacacccgtcttttattctcaaatagcgtcaatgttgactgggaaagatttacgaccatggttaacgagaacaatatgcatggtgttgttcttgtatgtcctccttgcttgacttcatactgccctaacactaccgcagtttcatgagtccttcgtcgaatatgacaaggttcctcaactccaaaaggcccttcgcaggacgaccggtttctggaaggtgtccctttcaaagccgatccaatacgttgatcgtccactacatgtccagcggctatttccacatggggggatttttctgttgaccgaggacctgattgtccacgaaccggttgctgctatgataattctgcaatggttctacgagtggtcaaaaaagaagcatccaggactatggaaaataatgctccgccccaatatcttgaactggctgacaaatcagatgaaactcgcagattattcacaagaatcccgggtgtgtacctacctattcacggtttcagtggtcaatggaaggctcagcgcttaaccaaggaacatcaggtggctaggcagtacaccatctggtctaacaactaggtttctgctctaccagcaatcctctatctagctacgaaagctgggaaggcgtcgtaatctctcctcctgcactccccaaatacgggtttcggacggcagatgactcactagagattcccaagaactgctcccaggagcagcggaacgcggaccatctaagcgagttttttgccggttacagcttagttcacgctcatcgcttccgccgcttttatattattacagccttggagcctcttgaaagatggaagaagtggcaacacgttaccgtcagtggttaccaggagttctttcattcccatgatgtcaagccagagttaatccaagaacggttatccaagggcgcgtcatcagctctttcttcgacggatcccacacctgtctcgccggctccgccgcggtcatcaaggccatggggcactccgctgtctgaacagcaatctgtatcgcttgcaccccagtttgcgtccaggtatggccagccgtatcagtgagaaaaattggatgtccaattattatctaacgttgacacgggagtctcctgaagatgaggatggcacgatataaatgacggatggactgctgcatgccagggtataccattacagcgacaccagtgacaactgtatttgcataagaggaacaactttgaaggcgatactcgtgcgtttattctctgatcagtttccaaaaggatagggcgatgggttatggggaaatgttggttgtaccttcagtttcggcaacataggcaacatcttttgtaagcggccgatcaaaattatgtcgtattttcacgcccatctgggcagtatcttatgctttacgcaggttataatatgttttatattgctcatagacattaaataatacatccctttagtgagggttatagcggccg

SEQ ID NO: 3049 - DNA, 5395 bp, Emericella nidulans
  unsure (1)..(5395): unsure at all n locations
agtatgactcgtactgtatggcagccccagtatagaacatcataggccccgcggttgcgttgcccagtacactgtgataggtgactttggtctgtaatcttatttcaacatcctacttgtgacttgtaattttcctattattaacctcgagcatgaccgttaacacaggggcgccagaactgtgtgaaaagaaaatatatttataagcgataataaatcactatgcaaataaaaaggattcagaaaacaagcataatactaaggaagaatgataccacttacactctggcagacagctcaatcaaagcaggtctcggccggttctgattctggttctggttctgtggttgccagtaaggggagagggtagtaaactggaagcgagggctagcaggcagggtaatcttcggccctggaggcatgatctagtcctggccttggtgatcttgctttgtcccccaggtccactgtgtgatttcacacccggcctacagtatcttgtactgactgccaacatccagcagtggtccatacctatccaggagggtactgtacagcgtagttttggctgccagccagagctcaatcaggtccatgctgtgtacaggaaacaggccgggaaaatcaggttcatagcaaggtgctggaccctgcagctcagcaaccagtgcttccttcatctccctactattagcagaacagagacataggataagatctgaagggctccacttgaagaggcagggcttatccaagccgtcttcctcgcgtttcattatgagtgtaatcgtgttgatcagccagttagcaattcgtgcagacaatttcttccatccagtcaaggagagtattaggcagggtattgtttccaacaccgccagcttttgctgctgaggcagggcagagtctatcctgatagttgctgcagaatctgcattgaagtgtggggaggttataggagatactgttggtcctgtgtttttgttatacaagaaaaagcaaaggaagcaggggtgttaagggatcgcgaaaagctccagtatttgggctagacaaggcagacttggcacttgcctgtgttggcttcgaagcggggcctctagtcttgacactaaccaacgttaaccatcgggcaaagtggagtggtatatcagcaacttgcatccactaacggtttgttggttcagacccatgcatttgccggctttgacgctggttcaaaactaaccagtggctaagtagagtaactgattaatccttgtcccatactaaggtatgtaacatcaaccaacttgcttattataattggctcgtgaaatgcctagactttgttagttcaggcagtatacacttgtattggccttgtattagccagcctagactatatcttctccaccatactccatagaaaccaaaatctaaaagttagtagagtaccggggtcacttgcactaagatatataacatatactaacatatattaacaacccctncaccgcaatgacccagtcacatgtgcagtgcgttgttggttcagactatattgatctggcgatgtccgacagctgcatgtctcagcgtttgactgagcaactgaaccacactatctttactctccaggcaactatcttggttcttgtaccttgcataccatggtttgcgatggccaccggaaattacaatggcatttcctaggaactagatcgcatggcccctcagcggggggagggaggaggtgtccttctcttctttccctgtagtctttatccaacgcggctatagcaggaaggccctctcgtttggcaaacatgacacagtgatggggacatgaagcatacataccatcctgattaggcagaggacaagaagaagggggacagactaccatggcaaaacggattatcttcccgggggactgctaaagttgaacacacgagtctgcaagtgacccgagatggttatttggccctaaatgtggtgcccatacgctgagcaacctgttggacatatttttcaatactgtctacagtaacctctggatggaagctatcgcagccccattttgttcccctgttccagagcagacttccgctcaatgggagtaacattaagccgtcaggcgtaacagaaatctcccggacgccgtggccttgaagggatgaggccgctgatgacggctgacatgtgggattgttttcgaaggcacaaatagggttgcctatttgtcttgaacctaggtaagtcaaaatcagacaggtgacttcctgtgcaatgttctggagtcataaataacatagatttgatcaaatacttcttcctccaagcagcctagtaatagttagtcggaggcctctctccggttgtcagattatctgatcaactggtggccatgtaggtatcgtcaatacctccagggcctgatgagagcttaggtgtgtcgggccgaggaaagttcctttactctgtgcacaaggatcatcagttccagcttttctgggagcgatcaacttggcgaagatctacttcctgtatagtacaggagaaatttattatatacttcttttaggctggcgtggtgagtgtaagcagtataaatcttaagtaagcggagctgaggtcgttggagggaggcagttttgtgttcacaggccctcaagtccgtacccgccgaccatagggctgcaatagccgcccagaggaagggtggcgtgggtgctggcatcacatcgttttatcggaaggatgcagcgatcaatcggttatataaggctgggcacaacccgttgagtttagtaggctgttccgttgcccatctcaggccagactagttgagaacgggtgttgtgaacgggtgttcccgtctcggcccgcgctgtgggcaaccgcccgcgcctccattgtttgtcgtgtttgcgcgaaagaacctccataatttcaaaaaaggagaaaaaggtgttaactgtcgtaaaaaactgattttgagcccacaacatgggtaatgctcagagattagttgcagcaggcgagagtgaagcaaggttggtagtcacagcaactactgaacactaattgtgcggaagataggagtagacgctccggcctcaaggtgtgatgcagggagattggatgcggttctgcgggactttcgcggcgattttctaggcacctgccaagctgaacagactgctgcttcctacatacgagggtgtaataccacgtcccccccagtcaatctgacccagttcgccttagtgggcgtgcacccagtcatcgagggcatagaagcaggtacccatcgcacaatatatactgaaatcagcagaggcaagttctgactttcgcgtgggtgcatcaagcgatgatattcaaattgctatggcttgcgctgcgctgcaccgaactgctctgacaaagcatctcaacaccagccttaaccccttctcaacttgtcagcccatgtgttcaaagttggatagctctcttctaatacagcgctttagtcaattcagagctctctaaggttttcctctgcaatacaatcaaatctccccaggctccaatcattccttaatgtccacattatccttcatcttcttttggcgcagagcatcaaggatttccatatgtcccttttccagcgcaaggtcttccgcagtgcgtccaagcggatccttaagatagatatcagccccagcctcaatcaagaaaagcgccatctccatgtatccctctaccgcagcctgatgaaggggactccccatatcaccataagcctcagcgcctggcgggcccttgatcccaacctcgtcaatatcagccccccttaacagaagatacttgaccatctccaggtcctcatcaatcgccgcccttacaattgcattactccccttcagccttgccccatgcgcgagcagcaaatccaccagttcgacgttgccagtgtgaaccgcacacgccaacgcgctcagatgctcctcgacaaggctggcgttcggattggccccgtgctccaggcagaatcgcacccagtcgatcttattgtcggaggccattgttccgagaatatcgccgtaccaggggacaacaaagttgatgcgaaccaccttgtgcttaaccatcaagcggtacacggcgaaggagttgtggacaacaaccgacgtcatcatttctcgcgtggccttctggccgtgttccaggcagtaggctgcgacctggttggcgcgacagtctgtggcggccaggagcagatcctcgagaggcggggtgtattctaactctccggctgcttcgcgttgttgctggaggaaagcctccagtgcctcacggctgtttttgcgagcgatggcccgtatctcttcgctgatgaggcgttcgttgtagtgcatggtggctgaatggttgagatcgagattgacgggataaaatttcaatgaaggatggaaggtcggtgtgttttactgatcttgaagacaaatgagtcactgttaaatgggggaagtgttggtagctacctagcctacctacctacttataggtagcgtagcgttggtctggaaagacttggcgtcggctgaaacaaagacagttgctcaaacaagatggtccaattgctggtatggatgagttagcctaaaggagaatgtggtgttcacacggtcctggggcatgtaatagtatgttttgatattacagagcatgaaactttttattacctgaggtggaggaggaggagaggagctaaagtagccccatctcgcgcggattgttttttgaccctgcaggttgtacccaacccgcaccgagtgcatccctagtagtatatcttttttacctactatagatcaagagattaaaaccggctagggctaatatatagtaaaattccctttccctcagttacttattagtttgtcaatccgcaccgcaacccgcagcgggtcaccacactgcagcagtgcgatgcggtgcaggttgcaaaatcttcagtccacgctggttgcaggttctaataggagaatctgcacagatttgcgggtcacgtgcaggttctgatgtctgtaatacaaacctataatatctatataatatataaaacatagattacccctgcttggtttcgatctatacacctggaagaaaaaagaaaaaggagatataactattaggctactaagcattattgcttatttatttataaataattaatttatacaagagatctcataatatgtcatgttggtatctgctagatagctgctgctggcatagtagtattatgatattataatattgcaatattataggattatagtactatagagtaaaccttagggttggagactactccttaaacttatatagtttgctttataagtctactagaatagtttag

SEQ ID NO: 3050 - DNA, 1908 bp, Emericella nidulans
taattaactcgtgttcgaaataaataaataacaggagagagatttttaaaacaaaaaacataccaaatggcgattataattaccaaatattaacgtcaaacctcacgaaaagaggaggtagtaccaagagagtcttatggaccccagaacataaactatattaaaacataaaaaaggcccaaatatgtagaagaaagaaaaaaaagctttaaggacccacaaaagaagtagaataaatgagttccaaggtatgaactcaataaccaaaaaaaaacaagttttggtctggcaaaaaatgggactatggtgtgaacagtaatatgctaggaaaaccagagtatatcaagctggagatgagacaaaaacaaggtctttagaagaaatctatgcttagggattagtagcaaaatacattccctaggagggcggagggcaaaaatcgattaaagcccatacaatggaaagaggtatgctacactaaattgttatatagcacccaattgcaggcacttaattgccaatcaggcaacacttcagttggccccattaatcttatttaataaggggaacactaaatggggggttttttttggatggcctaatagaccataaaaagtaactttcggtccttggttctgaattccttaacaactggccatagatacagagttccttagacgacttagtccatccacacccccccccccgggcgctatcagcacctcattattcccgccctagcatgcttccattccttaccaccatctcgggtacgctacacttacatcccatcgctatcactccgcatcgtcttttatttattttttttctgggtccttcttgctttttgacttgggctgtgacttttgctcttgtccccgactcgatttctcttgctcgtgctttgaccgtccgaccgttggttgccttgctgacggcctctgtgcctccgtgccatagactaccttgcctgcctgagctccccgtcgatcgtcacccctcttcgtgtgaccttgggacgcgaaagtatacattgccaaagaaaccgatcgatctcttctcttcctcatcccttccgctcttcagagacgctggacgaaaccgcccgactgcaatcgcgacggagggtctcccacttccccgcccatccgccccctcagctgcagctgattgcctctttgggaacctcttgggagccccagcttcgcccttgctcgtcctgctcgcccaacgagccagccaccctgttgtgttctacgtgggcataaccatgttctcgtgactgtatgattgtcgcatgcgatagaccgcctgtcgagcatctgcgcccgcccaacccgcctacgcgagacgtcggagctgctagcatggaaatcgtcaccacggaggagaaatcaaggatcttcccccagtactccggccccccgcctccaatgcatcgcatcccgcccgcggaagcgccgcatggcttgccaggggccccgggcctgtacgatcagccatggcgcccgtatccccatatgaaaaccaccatgccgaaccacggcgggtcgcgatcaatgctccgcagcctccactatccacgcatcccaactaccccccaatgcacagtcgggagctgccacagctcccttcggacggtccttttagccggcccgccagcctacctgtgcccgcagcccacgcaccccccgagccccctcagccgcagcatgccaattaccacccgatgaacggtgccatgaatggcgcaccaccggaggcgtcgcccgtctctgcgcccgactacgccagaactcgcatgtcgtccccaccccaggagcagatcgccaacagcaaaggagatcccccgcagccgcagcaatcgctcccaccgaatcgacatcggacctatcttccatcgcgata

SEQ ID NO: 3051 - DNA, 3377 bp, Emericella nidulans
ggcgttctggcgacgagattggcggtccaagccgagggtaactgagctcagcagtgactggtacgctagcgattcagaaatgcggagtgcaaggttttattggggaacgaggagtttgatggtagtggaaggctgtgaactagacgggtggaacggtgtttgcccgttgtgcgaaacacatgacaagctggacttgaaacggataccgccgatctcagggccttgtcgcctctttgtgggtatgagactgctgaccgctgagatcgctgagaccgctgagattgctgaggttgctgaggttgctgaggttgctgaaaaaccgctgaagacccctattcaggatgactacaaagtatgtagtcgatggatgaatatatataattcttctcgttttctcttttccttttaccccaggtggcaacgttggctatgcatcggctgtatgtcattacctatacccgacgtccttcgccgcgattgatctaaagggcttgtgcttatagcttgtgcttatgaaggctgatcacactggagttgtaccttgcaatgtggggattacaatggaagatagagatggaccacggctccatctttagcgggacacctatggaagaatgtcgtacccacactgtcgggtcgcgcctgatgatcgggaaatatcttcgtaattagctgacgggcccaatgtactcagagttgagagataatgttaggatgcatttccagttcgatcctatcatttgcaggcagctggatggctgtctgtcagcaaaggaggaatcacgcaatttttcttggcgttgagcaattccataagacccataagccgttgacagcgatattcaatctggcgagccccgccaaattgcttattctgctaatgtgaatataagatctcgatccccgtaaggtgatttcgtcgggtcgtcgcttggtcgcgtcgccggtcatgttcatccatcgccgattgtcatcgaattcatcaggatattgttactgtgatcaagatcgacagcacgaatgtaaccacagtgatctagtccatcagcccagttccctcctcagttctcaattgcgacccgatcaactcaccgccgttgtcaagaacccgatgcagttcagttcccaacctcctgcgtataccgtccccagcgcgatcgcactctgctgtttccagaaccgatgcgctcccaggatcgccgtcacgatggccgcgcaatggcacgtcaccgataacgggacgccgacttcatggtatccgaggcctttgcttgagccggcaaactgaaggcggaacagctgggcgatcaggacgccttgcattgcgaggatcacggaggtccggatgtacgcgagaaacgttcgttcgagagctggtgcgtcagaaatgttagcattgctcatcagcaatcgatcttcgatcgagtttccaccggtctttcttcaatcttcgatccatgtttgccgtcttttccctcacaacggcaggccgagataagagggggacaaggaaataccgaaataatcccgattcttcttctgcgccactgtcaagaccacatgcctcgtccagaaccgttgaatgcgcccgaggagcccctcgcgtcgtggccgctgcgtctgactggtcgaggtgcgcgataccgtccgccgcgtggtgatgcggtattctccagaggagatcgacacgcctgaatcgtcgtcctgctgagtttcgatctcgtgcaactccaggttgtctgggtccaggtgggcttcgttgcgcggtcgcggtcgcggtcgcaggctggcgctggtgttggtgtcggtgtgggacgaccgtgagtcaggtctcggctctggccccatggggtcggcgacagcttgggggcgagaaggaaggtggtctgccattatggatgaattgaccgatactcacatatttactgctgatgcagcatgaacagaatcagatgggcgaagaacctggaagagaaatcgggaatccgtcagccggatgcgggtctggtccagatgcggaccgttggagttggggagtgagatcattggccccgcaacaagtatagctctctatcgggtatttaatgatcgagttgtgaacagaaggcatcaccttcaacacaccaatattcaaaccaacaatttcgttaagacgcccagaggtcccgaccattgcctatccttgagcccttgacgcagaaaacctgttttctcatctggcagtacggctgtcgttaggaggacgggcagcactgattcatgctttttaaggggaaaatgtttaaggaatcaatgtacgagcgggaagatgaaatctgatatctcgtcgtccagatgtcatacctcgtccatgaagcggctccccggttaaagcgccgaactcatatgaggcaccatatagcagaacagagtccagcatcagttgccagttaaaatgtatcagtaggttaccttgtttgagacacatttgaggtctactacaatgggagctgtgctcatacttgtcgcccgcacactgatagagccatcgcacggtatagcacaacaccaacagtatattggcgggataaaaatgggatgtccaatggcaacggcgcttaagtagctgtagtagtattgcaaatagagaggttggatgaagcaaactataaagtgaccatatctctgtctttaagctggtaagactgtctgtcagtagcggagcctgccaggggggtcagcatacaaagatcttgttattcgtgctctatagccagtattcagcccagtacaactcctcattgttttgttcttttcatttctttctttctttctttctttctttttatttctacttttattttccctgcgtaaacggcattcaggatgataatcctctgtatacacaaggagatctgtctaaagccacttgcattgtggacagttctcacccttccacccttgtccagagacaacagttatgctctgtaacatcaagcctttgagaaaatgggatacttcaggtcagaccactgtcctgaaagccgatgtcggatggccccatgcgctcagcggtatggccgcgatagagatcatggcgccttccagacctatgaagatagtctcctcattcgctagatggctatcagattcatctctcgactaaggaacgcggaacacgcttcaaatagatgcaagcagatgcccgatcccggtatactcggaacgccacccaaagtttttaggcccgttgccggcactgtcgagtttaacacaacacgttaacaaaggcttggagaaatcatcggagctgactcgagcggcaaccgcatagtaatgatagaaccttagggaagcttagacaattcccggtccagtaaagacgcaccggatggagc

SEQ ID NO: 3052 - DNA, 1182 bp, Emericella nidulans
cccaatatcgttatagccgagcacaacccttgaacgggctcggcaacgtactttgttattcaagaataggaacagtcgcaaaccctgagaaggctgttcaacttcaataccaagctgttagatcaatactaggaaaccatcctgtcctggcatgatatctgaacaaccctaaaactgtgcttggcaaagatacacaagaacagaaaaagctgctgacctcgaagtgtcactgatgctgcacgaaagctcttaaccaacgccggaaatttatcctgactggccattacatctaatacccttgaacgcaggatataagtctggtttgtaacagcttatgggcatatgacaggacaggaggaatggctgaccttatggagccatttccaataccaatatgctttacgccagctaaactctttgcttactactcggatacggctggccaaacagtacttcagcatcttgctaccatttcaagtggcagagctatgaaactgcctgggcctcaattgtttgcttaggcgccttgctatggtatcaagacttggtcgaacccataacagttataagtaaactggttataacccaggatttaccacgtttccttacatttcaacggagctcatatcttggcggattggggtgggtcggagcgggattcagggggcgggattaacaagactaggtgtatctgctccgttatccagttctatattccggagcctgtgccttgttatatggatcggtgggtggacaactcaaaccagaggagtctggcagatccaaacaggtcaagggttggggaaggtatataaatattttgctatatcagcagcactgctaattcaatatagttatttatggcttcttgatatgtcagtgacgaattacccgtagaaaagtaacagccgcaatctattcaataggatggccagaaattggatatgggtagagagatgaaaatagtcgttaaaattcaccgtcacacgagtcaactcgagctggtttactatatcgaaacggcctgcaacctggaagtctcccggcactttgcattgaactacatgccagatgttagagctgattggcaaactactgtagcgagctataacctgcttggaaattgctgtacgcctttgggcgcgaaacaccagagcatcttctggcaacgcttagcacgtg

SEQ ID NO: 3053 - DNA, 1169 bp, Emericella nidulans
cggcggtccatgtcttttctgagaggcgataatccaccccggaacaccttgcggcacacaagaagtcaggatgtgtttgtgcagctggctcgctcgcaataccagcaggacctcatgagcagccctgattccacagcttggggaccattgaccatggcgaaagtcaggcgagagcataagccgtttagaaaaacatgccggggcacaagcgctctcgacggtacatccgtcgcagaggcgcctttggaagcgctaaagggccctcagtcccttggaaaagccagagccttttcgaccaccatcaagaaaggcatcaaacgagttttgggtctttccaggaatgtgtctgagcagggaaaggtgcatgcattcccatcatcttcccgtcaattcgctgagtcaccttcgactgcggttgataaccgagaccgattgcccgtgacggctgtgcagccatgaacgaacatatttacgaatcagcagagatccggcagccaacgatacggagaatgcagagctctgctagtctggccacaagtcgctctcgggtgacgagttgggcggattccactgctgctaatacaattgcaacccccaggacaagtgcccagcaacgcctttccattgtgtctgaacaagagaagcttgtgcgtcctgatgtgccaccagttaccacagactccattgcaagcaacgcagttgatagtcatcgtttattttccgccctgatgaaacgaatcggaggaacaaatgctcaagcttcggaagacaagattgtcatcggacaagtgaaggagcatcgggtaattcctactcaagggtcgttgacttcccaccacagcaaacgtaccatccgccaagtttccagtgagatctctgtcaactctccaagatcattcgctactgcaaatggcggcccaattacgccttatgagcagccacaggtacatggcgcatcttgtgcacacagtgcaggtctcacaactaaagcatatcaagagagcaacaagaccgctgagggtgacatttcacgagccgagtccgcgtcaagcgtttactctcgatcgacgagcgggctctcccccaagctcaaagctgcccgtgattcaccagattccgcggaagaaccaggggtagcaacgatctatgcctctgaaaggactgcgtac

SEQ ID NO: 3054 - DNA, 2703 bp, Emericella nidulans
gctggggcatagctcaatatcacagttctatttatgtagaattttattcagttacagttactatggcagctaaccaacggttgtccagtcaggctcctactatacaggatacagagaacagagtagctagaaaggtcaatatgctgactcatcgcaccgcaacccagctaggccagagatcagatcagcctcggttctccgcaaaccccaggcagctcctcacccgaatcggatccataaagccacgcgcactgcttataaggagtgcctgtctttgtctttcctatttcttccctctaaccaccatcgctccttttctcttgcactcacttccgttcctaacccatcctaaccccaaacataagcaaaatggccaccaccgcccgtcagcgtctccaagcgctcagccagcaactagtcgaaggaatacccgacgcaggcactttcgaggacatccccaaaattcgacaggttgcgggagactcagttgggccgtatgtgtcacagttatcttgcctcttatatgcatgcgggtatggtagagcgtcaaactaaccgagatgtatgtatgtagtcgagtgaaggacaaagtcgccattatcactggtactccatctacttaccactgataaagatattattactaaagaataaaaaggaacaaactctcccctgggcattgggcgcgcaacagcgcaccaattcgcgcgcaacggtgcgaaggccatctatatctgcgacttcacgagcacacaccttcccacccacgcccgggaaatcaagtccctctacccctctgtcgacgtgcacacgcgcacctttgacgcagcagatgaagctgcgctgaaggctgtgattgacgaggccatccagaactacgggcggctcgacatctttttcgccaatgctggaatctcaggctctaacgttcccttcacggaagtgacaggtgagcaattcgcggagacgctgcggatcaacacagttggtgtgtttttagccgcaaagcatgctagtctggcaatgaggaagactagtcccgagaagaaataccctggaggcagtattatagctacagcgagtgtggcggggttgaggtcgaatgcgggggcgacggattacagcgcgagcaaggcggctgttgtatctattgcacaaactgtggctttccaattggctgggacggggatccggattaacgcgatctgccccggggtggtagagacggggatgacagctgcgatgtacgaggctgcgcgggcgagggggacggagcggaagattgggcaactgaatccactgcagcgcggtgccgtggcagatgagattgcacgggttgcgctgttcttgggaagcgatgagagtagttacgtgaacgggcaggcgtgggcggtttgcggtggactcagtgctggtcatcctgtggttcccggaaagttggcttgattgctacgccgaatgtatatacatcttcaggctgaaattgaacattctcatgttttacttatagacaagtatcaattaactaaatccaccagctacggtgagcgaacacagagtctgcgcttcttgagcacagcggcaactttcaaagcagctccgttgcgaagaatatcgacaaagggaatcgggggagattgatcggaaatagtgggagagagagagagaggctcgcccggtatatggaggccgcgggctatctatgtaaaggcagcaaaagacgccctagaacgctacgttctagatgaaagaaaaaccgcccgacagcgggcgcgaagggtggggaatcaagctaggccgtcaaccggacggccttcaacgaaaagtgaaataagagaaagaaaaatgctcctccagaaagaaacaaaggcgtccagaaagtttgtggcagtggtgagtgaatatccaagacggaaacagaaagatcaaaacacagaaagcgccaagattgttcacaactcgctctagatctgacaatattgtgtacggagcagatgtcgtgtcgaagtcgtcgaaatcaaacgtcatcgtctgtggatgaaaggtctctacgcgagcatgcgaggggttgtccgcataaggtcctcgttggaatgcttggagagagtcccagcttcgcttgggttatcgagaccttccgtttcatgggcgtgctcgtcatcgtcctcgacgatccgggtcgggatctccccgggcccatactgctgacttgacctttctgggaatgttgagctgctgatcatcgacattgaggtgcttgaccggttgtggacaagatctggcgtaggaggaacgcttgtccggccatccgggtggagggtgctgacctcactgtcacccatctcactgccctcgcgaggggtcatcatgccgcgcggctcaagattggctttgctcggcatggcatcgccatcctctgcatcctgggcaagttgcagaccctcgacagcagcggcacactgctcgctgatgctgcggataatctccgagatggcatccgtcttgtcgcgtaagtagcgatcggcaacgtcagttacgctgagacgcgcaagacggcgttctggttgaccaatgttcagcaggtgttgctctaggtccgggttgatactcgacacaccgtttgaagattcgtttgtcttcacgtccttcttcacgttcttatccttgacggattctgcgctctcctgggcctgttcctcggcg

SEQ ID NO: 3055 - DNA, 801 bp, Emericella nidulans
atgggtgagacccaatcttaagatccactgccttcgcgcccaagatttgctgcagggcatcgaaagcctcagcggctgcttctcggacatcatcatcgttgtcaaccaatgccacacggacaatggatatgagaatcttctcgtagtcctcgagggcatctggggaggaagatgcgatgatttccttgagcgcgatacagataccttgcttgacatccacatcgggggaggtttggagaccatcttcaagagtaggcagcaaagtggcgagaacagactctccggctttcttgatgagatctccaagagcattgcttgcaatgaccttttgctccatgttggaagaaccaagacggcgaatgatgagctgggacaaggtggggaccatctctttgagtgttcttggagacgcgacaagcgacttccatacacccattgctgcagtcttgacgagaccggaagtatcgcagcggcagataaacagcgcggacaagaccttgtctctcctctcctctccaagaacctcgagcagtgactgtccagcctgagcggcttcttcatcctcctcttcggcctcggtcttggccgtgatgcctgtaatactgaagagcagatcaccaaccaactcgacggaactcaacctgatacggtagctatcatccgcaagtccgcgctcaagttcaggaagcagaagatcgattgccttggacgagaagttcttgaccagcatgcgaccggcgcgatacgaagtctcacgaatcgtgtcgacatcgtcagccagaccagccaagataggttgga

SEQ ID NO: 3056 - DNA, 761 bp, Emericella nidulans
ggaccatgcttattacagtgacgcgacaagtttttgtcgcttcgcaggatatagcggcatatgctggagcattggaattgcaaaagagggcatggactgctatgaaggccctatctggcaatttaactaactagctaactaacgtaatttcacagtcgagctgaacacacaagcgagctgaacactaccctgtagatacccaaaaacacgtcttcttaattcagcgagccactatggccccggcacgctctcaaaaatgtcaagattctactcagcaataaggtaggctccagcttgtcttaaaagctataaacgagacaaagcttctctcgattcagtgaagctacacgcgtttactatgtgcccctctccgcgctgcacagtcgcatccggggcaccgcatggcgctgcttttctccctatctctattctgaacccacgctttgttctccagtgtactcgtcgaatcagtgtgttgcaactctcgatgtaccatgatgatctcactcttatacgcgtggcttcaaaaggaagacatcttaattttttcaatcactatgcctcactttgattctcttggtcgttatcatgaaattaagagataattaatggatatgtctggaagaaacaaatctacacagtcgaacttgtcaaaagtaactctcagggtcaagctctacggacattgaagaaaaccagattctatattctctatcataccttggcttagaggcgccctgtgtagatattttgatttaatt

SEQ ID NO: 3057 - DNA, 2734 bp, Emericella nidulans
ccaccaactggcgagcatcatactacctagcgcacgtagtaccgtcaaacagcgaagcgatcgacatcctgaacgacatcatagccagacttaagacagatgagagatggatgttgaagctaaacaacgtccgggcgttcgcagagatgctatttgaccgcggccagcgatattgggatgcggagcagtttgatccggcaattgaatctttcacggaatcggtaaaggttgataatgcatgcttcaagcggatcttgactatcattgagcaatactatgataggcggctctggaaagatatcttggagctgctaaagaccgttcaagccggtgctgtctctgacactattaccggctctcgtgagagaaaaggcaactctcatctgtccaggatgctcgtcgaccttgcctcggaagaagcattccacagcatcattctccatacagccgtcgaaacgggacaattcgatttcatcgagaccgtctacgaagacgccatcaaactctcagcccaaatggaggcttacacaagcctcttctacattaggtaccactacgcaaacgagatttttcaacaggacggaacagacagcgaagagcgcgctatagttctgtgggaaacggcgctgaaagaagacctccctcgctcattcctggacatcgactacgtcctgcctagtttgacactgaaacttgcgccaacctatctgtctcgcgcacgatctgccgagccgaattcagacttagcgcaggaatatttacaccgtatagcctcaatcacaccggacgaaggctcggcgtcgtcagcgtcagcgtcccaaagcaacctgattctcccagccaagctctatctcgcgcggtactacgtcgtcacggggaataaggaaaaagctaagcaaatcgtgcggagtgtggtaaagctcgcgttggagatgctatctgatgatgacgctgataatgattatctcgcttattggaggctactgcttgtgtttttgccactggatgatgacgcgaatgcccttgttgttgtggcaatggttgttctggcgagtcgggctgctgcttttgggaatgttaatgcgggctctggcccggggatttcaatgccgctgattgacgagccgacgaggactacgaacggaaaagaccataacagcaagaaagaacggaaagagcaaagtccccgcagtcgacctgcagtaaacactgctagccctagcatcagtctacaaacaggccctgggacgccagaacccaggcgtccaggtacaccgaatagtttaccgcgcacgcccgagcttaaacctgtctcgcttgcggattcgcactcgcactcactctcagagccagcttcagcacctgcgtcagcaaagggggacgacgtagacgacagtggtgaagacccatgctccgtccctgttttcgccatctgcgacggcagctgcgggcgctactggcaaggtgcgagtgagatgtggtggtgcaaggactgcattaatttaacctttgacaaggagtgttttgagcagttgaggagtgggaccctaccgttgaaggtttgtgataggagccatgcatttttggaggtgccgaagtatgatagtcatggtcctgatggagatgagtatggtgtgccgaaggggtttgtaccgtatatggggaaggctatttcgttagaagagtggaagaaggcaattgtaagggcttatatagagtagaccagagttgactattagtcagttgtatatacactagctttttggcgcttttgcataatacgaggcaagttaagtgtaaaggtgtctttgtagaaactagggcaacgtaatactttctgaaaatgatggcttatgtgctagctaggcgggttatcctcattatctgagcatagtgcttggctgccgacgacccaagacacctacgaacctctcaactcgatttcgattcatagtgaaatacgctcatgccagttcatctccactttcagccaaatccagaaaaatcgaagcacataggtatacgccttattctccatcgcattccacataaacgaaacatcacgccccattcgcacccccattgctttccgaaacaacctcctcttctcgaatgtcgcggacaataagctgcgcttcacaaaattcagggctttcataagctctgtccagccaagccagcatattcttccaaggtatgggtaaaatacactctgcattaagctcctccctgatgaatagcaattccacccacgatctaattcctggatctctgtgattgagattgggacgccaagtggcttgggggacaggacatacgcacgacagcgggaggatacgaaggatgggaaagatgcagagtctaaacctgcgttcttgcttccggtagtgttgggttcggaagagatgaggtcgaaggatttagtgtgtagcgggttagcgaggcagagtgctgagatattgtcgcgccaggcgggccctaaaacaaaattcatttaatactctttttctgaatcaatagaaggaatgcgtagaagagacgaaaggaccacatacaattccttaccagatacctaaccgcaccaagtcccccttctgaagcaccaataatttcaattttcgcatccctcctcacaagccttccacgagctgcgagaattcctcaaaaacagagttaacatgttcctgccaatttctattctcagggatcttgtcctcctagtctcgccagagga

SEQ ID NO: 3058 - DNA, 861 bp, Emericella nidulans
cgaaaatgttcctcgacatgtttctgtacctttgctctgtgttattgccgttatctctgtcgcaggcacttccttcacccggcagcgttgataaaccatgccgatacttaccaggcgataccgactggcctactgaagctgagtggtctcaactcaatacaacagtgggtggccgattgatcaagacgattccgttgggctcgccctgtcacggttccagctaccgtgccgccgaatgtgaacatctgcaggcagagtggacaaacccagagattcagtaagccgctgctcgaccttgctcacagtcgctattcttgcttgtttaaggatttgaccttgaacgcagtgccgattccccatcctcttttggagctccgcttttccaagatcaggcgtgcgatccatttaccaacagatcgagtccgtgtgagcttggcaactattatgtatacgccattaatgtcaccagcgcagcagacgtcgctgctggacttgctttcgcccaggacaagatgatccgacttgtcgtcaagaacaccggtcatgagtaaagtgcctcttcgccatctggacattgcttgctcactgttaatccccttttttttccagtctactagggcgatcatccggcaagggagcactgggcctgtggacgcataatcttcgctcgatctcgatactcgactacaacagcagcctgtacacgggcaaggccatgaaggtggggagtggcattcaggtgttcgacgcctattcagccgcccaccaggccggacttcgcgtggtcggaggtacctgcttgaccattggactggcaggcgggtacacacagggaggcggacactcgatgctctcgacagg

SEQ ID NO: 3059 - DNA, 813 bp, Emericella nidulans
atgtacgtgggaaataggaaattccttaccacatccatagaactgataaggcctgcaccgtgggtaaactaatacggccctcttccttgtcaagtaatcttttggcttccgtgtaaaagttcgttcgcagatcagatagattgtcggaagagtaagcctgacataaatgagtgtctgaaacacgggatgacagtcaaacagagatcaaacatacacatgcatcagatagtatgatgttcaccaggagcggcgagcaatacgatgctgaaagggatccagattgcatatcccggatgaagagatcgcgatcgatgaagttgcagatcggatgtacccacgtaaaccaggaagaaatcagcctcgagacaagatcgtcgtcgtctataatggaggtccagggtcgcgcagggacagagaagcgtggagcgtcagaagacttcctggcgtcaagaatatggcgctgaggcagttcaacttccaagagctctggtgtctgcggaaggttcggctgttgctcgatatagaagcgaatttctgcaggagaggcatggctgcggatgaggttcaaaagagggattgtgctgcggttgctactctcgcgaaagaattcgaggaggcggaccagtagatcttccttatcttccaacttgtcaatcttgcgcttgaggactccacgacggcgtttgtcggcggtttcgtcgagggtacattcgaggcggcttttcaggcagttggcgcagggaggagctccggtacactatcaacatatatcaggcagtgtaaaagcggagttaagcactagataccttgagc

SEQ ID NO: 3060 - DNA, 518 bp, Emericella nidulans
taaccaccatgagcgccgtgaacgtccttgggtgtctcagtaacgtcgaagggaacatggggtacgctgcgaaaaacttttcatatacgaaaaacaggatcagcagcgcgatcccaagcgtcaggaaggcaatgacttttgcctcgttccagggatactgctgccctccccagttcagcgatataagaaggaaaaccaggccagcagtcatgattagcccgccgatggagtcaatgcgtttcactttttcgatcttgcttaagccggccgtgttcgtacggggaggtgggttataaaaccaccagatcatcccagctgtcagaagattccagatcgctaccatacacgcacagtaccgccagttgtgttgcgcgatcaatgcgccgtagagacttcccggcgcgaaggggaggaagctcgctaccacggctgcaatgtagtagcctctgtaccgggtagggacaatctcggcgattgcgcaatggccatgagttctgcactgcgattcaaaccattga

SEQ ID NO: 3061 - DNA, 1762 bp, Emericella nidulans
cctcaagggcgcatcgcggcattctcgttgacagtcaccaaatccaacgaagcgccctcacgcttgtcgaagtagatcttgttgccctggtgaacgatgacgatatcccaagagtacacgctgcgaggagcacacatgagcatggagaggatatcggaggtagcgaagatggtggcttggttcttctcggccaattcctggataacgggatcctgcgacgtggtgacgttgtacgcagcgcggtcgagagcctgcagtcggcgctcggcgttcttgacaggggccttgtcgtaggaacggtcgtagtagtagaggaatccgtacgtgtcgacatcctcgccctcgggtgcctgtaggttcaacttggacaagcggttgaagtcaacctcctcgagcatagaccaatcagggcgaatgttgactgaaggctcgcgagtcctctgcggcttatcgtagtctttccatccgaagcgacgaccccggttgccgcgggcgccacggttgtcgtagtagcggtcaccaccttggccacgaccagcaccaacacgctggaagccagcacggccgcctctctggcccgcgccgccgcgctgggcacggtcacggaagacggtgccaccgccccggccaaaggtgcgcttagcggaagtgcgagtgttgtcaaccacggagaaagtagattcgtcttcggcaacttgaacggcgaagaggctagaagagccagctgcatatacttgttgatctggatgacgatattcgttagatttgtcctgtaagcgatgggtggttggtcatttccatacctctgtagttgcggttgtatgcctgacgaccgccacggtcacggtctttggagtcagcagtccaatcagccatgcggcctagcttgtcacccttggagaaaggagcgtagggcacgccatcaagcatgttgtccgcctaggtgacaggaccccaggtgtcctccgcggggagggccgcaacaatatctgcgatggagatcggggccatgatgtcaaaaaataaaactacaagtaaattaaaacaacgttgacctgaatgtcacaaacaagcccctcagaaaccgaggtagccttatgagatctggggacggtaagcttgcaggcggcgggatattgggaacccagagaaaggcgattttttgtgtcgcgagtggtactgtggctggtggacttggcaccgccctatggagcagtacatgcctagccacatttatgcctcaggtatcaacactgtatacccaaacggtacgtgtttatagtcgttgcattccgcactctccttgttgacaattcaactctgactgcacagagaaaagagttcccctctgagaccttgatacgaacgtcactcggctatggcagcctcatacattcatgacatatccgaacccttgagtctgtgttgccgtccctaaaccccatcgtcgacccacggattttgtaccctggtcaatcgcctgactctgctgataccagatacatgtatgcttcattacgtaattgactattttcttagggagccgaaaatcctcttggacgaatacctgaaatgaagaatccatgacgccacttttttcaggtgcgaagccgcctatgtgccagaaattacaatttaaccattgcccaacttgcaatatggttatgataagaaatgttgcctacccactgcacaccggtggtctaagcccttatttttttttttttggggggggggtttttttttcccggctttttattga

SEQ ID NO: 3062 - DNA, 1128 bp, Emericella nidulans
ctggggctccaatatttcaggttcgggccccatggccttccagggaacgttgaccatgcacccaatcgcaccttcagccttagcgagatgactccctttggcgcgcggatgatgtctgaggtctggacgtgcccggcaaatacctccttcacttctttagatccggtactctatgcgaatcccctcctaaagtctgctggtgccggtacttctaagtacatccgctttctcttgaacggcgcacctcttcctctgaagggcctagttggctgtgagcacgcggtgaatggcttttgtcctctggaagggttcctgagcggagttccgactctgaaggagcgcgcgcagtaccagagggcttgcttcggcgagtaccctactggcgaacaggttggtgatggtgttcctcctccggcttaagactctcatcagcagctgttcctattcttctttcttgggagggggattggaagtgctcttgaaagagtcagatattttatcttgggggtctattcaagcgagtagcttgcttggccatctccagagtcgttattgagacctacccaaaaatgtatgataagctagatttgttgcaaatcatacttctcactggaggccctttcctcactattccttcaactaaaagtttccatcggggcaccgcgcttgcccggctagtaggcccctatcacctaagtacactattttactcggactgagacatctcatgcagtacttcctgtactatattaccttctgctcccttcgcgcccaccacgacatgagggccggtgaaagtaacgcatggtaggggcgcttcctgctcgctaaaaagggttagcatacagatagagcctgtgtgggagcggagctctcatgctggacacctgcagatgatcggctataacatgctctcctgtaggaacggctgcttgcaagcgctcagctataatataagatgctggtgcctgatggacaaacccgaagggaatccatgtgttgtacgtacatagcttttgaaaaaatcactaggacagacatgagcatgtacgctacagcctaggatttgctctgggatcatgcctggcgcggtcggatctagacacatgtacacgatacgctggatct

SEQ ID NO: 3063 - DNA, 883 bp, Emericella nidulans
tgtttataatgggtgccccgaatatactgaagctttgggagaactgtctaaaggctctgtttttagggctttttttttctagattaagtaagatgctgtggtgctgtatacataacgtaaatcataagtacgtcacatcctcacccttgttgtgttctcaaatacctcttacgctagtagacaacttccgtgctggcaacaacgttaggcgaggattcaaccatcactatccgtgtacaatctgtaaactggccacttgtaactccgcaggatctctgtcatgtgtgttttgtgtggctaattcatatctctccctgcttttatctggacccgactctgctaggccactcttagttgggagctcaaatacacggcgctccgtagcctccatctcaacaggcgaatcagtcttgtttgcagactcggaaattggagcactatctaactctgatcggccagtgtttcctccttttgctgacccgcggtaacgacggaggaagatcattgctccaaggatgactaaaaggactccgagggcaacgccaattccaatcccagccttcgcacctgttgtaaggctgtttccacttcggttgcttgttgggagaggcgagtatatggtgacagttgcttggggggtgggatctccatctgtggacgtgtctgacgtagtgctgctggtgcctgtcgatgtcgtatatggcttcggtgtgccggtaattgttatagtggtgggtggagtaccggcaagtatctcaatagtggttgttgagggtatgtggtttcagtggtggacgaagactctccttgtcggagtggtgagtggtttcggtctcgactcggctggtgtttcggcgcacggttgactgaacacgtgtcagat

SEQ ID NO: 3064 - DNA, 994 bp, Emericella nidulans
gcgcttttcgactgggttgcgctaacaacctcatcagcaatgggctcaaggctgatagatttggtggtagcatcgggaaaggatttctgttcagaacacgaattcggcgtgaattgcagcacgctcacattcaagcgagatggcgacgacggaatactaaccctaggtgttggtgtaatgtcgccgggagtcggtgtgttatcgttaacaacaggacggacaaaatgaggctctttcggcccaggagcggcacgcttgcatgccttcacaggtgcagcaatctcagccttttcagattcaggatctggaagtgtcaaagactgctgattctgaggctttcccagctttggctcgcaacgctgtcggagcctagcctctagaacatctttacattcagtcagcttgcacaaaaatgtcttagacaaatgtgtttgttgtaaaagctggcagacaatatcaatttcacgcctgtactcatcgactgactcctcatcctcggtatcagtagtagcttcaagaacgtccaaatcactcgtcatttgttgtttcggatgtgagaaccttcccaagtcaagtcttctcttagcgactgctagagtcgacgattgagagatttctggttcgagggattgcgtgaagtccagtccttctaattcttgtaacgctggactcattgcagccgcattctcagattccactggactgtccaagtcgacaagtgtaccgacgactctttggggacgcgatgcgggagtcgagtccatgggagttgccacagattcctgtgtgtttggctctagcttctcccctgtcttcgcttgaccggtcgtgtttattgaggctgttggtggcgtctctctaggtgactccgtgctcaccaagcctgcacccagatcgtgattagttgttccgaatttatcctccactttgtcctcaggagtcatggaaattgtcagctgggttgtgactttctgctctttgggctttacaatgt

SEQ ID NO: 3065 - DNA, 1528 bp, Emericella nidulans
  unsure (1)..(1528): unsure at all n locations
gacttttgggggaattcctggtcaataattccaaccattttttgaagcatagtttcattccctccttggccatcagcagttatcatcttgccattaaattccataacgcaaggaacccccccagagcacattctttaacatgggccaggaaactcatttctagatacccttttttagcagagttctcctgactcaaatgctttggtagagcatttttccacaataacatgagctgagagagatggatcttgacaaagctagggcccaatggcatcagccctccgatcaggatccatgccacctgaatttgcgtgctggcagcacgcagttcggcgctgctgcttgttttcagaaggtcggtagcttgagtgaacacacgagagtagatatcaacagaaccataaagtggctgcaaccgagatgtacttaacatcgccgacaagccattagcatagccgacacaacgccgcggagactgtcgtggggtagatagctgcccaacctcgcggttgagactattcagacagatagtgacgcatgacaatagctggactggacaggcaaggacaaagatacggagacagtgtgcagcgtgaatctgcacagtatagctagggtgagaaagaacttgaagcagagcatcacggcaactttcggcaagtgaaccaaaggcggagccgagtgaagaaactagagaggacaaggcattgagggcattgatcagagtgtacttgctaggctcacggcgttcctgaacaacttggggatagtccttgagcacatcgtttataagccacttggctgccgtaaggcgactgttctcacggagcgagtcgcgaccgacggtttcctcgagaatacttccaacaactttcctcgtcataagcagtcggaaccggttgtttgttattgttgggtggttcagaagatcgaacagtaggtgatttgcgatctggtcataccgctcttccacaagcttctcgcccaaaatccgtagaacgtactttgtacaaacccgcgatccccgcttgagctcggtagaaaagtgtgcttcaaagtattggtgcgataggtgcttcaagagacagggaggtaaaaagtttaaccgngcttcacttttttggagcgagggatttggaatttaacctaatcttattctttcgggcttgggcaaggctttttgatgccttttgcttttgggctcgaggggcataattgaaaacttacatgtnttttctaggccccacgaaaagccccaacgcttttaacagcccaagggtataagactttctacacgtttagggatcaatctcttttatcaaaaaggtttgggaatttgaaccgtgtgacccccaaggctttaccgggggtgcgccgttaaaattggtgccaattggaccacccaacctggaaaaaaacacttaaccggggttcgtttaataaattcaacccgggagaatcctcccaaaaaaaagaggggatgtgtattttttttttcttccccggttgtaaaatccttttggggggg

SEQ ID NO: 3066 - DNA, 2239 bp, Emericella nidulans
aatgttcaataggaatgattcttatcaagcgattttaacagcctggctaggtacatcttctgctatgtagaataacagcatcaaaccctaggtagccagcggtgcttccacagtctacgaaccagagaagcacagaagagaaggtattacagtatttctttgaagatcaacatatggttgacgcagtactggactagtacctgcaaggatatacgtatacacccctaaacaaacccgctttgcctcactgcgctcccgcactgcatgattgctagccttttataggtagccttgcgcaaatttttattatcgtccggagacaaaggaatatcgcgctaataattccaaaagccctaatcccaacactaacccgatacctgcattttacactcgtgctggggacaatagacggcggcggcgcatcgcaactagagttacctgcacccttctcgttgaggataaaatcaaccaaaccaccagtcagagtccccatttgtttctcagaggcgctacgatcgaacatgtcgtagctctcgtggcggaaagtggggacattaagtggttttagagggtgatctctttacttcattgtaccgtggacaaagagagaacgtgcagataaatctaggggatgagatgtaatcacctcttaataccagatgcttctatgctaacttgggcaaaataatgtgttcctggtatgtttggtgatagtggagcagagacatatgttagaataatcgggcgacatttcgtggaaatgacaatcaaccttgttagaataattatcagtacccatggtacatattctgtcagcaactgagaactgaagtatataatgcaggaacgaaggcatggatctgtatttatcaccccgttaagtgatactatcggctgcgctgctcagcttcagaatggtagcaatcaaactcgaaccggtgttccttagttggagaatgagtatagtaccagctctacacgtgagctcacgaagcggaagcctgaatacagagtgcttgggatatataccagcaaagggtggtaaactcagccctaccaatcctggtaatagtctcagggtcaaccagcctaatacacaatataccttaatatcttgacgagatgttgagaagcttcaaagcagatatgcaatgctcacaggaactgaataggtttcgccatgacatctttctgactggcagacgcggagtcgtttactatgtgcgggacatgaaatacgcctctaataagattgagatatatccctcgtccaatggtccacgaggttgaagtctcaaccctcaagcaccgtttccggtacctagatgatcttgaaaagagagcccattgttcgaaatctcagcgacaaatccgagtcggtttggagcaaccacttagaatatccacatctttgagtccctctttatattaggcctctctatttggtaaattgtcttagcagaagggcttaatctcagcgatgttaatgatgttgggtagatcggtgtagctgaaagttgtgtacaggattagataatagtggcgcagttgctgatcatgtgcaggcttcctggatattgggctgaaggatgagttgagcctcggatcgcaaagctgtgcaaaggtgtttaaagagtcttgttagcatgtaaagtagacttagggcagtcaaggtgatgcgccctgggtaggatctggagcattgctgatgagacccaagcccggggagccttcgcttgtagtccactctcggtaatctaactgacaatagctactcacgcagggttggccgccaacatatataaactggttaagagctctacaaggatactacgctggccgggcaaacgctggggctaaacggctagcagcagattacaccagattacaccatcttactcaccaaagactgtctgagcctatgccaaagcacctggagcgtgcccgtgaaaatagttatacgatatcatttgttcaattggggctctgctgtgtcttaagcgactaccccgatttttgggcatctctgacgcaatacaaccctgctaaacttcaaaacgctctctgaaaaaataacagccctgcttctagaaagtaagaaaagggaaacgtggggttaagatttacccattacgtattatgaattcagcagtgtcaggaaggtttggtgagctcgaagctccttgcgcacataaataatcatcacggtggacagcagccatcacggcaactatagacg

SEQ ID NO: 3067 - DNA, 575 bp, Emericella nidulans
aaaatattctcgaggtagtcgccgtttcctagaagatcgagccgtttgcgttgtgcggcaaaggctttcggcagatcttgcgccaggagactccgtagagccgctgagatggttctccacacatcaaggtggacggggaatggcgcggtatgtatagataggagggcatcgttccaatgtttttggagtcgggcttcgagttcgttttctgggcgcgggagagagctgtccccctcaagctgagggtcggctaagacgaggaggcggaagatcgctggctctatgcctggcgttgagcgtggtgtgaggatgtgttctgagggtgatgaatgaatgcgctgggacgctgtgaggcattgtagctgttcagagggagaggatatgcgcagccagagaagacggggtagaggtacagatagacggtagcggtaacggctagtgggaggaggctgaggagaagccgaaggaggatccaacgaagggacatggaggcgacatgatgtagaagaataatgatatctattataatagcaggtgcaatgttcgaccgctgcagaatgtacagggaagaagat

SEQ ID NO: 3068 - DNA, 579 bp, Emericella nidulans
taattatgttcttcttttgtaaagtttgcgtgaacagacggttttctgtaatacatcggaaataaaagttggacacgagatgtaatcgagtatttttctactgatctgactgtttcggtaattatatatttaggtttatacattcaagtttatacgtgcaagtttagagctaattacgtaggtggacgagaccgatatcgctggaatgaggatgacccatcatttagagttgctcgacttgaatcaccgtttatctgagctagaagctatcagtgccatgttcactttcttacgactcaggcgtccagctccaagactttgtccggaccgtctaggtaggttgcggcttatattcgcatgcgttgctatgccatggtatgttggcaggtgcctgaacggcacgcctttgcgaggcccaggccgagatacccgaatgcaatcacgagcatcgacggctaggcaggcgaggcccagtgcttgccgaccgagacgggatcccatttctgattaactacatagcggcaccgaagcaacaacttggttatatgtttaccaaacagcaaatgtggacctgcaggc

SEQ ID NO: 3069 - DNA, 4386 bp, Emericella nidulans
gtctggagacaggttggcaaccaagtcccagtcagctcaatcacgttcactctctaaatcttcccccttcaggcatgcctttaacaaggttccagagcctatgcatccactttggcccccctcagggttaattcacgtgcggaaccttagtaacgaactcgatttaagaaacgacggcgatcgccaagccaccgcaacggacaacaggaaatcaaagacgccagctgttcaagttattgatgaagaaaatgtgctttccttcttgaagtcttcggatatattgccggctttacgaaaaccatctaaacaggtaatcagtggacgagtgctgcaggcaaaagtaggcaaacggctgatggggcgaggcgcgagctcggacacagacgaggctccgtcccctgatactttacattcagctgtggccaggttatacacatctctgcccagttcaatgagcgcgtttgagcgtggagattacgaggcgcaactttgggcgcataagtatgcgccaagtaccgcgaagcaggttctttgcgctaccaaagaagcacttatgctgcgcgattggctaaatcatcttgttgtgtctagcgttgatgtgggtagttcatccagagataatgagaaagccaaacggaagcaggagaagaagcgcaagagacgaaagagaacagataaattggatggtttcgtggtgttcagcgaagacgagtactcgttgggtgaaatctccggttctgatgatgaattagctggcgatgtgacggtctcgaacaagcgcactgtcatacgaaccggggatctcactttcaacctgaagtctagcagtgaccgcagtcgtatagccaacgcaattcttctaagtggtccgtcgggatgcggtaaaaccgcatcagtatacgcagtggctaaagagatggatttcgaagtctttgaaatcaatgcaggctccagacgcagtgcgaaggatattttagatcggattggtgacatgacgcaaaaccaccttgtgcacaacttgcatgacaaggaaaatgtcaatcaacctttcgggacatcttcgcaggctgaagagctggaagacgcgaagcaaaaccaattgactggattctttatgcctgctaagaaagctggcagaccacagccaaaggctccttcaaaagaaaacgtcatgaagcattcccgaactcagaaacagtctttgatacttctagaagaagcagacatcttgtttgaggaagacaagcagttctggtccggggtccttactttgatcaatcaatcgaagcgcccgattgttataacttgcaatgatgagagccttatcccgcttgatgatatatccttccatgctattctacggtatagggctccttcacaggggttggcggtcgactaccttcttctgatggctgcaagcgaaggtcatatactgcagcggacagcagttgagaggctttattcgagcacccgcaacgatcttcgaaagtctatcatggaactgaattattggtgccagatggccgttggcagcgagaaatccggccttgattggatgattgaccggtggccacaaggtgtagaccttgactcgaacggagacaagcttcgaatgctgagcgcggatacatacgataactacatgggctggtttagccgagacattatgatcagtcccggcttagcaacagagagcgagcttcgggaggaagcattgcactggtggcatttgagtctacaagaggccgatgtcatggaggattcacagcttcaatcattccgagagcccaaaacgagtctttcgaaaattgagcacatcgaaagtctgtgctcgcagtctgaatatatggaatcgcgaagtgtcctcgatctgcttgctgcgccatgctccctggatgcacggatggtaattttatttcccatttcttcttcccttttttcccgataggtctaactgtcccaggatgcaatcgatacatccataccaccgatctcggaaaaacagaagctgaatttcgttgacggttataaactactacatgctgacaaactccctgattacgctaccttgacgttggatattgggagtacgtttcagactcttctgggaagagtattccgcggaacttgtgaagccgattccaaagacatgctagccagcaacatgttggaagctgtttccaagcccaaggcagctgagcctgccaaagagcttctagaagtgctcgtaccgatagcgaagcctgattgtggatatccgccgcccagtggaggcgcagagcttgcgtttgagtatggccaacaatcaattgtcgaagatctcgcgccatatgttcgctcaatagtagcgtttgaccttcgtctcgagaattaccgtagggagcttagcggccttctctccggcgatgcgaaaggtacaaaacgaatgcgaaccactcgtgctagtcgagcagcactcgaaggcggcagtaaagcggagactcggaaagagagatggttctcgccggctgtgaatgttcaacgcattttagccacgggcaacagagaatggcaggatctgctggttcagaacggctattttaccgtgcctgtggcgttggagcaggcgactatggagcgtagtgagctgccttcaggaagtgcaagcgatggatctatataggatagccgtttatagacagtctagtcacccatacaacaatgaaagctagagctataccccagagaacgtcggttggagatgccaagccttgggttgactagcctccgcggtcagccacaacatcgacatcatcccctcaagacttccttgtcacccttcccttatcaacaccgggaaagcaggttctctttcccaggccatctataccttatacttctgttactatcaatcattatatattctaatcaaactactatcagctgtcctgcaactcggccctgtctgcgcatcctgctgcctgtgccttatcgcgtccgaccgagctccgttcctcgcatcgctcctccaccgtgcggcgcatcgctcattccccatgtcattatttgggacgtcgccagatgactccccggcagccgattcagctcggagatccaaaacttctttatttgccgacgagccttcgttcggcaccggcagcagctaattttggcgggtcctctctcttcgcagatgacgatgatttaggttcaccgtggaatagtaacactgccaaacgaacatccaaacaacaattggtcaaaactttgttgccaggactcggatgtacctgaaagctatatcgatgcgtacgacctcgtactgagtgcgggggaaagagcgggcacgggcgttagcctaacgactgttcgagagctattgtctggcggcggactttcggcaacggatcaggccaagatcctcaaccttgttctctccggtgatactgataggtccaacgggctgagtcgtggagagttcaatgttctactagctttgatagggcttgcgcaggaaggtgaagacttaactttcgacaccgtagacgatcgccgcaagagtatgtcctttgcgtccgaagactacattgaaactaacaggcttgcagagcttcctgtaccaaatagctcctatttggatgcgctgcgcgcgaagcaagagtctatcatgcccccttcgcatgagcgtccttccactcctcctgcgcccccaattcccgtacaagaaccgagccccgcgcaatcgcggcgtgctagaggagattccatgggtggcctagatgcagacccatggggtagtccgcagctacatcgtggccatgctcacactcagcgcgaagccgagcgcggcatgctgaatgggtatggcagcgttcgatcagcaacaaacgcctggtccaagactggtgactcggtaaatccagatgcaccctctaattcgagctacacaaatggccggtctgagattcgcagttccaatagcgccgattacgggtggggtgaccattttgcgcaatcatcacagggcgggagcctcggagggccagttcagcctggtctcggagattttggacggcagggatcggtcggggcgagcctaatcccagtcgacagtcactgaacattgaccgggccataaacaaccatgtcaaacaagtggtgacagtaacacttctcccacagaagaaggggttgttcatgtttcagcatcgcaattacgaggttaaatcggcccgtcgcgggagcacagttgttccacgttatagtgattttgtctggctttttgattgccctcacaaacgatacccattcccccaactacctctacttccaccgaaacgacaagcaggtaagtcgcaagaaagcatgttcaagctctcctctccgcgtctcactataaaagcatgc

SEQ ID NO: 3070 - DNA, 1773 bp, Emericella nidulans
gatacccttgaagtgaagaacagaaacaagaaagacactttcttccatataccgagggtttgggtataagcgaagacgccaatcaaaacaagtgaaaaaagcccccttttgcaatacaatcgtgtcatcaacggcatcaagataaaaacacatgtagaatggatatatcattcacaaggcaataagtggtcgttagaaacatattacgccgcgaacagtcccctacaggggtagtcactaagcatggcggagccggctcagtcagatgagttcaccgttgcaccgtatttgtggtgcccgtctcaactgatgattgtgtaacactagaaccagacgtagtcgatgcgttcacactcgacgatgccacttgtgccctgagggtggctacctccgacttgagtccatttagttcctcatgaactgagcgaatgtactcccagagcttttcctcccgttcccgttgctgatcgaagacgctcggatcgtgagaggtatggacgttatgcgttgatgctgcttcggggattgtcttggaagtcaaagaaccaccgtgattactcgagtggctatgtgatggcgtatgtttagcggcggaaccggaagcctgtacggagctttgcgagtggagggaaaaacgaggctcagaagaccccaagccaggtggcggcggaagttgaggggccccgggctgaggtggtggaaggcctaagctcggtgcagtgtggttggaaagagaagcctgagaggggcctgtacgattgtatgattgttgagggaatggatgtgagattccagcagagtgggcgcgatggtgcatttgtagaccgttttccggcccgtgtcctaattggtgggaagatagtgcgttcggtgagagcggttcttggactttcagccatgtttgaaggcgcaaaagcagaggagccagatggctggtttgtcgaggggaacgccatattgccggactgagatactgggagaaggggaggcactagaaccgccatgacttgtaggaggagggaaaagcccgccaggcgacggtctgctcgcggcaattggagggtaagtgctaggttgacgcgcttgatagctgcttacgctgattgagcgaacggcataattcgagggcacatcatgcttctttatgctcggcatgttgtaacgtcgttcatcatcttcatccatgcattccggttcggcgtaaactaccccatccatagcctctttggcaccagcagctgctgcatcaccatactcatcttagggtgcgtaacttaccatgctggccctacgaccagcacaggcaccttggcccttattatgactcgcaagggcctcaccgtatgcaaacctgtgttcgtactttggacatatatggtggtcgtcacctatatgaatttcttggatactttttttagcatactcaatcctctgaaagctttacttacagtgttgagtcttacataccgctttcttatcttctataatgcggttattttctttgatgtgctttatttaattttttatatagctgttctttttttcctttattgttctaaactcttgttgtgtataaaataatgtatgattgtgatatctttattttaatattatatatttttttttttattttgtgttatttccactcccctcccctatcgttaaatctttattatcattttctttttctttttttagaattcttttatgctataggattttgttatttttattatgtattttatttttatttatttatattattatattttt

SEQ ID NO: 3071 - DNA, 1324 bp, Emericella nidulans
gggcgggctcccgctccgtgttgcgtgggggggcgcttgctggtcggtcatggtgccccgccctttcaggggcgggagcttcggtggtggattgccgcctgtccgcctaaggcagtgtattttaggccagcgctctgggctccggagattctgcttagtgttgtccgcttcagtggtctgcgttgtcaggttatgatatagtcatgcatcttgagccagagaacttagatactgcctctctatcgccgccttgggcttagcatcacctgacgtcctggaaaagtcaaccagggctgaagatacctcaaactagggtacgtatgatctaagacaggagataaaacgatatatttggattggtactgaatcctattttataccaaccgggaaaaaaacaatgtatgaaatggagaagacactccaatccatccagtgggtgtggacaatcataccaaggagaagaaagtctggaatttgtcgaatttcgagtcttcaattccaaacacagtttgtaatgagaacagaaaggagagcaagagccctcggaattgcatcaccataccaagacaaaccaaatctgtttatattgatttgagtgggcaagaaagcaactttgcgtgttgctttgcgtaaagaaaagaaagtagaaaatctcaaaagctagacatgaaggaaaacagaaaatgacaatcatcccaataacagtaatgggtccgttacgtttcggtcatattatgtatacgaggttcgcatcacacaatcggagtcttgcgcttttcggcgctcgacagcacaagcataggagtcttgcgcctatccgtaccctgggctaccgtcttctgaccagcgacgacagcagcaatggatggcgatccattctcgggtgaagggtgttctgcgaacttgcctgcaaaatacccgtctttctcgttgagggagtttgtgctaaacggactgtccggcgacttgcgctcccgggaggatttctccttcctctcagagccaatggcaccgttggcaacagcgcgcagactgcctagactgggtttgctcgaaaggctagcactgcgaaccgtggcatcgtcattatcggagaaggtgaattctttctcgcttgcaggagtgttgggtgcccccgctgctgtgtcctaggcttcgagaatctccgcggcgctcgatacctgcacgcaccaagttatggacggcacggcgacgctgacgggtggcaaaatttttgcttccttcgagccttgaggttggtttagcaactagttcctcaagcgacggcggggcccagtttgaacgacgggtgcttcccacacga

SEQ ID NO: 3072 - DNA, 782 bp, Emericella nidulans
cagaccctgctgccaacaagaagaaggtcaagaaggacgtcagcccgaaaattgggaagcgaaacgacatcggaaactcaggaagaagaggaggaagagttgagcagcggagacgaggattttgcagagtctcaagatggtgacggagggtcagaagccagcgagcttgacgacgctgaaactcataagaaagatatcgaggcccttaaagagaaggacccggaattctacaaatatctccaggagaacgatgccgagctgctcgaattcggtgaccttgcagaggttgacgcgctgagcgaaggagaggacgagcaggacgaggagccggctaagaagaagaaaaaggcagcaaaggaggaggaaccggcttctaacctaacggttgcatcggtgcagaaatggcagaagctcatggaagaacagcactctattcgcgcaatgcgacaggcagtgctcgccttccgtgccgcggcgtatctcgacgacccagatgcccaggagcaaaagtactccatctctgactcaaacgtgtaccaccaagtccttgtcacggcacttaacaatgttcccaaggttctttcgcatcatcttcctgtcaaggagaccgcgtctggcaaagttcgggtttcactagactcaaagaagttcaagactctcacccccctcatcaagtcgcacacctcctctgtccagaagaagcctgcgcacctctccgacgagcaaaccctcataatgaaatctcttcgatcgaacccatgcttccctacctcctgggattc

SEQ ID NO: 3073 - DNA, 1799 bp, Emericella nidulans
gatctcgaagggtccgagtcctgcaatggaatttgatggtcgagctatatcagatctgagatgtgtaacagattaacgaccgttaacattcaagactattgcaagccatccgttgatccggcggcgtcagaagcacactgtagtcagtcaagtagtgactgcagcggccacagtgataatgtaagatgagtctgagtctatttttagtcttctcgagcgtagtcatgaagacagctcgagtcagactatgcggtccgggacgaggacgagcatacttctgaatacgatcgcccgtaagagtcctcaaaatcttgccacggcattgagcaatcagccgttcgtgcaacagcgtccctgaagcagatgtggtttactgcttcgacagaggtggtccagatctcggctccagagcttgtaaggtctgataacggcagtttaagagggctgtatacatgctacacggcagtgctcatgccatatcgagtaagggaaggcaaattgtggatacacggatcggaggattcacaaggatcgaatagctgggtgagcagatgacccactgtcggtggatatagacagggccgcaaggcatgaaggaaagcctggacaggggccaccacgaagagcgggagcgtcattgggcaaaggtaagcgctcaacacaaagctgaaacaaggggcaaatacttcacgactgtttctggcgccagtttgatgatgtttgctctgccttggcatgctcggctccaccagagctcgactcctgactcgcactcacattcttggcactcggcttgggtaacctgacttccaggctgacaactgacatagacagcacggagtggtagcagttgtactactccttggtcccgggtggccctcactacccgaacttggacaaatctctagtaatatttctgtgctctggaaaagtatctgtctaggtgttgaggatgcaatcgccctcccagcttgagcagagcttgccattgagttacaagagtatatggcctctccagttggtgggccgggcgcgggcctgaggggatgctcttaaggggtaggtgcggttgtcgatccggcggtcttccagtaccgcattacgatccctaacggtcatgatgattattgttatcatggtctggcgaattctcaagtcttccaatatggcatgtaatttccgcaagacctgtgattagacctcgtttatgtgcttccagattatattttcgcgctcttaatattgggtgctctattttgttctttccaaaattcgctttttacagtggcccttgcgacttgaacgcttaaagactcgaagggaggccgcgcttctccagtccgtactctgtggactggacggagtatagcttcaagctatgttcgtgggtagcctaacccaaaaaggaggagcatccgacagtaactcagaaactcagtgtgctagactgtaagcttgctcagtcaacagatctgctcactactctcaaatcagaaaggacttcagtcgctgtctcttcgatggatccgggacgaggccccactacctctgtgatccgttgacgtatgtgacaaagccttacgcgagtatcttactatagcagccaaatcccagtatttttggaaaggacctggtatagtcatgtatcggtccctagcgctgtctccgcttttccttgctccagagtctggtctctagcctgacgcaggccaggacggcctctttttgcgctgtcggtgcgcctttggtagccagcctctgcagtagtgggcaggtgaccgggccagtcagaaagagag

SEQ ID NO: 3074 - DNA, 1190 bp, Emericella nidulans
ggatgcccttgactacttgttggactatcctatcgcgccatcacgaataactattttcatgacaattgccgaggacagcgcgtggggcaacatatttcgagcacaggggattaatgtgtttgttcttgaagatcgacaggcaaccacgcagaatcgcgatgcagctatgacagcagcgaccgattatgatattttgaggtggagaacggaggaagaggccagggaattttatggagagttgtaccagcctggacgcgtaactaatacagagaggaattggagaaggagaaaggggctttcctgatggcttatgtataattaacgcaaaccagcattccgcaggtatgcagccaaatatatgtctagaccctcagtgaagacccaagtttgccgtcattccagttcagccggagactggagcagatttgtattgcattctggctctatttcgcaaaatgtcctttacctacacattctaatgaaaactaacactgggaaggcaaattctttctcaacgtactacttacttaagtagtgctggaggaattaagttgcctgctgcagaaatacactcgtcgctttgtgaaccaaattatatcgacatttcgtcagctccgcaagataaaggtgatgcgaatcgtccatgctagtactgtgatgagcagaaatgcccgggtttgtgacttgccgtggccgaactaagacacagaactcagcttatgaccggatacatagtcatgctatgcccatcacaaagctgacttccatcccccctctgcctcaaaaaccgcccctacagcctctgccacggaaagaagatgctcgtcatgaaacctggccgccacaagtgacaacccaattggcatgccgttggttccttgaaatccggggatattcacgacgggggtgtggagcgccttgtcaccaacaaacgttagccagtctcgtagtctggaggcttagcagtgggtacgtaccgtccacatcccattaaacgctgcactgcccgtcctcagagtcccctcaggcgcttcatcgggtacgctgggtgtcagcagcgcagagtagcgatttgcgatgtcatcaataaccggtctaagcgtccccacgccatcaaaagcagcgatttcttgcgcatgtgtccacccgttgatattctcaacctggttaccaagaagggctgggctttt

SEQ ID NO: 3075 - DNA, 2146 bp, Emericella nidulans
agataaaaagaacgaatgaaggagaaggaaaggaagtagcaaaaaggtagaatgggaaccaagtgcaaaggaggatgttaacaaaagaaattaggaggaggaagaggatctatattttaggtgaccacccgatatcagtacgggacagaaagagatggtcttatacttggtattaagggctccgaggttacctagaaagaagggtacgagaggcagtccatgcggataggttgccacatctaaggaaatccacaaaaaaaccgagattcatggccaaacagacaagccaggtggggaccccaggtacagtgtctcagccccaagaatctaggaaacgagccagagcatagtgttcatatcaaattcaaccgtgtggaagtccggacgaaaagcctattatgtgttgaggacggcgagttaggggatgcctaatgtatgaaagtgggttttcgaaaacgagagggcagtgggtatctggcgaaaacgaggatgttgttcaaaattagaaatgttatccacacgggctatagcaagtaagaatagtaagagctgcgcggtatgtgagatgagagttgggtggtttatgcctttggaagtcacacatggcacaacagtccacaatgctatgagccaacatgactctatctgacacggacgaaaagtggtatgaagactgtggtatagtactctgtattaaatggcagttctggatctgcactatatcaaatctggcctcccagtgctcttattccgtcagtgcctcaggttcttatgctactcaggatatttctccagcatccctggcaggcttacgcgtgtgctcgagactaggttccagacattttggacaccattaccaataatcttgcaatctttgtaacaatagtacccacagggctagacagcctttttaaatcccgtaatattgatgtttgacgagcagctagcacgatcttcagagagcctgtagttttgaccagaacgagaaagctatgccttggctaataaccagagcgattcaagtgatttaagctggtacccgcaaatctgagttctccgataagatcatctcctgatctagaatatatccaagcagaaaattgtagctggatccaagctagttacttggtagtatgtcctcccaatgatgctatatgcaaagccctagaccccagtcgccagctgctctccaactttacaagcccttgctcatccagtcaatcaacttggtcgaactgctcacacaagctatgaatggtcttagtgaggtacacatatctaaattgtttatctcgtagaacagcagcgtgagccctaactccgacagttgcctgcgatcttttgagtcctactttttgcccggatcgtgttttagtagggtataacgaattgacatcttatagctgtgttggaactttaaggcaaacatcttaagctttgcaatgtcctgctttctctagtgcccttgcaaatgtccttttctgagttcgtcttatcaatccgtatcgccgcagacttcgccttcggaacaggtatagtcaacgtaatcgctgggctcatactcaccaaatgaacgaccgtcgtcactgtcggatagctagactcgctgccactgatacaaagactgccgtcattagacgctctcttattattatgctcgatctccctgcaatcaaagattttcactggggttggcgtccgactcccgagaaactgttgactgcttgtgtccagtaggcgttgacgcctggttattgaagacgatacacaatgataaagtttgtactgcctaagactaacccaattcaaaagcccaatcgatccctgggagagagtgactaggaagaagtgggcggccttttttaaagctacaccaaaagctcgctcaatcttcccgagaagtgcgatgctctggaatggacaacccagaaatggaagacataggtaggatagttgggtagaatgcggggtttgggattgagttagatgattggcagtcccggcagtttgctcaaccagactatctgacaatagggggagcgaaagcgctttgaaccaaataaaagtaaaacggtcaaaggaagagacatcacaaaaggggattagacaacacagtttacagagagttggaacttgcccggatcgt

SEQ ID NO: 3076 - DNA, 736 bp, Emericella nidulans
accttttgacggacccaaagctgaatgtcatttttgacctctatttcagtatgctgcaatggtgggctctcgtactgccgcatgtgctaatgtacgtcagtgtacacatattccagcagacttgaagttggctcgccccggttcagcacacctggaagtttcttcatttatgtgctgttcgtggcgctgattattatggtaagtcctgattatcttgatttccctgatagaatatatctaccacataaatttacacttctctccctctcatggtgcttcatcggcccccactccatcttccataccctgcaaacctcgcatatctgcccgcccagccccattctagctgaagcggttcctggaaacgaggaagattacccctgcatcgcatatggtacctacttcttgatccttatagggccatgtacgtgtaggcttggtgggactaccagtgagatagcctgcgtaatgaatgtttacgcaggtggttttggtgccctacattttataatcttgtgcataacatttacctgacttcacgtaatatatgtactctcttcattcatgaaaagccatcagtgtaccccaattcatgctaacgacctgaagctaactgcagggttctatcttggagccggggttttcacaaatggtgagcttagtacgtgattcctgatcataaggagctaatccccagcagcgctgatatcggcactcgaatacacatattcccagg

SEQ ID NO: 3077 - DNA, 3559 bp, Emericella nidulans
tgagttccgtgcgcatcatggtttgtccgttccatgacgccgtgttatcgagtgttgtcttgagaccctgtgcctcatcaagcgtcgagttggggttcttgtactcgaaggagagggaaaggtagtgcgctgtttcctcggaaccgtggatgtaccattggtacggggggatttgtgaggaccaggaccctttgggatagtcatattagctcagaagagagagagaaagcacaggagaaggtacggagggaaggtacatttgtcaaagtcggcgacggtataactctcgttgaacaggccgctccagacggtagctgctgaggcgaggggtgtcaacgttgaaagcagggggaggatcgaggtggacttcattttctgcgactgatagattgactgcttggctttcttggtttgaggcgatttcaaggcgaagatggggttttatagctggtgggaaatatgtgtgtttcaccgtgtttcatgtagatcgctccagctgtccgtctccttctccttccgcggcggatctagcacggatccgtggcggggatgaggccggtaggatgctgatgattgacagatgtttattgtaaattaagccttgtctacttcgtacaagagttcttctgagttgcttcatcttattacatatagagcttatatactccacgaatacaaatctgtcttcaccgctacaggactatgactcatagaacaaggtagtacttgccttcacattctaacacatagccatatcagaattattgtcagtgctcttgggcttcaattgcttcctctaattccattgccataaggctctatcgatctcctccgcccgccaggacctttttcttgtcacaggttcaatttcagtgcagataaactaacaagtgggatttcctctactcaactgccgggtattcactccgttgtttctacctccgcaagatgaatccgtgattcgagacaagtcggaggttcctccgttgcgggccggggaggcctgtgacgatcctcactaatccggaacggcgtagaggcgttcattttagcgtccataagcacaattctgcaagatttaatgcacccagcgctctttgagctctactcagtggtaaggctggatcctgcagaaactggagggatgttggctggtagtggtgacggtgcggggaaaggcaaatgttctagggctaagtaaagcaggtgatctttgtacggattatatttcctagccaaatcaaacggccaggttagatgaaaatacaagtataatatatacattgaacagtcgtacggtcacacggtcaaatcaatataactgactatcctaacagcgaaagcaataagatattcattactcatgacctcggcattaaccatatccatccgccttatcgcaacatacttagtccagctaggctccgtcctaaccaagcagcccctgccctttcttcagacgtagacactaccaactctccggcccaaacttcacctccgtcacctgcacagccgtccccgccgcatccatcgtattcgccgcaatgttcgtcccccaccaggatgggaactccgtgttggtcaagttcaaggtaaggaaaatcaagatggtgcacagggcaaggccacatctagaccggcggaaagaacatagttgtattgcatccaccagccgcgccaacggtcgcggatccacttgttgaagatgaagccgataatgccccaggacagataattgagcggcgtggcaggagggataaagctagatccaccgaagatgatgggcgcattgagaaggcgcacgtagcgggcgtacttggtgttccgaagaagcttggctgcgatgtagatggcgacggggagggcggcaccggcgagccagaaccattggagactagcgtagagttggccaggagagaacatgcgggcggggccgatggtgccccagatgatggaggcgttgaagaagacgcggccgttgggacaggtgtagcggttcggctgatcgagggtgcagacgctcgaaatggcgccgagagcccagttcatgacgcagatctggacaatcgatgaccacaggcaagatatcatctgtgctgcaaaggtcacccgcggaggaatcttcatgtagtggccgagcttcatgtcctggcagaagtaaaggccctggtacatgctgatgtacccataagttttgaagagcatcattgccatcgggcggccaggctgcatgtacccaatcacaaactcggtgataacgttgagaccgatctgaatgttggtcgaggcttggataataccgcaaggcacgaaccatactgcacccatgatcagggcaatgaagaaggcccaccagctgagattggtcgggtagccgagtgtgacaccaagagccattccgatcataataagtgtgatagcgccgtaccaccataacggaacaggcttgaatcgagccatgagccgtgcatggacatcctcgtcctcatgaccgatctgacggaaccgcacccagatgtcttttccgtggaacaggatggcatggataagcacagcaatgatggtggcaaaggacagcccataggcgagagagaaggtggttgataggaacagaggagagtaagcttcgtacttggccttgtccagggtcatctgcggggtaagaatacgcgtaacattgtagacttgacccgtgttgtcgtagctatttgagtcgctgatgggcaggtacttggcccagtgagtgccagtgtagtgcagagccgtggtgacgacccaaaaaagatgaacatgcccagcttagtgttggcaattccgtgccagggcgcgatgagcgggctaaagttgaatcccgaaatctgagtccagtcaaaagtcatgggaatcagcgaaaggccggtccagccgccgaacaactgattgatgaccacgttgttcggcttgatccaagtcacccaggcaaaaacgctcaggaatggggcaatgtatcccggaaaccaataccaaagaaaagatccaatcagacagtacagaaacatacggtatctgccaattgtccagccagagactttgcttgggtcgggccgacttcggtcatggagcgcggtgaaaagcgcactattgatcagcgtcgacggccagatcattgcagccggtgtaaccaagaaccggtggaagaagccagccattccaaagcccagcatctgggtcgagatgcacatgaagatctcaaacgcccagtcaaagcgttgcttgtagaaggcgcgctgggcgagcagaacatcggtcgcgtaggccgcaccaccgccaaaggtggcattggccatgatgaccgcaatggcatgctccttcttactataaggtccaggatttaaattgacactcattccaaacatcctgattgtcttatggggcatgaccttggcccacgcaacgctcaatggggtaggcgacgacctgggcgacatacgatggaatgacgatgtacggctggcgcatggagaagagcatgttgagtgcagaccgactgtagctaagaacatgcaatggccaggcgcgg

SEQ ID NO: 3078 - DNA, 1682 bp, Emericella nidulans
gggggaggagaggataattgagcggcgttcttttcccgattgttcactcgtcttggcttggcgcttgaggtcggggcgttcctacgtaatctaagaaaaggccgcaattagatgaacaggcattttaagcatccctgcggcggtactagatacaataaatcgaatggcatttcttcttgttactattctggtgacttacgaagctttatttacccgctcttgcaactgcagtccggtacttacggcgacgcacctcttgaggcccatgccgctggagcctgggcacagtgccctgctgaagctcgggctatttctgcagttcccccatgttctcgagacctgccagaatgccgcatggttacacatgccgttgacatcctacgtaccattttcatctggtacctttaccccttgatgctcttgacatcccttaccgagttctttcacagttacgccttcataactggacctcaccagccttgcaaggctgccaagatcgacctcattttattggagatgaacaaatttgacccgcttactgtgggcctgcccagacgctagactagattgggcgttttgtcatcacggggctcagctaatcgggaaattggacccgtccggccaaggcggttccaaccagaggccggtaaacagtgattcaaacataagaggttcacaaccacaggttcattatgcaacgctctccctgcagtcaatctgcataaatgtcagattagcccaagtagtacaatgagatgctggttcagactacgattcgtcaagacctcagaagctgagaaaacgaatgcattccatgaagataaaaggagatatatctcggctaatagaacaacatataggcacctgcacgcgcaaaggaatagcaaacatcaaggcgaacatagaagaaaaagaaaacaaaacaaaaacaaagagaaggtaaagacaaaaagtcaataccgaatacagaaaatccctcattgcatgcgcggagctacgatttccactggagacgcagtaatgcttagtctccaagaggcatcccctccacctggtcacccagtgaccgccagttgtcagcttgcagctccgagtacttgactcgctcttgactccaatcctgatgaagccggctgatgtgatactggctctgttggaagtagataagctcgtctcggatgcactctttgatgaacactccacgcgcatgctgttgtacaattgattctttgtcctacagaatatgttagccaaccaaccttctgggccacggggcaaatagtacgaaccttgaaaatcgactcctcgaccttttcgatttcacctggcttgacggtcccctgtggtcgcgctcgtaggtcttggagcttgcgttcattcgcctcaattcgcctttctaactgggggatgttgttacgggcatatcggtcccgtcggtcaaacatctcccgcacactcactaggctgtctcgctgacgtttcaaatcttccaacactccgtcttcccacgcccgcgcctcgtcttctagcagactttgactggcggacaagtgtcttgccgtggccttgatcccttcattcagtagaggcacgtcgttcgtatctaacgcgtatctgtcccgagtcatttctgtgagggtagcagggcaagcgaaaaacgcagatggtcacagcaaggcctt

SEQ ID NO: 3079 - DNA, 699 bp, Emericella nidulans
ggagctgttcggggcgacctgcgagtatggccaaggccagccagctgagacactacctgcaagatccaggagtagatgatcctgcgaagcatgacggggcctagaccattgaacacttgtattgatatactaccatagcgccggcacccaagtcacattctaacgccgacattgtatcttgttacctaactccagctctgcctacgtaaaaagaccatgactcgcccaacctcgaacctcggcgattcaatagtttccagcgccacaaatcctccctcgaggagaaggttgtcgaagcgagtcagagaatcgggttttgtatcctgaagggaaggtttggacgaacatagctgctattattattcttctgtggccgacggtggcagcgccaatatcagacttcgagagaccagatacggacccaggctgggtcgcaaagctaccgtagctcgtttacgggctagtcaaaacaatatcaatgtttcatacctcaaagatacggaatatgagactcgttcaatgattcgctttgcgtagctgttgagcgcatctcgggcgtgcatccatagtcaaacccacagcactgttgaccaattggcctgaattacatttcctgcccacttcacctaaagtttcagaataaattctctcaaagttatactttcgcaggatcagaatcctgttcagctgcctgcgcta

SEQ ID NO: 3080 - DNA, 1075 bp, Emericella nidulans
  unsure (1)..(1075): unsure at all n locations
tataccttctggggttcgttaatcgctaagatggtgaaacacaagggaggcttggtttttcccgcggccgatgccattgtttttccccaagtttttcaacccgccggcttgatcgcagatttcctcaatggcctgaccctttggaagactctggcgactctgttcgccttagctgtggtctacgaccagtgtacgtggcctctggaagcgagtttttgcgagttactgattttctcccagtccgatacatttacctcaagggcgccatcgttggtccagcttggaagctcccgtttatgggaccgttcctccagtctgtcaaccccaaattccacgagtacaaggccaaatgggacagcggcgagctgagctgtgtgtctgttttccacaagtatgtgaccaatacgatctccttccaatccgcaatgtctctaatatgtcgacctttttagggttgtttgtcatcgcattcacttgtgatatggtccgcaagatcttcaactcgnctacttatgtcaagccctgtgtcgtcgatgctgcgcataaactgcttggcaagactaactgggtattcttggatggcaaggaacatgttgacttccgcaagggcttgaacaaccttttcacccgtcaggcgctttcttgctatcttcctcgcatggaggaggtttacaatgactactacgcgcgcttcctcaaaaagtctaagaacaacaactataagccaacgccgtggatgcccgaattccgtgacctgatgtgcgccgtctcttgccgtaccttcgtaggccactacatttccgatgaggccattgataagatttccgtcgactactacaacatcaccgctgcgctggaattggtcaacttcccgatcatcctccctttcaccaagacctggtacggaaagaaggctgcggacatggttcttgacgaatttgccaagtgtgctgccaaaagcagagctcgtatggctgcgggcggagagattagctgcattatggacgcttggatcaaggctcagttggactctgccaaataccgggaaaagattgccaagggtattgaggttgac

SEQ ID NO: 3081 - DNA, 1299 bp, Emericella nidulans
aaatttatggaacaagacacaaattcatgataattacatgtttccagtcagagtatcttctgttatcagccagaaccatgccgaccctttttgcgcctatcctgtgccaatgagcaacgccatgtatatatatttttgccattatacatcacctgcttaattctagctttctcatattcacagccgacactgaaaatattctcagacagattctacatggcctataaaacatatccgcttaatattgagcagataaatacctggtagactgaaagggcggtcatgtccccagggcaactctacaccaaactctgtctcgcggctggacacaaggcggctcttgaatcttgtaatggtgtttcatccatagcaagccaaagatcactcagagattgcttacaatttcgaacgaacgccgtcagaatcttgaacgatcttctgcaggatcccgtgactgcggtggcagagtctacagtgttaacccacaggtatctacactctatcaccctgcttatgatccgagaatttaataacagcaaatcttttgttaggcgatcctcgatgtaggaactggtacggggatctgggcgatgtatgtgaccattgccgtgcagcttgtgaggctaatatattatagagatgtcgccgatgcgttcccagccgctagagttactgggttggatctttcgcccattcaacccacatttgtccctccgacctgctcgttcgaaatagatgacgtaaccatgccatggacgtatgatacggaacaatttgacttgatctacgtccgcgagatgttcggctcgatacctgattgggatgcgtttctccggcaatgttgggcctctctacgaccaggtggctacatagaagttgttgagcattcgattacgcccatatgggacgctgataccagcctgggacctatctacgcattatgggagcagacaatggcgcaggttgagcaggtatctggcaggagtttctcgatctggcgtgaaagcgcacaggtgctggagggtagtggcttccaagatattaccaaaagatcttacaaatggcctattagcgggtgcgtcacctactgatttatcttcataagccgtaactaatactggccacatagatggaacacagatcctcgattgcgcgagttaggccgactaaatcaacttcggcttctccaggcgatggaagacccatttcttcgccaaataacctccaccatggcatggccgtgcggtgcgagcatccatgtgatagaaaggagacgatagaccatcagagatgagcagc

SEQ ID NO: 3082 - DNA, 1330 bp, Emericella nidulans
gaccttccgtcgactgtatgacacagccggtcttggtgacgcgactgagattctaacgggcttccatcggcttgcgctttacgagatgagcaaagccgcagaggttgaaagcgaagttgtcaaccagctagtagggctgcgcaacgatctgcagaagaaaaccaaagagatcaaggcactggccggggattttcgcaactcggttgacaaagaagttgatgctactcgaaagacggtccgacatttgcaagaagccttaggcctagtcgatactgatccatcggctacgtctggcaagggagatcctttcattgtccgcctcagcgtcgagaagcaaatagagaagcaaattgaggaggaaaactacctccatcgggtgcgtccactgtccttggtatatttcgttttctaatgtccatactaggcctatttgaaccttgagagctctggtcgtgagcttgaatcaattgtggtaggcgaaatccagaaggcttacaacgcctatgccggtattatgaagcgggaggcagaccacacgctcgacacggtagacaagcttcgcgcgggcccaatctcaatgccgcatgatcatgaatggaacgcatttgtcgcaaatacggacgaaatggtggacccgcgtatccgaatccgtgacgttgaaagcattacgtatcccggcaaggatcatccggctgctgcagaagtcaggtcagggatgctggaacgcaagagcaagtatctgaagagctatgctcctggatggttcgtctgcttacccgttggactgctcgatgtgctaatcctgctgcaggtatgttttgtcaccgactcacctccatgagtttaagtcggcggatagggttgcatggcagacaccagtaatgtcattataccttccagaacagaaacttggatcgcattcgcaaccggactcgacatcgcacaagttcatgctgaaaggacggcaaacgggaacgatgcacgagggtcactcctgggtatttagagcggagtcccacaaaagaatgataacctggtacgaggatattgatggaatgatcatatgacaggagaggcacgatatgcgtacgtcaggcgacatgtacgtaccgtcagtggtgccagtttccgaagcagcagtgacggagtattgaatgaagacgaagccgatcggaccccatactctgctggatcagttgtgatgcaacaggaacgtcctacatctcagcgccaaccaggtggcatgttacaccagccctgtacaaatcgatcgtcaccaacacgatccactgtctccatcaagcggagagagctcggagagagagatctg

SEQ ID NO: 3083 - DNA, 3542 bp, Emericella nidulans
cctttcgttcatctcatgagcctgggattccaatcatccttatatttcctaacggctttctggttgggtgcggtgtggcctgtctcctactactcccctcggttacaatcattctttttcatcctcttcggaaaaaatctgatttgccattgatcaatcccggaaaggggcgcatcggtatactacgagggtatcgctcacggaagacatttaccacagagctaccgagattagttgcagatgggctttccaaggtactcatctatcctccaaatagtagtaaccgctgagcccatagataggcgagtgcctttcggatcgcagccccagatggagtcaacatcgtacttgctccatcgtatgcacatgagatcgcggagcatcctgacttgaaccccggcccaatcgctggagacgagttcaattcccatattaatggattcgaggtgtttgcacaactgggaaccagtgatgtcatctctgagtctgtgaggacgagactgacccggcagctgagtaagtgttcgtcctagaatagcgtcacctcattgcttctcgccttcggatgaaccatattgatataccaaatctcttagcaaaattgacgccgcttctcactagcgagactccccttcttctacaatcccaatggaaagatgcaccaggtatctagtccatcagtagtccgcccgcttttgtcacacaacctctactgatacctcgcactagactgggtggaggtgagcccgcatgagacggctctgtttattctgtcgcggctctcttctctcgtcttcgttggcgatgacctcgggcgcaacccggattggatacgcatcctaacatcatacaacaccgaggcttttgcagcagccgaagagctcaacctctggcctcagatacttcgacccctcatcgcccgtctaaaaccatcgtgccgccagcttcgtcgatatatccgtgatgcacgtgcgcttcttgtcccagtccttgagcaacggcgccatgcccagagccagggtgatcgaagggagtataacgacgcgatagaatggctcgacgagacgtctcgcagtacaggtcaaccctatgatcctatattatcccaaatgctccttgccatcggctctttccatacctccagtgacctcctggggcaggtcctccttgacctctgcatgagaccagattggaaagttctggtcagggagcttcggaaagaaatcatatcctcgctacagggagaggggtgggataagatcgctttgaacaaccttaaactgatggacagtgtgctgaaagagtctcaacgtttaaagccagcctcaactggtaagcttcctctatcaccctcttttcacaagttgatcccctccttttctaacctggccatgcatacagtaacgatggggcgatacgcctcgcgcgagatcacactctcagacggaacaataatccccaaaggctcaacagtctttatcgccaacgtggccatgcgagactccaatatctaccccgaccctgatgatttcgttcctgaccgttttaccactcggcgtgaaaagggcgatagttccgcctacctggtttcggcttccccagaacatctaggctttggccttggtcgacacgcgtgccctggaagattctttgccgccaacgagctgaagattgtcttgtcccatatgcttatgaaatacgacattaaacttcctgataatggcgcggttgcacccagcaagtcggggatcttcttagccacgaatcccgatgctaggatctgtgtccgccgaaggaaggaggagatagtgatctgaaattgacctctagtcgtttcttttattattcttagctgtcttctgtccgctattgggttgttggaaaattattggggtgcttcgcaggacgcttgttgacgcgaacaaataatgattataataataaaatacgatgctttcaccatagtggagacgatcgcggctttttgagtactgtgtcaaatagatcttctggtaagatacctatgcgcatcacgctatccatgccgttgctgatcagttgtaggtttgcgtggacgcggacgtggcgtgcgctcaactcgctccatgcagcaataattgcaggctgctgccttcatgattctggtcttgaagtctggcccgatattgtcctgggatgggcatacaactcttagccacgcgctcgctgtggatcagagtcaaaaagacgcgaacacgcaaggagccgtcgccgaatctagaggcatgcagcacggattcttccatcttcagtcctccagaattccaaacaccgaggcataagtggcggtctgtgttcgtccatagcatttgaactccttgcggaagtatcatcccaattcaatcctgtttgcttgctctcctctctctagtattctttgcctacaattacaggggaatgaagcgacatctataagtcaagattcaagaaagagatttatcccgccgtgtcggccagattatcatagcgcggtgacctttctcgataccgcgcattcattcccgcgatctatgtacgcgacctcaacagataattggtgcaccctgttattttgctcaaagtaagccagtcgagctaggagggtaagaggatgagtacagtggtcatcgcgcagtaggaatgaagtcatcctgccaaatgcatccaacataaggttctgatgttcgctttacctatccatctctccaagaacttcgtaaagtaaccctaatctgaccatctgccggtgattatgagcccctttccagataatgggctctctcataactgagtatccctcgttttaaagggcgcagcatccccgtaagagatatgcttcgcttctaaccggtattggagatccttcagccttatggtatcgtagaactcgtagatctcctcgataaacctacagtcgtccgtcatcttcagaataaagatgtactcattctcataggctccaacaatgctttctgcggaagccttagcgcggatcatcactctcctagcagcctcatcgacaagggtatggtctggctcgatgatggaaaagtcaaatcgtttgaaagtagcgatgaactgcgggaagttcgcacgggtttcctcgttcgttacgacatttttgttgaagctggggcagcactggtggtaaaggcatgttggcgtgcgaatggagagaatttcctctatgtcaaaggacccgaacgttgagacaaatctggaggttgttctgaggagcttttctcgtgtggtggacatggttttgggccttgtcctgtcagtagggcaatcatgtggctcttaggacttaatgaaaacttacagcttattatcagtgacgaggataacagagattggggtcatagtgatgctgggcctttggtacactgatatatctgctggcattagtgattacgtaggctgccggttggtgtcgtggacaattccttacatgctatgtgctgagctctgatattgctcaccataaatcctgtgctacagtgcttagcccttcactagcttct

SEQ ID NO: 3084 - DNA, 2101 bp, Emericella nidulans
gacatgtgtaaacagtccattgaggactgcctccgtgtgagtaagacttccggctttcttcatctcttcattaacaaattgcttcatttcgaccgaaaggtcggtagcattgtcgcggcggaagagtataccacgtatgggctcggggttagcaatgttttgcaggaggtggatgagcgggaatgagaattttccctccgatagatcttcgcaaaatcctttcttggcagtgtactaggactcaactatcagccagtgtcacgaattatggtgaacggtaagttacctcttcagaagctaagtttaggtaatcgtctctgatctggtagtatcttcccagcaaggtgaaaagatgcatcaattcggggttcggctcgctttccgactctacctcgagaagtcgaagcaccagacggaagaaaccaccggttttgttgtccaccataacaaggtactcttttgttgatggtaatattgtgttaaatctccaatgtaactcgaggccctgtccgaatgagagagtttctagttcatctgcgcgtgttagctgttacagttaatcccaagggtatacatacctataaatacgtctgcgcactcattggagtgtttcagcttcttcaccagtcgactccctttgacatagagataggttgcgctgttgagagtctgaggctggccaaagacagcgtgggctgctggtcgcccgcggcgcagccgtgatccgtcttggatatcatcaagcctacgctgtcagtttgatgttgactactgaaatggcagtccaacattaatacggcatcgaataacatccttgaaacttctccgattatgtttgttgagtcctcaggcaatgttagccaacactgtaggcagtcgattaagcggccgagggtcttcttcccgggcaacgaccgtatatattcccacggagcaagaacaatctgattaattttagcatgccagctgtgtggtcggcgtgactactaacctccgcagctggggctttttcaaacggtacgactatttccctggctagaggcgccactgcactggtgcgtttatggctggcctccgaggagctatccgactcagtatggccattagttttcatggtcatggccatggctggaggggggtagcctggcaacctccttttcccgtcgtaaccgcgccccactagctgagctctatcagcggcagaagaaaaagatcagtctgttgatacctcgtcgtgcagactgccagtagcttacccccccataagtgaggatggagttgaacatgtaccggcgcagcgcatctgttttagggcttcccgaagagttccagttttcgtattcagccatcaatctggcctcggccgcaagaacctcttgcttcaaaacattgccggcttcctgttcgtcatacccgtagttgctcataagcacggccattccgttatgcatcatatcaagggtgccagccaagaagtgctcattgaattctttgtgaaaactgtggaagtcatttgtcaacccggttatcagatcgccaatctctgtcatgtgggagactgaatcaagctctttatcactgacgtaaaatccgtttatagcgggcaccaatctcgacagcaccctatgcgaaaccagtcaggttattcctagtgataaaaaaggaagttcagcgaaggccggagagggcttacccgctgccaacagttttgattctgtgagctttgtatgcttcccatgtcactgtgtgcaaagctggcacggtctgtgcttgcaggccagtgtcaaagaaatcgaaactgcgcctgaaaacagcatcaaacgcatcggctccgttcaagaggtccacaaggctttgaatatatagctcattgatctcgaactcgcagcggttgcgccttcccagctttacttcggagagaagggcagcgcgcaagtctagttgaatcctctcatgctaggggactcaggtactatcttccaggtaggccagggcacttacggtaactgaatccagggcatctgttgcatctagcccgacagggacagggtattgtgcacgtatgtggaatgatacctaccatcccaacacaagacattat

SEQ ID NO: 3085 - DNA, 754 bp, Emericella nidulans
tctccgaattggatccttgcataaaatgaagaggtttggtgttcgggcgattctgatccagcttgcaaacttcattcatcctcgcttgatgaatcatgaagcgcaacgggacccagcagagcggagagaacgggagcttcactagcagaagaaacatgcgatccttcgaaaatgagtctcaacatgattggccgctctgttcgagctccggggctacagagggctgagcacaacgtggtttgtaccagatcttcgccccgataccagggagtatcccatcagcatcgttgtatgcaaatatcactccgcttctgccagaagatttgggtcctctgatagacgggaagaaccccattgcaacatgtccctagtctcccggcgaacagaggatagttggagacacaccaaggaggtgctgcgagctagcctctcgatgcccgttcatggagccacggcatcatacataaactggcggattactttggttgcaggaaggaggttcaccgcagagtcggccaagaaccagaacgactacgagcaataccagaaattgcttcgattcgttggataagtctagttgctattgtggttcaagcctcactttttttgttattaccgtgagcaaaagggttggataaaaagagtgaggcggtttcgcagtgatccgacaggtacaacatgactagaaacagccctcgcaacgcgttcctaatgttcatctatccgtcacaggatcgaaggtgagttccctggg

SEQ ID NO: 3086 - DNA, 444 bp, Emericella nidulans
cttgtaatccccttcattctagaatcctcgttctcactatacttcctcaaacttttcttcctttctccgttctccggagcttcacccatacggtcaccgacagcttcaaatattcctgttattaaaattcagctccagcaccagctccagcttcgataaccggaaaatatggcacagaccaatggcgagatggagcactcaaaaggtttgttgccacggagcattcctagaacactgaactaattgagttacagagtctccagagcaaatcaccaatggaaacaaccaggaggtggtccaggaggacgatggcgctgacggtatgtaggattgatattgctacgtgtgactatcccgaaaattagtctgacagctgttctgcacaggcctcttccagatctccgttaagcttcctcatgaaccttacaagatccaggttatggt

SEQ ID NO: 3087 - DNA, 2031 bp, Emericella nidulans
ccctcagactgcatgctgaaccgtcttcctacatacagattacgtgtatatcagtgccctgcacaaaagcggaaccacgttctagagaagcatactcgcttcgttgcgttatgaagtgtccagatcgactcggaaatgtctactcggtctcctagcgaatatgggaacgagctgcctttggccatcgcagacgcgacggcagatttaaggaagtccattgttgtaatttggcgccagctcttgggctagctaagttcgtcttttcgggctcggggaactgaaaaggccgcgctcaaagaggctgcttgatgatggcgattcggaggagtgagggagaaggattcgaggagttatcgagaggcggaggagttccgtgctcctggaggtttatagaccgtggttgaacgaagtagttgttctgttgttgtctttttgtttggccctgctatctgggtccctgggataatgaacgagctccgtaagtaccccgcccccgatttggcttaggctgtctgtcatttaatgcatcgcgcgtatcgactcgaccaaaacttctccctattcaccacacgccatgtcatataatgtgttatcaacttgacaagctatttgaaaaggtccagtttacaccgcttctattcttgtagactaggcaagtaagtgatcactattatcactccgtcatacttcacgttcccagcacaacctcttcgatgatgcgacactggaaaggtctacggggaaacttcgaccgggacacccaaaccggtggaactcccgctcagcacaccagaggagtccgcccccaacgtattcagaaccccttcaccgggcgtcccttgtggaagcgcagctcagctcgaccccggcccaattcacccagcccacgtatcccagacgcaggcacattcttgataaaaaggcaaaaaggttctagtcgcaagacccacgactaacggctcgctctgccttgggaagacatgtgtacaatgaaaccgatggctagccgcttactggggtttctcgtccgctgtgcctctatgaggaatggagaaactaatggctgcggcgaacattgtgtggggatccatgaggcttatactatcactgcgggacgtgtgtgcagggctgggttggatacagctgggatgcgttgaaatgcggggtggatttgtgtgttgtggaatctagtgcctggggttttgtggcgctcctttggatgagaacaagtaccgcggctgggtgttgcggttttggctgaatgaagaccaaatgataaactgaaaagacctgaggagaatgggattttttgtttttttcacttctttttttttggttgcatactgggtcgagacactacctgctaacgtgttgcaacagaatctcttcgaacacgacggacaccactaggcatagctttacacaatgtacagtagcaactttatctgtcctacaagtgtcattcagctcatgctttactttatcaactctccctcctacccgcaatctgtacctgaatttaacctggcttcagcctgcaatacccttcgggatcagtctcgccatccaagaggcctggcatcatgaagggttatttgaaatataagaagctgcaaactcagcacgtagtatcgatatagatcgatccagatagtccatattctgataaatctcccatggtcccgatataatatacgcaaagcgggagcgacgtagagacgagcaaagacaccagtcttggacagcaaaagaccacggccggcttagttcaacaatgtgccttctggtcatattctgatactctttctgtccgactaggccaccctgaaagatggattcgtcaagctcagctgttcttgatcagcagaaattctacaccgcgttccatgtggtagaccaaccaacgacagaatgcatccgccctaaataggtatataatcggcatgtgcggaccactaaaaccgaggaaaagctagcaatagcttcaaaaatagtgcgcttcaataatctgcgaacgatcagatctcggag

SEQ ID NO: 3088 - DNA, 936 bp, Emericella nidulans
aaagtgactccaatcataccaggattcccgctctcaggattcccatagccagactcaaacagaaattgcggaacgtgtgttgttttaccgcttcctgtggctccccatatcacgatggcagagttgttatggattgcttccatgatcttttgctcttcgccaacaacggggagtttgagacgggcttcttgaatatgttcgggacggtcgacttgaacactgaaggctttccggtacgggttgccctttgtgacttggagttctagaggtagtggctcttcctccacagctctgactggaagtgcggatttggggatgacttgtggctcagtcgttattggaccggatgtgggcttaaagcctacaacttcattgatttgttgtctggcccatgatttgaaggctgattgtcggggcttaattcgtccatcagtgttattttcgtcttcgtcttcgtcatcatcatcctctttctcgtcgtcttcatcctcgtcctcatcatcatctacgtcttcgtcttcgtcttcgtcttcatcctcctcatcttttctgtcttcatcttcatcactaccactatcgccgttgtcgtcaacttcactctctgattcagaagaatcatcggagcccgtgccctcttcttcgctttttgcgtcgataccaggtccgatctcttcttccttatcctcgtcgtcggaatcgaaaccctcccatggtatctcatttaatggagctttcggtgctgccttcggtgcacgctttcgctttttgagaatcgggaagccatccggaccaagttcaagaggacgttttaacccaataccgttcatcagggtcgatgctttctgctcctgctgccctttaccagtagcgtccgattttaatccagatagatcatcgtctgtttcatcgctagaataatcaggcgcattgcgcttc

SEQ ID NO: 3089 - DNA, 4806 bp, Emericella nidulans
ccttttgactacacttcgaacaaccttgcaaaagctgcgtttgaactaatggcctcagcaaacacactgtatctgatttaagatattgacccaaggcgttatgataagaaaaagggagacatgatgcgactgcagatgagtacaaaaggtgaggaatgtcgacaaggatataccaaataatgttagatgaacaacccctgcgacggctgctagatactatatgagcatggataccaactgaaaaagaagacaaaacccagagaattttcatgctcgctgcgttgtgcttcaatataaataaacctacccaaagcataaaacaggaaagacggccacactttactatactgtgccatacaaaacaacaaggggtatgtaaccatgactaaatccacgcaaagctttaagaacagaaggcaatccaagaagaactagtaaaagagacatggtaaagcagacttaaacagtttcaatacgcgcatcctgcgagaggcccgggcgatgcccatacgccggagctgtaaccgtgggagtcttagcctgtcttacaacaagcctttcattactagagttcaagtgaggggttcttttcctgacagggacaaggacctgcttcttgccctttgagacggagacagagcgtgcgaccgacacttcgatggttgggattggagcattatcgcctgctcgggatgttgttcgtggtgggggcaacgtggatatggttcttgctgtggctacattcttgtctctgggcggagactttgtcgtgcttaaaggtgagaggattggggaagatgctgatgtcactgtgggtgtgtccgagaaggtctctgttgagtgacgctgtttgagtccgaacttgaatggagtctcgcgtcctgatggtgaggttctttgcttttgttgaggtttccgaggatggtactgtcatggttaccggtgctttatttgaatgtgatactccccaggatggctctttcatgccggcgtatgttcggattcgttcgaacttctgtatcaaaagtggttcgtcatcggaaccaattgaggttgcagagaggaaagatgtgatggaggcctgggcgcggtgggattgtgttttggggcaaatgtccggcgttgagccatttgagccaggcagagcctcctgagattggtttcgaggcgccgtcaatgcttttcgcaattgatctgaaggctcggatgccttttgagttccgagaacctttgtagccttgttggctggtacagttgggaacaagttaaaactgggggatactgctggggaagttgctcgtcgtcgaggcgggcacaacggtggagatgactaggacgtgcggccatcagtaagttattgcatggtggaccgacgttcggaactcacctccttgtcaggaattgttaaattatccagtgttttgctccgcctagccaacagggagggccgatcattgtttagaaggccaccaaacattacgctgtaccgttccatctcaacctgaggtatctcaacctggagaaaggatccgggatttggcttagacccttgctgatgggccggagtttcattctccgaagcaagacacggccataattctgtattctcaattggtgcggtcttggtacctgctctccgccgaggtttgtagtctatcgaatgtgtagacccctgcgacggcccgtcattcggagcttgaacctggtagaacggcttgtttgcattatgggcaacggcgttctttgccttgaacagacctccaattttcttccacttacttggcttgcgctgcagcgatgaattaggcctttcttcgtcgggaggcgtgggcggcggtattcgttgcggctgagatgcagtattatattgttccaacagtcgagggcttccaagagcaatgccgatcatcgactcatccactccaaggtgcgtgtctaacgcttcagcttcgactggtgagctagtaagttgaaaatcaaaaccaggcacctgagaatctggcttttttctgcgattatgcttatcagacatgccaggatgctgtccctctttgaaaacctgatggattggacgactgtaactgacgccagcctggatctcgcagaggtcattccttggcagggcatctgtatagttcaaggagggattcgaaatgcccggcgctcgagctggcgagcgtgactttccaagtattcctttggccattctcaatagacgcggtccataaaagatgagtcggtgtccgatttacggcgtatgttgaatggaaatatgaaataaaaatatatatatatataaggaatggacagccttccagaaggccgagacgagaatcgaaaactaaaggagcgaaagttaaagccgtccaaggaagaagaaagtggcgggccctgatattataagggcaataagcccttagctgaacaccctggtgtccgtgacacaatgtcgggggtttggtgggccacagtctcacatctaggatctagacgagacaatctaggagtgttagcgctagattgacagggagtaaccagacgataggagttatggtgattggtatgccacgagcccaacgaaattagccggtccagtcatctttgaatacagccagcaccatcggaagccgcactcggtgcatttatcagagcgtagtggtgggcgttgtggttgcgcggctgttaaattatcatagcgggctgaggagttgagctgattcattattggtttcatgttactttgaaacttggcccgctcgaccaatgaagaaggatagcgccgggcatccagagatcgataatcaaacgcgatagtaatagtctccctaggaaaagatcagtccgatctataggcggaacagaagagagtcaatcttgatgcccgttcggtgcaccgttcatgcaacagtgggccgcagtgcgtgagaatctagacgaaacccaatgttctcaggaacgacctagagtatcacacggatctcacgtcctcgcctctactgttgctatcgtagtgatttgaacgtgcggcgattctgccagtctgcacgttatgcgacgggctgaaaagcacgggtggccttattgttagtgcctggaattcgccatctcaacgccctctatagccttgagaccacgcccacgccgatagcgaaagggtaagtacaacgtattttccaccccgtttgtcaagaagagagcaccgaaaaccggtaacctaactctgaagacagtgtttgagtcgagagttgggaaaatgcgtgcaagaacgggatgcagggacgagctccaaatgggctagtgttacgaatgatcggcacctgatgcgagccacacgtgccgtgccgttacggaacgcagtctgctgcggtgttgagttagaagacttaaatatatagagcagtgcagtccgttgaggactgccgtatcaggttgattcggaaatatcgggtttgcataatagactgcgtggtttggatggatttgaggaggttagggcttaaggaaaaaggctctgtggtctttgatagctggagaactcgtggaataccggagcccaccatttcagcagaggctcaccgcgagttcttagatggagaccctgagcagtggttttgacgtgggctgtcttgccgttggatggagctctccggctggcccttctcgcagcggtgtgacctgagggccgagtcgtctccttcctcgtactactggcgtgccgaggtcatattcatagtgcgcagtttcagatatcaggaatctaacactgcagtaacgaaacaaaatcggtttgtatcatttctcgtaatcacgcatttcacacagcaattgtcgcatgccagatgaagaattgcgcagaggcgcttgatccaagacggaatggcggggcagctctagttgcctcaggcgctgagctaaccccaccccaccttacctcaccttctttctgcttcccaccgacatctctcctcttctccctatcgcaacaaataataatctcaacagctctgtcgctggtcgatctctttctgcttctctgaaatcgtctactgtccctactcaacagttgttgccgtccgtctcagacgacctcttctccaccgtttcccattctgcgttccactgctgcttgtttatccaaccgttactatgggtgctcactctgctgtctggcaacgtactgttgacccaagtccctgaattcttttattgaacgcggtggctaacctttgtccggcattagaatatgtcgattccaggtaccgtgcctccgtcattaccccgcctcaaccaatattggaacccccgcgtcctccgcattgattctgacccaagatacctcacagtctgatgggatccggccaatttgacaaagccgccatcctcagccctgacttctccggcgttgaggcttcgtctcccggcttcacggtacgcattccatatccccggccagcttccgcggcgagcttccgcctcctttccgaccggccggatcgtcttgtctcgactatcatcgctgaccacaaagacagatctcgccccaggaaatccaaggtatcggatctgcctttggtgacagcacctgggccatgcagaacggtgtcacaatcggtggagagaagttcctcgctattaaagctgatgaccagagtgtttacggcaagaaggtaactccttgaccataagatactacccatctggcttgggcagtactaactgagataaattctagggcaaggagggcgttgtattggaagacactttcttgatatgatcggcacacaccgaggcgtcagacaccacgcg

SEQ ID NO: 3090 - DNA, 1063 bp, Emericella nidulans
gacgacgtaaaccagaagagatattgtcagaagaaaatctttgagaataacatcacgagatgaacgcagaataaagccggattccttctcggaacgcaacatccgctagcacttcaacattccacagtcgtagtagttcatcgcgcggcgcgaatctccctgcacccttgccaatagcactcagcagccgttcagccagttctttgcgaaagtccagaggtcggcgcctggggaatctcatcttgtgtcgcgcatacgagggatcctggatagggaagtgaatatacaagctagttgcgtttcatgggactgagcgccactggctcagactgagcgaacaaatacagcgtgtgagtacacatccgataggaactaccttcgtaattcctgagtaatttcatgagggatgaaggcaggattagaatcgatgaaacggtgataacgatgatggaaaggaatggaaaaagagagctgaaaggtcgagtcagtgactggggcaggttgcgtaggcagcgccctgcttgacttgtgtcctttccgacagggctcatgcatcatccaataacagtggcatcatgtgcgcaccaacctctgcaggagggtactccatttcaccccgcaggggtgtccactggtcagaaaataacaaacgctaagagcaccgcccacgtcattagagcacaggctagttcgtggctggagcggggaccccttatcgggtgggaggattgtattataaccgaagcattataggaaaaaaagtccagtaaacttcccagtgtagcgagcatgttagggcaaattatttctctaaagttttatccgggcgcagttgggcaggtaaagtgactgaattaacatgagagaataggtagtatgggaatacttctgtttagtagacccttcattaattacgtcaatcaataaagagttactatgagcatgctatgtaatttcccaggaataggcagttcagctatttctgtggcatataaacgtagcaagatcaaggtggtcggtatcaactaagcttatatctcattcagtcaggggatggaccgct

SEQ ID NO: 3091 - DNA, 1232 bp, Emericella nidulans
cttgtagcagtgcgcaaaagagatgtgaacgtgctcgagaggaaagtcatcctcaggaagttccttcagacctagaatgtaagcgtccttgggtgcatccttgacccaagaaccttcctcaacaagaggagcgccaacctgtacaatgcgtggtcaaaatctaggcacgttgcatttggaggtgaggcgttcgaacctttgcgaattcgtcatctatcgaaggaaaaaggtcagcgaagtccagtacaaaatcagaagccaggatactagtcaatgcgaacacgaccgcacccaacatgagcttggagtccattagacaaatcttaccatcgaagatacgctgagtagatcgctcaaccgtcacctcatatccagcatcaataagagccttgcaagtggtcggtgtcactgctcagcagattaacaaacggccgcttgaatgcatgaaaagtcacatacaagcagaccgtcctcggcaggcttggtctcagcgcgcagccagatcttgttggaacccattgtgtctgaatatcaactgcaatacaaatccacaaagacgctgaattgtgtctaggaggatgacttccaataaaaaagagcttgtatgactcttcaacaatgacaccgcctttcccctctgcgatagtgggggaaattatcagtgatgttcttccgttccgaagttgcgtgagtcagctttctgttcacaacaaatgccgatgtcggcacctgagaagtaattcatggactacggagcattgaaataaccaattctagcgaatgccccaatacagttgcagggaggatcaaagttatatcatgcccataaaactttaagttggcccagtcaacggccaattttaggagtattgttgatgacaatgctcattacatgaatctcataagcttgaaggccagaacattccaagtagtcaccactgcacaccgttgggagttaatgaaagaatctcacgaaacgactttggtgcggctacgcgtcctactaccgatgccatcggtagggataccttttttgaccgtgtccttggtcttcctgggccgaccccctttcttcttctgctgcggtgcagactgaccaggatcggctttttcagttcgcgaattgggggatgtgctatcagcagcgactgcatcctcattcgttctaggtttcttgtagtcaggctctgtcgattccactccgcctgaattcgtgatggatggtgttcgag

SEQ ID NO: 3092 - DNA, 2383 bp, Emericella nidulans
acaagtgaactgatcaacgatatcctcgcgcaagtggcgaccaacaccgactcttcaaagaatgtgcgaaatgcgatcctttacgaggctgtcctgactattcttgatatcgaagccgactcgggtctgagggttctcggtgtcaacattctcggaaagttcctcaccaacaaggacaacaatattcggtacgtcgcgcttaacacgctaaacaaggttgtcgcaatcgagccgaatgcagtccagagacaccgcaatactgtcctggagtgtctccgtgacccagacatcagcatcaggagacgagctcttgatcttagtttcatgctgatcaacgagagcaatgttcgggttctggtaagggagctgttggcgtttttggaagtggccgacaatgaattcaaacccactatgacgacccaaatcggcatagctgctgaccgttatgcccccaataaacggtggcatgccgacaccattctgcgggtcctcaagctagctggtgcgtacgtcaaggaacagattctgtcgtccttcgtacgtcttatcgcgacgacgccggaattacagacttactctgtgcaaaaactatacgtatcattgaaagaggacatctcgcaagagggcctcacccttgctgccacttggcttatcggcgagtatggcgacaacctactccgtgggggtgaatatgaagaagaagaactcgtcaaagagatcaaggaaagtgacattgtcgatctttttgacaatatcctcaacagcacatatgctacacagacggtggttgaatacatcaccacagcttcaatgaagcttacagtccgtatgtctgatgcgtcgcagattgagcggctccgtcggttactgcacaaccgaactgctgatctgagcgtggagattcagcagcgtgctgtagaatacggcaacctgtttggttatgaccagatccgtcggggtgtcttggagcgaatgcctcctcccgaaatccgtgaagagcagcgggttctgggtccgtcaaccaagaagcgacagagcaagatgcttaaggacaagacgaggaagcctatcaagacggctgagcaggatatgcttcttgatctcatgggggctccgatgttccggtaaccagtccaaccatgaacggatcccagaacactgccgatctcctggcggacattctcggcggcgattctggtctatcatcccctgctcctcaagccgctcaacagccagtctcaaataacagtgcgatcatggatttgttcggttcgaacggtggtacacccctctctcaacccgctccgcctcggcatctctcgatctgttaggaggcgccggcgctccagtctctacaccttcccttcgacatccactgcgtacacagcatacaacaagaacgaattggtgctttctctgcaggtacagcgaggcaacaacaatacagcgcagatccaagctcggttccgaaaccagtcgagcttcagccaatttaccagcgttggtctccaggctgctgtgccaaagagccaacgcctgcaactcagcgccatcaacaaggcagagcttgaagccggagacgagggtgttcagatgctgaaagtcactgcgctcaatggggtaagtttttccctacctaaacttattcgtccctgcgtgttaactaacttttttagccactcccatcaaaactccgccttcgtctccgcgtcacatacgcaaaggatggctccgagcccacaacagaccaagtcgactggtctgagtcgtaaataacgacctcaacccaaacccgcacagtacattcgagttttagatcagttaggaggagttctatctgcccaggtttctggttgcaggttgaatcacgtagtctttataataccataccatacctttcatattgggctgatcctctgcgggacaaaatatgagataacaaggccgctgctagtacccgtggcaaaggtacttgccatccaccatgtttgtattttctctggggcaaaagttctctagtgactatctacgcaatgagtcataatgagttgcttcaagagcgaggctatctagatcacctagacataactcagacgtctatcttggggcccatctgcaagttaggcttgaccgcaattataccaaaacaaattacatcagtagacatttaaaattgactgctgtttagtgcagcaaaatacgaaaattacgctatgatgtcggttttctaaataatgtattatgacactataaaatcaatgcaataaatagctaggataaactgatcctaatctcgtggctgtaagtcgttgctgtcgttaatgaatactaaagtagtgatggtagtcgtaagataatagacaaaccgatgtaaacagtaccg

SEQ ID NO: 3093 - DNA, 1357 bp, Emericella nidulans
gcttcaatcttctcctggataagctccttgttctcctcataccagacggcgacgcgacggtcgtcattctcaacctcgttctcaaggaagggagtccatgagtgcaaagtgcggagatgggtggtgcgaggggagtcgctaggggcaggcgacacaccctgggcgacactccgctgccttcaccctgaacaggagcagggcatgcggtgagcatgcgcttgataatgtactcctcgctaatacggcggcgaacacgccagtagaagaagcgacgagcgttcttccaggagagggcttggcggatggtgttcttggcttgcatgcggccagcacgatcgtgcagatcggcaaactgcaatgcaatctgcatgtaaacaggaaggagttgctcctcgcgtgccgccattttgtccttgatgtcggaaagtttctccttgctgaggttcttgtcctgaagagcgcggcgaagttctccgtaagtagggtccaaacgagccatggtctccaactgcttgtcgcggcggaatttgatgttaacgataccctcgggctccaggacaccaccacgggcctcctcatcggcgtacatttccatctggtcggggttgatggtagggtcgacaacgacccaagaaccaccacggagttcaccgaacggaggaatgtacacgaaaataggctgctcgtatttgacgagagcatccacgatgtaggaaccgtacttcagaacctcgttgtacatgtcacgttgtccaccagagaaacctctccagttagccaatatcataacgggaagctgctcgccgttgttgaagtcccggagggcctgggcagtcttgaaggacgagttagggtaccagacaccgcccgcttcctgggtgatcatttccatagagtcggggttagcaggatcagccggagtaacgttctccacagagcgtgtctcgacagcgataacacccatggggatgccaccaagtctagcacgaccaacaacgacagtgcgagcccagccaccaagagcctcctcgaaggagccggcgtcgaaaagaccagggaggaagccttcctcgtcttccttaccattgatgagccaacggacatcgtaggcttgctttgcaggagggtggtaagaaacgtcacgatcccaagggtcggcgagtggtcggatgggtggcagagagcccttcttttcggggacgaaggcaagccagtcgacaattttctcgacaccatcgaagtcgttagcagcggtcatgtgagaaacaccgttcctgtacatgatctgagtaccaccaagctgcaggttggaagtatagacctctcttcctagcagcttgttgatggcaggagcccc

SEQ ID NO: 3094 - DNA, 701 bp, Emericella nidulans
agagatagcgaggcaatgcattcaagtgcgggtatcataaggtcatatccattatcggacgcatgcagccatccaacaaggcgtgcacgctaagtaaaacaaatcgctcctgtacaatatgcacgaaatgtatcgtccccagatttctcgatagaggcccgatcgtgtcaacaaggtagacattagtccacttccatggtctcctgttctccttccaccttcactgtagccttatcttcagagttggcctggtgaatctgctgaacaaactgtctcgcagccgcccagagctctgcctccttctccttgcccacagtatccttcctactattcagccagctaacatccaacgggttcgatgcgcctcccgcagccgcacctgaaccagaatcacccgttctagaagacgagtccggcgcaagaattgaagcttcctccagagcatagacctggcgccgcaatcgaacatcgattgacgaaagaagcgcaaagtactgtgacgtagcttccttgaatcgagccttatgagaatcgagcgagttgtccgcagacgcgagagttgtagagtcgttagatcttgcgtttgtaagggcttgaatcgcgagtccagccgagtggattagtttcgatacatcctagaacaatgaaaatacgtggttaggaggagatccttaaacagagttgaagtacaaagctctgag

SEQ ID NO: 3095 - DNA, 2733 bp, Emericella nidulans
gggatattagaaaaacaaaatattaaaagagagaagcaatggaaataatgtaggtaataatttagggacaggataagggataagagaatgtgagaaagttacaacatcagaaaaataacatgaaagatgaaggaaagaaataaacataaagactcataggaaaggaaagaataaataaaagtaaaagatgtgatacatatgtattagaatagagagagaaagagatagagaattaggtgatagaaggatagattatagtagaataaaaagggaagagaataatcaagaggagaaagaaagagtaagaagcagattaaaaagggtgatagagatgtcgtcgggagaatagaaaaaaaaataaagtatagtgaaagtagataagcttgagtgggagatatagaaagataaataaagggggtcaagaagatatagaaaaggtggaagaagagcaaaaataaaagagattagattaatagataataaaaatattgggagcaagcactgagacccagaaagtattagtagcgagcttctgctttgctaaggaaagctggggtacttcccactcaggccgccccggctagcaagtccggctcctccaagcgtaggttggtcccggcgccgtctctgataaacgatggacgtacgacgagatccaagccctaccctttctggacgccttcgtcaaggaagcacaacgcatgcatagtccatctttccagcctgctcgaaacgtcaagaaggacatcatccttccgggcggatgggctctgccgcagggttcaattctcatcccgagtattcctcacctccaccaccacacggcatactgggagaatccggaccgcttcgaccccgaccggtggcggacggagaaagtcaagaatcggcaccgaagcgtgtatgtgccatttgcagctggtccgcgcagctgtatcggattcaacgtggcgttgcaggaagtaaagatatccttggctgagcttgtctaccgctacgagtttgtgaacgccaccaacgaggggatagagtatgatccggactttatcgtgattcgcccggtgaatttctacgttcgggccattcggcggacggaatggccggctcgttctccctgaggctgcctacatttttctcgactgtaagtagatctacgttgcggctaggttctggtcttgatattttcagcacctcgcacaaataaacacaattattacagattaaaataacagtacattgtagtagccaatattgatccattggcaatatcaccttgaaaagaacatttcttaaggttatcaaggatgtaaccacaagctaaaaatccacacccagacaccacaatatgcgtttaagccgagctagttcagtccgcacccatcgaaattttactacaggatttgcaagaatgcagcagaccgttaaggctgctaggctgcagcggcagcctcgatgaatagacgctcccatttcattcctaaagtcgcgagcaaggtcacagcagctgcaactatgcagaggatatatgtccgatcaatggcggttacaattgcaccgagaacttcattttgtgtagctgttggcaactcctgcacaaaagttgacccggttcctgagatcgcgtccacaatcgtcgaacgtggttcatgagggaggatccagccgatgcctatagttaaaggatattagcttataattgccacgactacggtaatggctgaaggaattcagcagtaggagatactcacgcttcgctgcctcgtttacgaagacacattgcgacagtacaagcgcaaacgttagtccgttcagctgcgccgttgtggtaaatgccacggctgccgggactttctccggcttgactttggcttgcgctaccgcatggcctagttgaaggtacatgccagaccccaacccaatcagcgagctgtacccataggtggctccaggaccgctgctgggcttgatggtatacatgagagcggaccctatcaggcagaacccaccgcccatgatgtaccacggaatatagtaacccagacggcctgcaagatagccaccagagacgcagctgaagaccagaagacagacgaacggaaggagtcggacgccggattgaagcgattcgtcgccttcagtgaactgaaagtacagtgggatcacatatgtcggaaccgtcacgcaaacaccagtacagcagccgcagacgaaaagcagcgagagaagaggttggcgccacgaaacaagttccacagggaagagtcgggtctcctccgtcgtgaggatgcagtatgtctgttggattccgaacacaatgaagaggactccgccaagggtgatcgcgactataatacccggttcgctccagggatacattgcacctgccgaagtttatgccaatgactcccgcagcaaaggcggcaaagagaatgagcgttcccactaaatccatacgcttcaggcgactggacacggttgttcccgcggctgtggcttttagcaatgggggagggatatgtaaactgccgcaaagaggctagaacatcgccgctgatttataccaacgaggtccaactgtgagctatcggggaagcgccgccaatgatcggcccagacatggcctgcacccaacgcaaaccaatgaataacgacatgggacgttttgcattttctcaggcggggagaagttattagcgactactgacaacacgcgtgccgcatgaacgactcaat

SEQ ID NO: 3096 - DNA, 2849 bp, Emericella nidulans
gagcgcagtcgcagtcacaagtcggctacggaggtattaagtgcgcgcgagcggtatcttgcgcgcaagagggagcgagaagcggcgaagggctcgtagagccttcactttcctttatgtgtcatttttggggtaatcgttgtttgcacgaaaggtgttggagtccattcaaaatataaagctggcgtcttacagcgaattccttctatcgagcatatgagttagtctaaactaatgtacttttatcgtttccgtgactgcagttctatcgtaagtatgaatggtatcgtcactcgttatgcagttgaatcgtgcagtaactccagagtaacatgcaccaagtccaactcttctgatccaaaatgcaaagcctaacgccaatatactttcaagttgtcaaggcaaaactcagacccatcaagcccatgcctccaatagcaaagccaattgccatattccgctgatgtgttaagactaaaccttcggtgaataactgcaagcccaccgaggtcattactcccgctgtaacggcaaacatgcagccgtagacagcccaggaggtctcattctggccatcgccggcaccactaccggctttccgagcaccccagatccagagcgctgccagtccagcaccggcaggctggctgatgccgcctagaagactggaccagaacattgcccatccacgagaatgaatggcgagatagagcggcaatgccattgcgaagccctcactgatgttgtggatgaagagggctaaaaagactgtcatccccagtgttgggcttgcgtgattagtggcgtatgtgataaagccctctggtagtttgtgtaacgctatggcgacagatgtttgtaaccctatcgaaagaaaagcgttttggggtacgtgatggtggtgttgggcaacggaaaccggatgcttagactgcccgtccgcttccgctcccattggaggtgacgagggagcattatccgccgtttctgtttcagaggaggagctgggagcatctgccgagagcccaggaacctgaatgtctgtatcagaggcatcgtccgcgctaacggcgggacggataagggtcttcgtgcattcgtcaccacaagcctgtgagaaaccatagcacggaccattctcgtcgcagtatgccttcgcacctccaatcaaggtgtacattcgtcgtccgagacggacacgccacggttcgcgacctgtacggacgatgccgcctggctcacgacccgtacctggaagaccgattcccgccggtgtagatttatgtgaagtcagaaggggagttcgctcggagagccgtttgcgaggacgatgatccaatgcagcgtgcgaaagctttcctcgatcgaggtcggagtcgtcgcggggcgacgcttcgtgagtataagcacaatccaccacatgggagggcaggaacttgtgcagcactgcagagagccccgggattccaatgactccagcaataaaaagaccgatcagagcgtatgcggatcgtgagggagaccaaccggctttcatgaggtagtcgcgggaggtggggagcatgctatacaacgaggtgaagatctaaaggtcaccatcagcatttatcaacctttccgccccgtaactatcttacaataactcctgcactgagacataacgatgcggaaagaaacgaattgtttcggacgatctggaaatggcttcgaggccagaagtggcggaggagaagatcaacgcagatgaccgaagaccccaggacgcaggctggaccgtcaggtggattgcaaatatattggactgggaaacttaccaacaccggacacggcactcatcacccagccccgaaggtcgtttgaggcagccatgagagcggttgatgggtttggggaaagcaaatccagttggagaagagccgttgagaaatgacggagttattagataagccagcgttgtggagttgcggagtatcactatcgtattagatagaggaacgatactaataaacagtagaagagttatagagattaactcagaacgagccggtccctgatgagatatccaccccaaggcgtgacaggttgtttataaggtgtggcaagtggtgaggaccctgggagtctcttagagttgggaagatcttcgcccgttcgctcgtctttctcccctttgctccattcaattcaacactttcattgattttgattctcgctttgatttgtccttgtctctgacatctaaaacaactccttgtatggattaattgtgttcttttgaaggaatagaggcttccacgatgctgctagacccgccgctctgacccgctgctctgacccgctgcacatgaactcgttacagccagtcatctcctcacatttcaaagcagacgaccatctatcctacgtgtggcgttgggaatccttgtaagcagtacttcattattgcttagcacaagggagttattttctaacgtcttgatgaattgctttgttgtttccataatttatgtataggaaaggccaaaaattgaccaacgcgagtaaacaacaatatgagatccgttcgatcgaatgtcctccaccactaggggaaataataaaaaaaaaaaaaaaaatttcgaggaattctatccagccattttcaatgtacagccatccaaagcttttgagttattatcctacccctgtcgcaaagcaaatatccaatgccaaatcggttttttcattcaattttaactccgggtcccctccaccgcgtttgaaataaatcctgtttctttatgggtgcctttaaccgttttgtaaccctaggttttattttttattttggcgcaaccgttgacttttcc

SEQ ID NO: 3097 - DNA, 576 bp, Emericella nidulans
taaacgaacgaagtatcaggtcttggctgatgaattggtgaagaccgatgatcaagtcaagaagacaggtggtgcggcagcgcaaaagtaaatacctgaagagtgtcgttagacgcaaaaggaaggaaagagaggaagaggcgattctgcaacagacaccagagggggggggggatgcactgacaattaatgaaaagttccaccccggctacggagtaaatcgtacgctactgtactactctgtattatcgcctttcatcatttctgttatggcgcatgatattacgctggtttaaccactagacggagaaattcaattaccactgcaaccacaaatatgcctaaagcgcttgggcaacggtttgaggaatgacagaaagcaacagcatgccattcgcaatcgtccagtagtcgccggaagcgccactgcatcccgattccttcgattcctccgactcctgctccaagcccaatgacaacatgagcgaacgggatcagaggatgttgagacccctggtcaggcctgaacgataagcaggttcgaggtggtgcggaggctggaccatccatgtcgac

SEQ ID NO: 3098 - DNA, 3356 bp, Emericella nidulans
  unsure (1)..(3356): unsure at all n locations
gaaagcagatgtcgagataagtacaggtccccgtgctctgcaaccttcgcaatttggaatgatctgcctagcttacactcttgaaggtgaagcctgtggtctcgtgaaaaatctggctcttatgacacacattacgaccaatgatgaagaaggtccaatcaaaaaccttatattcatgcttggtgcagaagacatccagaccgtaggtggaaaggagatctatgcacctggcagttatactatctcgattaacggtacgccaatggcgctaacccgtcgcccgaagtacttcttgaatgcgttccggcgactgcgacgaatgggcaggatctccgagtttgtcagcatctacattaatcatcatcagcgtgctgtgcacgttgcaactgatgatggacgtatctgccggccactcattatcgtcgaagatggcaagtcgcgcgtcaagaaacatcatctccgcaagctccgtgatggaacgatgcagttcgatgatttcctagcccaaggcctagttgaatatgtggatgtcaacgaggagaacgattcgttaatcgccatatacgagaaggatataacggacacgactactcatatggaaatcgaacctttcacaattctcggtgctgtcgccggtctgattccttatcctcaccacaaccagtccccgcgtaatacttaccaatgtgctatgggtaaacaagcgattggggctatcgcgtcgaaccagttcctgcgtattgattccattctttacctgatggtttacccacagagacccatggttaagtcgcgcacgattgaattgaccaaatacgatcagctacctgccggccaaaacgccactgttgccgtcatgagttactctggttacgatattgaggatgccctagtcttgaacaagggctcagttgaccgtggcttcggtcgctgccaggtgttccgcaagtatgtcacaaacatgaaaagttattccacaggcacgaaggacatcgtgagccctaccacttatgagaacaaagcgcccataaggaaacacgctctcttagagaacaaaagtctggcagccgttggagaacaagtcaatgctggagaggtttacatcaataagtctacaccagatcagtcaatgtcctcaggaatgccaggctctgatgcagggcgaccgatcagctacaaccncactccgatgacctacaagcttcccgatcctgcctacattgacaaagtcatgatttccgctactgaaaacgagaatcaaatcatcaaagtactcacacgccaaacacggcggcccgaagtcggcgacaagttctcttcgcgtcacgggcaaaagggtgttacaggtattattgttgaccaagccgacatgcctttcacggaccagggtatcaacccagacatcatcatgaacccccacggtttcccctctcgtatgacagtcggaaaaatgcttgaacttgttgcaggtaaagccggtgttctttccggccagcacggctatggaacatgctttagcggcacccctgtcgaacaaatgacccagaccctcattgacaaaagcttcagctacggtggcaaggactatcttacctctggcatcacaggcgaagctctccctttctacgtcttcacgggacctatctactaccagaagctgaagcatatggttcaagacaagatgcattcgcgtgcgcgcgggccccgcgccacactcacccgccagccaacagaaggtcgttctcgggatggaggtctgcgtctcggagagatggagcgtgattgtttaatcgcttacggtaccagtcagctgcttttggaacggttgatgatatcgtctgatcgccacgaggttgatgtctgcgagcagtgcgggttcatgggctacctgaactggtgccagcgctgcaagtcatccaggagtgttgtgaagatggtcattccttatgcggctaagctccttattcaggagctgatgagtatgaatgtcacggctagactaaagctcgaagacgagttccccgagaccaaggggcgatgatggacattgtctggctgcaggttatgaaaagtgcttgcacattggcgttggtactctaatgtatatatatgcatagcgaatggttagaatctgtgagatacatgtacgtgcctcttcggcaaacagcaaatatctcctcatatccccgcatttcgagccctcggcccatacaagaacacacactctcaataacccatcaacatccttccaataactcactcccctaactgccattctcaataagcaatgtggccacgccgaaaatgactgaatttcaaatcccactcgagtacctcacctcgatcaaggacaaagtcgtcctcataactggtgcgtatatacctctgcaccctagctattttatctatacatatacactgctagcatcaatataacattacccattcacaggaagctcctctggcatcggcaaagcaaccgcccacctctgcctgcaccatggcgcaaaagtcatagccggcgatctctaccccctaccagcggtctttctacaaagcctagaccagcgagacgaacaatcctgtacgggagccgcatcaacctcaccaccacatcaggtggatgtgtcagaaaatctcatgtttgtccaaacggacgtctcagattggacgagtatccgcaatctcttcatccgcggggtggaacgattcggcgtcatagaccacgttttcgcgaatgcggggaatggaccgctgagtaacttcttagaggagacttttgaagataaggaccggggagaacaggttctagccccaccagatctgaaagtcctggatgtgaatcttattgggctattttcacagcgtgtctgggtgttactacctttctcaacttccttctggggaatatgagatcggcatcgaacccttcttcttgctataatcatagttcatgatcctgtccaaaattcttgtcctctaacaccaattttcaactccgttcatttgattcctgtttgttcatcactccacatgatagccgattcctctatgttactccccatcgctcgtagactccgcttccccatatcattgttatactatactttcctcttcttataccgttactctcattccatttctttatctcacctttttctatcgataccttatctacttcttacatccttacttgccttcctaatattcatcattctatacacttcatcactgtatttctatcatctctcttctcatactagaattaggaagactcctacttatttccaaatcatattcatctccattttattaatttatatcttgcacgtctcgtcctcctattctacctcttc

SEQ ID NO: 3099 - DNA, 1006 bp, Emericella nidulans
gtcagcaagtctcgatcgacgccaactttgaattgatggctggagcttgaccgaataagaaatcaacgaatttgacaaccctgaaggcccgctttcaggtctgtggtgatgattggcttcccattaaggtctttttcggtgatgatgaatgactatctgaaagcgaccgacctatctagactttagaacaatatttgagataatatgatgcaataacgcaaatattactgtgctgttggtgaagtatcagtttcagtgcaagcgtaaaactaatatatagttcggtgatcccttcgacggtgcgaagccagacaccagggatatgtaatttgacacgggaacatggtgctgagcaggcctatactactgaatatctttccgcggctgcttactgcccaggcacttacagctctttttcacttactagaagcgataaactgctcattggtgcgagtattccggattcatccgttgttgcctcaggcgcgtggcgtggtcacatgctgcgccaccctgatgtagtcaccttcagcaccaggcatccttcgttctttcacttatcaaatccatctcgattattagtttgcgattctcacattcttcctagtctgtgataatcgtcgtcaggatgcctccttcaagtgggcacctgctgcttccaaagctttggagagcagctaggtgagtagttggccccagctgtatactctataccgagagctgacagtctattttgaggttcgcctacgcgaaggcgtacaaagccgtaagggcgaaaataccagaaccggcgcagcaggtttctcttcgtgtccagccagtatatgcgcggatcacgccccaacaacccgtcaatcgagctgctgccatccgtcaagcccgcagccgctacttctccacccgcgcgtcaggcccgtttgcttcatacttcaaagcggcagtccagggcgacaagactgccttatagatcatcaagaattgcgggcaacatcagccgacttacgag

SEQ ID NO: 3100 - DNA, 1481 bp, Emericella nidulans
  unsure (1)..(1481): unsure at all n locations
ttggaccccggaagatcctcgagtacgacggtcgctacggggttctgatctgccacgagtgccggtatgcgatccagaagagcgcgctgcagagccacctgctgcgccataagatctaccgtgccgaccgccagcagctggtcgctatgattaatgagctcgatcttctcgagcctgacgatgtgttgctgccgcctccggagtcacccccgatcgacgggctgccggtcatcgcggggtaccgctgtacagccccgggttgcgctaatctctgtgcgagtctgaagcgcatgaagggccattggagagagagccatggtattgcggatgcgtcactcgcgcgtccagccaagctacagactttctttcgggggactaagatccgctactttgaggtgactcccacgacagaggatgaggacgatgaggaaaacgagagcgagaatgacgaggaagaaggggatgtcgatttggaagagcaggaagacgacaacggtggtcggcagtcaacgacggtcacaacttctcccggcccttccgctccctctgtcaacgtggaccttgaaaccctgtcctactttcaccatttcatgtcggcaacgagcctgacattaccatgtccgcaggatatgcaggcgggggctcaatactggaaagaaaaggccgttcctcaagcgctacaccanaaatgggtagtgtgcgggctgctggcactcgctgcctgtcacttggccgcattccaggacaatgcggcggctggccacaagcaccgcaaacgagcggctgaattctccctcgagtttcgaacgggatggagagaactggccgacacatctggtgagggtctgcgagaggtagcgaccgagattgagtgtttgctacgttgtgcacattgggcattggctgaatccccctgcgatcaacgcatcatgccagagccgggcgtaccagagcacctccagtccatcatcagcaccattcagagtactgttcccgcggccgcaccacacgaagctgaaacgtcggcctacgcgacacgaattctcagatggaacacctcagaggccggaaacagcgtccttgcggagatccggaaccgtcttcatgacctaccagctcgcatggccgatacctttgggagaccggagaatattcaggacgttcttgtcctcctgtcagccctcgcagctatgggtgagtgctgtgacacgagctttgcgtcggaggaagttggaccagcgtggtgggggatggcgacctggtggacgcgagtgccgcttcgtttcaaggagctggtggcacgccactatccagcatctctcgtggtggtcgcccattgggcagcactgatggtcaatcgaaccgagcgctgcggatgctggctagtcaaggggttggccatgacgatcttactacggatcgctgagcgacagccggaggacgatgacggaaatgtgcagcggcttgttgcgcttcactaa

SEQ ID NO: 3101 - DNA, 725 bp, Emericella nidulans
aaatcgcgctcaatcatctccgcccaattctgcacgtcgccaatctccttcaacgcgttccgtccctcatctgcaactttctcccaagcgtcattctgcttacgcaggctctcagtgtgtcgcgctagctgcgcttcttggttcttcaaagcctgggaattagagtggaggttctgggctcgatcgacgagcgcactggtgtagttttgaccgagggagtgaagagaggcagtgaaggcggatgttgcgagggtgcgcgggtcgagtgtgtcagagacggggtcttggccggtgttggcgttcgaattcgaggccgaggtcgaggtcgcggtgggattttgaggggcggattgggggtctgcaattatagcgggcgaggtgggggacatcttgctttcggggtggttccttgagtaatgtagtatactgatcgcaaatgtaggaaaggggattggggaatgacttgataaggtagggggctgtttgtgaggtaaactgttggtgaagtgtaacaagattgatatattgtgttggtacacctcacctcactttgttggacgaccacatgacttgtttagctgcatatggatgagttgggtttgtagtcaagtctgatagtacgggttaacatgaagaacctctagattatatataaccagccatccgaacctcatgaatttatatctacttatttaactcctctgccgcatccttcacatactccc

SEQ ID NO: 3102 - DNA, 2167 bp, Emericella nidulans
ccaaaaaaaaggcgcttctgttattgtttaagaacaacctggttcttaatatttaaaatgcgggcaaagaggcaaatacctaagcacttattaaaaaaattctccatatagtggtatatcaccaaagattcggcttacaacctaataaacaagggcaccggctcaaaaactccaagttaaataaaaaggtcatttacagaaagtcaagatcgcttaaggtgcttgacagatcaatatgcgtgaacaagacatgcccaggacattccagatgccaataatgggcagaggtatccaaaagacaattcagcgtgtttgcccagcctccagctggcttggtgttcgcggagcatttagatgtgaattgccaggaaccgtcgtagaatcttgatttctgactctaaatcggttgctgaagttagacaaccaagacgacagtcgcgggatggaggtatcatttctcgatcgaccctcttcgatcgttggagtggtccgtacggcccataatctgtggcctattgggcgagaagttccggaaacggtgtctggagcactctgtgaggcctgtccatatagtgtctgtgctcgaaatgggttaacccggcccctgatcaaaacagcttggggatgatttgggcttgcggcgcgacgaccagaagtagatggtaagtcggaagcgtcaggacgaggcttgggtgtataataatctgccttgcacagcgggcaggaggctcttcgacttgtcagccatgggtcaacacatgaggcgttaaaggcgtggccacaataaagaccacgtatatcatcatcgtcttcaataagatcgagacaaatagcgcacgaatctccagggcttgtatcaagatccgtaagaacggtggtgggtatgatatcctcgacggtatgataatcatggtctctgactactggattaattcggtccgagctaactctgggtgatgcattattcgtccgggagaaaccctttatactcttctcttcagattctggcgccatgtcaccatcatcgacaggttttgttggctgctgcgacgttgctgaattaagtctctgatgagatttagcatcaggtgcagtcacgagggatgtagccccctccggaagggactgttggtcatcctcggcgtcaagagcgttctcagtatgggcagccgttataccaccagcagttgagagaccagcatttgcccgtgatgatctccacactttatacttggtaagcgggaaccgttcgtttacttcgtccatagtcatcaatttcttttcccttcttctccgatgagtacgcggcatcgcgaccaagtctattggctctccattgtctccgccacggatttggcgattgcgctggttataccggaagcaatacttcacgccaactataatcctatttattgttatcggtatcagccgccttcaggaggataaaggtattgagcataccacaaatttgtaaagacaaccccgaaaccaagagcaacaaaaaaaagaagtggagagctagtgggacttgagcctccgttatcacctgagccgttgtcagtaggcgctggcgaggagcttgttgttgaagacatctcgatgacaatcagacacgcgggttgtacaatggtcgggaaaacgccgtaagtgggctaacaagaagatatgggaacttctttcttttgtcaaaattgtagtttcaaatttcccgcctcgaaagacgggagtaccacgctggaaacctcaacagaaggtgtcgggagtcacagttcaattcatcgagtcggggagacctaggaatgaacacctgacggggcatcactgttagcagcttttattggagctgcgacggccctaatatcgccctttttttttctctctttcggcgtctgcgtactgttttccgttgttgagttcagaaagggaagtcgccgcttccatgggtaatggcagaaacagacgagtgagacgtcttgagatgtctctgatcacgggatgatccccttatgccaagtctactatccgcggcaagggtcccggctcactcactctttggacccgccgacagagccgtttcccctcgttgggagttccctaaaccaactggctgggccggaagtgatgacttagacaacttttagtctagaatacagtcaccatatcgctt

SEQ ID NO: 3103 - DNA, 1359 bp, Emericella nidulans
catctaccatggacgcatctccccgcaatcagttcagcggactggtagctgtctcgcaggactctcagcagaggactatgccaaggtccgagctatcagtttagccattgtggcgcttacgagctccatgcaactcaacctcatctgcggggtctttgggctctgctcattgcttctccatgaaacagaacgaatgttggaaatagagcgatgtcaacgacggacgaatcgccgcattgccagtggtgcagacaagctcagtttggagcgatttgcactgacactggggccactcctcattgatccgcgaggacaaggaggcgacgcaggcgcattccacatgggtcccgacgagattgaaagccagcgggtggtcacgctcttgattgggaactggcgcagcatcagtcgacagttgcgaatctgggagcggcgtgggcttgaagagctggaagggcgagcgcaggcaaggacacgggcacgcgcaacgagcggcgaaagcgagaaagcagtagagagatgccagaaagagtgtatataaattattaggtccaggggatgtggaaatccatgatcatggttgaaggttcggaataatgcgtcaccgttggagcttgagcctgtgcacagaccaatctagaccggtcgggccatgcgccgggcgggggaaggatcgccactaacgctttgcttaagcagggaacgggcgctccgtacattggcagcaagctagatagtctatcgagaataagacgatggaacaggttttgtagcaggtgtgggcactgaggggtctccggccctccattcaaggtggctagtacaggtttgagacggctatgagcagggtagcgctgctatagccccacgctttctagtgaattctggacgtgtccggctctcctaggagctcttgcagatcgagcgctcttgattgtcggctgttctttccggacctcacttttgagagtaatggtaccaatacggggacttttggagggttgcccacgtaggattatgtggtacttctagctggacgggtgcagctgccacggagtgtgaaccgccaattagaggtcgcctcagcgaccgatgacgttgcctgttaggaacttcagcccttgtcagaaagagaagactccaagcccagttctctcacaatgttcctggactattccatgctgatgatgatgtcaatgcaacctgaggtactcctgtggatgccattggcgagccctgtttcgcggatttcccatccgcaatagtccaagcctgtccaggtccagcccagcctaccccgtatcctagtccagttcttgtgttcatatgccacatctggccagctctgtccctcctcgt

SEQ ID NO: 3104 - DNA, 1050 bp, Emericella nidulans
tgccgaattattaaaagcaacgccttttattatatcccaatgggcattattttaatggtctgatcttcttgaaaaatactgataagagtctgaaagtaagcactatggaactggttggtaattgcttgataaccactaacaaagtgattaggaatatattcaagaatattaccaggatgcagagagtactatggttctctgtagttataataagcagatctgttaagggacgtatttagatggatcttcctatctagacgtgccgtacgtacaagaaggaatcgctaaagaagaaatgagaaagaaggattgttgttgcaaggaagtcttgtaggtggctcaccgccttcaggacagcgcaggccttggccgagtcactaaggtctaaggtccttgtataggcaaaggacccataacaccactaaggagctttatagtcaggtaaaaacttaccctggtgtgtattatattattctgcagcataaccatttatacaagcagtatatagataagtacagagcaagatagtattagagtccaatcagagtagcttgtatactatgaaaagtattagaagctgaggaagctctactgcaaatcttcaagcttggaaataatagcagacgcctaaattttacttctcacctttctcaaccgcactcggcctatgtcacaggctatggcctggagcttggttgtcggccatgccctcaacctagttctagataaggtttctgcaacatcagtatacagcctcggaattgcagcctcgtagcttaggaaaagatatccgtcggcatgtaggtccggcggtatacaggtaagggaagtcaggagtcttgacgtatgattaggaaaggttgataaagggaggaagatatctgcacttctatgtcttgtttccttctttaagcatgtgatactcgtgaatacaggacagccagttgaaaacaatactgcctacactcgttacagcctatacttagcttgtatcacctctaaaaccaacaccatcagggcttgttgcacttcaattatgatagcagtcaa

SEQ ID NO: 3105 - DNA, 2392 bp, Emericella nidulans
taatggttctactgaatggtgtttcgcttgtattgcgccttttatactggtggtttttttggggttgcttaggggcttgttttccagttgccccttcgtttttttacgattgttctgggttgaatcctggtgctaacactattcaatatgaatataggctctatcgtgcgttgtacgttgtaggttccgtgcctccatggcttggtagatacgtgttcgtaataggtagaatatacgtcgaatcaaacacatggattgttctcattataactccaggatatataacttttttgtagccccagtcctaaatacttctagatgaaacgccaggcacatgcattacagattccgtcaaatgtacaagagtagaaaagacctcacctctcgcatcaagcgatgctggaaaagacacgcttcttaccagttcccgttgttcgctgctcttcctcccaagcctgctcatcaatgtaatcctttgtaccatgagctttgacctgctcgccaacgaactgcaatgcagagagattgaagcccatttcgtccttctggcgcgtaagcacccgacgaagagatgagcgaatactgtcaagcatgggccgcatcagcttgctggcaacgatctggcggtgatgcgttttaagcatgaagaacagcacgcggcatgtaagaggaacattccactccctgctagcccaaatatttaagaaggtaaatagggcagggattttcgagaaggggaggacaagaagggcgtcctgcagggcggccggggggatcttttgcacgacgttgagcaggtgttgctcggcggagatgttgttaagggccatgtacagtgggttgcgggcgggaggtgcagcgttcgggttcttcgcctttatgacgcgccactcgcgcatgacttcgagatcctccattcccagatcgagcgcttccatgatcttctccccggccatgagggtgtcggttgtctgtttcccggcatccacggcttcggccttttcgccgtcggcgccgccttcttcttcttcaagggaggctgcgaggttgttgtcgtaaatctcttcgagctccttttctcgttcttcttcaaggaatagttgctcatcagtttgttcccatgtgcggatactcttgtcgtgactggcggtgacaatgaactcgccggtgtggctgattgccatcgcccagatctcgccatggtggccagacagcttctggatgtgttcgaatttatcgccgtcccagtacttgatgacgcggtctttgctgacgctgaagaagttgtgaccgttgccttcgttgttgctgggcacgaaagccacggccataatgctgtcttcgtgcgcgaggaatgacttatgacagtcaccaaagtccagaccccacaagcggactgtcttgtcagctgaacatgtgacgataagtttgctgtcccaagagatatccatgtttagaacgggtagtttatggccatagaggttcaagaaaagcttcagcgaatcgttgaagaacactttgacggtattgtcgagaagtgcaactgccagcaggcgagcatcgggtgaaaaccggacactcaggatatcatctgagaccttcagtgtcctcgtatgaaccaacctcaaccgcggtgttgtccgtttggtaccaggaatctcctcctgcacgacctggaaattccagaacttcgcggacttatctgcgctgccactaactaacgatttgccgtcgggatgcacctgcaaagaccatacgggcccgtcatgtgctttgatcgtatctagtagtgttgacgaggcaatgtcgaagatttccagctccccgtccttgttgccaaccacgacaatcttgtcacccggaaggaaagccgaacatagtgcataaccacattctagagttcgcaagcagttttgtgtccgaacattccagaccttgagactcccgttggaggcagaagccagcattcggtcatccgaactcaaggcgacggatctaatatctgtgcgatggcctggtatatcgatagccagcgttcggttgtactccacatcaccctcgctcttgctcttcttattcaacgtggtcacgctgtaggcctccaattgattgttcgtagtagcagcaaggagttgaatctttccgctcgatttgtcctatccatcgaagacctacctaccgccgtctgacatcgttgagaccaagactcagtacaggacggcgaacatatctcgcctacgtctagttctcgcgctgccgtttgcgacctggctctctcttttgtggctctgcaactttgctgggtaacgggcccatttaccctttgctgagcctatgtgggggagttcatctaactctggggaagccataaaaccgattcacggtttggata

SEQ ID NO: 3106 - DNA, 659 bp, Emericella nidulans
accggaaaaatagttggggccctccaagccctccagtatccgaatacgtggagaaatcagcgatccgttatcatatcaaaggcaccaaatacatcttcgaaattgcaaggtatgatgagtacaagcgttcaggggcgggtgcctactgtggggagataaattgctgggaaacttgtcagaaactccttgtacattctgggggcatctgtttcgatgcaaattgggacaacctgctcggcggccatgcaaatctaccaaaagggcaatccgcgaagtacagcctgaatctagccacgttcttcccgtccaaggaacctttgctgtccctgaaaaccagagcaaaggcttctgggagtttattgacctagtaagacaagcagcggaacttctgggcccgacacaggcctcccagaagatgccaaaatgaatgccgtatccgagaccaggccgtaaaacaggaagctagtctggcggtctcacctgcagcacctgcactaaaccctgcgcagagccctcggatgctgaacgaagatcttggtacactgttttaaacaattgaacatggctatatttcgaggtagcctagcggactaggaagcggagtcgagtcctaaatttaggcctatgttacatttttcagccagatcagtcattactgc

SEQ ID NO: 3107 - DNA, 1457 bp, Emericella nidulans
  unsure (1)..(1457): unsure at all n locations
ttttgtccctcgttggtcggtgttgggtgtgtttccctggggtttgtgttgggggcgtcccttggtgggggccggggcttggtctttcttgccctgcggatgtttgcgcgtgttgcttggtcctgtttgcgctgtgttttgggccctggccggtgggtggggcctggttccttcgtccttcttttggcatttttgtggggtgtcgccttccttgccttggcttcgtctccggctgcccttttttggcgggcggggtcggtgcgccgggttccctgttgttttggttgtctgtgtctcccttctcggctgcgattgcttggtcttggtgtcgtcgggtccgtgggtggtccctcctgtgtcgcggggcgccaggtctggcttctctttggtgggtcctctaaaatcgactgccacatggggacaccctaaactgctctttcagagccctagtagccgcttttcctttgtagttgccagcaacaatgaccggcccggcccggcattcccgtaggcatcaacgggccagctcaggcgactgtctgtcttcgcgtcatgggacccgcaagatgcgaaggagtgcgatttctaagcaggttgtctagagagtgttaacacttgcgattagactggcggagatccagcttactgcgcattgtggcatctgctgagaaacgacttcagttgccagtaaagcaacagccaaaggctccaattgctagcccatctcatcctgaaagagcatgatccgtcaagaattcaagagttgggaaataggacagacaaaaagacccttggacgaccttcacttgtccattccatagaactcttatccaacacgcgcaactacacagcgccctcagcataatttccaacaccctgttagttcgtccacggcgcagaggcatcacttttacgaaatacctgttggataccaggaataccgttctaacagataacgcaaaagttttgccggcagcaaaaccacagccctaacgttctcgggcatattctaccatatcctccgcacacctcgcgtctacacgaagctccaagccgagatcgacgccgctgcgtcctcaggtcaattaagcaccccgcacatcgcgtacaccgaagccgtcaaattgccgtacctcgtcgcctgtgtaaaagaggggatgcgcatgcacccggtcataggcgtctcgttcccgcgccatgcaccggcccaaggctgttcaatcggggggtactatatccccgagaatgcgcgaattggagtataccccgctgtaattcattttgataagaatatttacggngatgatgtggatgtgttaggcccgagcggtaggttgaggccaacgcagatgaggagaggtcgatgaatgggtgtattatgcagtttgggatggggcccagacttgtctgggaaagatgtgagtgtcgttttctttccattcattctttgtacgagt

SEQ ID NO: 3108 - DNA, 779 bp, Emericella nidulans
taacggagctgtacatctgccgtggcagtgaggaatgtatggaaatctgggttcttggttgacttgggcattacaagcatgattactgccttgtcagggggctggtagctctcccacaacacatataagatgcccagggcctgatagtatatcatcaggtccacacacagtaacagcagaggcactactataatcatgcatccccctggagccacatacacaggcaatataaacagcatactcttgctactacctataggcatgattacaactacaggactggcactgtcctggattacctttagtactggtacctgtaccctgcacaactacagcacaggccatcctatcatgcactgcaatacctgtaccatatctatctaggccagctactattactattactcctaataattaacagcctactattcggacaggttggcatgcatgcccagggctgtgttgactggccgcgggtgggggaacgctagacagcaaggctcgtacatgcttgattcttgtaaccacaggcagcacagaatggtgctgccaccaggttggctgttatagcgcccatgtactatcactgttacatggggcgagtgccctgcctgatgatctacaatagcacctatctaaccaaggtcctcggctgcctccagggcaggcattacctggttgtgcttggactatatcttgttcacgaacatacttagcatgtacaggaatagacagctaatgctattggacatactgagatacggggtaatatcaagcag

SEQ ID NO: 3109 - DNA, 1648 bp, Emericella nidulans
taatggccttctctccttctccctctccctattcaacatgcagcgagctctttcttcccggacttcggtcctctctgccgcttccaagcgcgccgctttcaccaagcctgctggtctgaaccttcagcagcagcgatttgctcacaaggtaagctggataccaattgcgattcaaaagaggccctaggagctttcggccagccttccgcagctctccggatagctccagcaaaattgctaacaactgggcaggaactcaagttcggcgttgaagctcgcgctcagctccttaagggtgtcgacacccttgcaaaggctgtcacatctactcttggtcccaagggtcgcaatgtcttgatcgaatccccctacggctcccccaagatcaccaagggtacgttcgcgctttagtcatcatttttacctctatccctttacacaaccctgtcaaaagttgtcattacattcactaatttgcttagatggtgttactgttgccaaggccgtccagctccaggattagctcgagaacctcggagctcatgttctacaggatgtctcttacaagaccaacgaactcgttgatgacggtacagccaccgataccgctgttgaccgcgctatcttttccgagaccgctaacaacgtcgctgctggctgcaaccccatggatctgcgccgcggtatccaagctgctgtcgaagccgctgtcgattacctccagcagaacaagcgtgatattactactggagaggagattgctcaggtcgctaccatctctgctaacggtgacacccacgtcggcaagcttatctcctctgccatggagcgcgtcggcaaggagggtgttatcactgtcaaggagggcaagacccttgaggacgagcttgaggttactgagggtatgcgtttcgaccgtggttacacctccccctacttcatcaccgacgccaaggctcagaaggttgagttcgagaagcctctgattctcctttccgagaagaagatctctgctgttcaggacatcatccctgcccttgaggcttccaccactctccgccgccctctggttatcatcgctgaggacattgagggtgaggctcttgccgtctgcatcctgaacaagctccgtggccagctccaggttgctgcagtcaaggcccccggcttcggtgacaaccgcaagagcatcctcggtgacctcggtgtcctcaccaacggtaccgtcttcactgacgagcttgacatcaagcttgagaagctcacccccgacatgctcggctccactggttccatcaccatcaccaaggaggacactatcatcctgaacggtgagggcagcaaggacgccatcgctcagcgttgcgagcagatccgtggcgtcatggccgaccctaccacctccgagtacgagaaggagaagctccaagagcgtctcgccaagctctctggcggtgttgctgtcattaaggtcggtggtgcttccgaagtcgaggtcggtgagaagaaggaccgtgtcgttgatgctctcaacgccacccgtgcggccgtcgaggagggtatccttcccggcggtggtcccgctctccgcaaggcaacacgccgatggccctcccccaagcgtcctgggactattgtgggaccggcc

SEQ ID NO: 3110 - DNA, 948 bp, Emericella nidulans
gatacgagagattcctttttgtcgacggggggggccctgaccacctggggtgcatcctctccctaccaggcgggttttttcaagataaagccatggtaaagtgagggggggaatgttatatcacctgggggggaaactcaaacgtccttcacaaataaacgtgagagtgagtaacgtggcaaccaagccctatccagggactgggcagaacattatgtttggattcacatggtttacgcgtacggacgtttttaaaattttcagaattgtttcatcttagtgaatatttcttcatatataaatggcagaaattgtttactactggcaaatagggtcaaataaaacaaggcaagacagcaaagagacaccactgttcaggctttcattgccgtagcgacagcagtgagacattacgtgaagagtgaaagattcctactcttttctctccatctgcatttctctataacacaaccattcttttacctttcccttcaatcccatcctttgatagaaccttatcaccttcatcaaaccaatatccccgtcaaccaataatccataccgaagccagagcgctatgataaggcgcaacaccttttgttcttctgatcttccgtccatcgcccgcaagctcgacctctttttccagatcgtccgcccccatccaagcctgtctgagctgccgaaatccccgatatgttggacgccgctgcgagctcgcgcgtacagtgctggaacaatgacttcgtctgagttcgggccggagctgggcgatattgtggaggagtacgtgctaccgcaggttgatgggactgtagcgagacggaaagtgaagaggatggagaagtcgaggaagaaaaagaagaagagaaggaggaggagggacgaacagaaagagagttctgctttggaggatgataactcaaatgttcccccggaaagggaaat

SEQ ID NO: 3111 - DNA, 1019 bp, Emericella nidulans
gaattaaccctcacaaagggacccttgaactgttcatggtggatgggggatcaaggcttgagagacaaggaagcttgaatgagaggtttccagaggttatacctgtctcggttaggaatgtaataggggcttggaaggacgaactgtcgggatgatcctgtctggagggcactcgaacagtatattgtgattttttatcaattaccatactgctagagggtcaatattgaagcaatatgatagcatgaggatgttatgctagcgatatgaacactagaagacttgaagagattaagtacgctcaagggcgtcgtattcaagaccaatagcacgataatcatgtcaagcccagggcgaccttgctcttcctggcctagcgaacgaatccttcgatttggaattgccagactgggttaacctaaacggcctggttaggtgctaagccaggtacgttgatcttgctgctgccttcgacgtaacagacacgacagttctgtctatctggccttcggaccgtaacagaacagaataatgaattaaaataagataaaaaattggaaaaactcaatcctgacctgtggagttcgcttcggcatactatcgcacatgtcaactgccaaggccgttccagtgagatgtgaaatgaggaccggctcatccaatgagtaactcgtatagtgaagctaaagatgcaccatgactccgccgctaaactcagttcaggaaccaaacacgagcccgatttgaatcagtttgagggtcagggtccctggggaacttcgggtgtttgcagccgacaaacaggctgagtcgtgctggcctggcttcgacctgcatcttccccctgagatcccagtctgctcgtcttgattgagcttcaaactgcgagccgcgagctggagacaagttcagaaatgcgtacattggtccgactccttctctgcacaggggttgcgagcactgcgctctcacagtcccaaggggagagcttcgaatcttgaggggcctacctcagcgaa

SEQ ID NO: 3112 - DNA, 998 bp, Emericella nidulans
gactcactatagggatcgctattgtcgtcctgacaagcctcataatcaatcatgttggcctttttatcggcctcggccttatcctccgtatcttcatcctcttcatcctcttcatcctcgtcctcctcgtcctcctcatcttcttcgtcttcgtcttcttcgttcccttctccctccgggtctgcgtcacccgcaccctcatcctccgatccagatagttcaaaatcaatatcctcctcatcgtcctcatcctcaccgttcgcctttttagctgccgctcgttcctgttttgcaattgcctcaccttcctgtcttgctttctcaacaagattctctacctcgtcttcaaatgcagcgcgctcagcggctgtctcaatgacaatacccttagctcgaagctcctctatcctttccatccgttctttcgctgcttgtagtctcgcttgatacaacaaactcgctgatagctctgctgggttcatcgccgtagacttccgggtgggcgacgtaagctgcgccagcgctttcagctttgaatatagatgctggctcctgcactttccgtactggaagattctcaaatgctgcaatactccggcatttggccggtgacgtgacgatttttgggtcactattggtgtcatccttctggtgccgagctacctgttccgggtgagtctaaccctcactggggcctttctaagggctcccccttcttgccactgttatttaaccatttgcttgtccttttgttcttttctcaaatattccttgatactttgtcactgctcctatggtcttcacaactgtttcatttcttttcctcttacttttgtttcaatatcttcatttcttcctttctcatctctatctctcatttcttttcctctctcttttttctccttgacatttcctatttatattactcccccttctaccttcccatctctccccctcgtcaccttcttactatttctctatcttataccatatcttaa

SEQ ID NO: 3113 - DNA, 1696 bp, Emericella nidulans
  unsure (1)..(1696): unsure at all n locations
caggacaaatctttgcggtcagaagttatacaggagggtctgaaagcgcttgctgcttttcctggattgaaagaactcgccctgcagtgaatgttcaacgttaacgaggcaggtcccgaggctgtcgcaaacaggaacaagatcctgtctcggttgaagtccctccggttgaatatcaccaataggagtcgatggattaatgggagctcggattatgaagtctgtctccttaccacctggcacctagcgcgtgcacacggcgaactaactgcgactggctgagacagagaccggaaccgcacaagttcttccccgaactgccctccgtctggctagaaccatgcatgtccaatcttcagcacctcaccctctactccagcatttacatcggcttcaccccgaaatgcgaccttgggggccttcatttccctaagctgaagacccttgcatttggaaaccacgcctttatccacgactcccagcttgactggatcctttcccatgctgcgaccctaacagcactctacctcgatgactgcaccataatctacgaagccgcggttagctcgtattcagttcaagagggccggacgcttcttacatttgatgccttccgccctcatccacacttaccagaaaataaactatacacgtcctatgatacgcgttgggctgattatttccgagcatttaaggataagttggtacatctgaaggattttcgttacgggagtgcaccaaactggtgggaggatgagaccactccctttgagtcggagcagaagatcaggattgggtttggaaaagaaagctatctcacctttgcctctgggattttaccttgtgaatatatggagcatttctactggtggatccgcacgaagcgtgccgttgtaactgcgaactggagggattaccttgaatatgttcatggagagaagttggaggtttcggaggatgataagaaggccttagaggagctatgcaagaaagtcgggttatcgtggagtgtctcttcttcggaagataaatagtatgatatcgatgggtcggcggaagtcaaatgtggtagggacgaaagaaagatgaacaagaactgggacattctaactgggtatactgaaatgcgaaacgctaatcactcaaaagataaacccaaacgccggtatgccagcagaattccagaggggccatattaatccctttttttccaacatcagcctcgaagagcattctttttcttttaaccgcaccacctcggggcttggttgctttccttcacacaccctaaacccttgttcccattgaaacggctacgacttttttgggcttnaattcggttttaccagaccctcctttttccagaaaaattattttttccttgacccgaaaattggtattgcaaattttatgccccaaatataaccccgaaatacacgggtaaacccacaaaagggcctttcccgagaacccctggcacaggaacttttggacaaggttccccctgccccccccgcggatgggagtgggggacccaaaatttttataaaccccactaggcttgaaccaccgggagtcgctataagggccaaaacaatttctcccccccgggtgtttttttattttccccctcctctcttattcttatttttagtttgaccttgtttttgggtgcttcgggggggggggggggggt

SEQ ID NO: 3114 - DNA, 1465 bp, Emericella nidulans
  unsure (1)..(1465): unsure at all n locations
ccacgtcgagacgaagaccgcactttagatatgagcgactggtacagtttctacctagtccctgcgcggcgcactgcgacacaaacactttccagcctgggccgtacccgcagaacaatatggagatcatgatcgactgggtggagaacggggtgaagccgtctcgtctcaatgcgacggtctcctctggagattacgagggtgagatccagatgctttgtcagtggccgaagcgtccgctctggaagaacggcagcgacagctttagctgtgtggatgacaaggagtcgatagagagctggacctacgacttccctgccttcaagatcccagtctactagacgggtgctgtctgctggtagccactgctcctttccagggcttgtttcagtctacttccctgtgtacagtatacccagtttttttctcttcttcgactattatttattctaggtagttagctggctgatactgcctcctcatgctgattccagtctataatgtagctcaatcttatcagctgtggaagttctaattgcattacatcgcctcaccagacagtaattgtaatggctagcccaggaggcgaaatatctttaagagcatactccattaatgttactgtaaaggacacgccccccgatcagggtcctcgggcgcgtgctgcgtgataataaccacaccgacagcggccctgtaccccttaccgctgtgtcctcatccgtcccatagcacgtcaagtacctgacttatgcgttcgcaggtttgggtctatgggactccagatgggaggctgattatctactcgcgtaaacccgccctgaccgctgctaggagccctcagcaaaaataacggaaacagacaataggttccacctttgctaggtatagcaaataaggcataacattcatattattgtcattcaatttgtctttaagggccttgtactcgaattataatgggctatctgcgctgcgccgcgtcttgttccctctcgtcgagtagaccctgcttactacattgtaacttctcctttatgcggatttcaaccctattttgtcgttagttggggtgaatatctggggaatgagggatttggtttcctatataatgtctattcttctaaatctctttttgttatacttccagctgcttgtgttatagctacagctataccaaggcaaagcattcaatcagatctagcagcaataaaatcgaggctatacttccacattgctcctccttccaaagagatgcagttccttttgattgactctactttctgacgcgacttgtagtcttgttctagggttatgatagctgttattatgaagtttctcgttctttgtctttgtactgaattgactnactactctaggcctaccttaaagggttttgataaatggactatcatttttcttcccatactaatgatgctagataaaattccatatgatgttttcc

SEQ ID NO: 3115 - DNA, 1655 bp, Emericella nidulans
tagattcattttcatcattgcaacggtggtcttatattatgagcagtttttagaccatgggtgcaaaaatggatgaaggtatgagtcttttaacgaatctatgatatctagaggtgtgttttactgatatgttttcagactgcacgggaacgacgcacatatatcccggtttctgtcagtcctcgactttgaacctgtttcgctacaccaaacgctctatatgtatatagtcgcaggcgataaatatatatggcaatcggtgcggagataccctggttatttaagattcattcttaagagtacgtacttgctgggttgccaaactgctggcctgcgagcgagaattcctcgaatcagcttaagggacatcgaaagctatcccctgggtcaaatagaggaaagttacgggaagtcgcttgagcagtactcatctgcagcatctacaggccatgcctgcccgagtagcacaacccgtctcttcctcccgcaagagctataccgctatcaaattcccgaaaactgcctaagttctcattggaatgagattcagccgagctattataggccagatgcagcatacaagatatgagtccattgctgttatcactagctggacgctgcccgcatgcattcgatataccttatcacctgtgtgccaagaccagacgcattccagccagtggcaagccctcagtgactgctgctcccgactgttccatgggttccggcgggaaataaaaggattgagttgcaataccagtcaaacaggattcaagccctggagagcctgcggtcgattcgttgaaggttgaaagtggccaccaaatccttctccgcttttccaccgccgtcgtcataaaagatctgccccgtcgttcaagtccgctcttggtttcactctcatcgaaaccattcgcttcgtactactttatcgccgcattacacaggcaacccgttaattccatgtcgcatgctattatatcacaactccgcatttgaccatttttgaccagaggtcccatcgtccagtgtcgaactatcgtattgtgcacccaaaacgtgtgaagagaaattgaagataacagagggttcgagcgagccatcaatcaacaaatcaagatagcatcctaaagacagaataggtgggatcttgacactggcactgtggagggcttgttgtaagagacttggaagattccaccgaagatgtcattaacccgccaggaaagaaatactacttcggccgatgaatcaaaattcccaactacacagctattctttctaggtatatttaccttttccgcttacgtggggataaattactgactttttcgcttccgaacagcaatatgccgagtcgcagagcccatagcggtcacgtcgccgctgattttcgcgtttgcgatggtcaaggatttttatatgggcgagggcagcgaggcatcattctacgctggaatccttgtcgccacatttatcctagtggaggtcctctctagaaactccttgatcgctatatctgagtgtgagcggaggaagcccagaatgatccctctggtgacgctaccatcatgtcgatgttagtgtacggtttgctccgactactgggtgaccttgttgtgggggactggagggttgttaatggcatcataacc

SEQ ID NO: 3116 - DNA, 950 bp, Emericella nidulans
atagaatagacgaaggctcgccaggaattagaagattaagttaagtaataatatataaatattagataagataggtctttactagggttaaaatgactttattcctgctagtactccttatataattagctaatattaattacttatcttagatagctatagaagctatctaataccttaatttaacaagttctataagaataatagtataatatctctttatatgcctgctggtttatcttatctattataattattagatattggctggtttggtctgctaaagtatatatatagaggtcttattaaatcaagattataccttagcaaatactatattaataagtttgactttttagaggcctatcccctgtatatattaaaatatttttaataagaaaaatatttagagcagctttgctgctacagggatagagctatataatctagataagattcttagtaaactttatatattactttttatattatctccccccctggtatcaagcaggggttctagtatatttactatattctatatagtttaataactatactaaaagactctattactttagaattctatagagagggcctctaagatacttattaaggatattaataactatatagagcagttataaaaaggctttaaagttgctttatataataaggaatttcttgcttataaaaaccaacttctatacttagaaagtataaagaagaggcttaaaaggtaataatctaggtaccagataatacctaataaaggtatcttagtataagaggcaagagatctgatattatagagaaataagtatctaaatactaaaaatccctctcctgatagatctactctagagtctttgtctatactaagataatatctactaatatattctaatataatacttcagtcatagaagaactcatatcctgtcctagtt

SEQ ID NO: 3117 - DNA, 1012 bp, Emericella nidulans
tggccaagggtgctccattcagacagtgtcattaagaagggctatcattgtcaatttggcacaccagtttggtacatctatcttatcgagaataatgctcaagagctctactgagactttctattgcagacctcatagcgacattacttgtcaaaagtctcgaacaatcggctgataaaatttatatccaacatgctccgatgaggagtcaggaaggtataattcatgtattctatcataaataagcgctcgctaatattgcaaagcaaacactcaagccattcttcttgccgcaggctatctacatcgccttaaccgagatgaagtgaagagcattggacatacaagtgtcttcctcaacgctgtatccaaccgcttagcagcgacctccacacgggcccgcttcctcggaatgatcattggcactgcgatctcgcagcttattgaggaacccggtaaagcaatcaaatttgatctcgaagagatggagggcgatgaggctacatggtacttgagtcttgttaattctagcgacaaaattgggtctctggactccattagattgccaaaaagtatgtctaacaagcctggaccgactgcagtcagggccgaagcgcgcacaagcactacacgtcctcttgggaagtctaaccaacgtacaacaaaaattgtggcagttgaagagatagacaattcggatgaggagggtgaagacgaggatgctgatttgataccttatgaaaaacctgacgaagatccggctgatgaggacgacgacccaacgcttctgcagcggaataaaccggctgcgccagtgtaagtctacttatttcaagttgaccagaccatctaatcattgataggtacatccgcgaccttataatataccttcgggacacagagaacctagaccgttacgaacttgccctcgaacagccccagaactaatcagacgtaaggccggttttggtacaagttcgccaacacacagaaaattgggtctcggctcgtc

SEQ ID NO: 3118 - DNA, 578 bp, Emericella nidulans
ctcgttgattcgcaatcacatatcgccgcccattttcaagaaggcggactcggtatgagtggtgcctccctccagacgatccggccatccaacggggcgatacctggtcctgcaggacatcatgacgcgaattatcgtcaccaacgatgtccacaaagggccgacacgagtcatcagtatcgaaaacactgctggcggcagtgtagtgcctcttgctgagctgcgccggatccgcgagtgggctgatcgcaaccgcgtcgcggtccatatggatggtgctcgattatgggaggccgtagccacggggcggggcagcctgtctgagtattgtacgctctgcgacttggtctccctggactttagcaggaatctcggtgcgcccatgggcgcaatggtgcttgggtcaacccagctcatagcccggctgcggcgaatacgcaagagcattggtggtgccctcaagcaatccggtcctatcgccgcagccgcgcagtttgcctttatggagcagtttgggctggggccctggggaagtcaaggaaagctacgtgccgttcatttgcttgcgaagcaggtgg

SEQ ID NO: 3119 - DNA, 3072 bp, Emericella nidulans
  unsure (1)..(3072): unsure at all n locations
acttcatccaccatctggtcgttggcggccagcttggtcttatattcttcaatcgccttcctggcggttgcgatctgggactccagctgcgcgaccttcatctcgcgagcgtcatatttctccttcagcttgcgctctcgcgcttgcagcttctgaaaactctgggcgtcgacctccttttgagcgtctcttagaaccgcttcgccagtgagatccatcgcggcgcgcagctcgttggctgtcgtctgccacttttgcgcgtcgttgaagagctccaggttggagctgtcgagctccttgacctggtcctcaagccgttggttctcgagcaatatctcatgcagtcgcctgtcagtgttagttgagtcatgatatttacgcaggtacaagttcttgagcaacttgatggccatctcctccgatccgccactcctgaccaatatgccgagttgctgctcgattcgttcacgctcgaattctgtatcatggtctaatgttagtcctctgtcgtattcttgcggatcaggggtcctctcgggtgttgggagctgcaaggttgctgactccgcttcagactgctcaatctcctgagggctgtggattaatccgcttccagaaatcatccttaaggctgcgtaaatgtcagtttgagtgtcttggtaggtgtaatagatgccagtgaatgagcaggtggtaatccgctagaagtacggataactgctgaattctgtgccgtaggcaattgttcggatagagctatgctgggtgagaacggagcaaaacacaaggggatttgtttctttaagtagtattcccgctgagactcgcctcttcgtcctggacaatagtttttatccctcgagaatgaaaccatccttcatctcacccttccctttcagcaggagacgtagtacacactttcagcgtctacctaagtggctttctatgaacctttgttggcatctttattctgctnctgggtgctttaggctcgctcagcctttggtctattgtactttagttggtcgcaatcaatatctgaacttacggcttttatttcaaggcttgtgcctgaattattgcttgtctagtgaccttgagtaatgagatcagagcccatcaatgctatgccagatctttttgttgcaaaaaagtgccgctgtctgttcgtctgaaccaaaatcgaccaggaatgtatagcttcgagtaggagtcgataaagaacttgaggggcagatatcatcaggagggaagtagttttacacatagagggggattatccctcgcttaaattttacagccctggattcggttgagaataactataggttcggagggaagatgaaagttgacaaggtagccccatggctgaccgaataaagagcgccgaactcgagtacacattactccggcagacaaatacaagagggtccaaactggcccctggtgagattcgatagtaggtcaggagactgcggtggctggttctggcgcctgttatagtataagagatgggccttgccctaactgcggcgtcggacagatatgttcctctgagtgaggtgaggtacattgtccatcacctgtaagagataatggtgagtaataagatgcatttaggggatcccagcccgagcatccaactaaagaaagacatggcatggccaaaacaactcccctatgcgaaccgccttgaagactgctccagatcctgtatatccacattctggccgagttcttttagaaatcgatcaatttcggcttcaataaatccttgctcaggctcagtttcagatccacaatcgtcgagaccaaattcatcgcggtactgctggtacttggcctgatagagagcgtgtctatccggagttaaaccagatatggacccagctacagaacagcgacgtcgcttgaccttttcctcctggctccgagcagaaagagagacgaaaggaggagaaaacggaacagagctcatatttgggctaagacctaccaggctaaaccttctattaccctgcacctcaatgaagttcagaaacgccgcgtaccgactgaacacctcatttcgttcttccgagtcagcaacaatccggcgacctgaacgttcaatgaacccttcaaccgtccgcagcgtcgtaacgaggaacttgttataccgcacgcgctcgccctccggcacgctccgagtggctttgaattgcgcaaggagtcggggtccttctttacgtagggaggctgttttgcttagcgtgctgcatctgaaagcgtattgttctgctagggtagcatctagaacgacatgttagcatggcctgaagtagaaggaagaagggaagaagggggcggagggtgctcaccgaatcgtcctccacggcccccgtcgatcacgaacttggggatttcacgcccagcagagcttccgcgccaggtctcgcggagcctgaactcagatacgggcattgtttggcttacgcggaatagactagagtgaattgatgttggttatcgtttgtgttgaatatacacagtgaattgtgagtatggacagcaatattggaagtacaggacttggtggggatatgcatttgtatttatactcgcctattgagaacttagagatcattgatgcggagtgggtgaggattagtgtgttaagcttattgtctagagaaggtgataaacaatgcctatgatgcagtctctctatactgggatttaatttgctgaaaggagacaggaagttgctttataacgttcttgtaacgccattgtcaagagacatgtcgtcatcgcactatattactagggttcctctaacaatggcaagtaagaaagagtgggaatctagagcgaataaagcattgttcttcagagcttcgctttcttcttccctttgacgttctgaaaggtatctcctgatagaaggaagtcgggataattggatgaccctataccggcagatgatatgcgccagctagctccgtccactgtaaaatttgttagcagtagaacctgagcatagatcgtgcatacttacccacaaggatctgacagctgtcgtgcgcattc

SEQ ID NO: 3120 - DNA, 1132 bp, Emericella nidulans
tacagcttacagattccaccaagcgcatggaataacagtccccaggtgccacaaactgtgcgcatcaatgtttgcataccacggcgggaagtccagtagctcaaggctcatggccaagatgatccaaaccacgatcagtgctggccaaagggtccaggttttacccgttttttggtagcggacaacgctgaagcaaatccacaaggtattctgaatcatgcccaccacgatgtttgcaatcatattatacgtataatcccacgaccagaagctaagatagcacacgtgaatagtgtatagaagaatgcagactgtggtccacagacgccgcaacgtgggcctgtatctcggttgttctttatccaagcggaaaatccgcactgtagcgagatatagcccatacaatacactcgcaccggctccgaaatagtccagtttctcggtcaacggaaagtctcgagcgtggaagagcatgctaaaagtccaggctgccaggccgctgtatccaaacgcgatataatatttctggagaggatgccatgagggagtcatttcacgtaatcgagccattccataccagtgagcaaggaaattaaggccagagaagatgaccgaaaacagttcctgcatgcccaggattctgcgaaaaggccacttcccatgaaactggaccacagggctaagcataggcggatcgcgagcgagtcgacggtctgtcacaacatgttggcaggtatagtcacattcggcagggcacgtccagagcatcagacggagaaggaaagctagtagcgctcatgatcagctagaaagtacacaaactgatgattgccattgtgaaacaagaaacatacgtatggctgagtccccatcctgccagttggcagcctcacaaatctgtatccaatgaggttagttccaatgcaagcgtaacatgtgagtagttgtgccatgacacaccatttgtagtaggcaaggtggtcccctaacgaggcagccgactcttgaaggcaggatgcgaggataagcaagagacaccagtagccggccttctttaccgctggaaataaaatcgttgtgtactcggcgggaaaatgcaccagggtcggagtcacgcgagattccacagagt

SEQ ID NO: 3121 - DNA, 1809 bp, Emericella nidulans
ggaagaggagagtagaaaaggggagaggcgagagagggtgagcgacaagggaagaagaggaggagaaaggaaggaataggtgttgaggggggaaggagaagaggggaggtggaggaaagaggagtgatagagaagaagaggaagtagagaaatggggaggtcaggagagatattgaacggagaggtagatataaatacggaaaagtacagagaggaggcatgagggaaggtgagtgaggggggttagagataagaaaggtgtggaagagttaataaaagaagtaagagggaaaggggagagaagaggaaggaaaaaaggggaaaagtaaaaaataaaagaatgaggaaggagggaagaaagaaggaagggatgatggagtaaggattccagatggtatgaggcaggaggaagtctgtgagagtgccaagagacatgatagaagaggcgagataggcgagtgagggatcaaaggagtgccgtgagatcgccggaggcaacagccagcggcaagaatatgttgccattgcggcggaatatacgagattggtaggatggccacgatggcagaagcttatgatgtagcattggccccccattgtccgttaggccctagtgccctcgcggcaagtcttcaggtcgatactgttagtgccaactttgctatccaggaaatgagcttgggcatccgctataatgctggatcagcggatattgacacgtatatcaagaatccggaggtttgtaaggtgcagggcgaattgatcgaccttctaaaaagaccaggcctgggtattgagattgacgaagagataatcagggcagctactgtggacgctgtcgcatggcgcaaccgcacttctgggacctgagagaactaaggggggatgaatttgatgtcctcagcttatagatcactttcttgtcatagtgctgaggtgttcgctccgatgaaatatcagccgatgactggtaccttctcacactttaagcactaactagactaaatgacatttggtaactgctgctaagacatctgctgcaggtggttagaaatggcacgtgcaccctgcctagctgccttatcttcgctttcccagaaagtcactttttttccccacgttccacccagtccttaacaacgcgtctgagcatccccatggctaaaaactgaattttttgttttcttctcagatgctcgtatgtgatgctttttgtctgatatacttcgatggagccgactcgaggccatccgaacaaacggcgatccgtcaaggaacgggttcgtgttactcgcgcctgcgatacttgcaaaaagtaagtcactccagcttgaaccattactacacttgacctgactcgtgacggttaggaagaagttgcgttgctcgggtaccctaccgtgtttcctgtgccaacgctcccagttgaggtgcgaatataccgctggttacactcgaggaaaagtgccacctgtacccacaatcagcggtgctgatagtatgaacaataccattcaaaatcatcatgaaaagactacgaattccagcgtggagagccgatctccacctaaaccgcaggacaccgcacaaaatgtactcttagcgagggagaaacaggttaacctcccatcatcgggcaactcacctgagcctcaccaaactgatatggagggacattatgtcggtcctgcttctggcgtctccttcttgataagagtacagaagcgtctacatgagcatattttgttcccggtactacgcccatcttagtttcgtgatgcacccttccgaatatgatcatctttctgg

SEQ ID NO: 3122 - DNA, 3772 bp, Emericella nidulans
ttcaaggcacccagtcttatctccccgagcggcttccgcaatttttgtgtatcgctaacgttcacggccacgtattttagaatacgatactgggttatgacgctgaggacgagatgtcgatctgtctggctatcgttggtaacaagcggaatccttcgagctcgggactcgagcatacgccggcacgcctcgtacaacggtcgctctgggtcaatggagatagtctctggcggggcgacatccaatgcccgttccacctctatatcacttgtcagttccgaacgtataacagtgaaacggtttcacatcacgcacctcgaaggctatccaagcggagttggtctattttatctaaggcggcgggattttggaagtaatattgaatgacattgatgtaatcggacgtagtgagaaggccggcgaaggtggacgacttcgagtcccatagcggcgccgaaacaattcctatcgatcgcgcgtcagtatcggccgtgcattactgattgagaaatgattgaaccatctgccagacgtaccattctgagtgaggatatttaggctctctttcactgtcaaggcggtgtcgaagacgatgagccggaaacttaaaggaaggacatcatagctggtgcggaccttgaggaagttgcggatggcacgctagacgaaaattagagctcagttagcatcgagcaggatttgaatatcaacaaccaagcgtcagggtaaatggacaacaagcagttcaggcgaatgcggggagcaataggtgcgatgatcgagatgtctactctccaccatgggctgacgtatgcgaaacattgtcgcaaaagcgagacaaagcaagccaccaggtgatacgatcagggcgagagaaacaagaactaaacttactaggccctggcgctcttcccgatcgatcgccctttcaggctgggatgggggcattggatatgagagaggtcgcgatcggaggtaagaggagggctggacaaaaccaccctcgtgaccacagacggagaaaggagggacggggacgggggcggacgggatcgtgctgaccgtgcgaaacgtcgatgaggggagatcggtggcagaaggaagagtagcgctggcagtggtcgccgtggtggtagtggttgtggtgtcgttggctggaggcggcaacccggagccggagccgctgattctgcccgtggggatccgcccacgatgctggtgctggtgttgttgacgatgcaagttcccttccgatgtagacgccattttgagccagcggaaaggcgggcaggctgcatacagaatcccccttgggccggaagaggggtaagtatggacaattacacgcctcgacaacagggggaataatgcagggataagagcacgactatgcaagcagactactccgcctagagtacctacttgatacaaaacaggccacctacatccaaaagaagcttcaagggagatgggaataggaataggagcactattgacgactaaagcatgcgcactgctataatgattatagttgatttctgtagcatctattcgccaataatactcttaagactggctgagcagcacagcatgaaggaggggaaggaggggcaccgccatgatattaaaagctccattcccccctagttttatcccgtcgcagaatcgctttcgacttctgacatcctgctctccagataccatatcagatttaaagcgagatgatcctctatctcgtcctcaaccagagttgtcactttctatgtggcctcaggcctccacatccgagccccgcgatcccagcacgtgattcatcgcagcgaagatactcggacccgaccttgaccttgacaccatctctgacgtccgttccatctctacgcacgatccaacgccaagtctcgaacagagctcaacaccaaagcaggttttcaaccagggcggttggacggccgaaacacaggctgcgggttgagttcgtcgctgagagggatggcagaaggatacagtgctgcaaaaccatgtacttacagtcacacctggatatcaatgacaatcatccaggcagtataatcatgaaataggagtccacctcatttccttgtgacatagattgacttgtaaggttttaaacacatctagctattcaatcagaggctcaccaacaacgtgcatggtctcccactcccaatcgccgcctggtagctatttcgatcctggatatgtctagttacagtgtgagtattctttgctgcattcaggctcaactagataatacgtacaggctgtttcgcgggtgcgtcaatccacgctcccattctatactgcgcatggtccaccggcgtcaaccgagtcctgaaccccttgccatccttgcagttgattaaggaagttcatgggaaaaagagggttgaacggcgcagcatcttgtattgactggatctcttcgggcgagagcttgacacttattgcatcattcatccccttgacgtggtctatcgtctggacgccgacgattgggactacgtaggtcgatgggtggaacaaatacgccagggcctaatttagctgctcagcagtccgtacactgaagtttcaagagtttgggatagagtgttgactcacgatagcctgcactgtagtcttcttggcaacagcgaccttttccagtgcgccagacaccgtgagctcatgcggacccaattcgtaaaagctcttttggccagcctgctttttctcacgctcttgcctctgttggcaagatagaagcaggctcccgccgagcgccgcccaagggacaatagccatgccctggtcctcacacatggggtataatctcggcttccatatcacggaacgcagcgttccatttgccttggtatattgaaaacggagtgatgccattttttcgagcgactatcggggatgatgttagttgatttcggggacgagaatctcaatatatgaacccacactcgttggccttgacaacgacccatgtcagaaaacccccaggtacagtacctgcctcgacatgacaagtgaatgcagatggatcatgacttcctccaccgaggtagcgaaatcccacctacgcctacaagatcagtgtcaacttgcaaggaatacgtctggctaactcaccagtgaacatagagcacatcaacatagtctgttctcagcttcttcagactatccctcccagacacaaacatacgctttgccgagttacccacaaaattgctctgtacggctcattatcccaatcatgacttcgttactgcgccgaatacttcgttgcaatcaccatctggttgcgcaccccgcgcgcctccatccaggcaccgatatgcttctcggatacctcactgttatatacgtttgctgtatcgatgaagttttctctctgagagtagaactcgtcgagcagtttgaacgggtcttcactcaccccaaaaagctcactccattcgttgccaaaggatagccgaaggatatttcgccgaggcaggtgggggagactttgaccgaggctgtgggggaaggatgcggtgaaaggctaacggaatggcgggcttggaaggagggttgaagaaagacatcttgcttctacttggatgagggtcgccacagattaatggtttgaggcgaaattgatcgatctggggctttatatggcattctcatggttatgtggcactattaggggcttgttggatttaattctccgcatcatgcttacatagtgcttccatgaggcatgcctatggct

SEQ ID NO: 3123 - DNA, 898 bp, Emericella nidulans
ctcatagtggaccggttcctcaggtttctccactaagtggatagcctcggacaacccccggccctaaatatcctgaacacttcctaatccggaaaaactaagcactcctgcaaaggactagtcttcttgcacaggtcactagcaaaacagtggtatatactcactgccctgtactaggaacgggattttcgatatgttggccgtcccaacccacctgcccgaacaagcagtgtaaagcacaccggcatgccgtgaaacctgctacgtatcgaccctctgcatatcaaaccctgctctagcagtacaaatcaccgacggcagcccatatctcctattttagttatcacatacgcatacggttatgagccagcacatataagattggatatcatatctccatttttttaccgtaactcatacaatccttccctcccattcacatccacaaccacactcagccctgaatcttcaggtcccctagtcaacctgtacagaccaaacacataaggtatacatcataatgtcccccatcgtcctcccctctgagtccaccgcccagcctgcaagccccctctttgccctcacaaaccgcacagtcgccatcaccggcggcgggcgcggcctcggcgtcaccctcacaagcgcagtcctcgaagccggcggtgatgtcgcctgcttggacctcctgcctgcccccagtgccgaagaatgggcagccgtgcagaaactcgccgctgcaagggggctgcaggcaacgtatgtccagtgcgatgtgacagatgaggttgcagtccaggcagcactagagaatattgcagccgttgggcttgggcgagggatgccgctcagagggttgattacttgcgcggggattcagcagatggtcccggcgttggag

SEQ ID NO: 3124 - DNA, 2083 bp, Emericella nidulans
ggtcagtttatttatcccttggtgggcgcacattctcggcgggacatacgaggtgtcaggcttgaagacgtatgcaacaccagcaacgagcaggctgccaatgaatccgtagtaccaaatgttctcccaaccctccttcacgtacttctggccgggcttaacgccgaagaggtacccagtcggggggtcgtagtgatcgccgtggtcggcgccgccgcggaggttggttcgcgtggagaagccctggatgttctgagcgctgcggcgaatgcagcgggcgcgaaggcagtgtgacaaaggacgaagagtcattttaggatatgtgaagcttgctctgtacttggattaacggatcggtacgggcggtggcggtgttgaacttccgtcggacggagcgcggtgggctcgcggagaatggatcgagcttggagttcgttatattcaagataaggagaggagagatgcccaattggtgaacccaggggaaacttgttcactgggatcgcagggaatgactcgtagaggggtgacgagatgagccggtgtacgatattcagaagccgcaaaaggccgatggagccaagcagataagcctaaacaggaagatcgctatgccgcctttctgcctcatgtctcaggcacattacttcgtaggacgaacgcgttggacgcgtttggacacacgctcctaaatgaggtgcttctgccctggattgtacagagtacggaataatctacctttttgaactaatcaccaatgtaagggagctgttccacttagcggcttcttttttttcgatcagacattgatcggtaacgtatccttgctctccagctttttggttaactccgcctttactaactgttttcgaagccagactcgagatgccctgctgctctttgcttgccgggatacattgtcaagatgaactccatttataagggcccgcgccctattcccgcttccgcagattcgcgctcgaaactagacgccttccgatacaaaaccaataaccaaaatggcactgcgatgtcgccaaagaagacaaccccgcataaaggacatacaaataaagaaaatcaaacgtcatggctgaatggcgtggtggagcaagacaaatcagagtcagataaccggcagaatctgcaggaagggccagagcccaaggctgtcaaagattgcccacagactcccggcaataggctgcctctggcagacctcattggcaacgcagaagacgctttcagccgggcccctatggcgcaagagtttacgccagaagattatgttatctggcagcatgctccgcccagttcaaacccgagcacccagacgcccgcaacccaaagcaagaagcgccgccacagctcgtctccgagtagctctcccctagccggttcgaaaggggcgcggaaaggatcttttgacctgcagtccattcaggccttgcttaagaccccccaaaatgacttagcaaccgatctatggaataactatgtcgccaagactgccgtgaatgtaacagacctccagcaaccacgctttgcgggtcttctgtcatcctccccgcgcacacccacgtcggccagggcaggccaggattcttcgggattaaggcgatccattagctgcaatgctgaatggcctagcactaaggcgaagaggaggagggtggaaggggagagcccccgcaaaggccgtgctatattctcacgaactagaagcaacattatggttccgaaagatctaaaaacgtccaacttcagctctctcgttcaagaaatggagagaagtctcaaaaaggctatcccaaaatactcagacacctccaagaccgcacctgctatagcacacactgagacgcgacggagtcgatcagcatccccgttggaaactagacttgccaaaggtccagtcagggaagcaatcttggataacgaggtgaattgtgctcttccctctgcaaaccagaaacccccgcaagattcgtcatccgaattcggcgatgacgaccttgatgagtttcttggattagcgaatgtctcagatcctttcgtggatcataatcaagtaggcagcaaa

SEQ ID NO: 3125 - DNA, 1154 bp, Emericella nidulans
ggatgctggaggttgcgcgtgggaagggcaattatcagtctcttgagacggcagatttgaatgaaggaattcttagcccggatgggaggtacgatgttgttgtgtgtgtgggcacgctgacaaagggtcatgttggggcaggtgtattggaggagtttgcaaggttgactatgaaagacggattggtggttgcgaccgtgcatgatgggatctgggaaagtggtgggtttaaggatgtgattggcaagttaaaggagaagagggtggtgaaggtcgtcagtctggattcgtttgggattctagaggacgagagtcaaggggggaggatggttattttgaagaagatatagtacacagatatcgccctgctgacaaagacaaagccaaagacagaatgtcaactgatagttattatttgatttattggatcgcgctgcagtacggaccagctaatgtccgtagaggtagtatggacaggtaaggcaatcttagggatatacctatggttttatagccattttggatattcccaatccaagtgtcagtgcatcctgtgtagccggtaagataatcacgcgataagtgcctctaaatgtagtcctcaggtacttcggctagcgtagcaacttctcgcatgtctatctgccctgtatccgtagtcggggagggttgtatgcgccgtaacagactcacttctctcatctctcgctttcactcttcccgtcctgcatttggtcttgtcatagctttcattttgctgtggatgctttgaattatctatgctaagataggaaacactccgtcagcggcgtcttggatggaaattccgccattcgtcccatccaactagcggtctgttgatgcggtcagttaaccactcaatatcgccacacgaacttttgcctggagatcacagttctctcaaggatggttctcggagagacgtctgacaaggcctttcaataagtgtggtatgggatcaggcgcacggaccgttgccgactggctacctagcattgcagactgtacccaaactcatacccctaaatactactccaccgcgttattgatggatatgatatgacgatgggacgatagtgcagtttaccgggccgtataccgcttgtctagacgaccaataccacgtacgacag

SEQ ID NO: 3126 - DNA, 1337 bp, Emericella nidulans
gcgcattttcatggttgatattcggtatagcaggcgtggcaagccggagtgctgcaccgtggtctcgcttgcctgtgcgatgtacagctctctcctcgtgaacggggaacagcgagatgtagagcagagatagccgggatcgcacgcagggtgtaggacgccgtgaatcctatccggggcacctcgacgcgccacagggtttgcagtgctggatggagagagaatgtgtaagcggttgaggtcgtgtaatgatggagcagctccaggtccgcgatacaagctcgaatcctgcagacggtggcgcatgtggagcttctactggaatccagcgcggcgacctctgtcggcttgtcctggagcttgagcaggaagttgtattccgatctgaggagatggatcttctggatgaggctaatgcttcttctatcccgatgcgatttggaggagcaaaagaacaatctaccccatatcttctgcacttgtcgcacactggctttttctcatcacactatctttcgattagtctttgttcagaactcaactacgagaagattctcccatcccgacataccttcactttcctgcgcttgcattgctgacaccctttgcgtgacttttgatgaaagcgccgtcctcgaagtgctaggctggcagacatgctctccgttgcaattcaaaactagcgccatgatgacgcggccaaaaaaaaggccaatatccaatctccagacaactctagtccttgtgcagcgttccgctgcgaagggcttataatgagtgccagttagagtttggcagagcctgcatatttgcatcgagaccctggaaggtcctttttgaaggtcttttaagctttctcaatcatggcttagctgggtaagtggatctgtttagtgttcttacggctgcctatcggtagggttgtagtttaggttgaatcttagtgcaaatcggcagcacaacacagaaaagatgccaggcatccatatctcctgcacagccgtgaatattattagttattgtaggagcctggctgctgctcactctagtccataccctaagtggccagggcagcacgatactaccagaaacattataaaaatttccataagacgaggctgaattggttgcaggattaagccgtttcagaatcatatcccaatgtcaatttattgccagttcaattttgggctcaataatcctgcagcttaagacattatatgagaccaggccaggaaacgagtaggaaagcagtggtaagcgaccaggtcctcttcaatccctagaattcctcttcaagaaactgaagtgtctaccacttctcaacgtaaggcctc

SEQ ID NO: 3127 - DNA, 2675 bp, Emericella nidulans
gaaagggctactggagggtcgctgagtatttcgatgaacatgtcgatgaacggatcgatgagatggttcgtgaaaaggtcgatgaaaaggtcgatgaagaggtcgatgaaaaggtcgatgaaaaggtcgatgagaaggtcgatgagaaggtcgatgagaaggccgatgagaaggtcgatgagaaagtcgacgagaaggttaatgagaaggttgatagtgcggccgatgacaatcttcaggaggaagtcgccgaaaaacggagtatgtctttgtccgacgagataattgcgtcggcccaacggcccagtgatgaggttaaggagcgttcttcggaggcggagagggcatctatgggaaagggaggcagcccgcgacctgagcgcgagtatgtcgattcaacgattgtatcggagtctccccttccaaagcgcgctgtgtccctctggtcgcagaattcgattaacgcacatgggatcctcttgaaaggaattgagcgaattcagacgagaactatggcgacagatggataccgaaagctccaggggctgattcagcatcatcccgatctgttcgctgatgaggagcaatttgctgtgttgttgattggtttgcttgacgagttggcggaacagactccaccgagcaagagtgtgttatctttgggtacggtgtcggatcacaagacgcaggttttgttcactgtgaagtacatgtttgagaacttcaagaagttttttgcgcctcactaccctggcacagatgtggcattgttggaggcagagaagtcagcggagatgggcggtcacttaatcaaggccattgaaaactttattgatgacattgtcaatgcttccagggcacactatgagatcaattgcgccgtcgttacccatcttggtcctgctgttcagattagggctggcccccctgagcccagaatgttcgaaagggcttgaatgttatcacacacggccttaccagcataaaggaccgggaatggaaacttccgcctgatcagttagagcgcctcggagaatttgtgagacaggtgatgacgcttccatcggtggccctgaagcggaggatcttcgccctttgcattgctctgcgcgagctagtggacaacgaagagcgattctgggaacttgttggatcgaagacaaagggtgtcgacggcctcctattctactaccggacgaggcaggaggcccaggctgcataggcagctcagtgaatggatgattttgcctggacttctgcacatcttccatttttggttgtgcgagatgtctgtctggaaaggagttttcttggacacggtgtgtttttggaggttggcagccgcattttgaatggagtttttgttttggacatggtttgttttcaagatttcctttagatgttgcttcattgccttcgtatctgccgttggttccttttattgatccttgtcgattggattgcttgttataagttgtataccctactgtgcatagcatgaatcagtatagcatagcctaacggtcaataaaaagttaagacttcatccgtgcgtgttgacatctagatctacttgatgaattgactagagccccagattggatcgaaattgggaaggcggacggtgaaacgtcatggcaagcgatggcctcatgtccaaaagactggcagacaagtgggatgcttgccgtcggggcggcatactacagctagaccgttttcccgcaccgtagaggcaagtatatccaagggcttttctaatcaagaataacattcgtgccacacgcctacgacggcaccatctgcctgggcctatttatttactgcacatattcccggaaactatggaactaaatagatgaggaacacaaattgggaagcttcaagctttacgcaggttcctcgactttggtaaaacaatgattgtaaaatgtcctagttttgtctagtttcccaagcaagaatacgatcagtccgacgggagaaggatcatctcgtcccaatgcatgaattcatcccccctttcgtcctcgtccacaagccggccgcgatacccagcgcgagtgctcgagaaggacgtatttatagcaaccgtctgtggtgttgggaggtctgagaattgagatagacgcgtgtctgggcttgacgacgattcagccgtcgagagtggttcttcctgaagccattccgaggggtcggatattgtgtctgcggtagaggcttgcggcgcttgtatttctattaatttctgctgctgtatattctgtacctgtctggtccctgcgctccgtccatttgtcgagggttgaaagtacgggattttgcgagcttttactcggtgggagtacaattcaccatcagtactttggagaggaagtggcagtaggaaggcctttttgttcttcggcagacagtttggtgttgaacttggtcgcggtgagtggttgttctgccgctgcggctgttgctgttgcctgtgttttagggctaatctctcagacgaatgacggtcaagcggggaagacgaccgagcatgcggaatctcagacgggacaggtcgtgattcatgaagcccaaatgcagaaatctgtcttctattacgtgtacagcgacctttttcttggtcaatggatcctttaagtagcgaggtgtttccgggcctaaacgtttgccgt

SEQ ID NO: 3128 - DNA, 1359 bp, Emericella nidulans
ctaaaaaaggagaacttttttccacatggggtggggacccggcttaaccaagagtttttggtgggatttcggaaggggtctcgaaattgcttgtgggggaaacaaccttgttggtggtccatataattccatcccccggtaaggggaaaggctaaaatgtggtaagcctaccgccaattttttgccgataattcttttcatgtcgcaagcggccaagcagacaagggctaaatactctccggatagtaatctggtctccgcggggcatgtgtcgctcaaccaaaagcctggaagttttaacgatggcatttggattacctcctcgagaaagtcctttgcatggcggggcagaactgccccgagtggctgtggtggaaaaagggcatgacagccttgaattatttcgtaaagcccacgctgtagacacggtcagctaagaattaactgataacgataatgcaggaaagattgcgcgaaagagcggtataagcatgcgatgctcgaacaagacttacagtacaagggcgataggataggaagccccgcctgagataaggaattggacgtagatagggtgaaggggcggtgagatgagcgatataagtactacggcatgatagtcaacggaatttgtgggatatctgttgaaaaaagagtgaatctacgacagccaatattcgttcggcaagttttccgccgactccgcaggtctggcctacattgcatatatgaacatttgcttgggaagcagcattatggtatgcacaaagtaaacaaatcgaatgttatatacatatatacacacatatattcctacgttgagctcttatattctaggatcgagagcttctcaatcgtcccataaaaaacttcatttcagaagctcatcatacaagtatcaaccatcaattcagacagctctcacaatgccccgaagtgctgcgcatagagacgagtaagctcgagtatacagctcaatcgagcgccaatcggccgtagcgatatcgagtcacccgtcaccactggtcattgtctgggatcacgagctgcagttatagcactttcagctttgtagccgattcatcgtgcaaacatgttgcgtaattcgtgccgggtccaataccagatcaagcttttccgcagtcgcatggcatccggcatgcaagtcgtatcgagttgcgtcgtgtcggttaatcctgttccattcttctatcatcccgccgcaagcacagtcgcaaccacatactctccgtcatgcgaaatagataaccgcccaaccctcccccttcgacaatcctcatcacgatcaaaaaggataatgtctggtcttccttctttagagcacagaggttactagac

SEQ ID NO: 3129 - DNA, 1601 bp, Emericella nidulans
  unsure (1)..(1601): unsure at all n locations
atgtccggagcagaggctcgctcgtgctctgttcgcggatggctggcgcggtgtcttagctatcccggccattacgtgctaccgcttggctactgccggagtcatcttgtgatttcagcgaatattcatcaggatgttgggagagtctctcgaaggacgaggagcttgaccgcgatggcattgttatcgccccatagatggcggacgttcggggaagaaaagcgggctggttgtggtttcaccaggcgttcgttagtcatcgtctatttacgcttccaccatgtcaagtatgtcaacagattaccttaatgatcacaaggctaataaacaaatcatcaattcatcataatagttatataattcaataaggaaaaattgccaattccaaaacacatagggtattagaacttcatgctcgcgtcattacttcgtgaaatcatcgacccattcgtcgtagctgaagagacgagcagctttatagaagaaaataaagaaacacagaagatgcggtagattgcgggcgcaacaataacgcttggatcctccgagaatgagtgttcttcgctaagatcttcgccaaatcacgaagagctggcattgaaccaagacttgatgctggtctagactcgagagcgatggccgctatgaaaaaaagttagaactgacacccaggttctagagtagccgctgaaacttactatctgtcagtagcatgccgcctgacgcggaaggtgaaccacatgccctacacactcgtcagcatgtagcgtgagattctgggtccttggagtactaaccacgagcgcagaaacaatccagacaatggcagagagaaaactgaatgcctgtgcggctttccaacggccacagtaagtgtcatccgttatggagccccaacgccaaatgctgccgcagttgagtcggtcgttggcatcgacctggacaccaaagaccgcgaaccagtccatggaaagaagcaagtccactgtgcggaaactgagatcagcatcggcacgggaatcgctgtgcagagaggaattacatacgcggccatgtgaagaaccccgacgagaacggaatcagccatatgataccaaacagtatggatattccagcgacgacctcagtgtagatccatcgcgcctcgggccagatgtcaaggtcaccgaacctgtggaggaaccagccgattataccggcgaccacctatgagagttagcataggttcgtggattgtagcgtggaactgcgccaggaaccgtaccgcaccaaaaccgatttcagcaatacggagtatcacagacaagacacgcgagaagacaggcataatgggcgggagtggngtntgattaattgaagagcttcgagtgggctttggtaaatcaatgcggagggctgacaggttgccttaggcctagtttatctggttgacagaagcttattttcatcgggccttggaatcagaagagagaagaaagtcatgataaggagcggcctcaatattaataccccggcatgagcgcatcttcaccggccaacgccccttacctcaagtaacaattctgttgtgcgaacgtgaccagctcgaggccatgacgtcg

SEQ ID NO: 3130 - DNA, 1155 bp, Emericella nidulans
agcccctccatgatcatcaccatttccctcttcgtaccatgaaactgtgagactcgactgagactggatctaaaccagtatttgggggcctggggctggctcctgtcatcaagctttcagttatctggttctgggtccgttctgagtattatttgtcgggtcagctgaagtactctgagtatatctactctttgtccgccattctgtatgcccagcccaatcctcccgttttcctccatttctccactcttgctgcttgaatctgttggcgcctctttcttccgaactattaaatctagaaaaaaaaggctaaaattcacaaaaaggtttgaagcgctgtgcagcattcttcaatctccattctcagcgccatccgccttgaattcctgacggcactccctgcttgcttgatatgtgcccaccttctcgttctcccatctacaacctcttatatcttaatgtgcccatcccttcggtatccgcgggttatatggcctaaaaccagttgaggagcgctaattttgttgttataactacctgcaacacactatcgtgaagctcccagccctactttccctcaccacaatgccgacttattccagcgtcaatcgtccaaggaagtcgaccaaatcttcagcgctgaccattatttctaccagctccaagggctccaaggctcctccagagaaattgaagaaagagagccccaaacctcaacccgtggcgcctcgaagtgcagagcctagcgggtctagctatacagcaaaagcaccgcccgcgccaacaccccagactgaagcgaagggcaaggatggcagtgcgctgaatgtgttcgagtatttagagaccgacagtgactctgatagcgaatcggaggtctcgtcatcggacgatgacgatctacgtcctccgttcccaccgaatactaacccgaaggctcctcctgccagtcggcaaccaaacaccgctgttccggtacagacccgcaaccgaacatcgtcggtgaaatctaaagagtcgcagccgccaggcgcgttcgaaggttctccagtcccagtaccagtgcaactcgccaggcagcatcggagaccttccacggatgcagggaacagcgtagtcgggtctgttgctgaatcctatgacgggacgctacct

SEQ ID NO: 3131 - DNA, 879 bp, Emericella nidulans
gagaactctaccgtggttctagagcaagggagggcgatgcattccttcagggtaagaagagaatagggcgagttgaatattgctgagctgcaatagtgggatctgtcttaagtctgggtcaagaagtaaaacaacagcaactgtttcctacgtagtaccgagagttctcggagtccactttataataataccatcaacatcatgttgattgtagggatcttcgtgattgatttttcttcataataatattccatcaattttaggtcggtgataggcaatgcgacataaaaattcaaaaatctttgcagcccttcttcacatcctaagaccatcaggtgatcttcgtcaacatcaatgccaatgtccacaatgcttctgatttgcatagcgcagacgagatctagagtcttgactctttacaagatcccaaatcatgggcggctgccctgacggaaaccatcggaaattcgcctggtcgacggcgtatcgcccagaagatttctgcgaaaggctatgatataactaggctgctagtgactaggtaaagtaatatgcgccaaaaaggggctacttgctatcgaatatcgacctgttttatttccctctcaggactctacattattcgcactattgaaaattctcgcgccctctttgccaccgacgacggtttctttgaaaccagggaggcttcaggagagcccgagctaaatttgtttcgactataaaaaggtacgcaataatgtgcctagaactactccgtacaactccaacattccgagactcgatctagactttatctaccttccgacaatgctgctggtgactacgtggataatgcgccttggagctgcaaaccgtcaaccttaagtgcgagcctat

SEQ ID NO: 3132 - DNA, 4547 bp, Emericella nidulans
gcggtcatatgattcagccctgttcagagagaaaggcttggtgtcatgtcttgggacgagtatgtataaacgtacactcgtctatcttgcacaagaatcaagctataaaccaaaacaccaagaggcggcaatatcgcttttaagagcctcggaggtacattgctgccatattcggcttccatgtcgactatagtatgacattgcactttgccagtctcagatctaagcctcctcaacatgctttctctccccaacagcaacagccttgtcggcattaacatccaaccccatctccctcatggcgttcttgcctgccagtgcgtcgggtccatcaaagatctccgcaacctcctcaaggcccttgcctttcgtctcagggaaaaacagaaatattagggtgaagttgacgccgatgaccacacaccaaactatatagtatctccagctaatcgcgtccatggcaaccggatttgcaaagctgttatatagacccgcaagattccccgtcagctggtacatcatagccgctttggatctcagcgaaaaggggacgacttccattatgtacgttggcgcaacaggcgagcacatgtggtacgcagcgctgaagacgaagatcatagccagcacaccgccggcataccctttatcctcgaaattgtgtttctcattcagtgcagagcagatcgtccagatgatgtacgctatgcccatactccccatgccggacaggaacaagcggcgtcgtccggcgcgatcgactagtgtcgcgaacaccgcagcagtgaggaagccccaaacggagagacaggcgttaatgatgagctgcgtttttggatcggtaatatcaatagtcactaacaccttggccaggtagtaggatgtcagcgcattacccgaccactgaagcatagcaggaatatagcaagccaggaagaggcgatggcggttgcccctggtagagagccattccgtccaccgggataggcgctggaccttttccatttcgagcgtcgccgtgatctcggccatttcgaaacgaacgaggcgggagtcagcgtccccgtgaccgtggtactctgtcaggatggcgagggcctcctcgcgccggccttggtagatgagccaacggggtgattccggcgcgaggagagctaggactgcctggacaagcgagaagaagcattgcagtgcgctggggatccgccagctccagtccgacccttccatcttgaaggtcccgtatgtcacccaggcggcgatcagcgaaccaagtggccaagtaaccaggtagaaggagacgagtttcccgcggtgcgttgggtaggccacttcagtaagcaacgggggcgcagcagtagccactattcccagtccaaagccgacaacgaatctactgaggacgaacatgccgtagttcaccgctgcggcttgaaggatcccgccgatgattatgacgattgatccgccgcagatcggataccgtctaccaaatcgctcgcatagctgtgatgagatcaaaaccgagatcagtgtgccgcctgtcggtccaaatgtcatggcgcccagacgcgtgcccgtcggctggccaaagtagctcacccactgcgggagcgactgcatgccgttgagcatgctgctgtcgtagccggaggcgatctgagtaaggagggcgcaaagaagcagggtattgagtttcagaagggtccaatcacgataccagggtttgcggccgtctgggattacgtccctgaggacgagcccctcaaaagtctcgtgtttggagtgagagagcattgttagggttgtctgttgatctgccggtaggtagccgtagggaacaaggcaacgagctcggcctacctacagaacaatccttttcatctttatatgtcggaccaccccgttaagctctggcctgcttggacccaggatgcttgtatgccgcaattggtatagtttacccccgcagtatgccatgtattgggcgggggaagccaggatcaagactgggtctcggggatatcggaagggagatcgacagccgtgactgcctggtcggtatgacatggcaacttggcagatgaccattatctgcgccctcagacatgggataggatccccggacaagctttgccccgaggttgcccttctcattgcagggtctttccacagccgggctgattgacggataaaagagtccctcccgtgttcattgacttttctacaagactcatatcaacatgccacaaacagcagagggcgggcaagtcctgatacaggagctgttcgccgagaacgtgctcgcaaaagtattacgtgtggcagaggaggccttaaaggacaatgtaccatcactcaagatcgtcataatctatttttctatactgacaacgtcctagatccccccaacggtctacccagaattcgttccccagaacggcgcagacgccgggcggtactttcttcgcgaggctagtttctggacatgcgggttctttcctgggcttctctacacactcagggagcgcgcggtcaagtacccgcaggcttttccttcccttgggggcaatgacaatgaagccggatcagcagctaccaccgaggctctgctggaccggctcacctccctgtgtaccgcctggacacagcccattaaggccatgagagcgcgcaccgacacgcacgatataggcttcatcttacaaccgtccctgcggaaggagtgggagctgacctccaatcgtgaaagcctcgatgcgctcattacaggcgcgcacagtctcgccacccgattcgtgccgtccgtcggagcgattcgcagctgggacgcactgcgacaggcagatatagagatcacaagcctggaagatgactgccttgttatcgtcgacagcatgatgaatctcgatctgctctactatgcctcgcatcattcgggggagagcaagttggcacatatcgcgaccactcacgcgaagacagtgatgcgatctcttcttcgacacgaatcacggcccggcaactatggcggatacccgctgcatctatactctacctatcacgtggtcaatttcgaccccaagacaggagatgtgaaagcgcaccgcacggcgcaagggtacgccaaggagtccacctgggcacgcgggcaggcatgggggattacaggctttgcgcagacgtacaagtggactacggagagggaattccttgaagttgcgtgcggactggcagagtactttatacatagactcgagacttcacccgcatgcgtggagcggccagtgacccagctcgagccttctggagcagccaacggtggagggagaaagatcggtcgctacgtccccctctgggactttgacgcccccatcgagaacgaggagaatccgctccgcgattcctcggctggagtcgtcgcggcgaacgggatgcttttgctttcgcagtcattggcggggattgcagacctcgcgccggatggcgaggcggctagagagcttgagcttgcgaaccgatatcgcgccttcgcgatgaaaatcatgattgacgctcttgagtactcgctttcggaagagaaggccactttgcgccttgttggcagtggttctggctcggacggtgtgcgagtacaggttcaggatatgattcctggcaagcgcttcgacgccattttgaagaatgccacggcaaatcataattcgcaagaccatgatcggtacagcgatcatgggctggtctatgcggattactatctgctcgagtttggaaatcatttgttgcggatggggttggtttaaaatcggttagggttccagtggattaaaatataatcgagtttgagtagaaccagaatcacataggcaagcaagcaatctgttgaatacttaaacatctagcgcgatcgcatctctgctgcgctctcctgagacctctctgagctggactttaggcacatccagccagctctctcgcatacgccgctggacgctccctccacccttcctatcggctgcgctgtcagcctgctgagccctgaacgactccgcagcaatagcaaataccctcgttacgagctcgatctcttctccaggctcaacatcaagtagctcaagctttgcgaccggaaccaaggtgcgctgggaaagtagattcgtgttggaatcgggcttcatggcctcatgatctacagacgcgacgggcccagaagagctccagctggactcgccagatcgttgacgcactgcttccgagacaattccgcttgcaccagcctgcgagatcacgagagcacttgattgggttacgtagacaccctcactcccgatactcgcgctctcgatatcaccatccgtgaacaccggcaaaactttcttcttctcagccgggactcgcccaatagcaaagccgccctcaaccaggtgcagactctccaaggacgtcttccccttcacttggatccggtggacgcgggtatgccaattgggccacctcgccgttgcgggatcaggcacgtcgtgacgacaacctgcccgtcgccccaa

SEQ ID NO: 3133 - DNA, 1156 bp, Emericella nidulans
tgttgggcagcctgagaagtatgtaggtgcggcggcgaggatgtagggcggagcgctgaggagctggctctcttggcttgtgaatcccatcccggtcaggatgatggtcttgaaatagctatacgcatatcctggaagcgttgacgccatgagattcaatgcccagaaatacagcttccagccctctaggtggtgcaagatcttcgcaaccgtcagtggatcttcttccgcatcgccacggtcatggttgatccgatcgatcacaaattgtctttctgccggagatagaaagccatctgctttggtgggaaaatcaatgacaatgagccgcccaatagcacaaactccgaccgtaatggcgccctcaactatgaagatccctagtgcacatcatccggttgcgcaggtccggattctggagaaatgattgcgtacatctccagccattaagaccataagtacccttcagcagagtcaacgcataggcgaagatggctgcaaaagcgtttaaaaccacagatatcagccagaatgccgctagccttttaccgacctcaaatcgcttgtaccagcaggtgatcagataagtacaccctagtcttgtcaatttataatcatgatcagaccttgaagcctcttacctggaaggaagccagcttccattatccctaatcactacagtcagcatcaggcagcctcgttcggagcccattcaagcctaccaagtaatgttcgacacactgtcattgtttcccagctgtatgtgaatcccataccgattaagatagccccgaagcttactccaagaaaagcaagccaattcgcggcaccggctttggggaggatgatgttctatgatgtatgaggctcttgtccatgatccttgacaaggggaacggcaaaccaacacttggaatctcgaacaaactttcatgctccagttagcatgtctcgcaagaatcattactggaggctcacatgtaagccacaaaaaacaccattaccacaacggtataccggttgccgacgtcaagcccgagatcttcttccatacccgcgacaaacgcaagcccgaggtttgtacgatctatcagagatgtacagtacattaaccctaagattggtaggagacgaagatcaacccgccgcctgcagt

SEQ ID NO: 3134 - DNA, 1310 bp, Emericella nidulans
ttataaccactgctgttaaacgacagacacgggggaatcggtgagcacggagaaatagagcacgaaagataatggtaacgaggcatgaatttatcgcaacgtctatagatactatatatgaaacttttcacaaaccaagcaaaaaaagaatagaaaaagtcttaactcatgccatttcatcccatcggcctctcgtcacatcaagactcgttcccaggcgcagatccatcccccgctgcctccgcagggtccccgtgctccaacagccagtcaacaatctgcctcgctttcgtcaccggtacctgcgtagcattacccccttctgcagcgtcacctgcaacttcaacctccatctcctcgtccccatcctgatccttgccctgactcggatctggagtctgagtagcttcctgcgccttccaatccgcccgctcagctaagaacaccgcatcaaggccggcctcgttcttgattgagatatctgccccagcctcaacaagcaccttcacgcactctaggtgggtgttgagcgctgcccagtgtggggccgtgtttccaggtgggttcggtgggttacagtggtctttacttcagccgctgttaataatgttctcattttgtgactgaaagaagctgctcttttagctttgtaaggatttctgcatatggttagcatactatccacatccggcctggaatgcaaaagggaatttggggagtaaataccaaggtttccatttgcagcagggtaatgtaggagacagcacccgctaccgccctcatcttcaggtgccgagtcgactgccgaggcaatgattacggctggcttgacggaatacttctgggatagggctgtgaggtcctcttccagggctgcagagtcgccggcgcggacatcgtagatgaggtcgtcgacctcatcgggtgtgagcgttatcagaggcatcttgtctttttctttcccttttcgagtccttgatttgatttgatttgttttctttctcttgtgcttgtccaagtcagatgatgccctatggtagacacaatcgtagaatggcttttttggatcccgatttggattgatctgaggggtagttagtctgtcttgtactcattataaatagattatgagttgtatagtgaggagaaatttcaaaagccgagacgtgatagacagctgcacctgggcagcagcagctcacgtctaacacagccgtgatatagttaaaagtccgaggcaggtaaccacttggggtgtctactagaatagagcacacaggaactctataccggcagattggtatagcgca

SEQ ID NO: 3135 - DNA, 840 bp, Emericella nidulans
  unsure (1)..(840): unsure at all n locations
actccatagcgctcgtctcatccattgaacgtcggacttcgacctcaaggtcacctgcaattgacagtcttttagtgaccctgaagctgaatttgggaaacggacgaggttcagacttacccttcctagagatcagctcagaactgccggactccttggtgttgccctccatcttcctggttggcggcgcaatgccaaaatttcaggccaaaagtttcagcaaggcatatgttgttggaggggacgaggagaaagagataacaaagagaagccaactctaaggcgcaagcacacgggattctgtttgccggggaggactttggtaatcggaccacatccggacccgtcgccagtgaatgagcagtaacatcttcaactaatcagcacagtttcctgtgaatagataaagtgcattcttcttggctcaatagtcagctcagggaatatcacagcctataaagtcttggttagccacaagaagagtatgtgaatttgctacagtatccctaactctatagaactgggcgagacttctcggtcaatctcagcttcagccagcaggctcggtccctcatcctggcggccatcataagtccgcatcgtctcgccagctcaaaagtcattcattagatttggtcttcgacaatacacctccatcgnttaatgtgatttgtctgagcaaattttggttggtgacatggggttgaagctagtaacattaccgtctagagcgattacttagcttcgggggcttttaatcacacaccgggcaggtgaatcattccactttcctcctgactccttcagactataaaacacgccactatagtttagacatta

SEQ ID NO: 3136 - DNA, 1325 bp, Emericella nidulans
aaagagggagaaggaaaagagagatattggttcgcacaacgagaaggatgtttccagtataacggaaccggatatcaagaaggagacagaattgagcctagaggaaaggcagagacaagtcgggcaaggcatgtattaacaaggaagacgtgggtcagtgaccccgtctagatgaccaagggtgaatgccaggaaaatgtccccccgagcggaccaagggcgggggaaccagggacctgtgccaagcataaagttgggagagaacagtgattcaggaaaccccggcccagcgaaagggctggggaaaccacggaggcattcttaaaaaggaaaccggggttattgctttatgtcccgaactagtgagtccctatcagggcagtcagtcactttacagatggtctgggctggttctaggctttaagaatagatatgacatcagaccacttgaaaattcctactataggcgattgtcctatagcccgaccatcatgatgaattcagtctgatttatctgtcctctaagaaacgcgcctgagccgccgtctctgcggcggatgacggtatgttaaacctggtcacctggtttcaatgaacggagatggccgtcggccgccagccacagatgatacaatggaagctgatctcgaacctcgtgatttgtggcttgaacgcagccagtgactctcggagacagaagggataaagaagtgcgcggttacgtcagagtccgtgactgcggctggtgccccgcctcgctcgccagcggctggtcacacttaaaacagctgggttgctcttctgtgcccggcctcatgatctctttcttccttttatccttcactgcagtcacggccgtcgattagatcatctccatgaactactgagccagtgattcttctcttttcatttagtttctcttaccttactctctagcgatggcttactacgatagccgaccaccataccctcccgcagagtatcccgagacgccctactattacgggaccacgcacggcgggagtcactccacggctgtcatgccacatgccaaccccgcccccactggcggaaccagggacgcatactaccgagaccatcctgcgagagacgcatacgaatatgggcacggcgactacgactcgaagcgctcacgcaagagccgtcacaaggcacactcggcagatcactacgacgacccgtacgacggatacgagtcgcgctcccgacgatccagacatcatgatgagcggcgtgcgtgtaccaatccttaggttgaacaagaccaggtaagactgactgaaccaaaaggccgtgaaaagtac

SEQ ID NO: 3137 - DNA, 855 bp, Emericella nidulans
atccgccactccacgaaacctcgcatccagatcctcggtaaagtagccggtagcgaccgcttcgacaacgctgaattacacccagagaatgttgagtcggtcgaaggtgcgctcgttgtcaaaattcctgaacctctaaccttcgcaaatacgggggacctcaagaatcgtctccgccgattagagatgtacggtacgaaccgtgcgcacccctctatgccgaggataaggcctccagagcataatcggaatgttatttttgatgtccatggtgtgacaagtattgatggttcaggggcgcaggtgttatatgagattgtggatgggtatgcgcaggccggcacgagagtgttcttctgccgggttccgaaccgaagtgtgtatcgtatgttccagcggagtgggattgtggagcggtgtggcgggatgtcgcatttcgttgggcatgttgacgaggcgcttaaacttacagattcggagacgaggccgttaagtgcatctagtgcttgaggtgcggctttggtcagtctgaactatggagttggtcggggctccaatgctgtacgcgattgccaattcaatggagtccaaggccaacggcaggtatactgccagagctctcttatgtgagcaacgagcgtatttcgagttatctgatttgtgatcctccatatagatgtacaattggcgctcacaattaagctatgaaagggaaaaagttaatgtcagtccatccttatatcttatctattcatacgagtgaaagccaagcggtatcatatatgaaaaccacgaacgcgtaactaaaaaaaaagaaagtaaaaatcgaccttaatttggttctgcagcatgact

SEQ ID NO: 3138 - DNA, 486 bp, Emericella nidulans
cacgagcaacgacgtaattgcgcagggtagccaagctctgcccatggtcagtcagtcatacgtcctggtgttacggggcccaagacaccgttgcatcgtgtggtccagggtccctcgctttgaatggagccaaatggactagtgaaaataatcagtctctttccggcacgacgcaagcagacgcggagaatctggccagatctggactaggtccctggccaggaacagtgtaccgaagcccaccgagatagtagtgcgattttacgcggggtatgtagtcaagtttgcggactcacaatgtatggagtacaggaaatagtctggtggtcacttgtggggacgacgaagcgagggacaacaggaaaatgtcgagatcaagagggaatagtaagactgcaagacccaaagctgggcggactttatgccttgctctggaccaatctccaggccgatataaatagaatttgtccatccacgcgttggcaa

SEQ ID NO: 3139 - DNA, 1101 bp, Emericella nidulans
  unsure (1)..(1101): unsure at all n locations
cagcgagccaagagccggcgacggaacgcatgaaacgaacacagctcagccgtagcgacacgtcaggcggcgcccgagcaggagccacaacctcgccgccatctgagcgagcagccaccagcaaaacgtgcccgcaatttatcctactcactctttcccgctccgattgatcgttctcgttacctcggggatattccaccaaagcccaccacaactgccgtaacagcacccgcttctgattctactgctcagcctgccgaggaaagtacaccttcaagaaaagaatctcaagattcacccacacccactgaaggtggccgtgaaactactcctcaggagagcaatgccacgaacaagtcaaaaaagaagcgcaacgcngtctccgtcaccagatgtaatccctaaccccgcaggttcaagctatggcatggacctagattatttttgctacagctctgatagcgaaggagaagcagagccttcacctcagtctgaacttgaccatcgtagcaagactgcccttcgcaacattgctcagtcggaaagaccagcgtctaagaaggtccgctttgaggcgagcccggaagacacgccatcaaaacgttgtgctcgggctaccgatccttaccgcggaagacactttgttggaataggtggcccacagacatcatcaccgtcaactacacccacaccagagcctcatgtcgtggacccacagcaacggcctggtttcgtccccaacaaatcgggcacttttcaacttgactacgatgccctctccgatgactctgacaccgacaccgaaactgtatcttcacccaagcttcctactcctggtaccgtcagaacttccactcctacacagcttgatgcttcactaaggtatgatatcctggcctggcgcgattaagccactgtactgattgattagtgcccaatcacctgctcctcgttctgctgcgcgttctacacagtccccatcgactcctgcccccaagatcgaagaggaagccctcgctagggcccgctcccaggctgagaaatacaaaccaaagacgcctagtggacttcgcaccgctagtcgctactctagccccctga

SEQ ID NO: 3140 - DNA, 3258 bp, Emericella nidulans
ggacctggccctcgttacgggccagggggtgttggctcaatctgcgcagtacaaggacagctaggttgatgcttatgcggttgcagatgtgccttcgactgtcgtcgccaatgctggtgttggtaaaatttagttgagcctcgttctctgtgttttgggttgaagttgatgtgtaattcgttagttgaataacagtaacttgcaggaatgcattaagaagacctcgatgatcagcagttaattgtgagattgaatccatcgtatgaacgaagttctgatatggtattcccatatcgaagtaggatcaaacctagaataatgctcactaccttagtatcagcaaaaactcttgctcacctagtcctcccgtacttatatcgtatgttcagcaccttagaccaatgaaaccgtgcataggggtttgatagcttcgcgcgtctacaatgtcatagtatctacaatttcccaggatgtccaagcgccattgtgtagttcgtcatcgattaggcagtcatagacattatttgtactcgtacactttagggagttggcaacaacccggttgaactcccgtgaaaaatcaagcgtagttttcctggcgtgccctgcgacccatccatgtccggtacaggaagagcaaaacgatacccagaccgacgacaaaaacgatgcaaaacaccagaatggggccgggattttcactggcccagtctcgtcgttggaggacttgcctctgggttgcgatagcgagcgaatcgagggcgggcatttctagtctcgtcagtgcgtgctcgatacagcaatgttaggattcatactgcctggcagcactaggcgcggattgtctatgtctgtctcagaatcacgacctttccagtatctcaattgcttgatgacggccgcgggacgaatgtagtgatggaaatggtcctcgaagcttaggctgcagacgcacgacagagaagagggccagcgaagacagaagacggcatcgaagagctgggtatcgcggatcctaatgacgtggtgcagagtatatcgtatgcagccctgagcctgccgcgaagtttatatcgcgcgcccctctggacgagcttcgcgagtcggcaagcttgctcgactattcagggacctcgctcgtccgctcattctcagcgctttccatctccaacgcacattccaaactgatatcaaaatcgtagccatgatacgagtgatgtttgatgtcgaaggcagcacagttcctggcgtcaccacttaacgattccggcgacgacgcgttgcgaagtgtttgacgtcatggatagcaacagacatgccagtccggttggagatagtggttcgagtatcgggtacgacttccaggatcgagatgcaaggactaaccgtttgacgggaagtatcggtggttatccaggctgcagcaggaccatcaggacccatgggacattgaagagcagccgaaggctgatcggcatcaccaagtcacgggtcttggcaagagtcacgtgtgggctatcgaggtggattctgtgaacaattgaggtggttatgtaatcaatgtctgcaacggacgattgtattgaaggtcttgatctcctaagtacgatctgtataggcaatttataccttttcgagggcttcaaaaagaagtttctcgatagccaggagatatccctgctatgcaaacgatgtaaatcatcaaacagacatccttgtcatccaaacagtgtaaaacatcaaacgattatacaaacgagcgaggtgctggataccgattagtaaggaggagcctcctccggttgacagattctagtgccgatttctgtcatgtgatcaatgtctgcaacgaaatcattaaaattgaaggacttaatctcatatctacagtctgtatagagattttatagctattatgataattctcctgatcgtcaggagatatgttgatctctccatattatactggaggtatggaaggtcgaccgaggtgctgtatacttgattagtaagatagagatctcctccagttgatatcacgttttccccttttggcaattctggaacaccgcgttccgccatggttattctcgctcccttcctccccaagtacaatcctgcagcactgacttatggatatctgctgagcttaagtcatccggtctcggggaccgagagcgcttggaattctcgggccatacctaaaattgcaaccgctgcgtctcggcctcgtatttggcaaattggccgccaatcaacgatgctgccaaatcctcaatctgcaatggcacccaccccgtctaactggcaggaaggggctgggcaagggccgagaccatgattcgacgggcgttgtggccagcgatcctggggtctagtcccttctcccacaaaacggaatgaaattgaccgtgccttgctgcaaaaggaatcgctcctgggctgtcgtccggtccaggtcgcagtcttgcaggtaaagtcgagcattcgtcgaggttggaagagggggatttgcctcagcgtcagatgtctctgggccccgtccacaaattctcagcgaccccgtgtaacgcgacctgtgcaggaggatcgaaactggcgtcccaaaacccaaacctcaacgaaaatacggaccatggttcgagacctgactttttggccgagatatcttgcgtccctcttgcttgtgcctcgcgccgtcgcctggacgctcctttggcggaacgagaccaccacttcctcagtcgaagacgggcaatcggcccaaaactgcacacaaatatggcacgaagaaggtagacagttctcatgggatccagaagggccctggtgtctcaaattctactcagatccattatgcgactacagtaacggaatctcctgcgagggccgtctctggaaacagcaggccacgcaaaacatctccgcattctcggtctacccaatgcccgattcctctgtgaccgcctttggattcgcctcgagcacagctattcccacaacgaccacagcggcgacgtctacacccactgatgccaatgccgagcaaacaccagtagcagaaaccgcctcaggcggcagcagcagactttcggctggtgccatcgccggtatcgccgtcggcgccgctgctgccgtcgctttgctctgtgctgtattcttctatcttggccgtcgtagcagacgcaaggctgctgcggctgccgccgttgcggctacgtcgttacctagatccgactcgccatctgcggccgctga

SEQ ID NO: 3141 - DNA, 2145 bp, Emericella nidulans
ggttgtccctgctttttttctgttcagaaaggatcttcaatgggaatgttagtgtatggactgggttgcttgaataaggtgctcggcgctgatacctggtcgtcggagaccttggttcgagtaatgaaatgccattgagtggaattgagtagagattctgatactaaccaatagtctatcgcacgctgagaattcatgcgctgtgctgaagctgaagttaaaaagctcgacacaagatggcccgagctcctgacgcgacaacgtcattgtttacgctcgacgcgtcaagctccgttatctccgttgatgcctgagattttaggttagaatgtacgttacaaaatgctcctgcatagttctgacacatcgtgttaaaatgaatacggaaaatgtccgatccatccgatcatatcttaaaatcgtgcattagaggctcctcgcgtattcgcctccgttgatttactccgagtatataggagtgcttggaggaactggacttctgtcaatgcacgatgaccaatgcaccatttacctaataccttaggcgtgatttaccggcttaagtcacggtgcaagactggctaattctggttattgaggaaactaagcccagatagttatgaaacctgaagatggagccgatattgcgatatagcgacattgccttcgaattatatccgagacctatattctctacctagactctatgctggggctcggcttgccaggcgctcgagaggcgattgcgggagcagccgtcctccaatatcacagcagacctggaactggaacctggccatcgtactaagtgtcgagtgaaaatctgcttcctggatacactgggacgtctttggaaagccgaagacggtcgtgttaggtcttgggagacccttggtgacattctgacgctgtatctcagtgaactcgagcctgaggttcgtattcgtgaaaccattaacctggtgtttaatagtcagcagccgggacaagcaattcatagggctaagaagggtagaactcatgtttcagagcaagacttgcagccactgcactatcaggtgatggtggctttaacggcggcattatacatgcagtggggttgcaccttcgcgagcctgaggctaattagacgcgaccacgtcaacgttcttctgtgtcaaggtctggtttgtcctcaatccattgtgagagccgcatgtcctcgggccctgtctttgcctgtcctgaccccacctgagcgtgctcgtcttcttgctcagaggtctgcactcgggggaaggggagggaaggagagggcgggtgacttgaataggctcgtccctttaatctctgaccgatccacatggagttctcgctcttgtcttctcatccactgagtctccgtcaggactcttctcggagaatcctcgatcaagccaatatccatataggggacgatttcgatcaccgcacttttcggatcctgcaagattactcctcttcgccctgggctttctactgtgcagtggtggacttctgcgctgtccccaacgtgcccctcatcgtgctgtgattcttttctattttcataatcttctaatcttcatttcacttatatagcatcggaactagcaaaagcatttgttatctgtctggtttttgtgccttgcgactatttcgcgcgactttgttacagcgcctttcttaacagtgcgctacggctcacggctataccgcatatcccaccaactcctttatataccgagtcaatcgcccctccggccttacatggcctgtcatatgtgacctcacgatggtgctgagcgatgttgccggtgtcgcagaagaagtcgccgctggcttccgtcgctttcgtgactttctcccagaacatagtaccgaaataaccggcctgattgccgacctgttcacgatcagtacattcctgaaaacgctagaggagctgtcacggcaccaccaccacggagctattttcaatgtcgcacgttcagatgtggacctcgttagtgacagtttgcaatatactcttgatgatattgttgaattcttcggcgacttagacggccgtagaggcttgactagtcgaagtgcatataagcgagcttgggcaggcatgtcccagtgtttcatgcccgaatgggcgag

SEQ ID NO: 3142 - DNA, 964 bp, Emericella nidulans
ctctaccgtagctttctggttccacaaacatatggtccgtgattccttccagcgtggggtcggaaatcatgttgaacgggtcaagatctatacacggctcggctcctgcgagcgcctccgcttgaactgcgggtggtgttgtgatagtctctgaagcatgtgtatatatttctttggcgcccgttttgtggccagtaattcctgcggatcctacaagagggaagttgggatctggagtcatgcgcgcggtctgccgagaggaggtgtctgagagagtagctccgaaaagttgactcgcttggggcgagcggcttgcacggtcgtagaccagcagctcccaaagaagttgggcattggtggtccatgcttgccgggaatgggaggcttgagggtcaccggcggaaacgttttctcgaagccgtgtaagtcggtcaatctataatgcccagttagcttacaccgcctctccctattggcgctaacagaacaatcaaaacagttatgtgctgcttgttgatgcatagcctaccatattttggacgtgtggccaccgctgcgccaacggatggaggaaacggacacatttggtgaagcctctccgcgccttctcccgaaaacttgggtcatcaacgaagctatgttggagatgaatagtcgctactatgaggacgcagtgggcaagtgttgggtcgcagacttcgaaccctttgtgctcgattaggtcaatcaaatgtaggatccacgcggcgttgtttgtaatggtctcgaatgactgtcggataaaggactgtggcatagtgtgtcggaagctacgcagtctccgcgatagcagaaatgggtggttcagaaggcaggggattgccaggtaaaggaactgtgtgaacaaccacggaccccagaactcgcgccgttggttcagctcatgcaggcggtgttcatggaacctattggcatcataccgata

SEQ ID NO: 3143 - DNA, 1079 bp, Emericella nidulans
ttcttttagcggctttagtatgtgagctaggaggacgatcttgaatgctcggcatagacaacggcttgacggcttaagcatcaactttagcggtctttgagctggtatataccccaaagttcaaaaccaaggtcttagtctcttgcaacctgaacctagcaacccgtatacagtgcatgaaaatctccgatctatgtatagggggctacattgaagaggaatgtgtagtagtatggcaggacgagaagtcgatggcctgatgtgtgacatgtacggggccaaaaataaaaagaagagtgagagagagagagtcctctcaatcgttctagcgccattcttaggaaagacaccctcttcgcatgccttttagattacgccgactcatgagactcccacgcggctgtggagcatccgttgtggagcattggcgcacgaggcgtgagccacgcgaggttctgcatactctacagcatgatggtgagttacacacggcaggtgcacgcaggataggctctgcactattcaagggggcacagcagaaagttgcaggaacctggctcggactgctcaatggcccttgcatctccccacagacgacagcccacacccccttcccacgttggccacgcggcggatggtctgcggtgtgacccctggccaggccatgcatagaggcccctcaaaagagctgatgaggtgggaaacggcagtcatatttggttgctatggtcagtcccgcacggggataggggtgttgacctctttgtgggtcacccggtcccattcaggctcgtacttaactctacgctggggcatcaggactgaagttgctttctcttcctgtgtcaaaaccgccccccataccattcaagcaagcggaagtctcagacggcttcatcgtcacgacgtttgtctcctccgagagagacaattctgttgtcggtgttcgcggtctgaagggctatgcaacagcgccaactttagtcaatatcccggtatgccattgcagtcgccctacgtaacacagctactgatccatgctccaggttatcgccgcctcctgcctgggtggcgttaca

SEQ ID NO: 3144 - DNA, 549 bp, Emericella nidulans
actaagaagaaagcttttattttattataatattattagactatactaacctaataatattataattaaaaatagatagtaggcaagcctgctagtatttatatttattttttaattttataatattagacaggttaattcaattatatttataaattattataaaaatagcacaaatttcatattatactagtaaaaataatatcctagtactaattaattagaaattactagtattaagtctttaaaaattaaaaaaaacttagttaaaaagactatattagagcttagtaagttgcatctataaattaattcttattataaacttgtctagtctagatatagtaagatatttctataaataaaatctaagcttaatatatatagtattaagtctataaaaaactagtatagagtagttaactaggttatataaaataatttaagctctagttgagctgtaccctattaattaatataattagtttatagaaagaagatatctataataataaagctaatactaatctaaatggtctaatatattat

SEQ ID NO: 3145 - DNA, 920 bp, Emericella nidulans
catcctgctcagccaggacatacgacgatagagtgtggagaactggatttcatgttcgttcagtcattgagcaattattattggcagattataagtgtaactatccctggaggttatagaaatctaatctagggtgagcaggtgatatatgtgagaggctgaagtacagctaggtcattgtgattaccccaagcttaagattgtaatagtaacactacttctactatgttagacctgatccaaagtattttctgctgtaaagaggaattcatactttgaagcggtgcgctgacttgaccaggctatttggtaatagaagtctctacacatttacataaaaattacgtctgctgtagttgcagtggtggtaatcctggggatattaacactcgcaagagttatgagcactgattttgcaatttatgagaaaggtagtaacctaaaaattctgaatccactccaaacctcgaactttcgctgtactccagagtcaatttacctgtattcacgtctgcctgtccttggactaataaatgctcactgcaccctttcatgaaatttaggctcaataatttttactcctcttccataactcccttctgagttcccagcaagctggaacaatttactctctcctcggcgcaacagaggtacactggcaccctcggtgccaagctatcatccagtaccaaccaactaacatcacctggtgtatcattggctgctcaggctgagaactcacgatgttggcaaaggatttaggggactgggtcaagatagattgtagcctggtatgtacctgtctctggaagcattgatggtgtgacggcagtctctatctgaggagaatttgtcttcgccggtgctgacagagtgtgattcaaacactagaactgagactactgactacttgaagacca

SEQ ID NO: 3146 - DNA, 3083 bp, Emericella nidulans
agttatgtttccttttaatagataaatggtttgacttgagcttcgctgttatggcagtaggtagggagtgattgacggtagtcaatgttttatgctgctgatggtttatatgctgataagggcatgacgtcaagatactcagtctagaatccgaagatcactgcgccatggcctgggggtttccccgatttctggcatgaagtcatactggttgttatcgcttcataataagtgataatttccaggtgcttcaagtttctttttctgcgttgcgttatcaggattaagggatttatatccacatatctgcataatgacgcgtatttgagtacgtaccggctatgctcatcagcctgccgcgcaataaattacttaaaagtgtagatgattgcatccagtgcctccagctgcacccgtctgtctgtgatacactctccaaagctaaaatcatttcgtggcctgcttcatctgttcttccacgcccagttattgaagtactctgctgcgagagatcactaagatgggcattgggaggactggtccaagattcgcgtggagcacttcctgctcgctataccattgaggtgctcaggtatggccgacacataatgtctgatgtatctaatattcccacatatcgttgatattcgattgtgatggaaaggacatggagcgtcaggttagttgcttaccgtctcggtgacatataggctcaggaccttccttattttgaaggagccatgcttcaacggcgcctactggcctgacgtaccctatccatagtgatcttctgagttgaagagggtgaagaatgggtaggactatagttagccgtcaagacttgaagggattatatctgtcgaaaggccaactcacatgctgatcaagaataccaccagcattaggctggacaaagaatacaaggtcaccaaaccgttcataacccagaaatgcctctttagaactttcacatcctgaagaaagttctcacctgatttggagtaaatatgtgaggtcgcaaaggaacgccttgagtagtttgcttatcgagaaagcaggctgacagcctgttcctcccaacaaaacagtatgacaagtcatatcagcatattttggcgtcggtgtcaattttttgactctttggcgacctagtaacctgatgatctcagcggtcattggtttttaggcctcgagtgctgtccgcttagatgtgtcgccataaccctagaaaggccggtgctagtacgtcataccatcccagggtaaaggagttgatttggcaactctgtggctgtatgggcttgagaactccgtggaagaagagagaagagaaatgcgtgccgttagttcttggttagaggagagaaggcggataggcgtacccgtaagtacagcatgttgctagagtacagctttttgcgagctcaggaaagcagagctcgtcatatctgtgccgtcgggagaagtatagtttggtacggtgctttatggcttttattgtgttgttcatgtatgccagaattagactgacacatcttcggtacctctgctggtgttggcacgtggcagactgcaaggctccctcgattgagtttaacgacatcttgattgtgaaattgcgaggaggcattggcctccaattcccgatggtcaaaggcccaggataacgaagtctgccttttttgtccagtgctggcgccagagctgagtgaagtactagccttatacctggcgcgatgcacataattctaagcttaggctgatttttaatgcgcaataaatccatctccagcattccgttaccactctgcgaatggcttagcgtgaggctcatgcaatcgagtctccagtattagctggactggctaacgaggtgagcctgacaattcggaagccctgctgctggatgagaaggcgtgtctttcaggtgttcttgtatatgtaaacatggctcctgtgtattttcgtgatatgaccattgctcatgttagaggatctaagcgattagaagaataatgttggaacgctgttttggggggtgaggcgttattatataggtagcaatcaggtgatgccagacaccatacattctgccaactcactcgctcctctatttctttattgtttctttcccatttacctactacctaccagatcgctggtccatacttgatctaaccacgacatctcattacttggtgagattatggattcccaatatagcaattaccgggccaagccctgaagatctcctgacaagtgaagctttcggcgtccaggcgtagacgacttggttatgctggggtcttgtgcactgagcggggctctggatctcgctactgagcagtcggtaagctcgcttctccctacgtcgcagaggccgtaaagctttactaaccacgactacgcagaaacttcgccctatacgcatcaggagagttctagttttgaatctgttcttctcttcacaggcggtacagtgggagttcactctatttatcttttcaagcttctatcacgagggtcattaccgggctgctgattggtgtattcgccatagtattctcctggcacgcaattccttccctccattgctcacctcgacgcacctcgttttacgtccaatctcaaataacatgggcactcacgtacccactgcagcaaataacccggcggatgaacctcgagctatccctgattctccaaaagcctacaggtttctcggccgggtcttgcataacgcgatatcgatctcacactgcgtgacagctgcccaaaccagaaatggctgttggagttgaatcagaggtgcaaaaactgaatcggattccatggctttcactcgatataaatgtcgagtatcctctgcggcccagaaaatcctgtcaaagtctgcagaagctcaaccattttctgggctttctgactgatatctcgggacgccatgtcttcagtcggaactgacctaatccctcagggaacggcgtatggcctgcttattggcctcggcgtcctcttctgcggggtgattcttattgccatcaaagtgcagaaggcctatctatccgaggattcagcaactt

SEQ ID NO: 3147 - DNA, 1536 bp, Emericella nidulans
tattggtgaaattttgtagaaaaattattagaattgtagagaaagtaatatgtaaaaaggtgatgggagtagttgaggagatacaaggcgaagtaaaaagtaagagtaatagtgagtagataagatgaatgaattatatataggtttttaatgattattttattgagatgttgtaagtgaaattaagaagtataaaataattaggagatggagttgttatgtggcagataaatgtgaaagggataggggaggaatattgataattaggtgtagaagaataaaatagaaagtaagtgagttatgaggaagtatggttagtataatatatatgaggaggaggatagagggagagtgagtgtaatatataggttagattaaattggagaggaggtagaatggtaatgtggatagttgatgtatgagaaaagtgagtgaaaatatgtaattagggagaagaaaagttagttggaagtaagaagttaaaattttaattaaggaataatgtaaatgattagagtaataatatgattaggagatgaattgtggaagtgatgaaagtgtaaatagttaggatattaattaaattataattaattttggtgttatgtagagaggtgaggggaaagagtatatgtatggagtaaacaagtgaatatgaacagtgggttaaatcaatgtaaattgatatgagctggaaattctaaatatcagagacgggcttttggggaagcatttgcttttcgccaaaggggtggagtgccgcgcttatgtgttaacgcctcgccagccatccgctcgtgaactacgagtgactgacacacgcgattccgacaccggatgtgccatggcgacaggttgaagacggcgacgatagtaggccgttggccgggatcaaagttgttgagctggtgaggatcatagcaggtcccattattgggagcacccttgcggcatttggggcagacgttattcgcgtgaactgtagtcggttggtggatttgaatgtatgtttcttttttctttatcctcccatcgttcttcgttctcatctatagcatcaagcaggcttgctaatgataataaattacaggtccttcagttaaccctcaacgccgggaaacgaacgatagacctcgatctcaccctcgagtctgacaggactcgactacgtgaactcctcgccgacgcagatgtcttcgtccaagggttccgccccaacgccatcgcgcgcaagggattcggcgtgaacgacctcctcgagatcgctggccatcgtggcaaagggatcgtctacgtcgaagagaactgctacggtcctgacggcccgtatcacgaaaggcccgggtggcaacagatcggtgatgcagcttcaggatcgtcgtatgttatgggccggagtcttggatacaaagatggcacgagcgttcttccgcccttgcctatctcagacatgaatactggtcttattggggcgctgggaacgctcatggcgctgcgggatcgggcgaggtatggaggctcgtaccgagtcgcaag

SEQ ID NO: 3148 - DNA, 3240 bp, Emericella nidulans
gtagatctcgagtaacgcgaaagattagaaagaaaagggggcaaaacaaaaaagggcgcatacctcgaccttgaattcccagctggaggaattgccggattagacgggtgcggtgctcagacggggtctttgacgttgttggggggtatgctccagctgatgctggcctgggggagtcctactgtgaagttgtgaaagggagccccagggggggaaggaggaacttcgccttcgaagatttcgagaggcatgatgataatgtctgaagagtgtagtaggggtatttgtgtgacggagagttaggaaattggagagccactgcacaacgcaacatggcacggatacccatcggccggatgtgttccagccttctcagtctgatacgctctctcgccatgcacagtcttgagcggattaccaccaattcctagccctctagcaagtttcaccaaaagcccttcttttgctgcatgcattgcatcccactcgtcatacgcgggcctgatattgaacgtcctcgcagtcatcactatgactatccgcatctcgttatagactagggtttgcccgatacagtttcgcggcccgtgctcaaacgggcgccatgcagccggactcggatagagttcgtgcccgggatctacaagccagcgctccgggatgaattcttcggcttgtggccagagcctgggattcttatggatggtcggatggattatttctgcgccaatggtatggcctagtggatagctatttccaaggcggtcggtgagggtgactccgtcgcgcccctcacgtgtagttgaggccggggggaacagacgcagggtttctttgatgacagctagagtgtaagggcactgatttaggagggctgggttcgacttcaaaagttgtggtgcggcggacggcagtgtgccaaagatacgatcgtgctcttgtcgcacccgagctaaagctttggggtgttttgagagcatatgatacacgtagacaatactactggatgtggtgtcattgccggcaaacagaaagaggcggatctggtgggttgcgtattgtgcgaaattgtcgtctagcttgctggctttgccgtctttttggtggtaatcagccaggtatgcctcgagagcgagggcgataaccgatttaacgcgtttggaggtcgaggccgagcgctggccttgttgcatctctgcaaacctcttgtcgagttctttccggatgcacctatccatgacacggccgtagtatttttgaaccaggggccgcagcggatttgcacggacgcgcgggtcccagaatgagtgccatttcgtgatagtatttagcgcgtgcaccatttcgttatcagagcgttgatagttcgagtccatatcactagagcccaattagacatgtgggttacaaaacagaaaggaaggctgccgttgttatctcacagggtcaccttgagtatgacctccatcgtcagtcgggtcgtcaggtcgtccagatggaccaaccctgtcccggccttctcacgtagaatatcacaaaagacctgaaccgagtcaacgacagtcgacacttggtcaaccatgttcccagcactgaagccaggattaaaaatcgaacgccatttcttccactcggcatcgttcatcgatatcatactcggcccgccggtgattggatgcatcagactgggaaaaatagcagacttgggcagattgtacttggtcgagatctgcagtgcggcatccgggtcatagaccataacaagtgcaggaaacaccggccaggtatccatcaggaacatttcagtatcggcaaactccacggccagttcatgagtcggcaagagaacatgcgcatcggctggtaggcgatcagtatatttcttcaggctgaggagatggcctgtgagccagctccaatccttgggcatgggctgagtccattagctacatcgcaatgaatgtttgagatacgcacaatgcctcgtttccgcaactcgttgattttgcgacggtgttgaaagccgcagtataaaccgtatcctatgactgtcagcagcgggatgctgagcgtcagcacgagattagtgacggccatgatggctcaaccagtggcgagctaggtaaatggctgaagaagtcaatcagcttaacacaagaattattagcatgatggaccagctttaggcggccaatgacggtaatgggggccaggggacaggaattcgttgttgttagacccgctccacgggataattaaagcagcttaggctgaagagctggtggagaactggagacacggggctggagctggaacattgtgcttcctatgcatcggttcgtctcctcagttcactatcaagattatttacaatgtactgtgtaggcctatgtacatatcagcttaagattggccatttgtttttgctacttattgttcgtattcttccatactcgccatcatgagtttcgaccccgaccgccccttcgacaacatcattaatttccgcgatgtcggccgcactatcaacaaagtcgccgggcgaaagtatgcccagatctcagttgtaccagagtataaagtctacatgctaacgtggacaggattctgaaagaaggtgttctcttccgcagtgctcgggtatgatcccctatctccataccatgtggccgcccgagtcaacagtcgactcgtacgatgactgctcttcgcgaatcaaacctgcatgtataacgcacgctaatgaagaaatatgtaccagctcgatgaagcttccgagaaggatgttcgccgtctaatagacgacttgcacgtttcaaccgtcattgatctgcgctctacgtatgtgctcactacactatttgctacctatcttcatactcaaaccttacagaacagaacatcagatggccattaaaaagcacaaacgcaggcacaacgtctccaccggatcctccgacttccaaccccaggatgaagatggatacatccatctcccctccctcgacgacacggaaacaggcgcccgccgccatctgattagtcttacgggaaaggggttcgagcgacagcttttgtggcggttagactggtggaatttcacgtccgtacattcctattattagcgcgctctacaatagtgtcccgtgagtgctgacagcgcgcagaaaagtcctcgcatatgtagccgcaggataccagcaagacgccgtgcgcatcgtcggggagcatgtcatgaag

SEQ ID NO: 3149 - DNA, 3521 bp, Emericella nidulans
cgagctaagttgcccaagctgctcagaactacaggatcatctggccctagtctcttttctctgacttccagcagtctgagttggagctcctcaacatgcttccagtgaccctggtcccacagtgtagccaccacacactcaagactctcgagagtatcaggatggtcgtgtccaagccgtgctctccttgtctccagaatttcgcggaatagaacctctgcctcgcggtaccttccatcactatacaaactctggcccactttctgcaccagtctctccctgtccggtgtcctagcttgaaactgttcacacccaagaatatgctgtgcatgcggtaggtatctcctccacagcatgcggttctctggcttgctttccggaaaaatatctttcaggtgttgtccggctttcttcatccagcattctagcgtattttgggttcttaaccagttttttgtcaccgagtggacaagttcgtgcagactaaagtattgaataccactctctgagtgctcagatatgaaatagtatccttttagtacccctaaagcgctctgctgttcaacctttgactgtgcggctggaagcaataaacatggtatccaggcaaagtcaaggcaggacatgaatgataagtactccacagccagtgggctcatggtctgaatctgtctgaaagagatgagccatgctgaggttatagaattcgcggtccctagatatctccactcgtcctcaaagtctctgctgagcaactctagcatcgaagtttccgtgtccttgataagtgaaaggtatgtttcagcggagatcaagttttcattgatataactagcggcttggacgatcgctaaaggtatgaaatgtaagtgtcgagcgagaacggctgtagatgtgtcactttccagcaagctctgatcaaaaacggcactttttaacagagttattgccgactgaacgtccatctcattcaaatcaacaatgttcgggccagcaacttttgttgcaagctggtgattccgggttgtaaagagaataaacccgcgaggcgatgtcggaagagtgtctcggatcctggacgctgaccataatcccgaatcgtctgcattgtcaatgataagcacccagggaccagccgtatctgaattcaagtacccctttacccggtcttttacattatctggggttatggattccaggcccaatcggctgccaatatccataaaggcctgctccaccgtttcggcgctggttgatgagatccagattatagagtatgcttccggcttcttgtgaagacgataagcaagcttcagcacgatctgtgtctttcccacgcctccaagtcctgctattgcggctcttctagtcccactgtttccacccgtatcaacatctgaaggcgggagagctcgcgctcgcggcccagaaacagcgggttctgacggaaaggcactataaaacatggtgtacgttgaggcatctgtgaaccgttactgctcttagcttgaggaatcctggacagcaggatctttgcataggcagcggccgtcaatgaagcatacccttgccaatgcttagatttgtgggaatcacagtaatcacagattccacggataaccacagacgggagctgattcaccagcccagcggcctccatctcaaaacacagggccccatgctttttagctaggcggtcccggctcacggcgtctctgatcaactggtttccagatgcgatcagtccgtagtgcacccgcggctcttctgattgccgtactgaacggtcgaccaaataccttgtatcacatttgccgcagtctgcgtcgcccagtgggtgaacatattccgcctggaataaacggtcgctggagcgctccggcttgcaatactggcttgccactcctgaattcgtcttcaaagctgatgagactaggctcaggatacccagtggtttccccattatctcttcggcttggagttgtgatattgcgttcagaaggactaggggcggccggttcaatattccagtcactttgaattcgccatcaccgaggaccttcccaaaatcataggcaaccaccccactcgttccctctgaagtaggtttgctgaccacaatatctccaagccacatgttattgtctaccgttcgcgggatcccgccgcccacgccgaccattaacccgaattcgacttcagtgaatgttgagagaagctgtgtaatcacgacagccgtagagatagtgccatatgctcccgatggcaaacatgctaacacgacattatggcctgctattgcacctagagtgtagatattctggtcattgatgagttgggggagtcttggatggacctcatccagcatcgattgcgcagcggcagcctcaaggggtagtgcacacacccaggcaatcctataatctgtttgtcgtctatgttgctcgggcatgatggaataagaataacaatattttgggcttgatcatttgcaagctcattaccaacagaagaaagaggaaaagtggtaaggtgggacacagccccgcaacacgtggccacgagcttcagcagcactgctcatctctggccaatcggaattctagcttttatcagggatcttggatgggattccgagctgtgtgaccgtgcgcggcctaggatcgataggctttgccgaccgggctaagctcttgattttgggaggcggatgtggccatggttgaagggaggtaaaggactatatacattaagggcatcaaggcaggggcaaagttaaagtggcaggctatgacctgtatctgaattagggctagctttaattgctataatatttgataaacaaaaacagaaaacggtaccaataaggtcaattacagcccttctacaatgaattacccaagtatatattctccttaaatttccactaatcccttcctaccttacttgtattgaattttatattaacttctctgaaattgtacagaaggtgatctcattaagcattcttaccctggtaatggcgtaagctctgcgattgcattgacatgcattgacttgccaaatcctgccaccagccatatctgatcagtatgaagactagtcagtctaaggactgatctcacaagagaaagcaggaccatatcaggtatatcaaaatctgtgagtcaagtgcaaagtctttgctgtcaagctatgatgagataacaagttgtatgaatcgcgaagccaaggctcaatacagtagtagtgagtccttatatatcctttcactgcgtaggcaggcggcacggcttaggtaagtcgttccctcacgccaaagtaggtcatctactttcgcgtaaggtgagtgcttcaacggctttttaatatcacctatcttcaatggcttcaaagggaccagattacttcaactggtgaatctacgtacactccttgccagaattagtctctcaatactacgctattggcagcgctgcttttatttttaggatgccttgataaatacttcttattcgatc

SEQ ID NO: 3150 - DNA, 2039 bp, Emericella nidulans
atgcgagaatagattatgtgcagagaaatccgcaatgagacgatattagtgagttcgtacgacccgacaatgtgttgaattggctaacactggcgactgctcagcccttcagaagcgcggcttgacatcgataacggggatgtagtactgaactgctgcgtccgcaattcttccgtagtgattaggctagagtacgtatcaataagcagtccattaacgtattctgagtcccatgcgtgtgtcaataaaaggtaaggatggcgtaagagacaagcctagcggccaggtaataaaagggactgggaaatgtcagctcgagattcttatttctcgccaatgttggaaagatacggcttcgtgcgaggctccacgctactcaagtctcccttgtccaagtacagggatttagtttatgaaggagcgcgaactgacccaactcgttgattaggtcaagtgcggaagccccatcctagtcacgggccacgttcctggattcagtcgaaaagcggtcaggccaacaacgggcgatattgtccggggaaacttatttttttcacagccaggtcaacttttcttaaatctagaccctacagagtgaatacaacaacaatatcctcgcagtctagttgttatcacatttaccagctttgtttgagcatatacccgctcttgttttgtactggctcagattttctgcaattatcttactgcccgactttaatattttggtctctggttcaacaaatgggtttgccagcgccccgcaagtatgttgtgctctatgttgcgttcgtaatcaatcgctgacaagaccttgagtcagaaaaaccaagatctctcatgatcccaataataccaattggtcgcggtcaacaagtggcttcggacataaaattctcagttcccaaggatggactccgggaagtttcttaggagctcgtaatgcagcgcatgccgatatgtttactgctgcaagtgcgtcacatatcagagtcattgtgaaggacgataccctaggtctcggagcacgttcgaaacgtgatcttctagacgaacctactggccttgatgcttttaagggcttacttggaaggttgaatgggaaaacggatgtcgaattacaagccgatcagaggaaaagagacgatgtgaaactcgctcgttatgctgctaccaaatggcaagctgttaggttcattagcggtggtctcttggcgcaggaaaaggacgaatccaaagagactgccgagtgcacactaaagtcaggagcaaagaatgcaaaccctgtcgataacaattgtgcagatgacaagacttgcgccactgatttgtctcaagattcgaagtccaaaaaccgacgagctaaggacgatgagaaaagtgagaaagagaaggagagaaaagacgggaaagataaaaaggacaagaaagacaagaaagacaagaaagacaagaaagacaaaatggataaaaaggataaaaaggataaaaaggtcaaaaaggtcaaaaaggacacgaatgacaaaaaggacacgaatgacaagaatgacaaaaagagaaagcgagcagagcaacaagaggactctgacaaccctgtcccaggcccatcacacgcagtgaaggaacatcgtccacctggaagacatatgatccgaggtcgacatattgcgcaaaagaggaaggctttgatggatgataagtctttaaacgaggtagtgcccccattcatcctttcagtttccagtggctaataaatgtagattttcatggtaaaatcgtaaatatttcttgttattcaacatataccccgatcaccctgagcatcattgcttctatcagtttcagcatttaatagagcataactttcgaggcatctaaggcagcgatatgtagtgagacttcaaattcttggaaaatttaaaaattattaaaccagatatcacgaagtaactttatggattggaactatatggtcaacccctgataagaggagagatcaggagcctcggcgtcgtgactaatcagagccaaactatgac

SEQ ID NO: 3151 - DNA, 2260 bp, Emericella nidulans
acgaatagtataagcctctcgttcaaatattgtctgatttatgacctatgaatgacggcggccagcgtcgggccgaaccccgtcatcccatactctatgcttacgtagctgcacatcataggtgatctacacagccctgcggcgattgtacaacaagattcaactccgatctattgccgaaagccggttcttagcaaaaaaaaaaaaataataataataaataataaaaataaaaatagaaataaaaataaaaaaggtctggttcttcaagaaggttgtaggtagttccagcattctgcccggttaatggcaggagactggacgatcatgccattgccgaaagatgccgagtactacacattttgtgtgcttgctcgcgtgcttgtttgccttccaacagatgatgcaggagtttgtttctcgtcgaatcagtactatgctttcctgctccaatatcccacaggttatgtaggcatccacgaccattgacgttatccaggtgtatacgttatttcaggctttcaggcttaaccaagcgcagctacttccccgtcttacctagcattatatggttacataaataatagtaatgataaaagaagaagacgaagaaaagaagaatagactctcatatttgaacattagtcattaatgggtattattaaaactaccttatcccatatgcatattcgtatcccgtaaccagttttgcaagaaaagaataactcttaatcgagtaggaccctgttccaatccgtcttgcccacgacatccaccattttgacccccggtattccaaaattttctttgcttaacgtccccggctgtggagactcggtgaaatagcttgtctttgcggttcatagtgtacagccagaacaacagcgtctcctccagcatctccatgcagcccttccggacgcgaacggacggatcggcgctcccgacggcgccccaggagacccggaacggggtatgatgcttcttccaccgactgaccgcgagtgtctggacgaggtcatagagcagcccgaaccggagccctccctcgtgcgaagcatcaatgtatcccttggcgactgaggtcggcgactcgtgatcgtgcacatcgcggacataccccacccctggctgcggtggctgggagacgagcatgcggcgccaggaggcattggggtgcctgaaggctcgttctcgcgcaccccgttcgtcaggccggagaaggctggagccgaccttgacggaccagggtgcttgcatccctgcgtcgaggtagacccagtctgagaggcattggcaggaatctgagccggtgttgaagaattcggggccaaactgcttgacgagcagcgggttcagcgtagcgcgcacttgggcgcggtacgggctgagctctcgtcgtctcgcagcgccgagaggtgtctttgggaacgcggtatactgtctcgatggtctggcggggggtgcgatcggtctgaagaagagggtctgttgtaaccgtggcgacgtggagatgatatgtagccagcgcctgtttactcgttgcgcggacgtgagcagatcctgcatgtccagatggaggaggatctgctcaaggagttcaggtattgagagggctctctcggtcgcaaatatgatgtcgacgactggtatccccattgttgtgaattaagtttgatgattttatgtagaattcgaaagataatgtaatgatgacctgatggtttacgttagtagattttcttttgaaaaattagaataatgtaatggcatggcaatgctatgcaagactatactatggtcgggttagcattcggggttctatggtgccctataaatactctgggcgcgaccattgttcgactcctgtagaaactatgacgacgaatccaagtttcgattgccacagatgcgtgctttgtaggtcataagcggggttttcggcctataaaattcggaagagggctgggcctgcatcgccaattaccaaatgccaagccccaaaccacgtctggaatacgacggagtagagctcgaggttggggctttaaccaagatcgacgctctattaggtaaggagtgcctgacggtgctcagctgacgcgatcagacagtgttctggtcggtcgacgcgatggagatagacgtgcacatgcaattgcagagctgtcgagctgtcgagctgtcgagctgtcgagctgtctagccaacgaggtatgcccctgacgaggcaactgagtttgttgccgttgggatagtc

SEQ ID NO: 3152 - DNA, 985 bp, Emericella nidulans
ctcccgaagaataccgcagtaaagcgaaacgaccggttcagaaatcttcctacaggatatttgggaaacacgtcaatgactttgaaactattctgccgcggcagatatcttccaatgcggaaggatggcgccttgaagcgtggatgcgttatgaccctcgtatcactgctgaggacatcatcgaccgggtccatccgttctaccgaaaatacatatccagcgtacaaatccataatcgtcgcaaagagttccgggagcattgcaacataacgtgctgggaagcggggcctgatgacaatgaaaacgtcaaaataactaatctcctcgaagagtgcggttatgaggcctggtcgacaaatagcactcgtgggttatctcctggtctaatcaacccgacagttggtgaggcaggaggtcgtattgcgctgcaggaggttcttgtccgtcggtttgatgcgcctgactccatcgcttactgggtctatgaggctttcccgtgggacagcgtgagtttctggttctctgcagggccagtacgctttataatcgacgtccacggaaatatactgtcgtctcatacttcctacgaatccgtgatttctcgtgagctgtacgatggtatcatatcttcatttcaggttgcgcaccctatcgatgctcagcaagccaaacctaatcaccttcctggaaatcttcccgaggcgcaaccccatgaaatggagtttctctcgtcccaaattgctctgccgccggctcaatcggtggtccattttgctccggacgtggttgagctccaaccgcgggcgatagctatcccacaccccaagaaacgagcaccttctgatgctactgccaggtaagatctcttccaacattcttcgtcatattacaacaattaccgacaattgcgccatcattagtgccgctaggagaatcaacatcacggaaatcatcgatcccagtggcctacccacaccagttggcg

SEQ ID NO: 3153 - DNA, 680 bp, Emericella nidulans
tccattatatatactctctaaaacctcattcgagctgaaaagcgaaactcaacagcctcttgtatagggtatttggcgtaccgcttccccttcatattagcctttcgaggcctgtggttcttcgaaaggaggagaagaagcattatatggaaagtcaggatagtctgatagtcgacagcgtcacacaaaaaaatggcctcccattccatccaaaccattggcgtcatcggcaccggcgttatcggctccagctggactgcccttttcctttctagaggtctgaaggtaattgtgacagacccggctccagaagcagagaccaagctgcgcgactatctggagaaaacatgcccacttgtaccaggctgcactctaacactcgagacgtgcctgagtaatctgacattcgtgaccaacattgatccgtatctcgagatcgtggattttatacaagaggttcgtcacccttattacccttaaatggcgcttgctataatcacagagtggaaacctcattgtggtgaatcagaacggcccagagagactccctatcaaacggtccctgatcgcccacctagacgccctcactcccagacacattccaatcgtctcctcgtcctcaggcattccctcatcaatgttcatagcggactgcaagaataatccagccgggatactta

SEQ ID NO: 3154 - DNA, 4010 bp, Emericella nidulans
atgcttttttatcgagatggcgataattattaataaatccaggcatccatcagctcacggttgccgctattctcttgactcttgcgcgacctgaggcatcgtttctgtctctcattttcatagattccgtccttttgttttatattctccttgctatatataggcatagtaagtctgaggtatattaaagtaatgagtattagttatgaccgtagacgaagaatctgaatttcataacagagtggtgctctgaagtatatagatagttcaaacactggtagtactctgctgtagctttgacacgaacatttgcaatacaaggattactaaatcacactcagatgggaaaagaggttttcaaatttgcccaaacacatactaaaaacattaatcatacgcatgtactgtgctcctaagactgcatgaagccttagccaccaagtacagagcagagtcatgtgatgactttccgggaaagagcgagcgggtttgaggcatcgtcgtcttatcgggatctagaattttgttcttcagacaacttcccactcaaccttagcgatccgtcgaaatgactagtgacgatcagttttttttcgactatgtgcgtacctccattatccctattgcgctatagctgaggtctaacgactgtatattcgtccagcttgcgtccgttccccatgacgtaagaagatatgcgaactctgtggccgaggccattgaccgacacgtcgaccacgttgcggacgcagttcgagatacgctttcgcatcaatcatggctgcctccaagtgtcaggccatcaccaatagttcgtcatttctcatcgcggccgcaatcactatatgatcgcgtgcacagctgggttatacagaaccgagcatggagcgccgctatcctagcgttcgtgggcacgaccggtgtcctgtatcttggtgataaaaagttgaggaccaagcgacggaaggcaaagcgatctgctaatggtgcccggaaggagataataggtaagccgcggggtttttggaaactatctcacctgcgctcgaggctgaccactgcttagctgttgctgggtcgccgcatgagccgatgactaggtcaatagcggcggatttggatcgccgcgggtatatcgtctatatcactgtgtcgtctgcagaagaagaacaccttgttcgggcagagaatcgccctgacatcaggcctttgtggctagatttgacaacagtaagttgcatacttctcttcaatcagaaacagtcgaatactaacctctgcagctcccgtcatcgccatcggagatacactcttctttgaatgagattcacagcctgattactcaaccgcacgcccccatggctggagtgccaccgcatgtctgccagttgagcggacttatactagtcccttcgccaaagttcgtagcgggaccagttgctacgattccaccatcatcgtgggtcgatactattaacacacgccttctctcgcctattttaaccacccagctctttctaccgcttcttaccctgcgcaacaccaacagcactataattcttgtatacccgtccatatcttcatccctctcagcgccttttgctggacctgaagtggccacagcccgcgctctgtcaggctttgcgacatccctgcgaagggaattaagtcttttgcagcaccacaatattgacttggtggagttgaaacttgggaatatcgaccttgggccacagtaccgggcccccaatagccatatcgcaggaaccgaagtcctcacttggagcgttcaacagcgggctctttacggaccacaatatctcaacagcattgaacaaaaaccggtagcctcagctggacctggttacatacggggatcgcctgctagggcgcttcataatgcgctgcttgatgccttggaacccacatctaagaatatttttggacagcggacagcgaagaagcctgtcagatacgctggaagaggcgcgcggacttatcattggatcggacagtggacgccccctggattagtgggttggatgttaggcctgcgaaaaggccacgcatctcctgtcgagagggctagcgagagtggcagcgagactggttgggaaaaagttgaccagtagagacttgggctaaccacgactataatcagactgtgcttgagagtacatctaatatgtgaatataagcatctctcctctctggaaaaggaatggcccgcctaggctgatctacggctgagattctacgccccttccaaagcttccacaagatctaagaatgatctgctagctatctgctagtgatagcctcaacggataaatagcaaagtataaccgacctcacaccgacatgattgcggcagcggtgcacggggagtttcgaagtaaacccaacacttcgttacatcggtcgactcaggaggctgcagtctgcatgaactgtagaccatggcctctcagctagaaaacgtaagtctgtagcattgatgccctaactgagacaattctccataagattggtggagtaggtctgtctaggcgtccggcttctaagacagtttcggcaagcaggagattatcacaataacgaagactctcctttgctgtcacgtcatatcacgaagtaaattgccaatagtgggcggttcagaccatgcttgtactgactatgaagaggggtagcacagatcactttttccatatctcgttcacataccctgaagacatccaggctgtctcaggtgggagctattgcaatcaatctgggtccagctgttgcgattccaacttttcaaaaaataaaaataggttctgctcccatttcgtccccaccgaccaggagttggactgaaccactatcgagtcgcccgtggtccgacggtttcatactcaggaggtattcgtctcctggcgatctgagtggtagtttgtcacagccgaatgtccatcgtttagtctagaattgtgaagcaactcggctactttgcgctcccctcccgttgattgttacgagtcggctgaagtcagcttatgactagtagaaagcacaggaggagcgaagtcacggaacctgacagcgaagaatgcgtctccaatagtacaatcgtcattgctcgatttattcgtctttatattaatgccagcccctgactgaaaaaacgagattcttctgcgacggactctcgcttacaatacaattttgtatctgtatttaaattttaattacaaataaattacattattatgtagaaatttgtctgtactaaaatcgtactatttgttttcttggcaaggaatacattgcggtactcctccacattatcagcccgcctttgtccgtcgagttggcgatcgtcaatcgtcaccaggagcgcgtcaaaattccatcctggttccattgttcttctgccgtcgtctgtcaagactgtcacatctgcacaatcttctggatgctcatctctcccttccagttgccactgccatttctccacaggcactgcgcgatgctggtcctggcccagaatctagcatctcctatctaatcgcccgcccacttttagtcttgtacagaaggactgcggccttgtcactccttactacaaccacttcaacttgcaacccgatcctgacctactgtccgacactggtgaccaactctgccgtctctttctcttgggctgtcactccttcagtaattccgccctcctttgatcttttgttgttctttcgcttcttcttttcttcccccccccttttcagcttgaaataccaccaacgcctgccactcaccaatattcagacccttcaagctacaaccattgcgactgttggctcttgttattaatgcgctctcgttgacttgccgacccgttacgatcccggttgaatgagtttatggtctctcgcctgataatacttcgcctggagcccggagaccgtcgtcctgtgccagcgaagtgaccatccacatggctacgccgagtcgaacgtcgctttatg

SEQ ID NO: 3155 - DNA, 3944 bp, Emericella nidulans
taactgtgtaggttcaattacgaacacttgggtaggaacgcaaacctcggctacctgcaatccttgtgccggtgtaacgcggtacccacccgtcagaatagcaggccgcagccgaagcgtttcgttaatgatgtcgtcgaggtaactgatagttttgattatgtcataagtccactccgaggacccgccgggcatggcctcgtctaggagaagctgaagcttcgctaggatctctggatttttacagagaaagtagaggattgaggctaatgttgtggctgtggtttcactgccggccactataactgctcgagagtcctcatgcagcgcgttcgctgtgggagcagccgacacctccttgtgtacgtacgctttcaaaagccacgaggttatatcttgcggcgtttctttgatgtcccagctctttattggttagtagctctcttctagcccggagctggtaacgtactctgtgtttttgtacgatttcatcttcacaccatttaaagaattcggccattgaaaaacttgctccaggaaggttgctaatcagattcaaaagccatgggacgtggcacatcactcccagtatagccatgtggtcatggatggctttgatccccgggtgttccacgccggtggacaagttattgaactcttttccgaacccaactttgcccattatatcgaaactgaggaacatggaccacttggtagcatcgattgcccgccctctgtttttctcgatgtgcaagaccagaagatctgctttggctctgatgctcggctcgtatgttgcaagggctgcggtccacggtaagcagccggacacgggttctagcttgagatgaaaacccacctttgacgctgagtccgcgatcccacgccttacgccgtctgcgatgatcctagaagtcacgcgtttggtggacgcttgcagattctgcctctgtttgcgcctgaacgtagaatgttgattgtccgcctttagactggggagataggagcagtgggactgcggatttgcggacgatgcatatctctcgcgggccttgataggtaatcaatggtctcctcatccgtactcatggaacaggctcaccggttctgaaaaagtctccatatctcttgtgcatttcggcgatttccacatggtattgcaggccttttccagcaaggtacgcatcgtagaaacgagaaagtttggatagccgaggaccaggaaagcgacgcagacgatggaagaacaaccgatagatcgcgatgctggatgctagacctgtattaaatgctgctgagatgcatcccacacggagaagaacttgtagcggggaaaaggctgtagcagtaagatataaaaccgttacagcaaccactgttgcagtatataaaccgagcaggccatataagtactcctccacgggtaaactgcggaacaatgagacatggaaaggacgcccaaagttgcagctgacagcagaagcttggaaatatcagtacttgaagcatgctgcaaggcttctctgaagagtaatgaattcatagtctgctgcagtggaataggttactatgaacgcgtgagttggtcttccaaggaggaaaggacgggggttcgtatttaagacataaatggcccaccatatgagcagggcttgtttgatagagataacggctttgtgttgatacattagcctgccacagttgacgccaagtaggctctgcagatgcagattttagtaaacctgtcaatgacttgagccaatgcaatggcctctgactctactccaccccggacacggcccgtaaccgtccgctttggggttgttaagcagccacggttgtgcggtcaagggggcacacaaaagtacacgtatctcttattgtgctcctttaaggtccaggggtatgagcatccaatctcagcccacccaacgggaattcagttcatttgcaatcacatcgcaccctaccttcccgaccgcctggagggacacccgcgcgtctcatattccagtgcccatttcatgtcactttcttccaggccttcgagcgctgcttgttacgctcaggtttagcgaattgtccaagcaaccttgccatccgtatagcactgtttatccttgagagccggatgccaccacatcggaaatcatcgtacgtcaccgcggccaaaaaggcttagcggaacagctttggcattcagaccgcgactctgcagaatgagagccaccagtttgatgaagacgataggttgggacgtctgtcgagtttcgtccccagcaacattagtctctcccacactttgcaaaagcgtgctctttatctgacaaagggaccatagtggtggaaggaatgcgtgacgcactgtttgattgcactgcacaaaatatcaagcggactggcgcaccgactcgaacctgagaaccaaagcagccacacaccttcgacgattgttagtgaatccagggcttgcctggctttgatcctaagtggctggtacggtggcgcaggagatgcccctgattgttcgaatctgcaacaacaggatgttattgcggaggcatagcgcagctggaagaatttgtgaccacggctgagacctttcacccagctttatgtatgttctttctatctaagccacgaataaacaagggaactcagcccgcccgcaccgggaatatcacccggaagcagacaagagacttccataggcaccaacaattgctcttctcccgcaaagtcctgcccgtccgatttccccctcttcgtcaaccccggcgccacaacaagaagcacctgctggtcaactcttggcctctgctgtcctttttcggcttccatgaattcagggttaaacctaacatgagcgtcgacgggcgggaactcccaagtgacccgggcagcttgacgatggatctctcgatcaagcgcaattgcattttcgagaatgcgtcggaaatcttggcctggggcgctacttcgtatggagaggtactgccccgctatagaccagaactcctcgcggatctctttgcgcgtgctttgcatgcgcttgtattcctgtgagccttcggtaaaatcgcacatttgaaggatcaaggccgatgcctcgaaggaccagatttggaatttgcgttcgaggtcggggtcggggactgggtcatggcgggatgctgtgagatcagtacattgttagtgcatcaggaggtgagagggcaaggcacgcataccgtatttcagatagaaccgcagatcgcagagggattcgccggctttgcctgcccatacaaagctcccgaaaacccgacgatccaatagcttccacactatggcctgaataatgctggcgcatcggcttggtgacctgatgtactcctggtatgcagttgttcctggggtggtggaaaccacacatgattcccagacgtctagccggtctctgctaacatggctgcgagggattcccgtaaagtactggactgcgaaatcgcggatgctgtacctcagctgttggatgagaccggtcaattggctgtcggtgaactggtagtggctgggagcttgttttgccttgcgcagttcgcgggctgtttgcttccatagtttccagttctcctccgcctgtgctgcgactttgtctcgttcgttgaggatcgttttggtgagagcacattgttcttccagctggcgttctaggtcttggatcctctttctcgactcagcatgctcaagctgtagccgctgaagttcgtcagcggtgttggctggctgttttcctttgatgggttcggtagcaggacgcgtgactgcagagttctgttgcggtgcctgctgctggtttggaccacacttgatagtaatctttggttgagtattagtcgcccgataagaaggcagggaggcagttcgaacgtcttgtgagggcaccgagtcgatttttatag

SEQ ID NO: 3156 - DNA, 500 bp, Emericella nidulans
caactcaaaaggctgagggccggcaaataccccggacttcaacctcatcttccttaaccacggcccggagtcccatttggagaatgggttgtgtggaggagtggccgggtgcgcgccgagaaccagagttgttggacatctcgagtcgtgacgatctgggttgaacttggactgttctcagaacgggtggaaaccgctagtactggcctttcgcatccggcgcttgaggccaaaccctggtcgaactagtgactggctatattaatacgtcgtaatacaccgtgttccgtagagacttccccaatagattgctgtgtccgtcgagaagttcaaccgagattttgcctggctttcgcctggctttcgggcggtatcggggtcggtcaacccaacacttcatggcctcatcaataatgcctcatcgataatgccgtgaacgcaggtcttctgggttacttgctatttccgaaccgtatttcgtaaatcaaatgagaaggcag

SEQ ID NO: 3157 - DNA, 1154 bp, Emericella nidulans
tccctatccgatccttatccacagcaacctacctttctaaggtccaagaaaggattcatataagacgagtatgcggcgcctcacatgtttaagtgctttctttctagcctcagctagtgtggctgtcgcgtccccttcagccgagcaatgggccgagaggtcgatctatgtatgtccctttacagcaccagcaccagcaccagcaaccaacgctaatattcatgacagcaagtgatgacagaccggttcgccaggcctgcaggctctcctggcgacaagccgtgcgacccttacagatattgtggtggctcatggaccggggttattgacaagttggactacatccaagagctcggattcactgcagtccaaatatcgccagtggttgagaacatcccagataataccgtatacggagaggcataccatggctactggccccagaacatgtacgctttgaacgagcattttgggaccgcagatgaactccgaaaactgtccaaagagcttccaagcgcggcatgtatttgatggttgacgttgtgatcaacgacatggcgcaactgtagaacagttcagtagacagtgggtcaaacatcaactggtcacgtctgattccgttcaatgagaagaaatactaccaccctttctgcagaatcgaagactggaacaaccccgacgagtccaagaactgctggttcagtacggaagtagttgcccttccggatctcaagaccgaggacgaaagtgtcgtctccatgattgaaatctgggtaaagggactggtgggcaactactcaattgacggtctgcgcgtggacgctaccaagcatatggacgaagcctacctgaccagtttcagcgacgtcatggcgtgttcacgatgggggaagtctacaccgaggatacagacgccgtctgtaaatatgaggaggttttatcgggtctcctgaattaccccatgtatcggccgatggtccaggctttcactgcgggaaacatgcccggtcttgctgaaaacgtccgggctgttaacagcaaatgcaaggattttactcggctggctacgtttactgaaaaccatgatactccccggtttgcgtctctgatcaatgatacgactgtatgctcccataatcttagaactgctgcat

SEQ ID NO: 3158 - DNA, 2433 bp, Emericella nidulans
aggggtcgctgtagacgatctctagccgctaggatgttgatgggtgctctcagcgtagctggcagattccgtcgtgggcggcggagagggtctctgttgcggttcttggggatcctggggtgcattatcaactgccagacgtctcctctttgcaggcccaggcctgctgcttgccctagtgcatgttgcgccatgcatgcgacataaaagacatggttgatcggcgacctcctgagtgcatcgacttctccgcttacgacagaagtcgcaggcgggaaccttatgggagcgataagggcgagcgaaagatggagagattggtgtggttggatccgtcgttccctcggcgttgttgggcattacgagggaggttgggaggttgagctacctatagctggagcggttgtggtccacacagtctacggttgtttggccgtcggaaagcgagcaccaactccgctagcgcttagacataccaagtatagactcaatggaagctgctgtgagcgtcaattgcgagaaacgatcaacagcagaccggaatggccccggggcgctcgatttgttgattggcagaattaagatgtaatttaggttgagttactgaagtgacacagggaaaagctgagcgagacaaagcatcgaattgccacgtgacacaaactttgtggtggatatagacatacccaagagaatatacataaacataagacaggattttaaaaaagtcactatgtgcttgatagttcaatacgactacgccagcgctaggagcactaggatgttgactgagaacctttgactacctacttggtagtaaaatattagtacataaatcgcatcaggtctcatgtatcatattcatagcaacatgacatgaacatcacgacaattaagttatatttaggctttcgcctcctcatcctgcttcaatccagagccctcatacttcgactgagcaagggtgttgagctcatcttcctgtttatccagcttgtagtttgttgcccagaagccaatgccgccaacgaacgccaagatggcaacgacagcgtagttccagacaagaagcgggtcttctgaaagaccgacaaaggcctgaccgatggcagaagagaaagcgttcatgaagagtgagacggcctggaccaaactgcgcatgttcttgggcgccttggtgaaggcgtactcaagggatgtaaccgacgccagaatctcggaaataccaccgagaatgtaggtgagagcctgcacccagacagagatgggtgcgtgcaggccttgctccagacaactgttggcttctttaccgcatgggcctttcttgtagatatagtgctgggtgacggtagccacgatcataccggaaacggccacgaagaatcctgctgtaatacgcttgagcggcgtgaatttgattccaatacgacggaggaaagggtatagcaagcggtcgaagatggggatgaaaatgatgagggcgagcgggttgaagttgttgatgatgtcgttggggacccccgccaagtcgcatcgtggcggtctgagaggtaagattggtaagcatttggttgtaggcaagccagtacaggggataccagaggaacacccggcacgctttgagaccgcgggcaacttcatcaacccactcgtcatcgaatgtcatccaggtaggacggtttgctcccatggtgctgggcttgacggtgttccagaagtgggtatcgtttttcttgattctactcgatgttagaccttcatacgaaaatgagtccaggtggagaaatacctcttgaatggaataccagccactttgaccgtggtaacggaccaatggtgcctgatagcttccctgatcagacgataggcctgggtatacacagagccagtcgggggaaccaggtggtatttgttgcggcagaggtacagcacgagaggagagaagcagaacatgatcgtgggcagcaagaatgacagccagaacccaacgtatcgctcggcgtagaccatgctgatctgtccagtaagcgagccgacgttgatacacaggtagaaataaagatagacacgagcaacagtggcagctgggtcaatgatgatgcgctctcctgatggtagggtctttaggtagggccgctcatcggggtattgttccgcaatcaaggcccagatgttggacttgaaaccaccggtacccatacccatgatgatcagaccgatcgcaaaacagccaatagcgccattggggtttgcgatcacggggggaatggcggagatgatgaggataacgtgaccgactagggcacaaccgatcgagaacatgatcgtaaggaaacgaccccagtactgatctgccaagaaggcaccggcgagtggcataacgtacgaccacaaagagtggtgctttcacaagcgcctaaacccccccccccc

SEQ ID NO: 3159 - DNA, 1443 bp, Emericella nidulans
ataagcagaaatttggaagtctgccacaaagaaataaattagcattgataaaagtctaaactctgaagactttaaggaaacctctaacaataaattgagaaggacaaaagctagcctcctgattcagaattcagggatgataaaggtgttgttccctaccggatccgtaacaaatttggaaagagcttgacaattcagaccaatagctcaatagttaaaactaaacagttcatgcctcccatcatatgcttattggggcgtaaagtacaatttaaaacgggtgaaagtcaagctgatattgcagacaccgaggtggggctagccggtgtcggtcccacacaaggcaccgctggccaacgaggctgcatgccctaatctgatgcctcaatccctgcaagaggcaacgctcttgtctctttgaccgaaaacagacacatgctgcatagtccttgcgattgaatgctcggcacaattgatgctgccagcactagctgacatcgcaggatggcaggattcaaaggctatgaagctgggcaatgcactgctatgatggtgtcaagtgcattgcagaaactacaggtctaaatcagttgtcccggcaatcagttcaaagaagatggtattaaacatgtatcagctagaaggaaggctgccgacaaagtatccgcgtataatgagagattactgcgcatccattaatcttgccttggttgaggaaatacctctatatacttgttcgataagaatatacttcaggttgaagttggcagcgaatctagcctacaatattgcttatggtggtgatcatacggctatacggtgggcaacgccgttaggcccaatgacctatgtatctactattctctctacctctggcattaccgtcagaggcacatcacgggacagaagccctatatcgcaaagtccaaagctgtcaattctttcgcacttcgcttcctagaatgaaaagaggcattcaatctcgcttttctactctttgtcttgagcctttatctacaatggtatcgaatgctgaatatgtctaaacgactcaccactgaggggatgatattgcatgaggtagttgaacgtataagcttcgaggttgtgcatcgacgatacctagccgggtatggaggatggcatttcatcacagatgcagaatgatagcgcagcagaggagcctagatcattgaatcagtgaggtcaatctaaagcagatgcttaccaaacccatcactatgcccaaccctcatctgtagcgccctaaacttctggttcattcctgactgatctcgatccagattgtgactgattctagttcaggttcgatttctgctgctgatctaaaggcgtaaatcagacctagattcagcttaggatttcacttgctgctctaccggctctttgccgctgttttcttgaagagtccggcaaaagagg

SEQ ID NO: 3160 - DNA, 1313 bp, Emericella nidulans
cgatggctcaagtaatcagttcgcctatgcgatacgacgccgagcgcagagccttgcaactccgtattgctctgccaataagaaaaacgtttgaagaataaagaggtgggtggaattaatacacggcttgaaaataagtagaactcggtcaaagcgtagtcatctcccgtgatgaggtcgctgggaaatgttgtgtaaagatgagctaaagttccgtattcaaagtgattcccggcccaaacgccatggcatggtcttgtagcagaaccgaattcgtacctccgagagttcaattatgagatgaaggggacatgaagaattgtaactggtatcaagacaaagaactgaatcgaacggcggatatcattcaaagaatggatatcatattagagaattgaactatctcactgaccaggaggtggaggttgggatgggttactgggctgcgcaccccccatcatgaagccaggaggaaacagtggcataccggggaaggaaaaaccaaaaccaggaacggctgggggtacacccacattgttggcgtgtgacgtgtcgtccatctggggtgcagaacgctcacgccgtggaggacggtcatgctggacggcgtgtgaaacccgggcacgcttgcctccagtgaaggttgcgatgccgctactgatgggctttgatgacacaaccgacccatttgaaaatcggagctcaaacggatatgcccccctgaatgggagtcctcccggtccaccggaattcccaaggaggattcagttctgatcccctccatcgggttttaaggggatggacctaattcctcttggaaaataacggcgctcttgggctaaagcaaacccccaaaacggcaaaaagtttattcggcctggttgaatcattcctcttaggaagaggcattcggccccggttaactttttaagtatgaaattgggacctcaccttgcctggttttttcccccggttttaagggaccaaaagggtgtttatttgtccccccccaagatagggaaggaaacttttttttcctggtaatcaacattattatgcttccaaaggggggctctaaatagaaagtataccaacggggacccttttgtgtatccctatacggggggattctgtcctctgagggtgtggggggcccagtggccccgggcccatataaaggcactatttcctcctcttcttttgaggaacatctttttcattttataggcgaaaataataaaaagatttatctatatgtttttcgtctaataaatttcctttctaacattcacaattttgttcttcaataatac

SEQ ID NO: 3161 - DNA, 892 bp, Emericella nidulans
acctgggcgtgtgtcctgccttttgcgatttccttcgcggctctacctacggatttttgtggtgaaaaaaaaaaaaaaaaattacatcggaatagaagcctgaatccctgagctagcatccaagagtccgcttttactacttgcattgtagtgatagctttggaaaggtaatgcaatctttcctggtgtctaccaacctagcaaacggctcaaaactgagccggacaatgatgataatgaagacacaaaatttggtcgcgcaaccgctggccgaaccaccagcaagactccctccgtgaaatgacccttgaactccgagcctccgtgataatccaggacatatggtaggcaaacatagaaaagaaaaaagttgaatggaagaagaagggttactggcgccatgattttccgcaatgcatgcatgtgcaaaacagcgtcatcggttcgtcggcactgcgggtctgcgcttcagtataggtgaccttgcgctgtccgcatttgccgcattgcaagcttgtactaatgctgcgctctgcctgggccaccatggccttatccatgttctccttttgaatctttcgatctttctcgcgctgttcgtcggatcggagctcctcatgtgtcattttcacgaatcgttcaggggtgacctcgttgcttaaaacacgaactcgaagcgttgggttggacttgttcttgagattctggaatagactgcggatcttcgtacggtagggttctttcgtttctggtccgtaggcgtcatatgccgccgcttcgactgctgcggcctttgatagaacggccttcggcggttcggctgagtgtagacagagtccatcatacatgagtccgatacagttatcgcgcgctcggttaccgtctgattgat

SEQ ID NO: 3162 - DNA, 708 bp, Emericella nidulans
aatcactgtctatatgcaacaaatcatgcagggtatatatcaacaatgcagagagacaaaatgacttttcgcttccatcgcatcacacatggacacattaaatgggtaaagcgcaaaagcaatgcaaagatgcagactaaagactatatgtatcggggtataagtaaggagaccaagtgctgaactctattttcctccaaaggactcgcgcgtgttcacgcggtcaatatcgtaagggttgccctcatagagtgatttatgcgacttgtgagaagcgaacgatcgggccgaggccttgctgcgaacctgtctgatcgagggaagctcttcgactgcagaatcagcttcagagctcacatcgtcctcggggtgaggggcaggggcttcagtacggtcgaacttctcaatctcctcatcctcagcagcctcctcttcggcagcgggttcgggcttgactgcgccatcatgcgagcgcatgaaggcatcggacagggcggcgtacttgcagcggacgcggatcggcttgccgtacttgtagaaaaggaaggggaaaggaccacaggcgagcgcgaggaaggccgggatggtcgaggcccaatggatgccgagatcttcatacatatatgtggtgaagagcgggaaaacgacccgaagatcgaacggagaacagagtttgctgccagaacggaggcagcgaagatgtgatag

SEQ ID NO: 3163 - DNA, 983 bp, Emericella nidulans
tgtactgcagttggggtcggatgttatatgccacgctcgaaggagtgagcttttacccatgtttgggcgacttccacactttccttgaggacatctccaagttttccggtgagttggacgcgaccgcttcctggcatgtctgcgacttcgatgaaaagaatgcttccttggccgccggttgagtatgcaactaggccggttacgacgcctggacggccgtgtttctcggcgatttcctcgtcaaagcgctcgataccgaggatttcttccaagtcatcgactgtaacaacggggttgtacgactcaagcttagcactgtcagtggcgtccgcaaactgaacggccttgtagcggcagatcgaaccaagttctcgttcgaggttgcggacgccggattctctggtgtatgaggtggtggtcttgtcgataacatcgtccgacaaaacaacttgaccatctgaaagcccgttcgctcggatttgcttgggaagaaggtgtctcttagcaatgtgtctcttttcgacagttgtgtacccggacagctggattgtctccattcggtctaggagaggggcaggaatggtgtccaaggagttgactgtggctatgaacaggaccttgctcaagtcaatgggaatgttaatgtaatgatcaacaaaggtatggttctgctcagggtccagcacttccagcattgctgcagatgggtctccctggaaattagggccgccaatcttatcgatctcgtcgagcaagaccacagggttcccagcgagctccttgatccgaccatcctccagtacgccagacccgaccatcctgtatgcagccagataagccgcaatccgaaccgcgcttttcacaccgcccaaggtcatgctatgcgcctagagggccgcatccgtaggcgcggaaaagggttcgatagtcctgccggcggccggtggttcaacgagcgccctggaggtctccctcatgtaccc

SEQ ID NO: 3164 - DNA, 976 bp, Emericella nidulans
acccctaaaatcaaattagggtatgagactgtcccccttaaagcctgaattttttccaccacaaagtcacagatcctcttaaagctcctagaagaacgcattacaattcaggcaatggggcacagtgttgcttgcatcaccgcagtacagcatcattctctgttgttttttagaccccgcgcggtttaagtcgaacaatgggacgggacagcacaacagcaaccacatcgcccaggatgacccggtgcatacggcgccgagtgaaaggcccgtgacttggtcctcactccttaggatagggcagcttgctattctgaccattgcgcgtctttctgaacctctcactcagacgtccctgcaagcttacctgttttatcagctccgttccttcgacccgtcgctcccggactcaaccatctccaagcaggcgggtattctgcagggcagtttcacggcggcgcagtttctcacggcggtcgtatggggtcgccttgctgatagcgagtggataggaaggaagcgcgtgctgctcattgggttgttgggcacttgcatctcttgtttggggtttgggttctcgcggtcgtttgcggctgcggcggtgtttcgtactctgggaggtgcgctgaatagtaatgcgggtgttatgaggacgatgatctcggagagtattgaagagaagaagtacgtatttcggccgttgttgctcggtgggacattgctaatggggtcgaattaggtatcagtcgcgagcgttcattctcttgccgatgtgcttcaacatcggtgttattatcggcccaatacttggtggtttgttggcggatccgcgcagaaactatccgcagctgtttggaccaggttccttctttggtggtgagaagggtgtgtggtggatggaacactggccattcctgcttccaaacttggtcagcgctatctttattttcatttcgtggatatctgtgttctttgg

SEQ ID NO: 3165 - DNA, 2035 bp, Emericella nidulans
gtccagcagccgtcattcatctgctgattcgttctgacttcgtagataaagcaaggggccttgtagatcagccagtcgcgtcgactcgaaactcagcagtacatctaagacagatctccagatgtcgtccagtgtttctccaggtcagaaactacgcgaactgccagggcatgggcggagacaagagtttctttttctaatttttttttatttctttttattttttttccccttctttttcttgtattacggcgccatggatgtgctgaagaaagaggtacccacgggagtgctcgggagtggtagtagtactgccgctatatactactgcggagtctatactagaggtcttcgatccatccagaggttcctgattcatacttaccgactggttcactggctggcaaggcacgctcggagctaccgggtttccagctactccagaagtcgaggttacatttctccttggtacgttggtagtcatttcatcataatgtggggagggcccgcgccgtggagacggcagagcgatcctgattcatgaagggcgatccagtggccctggttgcgacctgaggcgacgagtcttggccgcaggatttcaattccgagagcaaaatcgtgccaagcgggggccggccgaaccatgctcctgggagtaccgcaggcacaggacagagtatgagtaataagcgagatcgtattgccgcagtgggtgcactcttcaacgctagtcagccagctagccagtagctagctcagcaccggcatggcgaccggcatggccattagctttagtaaccaatcctgctgtcttcacttcatgttcatgtccaatgcggccttaaaacacggggcgaatgcctcgcgtaaaaaaaaaaaaaaaaaagagagaaaggaacagagaagggaagaagacctcccttccctcagaaaacctcaggaaagaaaaaagaaaaaaagaaaaaaagaaaaaaacatatataacatatataacgtatattttcagcacacttctgacaggtatacccaggatctgactcgccggccgcggccatgatcaatgctcttacatggatgtctctgctaattatcatcagcgtaccggtatcttcctctggttatagccccgcacctgagatggacatggccatcactccacagtcgccatgctgctcataaagtccatgtttcatgtgttctcaaggccgtctgtgcgttgggccatcttagcatttggcgggaggtatatcttaatgctaatgtatgctgatatttgcgcaaccatcagcaaccataagacggagtcctacaaggccacttcagggtgtcccaaagtctccctacatgcatcctggccgctagatgcttaaaccagcgtcgaccaggccgtatcaaccggccgaagatttaccagtgcgaattcggtggcttttccagatcactagcactcgacctcggggaaagaaaagaaaaagaaaagaaatctaagcagaagaaaaaaactagaaataatacaagatgatgggccgtggtaatccagtgatagcggtcgcaaaaagcttccgtcggttgcttttgcctcatcttcattcagatattatggcgaacccgacatttttgccattcggccgaatgctagaaacccactccagaagagtgccactcttctttccatggagagccattaaaggtgcgtcaagcctgctatccgtgctctggcacgtcatgaacggatacatttcagcaccagcaatgtcaacaggtgacccaacattaccgctttcctcgaaacctgcgtcaatgacgatgaattgactcaagggcaatagtgacgcgtgactgatctactgctcgatatagcgaagcttttaggacaggttttagggatttattggatttgttggattgatttgcgatcgtgactccattgtcagcgatttcgctcgccgaccgccgcttttggacgttgcaagactctatcagccgaccgcgagcatcgattgtcttaacatccatgcaatttctagatgca

SEQ ID NO: 3166 - DNA, 1279 bp, Emericella nidulans
ctgcaggtcgactctagcctattggaaaacaatgtccgaacatataattttccccccagtaatatagcaaagatcacgaaaaggctcaaaaaagtacatttagttcaaaatttggagtagaaaaaaaaacaatagaaaatttcaaatttccttcctcattcatcggagagctctctttgggctttccgaaaaggtatcacatgctaagtttggcctcacggtctaaaagttatagagtcatacatttttaacaaaacaaaatagagaaaaacagaaaaagagggatgcaacacgtggactttccgggaggtcacccatcctagtactactctcgcacaaggacccttaactgcggagtttagatgggatccggtgcattagtgctggtatgatcgcatctttactacatgcaatgtaatcgtatatattcttttttaaagactttatgatccatttgccgtgggtccacccgccatgtaggaataccccatctagtcttaagagctttgatacatgaaaaatattggaaaacaatgcttgaaaaagtaattttgggtccgtaatatagcacaaatcacgaaaatgcccgaaaaagtacttaaaggtcaaaatttggagtcgacaaaaagtcaatggaaaagttccattgtcttgcttctttcgtcggagggctctctttgggctttccgaaaaggtatcacatgccaagtttggcctcacggtataaaagttatagaatcataaagttttaaccaaaaaaaaaaaaacataaaagagggatgcaacacgaggacttcccgggaggtcacccatcctagtactactctcgcccaagcacgcttaactgcggagttctgatgggatccggtgcattagtgctggtatgatcgcatccgttagtatatgcaatgcaatcgtatatattcttttttgaagacttgataaaccattcgccgtgggtcccacccgctatgtagggataccccatctagtcttaacgagctttgatgcatgaaaaaattcgaaaacaatgcttgaacaagtaattttgggtccgtaatatagcccaaatcacgaaaatgcccgaaaaagtacttaaaggtcaaaatttggggtcgacaaaacgtcaatggagaagatccattgtcctgctgctttcgtcggagggctgtctttgggctttccgaaaaggtatcacatgccaagtttggcctcacggtctaaaagttatggagtcataaagttttaaccaaaaaaaaaaaggttaaacggggatcct

SEQ ID NO: 3167 - DNA, 1009 bp, Emericella nidulans
ttcaggaagggggtactcccggtggaacccccccgcaaaaacggcttctttacagaccaaggtacattacgcctttggccaagaaatgggccccaagggaaagttgggggcccccaaaaggcgaatatttaagcgttccccgcccatgcccagaaccgggcactgagggcatgagcacgaactttgaaaccggccagcataattcctcttcgaggcgaatgagcatcttttaggattagccatgctcagccatagtcttagtataggtcgcaaggagggccaatgagacgcaccctcagtcgtctaaagtcgccccaaggccagagcgcttttttctgatcccgctgggcgattgcaccactgacgacaataaatctgaacttgcgtgcaaagttcggctggagatccttcgtaaaggccgttgttgccgcggagacataatcgagcgaaaccctcctcttcagctcgtcgtctgccctccgcgccttagatggagtcaggccgattgtccagagacaggcggatgcagatcttaaatcttggacgaggtccgggtttgagtaggagataaagtcggactctgtcattttgtaggttctaagctttgggtgggtggtagagaggtcgcggcgggtgagagcgatgatggaggtaatggatggatttgctaagcactgggtaagaagctcttggccgatctggccggttacaccggtgaggataactctcatcgtaaggattgttcgaagggttgacttggatataacgccggctcacgtagaaagtggaaggtcaaaagtaagacggcggacgaaacgcgtgctcctaaaatagtgggttaaagccgatatctccgctgactagcataaagctcataggttctgaatattggccgccttaggccaccttgtttggttaatggcggatcgggtatccaaaaacactattgtactgcttcttagaatgtctgagggctgggtaggagggtttatgttgtatgtatgagata

SEQ ID NO: 3168 - DNA, 912 bp, Emericella nidulans
gatacgaaccgcaattatcacaatatcaccgccctgtaatgactccattttctttatgtcttcgaccacactcttcaaaattccgtccctactaccaaagtccgcaatgatgaccttcctaggcaatggctcgatatctgcaagccacttcgccgccaacccaacgtctgggtaccccaaatttcccaccgcaaatttgctctttccgtttgcgtcatttagcgctctcgcagcttcgccaatcggcccaggtgaagatgtgaactgtaatagacctagcggtccagtcccgctcggtctctgaaaaagattatacgccatcgaacgagccgtctttgtcgacgctcccagactcacaaggacagctctagagagatccgcgtcagcggccgtccagtcctgcacgccctgatccgtcacaattccgcaaggatgtataggcgggcggaccgctggatcagacgtgaaaatatactcgctcatcagatatcccgcggcaaaaaccgtccccactgctgcgtcccatgcgaactcggtgacatcttttccctgcgtgtcgaaaacgcggtaccggttgtagagcggcatcaggtgcgctcgatgctcagatacctctttccagtgcccgtctaattcagacggttttagttctaggtcaacggcgtggctacctgtcggccagaaaccgaagagcaccgtccacagggggatcccaggaagggtagattcgagcactgtggctagaccccaggccggaacaatgccccattctgtagtgttgttgtagggcgccggtgcggattgcggaacggggtatgcgtcccaccatcgcaagaaatttccaagaagtgcgtaggtgagattattggaggtcaggctcagcaaacttggtcggatgcggacggaggactg

SEQ ID NO: 3169 - DNA, 7935 bp, Emericella nidulans
ctgtgctctcgaccgcttggaagcgaacgcccttccggaccggtctgtaagcggacggattttggttcgcagtcctagcggtcacaatcgagttggccacaagggccgccgcaaacacgaacgaggccaggatcgggtaaccaattcgaaggtattccagcgacccccgccatgacgttatggcgagccatgatgggcggtttcctcgcgcagggtccaaggcactttatccgaagaccgtcgattaaagtatttccatggcacgacgaccgcagcgttactcccaatgtaagtgcggttgaaactggatagctggcttagcgagcaccgagtgaggcaggaccggatcggaacgactgaggagagaagggataggcgacttgggagggtctggtttcggcgaaatttgtgatggccgaaagggatcgacggagaagagcacggtctccgcagtctagctttaaattagatttttctcttgggcttcagctcaaagatatattgatctcaagggtctaaggggaatgagaagaagggaagaagagaattgcggccgagaagagaattcgaagaatggaatagtacaaaaacaaggcacgcagaaaataccaagggtgatagcaatgaagggcagagaagacaagacaagacaagcaaggttgagccaacgaagcaaagactacccaagaggatagaatgcaacgagcatgagaaggaagagggaagagatgaggaagaaagtgggagggacggatactgtagaggaagaaaaggaagtaaagcaatagagccggtgccggtatggagcctgggaatgacggtgtggtgcatgtgcagctgtgtcgctggtggccagaacagttccggacttgactagtctgcagtagctggccccagtgctcggttgtgcattcgagctctctacaaagggctctttacatagcaagttttaggagccttagctccgtgccctggagatcttcccggtctgctccttcaacggtgagaattttccggagggattacggggtgttttcgttcaggctcaagggttgtcttcctgcggaggtcgaactatgtgccgtactcggcatatacgagtcttattcccaagatacccaatataaccataaaaaaaacagtattcaaggcaattcacaattcaaaccattcaaaacaattcactaatacaatcgaatattgtaaatcctaattagatgcagtttgtgcgcttgctcccccaggatcttgctgttcagaaaccatcaatggccagcactggttggagctgagtgggctagcgaaggatcacggcccaatgggatcatgaatccaacaaggaggtcttctacagactatatggcggtaaaagagctgactctcgctcgtcttcagagattggcactttgaggcctaaagtagatcccaggtacatcgcgatgcagtcgatgttggctgttaagctctggcaccgcaagccgagcacggagcgtttccaatccagctgagtttgaccgtctcgtagggatgtggcagcagaccagtgtttgccccagcgacagatcatcgatatcaaaccccagcatctcttccgccacaaccgtccacagtccgctagtggtctatcagctagtcgtagtagcgatcagctcatctgtacaattagtagtctatccagtaaagtccatccagtagtatatatgcatccagtagtagtctatccagctattcaatatctatccagctagcgagcgtctactctagtctctggcccgacgctgcggatgatctaaggcatgctaacggaggggttgagatcgagattccaggccgccaatctcgccttcgctcttatatcgcatacatagcacaaggtgaatctcatgatcgactggagccgggcttgcatccaattcgctcgccgaattactccacgtcagatggtcaaaacatgggagctcgaatccagctcaaggcggagtatactgccgtacaccgccgttagcaaggcgaaagcttggtgaagctgccagtctgtcgtctgctctgtttgacgtttgttcatccagcctgcatctatccagggtttttgagccaactggagctgggagatcccttccgcatcgtcgtagtctcaagcgatgtggtctgagagggagtgatatatcagctggacactggactggtcagataaaccgcagaacagaccgcgctcggtatcgtaaaacgacgctaaacccgatcgggtgtaataacacgcactgggcaggtgcagtgcgacaacctcgattctcgatcgattgccgcgaccaaccagctcagaggcaagctaccttgcctctgccctagagcgcatcacttcaacggacaatcaattcaatccttactcgtagtgctgagattcttgccgcgttgtcaagctgcaaggcgcgcactgactaatccctggctacaagacgactgggccctggctgtcttcatcccgcaagacaccgtcggagtcttgtctcagttctttcgaaccttcctatgcaagcgcatctgacagcttccaaactcgttcttcaccattgtccttgacgaccatggagcctcgagctgtttcaggctaggttctgatgctgcgcaaactgaagcatgaccgacctcccccgattgcccacccgcggcagcacttccccaactcctccccctcctccccctcccccggtgcaacagagtcaggccaacaagtactcccatcgtgcggcgagtgctctcgcaagatttgcacagccctttttctcagggtctcggccgccgagcccgcacggccccgggcctcgtcctgacgcgtctgctgctgtccgttctactaggtctaggtctttgtacagtcccccgttgcccctccctccttgcctcttggtcgtccgtccaccactctcacacgctgtctttgtaatgattccgctggttttaattactttatcctgattggattttctattttctcccatttgccgccgctgaacctttgacgcattcaaactaatcccagttactcggtaggccgggcgcgtcgcagacagtcacccacaggacaggcatctcgatcgctgctctggatatctccccgcaacggacacatgcagtcattggaggcaaagagattctgaaaacgattcgtgtactgccagatcattcgtcagaagaatttaacctacgcaatgctattatcggctactcatcaactcaccatgctggcggcgggctttccgcgcggcacaaggaccagctgacggttaaggatgtgaaatggtcacatggactctacgatcagattatcgccaccgcagtggccaatggtcgcatcgtcgtttatgatctgcatcgaaccggattggagtactgccggtttcagggccatagccgccaggtccatcgtctagctttcaacccgcaccaaccagcatggcttctttccgggagtcaggacgcccatattcggatgtgggatttgcggaccgtgcctacggatcgtggcgtttcagtatgtggaagcagagaccaatataacagcaatagcgacgctgtccgtgatgtcaggtggtctcccggcgacggagtcttgtttgcggttgctaccgatagcggcgcaatccaactatgggacattcgcaaatcgagcagtcccattttgcggattaccgcccacgataggccatgctattccgtagattggcacccggacggaaagcatatagtcagcggcggtacggatagacaggtcaaagtctgggagttttcaatcactgccgagcgcaggcagaagccgttatttcagtttaggacgcctcaggcggttctcaacgtccgatggcgtccgccttcgtggtccagagaatcggatagctccggggactggcagtcatcacaagtagtgacttcatacgacaaagaagacccgcgggttcatctctgggattttcgccggcctcatattcctttcagagagtttgacagatacgactcaactgctacagacttactttggcattctaaagatcttctttggactgtaggtgatggcggcgttttcactcagactgatgtacggtacgctcctcaggtggttaatcagcgcccaacctgctcggtggcctggagtcccagcggcaaggttctcgcttttgctcaaaagcgccctaggaggagcattcgaggtctcagtacgaacgagtttattggacattccgatgaagaggacaccagtggcgaggcgctaagtcagagtcctgctgaggaggcggttggagatgagcccttgtttgcttctatccgacctcgccatagtaagtccagtagtattcgtacgtccaaatcgctcggcagtaccccaccggcagcgacagatctcgtccccatacttccgctggaaaggctcctcttaaaggacacatcttcctctttgtgccaaaagggaatgatggtaagtgtccctggagctacacttgatcgagaaacgtttcaatatctcgctagccagtattctcctctcctccaagggtggctcagtggcatgcaggcagggcctttgcttcctctcttagattcactcatgtacaatgctcaatgcgccgaagacattgcattgcctaaactggctcagacctggcgtgtgatacattacgccatcatccaggagctgcaagcaagggacagagagcagcggcaagcgccggaaaagagctctcgtagcatcaggaagaaagcttccttggaggaccccataattgagaaggtccggcctctggaagatgcgagacatggaaagatgaagactcgcttcttcaagggggtaatagagagcgaagcatcaaaacattctcactctgaccttgagagcgcttcaaacatgacaacgcctcttgctcagcctttgccagactcgccgcccgactcgtatgatagttctgagtctcaattcagacatttggatgatgctgaagatattcaacctcttccgccctcggttttgagctcaaaccaggataccatggcctcaaacgactggtcatccatgtcggacattgggtctcgccccatccatcaacttcaccatcgtgaatccaacgacagtgaaaatgtgcgcataccatcggacagtccgccagccggccgcagtggctcactgcaccagggaactgaggaagaacagaggtctgcccattagcaattgctggcaggacagactggcataatcgtcggccgcaactcaaaaagcaaatatcggatgtagacgaatttgagcaaaaggtagaggacaaaagggctgccatccgtgactacaagtacttccctaaaaagccactctctctcgaagcacatgcagggtctggtaaaccgggttactatagacacgaatccacagaaagtctcccaatgttttcggcatcaacaacaagctcacatccgtccaagtcgccggccacatccttcacctctgcaactaggcttcatgacgcggccgaagtagtccgaaatggtcacgacgttgggtccagaaatgagaaattgttgaggacccgcagcgattcaataatcaccaccaattccattgcagaggaggaactcgaggttgacgagtcatttgacgaaggcctccctgatcagaaccatatccatcttgacagaccatctacgccacccccccttatgaaagaatccacacccttagagtcgctgagcaaggaaaatgagggctctgcagcaacaaaagactgtgcttcagctgctgtgcccgaccttccagacggtctttctcgcatctctataccaatactctctgaccaaacgggcaataacccctggagtgcagaaatacttttgaaagaggcgatcagacactatcatagtggtacacacgtcgacattcaatctgctgcgcatctgcttcaaaagctgcatattctgattgaggacatcgataatgttctaccggctgaggagagcgagatcatattcaaagcgtacaatgaggccctgatacgccagtccatgtatatcaaagcagccgagcttcggttgctctgcgtgccgtcttatcctaccgtctatgagtatgctcaaggggacacctacatgaacgtgttttgcttcacgtgcaaaaagccttacgagaaccccaagaacgacaacacccgctgccaccgctgcagcactccacaagaaccttgcaccatctgtatgagccttgaaccgccaccggaatgggttgcagagcagagtgccttgtcccccgatgcagaacacgatttacacccgagttttacctcccaacttctctcaccatcccattcttcgctcaatacggagcccattccccattctgagctgcagcgtattgatgaattcggcccagaggtctaccgacgcgcgcgtcccaaggggactacactttggtcttggtgtcaaggctgcggtcacggtggtcatctcgcatgcataagcacatggctcagggacattgaagtgagtgaaggcggatgcgcaactcccggttgcatgcatgactgcgccccaggtccgcgtcgcgaacacaaccgccgtgtccttctcgaggaatcgaagaagcgtgacaatgccagtcgaaaggccggcgtcggcttcgtcaaacgcgacacctgtaccaaagggtgaaagcaaggccgtgaaaaggtgcgaggcatgttgggcaccggcgccagtgccggtgctgtcgcttcgacggggagcgtgacgccgtctaccaccgcggcgaccagcgttgctcccagtgcaacgtcgtcgaatctcatgtcgtcgccgaagaaagtgcgccttgtcactcctagtgagcaggaaaggccgatgagaactggctctgcccggactagttttggttgagatgtcatccaggtacttgggcttcccactgtgcttcgatggttttcagtttctctgcttgccaaaggtggcactcacaaactatactgtgtatataggggaaaaagcggtacagtcagcgataagcgtactggactaactctagatcttggtttcagcattaataattaagatatgtaccatagcccattcagattcatgataggtgtagtccaagaacaaagtatttccacgtagtcttccacgatcccagctatttcatgacaagaccgtatacctgtcagcaatctaactccagcatatctcagaaggaaatcggctatgagcgaactagctaaaaccttcgcttcttctttgcaggggccttactcttcgcctcgagctgtctcttcaactcctcccgtttcctgtccgctttttcttcctccgtctcctcgcgttccggctttgcaggtgttttcaggttcggttccttagcttcacggagcgatggagacctagaagcgggtctttctttcttctccgcctcgtcctcggtattgctctgcctttgggccgtctctgccggtggcagtacgctctccgttcgcgaggagcttggcgcttcagagctgtgatcttgtacggctttttgcttggagttgtgcccgccaataacgccgatcctacctagtggctttctcttttttggtggcgggtgcggttctggggattgagatcggaatggtttgctacttggctctggctctggctctggttctggtgttgcttgtttcctccttcctccgataacgcctagcctgcgggactgctggggcacttttctgggggctgatgtgggggtgtgttttgtctttgttaaagtgtactgatgctcttcgtctgcgtttgcgtcttcgtctgttgtttcctcattggccaagctttttgaagggttgtgcatgccatgagatggagaaggtaatggtgacggtgtaggcgttcgtgacggtgatgacaggctcggcttcgtctgctcatgcacccgat

SEQ ID NO: 3170 - DNA, 934 bp, Emericella nidulans
aatcgacggcctgcgtgatttccgaggctggggttgaggaggtgcacaagtgcacgtgaaaacggagaggatgatcccatcgtgacgcggcgagggggcggaagagggcgtgttcagccaatctcctgtacagagacagctgtggatggtggatagttcaatcttcccatatagtctcaagatctagatcctgccgacgctctgctccgcatacactccaccgtttccgacccgagcgcgtgtttgcgaaagaagacggaccggacatatccgatatgccacgccggcggctgacgctgttggcgtccgcatcgtctgccctgtcggcggcggctttgagagcggctatgcggtctgcttcaatggctgcggcttcagcatcggggatgtccggaatcgtctcgagcgaggatatactcgggctgcgggatcggagactcgtcggggtcgagggcatcgaagaggcagaggagaccgagtagctcgggaaggactcgttgaagcgggagctgagaatgacaggagacgaactcgcggaggacagcgggctgcccgcgacctggatcgacggggtctgagggacatgtagcgtcgacgagggccgacggcgaccgatccgcggcgtataatgtgacaagacgggtgaagacaagtagaagtctgtattcgcagcggacgacgaccccgaagtatccagttccgcgtgttctgatatcgtctcggagatgttcttgcggtgtagcatcctcggctcgaacgaatccgcgtacgacagctgtagaggtagataccgcttaggtgtattctccgccatgttcgcgggcgacccgcgaccgttcacaaagatatacctccctctcgagtccagaccaggcgacgagtgcgcgcggatcatggcagggctaccggggtcgtctgcgagtgaccgcgaccg

SEQ ID NO: 3171 - DNA, 1315 bp, Emericella nidulans
accggtaaaccggctcattaggagtatcagctggtagttccacgacaaagctctgtcgattctcgcgcccatactgcaagtttgttccctgggatgatacggacccccgctgtggatatcccgtcggcgacgaaggcgcctgatacaacgatgaccttggcgacatctcaccaggacccggatacaggggagtcgaagatgtcggttgcatcatggccgtcgagctgctccggtcagccggattccacgtcctcagcttcccatcttccgtcgtgccagcctgcaggaccccggcatcaagaacgtccgctttcttcacgaatcgatcaacgagcgctttcagagcggctctctgctgccccttcaccagaggcatgagcgtgatattgcattccatctcggtgtccacacacaggtaaaggcccttcccggcctcgcccggtgctggcgggctctcttctgcacctgacttgagcaccgactcgtccatgctgtctacgatgcgataccgatgccgagatcgatccccaatggcgcatatacatgcgtcactaatccccagggctcatcgtggaaacatcccttgaaactgatctttcccgagcccagcttgcccatccccgggacgtactgcacccgttcggtgatctcgtaccaggtgagatagtactcctcagctggagcatttcggggcgctttgacgggttgatgcgagaggacgagagggctgagggtgatgatctcactgtggctgtgcaggatgtcgatcgctagttgacgggggacagacggaggtataggggttatgctagtgtatgcttcttttttgcgaacgttttgactggcttaggattaagagaggatatacactaacaggaggaatgcacccttgcgtgatgcagaagtgaagtggagtgtgcagaatgcagagtgttagggaaatggcccctcgtgttcagctcgttaggcgtactgagaatcctgaggttccacggaataacaacttgctaactggattaggcttagagctggcttattattggtgatatgaacttatccaagtctgcaattatccggaaaaggttggtctggttttatgatgtcgcgggtagtaccattgacatatatggacatcaccatttataaatgcatctatgtattatctaccaaaggctttcggtgaatattcgatatatggtctcgcgttcaaaggcccaggcttttacaaggtcacactatacatgggaatggaactgagtccgggtttggtgaatgttttccagggaataattacttattatatctacagaaagtg

SEQ ID NO: 3172 - DNA, 1066 bp, Emericella nidulans
ggacttggaacgtacacccccgttcacccttcctgatgtctgaatggtcgggcttgccctaattagctccatcaacccggacacccagaccctcgaccttgtcacccccatcccttccacccgcctaatccaaagcctcgaacgagggcacgccctcgtcctcgtccgcggggtactcgataacccgaactgggcggttgccgaggagtactacgcggctagggcggaggaacgaagggttagaagggggatccgggggaggaaagaggccggggtgggtgagcaaggcgatgagagtgtggagcaaaggttgctggggttgttgaaggagagaattcggcgggcgaaggatgttccgttcatgaccgttgttgaggatcatggaaggaggaaacaggaggaggcggcgcagagggcgctgtggaagttgaggaagaaggccgggattgagagtgaggatgaggatgggtattgaccgtctcctgcacctctgcgggtaaatgtatagacagcggtctagctatttggagatagtgtcgcaaaactgattccgcacaaactacgtccacgaaacgtccacgaaacgtccacgaaacgtctacctaaactatggattctagctacaccgctcagcgcctacctcgccgggttcatcgtatacctgattgattctttctggtggactctaccctcaccagcgaaagtcgcaccccaaaaagcaatacgataatcaaacaataaacaaaggttccctgcccagtcttgaggcccaacgcccaatatcagtatgatcggcgcagcaaacattcatcatctccgcagcttccagccacaattctcctggctcattttgcccagctgtgatcattgctagcggtggtatcgtccagtcacgaactgaatcttgacggccgcttgccgcatgggcatgaacccttgaaagcacataaggcatctccctgagtccagggctatcgtccgtaagactgagctgacgctgatgctggcgataatgctgcgtagtctgcttttcgcatggacctgccactctgcgcgtacggcgggc

SEQ ID NO: 3173 - DNA, 1424 bp, Emericella nidulans
tctgaattaggcataagcagtcgaatccctctttcgaattgtcgaagattctcatatgccctaacgttttcaggttttcgcgcaacgtcagcctcgaaatcacttctgtcaaatagcgttgacttgcactctttgcagagcctgatgtcgatgttcagggaaccaacgttgactgatttttctaaataggctttcgacactaaatgaagttagcataatattgcttgaatgctggcagcacgtacatggtgttacgcttagcggaacttcaacagaacatcccgtcaagacatcaccgcaaacgactcgcccgcaagtgcggcagtgatgccttcgaaaggtataactagagaaatcctgttggcagaatggacaccttgtcacgctagtatcatcctgccagctaacaaccgtctgctcgagagccttgcgctcatcatgctggaatggaataggccagagcttattcgactgaagctgctctggtgaaaggctagctaatagctgcgtgagcctcgtcagacgcttctctaaccgagatacttccagcaaagacttgtccacaataggcttccttatggctttgaactcgtccatgcgatctctgaccagacctactgcgtattagaatccgccatccaaccaagctggaggtacctaccgttatgatcattataccctcccgcgatttatagcaagtctcgcagactctataccacaaacccgcactggctcatgttgcgcagatctagaaagcttcatttgatacatcgtatgctcctcgcaaaatagctttccgcatttccggcagttcacacagccatttgtagcgttaagccgctgcccacacgacggctcgagacaagtatcgtagaatccacgaggttgccaatgctccttcgttatgatctcctccgggtcgggtggcctgggttgcgcttcatgcaggaagctctgagattggtgattctgcgaaagaccggatggccgacttgcgcctgtcagagcttggtggttctcattcgattcgaatacgtccagccccttgagcttctggttcaacacagccaacggctgaaagcgcttcgccttctccatctgcgtcttgaaccaatccttaacttcatcttgtcggtcgtcctctaggttatgatgaacgtcgtcgaggtgtctgcagaagggaagtttgttagtcgaagcacgaaaaccaggttgcaggggtatgcaggctccgtcaatacctgtttagctgcagcaatgtgacctgaaattcattagcaactcagtcatctctcacacacaagaagccgtattcggcgagcacaaacttaccatctcttcgctgcaaatcgggcaaaatagctgagccccggtcgcagccggagccgcaggtaacggggcgctcgcattatccagtaaatggg

SEQ ID NO: 3174 - DNA, 3745 bp, Emericella nidulans
actggctgcttcctcttggcagcgccctcacgtcatcgttctcgacgaaccctccaattacctcgaccgtgactcccttggcgccctttccaaggctctgaaggccttcgagggtggtgtcattatcatcactcactctgccgagttcactcagaaccttaccgaggaagtctgggctgtcttggacggaaagatgactccttccggtcacaactgggttactggtcagggaagcggtcctcgtttggaggagaaggagggtcctgatgagattgtcgatgctatgggtaacaagatcaaggttgagaagaaggtcaagttgagctctggtgacaagcgaaaacagaggaaggagcgtctggcgaggaagaagcgtggcgaggatgttgatgatgatgaggacttttgaacaataaaacgccagggataaaagtgtgtcatggcttaatcttgcttgtttagctgttatagaggttacgatcctatgaatttcatatctcttcagttcatttcagttcatttcaaataatcttttcacatatatcacactagtattcccaaaaaggatttaggtttgagataataaaacaaaatatatcgatgaccaagctacgtgggacatgaagcttatggacatatacatatttggcgtagtcgaggtcctgggtcctcagatccaagttaacttagtacagcaattccagggctctacacactagtaccggtcctgtacattccaagcgttttcctctgtgagcctattactccgctttgtaggtcagaaatattccacatgagcgtgtcggtgcgtagactttgcatgtaatatatccagaatcaataagaatattaggagaaagcctagcctctaacaagtactaaataaatcttgtgcgttgacgatgactggctatcccttgctgaattatggctacctactcgagcgtcaaagagtagggcgaactcaagtcggggggttccatcatggttagcatgcacagcttcgctttcaacaagcattttcattttttgatgttcttctcgagcagcaatgtgaagcgggtggtctgcatcagggttcgccacctcgcccaggagatccctgacgttctcattatggccatagtgagaatcttccgccaacgatagccttttgtcagtgcaatcgtcattcttgagcagaaactgaaccattcgaacggccgaagctagcaggtcgttttctcaagattagccccaggtttcagtaaaaggtcaacgttctcgacaacactggatttggccgctgctggcaattgataaccttgtgaacatcgactccattccgcagtaagacccgatgatatcaggggagcaaaccagccaaacgagccacgagggcgctattgttgttctctgaccgacaaagagcattaaagtcaccttaaacagtgtatatcgttgccacggcctgaagatcgttcaagaacaagcttgttggagtgtgtcctcatacctgtagccactgtaatagccagctgcagagtgcttcagaataacattgacaataatatcatggcctccgtgggcactgtccgcaaaataaagtcgcgaaagcctttgaccattcctatcttcagctccttttcgagaaataatagaatgacgacaaattgaccttccacggctgcagctgaacctgaccttcctcaacctccgctttaggatcagctctatgatctgtgaggcagacgatattcaagtgttctccgtaagatgcagatatcaggcggaattgaggcccgtaactccgtccctaagcaaggtctgtatcatagcaaggaggtcatcaagcaagcagcccagaccacggtctctgtatggctgggctaatgggacagcgctggcctctgatgatatactcgatgagcctttccctctgtaccagaatgttgatcattccatgccccgggctccatcagcagctgcacattatttacaaggcttttgagggcggcaacgagcaaaggcgtgctctacagctggctcatggcattcgcgtccacctcttgtttaggaacaccctagacgtttcgtactcgcaaaactatgagcttcacaaggtagagccattgtttcttgacgattcgcaggatttatggtaggattcagacattgtcagtccaatcctggtgaggcgaatgttcggaaacaattggtcctgatcgacccagaccattacgcgtcatccatatccaaaatcagatatttgatacacccttgactcaagctcaagtggttattgcttcggtcaatctggagcagacctgggacctgccaggacctttctcaccaaaaaccccccactatctggcgaggaaagtgtatggactattccgatgacaaccagtgatcatatatattctggttcttgtctataccaactgcatctcccagagaagcgacagatctagttattagtcattaaatagagctaactaagtggtaggcaaatcttattaccaggttccaaggatcaaaggacggtgatctggaagaggatccgtcgacagtgtcaggagttttgtacccatttggataacaacgatacgcaacgcactgcgaaaacgagcccggctgccgttccaaagcgaagagggcgatctcgtgctgagccgttcttcctagaacaagacatcaaggggcatgacgtatcttggcgtccgccctatgctagggctaaagtatccaatgatcacagcgttacggagttttctgagtgctcttcgaaatgacgcaaggtgttttaagtgtccaacgccacctagcctggggcaggcctaaggcccgctgcgccccataaaccaacaagtgtctctcgtgcctcttgccctacaagaacaaagccatgacctcctaattgtcatggccgaaacgttcgaggagcagaaatccacctgcacattcatatctacaagatgatgagccgatgaggtggataattctctctcttgagcctgctgcggccgttaatcgttgattgggttggagtgtcctcaggtatgcctgattcgctacgagatgggatctcaggaggaatgaggctgttgggactagtgctctagacttaaatgcatgaaggctctactcatgctaatggctacagtgttgataggccttacttcagtagcatactgagctgtcgtagggtactcaactaccgctataactgaaggacttaagggacggaacggacaggatctaaccaacacccccaaaaaagataaaaagaagaaaagaaagaaaagaatgagaggggccaaggtccctttcccaacttccccactatattcgatcatttgttacagtagtactatgtaggctgactagagtggcagtggcatgttactcatgcgaactatggtatatgggccatgtggctgactcggccgtagactgttcccttttaactcaattaagtcttaagtcttagacagctgcaatcgtccgtgacgtagacacgattagccccaagcgttaccactaactcttggtgtaagaggtcgaagatgtcggtagccatgataaagtctgagagaacagcagttgaatggatcataaatttaccctggtctagatatgtccgaccggtagccgttgaaagcatggtatgtatacaaatcaaatcaaatcaaatcaagctcattaacgatgtcatcacaactcccagtgattcctgaccccgcaaagttaagcattcttaacc

SEQ ID NO: 3175 - DNA, 1038 bp, Emericella nidulans
gcgaaagcttcttgccagctctgcgctcgccgctccccatggccatgctcacactaccttgcacaagctcgagcccgtcaagcgcgcgtccaacacgacgacctcctccaagcgcggcgccgcttacaacgatgcctccctcgtcgaggccctcgcttcctccggcaccatctcctgggcctacgattggaacatgtacaccatgggcgatctccccagcaatgtcgagttcgtgccgatgctctggggtacaaagatgttcaccggctggttcgccgcgatccagacgctcttgaactctggaaacaactacatccttggtttcaacgagccggacatggcgtctcaggccgcgatgtcctcgtccgatgctgccaaatactataagaactatatcagcaccttcgccggcaagtcaaagctcgtctcgcccgcggtcaccaacggcgagggagacgacgtcggtctcaactggatgcgcaacttcctgaactcctgtacagactgcgacgtcgatgctcttgctgtccactggtacggtgactcggcagacgacttcaaggccttcgttgaaaaggccaccgcgctggctgacgagttcggtctcagcgaaacctgggttacggagtttgcgctcaactcggatttgtccggctccgcggatgccagcacttcggcggacttcttgagcgaggtgctgccttggttggatgaacatgacaaggtcagccgctatgcgtacttcatgtgctcggatggccatctgctcagtggaaacagcttgagcgtgagtggaaaggcgtatgtttcttgattggggcatctgatctaaccagatcgtcttgtgcgccgtttctttggatatacctttctctccgatctatacccttttttgtttgatttgatcctatttttgtatctaccttgctgcttttgttcttcttcctggtatttccatccatcctaacacccgggccgtcgatactgcctacctctttaaaaacgcaaaggcagaagatatgtttagaaaagttgaat

SEQ ID NO: 3176 - DNA, 619 bp, Emericella nidulans
actaacagccccgggccatcgctatgagagaggccatccattgttacaatgtctctttcagaactaatcgatatagatatgccgtctcgtactttcttcctattgtcctcatgcagggccttgaatttaatgttgcagaggcccagactcttactgctcctgtatgcgtccttccctccatgatcacggttacgtactgactctctgaaatagtgctttctatttggcacactcctcggtctaacagagtcttggctatccgataaatataagacgcgagggatagtagtagtcatcaacgccgctctccagataatgggggttgcgctcttggggtatgcgaaaaacaacggggtgcgatattttggggcttttatactggccggatcctgcaacgccaatatcccggcatcactaacttaccagtcgaataatatcacaggtcagtggcgaagagcgtttgggtcggccttgattgtcgctgccggcggcgttggcggcgttattgggggcttagtgtttcgtgaccgagacgcgcctgattatcggtacggttttaccttaaattctctttcttgggaaaggttgttgatgtgcctacagacccggcttatggacg

SEQ ID NO: 3177 - DNA, 2686 bp, Emericella nidulans
  unsure (1)..(2686): unsure at all n locations
tcaactcttaaccagactatagtccatgagcggcatcttaaatgctgtgcttgacggcagctgggcctggcaaggcctatctttaatgcccccagacggtgcagatcgccggaacggccggaggtcgccgagctgctatgagtctggtcgagttggtattgagtccagagggacctagccgttgtctagccctcaagactgagagagggaggggggatcatcccaactactggctgggaacagacgtcagctgctctcgtagtacaggaaatggcagaaatgacgaaactgatcagaccaccgctgagccactgcgccatagataggttggggatgatgtttacacgtgcccgtcacaccaaaggtggctaaactcactgctctaaagcatttagggcttactgaacagctccatctactatagctgagtaagtggcacgctgtttgtcgccaccagttcttgtttgctgcatgtgtcactggcatatttacaggcaagcagtctatgctggaatatgaagattggtatattgctaaatcattgaactaattcattgaacttcctataaaaaagacctgctgacagtttgctgggttgagtgtctacacagtgatgcaatagtttatttacacacattttctttttttctacatttttatataggttatttccactgggaagccggcaagagcaggtctcggtctggagctgatttagatacagcattaccgtcccattctcgtacatattggctgttacgagaagggactgggttgtcgagagtggtcgactccatgctgatgagagaactgctagaaagagctgcctgggccgcttcttaaggaacggtccccgtcctaatgaatatacagcacgtaacgcttcttaccggcttcttataccctccccccagggtcgccgccgttgccgccgccagcagcctgtggcaacagcggcctctggcatagggggcagttgtcgttctcgtacaggtaccagaactcaagacacccggcgtggaacacatggcggcacgggatcgagtgcaccaggtcgtcaggacggacggtatctagacaaatgcagctgcagccagtacgtcagtagcaaggcagagcaagaggaagactcttttttttaacccaccaggaaggcgagacaggttgactcgaggcaatcagggcgactacctcggtcggtgccgctagcgagttagtgcgcagcgcagtctacggggcgtcccggtctcgtcaagagagcctgagccgcaaaggctcgttttcatggacgcacgcctccatcgctgctgggctgcatcggcaggctagtcccagcgagcggcgggtgatgcggtatgaatgtaggaccctgagcgcggttttaatcagtttggttcacgcttgacaagacgagggctgagggactagaggctcaccaggccatcatcactgtaatgtagacacaaaagacgcagatatagaaaaggagctgtgggacaacagtcgctattgcctttggcttggtgcgcgtgctgtggtcggaggtgtccattgccatttccggaaccaacaggatacggaggcaaggccggcaaaggcaagtatacaatatttggaaaagagataggattctctgtttatgggctgaggaaggacgacgcatgaagtccgcttaactgtctcgaggacgatcagcccacttgtatagttccgtggatggcgcgcggtcaaccatggcgttgtggagagcttgttggcctattagacgcatagtacgggtccagaagatgctgctagaatcttaactatttagtactgtattatgggagtcgaacagctcagagttggtggggaaataatagtgcagaaatagatacaatgacaaccctaaaccctcatccaggccagtctgtatattaaagctcaagatcattttcccatcacccactcctctcactccttctccttcttcgtctcctatcctatctctgctcttcttcctgggcataccccatctcgcgcagtttctgagcggccgtgtaccgcgtcgaatcacttagacgtcggttgtgcgtcacgctgtgaaacccaagtcagacgcacgccagtaagagtaaagaatactgatcgcatcgagtccagagtacactcacgctttcagtcccgccgcgactctggttgggctcttgggcttctccccgtacaactcctcccgggcctcttggtcgtccatctccagaagcatgcgccgggcatgctctttcccttcttccgagacgagcgggttatggagcgccctaataatgcgatcttctggttagcctgattcaaggacgtgtagatgcaccggggttgcaccggggtcgtcgtgcatacgccttgtatccgcgcgccgcattaatgcgctcctggggcggcatcggctggtctgccgatgcatgtcgtgtctcgtagcgtctatgctggcggtggtaaggcacgtgctgtccggcttcttcctgcatctctcttcgtgcttcgtcttcgttcaggtcctggagtgactgccgcgcgtgttctttggccgtctcggagacgtgcgggttgtgcagtgctctgcggaaggtcagcttgtcagaatccatccgttttcgtccttaggaccttgcgccggaggggcctattantagtcgtattatcgncccga

SEQ ID NO: 3178 - DNA, 949 bp, Emericella nidulans
actgtatcaagaggccaaaatagtgcatgtggattgctatgaatcgtctatggtgtgccctaccaatgaaaacatggccatagcatgattatggtaagaatatattcgtataagcataattatctgtttcaaacacacaggtaaggggtgattatctaaggaatatatttctgagccaaccgctcctctacatgcgcctctcatgctgttatcatggtaggaagctgccgtgtaattgattgaagacgacgccgccgttcaaatcaaaaagtccatcacaaaaggaaagtcagggaaatcatgagcaagcagattggtgtatgtggatgtacaaaataaacaatgtacgtaggcttgggaaaataggaagatgaatatatgacagatagaagtgagtttccaagccctatggacccatatacaggaaaaatgattaatttggtgaccagcacccagagggtatcaacatatgaacggcacatgcacctacacatgcccccaagccccaataccaggcggtgcaggtgcaatggcactcccactatccacactccccccaatgtcccaataattgcggctcgaaccggtcaaggtccgacggctggagatagcagacatctttgcgctctggctggcgcagctagagctaggacggcgaaggtgttggcgaagcacaggcgacgaaacgccagtcaaacctgaatactgtgattgccgacgcgtctgcgtctgtgacctcgaatgggctcgcgcaacaagcgggtgatgctgaccgatgatggcagcgcggcgggacgcgtcttgcgggagtcgacgggtgctgtggacgtcgtggattgcttgaccggcgaccaaggcggttacggagctagcggaagaccatcatgatggcgagcaacgttcccagtattctttctcgtgctggcagcgagcgggctcagggaatggt

SEQ ID NO: 3179 - DNA, 3413 bp, Emericella nidulans
  unsure (1)..(3413): unsure at all n locations
caacacattgcatccttatagggttcctgacgactttcacgatgctggcccgtgaccgactttcgtccaagaatttgttctggattttagtctatgtgttctttgggtatgcggtgagaactctctgtctttgaccgctttgctaattagccacgcgaggcagatcgaactacctgggttttgtgcgtcaactccgtcttcgaacagagcggccgagatgcatttactgacgtggctgaattgattggctcacaggacatttgctatgatgtgagtactaaaccaacctgcgcttagaatctgtcgacttttgggacaagtcttttaccaaaatggttggctctcgtgtcaagataactgacgcgctaaatccttagatctccccagtcttcggatgcgggttgatgtaagtcttcccaactgtatttgctgcgccacaggacgcctccaacgaacccctcgcatgcatttctgtcatatttttggtttcccacgcggtcactcgaatcttgctattcttttcaggcgctaaagccaacatggcggtgcactttgagtgttccgactgtcccaccagaattgtcgcggacgcgggccgcaaggccccacaccccttgatcgccggctgacacggtcatgttctaggctcgtttttgtctcggtaacaagtttgttattgatctcctcactagtcagtctcatgagcatgagcatggagggtgtaagtctcccttgctgaaccgggcttcttcgcggcgctgatcgacttccttgtaggttatgtcgcatgcccgagaagaatatctcttccagttagtgataaaaattgcgttggatttttatcacagcgactaattcaataggctggccatctatgttctagaaagtagcacttccaagagactaacatacttcatgcctccgttggtgagttcatatcatcgtgactgaggagtgaaccgctaatagatggcacctaattctacagaacctcattccactcctttgcattcgcccaatgagacttttcctacctgcagcggaaatccggcgagtgcgcatcattcttcttagagcgactcacctaccgtgcgttgcactgctttgngcttatgagtccagtccccgttttttgccaggagaaacagccttgttcagcaagattgacgcttaaagattgaaccgtcctacctccacgaaacgggccgcttccggccggtatagccatcacgttatggctttgacttctgggctagacgttcattcccgcgcttctctcagaacaagaaggcactcacaacatgagcagcgacccggcaaggaagaagaagtagcagacatgcttgacgagatggaaaggcttcgtgctcagatggggcgagttgccgctgctttaggcgtccatcatcgtcgccggcagtaatcctaaagactactcacactgagccgtcaatgagagtaccacatacgaaatccagatacggtaggagttgttcctacgctgctgctatgtaccgttcccgacaaagcaatctacttccggggtgattcgatgaacggcgaagtgggatcaaaaagcgacatcctcgtcgagccctagttccccaacgtcgtcaagacacagacaaggaacgtttaaagccagttggtgattggctgaggcaggatgccttgtgatgcattctgcattgtgttgagactagaccaataacagcagcgaagcaaccaactgaagaaataagaagaataatcgacaataaacctttgcttgggctagcggtaaccataagacaaataagattgtatgacgatcaggtgtcgccctggcgcttcgtatctggatccctcttcccttcttccccctgacctggacttcctgcctcggctttctcgcaacctcaccaacaacaaccaccatcgtcacctcatcgggacccgacttgactgatcaataatgccttgccctccgccaacttgctttttgcttagctccagtctcctctttcgacggtgcggctgtgtttaccaatcataccagcgacgcgcactgcacttttgccaagctaggttaccagactgtcgggacctcactatgccctttttaacgaaaagaaagaaacaaatctctgcgctgttccgccgaagagcgacgatcggaaatgccaggcgccttggagcaatcttcctgcggccactgttgctgtccggccttccgtagcatgattcgagactcgaaacttgcgactccccctccgtgaacctgactgggtctctttcacctcgccctgaccaagatccctgaatgatcctcgtcccctcgccagaccaggtggaagcgcccatctctctcgtctcttccccctccatcaagggtgtgagccctgtcggtccgaacaaaaccatttggcgagagtgaccgcttctccagtcattccatcagtctatgcagccctcttgccggatccagcacgcatggatggctttttggaccggatcacattatttcggcgctaatttcctgtgcacgcttctcgagcatgccgcgcctatctccgtccggattgcagaattgattgcagcaagccccggccctgcgtagcaaccaggtacctcctcccacacaccacacccccttcaccttctcttcagtcatggcagcccacttctcttccctgcttcttctgctacactcatgcaagaccatttcgtccgattctgccttgccaggcaaggtgttgagttgccgcctaggtttcttctttacttcaaggagactttcatttaattgtcactggtttgtacctggctgatcgtctgagccgctgtcaaagagtccgttgcgaactattcttatatcagaacatttcctctaaagtccttgcggtgctctacactattactctatttctgcacgcctcttgtcctcgcaaaccaatcgactattgaaacattatcttgcgaatcgaaaagtctggctgcaggcaacactctcgccgcagggtgctatctgatccttattattattctaccccatcagtttcccccaatacgccctacatttcttatcgtcatgcattattctgcttgttcggacgatgtcgagcagcgaacgtatccagcctacccgtacccctcacaaattgcgccgaactctccatttcacgcagcaaattctggcttgggaatttcatattgcgaaacagggccttccaacaactacgaccgaccgcagtcgtcggccgaactttaccctgctgattggactggccagttgatgcctacgacagtaccactcggctactccttcaacacaagcctaatgacgccagctacattatgcgagccctatatcggttctgacgtttccacgtcgccccttagttactgcggtccacaagcaatgagtgctacgt

SEQ ID NO: 3180 - DNA, 1098 bp, Emericella nidulans
  unsure (1)..(1098): unsure at all n locations
gtgcatttaaccgtctatggctcgacgcctactctcagagcaacgacaacaatccgcaaccacagtgaccaggaactgatcgttacccaagtgacatcgcttgtgctcggcgggctgaccactggctcagcagaatggtgggacgaatataccctgtcgattccaacaaactcctggttccgcgaagctcaatggattgaacatgatcttcctggccttgggttagacgactatggtgtttacgggcgtccggagaaccacttcgcctcgcttgcgcactatgcggtctcaaacagggggacgttctcaacggaaggccacttaccgatgggtctcttgaagcgccgcgataatggcgacacgtggttgtggcaggtggagaataacggttcctggcgatgggagatcggtgactggaaggatagcgtatatttggctgctggtggcccggtcgagacggatcatgactggagactgatcctccagccgggtgaggaatccacaacggtccctgtggcgctggtccatgtttacgatgattatgagaaggcgttttccgctttgacacgatatcgacggatcattagacgtaaacatgaggataactcgcgtctgcctattatctttaacgactacatgaactgccttatggtgaccccactgaagagaaaatccttgcactttgtcgaccccgtcataaaagcccgggctgagtactttggaaatgaatcgcgggtggtatgcccaccaaggcagggtggtgggaatatttttacaagttggaacccttaaataaacttttttcaaatcggttttttcttttctttgtccgcttaaaagaaaaggttattttcaggggtttgtataaaccctaggggttggtctcccgatttggttttacccactttcttgaaatacttttctcacctagggtactaaatttaaaatgtccttttcggtgattccgtctttacctttttaataacatttanttgttatctaaggctaaacctacaatttttaattttttttcctatcatcggtgttaaatgtctgatcatttatatctantccatggtttatttctatctttttcca

SEQ ID NO: 3181 - DNA, 1395 bp, Emericella nidulans
ccgaaccaagtgaaggatgcgatggtaatcagacccattcccaaggccattttcagaccaagaaggccggtggcggagagagcgccattgcatgtggcacagacaaagtctaaaacacattagttatgcctcagagcgcaggggctgagaataacatacttggtaggtccgtgtaaggctgcggagtgtacattccaaagtagtaacggttctgcgagctcagctctccggcagaggcagtgtcatcaatgtccttgctctcgtcgtatacaatcatggtgtaagtcgcggtaagcaacggagccgtggcgtttgcttggaattttcccgtgtcccacgtcacagtttgggtctcctcgacgctcatattgctcgagatggtgtaggtagcactgttgagactgcatgatgcgacaacattgacagcagtgggtgtgatagatagcgacgtataattccagacaaacgtgataatatcaccgatcttgtagtatgtcgttgatgcggaactcggcgtcaacatggagataccacccggagggagacgagggtcgactgatgtggtggtagagttcgaagcgtgagtggtcgttgaattcgacgaggagctgccagtcttagtcgccttggcagttgtagtggcagattccgttgtgtcgctgtcgctgtcagaggatgatgtggacgtggccgtttcctccgcctggtcgtccgtgggggtcgcgccggtagtcgcactgtcggctgcggtcgtagtatccgagtttgagtccgagtctaagcgatgtcagcacattgtacgttgatacgccgacgcggtaataatgctcaccatcctgcctaggcaaaagttgaccgtgacccaacaacccgtcaaactgccatgcggttgagagcatcgctaacaagagcaggcacgcaatagggaaaagagcagtaaaccgcatgattaataaagcccgtcggccggattatctatctcgtcctgtcgagcaagcgggggtgtcaatccccttcgcttcagtatcttatcaacctcgggtgcccacagcaacggatgaccgacgtgactaggcacaacaggtcgatatcagtgagacggtgtaattcaatccaaaatcgaatgtggttataggtaggcgatcaggacagtggtcgaaagaggccgttgcgttggctgtgaaacggagaagtggtctaacaatcttcagggtcttaggggtcttccagagcgagtggagtggccggtgcaacgagcgtaaacaagcgagcgactgcgcaatttgtacgagcaggaacaaaactcggggttggagaagaagcaaagaagtccccaggaagcgatgagaagaagagggaagatacaaatgcgacagcgaaggtgagaggaaagga

SEQ ID NO: 3182 - DNA, 1099 bp, Emericella nidulans
aagctgacaatacacagaagggtggaaaatttttgttgtttaggggtgttatctgggcctgtagacggaagtcagtcgcgtgctctcaagagaaagcgaagcagagaaggcgcgaactgaagagctggagccatgaggaccagctcaagcaattgagcactagagcagaaaccaggcaaattgtgtcgacttacttcgcaggcttggacaggaatcgcagtaggtcctctgagttcatggaaggcagaaccgattcgggcttaaaagagcacgatggagcgagacgccacagttgtgaacatctgctagattgctccagacaagagaaataagagcagtggtcagaatctcaagtcagatcgaaagacgagagacgctggagagcattgagggaaaaagaaaagcaggcaaacgtggggtgcgcaggtcaaagcaagaagttgtcgccagcgctggggggttaagaaggctttctactttttgagggggggctgggctcggcttaacagtacaccagctccagttggcgctgaggggttaaaacgtgaatgacttgacaaagggctagcagacgcagagcgccagtaagcaattaaagagaagagaatccgccggagtaagtcgggatacatagaacagtatagctacagggaaggagatccagctagacttaggggataaagtgtcggtctggtctggagtttatatgccgatttgggtctcgtgtgagcgtaatttatttgacagataccataccgaagtataaatagatgagaaggcggtcgcctgccagggactatgacgtctccccggatcaacatcagccccctccgaccagcctactatacagatcaacctctcgagcccccagctgtcaatgtcactccacccggctctctccgctccttcaccggtgaagagtcttgacgccgctttatcgcttaaatattacatacatacaaactccccgtcgtcaggcttcacatcgatgcccgactgtccgacggggtattcccccttcacttaagcgcttttgtcaggttatgataatcggccaggtcatggcctggccaaaggacgcagtcagtatcagatgtgt

SEQ ID NO: 3183 - DNA, 1362 bp, Emericella nidulans
  unsure (1)..(1362): unsure at all n locations
tcagacagctcttcaacaaccacttcttcaacctccacatccacatcttcctcaacgacagccacctctaaccccaatgcaacgcccaccaccgacagcgcaactgacggtgaaagctctagcacagaaaatcacaacgatggtctctccactggtgccaaagccggtatcggcgtcggcgttacgcaggcgcgataatccttgccgcccttgccttcctcctctggcgacgcatcaaagccttaccaagcaccaatgctgttgggcccgaaggcccaatggaggatacagccaggttcaccagggatactttgctgatccaccaatggtcaaggctgcccctgtacctgcatctggtgtggttgctccgatgtccgaattggcaggagaccatgcgggagagatggatgcaggtgctgatgctcggcgaccgcctgttgagttggacggaagtgagctttattcacatcatgggcggtagttgtgcctgccaagcaagcaacaagttgcgtcaggataataatccacagcgacgatgatgcggctacgcgtgattcttggacgcttcctatgtgacacgcatcagataccattcctctattactactttaatcagaatctcagttgccgtaccggttgtggttgcatgtatgtactcgaactcatcagccgccactattaaataccaaattcttgcactgcaccctttcactttagcaccggctataactctactccctctcctattctcccacaaacaaactaggtctaattgaacgagacaaactgctaaccgacgacttcactcaacctaagactacctcacgcacacaggcagtgtgttgatgacccgactcgaaacgaagcaacaccganacaccccatggaccgtcgcacattctcaatataacggaaccagtagcaccttatgcataaccagaggtcgtccactgacatccacgtacacgtaccagcactgtccgtgccagcccaaccaatctgtcctatccacctcctatcccgtctatgacagcggtacaaatcactcgaacgatcttccggtctatccacatactgaccgacccactacttcgcatcgtccactcctataccaaccttactgctttttcaccggtcatactttccactattgatccaccgactgaccaccggaccaccagcggtctattgtcatcagccctcagctctaagtctacttatcgacatccgccaatcggctagatatcaagaacaagaatcaatcatccatccaattcccatctatatactgtttttatccactactttctgtctgttgcaccagctgacaaccacttacattactgatcaacatcacttccc

SEQ ID NO: 3184 - DNA, 479 bp, Emericella nidulans
tgcacatacaacaatagcgacctgtagcgatcggatctctgacgcgttcttcaaatagaatcagtttcagcgacgacatcgccaacggacacggctggtcagtactcgagcggcgacgaacaacggcagcagccggacgaccggcagcagggacgcaattcttgatcgtagtcgcctgccagggtcggcaaatagtacagttaccggctataaagcagggctccaatgggttcgactatgattgctcctcgtcttgatctccggtaaactaacaggcacggacatccggagaaatcagttctgttggtttgttttatgtgcgcgtgctctcagggcgtgctttcggctcgtgccctacaggcgttagaagattgaagatatctctttgatctatgacccacggcgatgcatccctggcacctatagcatgcttggcgtattaggctcaatcagagttcgaagccatgtcatttttgcgc

SEQ ID NO: 3185 - DNA, 577 bp, Emericella nidulans
gccccatcacacattcattttcaatattatgaagactgaagaggcccatcaggtacatactaggtgcttatcacgattatcctgacctttgtgatacatttccatcacccactacccgcctgatgaattcaaccaacgcggcccttccatcccccttcagcggcgcctcaatatgcatcgcccccttgacgttcactcgaacaatgtccagtccaaaatctcttcctctatgttcaagctggtccgccacccagggcgggatcacctcatcattttcggcggagaggaggaggatgggtggtactcgttcagaccagtgccggtttcctggagagcttccctggccctgattctgttgatggttaggctttttgtgctgagcgagttgttcgagattgagtgcgacatttcagtgtttccacgagaacggatgcaaattcccgatggggttgcccattctgcgggtagagggcgtaatggcatttttttattcctagagttggatgctctcgggacctagtccgcttatttttcctccttggcacccgtgtagggtggttcctgttttatttctctt

SEQ ID NO: 3186 - DNA, 471 bp, Emericella nidulans
actcatgcatcctgggacaggggcggacctacataggcgatcggttggctgagaaaaccacccatgtgagtgctactggaattacatacctacatggaaggacacggtcacctgcctcaacctaaaatgatctaatgtaccgactctgttgtcatgggccatcttggtaactcatagcacacgggtctttaggatggaaacttgagatgtgaagcatcctctgaatgtttacccaacatgctggcactggaaccgtaggaacctagacctcttactgtatacatctttaaggccaagacatggggttgaaattatccgagggcgccattatacccacagaccaagcctggcgtgccctcaatctatactcttgcaccacaggctagaaagatcatgccccactatacaacaacgattggctataaacgctggggggagcctcacaaagaaaacggtttgggctacagatcg

SEQ ID NO: 3187 - DNA, 1997 bp, Emericella nidulans
agaaaacaaaaccaacacaacacccgaaattagtatagtagaaggtttcccacccctatataagctgggtggaaagaacattgaggccgccctcaggtttcccaagaaactttcccgataagaaaagttaggaggggctccaaaaaaagcctgcagtgtatccttggcatggggcaccgcccccctttatgggaagacagtcaagaagccgctggcaaacccaacagacctgttgttgcacaaacaggtcctataaaaatggttgaaaagatgttggtccggcttcccaaatctccgtttgaataagctaccgcaacgaaagaggttcaacttgcagggttcgtcgcgagataaccacaaaatttggaaccaagcctacatcttcagttccacgtcgatacctgtcgagcgcacacgtttacgtccggctccgcgatggcgaatcatgggacaaacatcccgcaagagctcctggtagattgtggccaagctgaacaagcgcaaactccatcgagggtcagctgcaatcagacttccgacccagtttggccctattctaataggcggccagcaaccaagaaagataatattccggtcatctataccccttggtcgaatctaatgaaagatggctccatggcaacgggtcaggtatcgttccacacccccaagctggttaagaaggttttcgttgcacagcccacccccgccatcgtgaaccgtttgaataaaaccaaggttgcgaagtaccccgatctgcgagcggagaaggaggactacaagaaaatgcttcaaagagaggagagaaagatccgcgagagaaaaagaacagggagaagcaggagaagagggagcgggacagttgaaatggcaaaaggaccatgcatatgacgacttattttcggaggagaacatggaggccagcaacaaccaggatcgggatccgaatttccttgatgactttatgtgacggatgtccctaccactgcgatacaatataccccactttcgatactacaacttacctcacccgatctggcattttgagggcgcattgcaagcgacgtgagtgtatagtcaggccaatggtagttgtagaaaatataatgtaatccgcatagttcttagttccggctcggcatcatggcagcactagcatggctatttgactgtcgttaagcggagtcgggaatggccggcccgaagaaagccttggcgccccggagtgcgggcggagctttctgtgagaggccacccagtacgtcatgtgaagctgccatgttctccagcttacaggtctggaatccttaacgtttcactgcaacatcagccttccactgattaagaccatgaattgtccatcccgcaccgatgatacgctcccccactgcgactggaaccacagcccgccgtttctggcgcctgacttaacaacccggcatgacctaaatggcatctccaatgttcgcgagtttaaggatgctgccactgtggtcatcaccatgcagcactgtctgcacgacgcagacttactgtctcgttacaaacgcgaatctgaggtgttgcggcaaatgcacccgagggcgtccctgacccagtcaggtaggtttaaaacggattctgtgggttatcgacaatgcattaacacccgacaggacgcccgaaagatcgagttgagcatgctcgatcttcttttgatcaaataaagagctggtgctcatggctgctttcagtgctggccacagcgttttaatttccgccagtggttttgttgactggttgactgggaccgttgttccttttcgacagactactacggcttcggttggacatctagtactagataaggaaactatgcaggtgcgcaggtatgctaagcgacaggcctgcgcgtcaggtggtgtcgatggtagtgaatacaatacctcgctacacgtgggagctctgttcatcatcctcggggtgtcactctcgcctgtgctctgcctatattggtt

SEQ ID NO: 3188 - DNA, 2723 bp, Emericella nidulans
  unsure (1)..(2723): unsure at all n locations
ccaagggctgggaggtagggcatcaagggtaagcaacaactgttttaaaatttacaaccaaattagccagcattccgtgggcacgttaattaattaacttaccccaagggacttaatatagatcaatccagctattaatggaactttacctaggatcatccgcactaaccgtgctctaatgcagccccccgctcgctcagtcttagcacggcggctatttctcgtctcgatgttgtaacagcaacactggcaaatgcgccggcttgcgcggttttaccagggtctcatgcaccttggtgtccctagagaaattaacaaacaagctggtggaaatcaaaattagaaacgggcctgcctgcgatggatatatcatggcctctccacccaagcttggttgtcttgtggcaggtcgatcaaacagcttggctctattgtttggctctaggcagagcacagctcaagcctcagccttaaaagtctcagcattggcatccatcacaatatatactagtatcttgcttactccttggttccattataatgtctctccaccgcttncgcaacatagactnctctagacccgcgtacgacagaagggacgaccgtgctctatacaaaccctcatcatcacgcacacctaccctcgaagaagacatcatccctctcacaagctcgatatcaatatcgcgcaacaactcctccaagatgaaagctcttgaccctcgccgtctctcaatgcgtctgaaacgatcaagcatctcgccctcgccatctccagctccctacgaccaacacagcacatcaacgttccaccgaacacatccagattctctaccactacctcgccatacatcaccttcgcctagtacccgcaccgaatttatatacaagcccattcaccaaacggactacaccgccgtcgtagctgaaacagctaccgcccagagtcgatcggcgtcgaaatatcactataaccatcttccagctggtccagcgagcgggaaacacatggggcgtgggaatcgcgtggaggagagaacgatctcattgcagtcgcgatcgcggtctcgttccagagctcgacctcaggctcgcgcacgttatgcatcgtatgacgaggatgaaattaatgcaggcgacgatttatatgatgatatggatggggagtatacctccattgcccggccagggagagactactcaacggaactatatactttgactgcggacaagaggtgccatcgggcagcgaggcgcttaaccaccgtgatggttcctgatgcggaggatatttatggatgaattatgaatatatctaatcttaattctgatgtcttgttagcaatgattagcaaatgttgactgatttggtatatccgcactcctaccatatctccgcataccatttgacgtcagtctgacgcgcccaattcgagcccttaaccgatctacctccaaccctgcccagatgaactgaagcaaaatcttggtggaatggcggacggtctcggctcctgttgctggatcatgacgaaagatctctcgatttgggtgctgagtgtcctgtcatgtcatgcatgcggttacaggtacataaaaggcctatccaggtccacgtcgcagtggcattaaaccatcaatacataaatcctcattataaaacgatatcaacgcaaatatgactgacagtgtggttcagctcaaatgcggtgtcaaggtgtgttctacgctagctatcgcttaacttgcttatcggtttctgacgtgtttctacagcacgacccatggggaaagcaagggaaggagtctctcgccggccagctctgggccaagacggccgggacaacggggatgtctgacaacgagacgtactctgaggcgtgtatacactcaaagcaaattctggccgtgacatggctaacccgtcgctagatgtggatgggtacatatcccaccgtcccttcacgactgcttcggactggagaaacactggaaaactatcttaagcgcaagcccgagctcatcggccagtcagtgaaagaaaaattcgcagacaatattccgttcttacctaagatcctctccttcgcgaaagccctcccgcttcaagtccacccggacaagcgcgtagcggagagcctgaacctcaaagacccggaacagttcggcgacgcaaaccacaagcccgagatcgccgttgccctgtctgagttcgagctctttgcgggcttcaagccactaagcgacatcggggccctgatgaagctcaagccgctcgaacagttcgtcccggcgaatactgaacttgacgacgaactgcttcgccagatttgcaaaaagttcctgcagttgccgcccgagagcgtcaaggatattgtcacccagctctcaaaattgccaaagagtgagtttggcgcaaagcatgagtatgtgccggctctgctggagcgcgtgagccagcagtactcggagtcggataacggtgctctcgttgctgtactgctgatgaactacatggtactccagccgggcgaggccgtctgtgtcccagccgacagtatccacgcctacctgaagggtgatattctcgagtgcatggcgcggtcggacaacgtcctcgcgacgggtttctgcccgcaagctgacaggaacaacgtcgaccttttcgcgaaaatactctcgttcaaaccgcacagtatggagcaggcacagctagataggaa

SEQ ID NO: 3189 - DNA, 2756 bp, Emericella nidulans
tatgaggcattttgcttgagtttcgaccagacctaactaactttttttagcggaggatgccggccctattccgggtctagtggcctgatgtgtggtacattcacatagacaatctatggctgtttcctccaacggacttttgaccgcggccccaatgccagattggttgaacagacgaatgatcaaacaagaaaatctaagtctagacaaatcataggtatcatcaataagcagaaatgggccaaaaaatcgtcgagaatcaaaatgaaatctaatcacataacgaattcgctcatccaaagtaactccgtaggccttcaaatactgtaaaaatgaatgccgagcttggcgcagaccgcgcacaagtgataccacagcctcgatataggccgcgaagtccttgctgatgccagagagccctagcggcgcccccgaatgtctgtcgtttgctagatgtgttgttgatatcttctgtctgcaatctcgactttattgtgtcggctggataaaagaggaaattgtagctgacaccggctgctgctccggccaacatctgttgataaagagggagtgacccagattcgacctcagaggaaaaggttgtcgaaggtgaataatggtatgaacggaaaagtgctgacaccccttcgtaacccccaaaccacgcagcaccaccgcccgtctcacggataagcgtacccagttggccgcgccagaaccccaagacgccgtcctggcggaaaacagagactataatcttgaggggtcccactcgtgcgctggaaggctccgagggcacttgcatcttgcatttgatgagctcgatcggtgtcaaggcaagggaggtgatggatccggatgcagcaccgctgaacaccaaagcagttaacggtaacggctctgtcgaggaatagtacgaggcctgaagtagctcttgaaccacacggtaactgaagaacaagcagctgttctctacagcagtcccgccatcggagcgctgattccccgatagagaccccgaagaccctctgcctggaatgactgacggaaacaatctaacggcccattgtatcggagaggaaggtgatccggttgtgactgaagcctaaccttgaccgtgtcaaagggatattcaatgaccttgcctatcattcctgcagcctaaagatggcgttagcaaagcccgtacatcgtaggggacttccggtaacttactgatccaaaaacaatatctttgaaggcctctagaccttgattgggggctagttcaggcagctccattgagatatcattgtgtatcgtcaacgcactttcggtagccgccatagggatggatatgctgagcgcttaaagccaacggtcgtccgagtagaggaggaaaaagaaggaaggaaggaaggaaggaaggaaggaaggaagagtagttggtagattttatcgggaaagcatcgtagaaaggatgggtgcaaggtgtttaagagacagagtgtgaggggcggtgtaccgacgaggggtttggcgttgcccaatccacgcgtggtacctgaagagctcagaaactagaaagcatcgcttgcaagctcgagcagtagaaaggccgaaatgcgggatattttgagtggtgggggcgccttttggcttcggcaggtggttcgttgcaggtttgcgacaattcttttcagcagaagaccggacaatcctcgtggacgagtcatcctcggggcggctgggtgggcccggttcaccacttcccccgagatccgtttatctgatcgggctaagataactttttcgaaaaaaatcgagtctggccgtcagggtgaagcccaacttctccccttggcctctttctcagtaacacgtccttagtccccttctagctctctcagagttttaccatgtcgtccgcagctccagcaccctcaacccatgcggccaaatcaatacgcaagaatggtaggcgtccagccccccacttttctcgccaacttttcctttttcttcctggctaatcttccgccgtctcggacccgcaggtaaaaactggcatgacaacaagaagcccttcaggcccaacgggggtttaacctcgtacacaaaaagagcggctgcgcggaaagaacaggaggctattaaggagtatgaaaaggaattgagagaggaaagagaagcagagagacaggtaagaaactcgcgaaccgcatggctccattgcatatgacgccttccgcagagactgattcatgttccaggcgcacatccaaagaatcaaagaacgcagagccgcgaaggaagagaaggagcgatatgagaaaatggccgagaagatgcatcgcaaacgggtcgagcgactgaagaaaagagaaaaacgaaacaagctcctcaactcttgaacaatgttatcagtgtcagtgtgcatatccctacacatctgcttctgggtttgtcgctgagttcgaggagactcccttatttgtgcataggttcggcgtcttaggagttagggcttcaaggcctcggcgagcgaatgcgttgtttctcttgattgcttacttcggattctttgctcgacatctttttacattttgacatcggtcattaaccacatagtcgctcttgcatctgatggtcaattgctaagaattgtttttacgtcacactgtatcgcatttggctccttgatgatgttataatcaaggagaaaactacccttaaaagtcttaattccttggccctaagcctgccagcaggagtac

SEQ ID NO: 3190 - DNA, 1239 bp, Emericella nidulans
gagatgaaaattaatataaaaaagtatagaaataggtgatgaaaataaagaaaacataaagaaagtaaatagagaaaacataaatcagaaaaggaagaaaaacaaaagaaataaaatagttagatgagtgtgagtactaagtagaaagcaatagaagattatatgaaaaataaaagataaaaaataataaaaatagggaatatttaaaaaagaattaaaatatgaataaagaagtaagatatagagtggaaaggaaaaaactaaaaatagatatgggatatagaacatataaaatagagaaagaaaaattgcagaatactaaataataagaaaatgtataaggaaatagaaagtagttgtgaaagccataaaaatataacaatcagtagaacaacaaaaaaaaaagttaacaagaagaagaacaggaatcattacaagacaagaggatcaaatagaacgaatagaatgtagcttaaaaattttcgatgaggacaacttcatgattccatatccatatccaaatccatatcagccatgtcttcctcctttcgccttccatcttccttcttcctctcccacatccggtttttcttcttttgtcgaatacaggattgcaggatcatctggagttggctgctcctcgccctggaacccggcgagtcgccaattactgggtgtctgtgtccgctgaacctcagatttgcctagaatgttcccctccttgtccaaagcttccacggacacccagtccaggtatccatcggcaatgtacattgtctcaaagtcagtcttgaccgtgctaccaaccggcactggtaggccgtcttctgaagaccgtgcgtaaaactgccatgaagcaatgtccgtcgccccgttccagctgacatggaagatagtggtcaggtccgcgggttccgtgccgtacacagatgcaacaacatctggtggtgtatttgggcgtccggtaaaagggtatttgtaggatcggtacgatgagaggcgcgtggagacgaatttagcctccatcagaagcttgccgtccgggtcatgctcgctgtggtagccgcgctcactccagccgacgaaggtgttgccatttggcagagtctgcacattaccacgcagtcgagtgaggccaccgtcgggtctattgatgcgcttgataaccctcgcggtcatgggggaaacagtagtgcgagctgcacgtacagagcagactacccgtccacatccgcctcc

SEQ ID NO: 3191 - DNA, 1450 bp, Emericella nidulans
gtagagacgaacgaccattcgggctgggacaacagtaacgggtattcgtgtggctttattatagtactttagtttgtgttgtctatcgatgggcaatcccatgcggggttgaccgcccgccagttgccgtgccccacatgttcgggaacgttaaggttgtaagcgataataaggtaagcccttcacaagacgtataatgtttacatgtctttagcctatctagaattaaatacaactagagccacaggcgaaagaccggaagttgtggctcacacagtgacaacatgctaaacatgcgtcaggccatataagtctgaggacaaaatcgcaatagatcagatactaaccttccatgagatcctgatcccagaaggaaaagaaccagggttggaacggctgagagaccaaaatacatcctaaaatagacagacgggacatctcgcacctacagtcatagaagggaccagccgtcaagccagtctccgtcgtcgcaagacatggagcctttcgaacatttcatcacatgtgccgaagaagataagtcagtctcggatttcagttcttcatcgagtcatagctcatcatcatggtccatttccgaaggcttgaggagccctccaaccctcatgcgcgatcacgctcggcagccttggcatctttcaaagcctgttcccgttcttcggcgtacagttcagcattatccccagcaaactccttcaacgaaattaaaaagtcacgaaggtgtgtcttgaatttgttgaagtcgtcattgaaagcaaacaggcccacgacgaattgcttgatttggattctagcacgcaattagacatcggacaacttttataatgggaaacctgagaacttactcttgcagattcttgaaagccgtctgtaaaagatccgcaacgtacttctggaggaaatccttattggatgtcccgataggtgcttgttcaggggagtagatgggatcttggattttgcctgattcgatgaagtaaaacatccgcgacagcagcatagcctgggatttgaaacctttgagaaggttagtactgttgtatttttcctcttcgggcggcaccgatgagcgtacctgctttatgatcactgtctgtgagtacgaaaaatacatcctgcaagattgggatgtagaattgacggaagaagatgttcgacgtttgtacatctacctcagccatgttgttcataagttcgaggcacattgtgagaccggtattttcaacttcccgattatcgtgcttacttgcccacatgcaagaatcgatgacgaatttgaattgtgtggcgtctagtttaagcagtgccgggaaacaataaagattgatcgcttgaagcagcttgaagaattgaattcttgggtcagggaattcatgtaagtccttgttatcattttcaaagtgcattcgaatacactttccatgatagc

SEQ ID NO: 3192 - DNA, 1074 bp, Emericella nidulans
gctttcgccggtattcccaacaggaacttcagccgtttcgtttttgacgtgggccacccagaactcgtaactgctcggatcagattggtgaacactcatgatgcgtaagtcgaaccatcgtgcacccacgcgaagctggtcgtaaatgttgaggccctgggtttgtgtgttggcctcgctgcctatggagacgatcttaccgctgatggtgctcatgccagagtcgtgcgtgccgggcatgacaagatgttgcagcggcctgtccttgatcacacggtacatttgcttcatccagttaccgctgccatgagtgagtgacgccatgaatccatagctgtcactgcccgtgatgaccaaagtaaccggcacctccgctctaggatccaggtactcgcgttggcctagccccatatcactcagatctatgactgtacggcgccagtacatatgcggaacgtgagttgttgctcgaatctcgaatttcttgcttgtgcctacaatcgagtaataagcttcgccgccggtgtcaacggggtttgctgtcaacctagtcgagtagtgggcaatattttgtctggcgcggccaggtggaatatcgccccagtcaaacatatccatctggtatgagtgcgtgctgtccagcttgaaccgatgaggggttaaattaacaattgttatgtactgtcgtccgaaagtcacatcgtcgagcccgagtgcgccccaagtccgtgtattctcctgctggcatgctctataaactgtacgtcgcatcatctgcactgcatacaacaacggcctgctgtggcactgttatgccaaatcatttgcccctggttcagtccatatggcgcggaagtaaatgcagccagggccgagcagaggctgggcgctccggcgagcccagtcaaaatctgactaaatttcataattggtcactgctccaagaagcaggcagttaggacatactgcttcggaagatggaagagcgcattaagtggaaaaataacgagagatggaagacctatttaagcaatgcaccgcgatctcttgaggcggcctcccaaacaaacccac

SEQ ID NO: 3193 - DNA, 3674 bp, Emericella nidulans
  unsure (1)..(3674): unsure at all n locations
ccacgaaccggcgttcattcgcgtggttgagaaacaatattctcgagacccttacgaaggctccggctggtgggccagcatcaatgtggtgcttgccatatcgcatcgtctacgtgtaatgagcaacctcgtccctcaagaagaagacaaaaaagcttggctttatctaaaaaatgccatgggcgtgctaacagagcttacgatgcgaaatactgatcttttgagcgtccaagcgcttctaggcatggtaggtctcacattcttatatcggtttgcgatgcagatctaattctcctttgcagtcactattccttcaagggacgccaaatccacaaccctcgttcttcttagtcgctgctgctattagattatctcacagtattgggctccataagcgtgggtctggtttcggcctgaatcctgtagaagcagagcaacgcaagagagtcttctggattgcgtatatgctggacaaagagtatgctctcttactcccaaaagagattcatgcctaacttttagtatagcatttgtctccgatccggcagaccgcctgtccaggacgacgacgacatgaacgtcgagctgccgagtgaagatcctccagataatatcggtaacgtcccattgttcgacgggaaagggaagttcaacatgtttcgcaccttgtgcaagttctctattattgagagcaaggtgtacaagcgcctctactcggccacagcttccaaacaatctgatggcgccctcttgaataccatcggcgagctcgacagggagctcgaggagtggaaagatagcattcctatcgattttaggcctgaacatgaaataaaagcaacacatgggcctctcatattgcacatcgtcgtgttgcatttcgcttattacaactgtttgacaacaatacaccggatgtcagttcaccatgggtattggacaagccgcctttccaactatgctattcaaggtctgaatgcgcgaccattaaatccgcgagtgttcctatcggccgttttatgcgtgactgctgccagagcgtccatcaacctgatcaaatatatcccccaaggtgatttcgcctgtgtctggtaagtttcggtagcgtaagagcttgttgcgaaattgtggtataactggtaactaggttgatactttactacccggtctcggcattggtgacactgttcgcgaacatcctccaaaatccaacagatgcgcgggctcgctcagatgtcaaacttatgaacgtggttgtcaattttctctctacacttgtatctgatgagtcgaatgggagcatcaagcgcatgcttggtgtatgcggcgaattcgagagaattgcgcaggtcgttctcgacaaagccgagcgggagtctcaatcaaagaagaaacggaaagctggaccggaagagcctagggattcaccacaagcagcaagcacaacttcaacgaagaaaaatacagccaatacatcggctactatgcctttttcgcccccgccgcaatacggtgcagattcgcaggatagtagctctaatgctgcgaatggggcaacggctttcacatcgagtcagacaatgcctggaacaagtagcatctctgacatgtcgggaactatacctgccatgcccagggctagccaagatttcaccgaaatgcttggtcccaacgccctggatggattgaatttcaatagccagcctcctctaacgtctactggtgatgttcccattgcgcagccattccaacagccgtttgtcccacaagatctttggcagatgcctatgacaatcgaatgggattgggcagatatgtctacgaactttcccgtcttcgattcaggtccgagtcattagtatttacgatgaaacgaacaattccgattttgctgattgtcctcccccctcatcccaaaacggcaaccttattgatgctctattgcgattgtacgaagataggtgccaacggggtatgagctctgcaactctccacttatataatcttctgttattgatattttgctattggcgaggagtctggaaaggcgttttgtgaggttggagcatgcataagtgtacctgtacgaaggatttggtttctctggacactccacgctctgctgtcggggaagagtaggacatcgagtttagatggataccgcaggaatattctcctctattactgcatcattcattatcgacctcactggtagacccgataaatcgaagtgttgaggaggaaggccgtagccctagaacatgtgttaattcaattaagacacctagattacgttgtaaggtccaaatgacgctttcccaagattttaaggaacttagtggcgttcgatgactccgtaccctgaatcaaagacgaaccagggatgacggcatcgtaactagttaaaattgtttaactatcttatgtcacggcagactggatgactcagccggaacgagnaaaaaccaggtccgatccaacctcccgaagcgggcgacgacagacaagttcaccaactgaccttaacaattccaactgagtgacacgtattcacgcccgattcgcctcgtgagggcttccatggcttgctgtgctagattataaactctatatacccctttccgcttcctccgccccgcaccttcagcttctgggctcaccttcctcgaccatggccagctacttccgacggccaggcaatcttgctcaaatactcgaggagagccgcagagcacatctttcgcgccagaccacttcaaacgcgcatttcacaatcaagactatggtctttatacacagcacatcgtgtaaggacattcacttcgcaacgtgacgttgacccgaaacctgagaggagagtaccacctactgaaaacgatggcaaacaagacgacggcggcaactcgcagcctcctcaaaagcctgaggggcccaaggattcagaggaacccaataagccagaggaggacaagaagcctgagcagcctccctcgaagttaaccgcggaggaggaggagcaggtcaagcagttcttcgaacacatgacacaattttttccggcctcgcaaatcaacgacctgcgaatattcgtgagaatattacaaaagaatggcatgactccggagacacggcagtttatcgaaaagtatatcgtcacggggaaggagccgtcgatgatggagtacatgcggatttctacgcatgtacaatatacggtaaggaagaatgccagccaagaaaatgagcagaaggatggccagaaggaagaacagaagcagagtgggcagaatgggcagaagcaacagggcaagagccagccggattttccagatttaaaaccctgggatttcaaattcgaccctgatcgagcctgaaaagactgctttcgctatttcattttacgaagaattttcttggggacaatgcagggtatcaatgggaggggttggacaaattttgataagggtttggggagatgccttccaaaaaactaggttggtaaatgaccgatgggggttaacacctgatacttggtttacaatttatttttattgggcctggggttgggaaactcccccattggttgttcaattgggttcttttttggaaacaggggcccgcgttcctcccttagtgggtattttagcccgtcctaaagatattagaactctgtc

SEQ ID NO: 3194 - DNA, 1003 bp, Emericella nidulans
  unsure (1)..(1003): unsure at all n locations
gatgggttgagcgcaagaggccgcacgggtcacctagcagatcggtcaggtcagctccgcgatgcataatcggagattagagagcgcaaaacttactgcagaagagattaactcctcgcgaaccatgatgccttaatcgcaattggcttctacttagtgaaggaaaaaaagcacggattctgaaggagaaaggggatgaagatatggaaggcagttggagtaagtgctgctatctgtaccgaaaacatgaacctcgggacatctcgcctcccattactagcccggcgccgagcggagacttccccagaatctcgtgatgtccggtctcgtgactttttactggcagaatagagaccgcctgttgttcaccgcctaacttcacggcccataagtggcagatttggggggctcttgtttatatcgggcatctgcggttatttacctatcgccgacgttacctcttattcgtatcaccctctacctctcaacctccttttttttgggtttttttttttttcatgataattcccagggtactttgttgctttgtgtctggactcattttcctttagcaaataactggctcgtggtacgctgctgtcgcagcttcctaatccacgatgtcgcaagatacaggattgttcagcatcaaacgtccccgcgaggtaagcctggtgccgcctcttcctatgccacactgcttttggacaaggaactgatgttttctctgtacagacattggggagcgttcaaaatttctcatcactaccacagcccgtcgtcagccctaaagcgcaccagctcaattggataccaaaacccaccgttcacttcccaacacacgcgctccatgtcattattaaactcagttggtcgcccgcaacaaccaaacttcagcgatcgtctcggngggggtttgcggcggatcccgntcttcatctgtaggcgctctgtctcagcaatgtctttatggactagcgcntgacgcctagntttgcccagc

SEQ ID NO: 3195 - DNA, 1197 bp, Emericella nidulans
ggagacgcgatgacgaaggtgaaggtgaaaaggagaccacagtcaagcagcctcagttccggatatgggcgaacgaaagcgaaagcagcgatgttgaatccaccatcggcgctaatgaagacctagaccgctacgaggatgacttcgtgttagaagacgaagacgataaactcggagttcccagcgggctggaggacatgccaatcgagttttcgcgtcatgcttacaagcagctgaaggactacttccaagacgccgtcgaatggatggtgcataatcagctaaatcctgcgttccctcgattcgatccggttttcaaggtggctttcgacaagctcgaagctgaagtccggggacgtaccggctcacagctagtctcatctgtctggaacgcagacttccgccgggcactcttagcacgaccgcattttgaagtcaccacatacccaattgatctctgtcacccctgtgatgcatgcaatcgttccgggcaccctgcttttttcgacatggaactctatggcaaagcatacttcctggacaccttggagccggttgccggcgccgaaagcgacgaagagcagtcggacaatgaggacgatgagcaggagcgtgaccgcgatggctatatcttaccagacgaagatacgcgtttttacctgggaaggttcgtttcctttacttttcttgtagagagcgaatcattttgaccattctcagacattgtaagaagaacgcggtcctggcacatacattgacccactggcgctttcacctcaacgaatgggtggtcgagcacctccgtacaactggctacttttcagaagaaaaaatccttaaacgtagccagtacagccagaagaagaagaacaagcacgcagcaaaggctctgaataagatgatcgagtccggtgagattaagaagctttggcgtgactttcatatcaaccttagggctgcgagggaatcgacggtctgattcacgcttgggccgatatgtcctccctctaccttcttctgttcgtaccgcatatgagtttcttcagaagtgcatcttctggccatttacatgcatatcaggtttctttatggatggttctcgatacgatttcgcccgatgacaccttcatttgcctgttttctttctctttttcttttttttttttttgtgcttcttcttttcagggttatatatgg

SEQ ID NO: 3196 - DNA, 5935 bp, Emericella nidulans
  unsure (1)..(5935): unsure at all n locations
taatataaaaatagatataaatgtatgtaacaaatatattaaaaataaagacttggtaattcttaaatgagaaaataagatgaaaaatagaatctactaataaatgaagtggagtaatagaaataagataaacagaataaggaatgaaaattagcaaaaatttaaataaccaataaataaaagtaataccattggataaagagtacaagacataagataaaaattttcactccaaaattacccaaaaaaagaaacatggaatcatacctggggcaaattaatgggagaccaaatactatccatttatgatttctttcgatcagatgccgtgaggcaaatccgctccggcggcagcctcattcccgccataagcacactgttacttgccgcaggtttaccagcacccgcgtcaaaccccctcgtcgcacccggcagcgcaactcgattcctctctgctgcaacatccatgagaaactcctttggtagacccgtctggaactgatagtgtaatcgcgacgcgatgcttagtcgtaatgctggcaatgtcacagagttcacttcaggtggacccttattcccactgcttgtagtagtatccgctcccgtccccgcgtatccttctgttgtaagatgcaccgcatcttgtaacacgccggatgtgtagcggtatgcaaagtcaaggagctgcagctgcacacgctcttgggaggctgtgacgccttgggcggcaagcagcatgtggatgaagcggacgtagagtgggcgacgggacttgccgtttgttttcataaacgtttaaaagaatttgcgcgggttgggaagctggtgctgggtttgttgtaggcgcgctgatcggctgtgtcggatgttgtgagggggccgccggtgtgtttgtggttgaggcattgtcggttgatgagggttcagctgggggtgtgagcggttgcgtggaaggtgccgcctggcttggtgaggccattgtggtgtctatcgggctggcctgtcgtattctgaatccgtgtagtggtcgtgcagatcgtatggattcgaggagagaatgtagtgaggtcgtatgggcttagatacctgctcagcaagttcgtttcattgggctccaagaataggtcgcgcgtggggtttcaggcagccggtgaaagacaggaacggcgagaatatcgaagaggttgggattggcataaggcgaagatcaagacgacaggttcatggtagaagtagctggtctgagattctggcgatgcgcgctaggccaggataggaaggctagttgatatcaccacgtgactctcaagcaataatccttcaaggtgttccttctggcaaacttccnacattaatcaatccttctacttgggttttggatgctcatggaagctttggtactggtgcttcgaactgggataagtcctaattggctctctgtatagcgcttcacctgccgtcccaagttgttgtatacttctgcaatctgggctgttatcctgtggtcgacataatgcgttcaatatcaaaaggtccttggctttgcaggtgccacgtactgctttgttaaaattcctcgatacagctcaggatcttcatcgtcatttaaataaagcaaggagtttgactttgtgcttatttccagattcacggcctcatgaaacgacaggagagtagaatgttgatgctcactcagcgaccggagcaggctgaacattcttgtgcacggtgacaatactgtaggccctagtgcttgggaatcggctggctggtatttcgtctcatgggagtacatttctgcacatcacatcaaaccgaaagtctttgagacgacggggctgacaagctgcagccaatccctacggatggatcatgatccgaatatgccagtgttcttagcagattagttctgagataactggcttggcctggaaccgtcgttgattttagttatggaatgacttcatggctatcaagtcgtaactcgacacctttggcataacaaaactgcctgctcaccaggccggtgctgcaaccatcttggtaagtaaagtggtggctgcggcttatagccattaagaatcagtataagcatatcttttatatatgtactgtggaccatcgcgaaatgctctaataaacaaccccatcatccattttatcatcaaaataaacttcaacctgcttttccaacatcaccagatctccaactactgctttcatctccaaaatcacctgcatcaggccgcgctgttctagcttctcccgaagctggcgcctggaggtgacatcctcaagggacccaatataggaattgagagacatcaatgcacggcacaagtacctttgccgagagcgcttatcctgagatgattctgccgcggtggaggcccactcagcgagctgtaatcgaatagtgctaagccagacctcgggtggtgtggaggcagagaaggtaggcggatctgtgcttgtggacgttttgcgagggactttggttgagcccgtccgatttgagaatattcggccatccatgggttgggtagtcgtggtgcctgcgatgtctattgattcaggatggttgatgttggtgagcatggtggcatgaaacgcaatcgaaggtatgtttgcagccagggatctcaaattgaatactgtccctggaaaattcagccatactgagttatgctgtaagaataggaaccgttatgcctaccatgactgtttggtccccggggcgttggcttcggtggcagaacattctgcgcacttaggagctgccgacgtgatgatatcagattcgaatgtcctgactgtccatctgcataatttgcaagtcgtagaggctctgatgccccacttttgggatggccttcaggcctttttggacttctctttgactgtagcaaggcatctactagaatgtcgacggacgagaggcaccattggacctccgcatgcatctgttcaagcttgtttcgatatgacgcccactgaaccggaggaagtgatcgactcctggaatgcactgtattggactccttctgtttcgcttggtgttggttattatcagaaaacccttggagttcctttagcacgtaattgcagcggaggatcaagacaccaggtctcttgaacacattgctagtcgatgagtcagggtcattgctggttaggccaagaatgctaatatactttgcaagatggcaaagtgagcagtgaagtgagaagagctcgtcggatagttcgctcacaagagaggacggcccctccacgccccgaaatgagctgtagagtgcatatgcgagctgggccaacctggtaacatggcttgcgtcacagactgagcgcgggccactctgctgagccgtctgaaaatgtgtcgttagatgaataggcttgggttcatacgattccaggctcctttccaccgtgggtgcctccacaagctcggctgcagggatcacggacaaaaggtcttttacatatgcagcggcggccgcagcagcatacggctgccagctcttgttcttatgggtatcacagtagtcacagatgccccgaacgataaggcatgggaagccgttcatcaagcctgcagcttccatctcaaagcacagcacacccccgagctctttactcagccggtctcgagtaatgccgtttctgatgacctggttccccgatgcgacagttccataatggatttcaactgcttggttctctcttggctttcgaacgaccaggtggtcttcactgcatgcgtcgcaggtcggccctcccacgtgggtatatgttgacgtgaacagtttgtcgtatccagcattgacacgctgaaagcggggtaagctgtcaaacaccgataaatgctccatgaccttgctacggtgtctcagatggtttgcgcgcaacttgctcagggcgttgagcaggatcggaggcgggcaattcaggaagccctttcgtatgaaccccgatgctgtcgcggttccagcatcatactggacgacaccaccatgctctccagacggctggctgacaaccacatcgccgagtcgtaggtcggtagtgcctggaacgcctccgccaacgcccaccatcaggccgaatcgaagactgggaaactttgcctgcattcggatggccacagtggccgcagatgctgtgccgtatctgccgatcagaagacaggcaatgacaacattgtgatacccgattcggccaagggtataaatgttgtcgtcgttagggtcgtagggaggtcgtatgctcctggtccagcatttttgcagcggcggctagttcgacggggatggcgctgacccagcccaccgtgtagtcctgtgctcgaaacatatcgtctgtctgatttgaacgacgctggcgagaaggctcaaaaactatcagtaaaggttgacagagttgggcggctattattaccttgtacgaagctgacttcgtataattctgggattctctgcggggatcgaacgcaaggctgaagctgaagactaagataatatccagctcagatcctgttattatttttcttgcgcatatctgcccacgccaactcacaccttgtcggaaaaatggtccatatcactgtcaaaggcttagaggtggaaaaagacacggctggttcgagcagcacgagctttgatctgccggctgagaccacgctcgccgaccttgttcgtcagatacgtgagcgaggatatacggcccccgaggagctcgctcgagaaagagacgacgggcgtcgtggccgtagttataagccgtatgccaagtacttgctcaaccatcctactgagtccctagtagtttcgggggactgtccgtcaaattacgatgaacgacgcatcaatgtacacgatacctttctccattttctcagccttcagtccccgagcaaggctctctcggcaaggctggaaggtgaccagaagattctggttgacgatcgactcgaactgatctttcatcgcaccctacgcatgcccgacgatgacaagatccatcccctcccggattcacgcggtcaatttcctctttttaacgttgaggcttttgcctctcaactgccagaacggatcacgaagcgcggtggcatcttctttcctatgtggcagcgagaggctctctggattcagttcagtcacagcgggggcaatactcattatgccattcgggtcaacatcggccacatcaacgttgtcagtggtctcgatatctacgaggtctctgacaaacaggattacctcgtcgtccccggccaacagtggctcgacggtattgctgtaagccctggtgtcgtgcgccagtttgttgctatgccttgtctgtctcacccgtccttgcgtctgcattgctaatataggaggcagtgggctctggatacaccgtcgagggccaagtcagcggcaaagagaaatttggcggaatccagatcgaggtcgttccttcttatgaacgagacactcacacgttcagatgctcaaccgagcaaggacgcgtcaagtatgcggccgagcatgatacccctggcgactatgcgctgaaagacggcgacaaagtgtccatggcgctaaagccatctacatatagagggcaggctagactttgtgatttccttgacgatggcgaaagttttgaagaaaccgagaacctctgcctgaaggtctggccccaagatgagccatatcatgaggctgatactgaaagaagcagagtgtttacaccatgccagctatcctggcggccacaagctccaatccagttccctcaaaaggcatggtcagattcaggggttcagcgaggagaaacagaaatccgggcttggtggctttggtacgtcgatttttcagtttacagtttgctcgtattaactcatataactcaggatctggcgtttcaagcgtactggggaaat

SEQ ID NO: 3197 - DNA, 1245 bp, Emericella nidulans
cacacatcaatttcacagtctaagaagtgggtcgacattcacttacgtctccaatgatatctacgccgcatccagcgcaagtagacctttagttatctttattcacggctttcctgacagctggggagtatggcgccatatcctcagcgagtaatccctgcaaagttcagcgacgctggtcgcggttgatctgcctggttatggaggctctgagagcttagatagatattcggctgccgccgttcttgagatccttaccgagttcatcattgctatgagaaagaagtatggtattgatggtcctatagctactcgtcagcagaggaccattatcatcgggcatgactgggactgtgtacttgctatgcgactggcagctgatgctcctcaactagctgataggttcatcctgacaaacgggccgctagtacgtgttatccaccaacatcacccagtcgctaggctcgactgacacatgtccctagatccccctggcagtttctaacatcagtatacggctgtcatccttagtgtacatgctcaggtgcttcctgctctcacccgttcgagagcggtcattattgttcaatgccgccaagtcactaaagcccatattatttcaattgtggcgttcgggatacatattcgcctttcaacttcctccgctattgattgcctacattggcaatggagcaaatcaagcaaccctaaagcacattcataaaatgtcgtacggcaaccggaactacactcctactgacgccgcagagtgcatggcaagcacacttggtccatctattcacgaacgcatgacacaaaccgctgatggccaggcatatgcggaatccgcggtgaccagaccggcgatctcaaagttcgtcgaaatgtgcagctactaccgagacggcactgctaccgccccctggaagaagtctactgagacggtaacaagcctctgtggcattgcggaagagaacggagctcggtgcatcgatagtgacgcgagaatactcgacgacggaccgccaggcgccttgaaagccagtacgacccgtggtctggggccagaaggaccatgcactactcggagctgtgcctagatggtatctcggactatcttcttagcgagtcagggttgtgagcttcaatcagtgcacactggacgccgaggagctcagggtccggttgctttggtcaagtgccccatgggctgtgaccgccagcgtgagacatggaacgggtgtg

SEQ ID NO: 3198 - DNA, 1954 bp, Emericella nidulans
  unsure (1)..(1954): unsure at all n locations
tttggcaggcaacacccccgtgtataaggagaagttgcttcacatagctattggctgctttagcgtgatgacctcgagctccacggatgtcttccgaaagctgtttcaatttgcgtcctcgggtgtcgacttcccgtatcctttgtactggattgtcgatgcggtcgacgagtcagaatcggcaaagactgtgcttgagtacatatccagaatacggctggtcatcccttccctaaaagtattgttcactagcagggagtctgtcatcttcccggccgaccagaaaattgcgactttctccgcgtcagcagagggcaaaggatctgttggcgataattctttggacattagaatctatcttgagcggatgatgcatgaaatgggtggtaaacaagagttgaaagacactgtgatgcaggcaattctgcgccgggcacaagggaattttctttgggtccggttggttgtaaaagaaatcctcagttgccatacagaggaagggatcgagacggccttgcaaagcatgcccaaagatatgaatcaattgtacgaacgcatggagtgggtggttttatcagcaccccgtgctgaagacaaggagatcgctcagatgatccttcgatgggttgtttgctcccgttttcccatgactaccgaagttttgaaccaggccttgaacaagaaattcatcgatctgcggaaaacgatctcccaagtctgtggacagtttgtcatggtcgacccctctggtcaagtcaggcttatacatgaaactgctcgggaatacttgacaagaactacggcgagtcccattgcaatacgactaccaaaaagccattactcgctcttcgagcaaacattatcggcattgcttgcccctgacatccgccagaaggtcatcagagcgcaagagtccatttcagtatcggagccctttctgttgtatgcagccacgtcgtggatgtatcatcgcagcagtcagccgaaataagcgaccaaaccatnaccatctatctcaattctttagaacgacctctgtgctcgatggatccattactgtcaattaccgaccagctggatcggttggtcaggcccccacattgtgacggactccattaaagcttatcgcaagtcaaacatgacaaaaaaatccattgttgcacaaattatcgaatctggagcttcttgaaagatggtctgcagatctcttagagattgtggggaagttcagccggcagttgaagatataccctgcagccatatatagccagattccgcctctatgcccttccagctctgtcatttacgaacaattctaccaacaagacttcgcaaatattaaaatcatgggaatctcgcaaacggattggaatgacaatcttgctcggattccactaccccgtggggaggaaggcatcaaactatgttgtttcggacggtatgttgctgtgctgaccagctctggcagggtaacaatctgggacgcgaaccacttcaagcaagtctgttctcttgtacaccaagaggctgtcacttcgatgtctttcaaccggtacggcacagaaatgctcaccttcggcctagtaacatccaggctgtggtctgttccctcaggggagctgttggccactgtagttaatcctgctaataccagagcattgtctgtcaattcagagagaccgataggagtgtccttgttgcctgcacaaatcgagttatatattctctggaccttgaagacctcgctgctggttggcgtatgcttagtcgaagcttactccacgagcgatcagaggtgggtggagctatcgtcaactcaccgaggtgtgtatcattcaacggagatgcgagtcaggttggagtttcgtaccggggttttccactatcggtgtgggatctcaatgagatgcggtgtatcgccaggtgtaggagaccgacgcgcaaaccaagtaag

SEQ ID NO: 3199 - DNA, 1688 bp, Emericella nidulans
  unsure (1)..(1688): unsure at all n locations
gaaagattgattggtgagaacgtcctcatccaatgtccatgttcaaacacgcgggttttggacatggcgttgtttttaccacctgagctagccggcatatcttgaccagtttcgcatgaccggcgttgctccttgctactatgattgtttttaggcgtgtcacgatccactgtcaagcgtcgagggttatcttcgtagaggcacgctgacgtcaaatccagggctctgcattgaccacaggacggcctggaccggtcgcattttaccttacggcgacggcattcagtgcagttgtaagatggacgcaggcgcttgcgagtcgtttgcggtgagtctgtcatcgtcgatggcgcgacgaagttgtcaactcgggtgttgagagggatgaatggcccggctcggccgtagagaagaacggggccgatatgcccgagctgcctgaggccacaactgtaggcaacaaccatgatgggagtactaggtnnnntgcagcggaaagaagggataagcagacataagggcgctcctcgccactatgcaagacctggcagcatcaaagcgggctggctactacaagaccgcaccccttcccaaaaaccattccctcatcttctcaacccctaaacttgtaaccagcagcatccgtccaagggcatccacatcaacgggcaatgcctcgctaagcactttgcccaaatccccattacgtacaataaagtgtttctttcccgtccaggcctctgcgaattctgccgcggaggccgcattccacaagtaagcagatgcgtaccatgaatgcagcagaccgagttttccgtcacatctcatatccttgtccccgcggaccaatcgcaggatctgaataaagtagaatgtgaagagaatggtgcgccgagcggactcctcaaagatccagagggtccagaagggtgcgggcgaagtcaccgtcggcgggagtatggacgggctagggttggaatctgggccgtctgtgtccaagccttggtcaagggagggggggaaatgcgtgctgttgaagaagaaagaccctgctgcttgtagggctgatatgctgagggtgtcaagagacgaagcctgtttaacaacgcggaggaccgccgtcaaaaagggcatttatctgaaacaaaaacagggcctgcctatgtgccaagaggccttgcggctggcaaggaaccagtagagaacaagttcccgatgccgcaagtgaatgtccccccgatcatgggcccgagataaggtcttgggatgtaaaggcccgcaggcgaggccccaaatttccatagcaggtcacaatttcaaagaaagaggaggccttccttgaccttggaatccttgacaccatggcggtgtaacagccatagacttgtaccatttcccgggtaccttgggagtcagggttctggtccctcccccttttatagcgaaaaattaatgggccctcttgcctccttttatggaacaacgtacctaatcgttatttctcagcaacaattctctgaccacatcacttcataccttatcttgataccacacaatcacatcataacccctcaaaacactctaggctgttactaatccctcactatcaattcctactaccaacccacccccgacgcgcccactatctcactatgatttctcttccatattatctatccttctccaaa

SEQ ID NO: 3200 - DNA, 742 bp, Emericella nidulans
tcaatacaagactgtttgcatccccatgatcatatgctgaagagtatggcaatgcatcatccatacacctggatttgtcacccggatacgccatgctctccatcctgatggagcaccaggggcaacctccctgctatacccatatagcactgttgtatcccgcagaacaggctgtgtctcctgcaggcgcttctcattttccgcagcattgtactcgccgtcgccgccgccaatatcataaaagtgtctgccatggccgtgaaacgggtgagtctctacgccgcggttccgaacggtactgttaccaacagcaccacgattctgccagacaatctcaaggacctctcccagctgagcgggaaagatacggtaatccttatcgaagttgttacccgcagatattgccttttgcaatgattccgtaacgttaagctcacccctttgaatttgcacaagatatggcgtttctgggaacgtctcaacccagtcatacccgctctgtaaccagagaacgtggtcactaaagttctgatgaacatctataacaatgcgacgcgttacactatctgatgtaaggaaatctggatctcgctcaaggggctgtaattggtagtccagccacccgtaagctatactagggaccggcatcagtggtgtagctgacacatttgtcaaacatgcgggagccgtagatgggtactgaaggatagcgtatggtcgcagagtcctgggccttgcaggg

SEQ ID NO: 3201 - DNA, 957 bp, Emericella nidulans
ccccgccactaaaaaccccggtggttttgagcggtggggtattgctccccgcccaacacatgcagcatgggcgacgcacagtccacaagcctcatatactcgcgcggaccaccgagcattctctgggttatgactggggaaagtcggaacgaattcccggatgatgaagtccgattagagacaccccaggttggggaccggcttcctgctggcgggagcagcacctgactcgaacggaccgtttctatttctccgcgattggcctaacgggacctatctgggaagatattgtgaaacaatccacgatcattgttaccggacgcagccttcctaatcctgaagatgccaagcagtaagctcgcctgtcacataccaagtgccccaataaggcgttgtgaaaggatgtcactgacgattcgcgcagtatcaagtttatacacttcttctctgctgggctagacaaggttatccacgatccggtgctcactgattccgagattccggtaacaacaagctcgggaatccacggcccccccatcgcggaatggacggtgatgaactggctcgtcgcatcgcgcgaatacagtatcacatacgaaaatcagaagaaacacatctggggctcagttgatctgtactcgcacaggatccaacatcatgttgggaagaaaggtggtatccttggctatggaagcattggacgacaaagtatgcgcttttctatatctcctaacgtgcacagacaaatcaaaattctggaggaaccttcttgaaaaattgcccgggtttccgtaatctctaggccccaacgttttaccctacacagtctgtccaaaaacaactactcatattccgcgggaaccggacttcattattccgggacccgggaatgcacggacgctccaaattccggcacaatggacttttaagcttttggaaagtttttcattgggttca

SEQ ID NO: 3202 - DNA, 527 bp, Emericella nidulans
gtacttaccagcttccttcctccgcctcgcatgggggttttcacggcagcaaataataatggcgttgacagcaataagaatggcaagaataccagtcaatgctgactgaacaacgatcaagacaacaccagtgactgtcttggtcgtctgggagagtccaagctggtcgacaaaaaccaacacgcaaacgacagacaaaacccgcactacctgaatagtaatgttgatccattgagttgacttggcaacatacggccggtgccaaagcaggagacccaacattagcgcttcaacaacaagttgcccagttgactggaccagtccatgcccatttgcaccagcaattatacagcctttgataagcatatacaggatggcgggaatgaaaagccaccaacagcctttcttatagttatcataaaaaaggctgtacttccgccaaacctctttgttctcgtataacggtgatgcgtcgcctccagcctttttgtacttgcgagctagatgtacgatgcgataggcgaaga

SEQ ID NO: 3203 - DNA, 2325 bp, Emericella nidulans
cagggcttaccggttaaagccgttaccccacgcgattgtgtcttcaatcgtcacggcagatttgaattccctgcttgtgttagcggagatacggggatggactgggtttacggcataccaaaggtccaatccatcgtcgacgttattccacagccgtgcaccgcggaggatgttgccctcgcctgacccctccttgcacgcgaatccatcggcgctctcgccgttctttcgcgggtcacggttcccatatgagtcgagatacaggacgacgttgtttgacgactcgccctgaagctggaagcctgtaccaatcagtacgtgaggctataaacaggagtgtacggacctgtttcgtagttgttccgtgtagtgatgcgctcgtagtgattgttcgacgcatcgcgcgcatagacaccatacggtccgttgatcagttcgaggtcgtagaactcccagtattctgcatcctggatatggaggatacctcgatccgcattgtcgagcgacgcatctaggtcggcgggggtcctgaattgatcagcagcgctccattatctaggtctctgtactcaccctggtagctcttcgccgtcgataattaccgactctccttcatacgcgcggagaacgtatggtgccgaggccgtgccgcttttggtgatctggatattacttgtcggggtgtatgttccgccgcgcaagtaaatcgtagatcccgcagtagcttggtcgacagctagctggatggactggagcggtgcatcgatcgtaccggcagcatcgtccgagccatcaggtgaaacatatatgtccgccgcaagaactgcgggaaacaaagcggcaaagacccagaccgatttccccatcatgatgcgatggacctgtgggcttgaggacttgttttgggatgagtccgatacttatgcctgaaaagacacacggcattgtctcccattgttgggaaaatcagcttgattacgcgggatattcgtgctcggccaagcctgcaagggccgccagcgtttcattttgatttaggctcgcacgtcaatcatcatcttggctcactgtgaagaattaaggccccgaccctgtttctcatactcccccagcgctcgcgcaagcagctcagggtaccatctccggccgacatcctggtgactgatgatccggtggatgagcgttccttcgccagtgcggccgcgaaatatcttattaaaggtagcctcagcatccgaccgtgccttctcatcgccagccaacatcttgatatggtccggaaactccaacgagatatcctcagccgacagatccagactcatcccctgaaagaccggtattgagaaccggggccccagcggtgtcccctccgcatcgacataattcgatggtgcaagactcactcggtgtgtcgttgccgtacacacaccaccggtgattgctttcaaagcgcccccgataataacgaccatcgaccccttgattggtggagccgagatccaaaccccggatttattctgcacttcgagtccgtgatgcggagtagcttgcaggaggaatgtcaagaactccgagtctttatgggtccaacaccttgggattcggcgtcgctgggtggcggagggtatttgattagtttcatcttctgctgcaccggcttatcaaagaattgtttcagcgcgtttgggggcagatccagggcctcggcgatgaggacctggaaattctccgccaccgggctcagttccgccaggtatgcttcgacggattggcggaagcctgggattgcattctcatcgggccactaattaagatcagattaaggccaaagtataatgcggggtgggaatccagtacctggttggggcccctaatgttcctatataggggctcgtccggtgcaggagcaggtaactccgtcgcaaactatatcgcaatcagtatatcgcctgattttggatcttatacggggagatcttgtggatatgcgcacatcgaactgttctcggtagtcctgcttccgtgcagtgatttcggccccaagtcgagagtagccgagaaagtgcttgctgttaaccatttcgatctcgagcttcttctccagaggaaggtcaaagattgccctgcactttttcacgaggtcttgtctgatttgcggtttgatgggagcgttcacgagataaaagaaccccacgttgaccatcgcgtagcggaggtcggtcaggaaggctgatttgctggacatcgacagtgaatagtccaggacagggatcaccgagaaggaatcggattggttggtcattttggccatattgatgataattt

SEQ ID NO: 3204 - DNA, 2120 bp, Emericella nidulans
atgagagttttaggtgggttatttgtggcttcgggagttgaggtagaggtttcatcgtcaaggatcagggagtcccggagaagaagtttcttcttctctttctcctcgctgttttggctagaaggggatggggatgatatgggatcatcatgcagccatatctcattctttcccttccacaaatgaaagtcccagttttcgccgcgcgaggtgcggccctgcgttacccagtccagaacgcagagactacttcgggaggagcccttggctgtactatcgacgatgaaggtttggacctgctcgtaacgactgtctttgaatggcaccgaaggatcggggagataacacaatgcggcttcttgtccgatgcgaacctctaaagtctgacgactttgatctgaaagcgtgcgctccggggatgcttctgtcttgaagatctttgtgctgccctgtggcgtcgtgacgacgagcctagtacgcggctcaagggttatcgagacgtcaatctggtcacccgggaggagacctcctccgtatgtaagaaggtagaggtggacaggttgaaaggcggagggtaatgtagactgcggcacgaaacccccggtgcgcgtgaggagcttgagcgggtatttgtaggtcagcgtgctgagggagggattcgcagggggtagcagtgagaggacgacttttccctgcccgggcttcgcaatcgaggactcaaagggcgatttgactggcattttggttgtttatcgggagaaatctttaggggaggatgcgtagtgtcggaggagggaaggacttggagttcagtagctttggttttgatggcatgacgccacttatcagaatggcgcgggcgtcaatgttggtacagatgccagatgacagtgtctcaaggtcggtctgcttggctggggaggggaatatctgctgccgatgaagtcgctcctgtccaaccgtagctcaagactgcggagaagagctccaaacggagtttctatgacaagatgcaaactaggcacctagcattgagcgtcttggctattaatctatgccgttacacaacctcaaagtccgtctgtgatggagcagtagatggtttccattacggcatcagcaccgccctctcctcttccccgccgcagaggcgccgatcgctagggttaatgcatcatgtaattgcataagtccccttactaattttatgactttatggtgagcacgtatcaggcagtactaggcatcaaagcgcgtctgctccgtccagttgctcgcaggtctctagtcaactccgcgtcctgcactcctcccttactcctccatcgtcaagtcccatccgacatagcggaattctcgtccattgggtttcggtcctcactgccacttgtaacactttctacgccccttcgactggtagagacaacgcgcgcacagaaccatttcatccgtcgtcgcgtttgccgttcagccccaacaaccccgcgtgcaagtacgatcttcgcccaccatccgtcaatgtgtgtggcataaaccgccgggatctgtatttgtcgctattgagctatcctcacaattcctgcaaggaaaatggagcccgagttacgcttctactcgccccaacctggattgacccaggataccgcagtacccttaaaagacaggccaaaatctggtcgagggacgcggcgacctggattattcttacaaacctatagtgatgccaatggtgcgaccgcaagcggtggcaacgaaagggaaccactcccggggacagacgaggagaggtgaaggactgcaacgttgaaaggtcggagaagagtgggtcgcacacctaggggggggatcttgggaagaagacgggctgactaggcaaggtaagaaagcccaatggggaaaaagacgcaaaatctggggtccaatgcggaaatccaagttacgaacggttgtaaaaatgcttctcgagcgaaagggcaaatttcgtcttccaaaacaaggccggtcaacttgcaagtgcggcttggttattcggttccaaaggttaagttcttcctctcctcctggggaggaggtccccaaaatttggtgtcacaaacctgccccaacgccaaattgttgat

SEQ ID NO: 3205 - DNA, 4213 bp, Emericella nidulans
  unsure (1)..(4213): unsure at all n locations
cggatgccctgaattgcaagctttcttcagccgaatgcacctggtacaggaccgtttccgtccggtcgtctggctcgcatctgagaccctaccaggacacgtccgcaggtgtcgcttgagcacgtcggtccgctggaagctactgtcgcagctggcgcacgggtgtggccggtctgcggtatgcgtgccattgtggcgctggagatgctctctgcgtctataccgctttaaacagatccggcattgatactgtccagggtccatttggtccatttcgctagaattcgtgtgctgaggtcatgagatggtccgttcgtggtggttaagatctggggaaagtgagtgatgacatcgtcaacgcgccgcgccaggcaagtctggagaagcagcacagcacgggggtgcggggtactgagctcagggctgggctctggtttggcgaatgagattgagcgcagcgcaagagattttcaagcctcgttccaataaaaagagttggttctggccaccgtttggccactagtnggcgtctgttatactccacttcactttcttccggggactcgcgggtttctactacgcaccccattctatgaactgaattactgtagaaattggtactcggggaatcacggaaaatacctggcaatcaggtacataaggaggcagaagataggctctggaggtaagttgtagaccaatttgacccgatcaaccacgtcgtcttccaaagggttaccctaggataatcgttgtatttctcgccaaccatcatccttttgataattgagagaatcggcatttatatttattattggacctgtatccactgctttcccagcgcaatgcagccttcttggctgttaccgttcggtcttctaattagggttgagcgcacagaaggcaggtgaaaaccataacatggaaggttagaactagcgaacccaagaagcattcaaatgatttaccgagaatactttccgatttggatggcgaagcgactatcccactccatatccgccgtcctcccacccccactatactccaccgttcctcggcgccctagcttctcccacacatcccgactctctatctctataccctcgaccaagtccagggctgaaacccctgtcatctggaatattgaacactaccgcaccatggctactgaaacatcaccgcgagcgctggtctcgtacggcccgcacaaatcgggcgggtggaagctgaagaatgtcgcactacgtccgctgcgcgaaaaggaactcctcgtcgagatggtcgcgtccggaatctgccagacggatctccatttcgcggggatggagaccgggtatggagtgcattacccaagggtaatgggtcatgaaggtactggactgccccgctggtcattggccgttctgctcacctatctacaggcgccggatacgtgcgggctgttggaccagatacaacagtcgccagagtcggcgatccagtcatcctgtctttctcggcctgcaaggactgtgagccttgcaagggcggccatccggcccattgctccaacttcaacgctatcaactttgaagctgtcgcggaagattacgtctttcgcgacgcctcttcgccagagcctgcttctggcggtgatatctacggcagattcttcgggcaatccagcttcgctagtctgtcaatcgtccagcaagactcgattgtcaatgttgctggggtggttaagagccgacaggatctggcattgctgtcaccgttgggctgcgggatccaaacgggcagcggcgctattatcaatgcggctggtgcacgtcctgcagaccgcgttgctatcatgggcctggggggtgtcgggttgagcgcggtcatgggcgcgaagattgccggatgtacgcagattatcggcattgaccggcacggatcgagactcgagctggcaaaggagctgggtgctacccacgtcgttcaggtcgccgagggaatgcccctagacgaggtgaccgcggctgtgaaagctattaccggtggcctgggctcgaatatcaccctcgacaccaccggcgtgcctgccttgatcgcagagggggtcaagatgacggcattcaagggcaagatcctgcaggttgggacagcacccgagacagccacactgtcgattcctattcacgagttcatggtgtctgggaaacagtttattggagtcgtagagggcgatgtcgtaccgcaagagtatcttccaaagttgctcaactgggttaatgagggtaaactgcctctggatcggatcgtcaaattctaccaggccgaggcctttgagacggctatccgtgatatgcagtccggggtgacggttaagccggttattttatggtgagggggcagtgctggtatcggtggactcggtgattaggtacggaatcatatatcccaactagtccttcgaagcagcctttaaaatccattccctgcacctttaagcgcagaggtatagagggcgggcctctagtcaaggttaagatgatcaacttggtctcaaggggtatatggccctagttgtctttcaaccacctcagcccacaggtcttgaatcgccttccaacgcccgtctcgctggaaactctgttcctctgtccagtatgagtagactctgttagttaattcccattgctcgttatcctctggagaagggtctgcgcgaagatactcaagtaggtgggcaaggccatcccattcaatgtacgcctggaacagccacagccactgcttgccctctgcgtaaccccgtagtgcctctgcatcctgcaaaatctgagcccagtttctggctgaacgtgcactggctcgtcctttcgaggcggtgctcttctcagcctccgcgcctgccgctaccacaagccgaagcttagcgaggataagcctgatagactgcacggtcaccctatccagcggaacactcttatcacaaacccccaaatactgctttcaatcctctcctaaacagttctattgcatggcgcctctcgtcgacgataatcgggcgtacgaattttctgcgcggaacctctcgaaaataccatctgccgtgcaaagtaactgccttcgaagcgcactagactgaacagcatttccgttcgaccctgtccacgcggcggtctactcatggcgggatgcatggtcgtatctgccacgttggatggtaggcgggtgttgaatgaagattccagtatgcacggctctgagcccctatcctctgcgactcggatatctagagtaaagagctgccaccacacccgacggcgtatctcaacctcaaatggcgggtacccctgcgcttcagcgtcctggttgaggcccattttgagggctattccagtggcgaggccgacgagggcgtagacgtcgggcccgtctgggtcgtttcgggcggttatctggctattagcgacaaccaggagcgggctcacgtggttcttacaaggtatatagtaaaggcctgtaggacagtcatatctgtcgagttcaacaagtttagtcgcgagagcatgttttcaattgcggttcggtatctgagcagcgtagactgcgttagcaatacctaggagttattcaagcgcggcttgatagggcccatgtataccgtcttagcaagatttttcgatcctcctggagctcagttttacagaccgacagggtcatggctgccacagtcgcataataaatcgcaaacagcaggcactccgatgctaggtccaacttgtcgcgactccgaatttcctgaaagactaacatctgcacagtcggtgtgtgaaatattttcagcagggggtctacgatctccaggtacctctgccagaggcccgcgattgtgcttggtgttgggcgaaataggccgagatcgacagcagcctggggctgcaggagcattgatgaccgagtgccagcagtatcagctagagaggagcttggcagaacggacattgctccgtctccctgtaccctgagcactctgacttcactatattcagtgtcttgaaatcgattactgcctccatatcgtgctgacagcttcgagccagacgccgatcgcgacagcgacggctcctcgacttcggctaggcgcttctcaagagctactatcttggactcgagtgatgcgacacgactaagcgcatcgtagttttcaccagctgcggcgcgacgcaggatatttgca

SEQ ID NO: 3206 - DNA, 2459 bp, Emericella nidulans
ctatgcatggcaaaaggacgggagcattggaggccatagatagtaaaagagcgtgatccataaactctatcccgcgttgctatagacttagcgacggagttgtaccttgtgcttgtgccctagtaattccggcggtcacggcacggcatgaaggagtataaagatctctcttattcgcgctttgtagaatttcatcttatgtctcttaacatcccaattcaaagctgaaccagccacttccaaaatgaagatcagctgaacatgcgtcgccagctgcctccttgccctccttccccctccagcgtcttagctataccagcctctccagcagacctgaactcccgcgccatcacaacatgcagagttgtcaatacggagtcagaagtgaagtgccgcgcggggcctgattttgactacgacgttcgaacatccgtctacccaaacggaatatacgacttcagctgttccgagggaccctttgtaagcctgtattcctcacttttacccgatgctgtattgttcttgtcaaccatatctagtagggctggcgccgctctttgttgcgttgcgaacagttatctgtggcgcttatcccaagattgtttcagaactttacaacaggtatatagaacgacttggttcacgaactgtgagcattttttaaaaaaaaaactcctcaagcaatttatcgtatgtccaaattgtggtgaagatgctctggactttttagtcttgtaactttcgccccctaaaactatcaatatacacaaaggattgacatagacgacagcgaaattgaaagagaagggtaccttatccttagcttcatttcagaggacaaaggacaaatcatggatactggctgggtatttatagagtaggaacttaggacagtatctgcggagcggcccgcctattgttaataagaacgaggtaccgtccgtccagaggattcagtttcgaatcatggaagagtatgtttccagtccatttatatgccttcaatcatagtcgccctattctatgtgaattcaatggtcatccatcaggctcactagacgtagcggagagtactagcctcccctagccctaaatctcctaggctccgccggggcccaatattccttaccttcttcaaatttctacccaagcagagtagtcaccatgcaacccaagacgagctgcaaatgcatttcccttcgactcagctgatttcgtcatgcccgtgcccggctttcccagcaaatcgaacgcgtaaagctcacgcatgctcttgtagaatgatattcgtttagaaagtgatgatttagtccgtatgatattgtaatagaacaaaatgaacatcattgccggtagcattgaaagaatacccgctaattcgttccatcaagagctttataaacctcagcctcaacacctccccaaagctgcaacacattcagatccacaaatggcagtatctgtgaacaaaccattcctgccactcctttctcccggtccgcccaccaccacaggttcgccagtccagcccaatgtgccgtcgcagttgaccgtcccgtcgcaccgccgttactgagcataaacgtcagtccccatccctgcggcgggtttccagggacaggatacagttcggggatcgggttcgtcaggtcaggcttcgatgctgggatcggttgtcgactgtagttgggcatatgggggatctgattgctgaacatggtctcaaccgtactggggagaaggaggcgagttcctgtaatagggtaggttcctccattgagaagaacggaaagaattcctgtttacatttctgtcaggccgggttttcccagtagtcggggaaaagactgaggcatactgcagtactcctgcggcttcgcaaacatccctgcgccgccgctgttgaagagccgtttcacctcagcttcgttgccgaggttgacaacaagtggtgctcgaaggaggtggtctcgaggccggagagtgccgtcgtggtctcggtggttcatatacgccagttttgaccgcatctcctcggttgggatcattgacatgtgcttgattcccaacggctggaaaatatggcgctggaggtactcgttcagactcagaccggttgcccgctccagtgcaatacctgcccagtcgataccgacctatgtaggcattagtacgtcaatatcagcaggcaagtaaggcatagcaagagataccccatactcccatccctctcccggctggaacagcaacggtgtcctgacatcctcgatccggccggagaactcgtccaggccggccgggtaggaccactctctcagtctgtcgttgaagaagctatacccgaagcagcaaggcgagagtacttactgaacaagggtgtacatgatggcttcggaccatatcgatcatcgtgcgcttcacaatgttgaagtaggaggtaataagaagctctgtgtgat

SEQ ID NO: 3207 - DNA, 579 bp, Emericella nidulans
agaatcacagtacctactgaataatgaatcatttgcagaattgtggcgagacactgcaccgagctgggcgtgtgggtccgatggcccgggagacctccgggggatcggaccaaagcgactccacgtcctatgctggggaataggccatgtgccataaatggagtattggctctatggagtggattgcagtgtaatgatctatcaagtcagtttttagactcgctgccactgtcaccaaaatgtccgcccagctttctctcgtccacggcccaaaagagcctcccctctggctcgataagacattatgcaacgtaatcgaccagcaagaggcatcataccccgaccggacggcacttattgttccatggcaatcgacacggctctcgtattaccaactcgccgagcgaagcgggttgtcgcaaaggcgctgcttagtgcgggactgctccacggcgaatgcatcgggatcatggacggaaacagctacgagtatatcgagatcttccttggtgcggcacgaattgggtgtccggtggttgttctgaacaacacgtatactccggatgagctgaggaatgc

SEQ ID NO: 3208 - DNA, 2183 bp, Emericella nidulans
tttgagtccaagttacgtcattagcctcagtagccgacagtacacgtgatcaattgccgatggctcgcgtttctagacattgaggattacggagtagtctgaaacatagaactgctggatctcgaaatgtcaaagagagcaatcgcgtaacgcagattccccgaacttggtgacatgttgtgcgcggtaattccggccttgtacaatgaggtagcttgcagtgctcggcccgaggcattaccgcattggtcgtggcaacaacatgattgatgaggggacaagaagaggtaagtgaagcggtttgcaatattgagtggcttttttctaatattccatcgcagacagtccgtcgactgatgatacaaagaccggtcgatgcctcagcatggtacaaggatttgaaaggcgagaagcatcgacagagctcgagtttacgatgacccaatccaacgatggagagcgagcagagctgctgagctgagagggtcggcagggtctggggaaggcaccgtgccatacataagtctaaatttgcatgtgaaagttgcatgtcattcgacacgactgacctgctgaaaggggattggaaagaatcgtccagtcgaaactgaagagagcatgtgaagtctgatatccccagtgaatccaatggtcgatcagatactaagaaattgaggatcccctgatggttgactactgatggttatgggggtggatggacaaaccagcacacgggaaatggcctttactaagagcagtccactctccccggactctcagtgagctttgtccccatactatgctccgcgaaatacggggaagagccgtacactctaagaatggaattgtagaaccatcaaacgaatacaaaagtcagtaaatgatgatcagtaaataagtctgattcggatcgatttcatacctggtccatattaactaatcagaagttaactctgtacatgccggtcggactcagcaggccgtaccgtgtggcagaccgtcagtgagcctcggccgaaaagcgactttctcccccgtcggcttatgaacgagtcctgccttttaagaccgtctactttccctccgccctgaattcttcctccacgttcctgcctttctcctttctttctcttccatctcattttcttccaacttcatagataaatcatggcccccagagtaatcgttgtcggtggtggatgtgcgtcctcctttcatcttcatctccctggtgtctccccgcattagctgatcgtctcttgtccttcagtgtccggtctcagtgccgcccacaccgtctacctcaacggtggaagtgttctcgttcttgacaagcaaggtatgtcgcagctgttgctgctgtcactacgctctgttatcatttccccgggcgaaagctgcagtcgtcgaggcaatacgcagtccatgaccagccgaggctaacattcaccagcattctttggtggcaactcaacaaaggccacgtccggtatcaacggtgctctcactcgcacccaggtcgacctcaatatccgagacagtgtcaagcaattctacgatgacacattgaaatccgcccgtgataaggctcgccctgatctcatcaaagtcctcacatacaagtccgctgctgccgtagagtggctgcaagatgtcttcaacctcgaccttacactggtttctcgtcttgggtaagtcgattctggagtctattcggtccagcattgtccgtttgctgactgtcctagtggccactcgcagccccgaacccaccgtggtcacgatgccaaattccctggtatggccatcacatatgctctcatgcagcgcctagaggagctctccgagtcggaccccgaccgcgttcagattatcaagaaggctcgtgttacggctgtcaacaaggacggcaatgctgtcactggtgtcacatttgaggtggacggtgagacgaagacggccgatggtgttgtcatcctggctactggtggttatgctgctgatttcggtgactcgtcgctccttaagaagcaccgccccgacacgtttggtctggccagcaccaacggtactcacgccactggtgacggccagaagatgttgatgtccatcggcgcccacggtattgatatggacaaagttcaagtccaccccaccggtcttgtcgacccaaagaccccact

SEQ ID NO: 3209 - DNA, 1247 bp, Emericella nidulans
aaacataaaaagtataaatataaaatttataacaatatatttttaatataagtataacaaagtaaactaaattattttataaaatagtaaaatggaaagggaggggggggggggggaaaaaactaaaatctccacttaaatggataagggtaaaccgaatgaaagaatatttataacaaagggtaacactcaagggggggacaatggcacatgggagcgaaaaatgaagggggctataccacaaaggtaatattagaaggagggggactcaaaatatgaaagggacagcccaagggtgtaacaacgtaaaggggtcacaaagaaaaatatgagacggacacattagataagaggacaaaatgaggaataagagtatctagtatgaagagatgaatagtaactcccaaagggtggaatatctatctaaacggagcaagggccataaggacaagaaagggggaaccatcgcaatccagggaggaatgcaaacaggcctcgtgcattaagaagagtccagcggaatcaatcaccatgcaagggggggcaaaccctgtacaggctgccatacggaggggataagcaggagcctgcgtacgcgcatgggactggattgggagtcgtgcacacttcagcaatattgtgggattggggctaaggatgaagcagggagccaagcgctgcgatcgtggtacatcgacagggcaagtccctggttctctcccgacagaggtaggcatgagccccgccgagtccaccgtcgacccccgggagctcctctggggtatcctttccaccctctcccgcatccgtggctcccagtcgtacctcttcccatctctccttgagcgctgcaaaggcaccctcggctttgattccccgacgccgctttctatcagtgacttccaccagattaatcctccgcttctcaattccgctagctcttcttcaattgcttctgaaactttagatatctctggaccatggcccgcggctgatgacaatactatggattctagcacaggcagcaggacaacaaattcgtgtgcatgggaaataacttctggtgatacgaacgaccagaaccagactagtgatcagccgccttcattgtctggatcatcgtcagtacccctttcggtctcgcgaatgcattcgtccactagtatggctgcagaactctcgtttcaagctgggaggttattgacttgacttctggactggctccaccaccaccactacctcctcct

SEQ ID NO: 3210 - DNA, 2437 bp, Emericella nidulans
atcttcgtaggccgctggcaggtaaaaacgggcacgatacttagaaagctggcaagctggcgggttttttcggcgaccctaataatggatatctaatccaggagaaatctataatacatgttgtacaggtgacatatccaagaataatatacagtgagtcagctctgaaaccaaagtcctggttttggagttaaccatcttgttgtacaagtctattgtctaacggcgcaaagtcagttgttggcagctttccgcgctggctcgtcctcattgcgaaccgttggatcatattcagcagactctttcctttcaggcgtggcgtcacccgatgtaggctcttcctctaacgcatcacgagccggtggatcatgctcagctgatccttcgctatttagtgtggtgtcacttgtttcttgctgttggtcttgatagtcattgttggcggggttgtctgtctcagcggcgtccttgctctcgcgcgtcccgccattcagtgttgactcggcctcgaaatcgttttcgtcagtggtgatatctgtctcagcggcgtcctcgttgtcggatgcgttcatggtatcgggggagtattgttcctctgattctgacaggtcaaggtctgcgtctccattggctttcaagaactcctgctgtagacggagctgcttctgcattgcgatctggcgatgcagagaagcgttcttccggagcttcttgttggcagagaattctgtcaatgctctgaccattctttcttccacgagttctttcacgtgcacagccagagtgcggtctgtaaagatgcctccgaaccgataactgagccaagtgtagagaataacagatcggtgcaggccttcaagcttatgcatatactccttgtttccagatacaggttcttcgaggatttcgagattgacttcctcaatatccaagagccggccgttcgtgtgttcgagaacgcagcgctcgaatgccatcgctactctgcgtccgagctcttctcgtgggttcatgggcgcggccataaaggttagctggtccacaaaatgcaggccaggtacggcatcaatgatctccgcattttccaggtttgggctggggtcgcacatgaagaacaagttattgattctggcaatctccgttaaccgcttgaccatgtacgcgagtgatgcgttgctaggaaaataggctgcgaatttctcataaacagagtcgggaggattaatgcctgctgcactaattggtggtggctcagtgttcagcgcttcttggatgtaaggaaggtcgacttcttcaagtgaggtaacgtaaccgacattgtcattgtcattgtcctgctgatggtcttttccgtgctgcgctgctgagcgatagcggccagcgcgtccaccgatttgtttaatctcggggacggtgagtcttttaagtcctgaagggagagtcttcacaacagtctcaaaaatgatccgtcggcagctcctacaaattgttagattatacgccgattccactagatagacgaaactcacagattcagacccatgccaatggcatcgctggcaaccaagaagtcataatcattattggggtcattgaacaggcttgcctgctgggtgcggatttcagcgggcaatccgccgtagataatagcagccgtcggcctgttttcctttcgatatcggctttcaatgcgtggatcccaactcgggagaatgagacgatgcagtcccctctgtggagacgtgacgaatctcctttcaaactcttgttcatagccttcaaggggttcagccgttcatagcgatggatcacaagcttgtctccagcaagagctgcaagctgtcgaatcaagggcaccactctggtctctccacaaaggtgaagctctgtagccttggcacctaacagtgcacgagtccatgcccagccgcgcctcggatcggctatcatttggatctcgtcgatcacacctacttcgtatgtttgccctagattgaccatctccactgtattgctcacgactaccgctttttcgccctcggataatctcacttcatcgcctgtaacaagactaactggaattccacttgatttgaatcgatgatagacttcctgagcaaggagcctcaaaggtcctgcatagaaaccgctttttgatgactccagccgttttagggcgtggtatgtctttcctgagtttgttggtccgacgtgtaaatggattgtccgctgaatggcccgcgcttgagggtaccactcggcgggataccgcaggtccgcgatcttctgctgctgttccaagtagggctccgaataccgtgcatccagatcgtgcgcatacaaaagattctccagttcacgtctcagccctccaaggccgtctttaagataagcctttgtcattgccgctcgcgttgagcaaagagccatgtttagt

SEQ ID NO: 3211 - DNA, 571 bp, Emericella nidulans
ccaggtgtcaacggtcaattgccgatcaggtacagaagactcgagcgcgcaatggcgtagagcatattcagtcgccctcatacggcggctcctcctgatacacatcatacttgtattggctgcctggatgatcggacctcagcccggcctggccgaccccatagaccttctcgcgcgctgttaaaccctcctgcggcgcttcagagtagataccccgtcgacgaagctctggtaccaagaggttcacgacatcctcaaaggttccgggcgtggtaacatacgcaatattgaatccgtctaggtctgcctccctgacccaacgttccaactcatctgcgaccttttcgggtgttcctacactaactggtcccaagccgccaatggcagctttctcggcgacaacccgaggagtccatcgtgggacatcttcactcgtggtagtaaagctgtggagggtgctggtgaccttgtgggcctctagggagtcagcagccgtgatatcctggtccaggggcagtctggagacatcaatgcctgtccatccgctgaacaagacgagtcctccgatgac

SEQ ID NO: 3212 - DNA, 1095 bp, Emericella nidulans
  unsure (1)..(1095): unsure at all n locations
tgcatattatagaggcatgcttggcctttcttggaccacatccggatatgaactaaatacttttctctaatctgtgttctgctagcaatattgcattgctttcaacatcaacttcacactgcaactaaggatgactacctggaaatctatgcaaaactccggaaactattggccgtatatagacgtactcggaaggcacatacggtcaagagcccggagttccgggacgcagggccctttctttgagcatctacgaggatggcaccgacttcctggcgcgctgtatatttgattattttgttgagtgtatgacaggcagcatataaaacacacttaactctccaaggaaggttagcgctttcggctgagtgcgaagctgacaagttgtccgcggtctgtgtatccacttactcgcttttactcgctttacctgcccggttgattgccaaggggtttgtttgatatgttcgataacagtcgaccttggctttgtcttggttcgcattccacccactcagctgaacaaaccccgcagctgaacaatggtttggagatatgagactgagttgccggatgcaatacagtgccttgtaggtttggcgccgcctttccaacactctggctctctctcagcgccacattcgaaagctattccgtaatggacttagacgatgattttggttttttacgagatatatcattaatacatttctgtaagaaagctttacccttattgtagacctgctgggctctgtagaggacagctcgggacagccctaaatggttccgagatcgataaaaagcggaagaccagctgttgaaaggcaaaggaaaaacaaaggtctctcattgcatgggggaccaaccctccaatcaatattgttatgccctcccaagtaccaccacaatccacgccgataggggtgcactcgtggggtggtacaacccgcaggtagaaattgcccgccggtttgcgttctagaaagtaccgaccgacgaacttgattattttaaaagggnnncgggaaaaataaaatctattttttnttaaagtttctttttttatttatcatgggaattttgatttgttttgga

SEQ ID NO: 3213 - DNA, 1993 bp, Emericella nidulans
tccaagcccatagatctctattatcatcatcatcaatcttaccgttaagcgcaccccgcgaccgccccatgagcttcgtgcagaatcggcgctatcggccagcaagttttttttgatgtcatgaagtattgtctagctggcgttgatgatgacagctaggtgacagcttcgtgacaggtaacaatcatggacatggacatgctctcggttccctttgcaacatttgtggtaatccgttgccgtagccacttacatcctttcccctgcagtatactgcaattcaagcgctggactgaaagattacaggcactatgttcccttttcacatccatggccaacaaatttctccggttcactcaacccttctataaacctgctcaactcgcgccgctttcgttgtggcccccaacgttgataaccccataagaccgtctgagttgctcccaacatcccatccttcccccagcatcttcctctgccggtgccacatacccggacctccactattcaggtgcttgctcttggtcataataacccgcaaatgttcagtttatcacgacgtggctgtggttccaacaccatggttagccctagatgttctagccgtagggaatatagtatctgctccaaggaaatccgagtaggggttttaaacttcctcagcctcagtctcaagggtgctgtaggtacgatctaaataggcgggtagcagccagcaagcagagtcgcggcgtgtagataaacccttatccgacgttcactacgaagtcttattggctaatagctgtatgccttctactttatctggccagcgcctggcctgtctcatccctatatagaagggcgaaatatagaatggactcagcgattgctggcttcccactatttacatacatatgaaggccacggtcttctggagcataatgacttgattatataagcctatacaatgtcaaccccaattatgcctttccaccttcatcttcgattcgtcactcgtgactcctggactacggagtactcccatatgtaaagtcgcaatagacgctcttctcaagccaaggaaaatatgcggataatgaggtattaactctaaacacttttattccatagaggggtacatacagatcataagtgtccaaaatggtaaaatacacccactaaacatcgccaggcgttgccatccgtcatcgatggcgtcagatatttatacaaacaagctcaataacccagcatcgcagaaagcagaaggcatctctggcagcaaggtgactagtgaacgagagagcgacctagacctccatacatcatacaccttcattcaaaaacgtaataaaagtcagactgggtatgccacgccacgctatgcagtcctcgggagaggaacacagaagagatcgagaaaaaaaaaaaagaaccaagttaagtatgtactgagaacagaatcatatgtcggggtattagttgaactgtttcatattcatttcggtttccgccaaaaatattgctgctcaggttagtacagtcatggccaagtctgaatgagagacaaaccttatgttgctttcgacagtttctaaggccgggttttcgcaggtctgtgacgacggcttcacgacgcataacatcgtcatcgaagtcaggaatgtaatagtattcggcttcaagtggctttccggcagcatccttgccttcacgcgcaactttgccgatacactttgtggaatccaagattacccgaatctcttctcttgaaggcccgtggcgcgagtggttgtctgccttccagatggaagagggaaggttgtcaaggatggtagaaaaaggcgtggatgacagacgtgagaaagccagttggttgacggcgtgattttggacgtgctccgcgtcttcattgataacagctgtcttcttcttcttcttcttctcctcctcctcctgagaatgttccactggctttgaaggctgttttggagatgtaggctggagatgt

SEQ ID NO: 3214 - DNA, 2005 bp, Emericella nidulans
ctctgtatcacacaaaccagaacatcattgcaaggacgcactgatatatattggcaaagaaaccgcagagtatttcttttggaaacgcaatgttcaatcacattgactacgttaggtgctagagctatcacttcccatgaagtatgtttcatatctcaggtcctttccgtcccagccatcgtcttctcttttttgacccatatgaggaatggcccccctaatgacttaccgttgctagacggctatcgccacttatcgtcgtcgtcggttgcgaatgagactgtttgaagacgccttaattccttctacgcacaaatacgattacactcatcagctgcctttgttgctgctgtcgctgcaagcttcaggcctagcttcaatcgtcggatgtgactatcctacttgaaactaaaaacgctctatttacattcttgattcggagtcatctcccacagccagtgcatgcgcgagggggctatcctgataaggaatcaccggcgaatccgaccacaagttgtgagatcaagaatgtccgaaccatttttggccgagtttctaacttttctagcaatatggacgatgacaatatccacgagggtctcggtagcttgaatcgatggtcgcactcaacgacctcgagcagtctctcgcctaattatgtgagccaccggcgtcaagagagtgcccctagattgtttgctacagataaccatttatcctacaagaagatgttgagcttagaaaacagcccccaagctcacttgctcaaaaagaccgatgatgcaaccggcatggacgagccgttcattagacatcataactctcagtcatctactgaaaaaagccatatggatattccgttgtcagatcgaacggagctgactacggtgtccaaatctacagcacataacacaggcgcatttttattgcagccagagccttcatatcttgagttcatattcgtacagcacggaccacgaacacacagccgttcaccggagaaggagtgctcgaacggacgcacggtggttttgcctctcaaatcacaacccgaccccatagccagaacgacaagcggagacagggtccttcccaaaaggcaatgctctctaaagctctacagaaggcaaacactgctgtccttcttgataacgcggcaaactttgaaggcgccatggaggcttataatgatgcttgccagctactgcaattagttatgctccggagcaatgggggagaggatgaaaagctcaaacttcaagaaattgtaagtataggtgtccatgttgaaagttgtagctaatcatcagcttggatagcgcgatacatatatgatccgggttacagagcttcagcgtatggattttccttttcgagatgttgacagcaaggcgcttcctgaacgcccacttagtcaagaatcgtatggagattacattcaaagtgtcccagaagatgcttacagcctctccaaccaagatcccaggtttatggataaggagccgcttggcgaacgcgacacagcatctgaagggtcaaggacttttgttcagtctcatataccccgaggcgtcaatcactgttgccatcggctttggatgatgacatctacaaccgagctttctcgtccactgcccaaaatcagacggatatttcacgacctgtgattcagggggcgcctgttgcacatagacgtgttcattctgggacaaaccccgcaaactcggatgatccacttccgagagaaaaccagcatccacttcactcccggctatccgagttatcaatcctcagcgcccaagcccgggatccgaatgagtccacctcgtggttagatactattgacgaatctggtgcctcttcatctccatcattgcgttcgaatgcatcatccgtgtatctgcgtcgcaggagaagcacaagccttagtcacggtacagaagctgaatttgatgccgcccatgaagcagccgtgaaagctgcttatacgaagggtttagccagc

SEQ ID NO: 3215 - DNA, 844 bp, Emericella nidulans
catccggatcaacttcgactgttcccgtgatggaggtagtgaatttcttatccggaaacgcgatgcgtgcaatctgaggctggaaggcgccggcgacgagggcacggagaaggctgcggttagaggcattgctgttgaggcgtgaaaacgagggggaggattcagagtagtcaacaggaacgattgcggcatccttgagcgagctgatgaattgggctttgttggaggatatgtcgcggagggtctggtgtgaaagaaagttggttgtgcaccaggactgcgtagcccagtagcccagagttttgacaagatctgaccaggtttggtaggcggaaaggtcagtgagaaggtcgccatcgcccttagagaaagcagctctggcggcgtttgcttcttcgcgacgctcgcggggtgacacgaagggagatttcacagttagaatggcagcgattgtgatggcggcgtcgatgcagttgaagatagagccgtagaccattagtttgccgcagcgcaggtcggccgggattatagacaggtatcggcctagggctgttagtctgtcgtgatcgagggctccgacacggtggaggaagttgagggctccttcgacggcaatggtttccgggggcgtaatcgtgttggcaaggaaagtggcgacatcgtcgattcccttcatcgagcggacggaaagacacagctgttctaaagggacgcggcggatttcggggtccggtcgctgtggcatgcttgattctgctttgcgcgtgtagagtttgtagcaagtaccagctctaactcgaccggctcttccacggcgctgcttacatgctgcttgagatgccat

SEQ ID NO: 3216 - DNA, 786 bp, Emericella nidulans
tttatctcgctcgattttaactaacggggaaacaataacagagagtacgaataccaatatactttccccagcaaagccaagtatcatgaaggattacaaccaaaaccatgactttggatacaatgagaagagtgaaaaacctctacctagacaagggaaaggcgccgtggacggcagcaaaaatgcatccccgaagaagtccagtacccgcacaccagtctttggcaacgatgggaataaaagcggtaacaaacaaaagaagagcggggcgataaaatcgaacactccatcacttgatggaatcgaagactccgagatcgcgacaacagcagatatgcctagtacccggccgtcacggcgacgaggtactgttgtaagttatgccgaaccaaacttgagggacaagatgagacgatcgacaaacgagcttggaccggccgtcagcggggataaaccaaggaaaatctacttcgaacacagagtcaacccgagagtcacaagaccgaaggaataagcatgcctccgtaaaaaaggctcgaaaatcaaatatgacaaacggggagaatgacatattggatggacataccctcgacaaacacccacatcggcagaacactgcacgaggtaaccaccagttgtctttttacaacagttccggaatggaatcaatgagcgagggcgaagcagactcgaatgcgagcaagaaatctaggcggcaatcttaaaacacaaagaaccctggacagaacattgcaccaaatattgcgagtgggaagaagtatcaaa

SEQ ID NO: 3217 - DNA, 5703 bp, Emericella nidulans
ggtaatgtgtatgtgcagaccatggcatggcattacatcttgcgagggtgttggtcaaacttatcagtctgctgcttacacccggaggcttagtagatatgacgatcgcagtcatttgtctcacccatggaatgctgatgcctagatgatgactagaagttgtcagtatcacgatcctataatctttggcgccacaacaagcttttcagacaatgtatctagctggacttccgcctgtggcctccccccttggtgtatacaactggacatatccgcaacggctcagtcaagctaagcccaactggttcctttctgatatttggagtattattgaagaagcttgccggctgatagggctgcccagggtctatagcccgagcatggtggagttggacccagggcttcatgtttctcggagtatcatcatggataaagctaagatggcctcgctggaaaccatgctacagtccaccatgatcaatgaggtctcacaggcccgttagtttcataagccgacaaactccacgtctccgatgtcaccactgtgatattcacgcagtcgctgatccctgacatttagtgaagggccacatttctcatgcaatggatggtactgcgcccaagttatcgattatcccaatgcgcaatacaagtaccttaacagggtttgtctgtcactcagacgtcatcattctcaagctggggttcgcttggccagggcaatgtcctacgagctgaccggcgttgagatggccacaaaatgctacgtaagaaaaacaaatttcttcactctggagaaggtcattttcgataactgctggccgtatggcatagagccaccctatagctttttgatccgatacatagtctccctcgacaaatcgcagtttttcacgcagcagaagacttgccggggcaaacagcatcatgtcgatcctggagggagtgtcttccttgtcgagctggcgaaccagcagagcgatactgtcaatggatttgtgtagttcatgcgcactttacgccactactcgtactatcgtcgtgccagcgttggttcaaacaaagcgtaaagacgctgcagtcctctcgggcatgtcctttcggatgaaatagccattgcgaaaagtcatagaatggtcggcatagttgctgaatgatttgcacaaccgatgtaaagaccgattttagctgccttgctgccaataggaaaaatatatatagcggcagtgcgtgcttggaccaggaatcgcctcccagcacgacttatctgcacttcttgcagctgccaagatataggttcgttaagaaaagcacgactatgatggctcctgaagtagaagaccaagaatccaggaaagtggtgacattgaagaggatgtggtgtccgatcaggtgacgccgttccggctgcctgccaaacaaacaacgtaagctgaccagactctcaccacgtctctccttatgtctcctgtcctcttcatctattccacttgttattttcccggcgacatgtagcatctcttctgtcactcaaatgcaacatggtgctctccttatcagtgcccagcttctcccgctccagcacaaccactcccccgcttcgatcaagaaatgccagtaccagctactccgcaacgctcagcgaggcccttcgcaataacccatttggcagctcatcctctcgcacgcggccgtccctagcagctttcgaagaccagaagcgggagcaggaagaacttaatgccgcgcttgaaacactcgtccaaatcttccctgacgtcaagatcgaagtcttccgcgagctgcttgttcgattcgatggcaatagtaggctacctgtctgcgtcgagcagctcctgcgtcataaagagaaatgggtggcagggcgatggaacgttccgtcagcgtcaggaccggaaaatgcaccggcggccgcgggggctgattccgagacgcccggatcgttggtgccccccgacgagcggttccggacggaggattacagggctgccgtgaggggtgttctggttaaggaattcagcgggctgagtcggagtaccgtggatgcggtgctggcggaggtgaatttctgctatcttcgtgctcggcctgttttgcaagacctttcgcggaagacttggcgggcaacattccaaaacatgcttccttcgttcaggcgcaggaaggacaaagatgacagccatcctctcatcctgtggcaacgtcaggcggacggtgaaccagttccccggctcaaggaaaccggatgtgaggagctggatcgcgagctacatgaatcattggtagcgccggtgcttcgagcgcgacaagaggagcgagaacgggcggacatggaattggctgaagcattgaatgaaaaggaagccgaggcggctaatgcgttgtacgagtgcgagtgctgcttcacagatgccacgtttgagcagatagcgatctgctccgacggcatgcacttcatttgcttcaactgcatccgacatactgttcaccaagcactctttggccagggctgggcttcgtctgttgatgttgaaaggtcgacattgaagtgtttggcgccgtctcccagtgaaccctgcaaaggtatcctcagtgccgatctagtcaaacgtgctatacttctcgacaaggctggcctggagacgtactccaagtttgaatcaaggcttgcatccgatgcccttctcaggtcccaattcaaactcatccgctgtcctttttgttcctacgccgaggttgatcccgtttatcatccccccgcaaacggtgttaattggcgttccgcagggacggacttatctctactcttttaatgattttcttatttctggacgcaataccctttcttcttgtgatcgcagggataatctatttaatagaccctaccgcccttcctacaattctcaacaactctctactaaacctgcgcctcaaagtccgcatgaagaaatttacctgcgcgaatacaaagtgccgacggaccagctgcatcacctgtcaaaagccgtggcgtgacccgcacgtctgccatgaacctttgcttctggacctccgagccaccgtcgaggccgcccgcactgccgcagtgaagcgcacctgtccccgctgcggcctttccttcgtcaagtcctccggctgtaacaaactgacctgtacctgcggctattcaatgtgctacctctgccggaaagctcttgggccaccactaaaaacccgcgaccgccgacgacctctacgccaagaaaacatcaaccccatgggcatcggcgaacgtcacgagcccaacctcgatccccaaccagaccaggatgaggacgaagacgaagaagaaaacgaaggctaccgccatttctgcgaacacttccgcgctaacccgggctcccgctgcacagcgtgcaacaaatgcgagctctaccaagatgaagacgaagaagccgttgcgcgacgagcaggcgagaaagccgagtacgagtggcgcattcgacaccaaatggctgctgctggtggcgccacgtccgcgtctacacctgctgttgcgggtatcccttctgtcaatgtaaaccacgacctatctgtcagcaccgcgagaggcgcacgatatacgacgatgtttttacgaccgcgcggcaagagtttttggtactggcttgatgggatgtggcagtctggacaatggaaggttgaggggcaggctcttgtggattggattttagagagggttattgttattcaggatatttgacacttggttcccatcccgtcttctccttctaaaactgaattcttttaaacttaccagcctactttggaataccgtcatggcaagcatgcattgcattgcacggtcgaatttgagcctttgagtcaagattggacagcgattggttatcatacaggctttggcgttctggtttagggcatagcttaacttagcgttgctaggctacacgatgttatgagacatgaatacattctttactctgtgacatatcgtgatcccattcgttatggactgctttgcttctgcagacattctgccttccgttaaccatggcatgaagagctgcgcaaaccgccgtctaaccccggtccggagagaatgtccaccacaccacgtactgcttaaggtgccatattttagacgcccaagagtactatctcgcacctacaacctaggccgcaagagttgacatggacgtgagctcttactatggaaggtacggacgcccatacctcgcctcgcctcccacgtcgagaaccaacaagcctcgccttgccacgggcttcacgaagagtgtgcaatctactcagtcagccggtaattggacagctgtcctttcataatcttgatccggttctgcagctttcagcccgtgcatagttccaaagattcatggggctggaccgggagcagcggcggggatagagccagattaagtagattagccgtgtgagatcttcaggaactggagattggactgtagtcatcagtttactactcagggctcttggttagggtcggcacagggcagggtgtggtttagaatccacattcacagcgccgtcgaattctagggtttcgggaccaaaagcacggaccgccatatacttgatcagctgggttcttaacatactgaagaccaatgttgtcaaggagctttacttaataaatgctaggctgaaacacgacgtggtctgtagatccaaaatctcggtttagatatatgagagaccgatcccatagtgtagcaacccaacgtatgctcgtagttatgacgcagtgacacccaattttttggctgtaatgcccacatcttcacgttccatcagaaccaacctgggaagttgttcgtactccgtaggggaaagccgatgagcgcttctaatgctatgtcaccaatcatatgacctttttgaccgaaggtccacaagggcacagtcgtgcaaagaaaaagaaaatatgggagctgaggcccggatataaagaagtcggaagcggttccaattgcagccaaccttggcaactcgcgcggtgactggcgaaatcgtatcgcaagttgcaaccatggcgcttactctgggagtactggcgctcgctgctcttgggccgcagtccgtaactgcgggggttgttggtcgccgctccgtactgtcagtcagcgattcggactgggatgccttcaatgcgagcgtttcggggcggttgcaagtcggcgtgccgatgcttgcgccctgctacacgaactacaacggacagcaacaggtacggtacagtgttagacagtggcttgagttggctgtgctaacaacaaataggacgttgatcccgaaatgtgcgacaccctgcaacagaaccgcgctgaccatctgttcgtgacggaccagtttggcggctatcaggaatcgaattggggcgggtgccagaggaccggggataactgtgcgatgatgcttacggtgccggataccgtgacccctttgtcgaggccctgcatgcaggggagtgttccgacgagatatgttgacgcgcagagtgtggaggatgtgcagaagacgctgcagtttgccggcaataacaacttgcggctggttgtgaagaatactgggcatgactatactgggagaagctcggctcccgactcacttccgctttggtaggtttgtttggtagtttgcgattaa

SEQ ID NO: 3218 - DNA, 878 bp, Emericella nidulans
accttcgccgcctgatggagacttcgcaggttcccatctttggcatctgcttgggtcaccagctcttggcccttgctgctggtgctcgtactgttaagctgaagtacggcaaccgtgcacacaacattcctgctctcgacttgaccactggtcgctgccacattaccagccagaaccacggttacgctgtagatgcctctaccctgccttctgactggaagccctactttgtgaacttgaacgactcgagcaatgagggtatgatccacaagtctcgtcccatcttcagcacccaattccaccccgaggccaagggcggccctcttgactcctcgtacctcttcgacatctacatcgacagtgtcaagaagtacaagaacagtcaacttgccttccaccccagccgggagactattcccagtcctctcttggttgatctcctgccgaaggagcgtgtcgatgttgcccctactatcggtatgcagaacgttgctgctgcggcggccgctgcggctgctgctaccgcttaggtgaatctgggaaatatattttatgaagtcttggttacggctgggcctaattgtttatgtctgggtcatattgttctagttcaaatatcctctttcaaattgaatatatttggacattgcttctaaacaaacggaggttgtccaatttttatcagtcggccgtgatctcttttaccaatgcagtatggtagatattttatctcgtgtcctttatcattcatctacttagcaacaatcgaaggcgcactcgtcatcaccgcccacatgtctcaacccagcccacagcggaataggccttgcgctagcacccaagcctgtgcagatttgtacgtctccttcagcgtccgc

SEQ ID NO: 3219 - DNA, 1285 bp, Emericella nidulans
cagacctccaatcctgattgaccggactttcaaggtttcgttctttgcgggacgaaacgcagccttcgttggaatcggcgtccagagactgtttggggctatgctccgtactcttcgttctcaaatacctgtcaagcagactaagtaaaataataaacagacaaaaccatcttttggatcccaacagcaacgaatgctatcttcaaggtggctgctggagaccatcaccacgcaaggcgactttccatgcttcttacgtgggtaagtagcagcctctaattgtcttgggcagtgccatgaccaccgacatttctctccgtctgaactatctacgctggacattagtgtccaaggtagtttgaaaaattctcatatcctcgagcacccaactcctactccgtgctctgcctgaatttgtctctagaagccagtgttactcggtgctttcaacggtccctgggctgccggcagcgattttgcaaatataccatcatgtaaggagagcggaattgctctaaagccagtatccaggtactgaataaggcccagccagacagctcagagctctccaggcttagctcagatctcccatttcccgattccgcaaccgtgcaacccgcagtactccgtacagagtctctcctacctaccagtatagaagagaccaaacaacccaagacaccaaagtcacacctgtgcatccgttccctcgttcctgcctggtcctcacatctccctacatgagcaggcatgagcatgaccacgagcatgtacgtacggagcagagacagggcctaaactgcatcagtgatagtcggctcaccgcgggtctcccgggacaaccatcgattggcgatgattggcgatcctgctgccaactcatcagcgcccatttatcacatcacatttggcactgacctctaccagtcaaggcggctggttgggtaggggtattcctggctgccataactgccgagataatcatcacacggaataatgcagttggaacctaaccttgagctcagttggttttgagatatggccccgcagcccgatggagaccgtcgacggagtcttcaagagcacgggagaggcggtctccagccaccggccacttctccacttgtagccaatggaactctgtctacgagagtccagccactttgtttcttgacacttgcgttcaactgttgacgctcgagtctctgaagatggttcaagagagcaagaaccgtggaaccgaaattgagccctggtccgcactttattccagtgcctcatatgt

SEQ ID NO: 3220 - DNA, 1761 bp, Emericella nidulans
gaagaaagtaaaaaatgcggaaagaatttaaataaagatacgattacgaagcaagaagaaaatttttaaatatagaaaagaggtggaatctgatattgtataattagaagaaaccaactaagctatgtaaaaggttagtagagtgttagatagtaaggaatgtgggttaactaaaaaaaaagaagtaatgatggattaagtacaacagacaggaaaggacataacgcagcagtagcagttgaaggggaataacaagattttcaaaagatgtatgctgaaaggatgctcggttgggcaaatgtaatagaagagggtcttcgtattacatttgcgtcatgaaagagcgagagctctatatatccgtatgccgattaaggtggatgtaaaattgtaaacaaaattcgacggtcgaggagctttttgagcccccgatattttgcagtagcccgtcccggaaagagacgcctttccagtaggccactcggccgatttgtgaacaatcaaaagagaggtttgttatatatgcagcatttcgaaaaggcaaatatgaccctaacgaaatattgctacatgcatgttgaaatctgaggaccataatgcatgagaatcccggccaaacatgatggacttcatttttccaactgaaccgtaatctcctctttttatcttctgtcttttaattttagattctttgatctccccaccgcgaatacgtctgagcaacagcgcagggttcccggaaatgaacccacgcttaaggtattggttgttcctgaaatggggcgcttggttgaatgtatctagtttggttgacatgccttaaagtcctgtattattatacaatcagttagaatgcagcttcttgaaatatgcaatacacctcggggagaagcgcagtgatgcttgatgctggggcctacacaccacgcccggcaatgggttctcggctacgatgcagactcgccaacatcgaaggtggaggtcataggcggcatattctcgttcatgaacccaaacagcagatcttagccgagcagagaaaatcctgaaagtaggccgactgcagctgttcaaactcgcctgcatttgcatcgtcacagcttgtgctgaagaactgcccagaccaagcactgcggcagtggatctggcgctgcggctagagcagatgctgaagttcgggactatatgaacacgaattgcgtcagcatccgatcgaccgaagtctgctcgggtatgatccctccatccaaggcgggagaagacttacagggcagttcctgcacatcattgccggccatgaacctacggataatgcgagccgtatctggagctccagtgttgggtatggcaagcgcacctatgcattctaagcttaggctcagcaatgttgaggattctagatttacgtagcgggtagacagaccggtagcttagggtaagggcagtgatatggtgagctgctgctgcgcatcgcttcacaagggtgctcatacttgagggccagtggctttgcaagccttattttgcgcagtgatgaaagaactattgatcaaaataagaagtgagtgatatggtgctaagcctatgaatccgtattccaacgattggtgcggactgaccagtacccttttccaggtgtaggcgtaaacataactgtctgaatctgtcaggtcctactatgtacaaaagcatgttgttcgtgaacctaacagttatattacattcctttaaagctaacacccaattgacctatattgtcct

SEQ ID NO: 3221 - DNA, 1070 bp, Emericella nidulans
aagcagcgcccgtcaagcgattcgccccggccttgggaaccaagaggcgggggactttcttttcaggaatgggctactttagtcggtgaaattagttacctcggactggaagcagagatctctatcaagccagtttcggagataaacgagatccttcggtgatttctgaaaccctggccctgttcagccctgttcagcctgcctaagctggcctcagctgaggcctccacccgacaatgaatctcatttacgcacgactcatgtctcattagctttacgctgacctagtcgcggtggatcagcaagcctcccctcttggccgcataccgctaaaagttactaaggcttagagaccccgtccccacaccgttttagcccggtccttttggccctgcactagccctgctagtcggcctgctcgttcccaccggccttgtccacctcggacttatacgacctagccattggcaggctgggcgggggcgggctctggctgagatccctagtaaagagggaaagtcgaccttgttgtcataccgtcccaagaacaagaaagaacttactcaccagagaaagacgtgacccgggcgtcactgacgagcaatgctgcaagcaatcgtgagcgctgtccttctcaccgtgtcttttggaggagagcgggctagcgcggtccaggtctggcagagtgtggacgaaatatctgctgcagtgccggccgactgtcgggatgcgctgacctacaacatcacttgcgccaacgatctcgttacggcgcaagatgctgtgaacggagcagctctggtaggagtggcggcgcaggcctactgcaccgcgcaatgccgtgactctctgcagacattccaggagaatatgcgcacaagctgcgggaagcaggagtacgagctgtatgtgaacagtacgacgaagcagtcgccggcagtggtcgccgacggtctggtgtgggctcatgaactgtcatgcatccaagactcgtacgtatcgctatcccacccagcctggagcggcgactgtgcagacaccctgacgcgaaacagctcggcttctgcctc

SEQ ID NO: 3222 - DNA, 2431 bp, Emericella nidulans
gctgtactggctgggtatctgggcgacacgaaggaacagtgccatcactgccgacaccaggaaccagttgaagaccacttgctgcagctggtaaatatcagacgatgcgtggagctgcgttatgaaacgaattgagtctttggccatgtcgactacggtctgggtctcgtttgggaagcgcatcatatgtgctgctgaatgtaggacagggcgatggatgagcatccgcagctggtttgcccggaggtacaccaaggagcggagtcgccggacgttcgcgtctcggcttctgcatagcctgaggtacttcgcaggcgcaaagagtctggcagagcagcaacccactgcaggacttgccagtctaggtagttcatctcgtccttcttgagctcgttggtgttattgaaggctgatataaacctccagaccttagctgctatcctactataccggaccatcacgcgcaagtatgagtcctcctcctctggctctgggagccaggggtcgatatcagagtcatccatgctaaacggcatgcccgttccgaagctccacctcagatccagtacccgaaccgaccaaaacagcttgagcacgcggttctttcctgctttcataatagcaggatgcttgagtgtttctcttcggtgcagacctttctctaagcacattcgttccacaatcccgatcgttcgccaagcaagggtctcctcgtcgatctggaaatacaatatcgcctacgcccattagattcgttggtactccagaggtgcgacttaccacacgcgcgagtaacgtaatgcttttgagctctggggctgcccagacatagtggtttgcagcatctcgaacagtcgcaaacaaactcatcgctaactcactactcccactcgcctctgctgtcagagcgcacgcgaataccaatcgcaggatgtgaacgtcatcactgtccaactccccaatgccttgtgcatgagcaggcgcttgaagccagggcccggtttctgtcggtccgtacaacaactggacattatgtagaagctgatcaagctccactaccgggtacatgactcccatctcctcttcatacactcgacacagccggagggcttccgtcttgctgatactccatagtggatccccaacatgacaggatcctggcgatgggggagtcggcagtggcgacggttcccgcgttatgtcgccttcattacgctcaacttcaattccgcgttccttgagactcgacttggcaagatcgaagctaaaacccgacgtcgtgggaccctggaaagtcaattcctttgacgccatggagatacgcctgtgtagtcgcggtccagcctcggaacgtggcatcgaagctgatgcattactctgggcgagcgagtggacagacgcggtaagggcactaatctgggcctgcatggcattcatctgctcgtacagccgctcgatcccactacccagttagcctaagcctcgtcaagacagcacttactcacatattctcatttcctccaggctcatgagaattttcatagacgcaggatatgttctgccgaccacacctgcggcacggtcgctccccgttacacttgatcttccgttgtctgcatgcgttgcttgaaactgtcagcaaggtcggagattgcggccctagaataatggacagtctacaaaccaggccttagcaatgtactttctccgcctcttcctcggcgcagcatcagcttcaccctcgcgctctcgatcaccgttgacgctgacggtaacgctctcatcaggacttcgttcccagacgctcggatcgtgggtggagatgggcggattcatgatgaacgtgattgattcagagacggaggcgacaggggtagtcgggccggcaagaaaaggagttggaggtgagacttggaaaggcggccgacgttgacggcgggcggcctgagcgcaggaaaactggggaaattgcggggaatggaattggttccgctgtggtgtcgattgctcagggattcgcactcccgaagaattgtggctgcttggtactactgatcaaccatttaatggtcttgggagattgcatattgttgcatttctattggttgccttatttttatttgcgctgttgctgccctcagtatactccaatcgaccatgtcccagctaagtataaattgcgctgtaacttgcacgcaagaaagaaaagaaaaactaattcaggtgcttcgtcctctcctcactctccgcaatccatttccttaccaagacaggatctctcggtttaaacccaaccttgaagggcttcggctccgtcgtcaaagcggtcgggatcgcattacactcaatcgcatcgaggatcggccgatcctcagccctcttagctggatgcatggtaaatgctgtgatcagacggacgtaagcggtgaag

SEQ ID NO: 3223 - DNA, 2955 bp, Emericella nidulans
ccattatcgataatgacgctcttgacaaagccgatgctgctaatggagactacgaatcaagtagccaaggtgatgactcgcggggaaattcttcgtcatcaagcagccacaccagcccaagtatccaagccactacacctgatatcaaaccgaatactccagtgcctctggatgtcgacgcagatcctctcggccgaggatttcagcgaactatgattcgcgctgagcctgcctcctttgcccagtcgagactatggtttctgacacagtatcttcatgatccaacaacgtacaatgttaccgtccgttatgatgttagaggaaatcttcctgcttcacgaatcgtcagttcccttaacagaactatctgccatcatcagtctttgcaaacatgcttttttatggactcagataaggaaacacttatgcaaggagtcctttcgccgtcgtacagttccatcaaacatattccttctggaagcgagcagacagtcagagaagaatataaccggttgcgcagtcgagtttgggatctccagataggggaaacgttcgcggtcactgttgtctcgttgtcgcccgagcagcataccattatcttcggataccaccatattgtcatggacggggtgagctggcaccttttcctgcgagatctggacttagcatattggctgagaccgctccagtcgcttgagatgggatagatcgtctggtcaagagagcaatttcagtcagcacagcgagtatacttcttctgaccagtcgagtaatggctctagcagcgctcgcctccgccttcggtcaagccactgctgtctatgggtctcacgagctcttgcgagccgctcggctgttatgatagtcttgtcatcagtgtccgtattgagcgccagcgtgcttcgcacatccggcgtgtcagtcagtcgtaaaaagtcaaacccttccacttccatttagccgttatccaaagcatcctctgccgcttgctgaagacagaagatctttgcattggtgtggtggatgcaaaccgaactagtgaagctcattcaggaaccgtgggatttttcctgaatcttctcccggtccgcttcactacgagggagcacagcacattccaagatctggtctcctcaaccaaacgcacgatcctaggagccatctccaactcggaggcgccatttgatctcattctcgaggatttgaaagttttgcgaagcatagaacacagccccttgttccaggttgctgtcaattaccgcatgggcgccatgctccaagttccccttggagacggcacaatggaggttgcggccgccgacgatgcaaagaacccatacgacctcagcttcggaatcacggaaacttcaacggggacttgcttgttagaactaactagccagaaacagctgtacacggagcagtccacagagctcttgctacagatgtacatggacgtccttcgcgcctcgtccgacaatccttcacttcctgtaaatcagctaccagtcactcttgagccgtcaaccgggaaagcccttgccgtcgctaagggccctagagctgagtattcttggccgaacacactatgggaacgatatgacgctatccggaagtccttccctgaggaaactgccatcaaggacgggaaatcagagttgagctactctcagctgaccaggagtgttgagaaactcgccgcgatgttaatcagccaaggtgttaccgctggagatagcgttggtgttctccttcatccgtcaatcgatgccattgcctgtatgttagccttgctgcgcgttggatgcatctatacaccccttgacactcgactgcccgtggcccgattgagtatcatcgtcaatcgctccaaatcttccttggtcttgtatcacgcttcaactcatgacgttgctctggaacttggaaagttctccaaacttgcaaatgttgaggatatgtgtgaatcgggccaagcgcaagttccagcaattgcgcctcaatcaaatccggcatcttttctgttctacaccagcggcagtaccggcacacccaagggcattttgcttagccagcaaaactttgtgaatcatcttgctgcgaagaccgacaaactgaatctcggcagggaggttgttttgcaacagagctctttgggattcgacatgtccgtcgtgcagactttctgcgctttgggcaatggtggaactttggtcatcgcaccgaaggaagcgcggggagaccccattgcgctgtccacaattatggcaaaggaacgagtgacgctgacgattgccacgccctcggagtactccttgttgcttcggttcggcctagagcaactccagaggccctactcatggagacatgcctgcatgggcggcgaggtcgtctcgcggcagttggttcagcagttttgtcagctggaccatcctgatctccagctgaccaactgctatggtccgacggaaatcactgctgctgcgacgttccaagacatctctctccaaatgaaggaccagagtaccaccgatggatctctggttggaaaggccttgcccaactactcggtctatatcatggacgcttcttccggatctccagtgcccattggggtcaccggcgagatctgcatcggaggccttgtggttcactgggtatctgatttcttggaacagacccaccgaaattcgtcgggatcccttcgtggccaaggacttaccccggtggacataagtcacaacgggaaatggtgttcagggatggaccctttttttggcccttgacgggacacaggcaaataatggtgggatggccctagatgcacacctctcccctgaatacgggccaacccaactgcattcgtggcggtccatgttggtcctccttggacacccaataaataattgtgactctccacacttccaacttagtcccctcatacaacattatgtg

SEQ ID NO: 3224 - DNA, 1378 bp, Emericella nidulans
  unsure (1)..(1378): unsure at all n locations
aacaaagcccaccctacgaaaatgactccgatcgatatgagatcggtttatcagggtttacccaaagaggtacatactctacatagtaatattccatgtaatgcagaaactgtatgttgagcctctatgcagaagcggaaattactgcgtttgggaaaattccgacgccggggagaaaaaatcagaaagagtcagtaggagtggggtcgcttccagtctgttaaagtctgttgagatttaaaaaaagaccgtctaaaacctcagttagctcagactctgcatctcaacagaccttgactttgtatacaactgcatacatcatcattcattgcttgtgaaagccaccggcccgaacagagctccggggacctccgagagcacgctcgttggttcaatccatcccaattccacccaagacgaattccccacgggtcgagagccgacccctcgggaaactctggcggccaaacggacttcgcagcacatgagcccgatctcaaggcatttggatcagagactcccactgcgtgaacttaactcccccttctggtccgaaaggattgcccaacccccagtcgacgttgaatataaacccctagtccgctctacccctcctaacatctctgatcctcaaccttctgccataatgtcgactcaacccgctcaccccaccttgctcattccgggccctatcgaattcgatgatgccgttcttcagtctatgtcccattatgcgtgagtttttgtcattcgcagtccatcgaccccaactaacctgtcaatcaccagcgagagctcatgtggccccggtttcgtaaaggtctttggagagacattgtccatgacccggaagctcttccagtctacaaacccggcagcccagccctttgtcatctccggaagtggcactctaggctgggatttcgttgcttccaaccttgtcgagaagggcgagaatgccctcgtcctgcactccggctacttcgcggactcgttcgcgtcctgtctagagacatacggcgccaatgctacacagctcaaggcacccattggggagcggccatccttcgaggcgattgagcaggcattgaaggagaaacatacaagatcatcacaatcacccatgttgatacctctcctggtgttctaagcgacatcaagacggtggccaatatatgtcgcccagatcacccttaaactttgggtgatgcggatggtgtatgccatggacgctgcgaggaaattgcttttgacgagtgggatttggacgacgtctctcccgcaagcccaaaggcccttggctgccctncgggctcagcatcattatgttctccggcgtcttatcagaccttaatgtccgcaagactccctcttgtca

SEQ ID NO: 3225 - DNA, 1274 bp, Emericella nidulans
catcacaatcgggctgtgcttctcattcaactccgctttggtcatgctatggttcgaattctcatcgagactgctcagggcgagaatcaaagcaaaagggccggatcgtaaagccggcgcatacggtttgggtttccgggccttctttgccggttggccttcagtgtcaccatcagtagactttcttttgtccgctttggctgttaatgttttttagcatatgaactaaagcaagccgttgacagaacctcaccagtccgtggatcttcgggcatgggaagcccgtgctccttgcaatactccttgagtttatttgtgagacgttcgcatagtttaggtcccaggccgttgagttgctgagcttccgaggggtgttggaacgtcaagggacatgctttcatcgactcgtacgcctttttgtacctggatgactattagctccccttcttggttttgacgaggacgcatcaggtgaacgcacaccgtgactcccttggtattacgctcccgggcctggtcgagccactccctaatccaacccagaagcagggggtatagaaaagtatcgtcgctcatggcgttgctgagttgccacccgagctcaagtttccaaagtctctcacagacctcccatacctagatcccacagcaagattgaagcacgaagaaatcagcccgcgctcagcctgagtctctttggctgccatcacacggcaaatagagctcaaaaacagcttggttgctccatgggagtcgcgatcgacgcgtgcttccaggttaggacgcgaagtcacgtgcgatcccgctttgccaatttcaggcagaaaggcaacaattgtcttatgatttacgtacttcattgttagtttagcaacggaaggtactggtaaaggagcacgtaaaccaggccagtttcgcatagaatgccttatctgcgagaaaaaatggtgtatactgtgttgcacaacgcgacaggccgttaatgcaaccaaggttctactgacgtcgctccgtagggtgtgctggacctgctggttagtattcatacacagagttcaatccatcggtctaagtcgtttgcacaataaatcaactaagacctatatgactaaccgcagggctgatatttatgtacagttgtgggaatcttgaattgacaaagaataggctctccgagtgttgtacacttcattggctcagagaaagttgatagtctctgactgctgcctcaaacgagctgtcgcgcttcattccgagagagattgcctgagaat

SEQ ID NO: 3226 - DNA, 6446 bp, Emericella nidulans
cttcgacccttcgactctcgacaaccaccacttaccgtccggcacatatccatcagtcggtaagtgcgcattggtaccttttgtctgttatcgtcgagattcaacacagggaaattattctgctttcctttccgcggaatctacagccccgtttctaccaatacccaatctactttgccatcgacatcacaccattagcaagttctgcaaacgacaaagttctaacgttttggttccgcacagtacgccgtccactcgatcataatccgacaagatgggtaagggaaagcctaggggattaaacgccgcccgcaagctcgcgaccactcgtcgtgagaaccgctgggccgatctgcactacaagaagcgtctcctcggtaccgcttacaagtcttctcctttcggtggtgcttctcatgccaagggtatcgtccttgagaaggtcggtgttgaggccaagcagcccaactccgctatccgaaagtgtgtcaaggtccaactcatcaagaacggcaagaaggtcactgctttcggtgggtgccctatgtttcctatttcgtgtttcggcatatttgcgatgagtcgagagatggagcgcatgggattatggaaaatatcagaaccctgaagaaacacaactaacaacacttctcagtccccaatgacggttgcttgaacttcatcgatgagaacgacgaagtcctcctcgccggtttcggtcgtaagggcaaggccaagggtgatattcccggtgttcgtttcaaggtcgtcaaggtctctggtgtcggtctgatggctctgtggaaggagaagaaggagaagccccgttcgtaaacgacaccgtggcgagaggcgacgaacgttggttcaagattgatatccgagaagtcgacggggcccgtttccattgaacatcgggcggtatggtctatggatctggaatttatggttcaggatggatgacctgcaaaaaccgtagcagatactacgattgatatactcaaaagacggcgccatgattttttatttctctctgggaagggccctaaaatcaagaaatttctcaaaaccttggcttccagacgtaggcggtcgcggcgcattatcaatgctacttcccgcttctttgtaacctgtaccctagtgcttggctgttgactttaagcagtataagctgaaggctgcacaactcgaaccaattcctgagtgtcccttcatgtactacgaggtatgcatgcggcatctacgctcattaggcgcctttattaccacgctggcgtgcataatcctactttaaaaacggcgatcatgaaacgcttttaatccttattttcagcgtagcctatagtgattttactaaaagctgatatcctccttccggtagtggtcagacacgatacggtataagtatgacggcgcgtgtccgccccttgacaagaattagttacttccatgtgaaaaaggtgatgagagactcacaagttcgtgatataaaggtcaactaattccgcgggaacataatcatataacggattttgcacgtcaatctggtctaccaggtcgccatcttcgtagtcaatgactttgcttgagtcgccgtactcgattaaagattcgaaatcgaaagggtacaccgggctgagcttgtatacaccgctaacaaccacacatggcgtttggtgcaccttggctgctcgggcaatgacacgggtgcctgctgcagcaacgagaccgccgttggcgaggacggaatgtgtaccgaggatgaccttgttcacacgagacataagggcgaaaacagcggagtcaggtatgagaatcaccgtgatgccgtgagcgatcaagggcttttggaacgattcggtgctgaggatctcatcgtcgttggaggcagcaccactgacagtggcatgggttgcttcatggttattagggtatgattcagcatggatgacggtgaacttccgcttcgcggcggccttgaggaggaatttctgtacagtcgtcgacgaagtatgtgtgaggatgatttcgttagagtgaatgtggtcgagcgcataggcagcaatctgatcatccacctgtcccaattcatcaatgatctcgttgataccatccaggacttcggcgcggatatccttattctgggtgtgcccgggcaggcgtccggatggtgagccggttgctggcgtacccggtagtgacgtttcgggttctggatgagagagcagactgaacatagaaacgggatgggtggctagcgaagatataggttttgaggcacctctgtcggagccatggaactcggacggttctgcgacattcacattaacctcactttatcagcaaggcctgaagagagggcttaccatctccagcacgaggtgtctgcggttggctttcggaacccgcatcgctcaaggtaaaatccccgtctctgtcatcctctgcctcgtcacggatcaaccctagcacacgccgaacaatgttcccgactaccatctccctgggctgtgcggctatcagccgtcttcccacgctctgcacgcgctcgatgagttttgaggcatcgctcgtcctacacgcggatatgacgctgcgcaaaaggtaagcagtggcagttgcgcatgatctagagtgtcggatctgtcttcgtttgagaagtcttttgctgcatcagttttgattgatcgaacgctagggacaattcgggacgcacgagatcagattatcaatagaagtatcgatgggattggtcttcagagacttgagaaacgacgctaaccctggcgtcaaaggagcagaagtggccggcatagtgtcttttgcgataccggtgctattgtgtacaaggtccttttgcacatcagtcagcgggactcttgagtcagggcgggcgacatgcgggaaattttacctgcacaacacaactcgggctccaggcattctaaccttcttaaggcgggtgtcacgaggactctggatgcaggaaagacttccgtggagccaagtgagagtcgatctagtgcggaggggtaaatttggcagagcgggtgaggatgatggggagggaattttgtgcccgcctttaagtctttggcaataacgttacagtctactgtatggggagctgcacccgcggcggcttttgcttggcccaaccgccgccgtcattctcatagcaaatcgatcgtaccgttttccactgccgactcttcatccttactcctcttcaactactcccctcggttcaggcttattcgtgcctccctacttattcacttccatccggtcactctacttgacctaaacagtcttcgtgtctcagcttgaaataagcttttgatctctgctctcttaactattctccgttccgcccaccagaaatccagggctgggaggagctgtggtctgaagcacgggctgtcaactggcgcattgaggttggtacagactgaagacatctcacgtcctgccctatcgatcctgtccctcatggttgccttgacctgttcgctgtacttttcgctgcccctcggaatgttccggtgatcgctgacttgccgcgactcgcgccccagacacctgcgccagctccgacacccgtgggcggcattggaagatgaactcgctgaatatcctatcggctcgagtcattggccagtcctcgcattcgaagcgtagccgacagcgatctcactctcacggggatgtttctcctgtaatccccccggacgaccttgccaagctccgttcatatagcgaaggcaactttcatgcacacgatacgaatgagaagactcgccaagacacgcccgaaccaccggaggatgttcactttgacgagcatacactggacgagaagtctccattactacatggactgccaaagagcccatcctcactcgctactagaagctccctaggtctaatcgcacagcggctcctggaagcggtcaccgagacaatcaagttcatcctggaaacattggtttcgcctggggtgtatgtagctcagagcttcagagatgagactgggagctactcgcctttggcgccggtgagaaagcttcgacgctctatatctggtccttcgtcctcaagtagttcaaacacgcctaacaagtctgctactcgaatggaaggcaagcgacgctctggctctgctaaaaaactgagaacccattcctcccgagattctgttgcttcgagtacttccgagtcggaaggtgatcgccgcgtaatgaaaggtctcacaaatagtcgacctcgagccgctaagaagacctcaagtgaagactcggtatcagacgggacggccccgcgaaggtccattcgaatcaaactcaataatgaggaagctcttcagcgacaaaggcaacgccgggcgcggagtgctgacctcgaccggtcgccgcggaatggtagtcacgactcggtcgacccagatagtttgaagtcgccagcctcaccttctgtgcacctagtcacgcgataccctcattctccggtgcctcctcgaccgctcatcccgtctcgcctcccgtcatacacggccactggcagaaacgccaggattccgcagaaaacgctcgtccttgacttggatgagaccctcatccactcactcgctaaaggtggccgcatgtccagcggccacatggtcgaggtcaaactagctacaccgatgacgactgcactctcacctggcgctcctcctactactctcggacctcagcatcccatcctatattatgtacacaaacgacctcattgtgacgaattcctacgcaagatctccaaatggtacaagctagttgtctttaccgcaagtgtgcaagaataagccgatccagtcatcggctggctggaacaagaaccggaaaattcttcccaagcccgggttcctcccgggccaaccagatgttccctttcccgaaacgggccgccctataattaaaaggtcctccagcctcgggttgacgccggtatcctgacgcccgggctctatgatcttggacaacagtccaatgagttacatctttcatgaaggtaggctgattatattttggtccaatatcttgagcgaatactaacaccaatccttagataacgccattccgatcgagggctggatcaatgaccctacagataacggcctcctccatctcatcccaatgctagaagccctacaatacgtcactgatgtccgggcttttctagcactgcgtagaggagaagcagacgctctatgatcaagcagcttgtcctcgacgcaaagccatgcctagcttatacttgttacccttctcagctctgatatccgcactgttatacctaacttacctaatgcattgtaaagagtccggtttctttcttgaattggcagcatgccgagtttttagcattacaattatcattatcctcccatacccccttccttgtctattgttggcttactacattaattttatctgctttgcctcgcctggaatcttcgctgcacctctcccctcgtctcctcagatgtgtattactgcgccgagtagatgttacttgcacgaaacataaagctaacgactgttactctccgcatatgcatgcctgtttactccataccaggttaactgatgtatgactaactaatatccaccacacggtccgtaacccgacacaaaaataagtattgaaataaaatttaaggcatatcgaaagccttgccggtcaccattgtatggccaatccagtatcgtttgcattatccaggatctggctaaataagaaatcctagtatttagtattcgcgggttctacagggcccggtatgcttccaggggcttctacacatactagttccgatttcggctacaagggcacctgacgggaaacgtttgcctgatagggaaagctaacgctaatctcgggttccgaggcttctaaacttggagaccgcggggctaagactacagagtccgttctatacgccttgataataaggtatgggcatgctatcgccttgtcaggtattgaatatgaatgtgattttgtttatattttactatgttatatatctaagggtatagcaatcacagacccttagcacgtttcgcatcggcaatggcctccttgagggctgcaatggccttctcaatgtcatcccgagcggggtccataatgctaacacccatgtgcccaaagcgaatgtactttgttgcaacctccttgtgcaggcctgcagcaaagataactccacgcttcagcagaccaggaaggacatctggcggggccagtccatcaggcagccagatggctgtcatggcatgagcctggttctcgaccttggaggccagctgctgcaagcccagttctgcgacagcggccttgacgcggtcggaggaaaggcggtgtgcggcgaagcgctctgccatcggccgggatgtggtttg

SEQ ID NO: 3227 - DNA, 2732 bp, Emericella nidulans
tcacgtcctttctctgtatgaccttcttggccggcaacggccagcccgtgctccctacttctccaaccaatgacggaattacgaagcaagctcgtctctccggtacgccaccgaacgattcaattttcccaatcggcttcccgtactcaatgagcggcgttccgtgcgccagcgccgagagctgcaacccgctcggcgtgacaagcgggtacatcctgatttttggcacgtcgcccgccacaaccgagggcacggactgctgtaagtgcgagtagattatatactgcggcatttccttgggtgagagctttgctaggacagaagttgggtgcacgaagacagccttttcgttgatgtctgacgtgcttatgggggcatcacgggaccggaagagtgtaatgtagggcacatcaattgcgcgctttggtgtacgggccatctccggtgggacgggggccaaatccgcacggatggcgacgttgtcaatgaagcccgctgtgacaatctgtttgagtgctttaacttgtttgtcgcttggttctggtaatcgggcttggtaggcttcaacgaggcccgggttattggtgcgtacaatatcagtgagctgtcgtctaagctgcgtacctccttgagtgccttggcgcgcaggaacattctgtcgcagaagctgtcggcgtccgaagaggaagcatacccgtacgcgcaaattgcggagaggtatttaagagcgtcagaattgttgtcaaatttgctgaagaggcggtgcgcgcgtgcgtagtccttgtgtcgtttctcacgtgctgtatcttcaagacggtctgagttcttataaacgccattatcttcattgtcttccttgcctggatggggatcgatttgattctccggtacgaagaggtctcccactgctagagcggcgacaagggcaatgacgtagggcatacagccgtgttggtggccaacgtagaccattttgccgaatcggggtgagagagggtatgtggagaggctgttcccgacaggtgtgatcttgccatcggctgtgagagcgcctagattcttcaaaagtttctcggcttttgctagaccctgacggctgggtggtgtaggaaaagggaagttaataacattgtggagacccatgctcttcatctgcaggacaaccccctcgatgggcgtccgcaagatttccggatctgtgtattctgcaaactcgccctcatatatagcagacgaatacagtctgtagcagtggccaggcccagttcgaccggcacgaccggcacgctggtttgcactggccttgctgatccagttgatctgaaatttctgtacccctgtctccagatcatactgtttctcctttgcacggccgcagtcgaaaacataccggatgcctggaatcgtaagagaggtttcagcaacgttggttgctagcacgataaggcgggaaccttcaggtggcggttcgaacacgcggagttgttccttggtggggagttgtgagtagagaggcaatacgtgtacctttgtggatgaatccatggcttcctcaccctcttcgccaacgttgaattcttcgtcttcctcggggtcatcgagacctgtgatctccaggtcgctgtcgtcgtcgtcgtatccgtaggcgttggtattggcggtatttgtgatgtcggcttcgccgatttcaaggtcctctgcctctagtggtgcttcgtttgccgaaatttgcactttggcgttagtcacctcccctcgttgcgttggcttgaaggcctgcttcaaccgcttggagagctgtctaatctcattttggccggtcaggaacacaagaattgctcctggggggagtttacggtgccctcttgagaccttcctaaaggcctcttcgacataatcacgatgcgtacgtcgggagaagtggatggtgacaggatactggcgtccctcagcctggacaagaggtggcgggccttggcggaagagactagcgttctgtgtgaagtcggagatgcgtaaagttgcagacatgattaccagtttcagaggtttgactgatgggtcttcttcgctcatggttttgcgcaagtcgacgatgcggcttaccaatcctattaggatgtctgtgttgaaccctgcgctcgggggctttattaataacgatgatggagtacttggtaaggaaaaattttcagcgattttgcgaattaaaataccatcccgcatgaacttgatggctgtcttgcttcttgcagtggtctcaaagcgaatttgataaaaactttggaggaaaacggctctattaataaccacttcttttgcaatttactgggagaacttgcggggtgtgttgcgcccaaaaacccggttccccgttttgtgttcctaaccgacttaaaaaaaatgttggggcggttgtttacccttttctggggcccaaatataaggaaagttttttgtgtcataaattttttttttgccacagaggggtgtcaagcgtttttattatttggccgacttataataaggtttcctccgtggcccttttgttaaaattattggaggtttcccctctaatagagtagggtcggtgagggaaactttatattgttagaacaaatatttttttttgattattttgttctgtaatacctattttatattcttattattaattagtcattaactacttttttctttcgtaattatatttattttctaaatatttcttt

SEQ ID NO: 3228 - DNA, 2367 bp, Emericella nidulans
cttgcagtgggtgcgattatttcgcatgatgtagcgccagttttgtactcgtgggccgggctgttgcaaatctcctgggtccggtttagggagtttgagggcgagatcgactgaatcgccaatgtgattcccttcacctcggccatgagtcacgtactagagagcgtcccgcaggattgtgagggacgaggactcgaagggaaagcggctgggcagataccgcaggagccacgatgatgccgtgaaacacatcctcgtttccgaccacagattcatctttgtgcatggccgccatatgaacggcgcgcaagctaaccccgtaccgttggcccgttgggaagaagcgcggttgttccgcacttggccatggccgaaaccaaggtcgataaggccggatgatgcagttcagatttgcacgagggatttttctaaaccaataaaatgattcgaggtatgtcgcagatggagatcaagagatgcaaagcaaaagtggacccgaccagtcgggtttagctggagatttgtcactttagcgactttacggagtactactggccacgatgctgaggctgcactctgcagccgctgcagatgaacaaacaaagtatcaaactgcgcagacaattatgcgagagtacttgtcatagttgctgagctggatccgtaccctggctcccactgcatatgcatacttgatatgccatgaaagccaattttttttttggcggcttgaatagtaccgtcgaagggccggttccgtccacagcaaaaccagcccaagtgacaattcacattatcaactcctcttgggcctccgcttatccagaaggactcgtgaccagaccggagagccttgaaacggacacaaaatcatgagaatcgccagaatcgcggaagtctggagtctagcgacccatatcgccttactaccagggattaaagggattaagcatatgccgctcaatctatactataccgcacatttacagaaggtcagtgcgacgataaagaaaaaattactgtttaggggcaattttaagaccctctaagaccaggtatgaatttgccggccacttgccagccaggggaagccctcaatgaacccgagcctaccccgggagtctgacccgccgcggaaagatccttgttctttacaaatcgcgtggttcgactgtctttcccgacatgctaaccgaacacgaacttacggctggctcgaatcctggccttgatttcgcgattgccaaggcaattgagctcagtcccatcagaaaacacaaactacgcacacttctgatggaattttcagagtacgatggggcccaggtgtggatgagactacgaatcccccgttgaacagacggtgagagtgaacaagcgttaaggctcaagactcagagctgagtccaagctcgaaacaaatctggagcctagagtggaggactggcacagaccaacgaataacaacgccatatccgccaaagatgctgttcaagcttcggctctactctcgggccaagactgttagactgaacagttcacagactaaaattgaaggatcaagctgcttatccaacagatgatcacaacgcgggcatggccgggcggccctacagtacaactggatatgatggtattactcgagagtacttctaccctgcatgctgcaacagctgccgagctcggttgcacttatcagcttacatggaattgctggtcgcatatgcataataaaacctcgtatatccacctcgctcttgggatcccgctcctgctgctcaccggtacgtacaccttagacagctctgctatatgcattatgggcatcctctcctatcaagatactatcatggcatcttatagtgccgactacagggatgctagtttagcaccgtagtccacttaggtaccagaatcgaggttaataatagtaactcggctcttcaagactttgcggtctggatagagttgccgtaccctacatttagatatcagactgtggccaagtcacgggtactgtaaaagcgcttggaatggctcaggggaaacgagaccccaaggccgattttgagcacagtgagggctggaaggttagacctaaccagagcaagaacaattctagctggtcgcgggctggtctcgaccagctcgatcgctcgtactactccatcgcctatacgtactctcgagtatatcgcgagcgtccgcgatgatcgatccacgatcaacaagtcgcagcccgccatctacacaaattctaaatcggaacgtgatgttgtctcccctgccagtcagtgttctgatgattttctcgatgcaatatcgctgggcacaaacagcgatccctatagtagtgatatatcgcac

SEQ ID NO: 3229 - DNA, 533 bp, Emericella nidulans
ccaaatcgtaatatacttactttgacactgtcaacgcctcgtctaccgctgcagttacaagccttaaccgcggaaaccgttgcattatcgtctcgagccctttcttcgacgcaaccagattcacaaagacgatatcctcctcgcacacgcctttctctttcagcacgtcgatggcttttatggcggaaccgccggtcgcgagcattggttccaggattaaaacggctggccatcagacatttcagttaggcaggtaacagcaagttcaagaaagggacatacactgctccgcgatacccgctggcagtttcgagtacagatggacagggagactcgtttcctcgttgcgctggatgaggagcttgcccatgcttaggttctcgctggacacagacatgatagatgggtcagcgaatgaaacaaccactgtatacctcgcaccaaacccccacctgaccaaaggtcgtaacgtacccgtaagcccttcgtagggcagtttcaaagctcgcccctgcgcgaaggatactcacgcc

SEQ ID NO: 3230 - DNA, 1475 bp, Emericella nidulans
  unsure (1)..(1475): unsure at all n locations
aaacactggattgttgagttcatataacaggtaactccgaaatttgccaatccggtgcgcggaagtttgagacgattaagcaatgagttcgacgtgtaaagcgcgtgcttggttgctgaattttgtctctgcagcggcgcttgtatctgccggccatccgacacaccgctgtagctgggacgcggaacagcaggtggaggtcttgaaggagcaataggcacatgagacgcatagtcgggggtcaaaggtctgggctgggctgttatcatagattgctgaatattatgaggttccgggaaacggcgcagaaaatcctcgtacgaacgaatgaagggggagatgggagttcctgcttgttgctccggctcgggctcctctgagaggttatcctctccaagataggcacttgcgtcaatctcttctgtctttgacttctccaaccactccgtaagctcatctgggttcaactgtgaaagttttcgaagcctccgctttctgatctccagactggagttagcgctagcatatgtcgggactctaccgagacggcgtcccggcctcgcaacaggccgcctggtttgcaaagacgctattacagcagcggtagatgatgtggccagcgactgttgccctaagagatccatccaagcgtcgagtcctcccgctagaagcataggtggccgaccatccttcagaggtttgtaggcattgaactcgtgcagtgtatcatacaacgccctcaggtgagaccctgtggtcccccccggtgggccggcaaggtagctgttcgacctggtactctgatcgtagtagaccaccatatcaaactcatttcgcctctcgaacaacgactgttcatgctcaggagacaccaccaaccgctcctcaagctcttctgcggaaacgttctcctttaatgccacgggctctatgcatatgatcgatttcgcatatacatggccgctgtcaaaatcctctcgggagcggacgtcgatcagcaatatgctataacgacggaggtagtccagcaactcctgggcgctgatagtagatctgtgcggtaaatcaagcgtactactactggcgcccttcagcgcatggacgccgttcggtgttcgagacctataaggattatcatcggagccattaggactttggctgccatgaggagaatttgcaagatgggaatatcgtgcattattcggacgaaagttctctgttgaagttctcggcgggttagacggaggctgagaaggtacggtgtatattgantaaaatgaattaagagtttactgtggataagattagacatcttataaagaagaattttttgacgatatctagcctggtggtatggaccagggcctctttcggaagacgccgttatgaatcgcccttacggaaatagggaaaagggaccccccttgctgcgtactatcccattgaactcgctccccccgatcctgggaatattc

SEQ ID NO: 3231 - DNA, 1502 bp, Emericella nidulans
ccgtatgactcccccagcttttcttcctctttgctccgtcggcttcacgccttttctttttatcggcgatctgatccgtaataatcgtatttcagttaccacactgaaggtctgagcaaacacgcttggtttgcaacccgccgaaactgtcaatgctgtctgtcacagctttatatgcagttcaacatttagaatgcgatgctttcgtgataatactcttcttatacagctcggtcgaatctgactgatttatcctgtcagcagacaccgagctggctggaaacatcctctgcagcggctgatcgccctccgcgtcatgctcgtttgggacgtaaattacaatggagatctacttcgagaccattgctgtacctagaaatagattactttaccagaaaccaacgcttggtgattaagcctcccctgaccaacaatggatgctcatgaacacaatgaccgctcgtaaaatgcatagaacggttcctgtttgctgcatctgaaccaagaccaaagctgattgagaagtaagaaccaagtcggcagaagggtccgttgcgtttcgaccgcggcttttgggcagttggcatcagcgtccataaacccctttgatcctaagccaaaactcaacactgaagcctacgcatttccagataaatcataggcagtgtgccaattctttccctaggtctcaggagttgggaaccgcataatatcagccaggaacggcgcgaagctccgagaaggtgcagcgcactgcatggcggcgagggccaagcgcctacagggctcaaagagaatgagatgcaggtcgccaatatacctctcatctattcgcacctttgtttgaagctaaatctctccacaaacatgtcccacgtaggtgatttttcgggggcttttgtcatatcctactctgatactactctgtgcctggcttaccccagacgccatactacagcactgcggagcaggtcgtacaggaactaacataaatctcaccaaatgaaactccagcctttgcatctcgtgtactcccaaagtggctgctgattctgtaattttcctacttgtttccatcctgatccgcgtaggtgaatttctgcttcctgcccgttcactcgggaatctccaagacgtaacgacccgcaatcttcccttgccctgcattccaaccaccatcagcatcaatattaacgtcgaggggagaacacaaaagaggggaaacacacccatcaactcaaaaatctgtggcaaatcttgcagcggtgccttcttgaatggcgccttgataaggcccctggcaaagaagtctaacgcctcaacgccgtcctggcggtttccgacataacttcccttgatgttgatcatgcggacgacagttgtgaacacgggtgccttgagaaatgcattggctggcaagctgattgcgacgacggagccgtgggagcgaacgtactcggttgcttgttggaagggcttttcggcgacggcgaggaggatga

SEQ ID NO: 3232 - DNA, 512 bp, Emericella nidulans
ttacagtcaaggacactggtcaaggtattgacaaggagtacttgcagacaacgtcttcaagcccttctcacaggagaaccctctctcacccggcagcggcctgggtctcagcatcgtccatcaaactgttgtctcgctcggcggcagtatcgatattgtctccaccaaaggcaccggcacagaggtcaaggtccgcgttgacctgccacgcacgcccaaatccgaggcaacaaatggcgaccagaaccaacaccacaaagcagtgacggagaccagggagcttgttcggggtaaatccatcggcctcgtcggattcggtacaccggctgagcacaatgaggaagccctgactctgctccgctcctcgctccagcgcatgtaccaggattatttcggtatggaggtcggctttgcgtcgcccggaaatcccggctcatttgacatctacgtcgttcgacagacatacctcgatgtggccgatgaaatctttcgcaacgtcggtacagtgcatg

SEQ ID NO: 3233 - DNA, 1468 bp, Emericella nidulans
gcctgtacgtgatcccattgcactattacagcgctatctaacaatagataggcaaaagacaggagatgggtttatgcttttataacaatctaacgctggtttccgaggaggccgcgctgctacgtccgattcacgccttgcaaagagctaaaagtgggcagcgcagtacccgtagctggctttgccgcagtttccagacggctttgggttgccattggcttccaaatgaatgattcacacattgttgcttagtatctgattctcaggtcgaccaccttggcagatctgtggcgggcgtctctccagccttctcacgcctatctaacatagtctcagactgcagcgtgagtaacttgaatatactgcgaccttgctggctgaaatagtagggatgaatagacgcgtgcgatgtggataatccctttcaggacactttggatttttaagaagcaagcacgcagtcacgtgtcccgcaacatgttaggagggcagcttaaagtagtaggtggaaggcttaagtcgatatatggaatttttataaatcgagactatccatgcacagtatacaagaaaaacgctcagaggcaaccagaaaataaactacctcttggaaagcacgttcaacgcactgcccgtcagaatgaaagaagactgatccgcactcaaggtgtgcttcacaggaataacaatctcctcgccactcttctttgtaacacgaagcttgacctcacccttgccgccgttcttcagtgtctcgtacaggccctcggtagcaacgacatcgcaagcatcaatgcggtcatagtcggccttgtcagcgaaggtcaaaggaacaacaccctgcttcttcaggttggtctcgaggatacgagcgaaggacttgacgagaatgactcggccacccaggttgcgtcgctgaagagcgttgagctcacgaatggaaccttcaccataggtctttacagaggcgaccagcctctcgtggtcttggattatccattgtgcagctagatcaggattggcgtgcttctatccagcctcgaatatgtcacagattccgtaacctggtgcgccgtttacagcacaatggtgggcagcggcccagaaactggtctcaagacgctttaattatattcgtttattcaatccccgtcttcgcctatccttattacccagccttcccaaattatccctcggtccatcgtaccttcaccgtataagaacggttccaaccttaatctagaaagcccatctttatattttccttgtgcccaaactccaatccttttctgctcgcctccatccttctcaatatctccttcccgtttttttccaaaacctctcaaccatatacccttcatttttttagaagtctacaccattctttcaactccctccattgacctaatcaatctttgaccccctaaatcttttatctaaaatatgtctcttttacttttcctccccc

SEQ ID NO: 3234 - DNA, 889 bp, Emericella nidulans
ctcatttttagtccctgccccataaacgaataagctatccccaggcgcactttaacccattttagctcaatcaaaaatcccgctgcgcacatcggaacccacatcccccctcacaaacccaatcactgtccccgtccagactagaagcccgggcgcagcaaattctcacgctcattaagcctacaaccgcacatgattggcgcggattgatcatactcctcgaccagctcccgcgcaactgctacagaggcactgaggccgtactcgtgtatacattcttcgacccgatatgcaggtttatcgcgtcccgggctttggaagaggggatggccgttagacccgaaatacggtatcgcctcgcgctaaggcattggttttacctcccttttatgcattcagaggatcttggccaccaagaacttgtgctaaggagttaccaagagatggctgatgatattcgtcggcttttggatgaaccagcgcacggggtaggcgagaaggaattatcttgccgggtgatcctggcgagcaatagggaagccgtcgaggccaacctggcgcaaagcttcaagtttcagaaggagcaccatgatatcattgcacggtttggacggtatccttaccgaaatggagtgctggggagaactacaacgccggaggaggaaaagttcctcagcgagacagacatatccttcggttaatgctcactacctctttttatatatacaatttaagagatatttgcatagagatacacgcgtatcataagatagataaccaacctacttccttgaccagaacgcctatgcaacgatcctccacagccttcgtcctacataatatgaagacgaactgagcaagaaagaccggtagccacagtaacaatgta

SEQ ID NO: 3235 - DNA, 1312 bp, Emericella nidulans
gattaaaacggaagctatatacgaccatcagcatcaggagcaggcacaccctcatgggatacccggtatcgaggccatagccgttcccatagctagacgaaggcccagggccggtcggcgagccccaagcgtctgagccccgactacttcgcctcgttaggttccggattttcgaggagaacgactcattaacgctgcggttccttcgatgttcaagggacatgcggcggccaatagacggtctggtctcggtatttgcagtattgctgtttagtgccggtccagcagtcatagcccgtgggagcaagcggccgagattttcattgtcaatgacgatgtcgattgtcccggaagattcacgctgggaacccgtgcccgaaagcgaagccatcgagaccggggccggaggaggtggtggcggggtattgttgttcaggtgttgcaactcagggagaattggcggcaacgacttttcaaaagcctcctcgatgttcacagtaacaggggaggaaccataatcatgacttccaccggcggcggagagctcgcgcgagctttggcggcgacggtggatgcttcggatccggtctgaggagcggctacgtggaagattggggttgtagtgggggtgcaatggcatgtccaagggtcgggatggaggctgcacttcgggaactggcacagacatggaccgcgggatacgctcggcttcgcttgatatcttgcgtcgctaagaaggagtggtgcggtgtcggtttggggaggagctgatgggggaggaggcggaggaggaggcatgggctcagactcagaaggtccgctgtattttggatggcgcatcgcacgaggagttgcaggaaggcctacaggcccaccggaacgtgacgagttggactcggagctactgggatagtccggcgaagtctttggcggaagcacggtgcgtcccggcgtgcgaggggtgaatgactgcacggagaaaggtgggctctctaggacacctcgagtatattggatttctcctgagaatggaatgttgggggcggacggattgcgcgcaagcgagaggcgtctagcttcaagttcagccgctgccagttcctttcgcctcatttcagcagtagcaggggaaacattatgattggcctcattaaccgcttgtggcttatcagcaggttcgttgacagcaggattcgtctcatttgttttggagtcggcatcttgacgagttctagagcctggtcgggtgcgacatccgtcagcaaagaagttacgtctagacgcggatggacgactgctgcgactccggtga

SEQ ID NO: 3236 - DNA, 1305 bp, Emericella nidulans
cttttcacagcactttataatttggtcagcagggtcgtcttcgcgcactagcgggtctctttaggttagtgtcgtcggaagctaaacagcctattttggctggaccttggtattcacatccacaactgacctatgaaccagatcccgctttggatagctctcaaaggcttggctaaagtatctcagcagctaggcaagtcgtgccatacaattccttgactcgtatgacaagctgtgtctcaggccaatgttttattcttacaaacatcaactgttctacggccaccagaatgccttcccgtacttgagcttacccacttgatgcggacagcaacagtggtcattatatgttcacaatcatagagtagctaagttcccgatgtacgaagtatatgtcgaagtacaaaaatgacgttagcatgattggtaccaaggtccgtgcccgctttgtctccattgccctccagctccaactccccatcacgactgctcttcctctgtctctcttccggtagttttattgtatctatttatattatgttaaatgctttggtctcctttattcctatacccggcttctgatttctttcctcccattcgcctcctgtgacactcgttgtatgattgtgcaaccggatactctcctcagcttacaagcaatgcgagtttcctttccctgcctataaaggggaatttttatattattctaccctatactatctctcaacgatataattccaatatttttttgcgtacctttggcccaaaccgttgaccatccgttgaatggcggcgtccacactctcagccggcggaatgatcgatccatccaaacatgccgaataccccatcatcctgggcgaacggctggcaagaaggaccgacaagacatattcacagttaataaacattcaatataattacaagcccaagtcggcgaccccgcagcagcgatctattatcaccaactcccctcactcccgggaccactttaacctaacgatcaccgatcaggctccgaactcggaccagaatgtcctgacctactcctaccagggcagcgttgacccagcacaaagcgcatctgactcgcaggaacatgagctagtactcgtattcgacgcggcaaagaaagcattcgtgctggaacctgtggctacacaactcaacttcaatcttcgttcggccccggcaaaaacgcaaaagcagttgatccagcagtatccccagcttaggactctacaggaagaccacacgtctggagatgaccgggcgcccgaccaggcgagcggaaacgacgatggg

SEQ ID NO: 3237 - DNA, 1703 bp, Emericella nidulans
tgattgcatccttcttcaatccaaaaccgctcagaaaccgtgcatagcatatttgatcatacgtaatatgtgcatattctatcaaaaaattagaaataacagatacggccttgatcgtctgctgtatgcgtagtctttcgatggaggcgccctaacgagacctgatatagacctgaactgcttagtcacagtttgcacagtttgtactggtcaaagttgtgtcctttgccgccataaaacccatcgttatagataccttaagaacctaccgcatctccctcaacaaaattgaacatgacattgctgagggcgcctcagccgtttcaatacgctagtcgtgtatttacgtctacatccttatccacaccccgtcatgcatatcttacatatagtcgagtacgatctttgacctcgacatcacaccaccccacaaaaagccatccatccttgtcctcatcaacgtccaataccacatctgtggaagaaaatgacgccccaaaaagccaatgtaccccccaggcgtctcaacacatcccctggtatcttcaggaagagagctcagtacctgcagtgtccgaggtcaccttacaggagaaactcccagagctcccggaaaacccacccaaaatcttgccggaactcctagaatacatctttaaagacctcggccttgatgagctcaagttgattgacttgcgaccactggagacgccctcagcgctcggagcgaacgtcattattatcattggaactgcccgccagggcaaacacttgaacgtttcgctgaccgtctgggtcgctggcttcggagctaatacaagttatcgccgtatgcggacggattgttgggaaggaacgagctgaagattaagcttcggcgcaagaaccgcagagctagaattgctagccgaactggtacgatgtttgatgataaggacgacgggattactacgggttggatttgtgtcaacgcgggtgtcgtggaggagcatcctgttgaggagcgggtggaaggcgattttgagggttttggccctctcgtggggggtacgagagtggtagttcaggtgttcacggcagagaagagagcggaaatggatttggagactctgtgggaaggaagactggcgcgagcacagcgagagagacaaaagcacgccgatgccgccaaggatgacgcacccgaagaggttcgttatcccaactcaataagtccgtcaccatctgactataaatcgcccaatgttcccaggtcgtggatcagtcttccgcatgaacaaagaagacagtttcatattagaagtctgcggtcattcgcgcgcccggcacaccatgctgtttttacgccacgttttatgtcccagaatcatacccctgctgaacatgccatcgtagggagcgaactgtcttctccgactgcaatgctcttgcagtatattacgactatgccagatcagcaattgatgtctgcattgggggatagaccagatgacgagagttcgaccgacttcctacgacttttccaccacagtctattaggcgcttcaccgaatgttctagccttggccagactggagctcctatgcttggcacattccagagggcatacaggaatcagcaaagaaagcgtacatcgcgcattcatgggttgctgcttctccgcctctcatataccagatcgtctaatcaacactgtagttgat

SEQ ID NO: 3238 - DNA, 6792 bp, Emericella nidulans
  unsure (1)..(6792): unsure at all n locations
tagagacttgtgtcctagtccgctcacaacagtcactacaaagcaagtcattctgagataccaggaccattgatttatggcaccactcggctacagaccagagacacttcgaagggtatgtcgagcgtgtgcgcgcggcaagcgacgttgcgaccagcgctggccataatgtagcagatgtctggctcggggcataagttgcgaatatgccaacatccctcttacgggaaatgacgcggtggtagctgtaccgtctgaccgaccagcactcagaggcctagaccgttcgccaccaaagacaacgactactactgcggcggcggcagcagcagctccatttattacccctaccatccattatcctctgactatggaaatccccaaagactacgggcagagtaccattgccctgcttgtagaaggtgtgtcgtcaatgccactagaattcgcgcagaatatgaaaacgcacatcatccactctgggctctagccccgtggttcacgctccgacactctcccaccggcgccgatccgggacatgtacgccgtttgctaactgtacccgcgactccacagtacgacaactttccggatgctgctacgacagaagacgatgtatctctacagacaagtcctccgcgccgctagctttgaggcggcactcgcctcggcacaagccctgctgctagcccagtgcatgctcatcgctatagagggtcccgatgctcccttctcagaagcgactagtgtaatgctcctcagtctcggccagaggctataccagcaagctccaacgcaactacgaagtaggctcagtccgcgacgcgcatggttgtttgccgagagcgtgcggcgcacgatcatcgttgcgttcgttctccggggcgcatactcgctcaaaaagcggaattactctgcccgcactccgttcattgattccctaccgttcgacatgcgtaccgcgctctgggatgccagtgccgaatcgtggaccgatgcagagggtgactcagctgactcgattgtctcccttcaccagtactccgggatgctggagagtgggctcatacatgggatctcgccatttggcgggttgattcttgctgcttgcaggggaaaggccattgaggaggttgcatatccgtcgttgcctctcgctagatcaggtcagagtatttgaatcacaaacgacccgtgatccgacagctcctaacagtgctgtctctgtgggtcgatcattatttgctgcgctccttccttcgatcttgaccgaccaggcctatgttattcgaacactggcacccatcggtgtctcgttgacgtatcaggaatctctgcggctcgtgtatgtttcaaccacaatcatgcatttcccttccaagtttatgtgggttgacctggctctcgaaggatggctgttaccatgtggccacaatgttgagggtcctgcccacatacgtggtcacatatttaagaagcaggttggtttcgtcaaaagctccaagatatcaagatgcattagagtgcaagcgtgaacataactggctctagttatgtgtttgcccggctgggagcttatgacatgagccagggatggttcattctcatatggcagatgaggacggctcagccgtgcgctcctaaggggattaatagtcgcccgctctagacaagggcggtattagtactgggctcggatctgatatagttgaaatcacatgatgtattcatacgcaaatttcatgagcgcaggtttgtgttaggcggatgtccatggaatttcttacactcctgagcctttaggttgtccatttagtatacgatggcttgcaggcctaaggcagtatagtagacagctgctgacatcactattggccatacacctggtaatcgtacttgagtattcgcctgcaggatgaatggcctcgcctggagcatatctggggagcattatcgcatttgaagtcaatatacttcttcagtcttaggagtgctgaggctacaggagtatccccagatctagatggactctgcgccgtcagcattcttacatagtctactagtccttcgactaaaaggtccgctcgagctctaccttgatgtcgaaagggttaatgataaggctgtaatttaagggtcagtaaaacgtgaagagccctacatgttttaccaaacgccaggattgggctgggtctggtaacctgtgaaaaactcatgtctgaaccttcactggcactgccggctaattcaccacagcgccagagcaacaatccgtctcttcttaggctattctacctcttcccacttaagctatcctatcttctctctattctaatcttcagagccaaatgtggacagccccagcctgtgtatggcgatgtcaatctggtacatgtagggattctaggcgtggaagacgattcgctaggccatgttgtttagtgcattattgtatttactatctcgttatatctagcatgctatgttttaccagtgattttcgttcatgggaaatattacttactcagaagacaggcgaggcaacatgaagaaaatcatattaattagctcccagatggctctgatcgcgtactcccggcttcctgacggacgatatcccatttcatagaaatgaaaagtccattggtttccagattgcggtatctatacacgtggtagggcacatttacttcgactgctgtagtgaccgactcaacttacgactgcttggcctaagtctatcagactcccagattctgataacattcagggtcgttatctcgtaaaaatccggcaaattagataagagctggtcctatctactccaaatagcctgagaactccaatgaactccaactccccacattttcgaagtcagcaacaaataacagtgtaagccctggcccgctatgtgtatttcagcccccattcttatctctcatctctcctatgccttgtccttttaaccgggctgctccgcacaaacatcattcaggtacaatcacagccacccgagaaaggaaacaaaggtgaagaggaggcatggttcttggttacttcagttgggcgacggcattctcgctgctagccagtactgccggggcagccatcgtcaaaggccagacggttgcggtgggcagtaatacgtactacgtgcctccgaatattgtcacaaccctctcactgagcggaaaatggtcgggccaggaggatggtctggtaccgctgacggtctttagaagcgatgccagaaacctgagcatcgccgccgtcaaggatttggtagatatctacgaaagaacagatgacgtttttagcactggctttttggagagtacgtttacctttcctgcagtcattaaggccacgatagctgactgcagcagatgtctacttcacatacaatggcagccataaaaatccagtcctggatgtttcattgccttcattatggccgactcgattctttggccatgctgccccttacaatccccagacttccgtcaatagcacgagtgacataccaccaggcccctacttcctggatccagtcacaggcaacatctacgaagcctacctcctctactcagacgtcatgggttccttcacacagggcctgatcgccacagggaacaacacctacgatgtcctccctgccagcctgcaaggctacgactcactgacgattggcgtgccatctcgcctgtactacacgaagacgccggaaaagccgcttgccggtgtccgtctgggagtgaaagacatctacgacatcagaggcgtaaagactggctgcgggaaccgcgcgtactatgatctctacccggtttccaacacgactggtccggcaatccagtctcttatcgacgcaggtgcagttgttgtgggcaaaatgaagactagccagtttgcaaacggggagactgcaacagccgactggtgatactatcactcccccttcaacgcccgtggagacggataccaggaccccagctcctcctcctctggtccgggctcaggaattggttcatacttatggctcgatctcgcagttggcagcgacacgggcggctcaatccgcaacccaagtcaggtgaacggatgttttggaaacagaccatcattcgaccttgtctctctcgacaacgtcatgcccatgtctcctctcctcgataccgctggctttttgaccagggatgcaaaactctggaaaacagcctcggaagttctctatgctccctccggcctgaagtcatacaccaaataccccaagtctattaagacaatcgactttccaacagagccatccactgaagccaacaaaatcctcctctccttcttgcataaactctcaaggtttctcggaaacgctacagcttctccactggattacgatcgcctctgggagcagacacaaccatcgacggtctcgtcggacacgacccttacctctctcctgaacctaacctacgccatcctaattacaaagcaccaatttcctctccttggtgcaaaactctatgaagaccatgcagccgccaatgacgggcgccgtccattgatcgaccccgtcccgttaagccgctggaactggggtctcggttacgcggatgagcagctcgaggccgagattcataataaggaaacctttaagtcctggtggaacagcaccgtccaggtatttgacgaggagacctgtgcagatagtctggtgctatatgtgggcactgctgcaacgcctacatataggaatgtatatcgcgagtacgtgcacccctacctaatattccactttcccaaggaaaccaactggctacggtgccaatgctaacgtgaacagcatccccggaattccactaggcttctctgtatcccggatttctaacatggctggtgttccggatatggtagtcccaggtacgtcccttgtctcttcgccttccaccaagacactggcaacaattaactgtgtcatatagtcggccaagcccggtacaactctactatcactatgcgagaggagtacctccccgtcgccgtggacattattgccccgcatggctgcgatctcatggtgtttaatcttgtcaatgagctggtggaaaaggggatcgtgaaggagccagtggcggggtcgacgatgtatggggatgagacgatttattaataattgtattccgaacaggattgattgtttaattgttgtgctagggttctgtagtgatgtatattgggagcttaagatgcattaacatctttgctattctctggttgtttcggttgatagcccggtccggccatagcctagatttagtttatgtaaatgcatgatcagtactcaatgaagtctttatgccgtagacctcttgactctctcctgcgttgtataatagggactttgctatctcgacttgggctctcctgcaacgattattcaactgatttactacatatactgtggaacgcttctgcaagataggtcgagaagccaatgtatgcctcctgtttaaataaatcttaaaacaattactgnaagctgatgttgcatcttgtagggtaggcgaaggtatagcgggcattcaggaaacaaaaacaggctaatattccgctgaacaagaatactgagtaatgacactgcttgtaaaccactaaaaaacgccggtatgtctgcaaattctatagaagtgacctaagcggactcttcatcttattttcctcctcagccggaccagccagtctcttcccctccggatcaaccaccggctccccaacaacagtggccttaattttctttccaaaatacccaatctcgacgcccaccccttcattcagcccagcaggcacccaggcatagactactggcttcctgatagtatatccaaaagccgcattcgtgacatatcctacagcattcccgctaagatagaccggctccttgcccataaccatggacattccatcatcaaccgtcagacaagtcagacggcgggttagagctttcttgccgcgagctcgtaacgcagccttaccaacaaattccgctttcttactcgtgccctccagcttcaagttggcaatggcggatcctagcccggcctcgtatggatcatgctcggtggccatgtcaactccatacgtgcgatagcccttctcgatacggagggggttgtatgccgcccgcccagtggcgatgaggccatgccttttgcctgcgctgaaaatcgcctcccacaggcgtgcgccgtgctcagcagaggtctggatttcccagccgtattacgcgccataggacttcctgtacaccatggccgtgatgctcgcgatagagccggcccagcacagcgtgcgggcagagcttggttactgagagtaagtaccctctcagacctttagctggcatggaaaccccgcgtgggagcagaacagtcgatgttctgctaacatgcccctcattgccacccagcatggggtgccccccattactcgctcttacgtccttcgggatcctcctttttctgagcctacccatctccttctatattccttcctcttcaggcgcgtcaattgtctactcaatacttcctttcttatactctctacttccccctttactacctgtactccctcttctttctccttcctattctcttcttctccatcgtttctcttttttctcatccttctttcactttcttcactttcttttttcatactctcctcttttcattaccttctttatctcttcctatatctctttctcccgtgtctccctcttactctccttccaccacc

SEQ ID NO: 3239 - DNA, 7219 bp, Emericella nidulans
gacgaggaagagcgagtgcgaagtgtgatacctcctgctgtgcgagcacctcgaacacctcgaacaccgcggaagcaggttgacattcgaagctttggggagtacacggctccgagtaccttgaagcggaaggcaggtgcggactcgtttgatagtgctgtggggagtataaaaaataatggtacaccctcacggttgccgctgcacttcgtggtctaaaaatatatgctagagccagcatcaccgtcagtttctaggtccgtcaagacagccaggattggctatgttgacgcagggacccagaccggcgagactgagactatctcccccttagcagctcgttcggcttcattcacagcaactagactcgcgccgacaaccaggcctttaccaagaagacgattgtttgataactacttggcagatgcggagagaaaatccgcgactatagatccagttgccccccaaactcgagaacataatacaaacaaccaagatttctctttaccaacgtcgccaacctgccaacgaccctggcagtcgttatctccgcctaaaacaccaatgtcaagcccacggaatcaaaggatagagtcggttttgttctcagccggtggatatcctcgtagtccgtctccacaaatccgacagccaacaacacctccatttatgcaaagcaccaggataggcttaatcactccaggtggtgattgccctcggtcatctcaccatcactggtccgcggagtgggagaagccggagcccagtacaccgacaaatagcaaccacaggtcccagtcgcaatctcaacaaccccgcgttactctggtcaacagcgacagcgatgatgaatcatatgactgggatgacgatctcaatcagactatgctggaggttgtggaatctgtcgaaaaccaaggtgttagccggcttttcatctgacccttacgtctttttttatcattactacagtgtatacctatgaccagtattatatgaacgagccaatgtacacagacccaggttctcttccctgctgcatagagtgctgtttggtgtcccctttgtggtttagctgggtcattgaccagataagacatattaagactcttgggcagctctgaacgtgcgagtcagtcacggtgcccgaaggtagcacaggcacggccttcgccatgaacgcaaatccattcctcgctactacctaccctaagacccttcctatccagtgtagtgcggctacccatgcctgcatagcttactgctacccgatcttgccgccgttatccggagacgccatcctcgacccccctacaatattccacggcatatttagtgcgcaactgggatattcccacagccttaggtctctgttggccggtgcatcgcgtatccgagcaatgctccctgcttcagttgttaagctactcaggtgctggaaagcctccgaaaatccctgaaattggccagagcctggcgcggatcgtggactttataatttgagaagctaccaatttttacgacgtaagcaagatggtcaaggaaggtaaagtgtatagatctcgctcttggttcttcttccaggggtcgcattctactaaatctccctcgttcaccagttggacaacaacgattaccagcacaacttttggaggtatccatggtaacactttaactgcagtttgtccgtgagtgtatctgtcaaggacctcctttacgccataatactaacagctgtgatgtagtagtccgattagcatgccaatgctgaggaatatggactgagagagcagactcaaggcaatgaagggctgtatcctgctagatagttggagtcaacaaaggaggtggttggactggtagcatgcctgctagatgatacttaaggatttgtactggtggggtacacatggttttagggggattaaccactctctgatgaatcatgtagttctattcagtgcttggtgtatgcccagatggttgattagggttttggaaatgaatggaggcctatatataccgcttacaatggattacattcgtctgtacttatataacgactagcaacggagatatggtaactccaaggtcctcatggacgtcgtgacgccttgatttgcccgtcacttaacaattatttactccttgatatatcagggtatttcagcgctctgtgtaaactttaggaatactgactagatagtaagagatctctatttaggtatgtacagcagaagaagcagcactctctatcgcaaacccaaaacaacttgtataccactcctgcgcccagtagctcagctcccgtcaaagtaatgacagtcgtaagtgccaccgtgaagaccgacgattagcggtcgatagtgaggagacggagagtctgtagggatgttgcggattccagcaacggtggcgccgttgggcagtgaaagcttgaaggactgcatcatatcataccatacctgcaatgatagccgggttccaagaactgaaggtattagtggtgaacaggaggtctcagtgcctggaaacggtcagcgttaaataacctaaaatccatagaacccaagtctccactcactcatcaagcctttgctcggcccatcgaggtggaccaggaccacgatcttaactccgccttccggtcagcacatggattgattgccatgggatagctgttgcccatggtggaacaatttgagttagggtcaacggtggcttcggactcgcatggatagacgttccgacacaaccaggccacggagtcgcataactatacgagcccgccaaccccatgaaaagctttgcattgtgctatgcagtagtcttcaaacgaaatcacattccgcgccttgttctatgatattggctgtcgtgctgacacccagcagacccagagattagtggcgggcgagttggatcggtaactgggcattaaacgacgtctatcttttccctagtttccatgcaagacccagacctcgcctgacgtcaagcgagccgttgcaggtcgagctctctgtataaagccgcctttataccattcttgtgagcagcatctagcactgcgtctacagattgggctgcaggtgccaatttgaaacccaggcattctctttgaaccagcgatgcccttgaatttactagggatttgtttaggagcagcaccagtatctgtactgaccagacctagccatatggtgagcctcatgatgaagattgttgtatcttattctagttcggttgcgcgataagatagtatggagcgtcaggctagatgtaatcaccagcatcaaccgtcaatattatagaatagtgacggcctaattcttccaaattagctctatacagcggtttaactacaaaggaaattttaagcattttagcctgatacggcaattggagtggacataacttttgaaccatggaagtagcagaattcctgcattgccattggcgagccggaacttgatatataaaataggaaagctccatatatgggtagctgtcacatacggttcgacacaatataaatgcggcctgtttcatattcattatcaaggaaagacattggagctagcacaaatcacatggttttctggtaaacccacatgagattgtagtttcggactgacggagattgagcaccatgaattacgcgaaatcaaaccctacctacctagattcaaacacaaacttgactcgaatccgaatagaccagatatatagtgcaaagaggattcttatgcagttcatcgagtgcctttgctccaccatctagttctgcagtgtccctcattaccgctgtgatcaggctgccttgataactggcatattagattcggcccagtcttagcagcttacacaatccatgatacctgtagtctacgcaagacatattagtctcatattttcagttatctactgaccacctcaatctcccgctctctcaattatatttctccaccatgagcaaccgttaggggacagagtaggccctgttagttcgagctctatgtgcattttgaggactagacacttaggactttggttgaaggtgctgttcgctgaatatatccattatcgagaagtctgaattggcagttatttcccagccctactgcacacccgaccaagaaggttcagaatcatgtaattactgtacaaactcgagaaacaagtgctacactcagcaataggtgctttgggcgacgaacaactctaggagccgaccagatggtatcgtcatcaccgatcgacaactacgccatagcaaaaaggaaatatgaaatatcctttgtcctgaggtaaagagtctactgtccgtgctcgtttatcctggatatgggtagtatatgcggctggtactctcagctgccagcattgctggccaatctcaatcctaactttgctagtatctgcaacactcttgctcacccttgctgttacactatgagaaaagtggtctatcagcctgttgcagttatctgaaggccggtgagccccgtttgcaacatgaagctagaaagaataaccccatgcagcgagcgtaatgtgggatagacggaggtaaggagattgtgccaacgaatcctccattgttttggcgcccactcgtccttttggggaaccaacacttctagcagccaagagtcttatctgctttaacaaccgtctggtgagatcgtaaacagcaggagcctttgcatagaccctcttcaatcttgattggctgtcagaccagctcaaatgccagagcagcaaacggacggcatacctgcatactaaaggcgatgtcgtacactcaaccagatccatacctggtgtattgtgctatgccggccacttatgcataatctcaattctctctaaatttggcatatctctgcagcttgcctcagtgaatttatagctgaacttgggatccgggaccagacgacgtgcttaattatcaggcagttggttttcgctggcagcctctccagccattgtgtttgtaggcgatcagtaaggtgaagcaaaaagctctgattcgtctcactgcagcacaattctcaacaaagttgtcttgacagagccttgggtcgagtgtaatggctcagtcggtagtttctagacagaatcgaagagaccactgggagctgacgggatgcgagcagcgaccgaaccaagcagggacttttcctatggcatccgctgcccatctgactcagcaatgttttagcataagcaagggtttgcgaggcgcgcgtgccaatcctcaacacgtggaggccacggccttggacacagccgtcgctgctgagacggatacgagcgggttgggggcgggttgtaaagaagggttacacggggctgtggttctactctgtgtagacaagaatcgccaggctgaggtggactaaatttcgaagctgagagcagagtatggaaacattagaagatacgaatagtttcggtcgtggttgttatcctctggaataaacctacgcctggcgccgacccaatatatgtaggtggccgaaaccagtgcattcagccactcgataacttcagcgcaaacaagtcgctagagtcgttagcgtactctggtcttacaccgcttcacaattacttaacatggataaagcaaatcttgaaaattcataaattggaatcaaatgaaaggcgaattgagttccagaattgaagtcccgaagcaggaccagggtacggggataaggcgggaagccgatacgtgttcgggcccggacgaaaaggctccgtatagttgcatctggctgcggagataacaaggcaactcgctttcaagacattcctgatgggatttaggccttataaggagactgtattgcgaacactctgtatttcgaacaatatactgttaagcgtaagcgcagtctgaagctgcagctgtttagccttgaagactcgtcccaaaattataacggcttcaaggtagtccgcagagaagtcagatcgatgccggcgctcggacgaagccatgtgcgattgcgaagaacggtcggggcgcacacaagtaagaccgacattctagaacggacaaatccactatcgcttgagccgagggattactctgtaccctcgcttggcgcggttccgccaacgtcattgactcgcttcccctgcgagaaatcgatctccgtgctgtcagtaactcaattggactacaaggctcgtcagagcaagacacagaatcaaatgagacgtcccctactgcatgaaggtgcaaggagttcatggccgccaggctgcggcgcgatggagctgtcaacacagtccacaacacatgttcgcaactagcagaaccgatgctgacgcatgtgatgtatcaagaattcatagagagcacagtgaaaagctcgcgtattcggaatccgaaatgacgtccagacggtttctaacccagaggaatcggtgttaaccagccgggagtaaaaaccgagtaaaaatagaccggtaaaggggggtacaaagaaagagcccgtggataatccctgctctgggtaagctgacggatgctgatctgataaccctgatacgggaaggatggcgttgcagcctggatggttcagcttagtgggagaggcgttggtcgcttgtttcaggcttggattttcagccttccagggccgatcgctgggccaggcgagtgtcagattttggaggctccgctgagtcatggcggagccacctggagctaatcttgcataacattggctacgagccacaaagtgccgctgagtaagcggatttattcggaggttctggtcggcatggcctaaactccgacgccgattcgttccggcccactgtttttctttcttctgcagcatggatgcagacttgtgttgggttgtccatggtcaatcgttcgcttctctcgttcatttttcgttattattggaagatgacgacactccactggtcatgctcacttcttgcatggaagtctctggcgcttcctctgttgactcagcggatttgcgttcgcctgggtccccatacaggccagagataggggagccatgtgggcctctagggcggattcgggctgattatcacgccgtctgaaatctttggaatctgacccacgcccctggcggtgtttatatacttgctcagggctcccgactggactgctgatgaaagttgtgaatcccctgtccgctacgtaccggcttgtgattagtac

SEQ ID NO: 3240 - DNA, 590 bp, Emericella nidulans
ctggcgggagtttgattggatggcggatttccagggccaactagattttagcgggctagaccgtccgaacctgggcgtagaatgagctagtatatactgtggttaaaaaacgcagctgaatggccagacagaggtaccagctcattagtccctcgacttttatttggctcatcatctcttatactaaccataggtcatagattaccattctggcttcgctatatgtccttaataatttccaacgccgaaaatattatagacagtcatatttgatgctctacattggtcagtttgttatactgagaaattagcgattattttcagctctctcccactgtagacctgcctctccagccgctcggtttgctctcccctctttcgtcaatttctagcagcttctgtatggccacatcatcaccacaccactccctcagcatatggaaggactcaagagtactatcatgataaggccccaaaactttctcctctctatgggtcgcaagagtcattagccggatcgcttcggcatctctcccgtattgcttgtgagtgaccgcaacaaaatagagacatcgcatggtaaacgggtg

SEQ ID NO: 3241 - DNA, 1197 bp, Emericella nidulans
accactttcccaaaacgggcttgttgagggagcgacgacgctggcaacaacgattggtcgattgacaatcagttcaactgtttcaacaaatcaacatgtgtcgacctgactcggcatcaggcacctgacaaacccccgcctttgtacatcatgccctctctcaacaatccctttacacctcacactctcttctttcatcttacgttactatcttactatgcattgatcacccaacacactccctcaaaaccaaggataatacctcaccatggcaccgaaaccgaagtcgtcttcgcgccctcatagtgtctgtgtctcccgcgcagcctcgcccgccacagtctctctcgtctccacgctcccaatttccgacccagagccttctgataacaacaaagcctatatcccgctctgcttctgtctgatctcgttcgcggtcatgatttgcgtcaactaggccgtacgcggagcctcaacgtatgccgaggctcatcaaaaggcggtctgtcgcgggacgagagtggttacaccgaacaagagctgaggccaaaacgttaccatccccatagcttcgtctccgccctgaaggcttagacacgccgctacatagcccgcgtccagggcaacattgaactcaatctcgacagtcgaacgaatcaatgtcgtccacgtcacaacgttagcctcctctagacatccatagagatctataccgatatatgaagtgtgattgatggactatcgccacggcatcctcattacaacaacagcctaccagcgtctagcgcttagcacttaattcagccggttatgcgccatggtgatacgaacccatcccacgagacctcgagatcattcaggtggacaggcttgtctatgcaccttgtgtagcacaacttgcgaaggaagctattacgaacgagcggcaggatagctaacatcccatgctcacgtttagtatccctcgactcgctcgaatgttctagcttggacgcccagttctgggacgattgagtcccaactgatcacatgtatgtgattcatatggctggaagatgatatcgtgccctggtggcatacgatatcttcggtagactatccattattagcgcggcgtctagcggataccgtagcggttacattacgactatgatggatcctgctgattaccaactggagatcgatccatactggaga

SEQ ID NO: 3242 - DNA, 1467 bp, Emericella nidulans
tcattccgtttgtaaaagtcgaccaggaatttgtgctgtccgggcaggctgatcttcttgtataaaatgccccgcgtccgggaagacttgtaattgatatttccctgcaaaatatagagttagaatagccataccttagaaaggtacgaaagcaagtggaggaagactcaccttgcatctggccaatcattaactccttatccagcctgtctgtcccagccaagaggagcaacttccccccacgcgcttcaagaaactttcggcttagaccaacaaaccagccttcccaaaagggctttgtttcggcgagattggtgcgccaaacccatggctttgaagggtctttagggacatcttcgtggtagaggagggatgggacggatacacgggctgaggttctattgcggattgtgcgcgagcgtgtgctatggaaatactgttagagaagatgtctgttatcgcctagtacgcatggacatactgccattctatccctgaaggaagggaaggaaagcgggatggccgagttgagaggtatgtctccatgctctggagggcatccatcgccgaacctaatgttctgcatgagcgtccgcgtcctggtccagaaataggttggaacccaccttcgacaacgtccaaaacagcataagccagcagcttcccacctaattcgcctttcttcgcaacatcggtgatcaccgcgccttccaagctatggccgacaaggacaatgtccggcagagtctcccagcccatattagcttgcgtttctcggataacgaagaggagatcctggttcagcgtgtccaggctcaaatcaagccgagccgtttcgggatctgcctcaccatcttcactcgctctttttacggatgtactgccatgatcgcgggcgtctgcagagagtatccctgcattgggcaggatcttgcggatctctgcagcacaatttgcaaaagagaggccagaagagcctgcaccgtggtgcatgacaaagacggggcccgaattcgtcggcgaagtgaggtatacatcgatgcacaatgtctagatcattgactcgccgttggaggtagagttcctgatcgaagaagctggtccattgtaaagagttcagtgccctatcttgcaagctttctctccacgttagtcgtacaatgtacgtcatttcgggtaggagaaaagcggaaaactgaatcgaagaagtatgtatacgtaccctcgggtccctcctggccgagcgaataattgtttaactggcgaaggggtcaccgtctcggttgatgatccggagtcatcgtcctcgtctgctacggactcgggaataggagggggctctgggggaagcttagccaatttcgatttggcgaaggacttttgcagatcgctcatatttaaggtccttggataatggaacggcggatagttgtgggagcctgagcgggctagccggaaacaggccgg

SEQ ID NO: 3243 - DNA, 993 bp, Emericella nidulans
aagctaagcatgctgatcgttgaatccggttgtttactaggaacaacataggtgcttttcagattaagctagtctcatcactgcagcagtacgatccagtatggtcccacgaggaaaaccattccaagtgtcccagcaagcactaggaggcgtacggctagtttttcattaacggcagaatggcatgttgttgatcggagatgttaatcaaatatagcaagataatcccaacagcattcacctgcgcagataagtattaagttcctaagggaataataatgcaaagacgagccagggcaattgccctaaaacgacctcgaggcctcgagtgagacgcacgagttcaaatttgacgagattataggcttgtttggtagaccgctgccgcacgctcgtatcttatatgactttattctatccagtttaaatccagcagcggcagcagcagcaaagttagagatccgcagttactgaagagacaaccgagacaaccgagacgatagccgcctatggccgatcaatccgatacactacctctgcgacattcaggtacgcctcatactcgacctccccgccgttatccgtctctagatcgtaatgatagtgaccacctttccgacacccttccaggtcaaagcaatgcgtatgttccatcctcaattgcagcccttccgggtccgcactatggaagacggtcaagcaaaccaccggcgcttcgctggtatgatactttagccactcctgctctaggacctccgatctttgaacggcaggtctctggagcaggaaagtccggcatgacatggaatctggcctttcccgccttgaggagaaatacgccgcccatactgatcggatgagagtcgccgtacgccgcgagcagtccagcgcggatggagctggtgaaattggccggtccagtccttcctcgcgctgtgatcttgagcactggtccgggcaggccgctggagccccagaggttcaccatcagtg

SEQ ID NO: 3244 - DNA, 3803 bp, Emericella nidulans
gtcatgtctatgtctgtctatacgcaaatcttacaaataggagtatcaaaagaagcacagtaagtcctagttccggtaaacggacaacatcgactaacaaccgtcagcaaccgaacaaatgactgaaacaagagcaggggaagcaacaacatacctcggcgaacttgggctcaatgaacaaagccctcccctccgcaacaagcaccgcctcgtcctcactcgccgtcttctttgccggcatcatccttatcactccctccacccacgccttcctcccctcaaccttgactgtctctgccctcagcacgtaaacccggtccggcagcgccggcttccggtaatccacatttaaattcgccgtcatccctgttccgctccgaaaagactgcgacacgcaatgtgcaaacacctcatcgaacatgacagataagaacccgccgtgcacgtacccagggtgtccgcacatgtcccggccagtgtggaagacggtcacggcgcggctttggcgcggcccggttgacaatctttcttccgcagtttgagacggtgtgtgtcgcgataggaacatgtatggcggcgaggtgagcttcgttccgccagagagcgttcctgcgacgaagtgcgatggccgtaagttggctggcattgtgagatgcggccgggtctctttaagtgtcggatcctgacggaggagctgaatgattgggtgggtggtcaggtctgtggtattctgagtcggtgctgctgtggctgtttgcgtgccaggctggggcgcatgctggcgttggaaagatgggggtgggtgtgtgtttttgagcgcggaaggtgcggcttcggtttgcgctgcgcggatgggaatattcggagacaaaatatgtttgactggtgcctgtgtctgcctgcgcagaagacaagctaaggatcgtggaatggaaaacatgtctgttagtcgggagttgtgttttggtgccgaatgtgtagtgtacttcaactggactatatgaacggtatagctgtctaggattgtgttcgtcctttgtatatctcagtactcgacgtggtctaacgaagacggtctgagcttctttaaaccagctgcaccaatgaattagaagaatgcctttagatacacaaaccgagaaaaaaatcattccgagaatcgggatggacattggcgccaagtggagcagcccttgttctcgggcacagatcttgacacttatgacgaaaccggctgtgctgtacctagccctatgtggccggtagtcgctataccctttctgtagttgacaagttgtgtgctagataatccgagatttgaatgaatgcaatttacaagtgcactagcctgcgttctacagccctggcttctgctggctcaactcagcctaaattacaaaaaattacaggagtgttctcaaatggtctagttccttctacttcgaatagttatttttactattttctaatttggttttggatgcgtcgatcggatgcacgagcgccgatgaactcaggtgaagtggtggcgatctcggcatgccgatgcggaacatgcgaggccgatgctgcaaagttgccgagacgatcactgccccctcggcatccagaacgaacattatagggaccatggactcaaatgagagggaacttcttttactttgtagcatgttagttccacgttacacccactctattcggcgtcagatatctctatgctgtgctacggccagagcgactagactgccgcaagcatggcattcgggtctgccgatctagcgccgtaatggttaatgataaaaaaagagttgagggtctcgaactgcgcagtgtcatttaaaacatctctgtagcgggacgaataggtcagtgagactggaaagccaacaaagttcgtactcgggaagtcactctcaatcatcgcacagctcacgtcttcgcgtctttcctttccacctccactcctcttttcttctcattcaggcaaacacatctcaaatcagtaggtgccgcaaatgttaccaggactgggtaatatctcagaaagccagtcccctcttgttatgttcaccgtcatttggcctggtccaattcctaatgaacctacagcaacggtcatgcttagatttctggtttttgaggtcgaatgctatttaatgtacgagaggctcatccattttccccgggaaagacaaaagtctgctggagagacgcaccggttgacaggaaacaatgagttcggagagcttgtaagctgccattcagactaggtcacccactagtgactatgtcatcccggcatcagagcaaggtcaatgacatgagaacatcaatcgagtaagtgaagtgccggtatcccagcactaaagggtgtcaggattgcagttctgatgggcgactcagcgcgatccagtaccgtttacttcgcaagggactactgcgcaggctgagtgcaagtatacgactaattgtatcgccgacaacctagccgtgctgcaaatgcctaaactccttttgttttacgattaacctattgggtcgatagttgctgctttctttggaaggacaccaccgcagatggactcatcgccccgaatactttaccccccagagaaagtccccttccagctgacgtgcacgcactctttgatgtctctttgacctctcctcaatccaggtgtatgcccgtatctaatctccctaccttagtctctatgtctgcaggttcaaacgctaaattaaacgaataaaccctgaggcgaatctgtcctaatgaccggatcaacgatgagtgcctgagatggcactaccgtcaagtcgggatctcccagaatgcgtcgagagatcaaggaatcctgcgatctaggcctgaggattatgatgataaagagatgataatggagcacagaactgcagctgatattggaagcaatccggggatcgcctatctcttcgggccctatgttggagtcagcctagctttactgcctaacctctcgactgaccgaagttaatgcaaaatgaggatgctggccttaagatcttcctgccccagccgattcctctcttccaacatggtgggggtatgccaattacggcatctgaactacttccatgtagctacaccagccttcttcaagccgctcccattactataattgcagtaattcttacaaagatgaaattgcaatgatgaattgaccatgagaataaagtgaaggagtgtcggaagtcgccagtatgaagctgcttctgtgtgaaaacagacgcgatgagggtccctccgcaaaaccctatcactgctcttatttctgacatagtaaaaccaggatcccttcttgttcttacaagaaagatcgaagtagggctttactcgcgatcctgatgcgttgtactgtaagtggggagtgaaggaatgaattatgattggcccgctcgtaccgggcgggttttttacgagcctccgaattatctcgtccagacaaagtcatacatagttaactatagtcaacgtacctagcaagcccttcgtagatataaatctcatctcctcattaacatgaatttcttcctattcttcttttccatctgctcagtcagatgatactatagacataaacacttctcaggtcacagaatgctcgtcttcacaatcccactcgcaacagacctaatctacataacccactcagccttctccttcctctccaacctctacctcgtctgcaaaacatgtccctctctcccgcgtgttctctttcctgtatccgaagtcaatctactctatctcgcgctctttgagt

SEQ ID NO: 3245 - DNA, 587 bp, Emericella nidulans
ctcgctgcgccgcacgggaccaagcgtgttaggtagaagaactgggtgagcaccggtttggcctccacgtcgggagatggcgaaggtgtaggctgaggccggagcgaggggatgaagaagaggataagggaagagagggtgaactggacgagcatatgcaggctggtcgtgaagagggggaatgggaagacctccttgtcgttctcgtctcgagaaaacatccatttattgtactgcgccaattagtccgacgcgacgaggagcacgcgctgggaaactcacaatagatatggcgagcgagaaaaagtaccataacagaatcaatccaacattaaccagcagcctgctgataacagtccgatctgctgaactgagattgaacggatctccgcgagactttgtgcctgcaatgcgagcatccaactgcctccgttgtttccgtcgtcgacgccgctggcgtctctgctcgctgtgagtccggtttcctcatcgtcaggatagtcgtcgtcggaactcaaataacgtccctcctcactctccgcgatcgaggataggtctgaaatatctgcatcatcggcagctaacgg

SEQ ID NO: 3246 - DNA, 2795 bp, Emericella nidulans
gcggttggccgggacgcaggttttttgcgggcgccgaatgggtggtgtgaggtttggctgccttaaggcatcacttcgagtgtaatcgcagctcagcttgctgaggttggtcaaaagatcggtgccttgctgcctggccttgcctgaatgcttccgcttgggcccgatgaaggccttagaaggcctgaggcagcacaattgccgtgctttgttttggttggctggccatacaaaaggattttactcactgtgattggtcagtcgggaattgcacggcatcttccgtcccgaggaatcgctctcagccttcaatgttgtccagggtcagggaataaaaacaggggaattactggatgctacacatggctggcctctgcagatggtggaccaggctgcattcgtcagggaacacatgcattctgaatgttggcggaaattgcccaagaagcctcgccaacactagcatatagcacagaagatatatatttctccagtgaccacccgccataagaggacctgggtattgtcttgttgcaaccaatcgatggcccggacatttgccgaccagagacgctattagggatccatatctgatgatttgcaatcgatctaactatcgcgctactaatgccgagctctatcttgttgagcagccgcgcatgtgaaagtgctttctctctccggcttcttaccagcacttgttattgtcctcctcagacgctggaacctagatagcttgcctgcgaggcaccattcacaggcactaattagtctccgaaatcttgttctgttggctttaaactccgtagcgatggaccaggccgtgccatagggaccccaagtttcacgtgacccgcccctttattgaggggctaaccggatttggcgctcaacggacacgccggagacagcaagccaggcaacctcgaccttgaaccagccaaaaagacacgcttttcaactctttcctcaacagcttcgcttctccccccggaccctgttgctcggggcctttctttcctttctttccttccatcattctctttcttcccatttacctcgcgtctctttcaattttctccctaattgcggttctcgaccctgtcagcgcccgacgaggaaaaaatcattcaatcgttccctcccttcctaacccgcagctctagggcgcaagtctgtctcagcgcgatcgtgctatatagtcagcaatggagtatttgcaagacatccagaagccgtccattgaggggcctttcggcatccacctatggccgatattcgacaaggcctttcaggccgttatgggctaccctgccagcgagttccagttcgttgagggcaagacgccgatgtcgaccttcagggagacggcaatcatgctcattgtttactacgtgacaatcttcggaggtcgcgaggtgatgagaaaccgcccggctttcaaactcaacaccctgtttatgatccacaacttcgttttgaccgccgtcagcgcgattctgttggccctctttgttgagcagcttgttcctaccatctggaaccatggcattttctactccatctgcgaccaccgcggtggatggacgcagcccctgattgtcctgtactatgtgagtgtgtcggttgcatgggaatgaagcgctactaacaagagtagctcaactacctgaacaaatacctagagttcctcgacaccgttttcctgttcctcaagaagaagcctctgactttcctccacacctaccaccacggcgccaccgctctcctttgctacactcagttgatcggcctgaccgccgtccaatgggttccaattactattaaccttttggtgcacgttgttatgtactggtattacttccagagcgctcgcggtatccgtatttggtggaagaagtacattactcgccttcagatcatccagtttgttattgacctcggtgagtctctgctgcgcttgcgtggaccaatctggacccgtggctaaccgcaactttagtcttcgtttactttgcgtcgtacacctactttgcatccacctacttcccctgggctcccaacgctggcaactgcgccggtgaggaattcgctgccttcgctggaatgggcatcctcacctcctacctcgttctgttcatttccttctacatcgtcacctacaacaaggctgctaagaccggtcgcccgcgtcgcaacactggaaagcaggcggttattgacatggccagatatgaagtggctcctccctctcctgccggtgagaagaagtcgaacggctcggccgtgaccactggccgctccaacggtcccgctacccgctctcgcaaggcgtagattcagggacgagtacgacgatactcgaaccatgtgaactagctcgtcagccagttaacccgcgtgcggagagctcggttcccctccaggcgttgcccctggacctgcatttgaccggcgtcccatagccaagccggaacggttccttctgtgattgtattatggtgccgaagtatcgcttttaatgaatgaccctgatgacactggccgcctttgcctggccagatgatgcatgtcgcagcgagctttgtgacattgttgggttgcaaagctagcggatgttgtgcatgaaggttaaaataatttcgtggaatggttgtgtcatttctcggtgtattctacagacggtttgttggtcttgcatcttgcttctttcctcttattctttcttttcgctttcctgcaggttgcagattttttattattattattttcttttgacattcttagtatctata

SEQ ID NO: 3247 - DNA, 808 bp, Emericella nidulans
ggtagaatcggagaccgtgagatcccgcatcttgaatatgcactattatatgccgccgcggtgtatgatcgtcgagctgatgacggatggatccacgcacgaggggatattcccattcatggtggagaggtgccgcgaaagctaacggagccttatgttgcaagaaaggaatcaactggtttcatctttaatcggctttgggccgctgtcaaacgcgaggcgttgactatccttgcggaaggggtgtctgttccggaagagattgatgcaatgtggagaacaatgtttattcagggcgaagtctcgccttgcatgatgatggatggtgagtatctggccatggcactgctaagcaggttcagaatgattgctaataaggatttgaagcggttggactcgacactgttgccttcatcgaacaacactacatcaaggagcgtggcctctcgagcgaaaagacagtcgactacttgcaagaaaactacctcagcaagggtaaactgggcactaagtgctctttgggaggactttaccctccggccttcccggagaatacacagaccaagcagggcagtcctcacctgttagtcctcgacgttgggcttcgggcagagacagctgccacgtccattggaaccccagccggcaagattctgtccttggccccagacggagacagaatccagcacaaggttcagacggttgtgccaaaccagcttctcccggatggtattacaaacgatcgtgccaccaatcgcatcttctggacaaacatgggcatccccggggggcttacgatactgtctgc

SEQ ID NO: 3248 - DNA, 534 bp, Emericella nidulans
gacgttggcagagacactggatcgtatgagaagttgaacagtcttgactcttgtagcgtggatttctgaagggaagcggcgagagagcgacgtcatctgtcctgcttctgactgttctgggacgcggcccggtttgcatccgcagacgactctgggagctcatattcctcagttacagaggaaaaccggacttgagccggttgctgcttaattttagcgtcactgctgcccgaatcagaatgtcgtccggaagccatccggtctacggactgaggctctgggtttgctgcagaatagccgtcttgttagaagggatctctggaaaccggttgggggggggtggggggggggggaacttcgattgcccaccgaattgcgcagggtttctcccatcggcgaagtcagtctgtttggacgtcataatgtcgaggactgcgggcgcaaatcatgcccctccaaagacgtaatgatcactgaatcgatgagagatggaaagtgggccaagtgtacgccatgtaaaaattgctttttcgg

SEQ ID NO: 3249 - DNA, 1201 bp, Emericella nidulans
gaggtttggaaacgatagccatgtcagcgatgtggaatgttggcaggacacggacccccgcattcaactcctcccaggaacaagagctctgaaccgcttctttcccgcatccggttcactttttttttactctctaaaacttcgaagactcaatcaattcctactctattttggccctggagtttattcctgacgcgactctcaacgcgtatcgagcctgagccagcttatctcgttgctcaacggccatgacttccacagctccatctgacggcactggtgggtcaaagaacgccgattattcagtcaatgacattctaacgctgatctacaggtatcatcgatcttgatccgtggttagagccttttcgggaggctatcaagcgccgattcgattatgttgagagctggatcaagaccgttgatgaggtggagggaggtctcgataagttcagcaaggtgagtagactatcaactatccagttgtgttccccattttctctataacttgtgtgcaacggctaattggagagcttcttccatggggacgatagggctatgagacattcggcttcaatgtcagcgagacgggcgacatcacctacagggaatgggctccaaacgccatagaagcggcgctggttgggtgacttcagtacgtctgtctggcacctggggtgggtaaaatcgccagttaaagcacgttactaagactggcagacaattgggataccaaggcgaatccaatgacgagagacaacttcggtgtttgggagattgcccttcctgcgaagaatggcacgccggtcataccgcatgatagtaaggttaaggtatgtttacggcatgcagcttcaccaccgtgggggttctaatgctgacttcctacagataactatggtcacccgcagcggagaacgtatatatcgtattcccgcatggatcaagcgtgttgtgcaagatctgaatgtatcgcctatctacgaatctgtcttttggaacccaccaaaggcagagcggtataactttcagcatgcgcgccctaagaaacccgaaagcctacggatctatgaagctcacgtcggtatctcgtccccggataccagagtagcaacatacaaggagttcacagccaacatgctccatcaaattaagtacctaggctacaacgcaatccagctcatggcggttagtcctcata

SEQ ID NO: 3250 - DNA, 4981 bp, Emericella nidulans
cagctgcggcgattgttggtagggacacccccgacgcgaccagctacttctggcactgttcgcaagccgctcagcacgtctactacttcctcccaccgttctcggccgtcactcagttctgccgatgagaaatcgcgctccgtagccagctcaggtgatgagaagcgggggatcaccgggtctgctaagcgtatgtcgcttgcgggcagcactgcgggcactagagcccctgtaaaatcaacgacaactaccctggaccgccgcgctagcgtagcatcaaccaccgggacgcgtacatccactacttcctcgacaagaccagtgacaaagccgacgaccacaacaacccggcctaccacttcaacaacagctacgcgaacggcaacaagacccacaactaccgccgcgaagcgattgagtacagcacccaaaacttctgaggaggatgccatcaagttgcaatctctacaggacaagctcagcgagagcgaagctaccattgagagtctgaaaacagagctggagaccgccaaggagaaattgacactgccacctcagaccgaaggaactgaggcagagcctaacgactctacaaaggctcttcaggagcagcacgctaccgagatcagtcaactggtggctagccatgaagagcagctccaggctttacgcgcccagcttgagaaggcggaagcgaagaggaaggaaatcgaagagaagtcgctgaaggctctggaggacgcatcccaggctgcagcctctcaaggcgatgagaagctgtcggcggctctcgatgagctgaagcggtctcatcaggcccagctcgaagctctcgaaagtgagctagcagcacagaaatctgcagctgctagttacgccgagcagatcgattccctcaagattgagttgcagtccaagtcagatagtctggaagcggccgccaaaggatttgaggccgaaaaggcgtccgccctcgaggagctgcgcggcgagcttcaggctgaaattgaaagtctgaagcaatccaaggacgaggcggtccgcgctgccgaggaatctactagacagtccattgcggctttggaagataaaattacctcgctccagtctcaactgacagcggctgagtccgccactactcagggccaggaagagactgccgctcagcttgcagcaaaggagaatgaagtttctgaactaaggcaggctgttgacgccgcccgagcagagcttgaacaagcaggcgaaagggctgccaaagatcttgaagcaaaactgaaggccctcgaagctggtcatgaggatgcgattgccaagctcaaagcccagcacgatgaggctttggcctccgctgccagctcccatgcgtctgaacttgccaacgcaaaggcagctacggaatcatctagttccgctcatgcgcaagaactcgaggagcttcgagcatctctcgacaaggtcaaggaggatgcggtgagcgagctgcaggcgacccaccaggcggagttgcaatctctccagcagagacttgacgatgccgaacaatcccttcagacaacgcgacaggctctggaagagggcgccaacgccgcccagacccaggctctccaagagatcgaatcgctcaaggataaagtcaacacattggagtctcagctatccaccggacaagaagagatcaaggccctccaggctgagatccaggccaagcaggagcaagctgacacacttcaacagaacctcgttacattcgagaccaagctaaaggcgaaggacgcggagcaggaaggagagatcaaggctgctgaggagcgagctgcagcagcagagagagccctaaaggagcacgttcagaaggccgctgctcttgctgaggaacatgccaatactctagaggcgctgagggttgatcatgctgcggagctcgagagagtcaaggctgacgcctccgggtcgttgcagcaagcgcttgaggagcttcagtccaaatacaatgatttgctgtcgaagaacagtgacatggaggcgtcccacgccggcaagatcgaagcacttgaaagcgaactgaagctgaccatggagcgcgtcgctgctcaaagtgccgctcatgcgaaggaacttgccgaccttcaacaacagcacgaagaagcgaaaattaagctgcaatcagaattggaagccattcagctctctaaggctgccgaggcggactccgagcacagcaaagccatcgaggagctcctcaccgtccaggagtctaaattgtctagccttcgtgcggatctggaatcttcgcatgaagcaaagttggatgaactccggaagtcccacgacgctgctcttgcagagctcaccgctcaactcactgctgcccagactgccgcccaggatacctccgtacttgacaacttgaaggagacaattgccgatctagagaaaaagctcactgcggcggaacagtccgctgccgattccaagacgcaacatgccaatgagttctctcttattgagaaggaaaagagtgaattggagcagaagcagcaggcagcgaccgctcgtatcgaagagcttgaaaaactcttggctgcttccgaggcagccaagtcggacttggagacggcgtcgaagcaggcgattgcaacccaggacgagctgacgcagctccgggccaagtatgatgcaattgccaaagaactagacgagtcgaagtcgcacaacgccgcgactgaggaaaagctcgctcaaggcgagaaggacttgaatgcgcagattgacaaaaacatgacccttctcaatcagttgggtgaggttgagtcgtctatctccggcagccggaagcacatccgagagcttgaagcggacgtggcagcgctgaaggctgaaaaagacgcgttgaagccaaccaacgtcgggttggaaggcagccgatgggcaactgatgacgacacgccggccaccgagaataaccaggcagccacagtggaaggtgaggatatgggttcatcgatcgagggaacggtgggacctccccgtctatgatcgtcttaatctcccctcggagatctgttgtgtgcacaattactgatcctgaatttttttcccacatagatggccagcatccaggaacagcttaaacacattcgggctgccaatgacgactggtatgacgaacaccgccggtaggtgctttcttacacaatttcgaatgccgctgctgactgctgtagtctcgttggcgaactagcacaagtgtcacggcgggcgacgcccaatcctaatcagtctgggacaccgcagtccgaaaccgtgatcgaggttgcctcacagtgagagtatccgtatggaatagccaggttcggccgagctcgttgaattttcccttattctttctctttgtatctgccttgtataggaataggatgtatgtaataaagtgctcaggatacccgattgaagtaccgtcgccgtggattgatgctatatgtaattcggtatctgggtagcgatgaatatgttatctgcaagagattactattattgacaagaactcaatgagaaatataccggtgcacagctcagatacggtgtatatatatatttaaaaaattcgccgacggtgtaagttcctcagacttgcttagtccgacccaccggccaccacgaagttcgaatgggcaaacaccacataaaaagccgccatctctgttgttgcctgtctttctccagttcagccatttcccgttttcgctggatctcgtatcttgcaggggtgagaatccccaacggtggcgatggcggccttggcaacatacatgatgcaggatgatagccgtgcgcacccacgggtaagaaactaatctgtgctacacgctctgtaggagcagcgtccacacccacaagcggccgctggtattcctcccatgtctccgacgtgggaagccgtggaagaggccgtgccggcacgttataggaatggataggagaagacgtgaatgcccgacaaaaggcggcgtaactatcagcgaggacggtatcctcctcttcctcatttgcgtcatcgtgtcttccatgtccttctctgtttccaagctcatcggaatatcggttataataatggcgatgacggcgatgttgcttgtgcgattcagttccaagtccatgtccgtatctgacttcgctgtcaggatactcataggcatattcaaagtccgtgaactgattctgactggctgagggatcatgcgggattctgacagttgacgagggatgcgtgccagagcggtctgtgtttgtctctggacttgcgttcgatgctttggcgccggtatttcgaagagtatcctgggagaatccgtcgtaaagagtatcggtgtcaacatcacgagacagtgggagatgaagataagttgagaaccatcgtttcaaccgtagtgtcgaggggggtttttggcggcgtgcggaggatgaggatgtcgatgtagatgacaaggaagaggaggagaacgagaagctgcgggataggcgtggcatagtgaacgacggagaataatatctggctctagatattcaccagagcatggagggtcgtggagatgaggtgagattctaatagggagccataaggagatggttcgatgggtttgaagaggagggaatggggatgacagctcgcctacacgggcgacgagatgacaacacaagacaggacggggaagactagctagaaggctcccataggcgaacttcaaaggatgggtcggatgataatcggagagttggaatcggcaggacagccgccattgtacagcaagtgagtaggtagtacggaaaaagcatgggattctttagcatccaaaagctgcagtgtatgtacacccccgcacatgttcatgtacgtagggtccagaaaaaagacttgaccgatgatgagtgcaatatggggtcatttgcctgcaccccacggcccctataataatattgt

SEQ ID NO: 3251 - DNA, 2728 bp, Emericella nidulans
gcccccggtctcgcaggccttccccgacgccgaagcgtgaagcccatcattgccgccgtaaacggatactgtctaggcggcggcttcgagatggccgtcaattgtgacattgtgatcgcgagcgagaaggcgagcttcgggctgcccgaggtgcagagagggatcgccgcggtggcaggcgctctgcctcggctggttcgattgataggcaagcagcgcgccgccgaaatagcgctcagtgggctgccgttccctgcatcgcagctggagcgctgggggttggtgaaccgggtggtggagcacgatcagctgctagccagtgcggtggaaacagcgaaagctattgcaagaaacagtccggacagcctgcgggttacattggaaggcttgcattacgggtgggagatggccagtgtggaagaggcgagctccgccctggtcgatgagtggtatcccaaactgattgcaggggagaactttcatgagggggtcaaggcgtttgtggaaaagcggcagccaagatggagggcgagcaatttgtagataccataaatgataccttacgtactatacagtatcgcgatatcaagatgcgggatattctgattgatgagcgagtacaggcttgtattacccgctgtaccgcattgaaagcgacgtattttcaatacaggatcccgctatactgcaacaattacgcgatatattcagacatggatggtctctagtttcgtagactcacactcagtggggggttgcccacatcatcccacttgagtcctgcacgacccgatctcgggcaataatccagttcgattgatggcctgaatccatcccaatgccatcacttgatagctcgctatataacagtctcaaaccaatctcgcccatccgtcttatgcgaagttctacgaattaacgggactgaccagaatcctcgctgggctccgacaaaatggggtccatacaggtcgaggacttccttggccaaggccaaccgactggagacagccccaagtccttcgagattgctgacctgggagctgataacacatctgcgaccggattgaaggaagacatcatactcgtgtcttggtttatcgcgctcttgcggacgagggaaagcagccaagtcagctatgagtgggcgtatggaggcggggatagtccaaaacggctggcgatggaggaattgaagattggactccagagcagtgttgaagaggccgccggtgcggtttctgactatattgcgactgttgcgactgccgtggcagacacatctggctcgacttctctcattttgagtaacgagtctctgtcgcagacggctgaggcgaaagatgaggtgagttgcgtatttcggtacttaacgagtcctgctgacaagaaagggtgtgcttcatctgaaactcggcttcgagaatgggcgccttgagatccgcccaacatggcataccgagaatatgctaccgtacacagtatcccgatatattaacacattcgtcgatgtggttaaactatgcattgcgacgccaagtgcgctgattcaggacttttatctgcgaccgacggacttcgatctagacagtatctggagctggaaccacgttctacctccatcgtacaagttctgcatgcacgaaatggtatcagagcaagctcgcaggttccccgaaaaagaggcgatctgctcctgggacggcagtttgacatatggccaagttgacctgtattcctctttcgtggcggcctcgttgaaagacttgggcgtgagggttcatgatgtcctccctgcatgttttgagaagtcgaggtggacaattgtcgcggttcttgggatcatgaaatcaggagcaacgtttgtgcttatggacccgacccttccgcttgcgcggcttcaaaatatcgcgcagcaggtgggcgcaaagatgatgttgtcatccagcaagcagcacgatctggctacgatgattatgccggatagcaacccttttgttgttggggaagagacatttgccgacgcttctaagctgcagagtattccggaattggcaccagtgccttcatccgccctgatgtatatgatctttacatccggtagtacggggactcctaaaggtgtgtactcatggtagacgcttcaaccccatccgtgtgtccatcgttgaccctccttaggagtcaaactctctcacgaaacgtatacaagcagcgctatccctcgagctagagaggtcggttacacggagaactcgagggtccttgatttcgcgtcctacgctttcgacgtcagtatcgacagcatgcttctcacccttggaaacggcgggtgtctctgcatcccctctgacgaggaccggatgaatgacattaacggtgtgatccgcaacatgcgagttaactatgcgggtcttaccccctcggtcgcacgtattttagatacagacgtaatctcgtcacttgagggtcttggtcttggaggcgaggctgtttcggcaagagactgcacggtctggggtaaactcgcaagaattatcatcggatacggaccttgcgagtgcacgattggatgtacagtgaacggcaacgctgcaactggcagggattatatttccattggcaagggcaatggagcagctatgtggattacggaccctaacgaccatgaactgctggtgccagtcggtgctgtaggtgaactgcttgttgaagggccaatcgtcgg

SEQ ID NO: 3252 - DNA, 501 bp, Emericella nidulans
gattgctaaggtgcatacctcatcctcagctggccctccttggacttaggcacgatgactgacgattggcttcgacagggaaagtttggcctttctatcaaccctccagtaatcccttcgtccgacggcgcgggtgaagtcctgcaaatcggctcatccgtgacatgtttcagaccaggcgaaaaggttgttacgcatctgaccgtccaccaagacgataacgagccggctacctttacggatatcgctgcgggtctgggacacggtgctcatggaacgttgcggaagtacgctgttttccatgaaagttctgtggtgaagatgccgagtacactgggatttcgagaggcggcaacactgacatgctcgggattgacggcttggaatgcgctttttggaccgggtctgctagcgaacgacgagggagtttcaaatgcgccgagggaaagtatgtcttgtcacgggacggagcgttagtgttctgcctgaggtatgtggagt

SEQ ID NO: 3253 - DNA, 521 bp, Emericella nidulans
gagtttaccattctcgggctctatacacccagatgcattatccctagtgaacgttgtggcaattccatttcatgcacaaaacaattaacccaaggctacttactcgttttccttgcgctttctagtacctgagaaaacatccactgctttcagtagcttgttcagatcttggatagagtatagtgatccttaaaactctgagaaataattggtcgtattaaacgggtctggccactgctgcataatacgggtatgagtcacacagcatgctacatggcatataagcttcctcaaccgtatcttgtcattttgatttgatttcattgtcagtataccttcaagaaactgaaaatgtcccaatatgactaccaccttattggtacaaacacccgctactccagtacgtccgcctccccctccccaaggatcctgcccttacgccgaacgaaactgacatgaacaggctggacggcccgagttgaaacggtcctggagtacttccaaatcccgtacacgaatga

SEQ ID NO: 3254 - DNA, 2713 bp, Emericella nidulans
aaaaaaatagaaaaaaatataataaactgtttagaaaattaaaaaaactaaaaaaaataactaaaacgaatacaaagggaaaaaattaaaacctaaacataaaaaaacaagagaagaaatacgcttaacggcagtacaccctaaagcgaagctgagcaaataaacaagctaacgggtgaaaagcacggccgaaaccatagaaccctggactactaggtagcaaaaatagggctcgtttcatatctctagaaacgcctcgtacataaggctggtcttaacctgtcaatggttagcttgaggcgcccaggaaggtcgggttgtaaatgcgtgagctcggtagtttagactttcgtgggcttacgcagttagcaatcgctgcgtggtccattgtcggtttaaatgtatatattgttgtcaacaatccacatctatcctacaattacttgttctgctgattctgaagtgtatttatcatgtagaacacatccaacccctgcttaggttgcaatcccggtggcttagagggctcgcgtacattctctaaaaatatatttactgatatgcctccagccaaccactttcatcgaacatcaaaagtaaacaagagactcaactaagactgatttcttttagacaggatccttcatccgttcactaatcgcaatttcaagtggatagacggaaataggttcaccaagacaaggctgaccatcagccttgcggccatcctatgaatagctagtttaatctaacatacatccgatctagtcgttcagggtcgcagccttgcctttcctcgaatatgtggtataatcttctttatctatctaaggtgcctctctggctggctttctcaattacttttctgctttgaaagagaaataatcgacagttttgagtcctcagtacgtctgcattatacaaggtatatgtcgccgctacaccatatttctacatacaaccagagtcccatccaagcctaccagtgccatacattttattacccccttacactgcttctcctcccttaaagacagccctactgttactgacctttctccctcagatctcccttccacctcccgtgtctgaccatgtttgaaacccgcctctgcggcgcttgtggcgagcctgctaccggggttgccggcatttcccagagctggtacgaaacctgtccggggtgcgacgcaatcaacaatggccttacaatgtgtgatgtgtgcatggaaggcgatgaggagattgaaggggtctgctggaggtgcaacgatgaagaatggatccgttgttcttatgaatgtgagaatgggtatgtacaaagggttgagcggtgtcctagtgagatgcattgtgatcactgggagtatgaggatgactgagggtttagggcattatatggtagttaaggatccctgtcttgtcagggcctaggactctttcgatgggctatcgtcagatgtatggagatgtgaatacagtctctgtgctttgttccttggcctctatcttccagaagctcgttctagatgcactttttggtctatccttgagtctggattattctgcacagaactcacagtccatactgaggaccggaccttcaaaaccatcgaatacagcccgcatcttgtatacaggttaacagcataccataccccttactcacggcatatacgagcacagatcacccatgtctagggcatggcgtatacgaggtcgagccacagcaagccacggcccagagtatgaaacatgcatatgatacagtgagtctcacggcctcattcgcatatgcgccaccactccatgtaaggagaacaaggtggctctggggcaggaatggggggcagtggcgaatatagatttgcgcatatgatctacaggtaattactggccttatggtgggggaatacgagtaaatggcatgtatagggtcatgcatgccagaaagattttgttggtagtatgacccttcgccctgaagaacattgtagaacaaagccgtctagatttgagatggtaggcgccgtgggagagtgaaccgtagggtataaatatgcggccgccgctcatgaaacctttcttcctcaagcacaacaaatcatcacatcctgatctcgctttagacaccatccaacatttcaagatgaagtatctcgtcgccctcgttgccgccctcgggtaagcactccatgtctattcaagtctttttttttctcgttgcaacataggaccctgctaacctttcaatagtctctgtgtctctggttagttatgccagcctcgtttcatcttccttcgcagctgacatcccagataccatggccgtgtcctgcggcgcccaaggaagctccaagggcgtacgatgcgttgccatcaaccagccctgccccagcggtttccggcctgttttctatgatgatccagctccctgctataacaatcagcggtgctgtgtttgaggtcatggtcagggcggcgttcacttttgtacggaaactggagaatgcggtgggtaaattagttaagaggttcgtgcgtatcgtcacgatttggcctaggccacgaccgggtgtggttcgacgcgagattgcgatttctcttggggtgtaggtagaggtagtgcgaataggtcatgcctgttaagtcagcagtgcgtgctagcaaatgaatgatatctgtgttttcagaacattgcctgtggtagcag

SEQ ID NO: 3255 - DNA, 3684 bp, Emericella nidulans
ttccaaaacaacaaaagtgaggaagacatacatcatttcttcgaggaccctacttagcttctggtggaagcactgaacttataagatggtttgtcagagctggttgtttcacttgttgggcttggcgaaattctaagggaatcgtgtaaggcacaccgtcttctctgcttcctcggcccaatcaattttactgatagattgataagtatataggtacattgtagtttctcgagtggtctgcagtcttgggagatggatagatcagggtggtgtgttgtaattggagtttagagccgatttggagaagatggacaagaaaagaggagaggagagaagttcagggaaggatcatgtgagctgaccatgtaattgaaatatctccgtctttgaattgtggtgttatgcaaaggaaaggcttgtcaaggactcagagcccagacactacaagtatgacctttaaattcaatatatcatgtccttctcctttggtattcttcttcgtatttaactgatgcttttctctaatgacagagagctgttataggtacctctagatacttctagagtgatttccttccaacctgtcacgacgagcttctcaacgagcttctcaagccacctgggcagctctagatgcagatctgcatgatcgatcgcttgtggagactacgatgacgatcaccaagccgcggccgactatctgacaactataaaggccggctccccgcagaatccaatggagtccacatcaatttcaaccacctatttatcatgaaatcccttattacctccctcctcccagcggctacgctcattcacgcagccgccatttggccaacgcattcatttcacacaaccgatacaaacacacccatcctcaacatcaccaaattcggcccaacagcccccggcttcctcttcatcgccccctccactagcaccggcggctcacctgcgatctacgccgacaccggcgacctggtctggcacgggcccgagggcaaaacatacgcctaccagccacagacactgcacggtgagccagctctcaccttctggcagggccataacgtcaagggcttcgggtaccgccatatcagcatcctacatgcgtcgaatgaggaaatccaccgcgtaaccttgccggggtcaaaagatagttcattcgttacagcgacgaatgagtcgtttccgtcttatatcgacattcatgagagcgcgattacagagcacggaacaattctggtgacggctgtaaacgtgacgcagacggatttgacgtttgttggtggcgagcgcgatgggtgggtccaggatggactggtgtatgagattgacatcgagaccaacgaggtcttgttccggtggagtgctgttgaacatagcgagcagttgcccttggagtatgtggagtatccactcaatgatgcggggagaaacagctctgtcccgtacgaatgtccgcacctgaactccgtagccaagtacggcgatacatatctcgtttcgtcgaggtacatgtgtagtatctttctgcttgataaaaagggtgatctggtttggttactccatgtatgcccgtgcctgccctaaccttgcctcaatggaacgagctaacaggtacgtccagggacaaaaaggaggcacatataccctcccctcaaccccaggctcaaccttctgctaccaacacgacgcgcgcatccacgcacacacataccccgggcaccccaatgagacgataaccctctcacttcacaataacgacaacacagatgccaccattccgcgccgtctgacaaccgggttagtctttaacctgcacccattcaacaaatcagctacgctgatatcccgcacctacgatgcccgggatcctgtctcggccgtgtcccaggggaactaccaggtccttccttctaacggaactggagctggacttggagggtactatgtggcgggccatggcgctgtaccgaagatcgaggagtatgattctgccgggaaggttgtcatgagggggtggttcggtgcgaagatcgagaatacaagtacgagtagctatgattggacttcttatcggggctatagagaaaattgggttgggagacccagaagtcgtcctagtatttttgcttgtcgggaagaggatgaacagaaggttgatgtttgggtgagctggaacggggccacagatgtaaaggggtggaggatttatgggctgagctcgagttctaaaggggaaagaatgagggtcttgcgggacgtggcgaagagtgggtttgagacgagggctgtgcttggggctgatattgacgatattgaagttagggagggcagtgtggatgtgatcatagtggaagctattggaggtgttggggaaggcgccaagagtgaggctgtacgtgttgggtcctgctctacgcagtaaaagtgaggatgtgctataggtaactatgagagcaaccactaaatattcatcctaggcagacgccaatggattatattaagtgccttgaagccatagatgggtgcatgcagaaagtatcttagtataatacatggcgtacaacaaagaggggtataaacaaggcacaaggcaaacgcaaccatagagacgaccaataatgataacttatagcttagatgtaagtgccttcctccgcggcgccctggtcgacacatcgacatcaacatcagtagcgggcgcacggctctctgcgctctcgaacaacgtccggccaacattgtcagacatagtcaggacccgcgaagaaacagtggcgccgtctcggcggtttttcctgcacagaatcagcttacatgcacgatagggcttaaacgataagaaagctaatagttaaacaaggcacgtacccctcacgtctagacttcgcaatcaactccataaagtcccaaagacggccttgcgggaggagtttcccggtatctgggtcccgctctggcgtccactctggggcgagtctcattttcgtggacgagcggttttctttgctctttgcgacgatgatgatgccttcctctgcgaaacggtcgtacgagtttttaagggcttctttgttgacggcttcgaaataggagaggtcaccctggtggtagagagttttgccgagctatggatgttagcgagggctgagacttgaaggaatagagctgcatactaattgtgcattgttctgcgccttgcttaagttgatccatacgtcctttggaccgtttaagggcggagtaagccctagcaaggacacagtgccgagccacgaggcttcaatgaacggccaaatgaggaagcagtagaaatcgtagttctcgcgtccgcattgacgctctgtttctgagagttcgatgaactgtggtgcgcccgtggaatctctggtgattgccaggacttgatctttctcgagggtccgcaaggtgttctccaaattagtagtgagaccttcaggagggaatatgaattcgccgcggaagagctgttccgattagtatgcgtgtcgtaggaggtgatgtcaatggagaacgtacctgagatagaaaggtaacatgatgcaagagatcgccatatgatattcgttggtgtgcgggtccgcctccttgcttaacctttgtgtacatcgctgccgacacaagcgcctcaaaatgaataggtggatggtcatattc

SEQ ID NO: 3256 - DNA, 691 bp, Emericella nidulans
tactgtatccctactcctatggggattctgccgcctccgcctctaccacgcgcctcttttcgcaaccacatcatgccctacaacactcgtcgcaagtccttgtctcttcctctattgggaattcatcttccaaacacatctcgccgctccccttctacatcaaaaccgcctcacgcgaccgacgagaatactcctccttccaaaaaggttaagagatcgcacgactcggcgtcgacgtcgccagagcctacagaccgtggctcaaatccaagcagaccctcggccactgttcgtccatctggtcgacgcgcgacactggaacaaacacctccccagtcccctactgacggtggtgtcgcatccaagatcgacctcgatgggataaacgacgatatcgtggtgggcgtgattgagcagttggaaaagacggctaatcgcccacatttggtcaaagagctggctgcggtcctcattacatctaacgataatgtggcaaagtaagtttcaccctcatccccttcggcgcagcaatagagctaaccgttgcgtctcttgcttagttccgcgaaccctgctgccttattgtcttctcgcctgagcgcttatatgaagcgtcattggacggcactggcgccatgccccttggctaaggagctcattcctatacacccgcgaaaggtgtagttcttag

SEQ ID NO: 3257 - DNA, 2387 bp, Emericella nidulans
ccaaacgcagaagctaaaggaagtgctgtggtggtgtatcgaactcgaggatcgacgaccgatccgtcactggtccaatataggttctggtgcatatgttctataattgagccttgagtccatcacgctgtttttggttgtcatcatctctattggggcgtttcttggtccatgtgctctctaaaattgcatttctcgccatttgccgccgtcgcaatatgataccttgatgaaagagtcttattatagtgcagcaggtacaaaccataaattttttgtaaatatgtcttttatcaattggaaacagaataggaacaactttatttacacattggccacaaacagtccggggggcagcttgagagaatccaactgatggaaaaacctcaaaacagatttaccggggagcagcaacggggttccaagctgtatacttgggcttggtactagaagagcaacgcggttatttaaatgttcgatacgcggctcgtggaatgtcctcaatggtgtacttacgtcgaataggtcttgaatgcagcgcggctcagagtcaaagtcggtctgtgctcccgcagctcccagggtcgaacaccaagctgcatgatcttgtcatttgtgggaggaatgtcgaccatgtacgagatccaggcgtgcctgcaccgagtcagtacggaagatcttatgctgatttgagagtaaggattcctcaccagccaggctcaatctgggaggggtcgtattctttctgcttgtaatcaacccagcgagttcggacttcattcagtcagcgccaccagttgaagtgaattgcgctcgaattcaactcacggggaagttcttcttccatattctcgtagtacttgttgccgtagcggtcggtgccgattagagtaccggctttggtatcacctggaattgtattgcgtcagtcgctggccggttcggagcagaggggtaaagataggaagccataccgatgtactatatgcccattgcccagtattagtatcacgacacacagaatatacaccctaagatcaaccaccgcaagagtgagaactgcatacctgcatttggtggccatattcctatacgtaaaaaggacgttagcaatcgtgcagtacctattggcgcagctgtttcggtcgcagtatagcccaccttgaagccaattcttctgagatttcgcaaggttcggagaatagtcgacatcttgggcgatgcgctgtttgtggagcttgattcaagcaaaccaagagtatgtatgtcgtcgtcctcctgggtagtcgggttccgttctgtaagttgtaaaggcctgatccggcctagcggcagactatgtttgcactgtttgcacactgtacataattggccgcggaggacaagaaagtattccatatgcttgaggtctgtcgcaattgtcgttgaaatctgctttttgctgggctgtggcgcttgcattatagcacacatatacgatgttcgggcgtcttggtggcaatacactccggtgcgctgcgcgcagccccgtggtgcggcggaggttctgggagcgcagcttttcatcgcatataccgtccccaacaggtacaactgctccttcaagtgcgtcaccgctaggaagtattacgacggagctggatcggatatcgccatgctttgaggttcccgcgtcgcggatatccattctggactctcctgcgagtttttattctacgctcaaggtgcgcactggtcctattatgacgacgagcgagggctaatccgagggtatcatatcggcgcttagaaaaaaatccgaaaagctcgaaaacgcatcttcctttctacgttatatatcggcaaaacggaatatgaattgattcaaaccatcaaccaagctcttcgcgacaaccccgatctgcgagtctcgatcctcaccgatgctttgcgagggactcgagagtcgccgaacccctcgtgtgcttctcttctagcgtcactagtcgcagaacatggaccggaccgggtcgatattcggatgtttcatacaccgaatttgactgggttgcggaagagatggattcctcgacggataaatgagggctgggggctgcagcatatgaagctatacggtttcgacgacgaaattattctctctgggtgagtgcttgctgttagaaaacaaagactcggtgactaacgaccgcacagggcaaacctctcaaatgactatttcacgaatcggttagatcgttatcatgtgttcaactcgaaggaattggctgattactatgcgcgcattcacgatgcagtctgcagcctcagctttaaagtccttcacgatcctcacaataaggccggatacgttctccagtggcctagtgctaatagtgctggatctactt

SEQ ID NO: 3258 - DNA, 1269 bp, Emericella nidulans
tccgaattgtgttgttcgcggatcaggtttagtctgatgcctccgtcgcgtcagcttcgagtctaatatttatctctgctgtagtgatttgttagtgtcatatggctccacaaacagagggcgcgaggaatcatcgaatgtccccgcgtgcttcatccaaggaaccaatggccatactgtatgcctcgaacatgaagtgcatttgtcgtcatatttcaatatccggccactatttgaggtagcgattaatcttcatgacatctaatccctcagatcattcctctgcttgccatgggggttctcacattgcccgccaagcccgcagcctgtgcctttctgacgagcatacgttgcgacccagatatagaccaagggctgtattaccgcgaacacattttcaaaggcggaaatatgggattttcaagacgtcaagataccaactattcttctgggcgccgtcgtgacgtcgctccgaacatgccgtccgatgttgtctgtttaaccctacccgaaacgcagcataaagtacaaacagtattgatcgagatagtagctcaaaccgctctttgagcagagacataactaaagcctagttcttagtttataaagctttatgttaaacggttttttggacgtctttatatgatctttccttgccacgatatttgaggtcaaatttctcagcggagacacttcactgttcgtataacttgactatatgatgtcgcctggttgttcgcaaatgcatatgagaagaggacattagcggcttccgccagcaagcggtcccaagccttcagcccttcttctgaggcgtcatcacgtggcaagttataagacgcagtaagtttataacccctattctgaggtatgctcatacaagccatgctcatgcaagccgtgcatgcctgcctcgtcaatggccgatgctgtagcatcaaggcgccttttagccggtcagtccttctttcgcgtcgccacgaaaccaccggcttatttttcctgctaagccccgctccactgaacacacgtatgctcgcctttcgtttgaatacaactattctgagcgaaagagacaggctttgtgcattcctggacctcgatttgatcaggacgcactgaatcttggaaggttaaactcgagctgaatgcaacatcttctgcactctctttaccagactcttctcgaattgctccacgccatcatccctgaccggtatagtaccagctttcatacgtagacgactggccgcggggagcttcatattg

SEQ ID NO: 3259 - DNA, 4022 bp, Emericella nidulans
aaaaaagaatgtaattcgacagtttcgattcatgttcaaagactattcaacggttagaacgtagctcaaccgtcaacatacataaattgaaacaggacggattgatagaccgaaaatctggtgtataaatacattgaacggggtataaaaggaacagaataaggtatggcttacaattcagtcttgtcagagttgcgcttttttgtttttgtttctggcatgaagccttccagttccatccactcggcagcaaaaccagcaattagaagactccaatcctctaccgtgtcgatatccaggtgttcagcatcgtccttgatggtgtgccagacacttggaaatccaccgcgcgtgggcgagtagtcgatgacgtgcaggacgtccactccacgtttgaggaatgggacatggtcatcccccaagctaccataataagataattgccgctcatttgttgagctgtcaggaaaccaggtctcgccgttcgacttgaacatctttagatccctaaggcgacgttcaacattcgccagcttctgataggcccagtgcgttgttcgataataagagcgaattattgggtttttggaacccagtaagtccaagagaacgaacagggatatggatgaaagcggcgttttgtagaccgatattgctggatttacttcagaatcccagtgttgcgcaagtgagcgagccccatacaaagaatcagtgtcagtccatgctttaaaggcttcttcgccgtccagaaaaggatctggattccgtggtactcgagataatcgtcaggagagccggattcccatttctttgtcaaggcctcgtcgatactgcgcatcgcatgcataatcatcgcgcacggagcagcgctatcaatggctccgataaagcctttaggctcgtatttactatcgtaatgggcgacgagggtcaatcttcccacatcgcccttggctgcgaagggaggatcccgataggcgatgaagttcacaaaagggacctcctttccatccgacacaggcgtcgtagaagttgagttctgaaactcgacgttccacttcgggagtgagttccggaagaaatcgacaaaatgattaagaaccgccgtagatccagcagttcctgggacacgagggataagaatgggcgagaggatggcgccgtcgtggatatcaaagtcctttcccggccggggaagcgcctttagggccgcgtctgacacgtcccgatatgcgccactgagcggaagaaaatacgaaacggcaagccataccgagagcagtgggcgaagcccaccctgggaagcgaacctcatcgcgtctggcgaagagaagttacgggagttgtagagagataatcgttggtgcgacttggaagttgtccaaatgtctcctgtaacccactaagcctaattagacagtcagcagccaagcccgcggcgatcggttcagctttcagttcagcttcaactttccgctttctgcggactatacccccgcttaaagagctccaaagggcagttctttttgcaattgcggttgtcatccacttttcagcaaaataattttgctcaaatatattcaagatgagggtatccgtcctgctccatcctcaggtgcgctccgcgcttccccggcctgtgcggagagagctttgcagcagtttgctatttactcgatacaagacgactggcactacgggtcatcctcctaagaatgcaaacgcgcctcagaaaccagaatatcgacccgtcaatgctccacggaccccgcaaccatcctccacacatgcgaagactgccctgcgaagaggtgacactcgaaaccgcaaagatcaattgaagcagtgctgatattgcttgcaggaccccccgagaggatactaatctaccatggaggaaccggccgtactatgttccttgggatgctgcggataacgaccatctttctgttcggggtttctgtcttagtggttgctccagccttcatgtcttccgactttccgtggtatctaggcccagctagtaaggacactttcccgcgcaggcgcaatcattttttactaacacacatctcactagttgtcgttggtggtgccttgcctatgctattcgtatcttatacatccgccccctacgtgaactttgtccaccttgccttgcccatttctgttcggcgatcgcgagaacaagctgttcagtatgcaaagaaactccccccaaccgctacgttgtatataaacaccatgaagttcaatactattccgagacagaccgaggtgcgactggccgatctcgtcccggacaagtccaagatccgtcccgtgagttttcgaaaccagaaccctgccccatcgccctggtggaggggaaagactctgcagcagttttacacagcagagaaaagcaagcccggaaaggactcgaggaccttttatccagagctgtgggagcacgtttacaaacagatacagagccgctcagtgaaaggcaattgaaatcactatttccagagccatttgccaatgtagctgtaactccggcatcttatctttgccctcactgatgccagtagctcgagtggccttttcccacaatctgctcactcgcaggttgagcccgggggctggctagagagcataaacacaatagctcagttgcgcaaatggttttgtgttaacgactttcaaaccttcattcacctcacctataccttctaataacttgactttctgtttgctcatattcaccatcctgtttccttcctccattctccttataagtatccgtcctcaagctcattcctcaaactccaattctccttgcaagcatccagccttcaaactctcatccttaagctgctccattcaatcagcaatggcggctgctggcaaaggaaaatctgagggccttttaggtattactcaaagcgacgccaggattctccttctgggcatcctctccgcagacaacgcagggaaggtaggttacacctatcggcaattttacatgcgacaaaacatatcttaccggcacctagacggcatatacggcatatacgataacatctgataacacctagattgatttcaagaaactctctgttattgctccctacaaaaaccctgcaccgcttacagcgcgtaccgtcaggcaaggaagaggttttatgctgcaaatggcactgtagatcccagttcatctggggcgcaggcaactccgcccaagaaagccccggcgaagaaaaagggcgccgctgcggctgtcgacagtgattctgccaacgaaaatgacgattcccttgtcgaaggcgcagagcctgtctctccatctccgactcccaaaccaaagcgccagcgcaagaccgcccccaagccgcaagttgttatcgagaacgaagctgaaatggatcagtaagtatggcaaccttcctccgtgtttaggtcgaccattgtttttcttggaaaacacagcaccgggcccgattatgtattgatataatacagtgactctgacgattcctccctcaagcctgagcagaaacagctcgaggcagacctcaccaacgccatcaaagccgagggccaatacaccccaagacttcatcgctggaaaaccgatgaagaacaaatcatgacggacatcaacctcgatgctgaattcgaggaaatggagcgcaacaagcagttatctgaagcccggcgtagcagtgcaaagcttgctcctttgcctgaataggtggtccagggctttgcatctagaacacttgtctgctccagggctggaagctagtaacgaggcttgaattcgttggtttagttctttcgtatgatgcgcgccgctttttcccttccccttttcctttctttcgggttgtgcttacggatggggaggacgggcatgcttttcgctggatatggggatattgtctactccattcgatagtcctttggttgttttctctattgttgcacttcggggcccgtcgaccaagctcgctcagtttgttcgtttcaaaaca

SEQ ID NO: 3260 - DNA, 2167 bp, Emericella nidulans
  unsure (1)..(2167): unsure at all n locations
catatccccatccttaactttaggcggatgaactctatattctccaattctcaacagcgcgctgtacctctcatcagtagccaggaccttttcttgtgactgacaacattctctttgtttatcaagttctgttggtattcttctgtaaaaccacatacttctgcaaacttctgaagtcgctcaagtttcttatatctcaaatcctccttggacagggccatctggtcacgtgagtaatgaagatagggcaaagtaacaaagatgaaggtaaaagtatcaaatatacagttcaaaagcattggataaaagtcaaagagccctcgctatttatgttcagcttggagagatcatagtagtggcctaagttttagttctcacccatctcacccttctcacccccccgctcactcaggtgggtgatattctcaccttgttctcacccatctcacctgcacccaccctagtcttagtgtctctcacccctaaaagcagcagcacactcagggctcgttgcacttttatccgcgttgataattgtggcttaagtacggctgagcggacgggaagccctgttttctacaccctgtggtcgtatgtactcatctagtctggattattcatcatatggaacattgttttttggccggtcttatgcacttcctggcgaaatggatgcgggcccggcctagctgtagcctgtgggtgcagttccgcactcagtagttgagtagcggatcggaatcgcatattgtttgcattgtgtcccaatgcagcgaaacggcagggctgcgacagattataaagctctactgtaaatacaaagctgctgcaacggcttggcacgaatccaaccagcacgctatggccaacaagcagacctttgaaagtcccgactaccacattcaggccaagaagactatgacagctccagtaacgctttggctcagacttctacagctcaaggagggagccgagttgggggtcgcagtcgtggcgctgccaggacttgaactgctggtcgagaacgacaaggagacatactgctggagtctagttgacggtagagagtcggctaagctagttacacctcgcaaatagccactgctatctcgatgggtacatgctcgtcgatcacagcctgaaccatttcagtttcattgagaacgcgtcatccatggactttaggtataattccttggaatagcgagaatctaaactcgtatcatctgttgcccctgtaagtagacgtgattcacaggcgtagagcatttatatagtcgaaagcttgtcctagggaggtgtatcaagaacagcattcagatatttccggagctttgaattgtcaacatcttattcccagcacttcccccgggccgacgtgcagccacagccgtacagagaccatcagtcatttgcagcaatggtacgagtattaaccctaagtggggcaccaacattggtggtttcagcatattgtacgtttgcaaagactactctgatatattcggacgcagctaagtgagctaacatatgaggcttaagccctgcacttcgtttctccgtcgagcggctctgagcttgatctctccggaacgacaaatgtcgaatggtcgtcctctgagtgagattcccttctgaggctaaaggcatgaaatacctgctaacgcatacagccccgacctatctaccttcaacctctatcttttgaaaaaaagaacgaagttcccagcatcaacctcaagagtgcatccaatctcaccacgtccgatgaggagcacacctttgacggcgccgacattttgccggggtacgttcgcttttcctctttccatttttcctcgccgttccacgctacgaccagcgtaatcaatccttgcgcctgatactcgataacacatgaaccggttcatcaagcgctaacacgtttgaacacagttctggatatatcttcaacttgaaagacgcctccaacaacatcctcgccagttcgacgaattcaccgtgtctcgataattgaacatcattgctatgtatttatagatgagcccttctattaaccacgcctngtaaagttctttgtgaagacatccggatgacatatatgccctgagaagagtcaaagcggaatgggcccacctcagttttattgctagcatatngccactaa

SEQ ID NO: 3261 - DNA, 3711 bp, Emericella nidulans
tcgctgccgtagcagcctatgtcggagaagcccagatcatcggcgacgatgacaaggaagtttgggcgtttgactggagccatccttggtgttgtcttggtggtgtctggggcaatgaggctggagttctaaacccaccatcatgaagctgagatcgcttgtatatagttctaccatgatgcccatcgtctatcggctgtcggcagctataacagtattggacggttttccagactctcaagacttcatcaaggggaaagccgatggtgccatcttgcgccatctcggccgtcggctgcattaccttttggaggtataaatgcgcgtcacttaacaaaacatcaggacagaacttacagaagcaatatacatatttgtataacaaaaaaaaaaccgatacaatcagacgctcaaggtgctaaaataaaagggagacatgaaataaaaataaaatgacaaggacgagattcgaactcgcgaggtttcccactgcggattttataggtaataatacctaaacacagcgccttaaccactcggccaccttgcctttattatgttatatgctcattagtattagtacatattaaaataagtaaagtaaactgcggattactcctagcacgtggcgtccttccaggagtatacgacgacgtcaacaaccttcaacagtctatccatcttactgaagccctcagctggtctgcgaggccttccacacagaagtacagtagcagtcatggcttcctacaaccatatatcccaagagcccgactccaacactttatccgactcccgtccttccaacagtagtcaatcgttacgaatacaccttgattacctccgcatttactacctcgcagccgtcgtctgtgccggcggtctgctctttggctatgactctggtgtaattggtttagtctctcttttctcagctctaccatgtttaatgcggtccgttaataagcccgttaggaggcgtcctcacgttcccttccttcgcagacttcttctaccccagcgccagcaccaaccaaagtgagacagatatcagcgcactcgccgtagccacccagcaagctggcgcactcctaggctgtctggtcatttggccggtgacaaactctgtcggccgccgaaaagcactagccctctgctccctcaccttctgcatcggcgtgcttttcgaaatcctcaccctccattcccttgcgctcttctacaccggccgtatcatcgccggcctcggcgtcggcggttccacgaccgtcgcgccaatatacctcgccgagatgagtcctcctcatctccggggcagactgggcagtgggtaccagtttacctttacaatcggtatcttcgcgagctactggatagattatgcgtttcggctgctggtggatgacgcgaactcggcgcagtggcgggttccacttgccctgcagcttgttcctggtgttctgatgggtgcaggcgtactgagtctcccggagagcgtgcggtggctccttggtcgaggagaaacacatacgcatgaggcatggaacagtcttgtttgggttcgaggcagtgatcaaggaggccgcgtgggtgacgaattcgccgacatgaaacgcgctgtgcaccgcgatacagaagaatcagccgactttcacccgcgcgagcttctcctccgtccgaaccgccatcgcatcttcctcgctgtgtccctgtttatcgcgcagcaggccacaggcgcaacggcaatggcgtactttggacctcagtttttcagcattttagttaacccaaaccctcagccctccgaagcagcatcagcatcatccaattccttaactctcctcttaacaggaatctttggcgcccttaaggtcctcagctgcctatcatttatcctttttattgcagaccgcttcggccgccgaccacttctcatatttggggctctgggaatggcattctgcatgattgcaacttctgttcttgtacattcaatgcctattcaggaccaaaaatccctcatccaccatatcagcaaagtccctaacaacaatcctcctaatatacctctttattgtgatctacaacacatcctggggtccgcttccctggccgctcgtcgcagagctcttcccgacccggacacgctcaagcggagtggccctcgcagttgcaagccagtgggcgagtaacctcgtatggtcatttgcgaccccgtttatactgagggatgtgggtgcaaatacttttttgctgtttggaggcgtctgtgtgggggctgcgggattcgttagactttgtgtgccggaaacgagggggttaagccttgaggaggtgcaagggttgttcgaagaggttggtgggggggttgaggttgcgcatagagatgggggaagagatgatggggccgagtgggagcgtcttgtcgacgggagtgagggtggtgggactgattatcatggggagggttctttaggtgtgaacgatgaggacgggaaatgagtagatatggcccgaacgcgctagtaaataggtttgtgcatatattacttcctggtacatatttcagacgatatagttcactgagatgctagactaaatacatggcataggccgaacaaaagctaagtattcgtgctcgtgattgaaaataaactgcaaatccttcatccctgactccaaactccagaacgaaaataaaagtacacacccgcttgctaagcgaacccgccaatatgtcactgagccggtcgattcccaacgcttttttacgaccagcggccaaactccggtgtaagtaagctcattattcgtcaattggtcctccagggcaccaatgtagtaacacaccgtcaaatgcagacgaaaagcacgatatcatgccgtcggtgggtggacatcaaagccaaatccactaggctttcgctccgagtggcatccgtactgtgccggggctgtcccaaaatcgaattgctcatgctgaatggagatgttcttcgccatgttttggatgtacgctttgatggattcgtggccacattcggagtgtgcaagaagctgatccttggccaccacgatagcgtccctcaacgagttcacagtgcgagtgagctcctcgttcttcatcttctcctgctcgtacctggtctccaacatatggttctgctccttcttcttctgtcggcacttgctggccgcaagtcggttccgtgctctagtcttctcttgtttatcatcaccgggcgacgtaggctcgaccgaggttgaggcccgagtgctgcctcgactgccactcatgttgctagaaccgctccttctgcgctttggcggggactcagatgagccttcaatggtggacgggagatatgctgacttagagtcgtgggaaggaacggagtagacggtgctgggagaatggtctgaaggaggggtgacttgaccatggcggacccggtaagaaccctggtcaagctcagtttcggccgagcttcgcctgcgattgctcgggccttgcttgtgattcagttcgtcaaagggatgattggtaaggtaggaatgcacgtcactggcaccgcccgcggcgatgcatgacggattaatagtaggatgagtggtcggatgaggagcccacatattgtctcagagaggctgaaaggattgccggcgaggttgggaatgtcagaggggtacatggacgtcataaagcgttcg

SEQ ID NO: 3262 - DNA, 1964 bp, Emericella nidulans
accacggaggtggcccttttgaggtcacatttttctatccctcatttgttgtgccaccccaccaggcagtttttgatggaaacattatccctctccgtcccaaatcacatgttcgtgcgagcccaaaatatgacaactatgtacgacttactaaggttccccggcgatcgtctttcaatatctcccctacctacgtttgtgggtcagctcatgatttcgttttccttattctctcctgctccagcttcatcttcatgccttcttgtgccttgcttacttcccccacctgtcttcattatttagagcttaatgtttcatctcatgtacatgtacctaatagttagcaggcaaatgagccggcatgacagccatgtgaagtggcatatataagtgaactacagcgtgcagtgcactctggctctcatatcgaggaacggaatggtgtaggtccggagtaagcttttgctctactatacgatcctattcatgctttggcttcaaattagccgtcgcaggtatcttacctaaccgcagcaaatgctgagacgaatagcctccttttacctcagaagctggactcagaaacatgggtctaatcagttcgatgtctgcttggagaaaggtaatccatctactccgtattgtcgctagtgcatgactgtactggaggcgccgttgtagagaatggtattcaggtctatgtaaatcggatatgtcacagaagaataatcctctttgggtgccctatttacggactccgactgagcttggcacgggtgagaaaactacgtagcctgctttttggccatctgatttgtaaagactcagtgccagttgcggcggtgaacgctgtagctccctcttgggtcgaagatgaagtctcgacgtctgaagtttccgacacgtttagggacccccagctcccggctttgctgttgctgcctctcatgtcttccctgctccaactgagtcctgataatgctaactgcagagcggaagccgctgtcttgagggacagcgactttagccccaattccaagggccggctcgctcatggtggtctctcttactagtttcatcaactcgtctttcccatctacacggcgagtcaagtaaaccatgggtacgctgcccttgccttcttttcctggaagggtatctgctcgaatgcgctcaatttcctgtcggtacgccgtttcgtatatatcgaagtcggcggcgcctggtgattcgctcacgacaggatagtcaggttctgtgggatctgtctcggccccaaccattgggacgtttgaatttaggggcttgggggatacgtcggtgctgttgatgtctatcggggctgaaccagtgaaagtggaaggtccgatgaataagaatgggcagtcttcttccaggggatctcgtgcgtgtcctcgtgtgccttctatgctgcgtttggtggtcgtcgagctagtgcgtgagagcgggatctgcgatgactgtgactgcaaatcgtcgattgggtcgtccctaattttgacacttcgtattgagccggaatctttccttgttggtctgtttaaaatagagctgtacgcagaacccgattcgccgctctctggcgcaggacaagggagagcttcccgccgctgcgggtgatatcctttaacaacatcgtcacgctcccaagctctccggttataagtgttcaaactttgggtttttttgtatggtaaaggactaggcaaggatacgctctcctcaggatccatttgcgtaggaggttccacaaagtgcgtctcgtattcttggccgaggatactttgtatgggtgtagaagctcgagtcgggccaagaaggcttttaaatttcttcgcagctttcatctaaactcctgttaaatttagccattagatagaacacacaggacataccacggctaagacatggccaaaattgtttgtattgcgaagtacatttcg

SEQ ID NO: 3263 - DNA, 1011 bp, Emericella nidulans
tctaagatccgtgactgctcttaatgtattgtaatgacagacttgagtttgtttccagcatttgcaggcgcttgttgaccgatttgaaaaaagattcctgtgttgtcgggtttgcggacggcggttgcgttgtagttgttcgtattgactcaacaccctgctcatctctagaggcagctgtagaacgagtatcttggtcagaagtggcattgtgagaatctgtttctgacgaagcccgaccggaggcggcagtatccgcagtattaggaggattgacaccagaagagcctgaggctttataatctccagcctcaggagaagcagccttggcagcattgccagctgaaggtataactggacttgatgaagttttgctaagcactgagttattccctcagtcgcgggcgactctccgaggtgtcattgatgccacacgtttgaggattcactgaaccgagcaatgccagctcaacactagtacaaattcggggacatatttttgacgggcgtatttcagagttgacgacgtgaaaacttggtgcctccggcggcggcacttcagtcttcgtggcatcttccgtgacagtctctgtctctaaagctggttctgccacacctccagctaattcttcctcagctctattcacctctccatcgtgcttgtattcttccaacattgtcgtcccgtgaacacgaattaaactaagcggacagtaaaactcgtttccataatgcgttagaaactcgattcgcaagtatcgcgcccaaataagcgggttctcaactgcgaaggcttgtatctcgcgagtattcctcgctgcataaatcccgagctccttccattgctctggcttcgcagggtagcggtctgcgacactgacgcggaaagtgtggaagatcgagctgacgcactcgtagttggcgagaacaacagtaacacaccagaatatcatcgcatagctcgagaatcaaaaacttactctgtgcacgacaccgaacagcatatggtaa

SEQ ID NO: 3264 - DNA, 3002 bp, Emericella nidulans
atgtcgccttgatttccttatttcaaggatgtagatcatcctagtgtcctcggctcccgtgttataagcagcgcgaaagccataggaactgccaggattattggcctaagcttttgggtttgtcgcaaaggttgagtcgaggatgttgcaatcttctgttcaggttgcgaggcagttgatggcgataacgtagcgaatcaaacggttggcttcgtctattggacacatcgcttcgagacgtgattgcctgggcttcttaagtggtttatgacttagtcttctgcaatgctggacttggcagaacgcgacttgaaggcggttcgattgtatgctttctgatgccgggaaggacgaagagcttgttgaggagaatagcgttgctataattgctgggtttgtccataagcgcgtaagcgcgtggttgaatggcgagagaggttgcggtactctgaatgcaggatagagtggcattttaagcaaggagggaaatggtcaacttcgatatcgaaattggcagggacaaatctaaagataatatatatactcagaaagagagatgaggcttaccaggcgaaataactgccatggattagttgccgaaacaacttctaggcagtgaaaagtagttgcgttaatgttagccaaagcttcaggagtcaggactatctaaacatgtaataggggtctctccagcatgatagagggtctacagagcaagatgatttgtatgtgcaacgcaacacatgcctaaaaccagagagccagtatatatgatcgaaaggattgattgttttcccccatgcaactcaaatataccaaaataacaatgcccaacaatatctattgtagcctgtgaaaaacaacatgattagcgcgacccaaggcatactgaagctcacataccgctcgatgagatgaagaccagaccctgattcgacaatgtcactgacttgacccggttgcaatgcgaacgctgcctcctcgaactctttctgcatttcaccacggccaaagaagccgcttcggagtgttagcaaacattacgggaaggatacattggggagtatcattacagatcgcccttcttcctagcactactgcagtccgactcggacatcgcaagatctccgagcaggttctcccctcacatgattcgctcatgatgtccgcgcaaaatctcgcgcgcctcctcttttgttcgagtaatcacggcctccctccagctgctcggtcgcctgctgtctctgtgcttgactagaaggtgactgcaacggatcttgccttcttgactcggggcttcatggtaagtagcggcgccgctgtgatatgttgccatgtacatcttaagagtctccatatcggtatccgctggaggttcccatcgtgactctctggtagcggggttgaagtagtagggaaggtttttggagttcgaatggcgaacttcccaccctgctggaagaccggtgtttaccttttgacgaaatatcaggatatgtgacggaattacaccactttgattaaagtgagataacacagacataccattttgcttcttaagctttgaaggatacttgaggtgtgaaatggtataaaacttagcgaggtatagaaccagtgttgtcgcagcgacgcaaatagttcagagatgacgcggggaaaagcgaggaggggaaacttcaaacatgacaaacaccgcaaaccacgcaaacgtggtccagattgatgttcggcctctccgtgcttcttccagcaactctactcagaatcaactacatcttcaagttatacccttgatccttcctgacagttcttgaccttgtgggcttttctccgctttagtttttcatcgatttccgagatctcccaaagacatactcgtcgcatatcgcgcctcaaaacaccaccttccccgctctctacgattcgacggtcctagaaatgtcagctagtccatctccgtccgccgatggcgataacaaacagaccgaacaggtccattttcgcttctgccgtgaatgctcaaatctgctctatccgaaagaagaccgcgtcaacaaccgactgatgttcacatgtcgaacctgccatgttggcgagcccgcaacgtccaattgcgtttatcagaacaagctcaccagccaagtcggcgacactgctggtgtcactcaggatgtgggaaacgatcctacggtttgtctatccggtctctgtctgctttgtggcgatgtgattgcttgctctgcatgcgattcgacgtcctagctgctggcctggtgcctttggcttgcaatatgcttggaagaataatgcggtccgaatgtctggctaacgcgcaaattgtctttgcactttctttctatagcttcctcgatctaataagacctgtccaaaatgcgcgcacaacgaagctgtattcttccagtctcaacaacgatcagcggaaaccggaatggtgagcatattgagtttgtggaatggatggtcctggtggctaacagtcttagaaactttattatgtttgctgccattgtggaaatgtcttcttataaacttgtcattcttgcccattctatatcacgatacccattatcgactttacagcatgttaggggtgtttctttatggcgatcttatgttatcagggagattccaggaaaagtatgctctattgatacaagatagatatgtgaacgcctaataaaacaattcgcctaaatggtatattatacgtgcattggcgccaatgagaggatcttcgaccactgccttccccgaagttctgtcgccacaacgcctgtattcaagttagaaactgcggcttagactttccatccagctataactgaccgttcattctggttccgatggggtctccggatttgttcaccagcacgcaagcgttatcatcaaacttgacaagggttccgtccggcctttgcatttccttcttcacccggaccacgacagcgtgtcgaatgtctcctcggcgaactttgttg

SEQ ID NO: 3265 - DNA, 1962 bp, Emericella nidulans
tccactgcgttcctagccaggggttaacggtgacgtctctcgccatgccgttactttccgaacaaaacctaacggtcttaacaagccatggaaatataccacgcactacatccatctaccaatgtcggtcgctggcgcattaccgccttcgaacctgttttcttgccgacgatgggcttcggcggagatgtcaaatccccaaactgcgcggatgctaaagagtgttgtattcggggagtttctaaaacaagatgacttaactgattagagtggctcttaattactggaagaacggcatacacaaggttaagcgtcgtcttccgcagctacacccgtccttctcacaaaagctagcggcaccacacctcccagtgccaatgtgatcaaggttgagctttgacgcaaagctttctctacccgtttccttgcatcatcttcggtctcctgtcccactctacccagcgtcactcgatatcggtggaagatgacagcgagtgtagcaataaactctacctgggcaaacttcctccccatgcatgccctcaagccgtcgctgaatggaatgaatgcgcctcggacaggcttgtgagcgttttgcgactccagccctggcccagaaagccctctagcgctggcgtttcttgcaagaaaactaccagcgttgcgtttgtcccaacgacgaggatcaaaactgtccgcgtctgggccccagtatgcttctgagtagtggagaacattggcgttgagattgactcgcacatttgggggcaagcaatgccgttcgcccttataggtaatttccgccatgtgcgttgtcgtcattttgggaatacttacaaccggtgggtacaaacgaagggtctcaagctgtgtctgttagcgagtgtggaatatattgagggagattttggacttgccataatacacagtggagtcaccagtctcgggaagaccgttgaatactcccactcagccgggttagcgggctgatcacgcaaagcctcttccaattccttatataatctatcttgaacatcttggtggatagcaagtagaggcaacgcaaatcgcatggttgtcgctgttgtctcatggcccgcaagcgagaatatgtaagtgttacctagaatctctgcattggagagaccaggcccagagccagagcaccgtacactttgttcctctcttcgtgcggcaacaagccttcccagcaggttatgcctctcatgttcagaattttcggtgacctcaatcaacgcatgcaaatatttctttaggtcctcatgtgccgcaaaatcggttttgaagaagggcactaacatgcgcggaatccacttcggcaggattccatttgcgatgaagacagacatcatagatcgattcatatactccataacgccacggaacgtgaaatggtaccctgacgcgggggtggctgcatctctgaataagtcctccgcgctatccttgtcgcgctcagctgtggctgatgtcgctggtctataggggagcctaaccccgaaaccggcactgcatatgatattcagcgaaagcttgaggatgtcctctcgtacatctggaactgtgaacctatcgcttccattagaagcgttgaatttcttttcccagtacgctagcatctcctgcgcctggatggcactctcctgccagacgagaccgttgttcttgtcactgaatgcggatgcggaataccgatgatgataagcccattcgcttccttcagactacctcggcgaataagcaatcagtttctgatatggtcgccagaaagggcagcgagactcacagtcaacacgttacgtccatacatctcgaacgcctctgtccgggtcatgttagcaattagcacgaagcatctacttacgctcccatctcgagctcacagcaagtaggaacaaagcggtctgagtagtacgtacccagatgcttaacaggcttgac

SEQ ID NO: 3266 - DNA, 2097 bp, Emericella nidulans
gtaaaaatgggccatgcaaacgaattatctgcagcgggtgacgcatcgagtgattaaaaaggatcgaataagcaaccccaaagcataatggtccccaaagaagctttcagataatatcagcaagatattttacggaagccggtatgaactgacttacaactgtgattgtctccatgcatagcactaaggtgtcagacgtcaagtagcgcgaatcggagagcgcgtactccttccacaattgaccaaagaagtcctgagctgatcccatacgaccatgattgatcataaagtagccttcaaataggcagtgaagagtgcccgctgcgtggtttcaacggttagggcgacatcgacaacaggggttcggtatactcgtacagagggcaaaccataaaatggcaaaccggtccgccttcctcagattgggccgcacccatatactcagcagtaatactgctcctaatagtactgcgcagcttacgcctgcagtacatattaagccaagcacagaagtttcattgggcgtgtagtcgatgattcgcgcatcgatgggatagtaggggtgggaaataggatcatccatattttgttgtgccctggtattctgtgagctagctggtatttccaaaagcaatgttaagtgaagatttgggaagaagaagccagacttcttactttcttgctggacataatccctggacaggatgatcatcaaaataacccgccaaaacaggaatggtgctgataatgatttagactaaccatatacagttagtaacatatcctcaggcataattcaggcagaaacagctccaaggtgtccaaccgccaacgtctccgcagccccgtattcctgctgtcgtcgtcagttggtctcatcatcttcaatgctgccactttagtgatcctaccctgtccgggaggtctcacgaggccttaatactcttgagcaattgcgtaacggtgcgatgggccgtccttcagtgcaaagaaagtccttggggcttgatgtaccccgcactacagctgctgaagcgctacctgggatcgcggcgctctttgtgatccatttcgatgtcaaagctgggtaaatcctactatgctgctttgttttcttcaatacagacctcgcttattctgggtgcttcattaggtacactgtgacctggaaacgcactatacccgggggtaagtgacacacctacgagatggatgctatgccctactgaataccggaacagtcgaggtcgaaggggccgtcgagtacaagtctctgccatccggattacacaatgtctcggaagatttggtgtatgtacaaaagcctaagacacccatgtctcgcatcgctaaccgcattcttggttagctatttcgttcacgatcagtatgctggcatcagcgcgttcgtcaatcagcctgcggacgaatcggagcgcaacgcgaagatgttctcgattggagttctggtgccgttgagctgtggaaggctgggcaagagctggcgacatgcctcaaaattgaaggaattagctcagtgagtagcagcacccgattccgggcttttcttcaactagacctaatatatggggccgctttcaaggcgctattccgagagtgctttcagcacaaatagcttgtctgaatactgggaaacccatgagctatccgcaaacgagacatcggcagcacctgattcaccacttgactcacctctgagtctccgaatgcgagctcatagtgacaggccagatactctgcaaagaaatcgagctatcagtgacgcaatggtgctggagacgtctaggccggccctgacgccctttcacccagcttcttcgctacctgattttctcgatgcgtttggtcccctcctatttccgttatatagagcagcactcctacgcagaagagtccttttcatggcagaagctcctgtacaagtaccttgtaactacggtatgtatgaaacctactcattatacatagacttgctaaatgtattacagtgtacgatttaaaattgttggcttcattgcctaactctctcctcccgttacttccttcggataggctactatccatgcggcctcgcgt

SEQ ID NO: 3267 - DNA, 969 bp, Emericella nidulans
taaccctcactaaagggatccttcgtcggccaatggtccactttttgcgtagtccagctgaggaaaggatcattttcccggtcgctagtagcaggcatttcggcgggcggaaccgcaaaccactggcagaataccgtcagtaatgacgactggttgttctaccccagggagacagccgttctccagaacgtccaaaagggcgactcgcagggtttccagacgcgtggtttactgtgggacgaaccaaatccaggtcgccacttgctagatggcattacgctgtgggggaggaccggccgggaaagacgctagaaggaaaagaagattcgatggactgacggtcgtcgtacaggacaatacagccggttagtggtaacggggaaacgggatttggcacttggcggtggagagtcgaatatcctccacccatgattatcaaataatgtcatcgagccacggagcagccaggccccttttgcccaggtgggtttcccgtgacttccgcaggcacaaagcaacggtcgccgaattcaagcaaacaccaaacgatggcagttcacgaaccccctctactctggctgaatggccgaatggctgatattgactggtattgactgagtctatcagaccggcttgggaggaggtcagagccaggctgtggcctctgggcctagaaaagtccgcgatttccgcccgtgaaggcatcacagtgaaagaagatctgctggcaatggttctagcactaaatcttaggttagctagtcgttcgatgccctctaactcccgcaggtgcagcatggggagcggccagccaagctccatgtgatgttagttcagcagtacacgtagatactctgtccgcggtatttgggtatcgaatcataggtcaaatcatgagtccagcggcatttcctagagtcaaggaaagctttaaagtgctcagcatccaaccgtcgacggggattgctg

SEQ ID NO: 3268 - DNA, 2111 bp, Emericella nidulans
  unsure (1)..(2111): unsure at all n locations
gtggaagccattctaaaagcgatgtcaatccccacatagtacacggcaaggatgaggtcatgagtcctaaaaaggcaaactgttaaagaatagtggccaaggttacctcaagcaatacaatgtaatatttgtaatttccgtaaggcacccggctgttccagtgtgctcgttcccgtacgctcagcaacccttaggttcgagtccatgctatcacagtactctaatacacatagctggcccgcgaagctccaagggaaaaaaagggtgctgttatctagtattgacactggaaagttctcgaagtcacaattgttgaaagaccaccattcttcccgtaaggttagagacttgtacaacttaaacatactatgatggcatgaatcatatgaccacctgcctgtttggttctgctcaccccctcccgccgtcccggtctcccgctatttatctcttgttcgccaaaagacttgtttgtttgcatatgcgattgactcgagcaccctttagaagcaatagcaaattcaagactagcggataactcgatttaattcgaaaagtgtgtactttgttctctccttgtcctcttgggagaacccattggcgtcttcaacttacctgggttgagccttgatagttaacgtagatgcagtgacacgttcacacaaagtcaatgaccgtgatcattccgcggcacaggatgcaatgactgctcctaccgagaatatccctcgttactttgcaaaatccggccctatcgatgctgaccctcgaaagaccaagaaggacgggggaggtaaaggaaattggtaggtttctatgctctcggccccgtaaactcttacttatgatgatcactgacgcctcattaggggccgctcaggagaagagattcatgactatgaatacagcttcatgaatancccgcgtcattcgaatagcagcatgcaaggcatggcgggctccaaacctaaatttgaaacagtgaagcccgagccagtctttaaagaagccttgcatggaccttcatccgaaaccaccattgatggggctcctgtaactaagattgatagtgtcagtagcggcattagtggcaatgacgaggccgagaaagctgctaacaaaaattccggggtgaactgatgggctgtaactatgagcatcaagcttgtgctttcagaaggttacaagcttgatcgtacgacgatgtattgatgatggggaaatgcaacagggcaaaacacatgtcgaagaaaaagcatgccaagaaacggcgggatctgaatgtatgtgattttttgaagtggcatactgaacttgaatcacgaccccgtgtttgatttctactgtataatgactttaaatggaagtcggaagcaaaaggtaaacgattagagtactttaaagcagtagtcatgaatgcgttctagctagagccagctaagccgctctttccggttcgtttgggacaatgagctctccgcatccatactgcagggggtttgaagagcgtcatctgatgtcctttctttttctgcggaggagagcagactcttgaaccaacattcaagttcgctcttttcaatatatcgtagaagagttgaattttctcgttcaaggtcgcgaataattcgggctcgttgctctggacgaaatcgtgatgagataagggcagaatcactgtcattcaaaagcacatcttgtggacgagtggggcggtaaagtggaggtttgctggggtccgtacgatctatgcaagttagtaagataagtatctaagaatttccggtacttaccattcaggcacagtgcaagggttcgagacagcgcagtggcggtcaatggggattcagtttcgcttcccatctgttaactgtccaaccgtagctccacttgccctgatatgcattttgcaacaagtttggagtgcagcttgaattggactcctgacattggtcagcgatgaccgtacgtaatgtactgtccccgaagcgttgtcaaattgatcctgctgacgtagcgtaactcacatggaaaactaatttcattcccccaaaagtcttgaatagaaaaagggtttgaggtttaaaaaaaaaaagaataatttttttaaa

SEQ ID NO: 3269 - DNA, 885 bp, Emericella nidulans
ggaaaacactgatgcagtgctgcgcttcggaagcaagaagcctgtatacatgatgagtgccgacattatgtataccggatactttggaggcggcatcaaagctcgagaaggcggcgcctatggcgcgaaacagggccgtcatacacattgtcacggagattgtggtgatccaataaatcatgaaagcttcacctgtagccttgagaccagtcatccagtagactggcagagcgaacagcgtgacctgcgtgaggataagtggtacatcggcagcgatctgagcgaagcaaaaggcggcaggatggttgagagcgaagccacggtgctttgctaaaacgggacgtgctgcaaaggagttggtcacctcgctcatggagagcagcgaattcaacaatatggcgaagaagagagacccgcttttgaagggcagccccgaagagtttttgggagcattgtagaataaagaaccggtaatgagagcttggacgaagttcaaaccctgagggatgagaaatgtgactttatcaccccacagcagctgatactgtctgatcactgccgatttgacttgcgtagagaagctgacagtgagcggcgatctcctggaaagggcagggcttttttcggagtgaacggcttcttgaaagtttttcgtcgcctcggcagcctctgctgagattggatagttgtattccaatgccattttacgcttcagttgcgttgcttcataatacgagcgaagttcttcggcgtttcgaggatagcgactctccatgtcgggtttaacccgtcgctcggtaggaacagtaaccctggtcaggtaaaaggcgctccttgctccatcggagtaaagaaagcaaaaatcctccataaaaggctttgctt

SEQ ID NO: 3270 - DNA, 1558 bp, Emericella nidulans
ctaaatcgcggccgcataatacgactcactatagggatcaccttattatcatccaagcgccgccccgcaagaagaaatcggccgcgtttgacggccaaagatagtccatagataacatcagtccctgctattgacgaggctgataaggagacttggcctcgaagactatgataaggtgatcgacttaaaagaaggtcatactggcggatcctgtccggagacactctttctacattgcactacttccccaagcttgctggatcagaggcttgtcacttattgcacacaacgatgcatgaaatcaaggatgtgaaagttgaagcacaagatcagcccggtatcgaaaagaacaatgagttagagtccggaataatacaagacattggagcgcagctctttgcggaaggtgatcaaatttccgccgaagagctcgagcgtgaaggtgtcgaggtgcgcatgattcttgacaggcgcgttatgcctattgtaagttctgaacctcagcacggagaagatttgactgccatgattctatgtctcacttatcatatggcattcaattttagagtgcgctcggcatccacagaccaaggtcctaccaggtaattactgacatttgtgatttagacaagctctctatcaattatgcgtctgcatattcgttaatcaccgatctaggcttgcaagtccaaaggtactcatgggtagctgcaatctactacttcggttacctcgccttgccctaccttaaatcttcttcttcagcggctgccgcttgcaaaatacatgggagtttcgcttctggtctgggctgggttggtaatagcgcacgttggcgcaaagaactatgccgggatgctgatattgagatttattctgggaatggcagaagcatgcgtaagcccttgcagtacgttacatacctacttcccaaaacagacaagatcttgctaacgggagcagtgatgagctttacatccatgttctacaagcgatccgagcagccgctacgcatggccatctggctctctgcaaatgggacagcaacaatggttggagcgctactcggctttggtctgggccatgtgcacaacacatctcttgaaagctggaagcttatcttcctcgtcatcggcctcctgaaccttgtcacaggggtgcttttcctctggctcatccccgactctcccagctgcgacaagttcctcacccacagacagcgcatcgtcgcagttcagcgcgtctccgaaaacatgattggcattaaaacgaagcagttcaagttcggccaaaccctggagctcgtatatgacatcaaggtgctctgcatcctaagcatgggaatattctgcggcgtcatcaatggtggcgtctacacttcgcttctttctgatcagggctacggtttttcggcattacgctcccttctacacttcccaaggggcaatgagaccgcgcgttccattgcggttggttccaatgtcggactacgtgattgggtgttatgttcctcacccttggggctccagattcgttacgatttttacgtgacttgggt

SEQ ID NO: 3271 - DNA, 2686 bp, Emericella nidulans
tgtccagggggttctgacgaaattacatgtttagcggtaagttgctagcctcttaatgacaaggcaattggttaactcctacagctaatatcctcaataatgctctgtatatgactggtcttaacggaggaatccttccaaacgaccataatggatcgagtgcttcttaccacctttcgaattagttggctgctaatggtcagacaactaccttttcgaattggatctctcctcgcaggttgaccttgcggacggagcgaactataaactgcatctgattcttccggcgtcccacaactcaaagatcaagcactctgggcgaatcaagccaacgatacccttttcagctacggcggacgtggtgtaagcgatacccctcggattacgcggtctgaatgtacaatatttcgaaggtttatgggaaagcagcaggggagcgtcaagccggtgcggctggcatatggcggtatgtttcaatcctaccgcatatggtctattaggactaatccgcacagcatacaccgacgcccccgagattcaggcggcatactggattggcggaaacaaggacagtaaaacaacaatttcaataacctacagcaccaaaaagtatgtttctgatatgatccaattcaatacaaccaccgaggaatatgtcgtgctcgatgcccctttcacgcccgtagagcgcgctctggtttaccttccagtcaataggatgggagcactgcttttcttcggcggtgaggtaccgtctgttcaggagggtatcgatgcagaacttacatctgtgcgtttgctgtcgtcgtttacatgctcaactaccagtcagaatgcatgggaccacgttcatatctatgacattgaataccaaaaatggtttaagcagacaacatacggcactgaaacctcccgtactcaatcttgcgcttctgttgtccacgatcccgaggccagctcgtggcagatcttcgtcgtcagcggagagactttgagtccaaagatattgtgaccgatgtgtatgcctcacccacttttctccctctgccacactcacctagtcggatagctcgtacctgtccgtcccctccttcagatgattccgcgccggagttctaatcaaaggccgaatgtcacacgcctgccgcacatatggacgtcagattttcggcattgggagcgtcaggcctgggttgataactcttttgctggatgctatggcaggccaggttctatctacgatgcgcaatccaaagttgtccgcaatgaattcgacgtatgcccacccacccataactcagcaggcttgtagtaactagctttgttagcccgcgatatcaacccactcgattccctacgtcacggcagctgagatagagaaatcccgtccctttagaatgggccgatggctcgctttattcctgtttctcgcatccagcacgatggcccggccgacttattcttcgagcagaagctcaatgaacaaagccgccattgcaggtggagttgtaggcagtgttgcgtgggctgctatgatttccgcactttttggctattgatacgcagacgaggtagtatgcgcaagggccacgaggctggtataaaggcagaaatggagccaaaggctcaaccgttgggtaaactcggcacagacgatgtgtttggcgagttggagtaaaggaatcatcatcgaaatggggtccttgaagatgccagatttctgcatgaactggattcgacctcgcctggggatttatatgatcatgggatgacgaagtcgagatctaccttaacgatcgcataaaaatagggcatattttccgtatctatagaagacctctaccaattaaccgcaccatatcccatgagaaaagcaggattaataatgcacgagtaaagtatttcgacagcttccccacaatcttgaggagcactggcgctggtcgatctccatgtggggttccccaggactgcataaactcgtacacagaggacattctctgtacaccacctgctcatcccacgtaatctgtgtatcgacatggcattattattctcatatgtggggctgaccaggctcggggggtacatagcacaaacctcccctcagatcttcagggctatccatagtttaaatcaaagctcagctccagtctttctctcgataaatatcaagccccatgtcagagtgctgtactctgtgctctttacattatacttaagagtcgaacaattacagacttgatttcgattctgatcccagcttaccccgtctaaatatccagaacgaccctaaataacaaccaagatgcaccccacctcaaccccctccaacctttcccttccccccatgaaagacctgacaaccgaaaacatcacggaaaatgtacatatcgtgaactcgcaatgccgcgatcctcgccttcgttaccttctcaaccgcatagtcagccacctacatgacttctgcctcgaaacgcgcctctccacagaagaatggaacacaggcatccaatttctgactgagatcggtcagattagcgacgacctccgacacgagatgattcttctctcagatacactaggtgtctcatcacttgtggacagtatcaaccacccacggcaaccgcctgccacagaggggacggtgctgggcccgttccatacgcatgacgcagcggatatg

SEQ ID NO: 3272 - DNA, 699 bp, Emericella nidulans
ctattgttttatgtctgtccagggaccaggaagctctgtgttgcagagtctggccttcttgaccttctgcaacttggccgagtatagaaaagcccagttgctgcgtagtaagtactattctgatttcaaataatgcaactgtatctataggtcgctttgtcatgagcctccataatagcttaaagcttcaataagccagctacagcagagaggcgcgctaatcaatctcactctaatactctgttaagggaaggagctaatgctcagccgtcagccctgatggtcaatgccaagatttcatctgactattacagcataagtttagtcggatagattctacctagcagaaatatgtttgctctggatacctatacctgatccgctttgtaaatctatgtgtgactgtgtctcgatcgccatactgactccgggcaggttctttctacaagtctctcactagagtagactacttctgcctggcgcaatgtgagtctttttttctgaacagaagcttgccagaataactgcccttctgtactacctgatctacggggtaatcctgcttgaccatggagtcagcgagctaaggtactacagatcctgggtcgtacccgacctccaaagtcatgtgatatatgtgaaggaggtggtcactggccggacgcgctttgacataacacgtgcgacaggtgcagagat

SEQ ID NO: 3273 - DNA, 878 bp, Emericella nidulans
gtcgcaattagataccatacatgtacctctcatttgcgaagaatctaaatctgagacaacagccactcgcaggtccccactctgactgacaggcccctcgtgttacagaatcgagtcctacaggtatcttaccgatggcggctactgcaacaagaccccggacccccggccgggccgaagctcccatcgaccctcctcctgtcccttcggaaaatggtcactcccagaccaaggattcttcgcgcagaacttcgtcgtccctaggcttcctgcgccgttccaagtcgactgaaccaatcgggagcaagccccgtggcaaaaagatgtccaaggcccagatggaagaggagcttcggcgtcacggtgaggcgcggccgaaacaacctccgcgtctgcctgacttctcgcctcctccagtcatcgaaacctttgggggtgatgaaacccgcaatggtgttgctgacgttacaagccctctttcacccagtcaatctcgaccgtcccgtagcgcgatgagtactccggtgccgcctgattacagcgacccctacgctcgaaccgagagcatgacccatcgcggccgttacagctatgcaagcagctatgtcagcaccgttaacaatccgcgcagactgcgccgccgcaaggaccctactccgtacaagtgagtagagtgtgcatcatggaagccgacgagaccgtgctaacactagatacagtatcctcgtcatcggtgcgcgaaactcaggcaagacttccttgcttaactttctcgcaagtcgctggctctgcccccgcataaacatccttcgcgtgcgcccgacgaagtggaatatgatagtcacaaccccgccagcgaaaggtacacttctcactac

SEQ ID NO: 3274 - DNA, 669 bp, Emericella nidulans
tgtcacgggagcatagtgtgtcagacttcgcaaaaacagaggccacctttctgtgacgtggggcctgaaaagcttccgactcccgttcccgtccagcctcctctttcatacctcttccgccgcagcagcaatgtcagactcaaaagactccaagggcaaggccctcaggtcagttaattcagcctcaacccgtacaatcgcttctactaacactgtccagaagcccaacgatgcggaacagacaccgggcggaaagctgactccgcaggcggccgaggcactattggaaaacaatccctccctgaagaacgagctcggtgggttagataaggacaaggctttggaagcattgcgcaagatggatatatctgaacttctgaccgggctttctttgaccgggaagaacaagaaggatatggccgcgtttaagttctggcagacgcaacccgtaccgccgcttcgacgaagccgccagcaatgctgccggtgggccgattaagatgatcgaccctgagaaggtatcgaaggagccggatgcgttgattgagggcttcgagtggaccaccctggacttgacgaacgaggaggaacttcgggagctctgggacctactcacataccactatgttgaggacgataatgctatgtttcggttcagatactccaagt

SEQ ID NO: 3275 - DNA, 758 bp, Emericella nidulans
  unsure (1)..(758): unsure at all n locations
ctattgcgacctaagaaagtaaactacagggcttactagatcttccccttgtctccttccatggggatagttgggctttcattttcgagactgccaagttaccacgtactagcgcaatgtcatcctgtttagagaatttaactcttttccctccatggaactttggtctatggcaaaagagctcacagggacctggacctaccaaggcctccctgatagaagttacagggcttgctcccagcctacctagtgtgctttctacatcacgaaagagagaccatatactaaaccccacaatgaaacgagagagatatgtgaaggcaaaagagagtatttataatgcatacttcgtctttgagcataggatttataaaaaaggatcaatagaggccatatttcaaaaacggaaaactacatgaagcaaataagatattagaggggaattgctctaatatatggttaaattatgaggtcaatttcggtattagtcctcgatacaacacttctcgcaaccatagtattaagccccagggccagataaagtaaacaaggtcaggaattgatattaaggcgctgtatttctgccactctatgacgagattacatagaacgcaattggagtgggaacagagacagcttcacacatgagcattctgaaaaccaagagcctccatcctaactnccatatattatgaagcgaacattcatcaacttcgagaagtactatagaacccctaatttttcctgcgtttgatgca

SEQ ID NO: 3276 - DNA, 814 bp, Emericella nidulans
ttaaaccggagagagattgcgccatgttaacatcgtctctaagaataaggtagataaaagtatagcctccagacaacgaacatcgcacaccgaagactttttgttctgtatcaatcccggagcccagacgaagccttcaggttgaccttgcggatttgctcggcggcgtctaaacccgccgaggttcgccggcgccgcccatgttgtgcgatagagtatgacagcaagacgagaatccgagacagaattgagagagaacgacagctcacgccagcgatggactaaggcggatggtgcacggttttcatacgaaacggcaggcatgattccggctattcttgagacactttttcacactagaagcctgctttcgcatgaattcccggcgtcacgtccggccactcggctgttgaccaagacataggccatgccataattcgtccgtgatcggcatcgcctgtcagcaagcgtgcgggtggttggcccccgcgcccactagttttggttgccggctgaatccccgggtaaattaacctggggtgggaaaactccacatggagaaatccagattcagtggggagacgaacgtggccagtagcacggagcgagtgtataggattgggtgagtacgctacagttgcgtacaatattggtaggtcggtagttcattcaggcgagtcgttgtgtttgttaacgcgagcatcaattgctgggctcacacagtgtccgtggaaagtccatgggaaagcacggagcatcacatgtgcctagccattctggtggtcaactgggtcgttatactctctgagccatc

SEQ ID NO: 3277 - DNA, 671 bp, Emericella nidulans
  unsure (1)..(671): unsure at all n locations
gctcagaccatcatatgatcgtaaatctttcaattctctcgaaatctgttcagcgcatcgacacatctcagcctcatgccataacgaaagcttgcagcgcaactttgggatactgagtttgggcagaaagggagggaaggagttgtccaacgtcttcttccaccatgtccaccggtaaaccgtccatcatgacctctctgctctcttgtccgtaatatgaccgaccgcgtcgcgggcttcgactccggctgcgactgtaacttcggcttcggctgcgtgagcgataaccttcgcgatcgcgatcgcggtagccgtgccgtggccgtcgcggaggtgaccttgaggatcgtcgtcggaactcattcgcggtctcgacttcggtatcgagatcgagagccggaatggcctcgggagtagtcgcgtcttctgtcggctgcggggcctcgaggaggagtgtgagatggacctatgagcaggaggaaatttagttcagtttttgtcgcatcctgaaaactatacgcagggagatagtgtaccgtcaggtgaacgagaacgggattgagagttgtcgtcatacatgcngncatncaggtcgtncctgcgagggacggncgaggaggcggccanggagatacctgtatcttcaggttcagatgagacatgtaaacaac

SEQ ID NO: 3278 - DNA, 641 bp, Emericella nidulans
ttcggagcggccgtcgatagcaacaatgtatgggagattgatgctgcgagacttttcgatccgttggcgaacctcatcctcatgaataacatggactcccgggctaacaaaggagttctgcgtataccagttgtagatctccctgagttctggagtatccttgttgacatcaacgggtcgtagataggtatccgcgactgggctgcgtggactacagagcggttcacgccgtgcctcgcgccgaagttgaagctccatcctctttcggtgttctactgcttcttctgactccctctcctgaaggttgatgttatagcaataaacagcaacagtttcgtgcgcatgaggccatgatactttgtcatttgggtctaaatgggtctcatacttacgcatgtcaaggatgaacatcgatttttcgccatcagcatgagcaaagccataaaagaatgcttgacgaaagttgtccacagcacattcgcgtttgatagtactctccagccaattctgaaatctcgcgcgatatgcaacctcgtcagaattgctgtgtgcaaggccgcgggggcaatatttcccagtaaaacaatggcagggtcagtccagctatttttaaggacccgagttttttgggtgtttgtttc

SEQ ID NO: 3279 - DNA, 860 bp, Emericella nidulans
atctcaactcttgctgagattacataagcttttgcaacaaggatcgtatatctgcaattctgcagaaacaacgcctgttagcctatcctaatggtcaggatatcgatggggtcatatttcttcagcagtctaatcaacatattaaggtaagtagttatcaactgcctgtaagccggttgccaaatacttatattacatataggattacattcaggagacatatcatgactcagaaggcactatggttatatgtgcttatagggagcaaatccagctcctagctcaactatcctcatttgaagtagatatgtcttataagcgaattcggaccaaagacataaacgaggtgctttttgcaacattcttgcctgaccagtgcaaaggtaagttttttgcacggttctggaattgtggctaactgctttttctagttatcaccttgctgcgtgtttttactagtgatgactctacgcggggttattacctcctttttaaacgagtctttacccttgtccagaagcttacccagacaccagtactttttgatcctatacatggttctggaatatatggtattattatggacatggatagcaaactatatactggtgagtaccctcagtcggctcacagggacttactaactacttgttaaggtcttggtcaatatctttctgaagttgacccccagcgccgagatataacatggcagctagaacgtataattgttttctgccaagtccactttcagcgctcgattctaaggctattggaacacgaagtcatggaacacctctttggggtctgatgatgagcttgctggattgtaactcttgagtgagtatgaccagctgtttgat

SEQ ID NO: 3280 - DNA, 1278 bp, Emericella nidulans
ttttgtatacattatggtatgtcgtctccatgaatgcgctttgatgggctgctgactgacaacccagtgcttggccatgaatcggtctttgactaacgtcctgtttggtggaattgctgcccctcaacaagcccagaagaagattgagggcaaggtcacccagaccagcgtggaagagacagtggactctctagcaaacgcagaaagcgtcattattgtaagtatcaatccttggcacaaggcctctgctcataccggtaggttgtcggatatggcatggctgtcgcgaaggcccagtatgcgctcgccgaaatcacccacatgctgcgcgccaaaggcattaacgtccggtttgctatccatcctgtcgctggccgtatgcctggccaatgcaatgttctactcgcggaagcttccgtgccttatgacagttagttacctggccacccaaccctttcttcgtgctgactagtacagttgtcttggaatggacgagattaacgatgactttgcggacaccgacgtgactcttgtcattggagccaatgataccgtcaaccccatcgcactggaaccagactccccaatttctggtatgcccgtgttgcaggcgtggaagagcaaggaggttattgtgatgaagcgtggcatgtctagtggatacggtaggccttcgccttcccttcttggtttcaccatactgacttaagatagccgatgttcccaacccgatgttctacatgcccggcaccaggatgcttttcggagatgcaaaggccacgtgcgacggtaagtgtatttcttgttcggtattgagtcctattctaacttctgcagccatcaaagcaaacctcgaggctcgtatgtagatgcgcatagtttatgcatttgttgttttagagacagtcaatcagtggttttcctctaatacggtcccaccccgcctccctgggtactacaaccacggcaagagcaaccttattagaagatgattatccttatttgtcctgttcatcgctggaaccaaccctgtaaaagccgttcgagcctcatcctccgaatctggccttgataggacgtgtaagcaggactcgaactaacttactggatgtggattgcacgtaaactctacttgacggaaagctttttagcttttgcgtaaggatataaggacagttactgccagggaagattactagttgtaaacgttgatttactagggttatggctgtaagggctgtcattatatatggtgccttgaagatggacttagttgga

SEQ ID NO: 3281 - DNA, 723 bp, Emericella nidulans
taagattgcccggttggtctacgataggtcgcatctctcgattgccattgtcaagcatccactggaagtcgttgggtgagtgttgcccgtggagctctggtgcgggcaggatagctcctctaaccctcagactgaggtataacctaccgggcgtgcatcagccgcaggtttgcggagatagtcttttgcgccatttcttctgatcagcaggttaagggatatggtgcgcatctgatgtcccatctgaaagtaagcaagcaaattgaaagcgtgctcacctctgcgagtatcattacttactgaaagctctttaggactacgtcaaggccacttcggacattatgcactttctgacctatgccgataattatgcgatcgggtatttcaagaaacaaggattcacaaaagagattcaactggaccgatctatatggatgggctacatcaaagattatgaaggaggaaccatcatgcagtgcacaatgctcccgaaaatccggtatctcgaatccgggcgcatgttgctcaaacagaaagaggcggtccacgcaaagattcgtgccttcagcaaatcgcatatcatccatccgccgccgaaggagtggaagaacggacctgtcaagattgacccgttgagcattcccgccattaaagagtccggctggtcgccggatatggacgaactcgttcgtcagccacgacacgggccgaattgaagcatct

SEQ ID NO: 3282 - DNA, 1174 bp, Emericella nidulans
aacgttcgagtccgtgattgctgacgtacgaagaatacgatgccatcagagtatcatttcggaagacctagaattcttactggcaagccgaagcgaagcgaaactttaaatgacatattctggagcgatcattgcgtgggaaaacccactctgtacgtggaaagttgagacttaaggatactcacgagtcggataccggcgtcgattcgccaaacggtgtaccgtgtggaggaaacacaggaggcctcaactcccagtggatcaagctgcctcaaaaatatcccggtcagccactggcatagatgctggattaaggcccatggctgaatactcaggcagagtataaatgacaatatcattcagaacgggaataagcagctaaaatttccggaatagagcggttgttattcgctcaatgagtaacggtcacacagccgagctgacagacgctgccatgcgccagtgacctcgtgcaaaagtcgacgacaaggcaccaggggcaaggttgcagcagctgcggccgtgatgaagagacggccgaagtttctttgggcgacagcttcaatcagcatggacgagccacggaaaatgcatggctaatgccgccttgaggcactaggtctggacttgatactgtttgtagtatagcggtaggcgagtggagggctggcggatggcctgacggagccgcggatccttgtcagctgcgggtaaaggtacagtagcacccccactgggctggactatcggggtgacttactcgaggaacagtgtttaggagaaggcaactcacggagcgatagcgaacggtgttatttcgactatggcgagtcgaaatttccggcgttctgggtacggcactccctgatccttgctgggagactttgcaacttctcgtggcgtactgcgtactccgtactaacactccaggctcagggcaacaagaggcgggagactaaaatagatcgcggatggtgaatcgtggagcaattgatggtgaccggcgagcctgtgagcctctcgacgtcgaccgaagaaagaaagagttctcgatgagagtgggaatggattaattacctaattaccagtaagattcgatacgatacggtaccccgctgaccagcccatacgcccactttggctcattttgatacaccataaagttctggtcacc

SEQ ID NO: 3283 - DNA, 948 bp, Emericella nidulans
tactgggcactagtacaataaatataagcaccaactagatacatagccagtgaagatgcggaccacaatcgggaagattgttgccagtgtatttctgtattgcggaaagccgtacgtattgattggtgagtacctgaagcctgggatatatgtttgcttatcgtgtaagtcatttggcttggggtactttcagacgagtgttgatgtgtgagtgctgattaggtcattggaagcttgggcggcggctgggagccaggtctcatgccggtctgattatactcgaagtctagaggtaggtagtcacatctatgattggatagatgaacttgacgttttgatgtttgatgtatggggcaggacttttgacagaacaggcaatggatgagatggagatatggtatcctggacgttgagaaatcggtggacaggggagcaatgtccaaaaacggcttagcatcgcagtaaatgacaaaagccgcgatgcacggatagtaatgaacgccaatgtcacatagaatgaaatactgggtacaatcatacgtaaatctatcgtaactcttcataacttaagtcaaatgaaacaaccatatctgcaaaaaaaaaaaaaagataacgccacctacttccaggcattcagcccggcccaaggatcggaagaatttgcggaaacggaaggtccagtttgcggtgatgactgtgaatgagccttgtggtgctggctgcttccgtatggtcggctctgagcatacccgcctggtcccgaggggaacggccctgttgatggtgggtaggtgggctgcaggtgtcctcaccgttggttcaggacatgttcattaaattccgggtgcttgttcctaacgaccatgacttctggcgcatttttgtgtccttgcttctgttgcacttgtccgtgagctttttggggctaggccaccatctttctaaggc

SEQ ID NO: 3284 - DNA, 1484 bp, Emericella nidulans
  unsure (1)..(1484): unsure at all n locations
agctcccctgactgataatatatagtggtttgaatacaaggactaagacctcattctgggttataaaatgcacaaaggaagggcagaatgactattggctatacaaatgtaacctattaaggagtggatgcctcaatgattggcactctctgttctctatggactatccgaatgatttgaccattctcttgacccagctctggtgctgggacttcaagaatagccacataaagtacatcaacatcatcagggatcatgaatcatgtatcgtcatacgcataaactaagtgccagaccatagctctaaaacatcaagctcagcaaccactgaatacgaaactaggcaccgacccgagtgctccgttatgctcctcgttccaggcttcgaggtccaggtcgggcataaagcggtcctcgactaggccgccatcatcatcggcgttggttgcaccggcacgtggattatctgggttttcgaaggacaaaagtacatcgaaatccggcgaagggaattcctcactaggtgccttttctgagggtgtcctagtggtttctgccgcggacgtttcttgcgggggacagtttgacagagagttgggggactgggagaagcttggattataattgcccggagaaagcatggagccgctggaaggattgcagcgagaatatatagagctcccaagtgagtgcgcggggactatcaggtttgggccacggcctgacggcatttcccacttctgtaacagctggatcgtagtattctcaaccaaggaaagccgtttctcaatgcaatgaatgatgtgtttaagaactcgcactgctgcagtaatgggaagaggggaatcgtacagttgctgggcgcagctgctgggtgtagagacctgcaccgagcttgcatcagcagtggtcagggggtctggcgagagcgcaattgaggaagctgggcttgggccggccctcttgcccacttggaccggaaaagcttggggaatttttaggctggtggaggaaggccccgaacgggggcccacccctgggagggtttttttttttttggaggggggtttccaaccaccgggggcccttcaaaaaaatatttttgggaccgggccctcggaatttaaattctatgattttcccccttttttttggggaaactcctgggggcccggaaatttttacggttatttgtcaaaaagcatttaattttccccactcttagcaaaattttttggcttctcgttatggagtttagtacacccctgataaaagtacttaaaacccttgttttaccatttaaacccgccttgaagcttttaaattttcctttgggatgatatttgaacccttaattcttttgttttttaaaaaaaattctcttcctttttatcactatgcggttattatacccccctagattcctttcattcctttctanattacttctatagtttatttttttcttccatctttttgtcttt

SEQ ID NO: 3285 - DNA, 3263 bp, Emericella nidulans
ttactcaccatcgtctattaatgaggatgggggggggtaataactagggtattaacaacatcaaaatacaatccggaaaacatatattctaaaaaaacataaatattctatcaaaaaaaataatactagatacttacccttatgcgtaaaggacctatggccacgtcggctatgactatttcactttgggaacgtcgtaatcgttaaaagcacaggacaccgaaatgaggcataacctcatatcacagaaaccaatattctgggacccttatttacgaggggtttacaggaaatgagcctacaaacgcacagtatcccctccctgtatggttccctccagtataaaataggaaagcttccaccctgggggggggggccgagccgtttaatttatatgaccctcatccaattcatcagggggtttctggattcaaaggcaattctgcgctggagagtattctggcggccaaaatcctaacgtggttaaggggcaaaaaatgctcctaaccaatggagcccgttatggtcaacgagctggaaacaagggagcatgtaaccgaatgccattttgaagtcagctacaaagctggataccgatctccggcaatgggacgtcaccctcctcctcgatgaaggcgccgcatctgcccttgacacgcacatgcagttctacctgtggaaggggctcatccagaaaacaacgctcggcgagcttggaaaatccacgcttgaaactgtccagcaatatgcagacataatggcaggcaagcagcaagacccatacggccgtactgcgtttgggaactggacactctctgatcctcagccggagtcggtggcatatgtgggcaaggtcacgcccgttttgcacttcacgatgggcggtgtcctctttaacgaacagggccaggtgcttgaccagacctggactcccatccggggcctctgggctgcgggcgaggtcacaggtggtctgcatgggcagaaccggctgggtggttcctcgctgctagagtgtgcggtttttggccgcattgttggggatcaggtagctgcgttttataaccagcattatgtttctgacagtgggcattgagtggcgatagagtgcagctgcagtgtaatgatgaattgatatgatcgaatctatatatcctaatgggttgatacgaatccaactgaatcccattgcttttgccagaacgtggaaaaaataattagcagatgccatagcacacatactcatcattatagttccatgtgcgaaagagtgcactgggcctttacatacatatgctctgttatacataatagcgctctccagtcttctgaattaaatgccagatgtttgacccaagaagaggcagctctgctagttgagttgtagcagtcattgagtagcaaagtttagctgcatccactctggcaccgaggctgccatggagccttatatggctgtctatgcagatagatcggaaagcactcggaaccagcagcggaaaggagccgcgtggaggatccactgccgcgccctctgacattgggacccacatacagattttccttatcgataaatagagtcggttttccccaatgcccctccaaccaccaccccgacttttctggcaaattcttctcctactctagacggccattgactatttccgtcttcttctcgattggtcacttcgtactcaacaggcctgtctgactctggaacgacaatcgctcccaacgagcgccaatcccaccttctgccaacccctcatctcacattagctctcggaattggttccgagattcagctcaagatggacagcgaccagttcagagaggctgcgcacgctacaattgaagacagtaagttactactaaacctcctcagctttagagctaactgatccagtaatctcctacttcaacaacatccccaaccagcgcgtcctcccgacgatcgaaccaggctacctacggccccagatcccgccctctcccccaacagaacccgaatcctggccagcaattcaggcggatatcgacagtaagatcaagcctggcctgacgcaatggcagtcgcccaacttcatggcgtttttcccggccactgtaacctacccttcgatcctcggtgagatgtacagcgcggccttcaacgcgcctgccttcaactggctctgttcgcccgcctgcactgaacttgagaccgtcatgatggactggatggcgcaggctctggggcttcccaagtgcttctatagtactagtgagaataagggtggcggtgtcatccagataagtgcgagtgatgccgtcgcaccggtgatgatcgctgctcgtgaaagaagagttcagcagcaggcgaaggccgaggacctgaaagaggggaccgaagagtatgaggaccggattatggagctccggccgcggttggtggcgcttagtagctcccaggcgcacagcagtacggcgaaggcggcgctgttggctggcacgcggtaccggagtatcggggtcagtctggagaatgatatggcccttaccggggctgagctgcgatctatgctggaggagctggacatcaagagcctggcgccctattttatcactctgtgctttgggtcaacgaactcttgcgctgtggatcgcttcaaggagatcacggacgtattgaaggagaaagagcactggtcgcgcatctgggtgcacatcgatgcggcctatgctgggtctgccttggttgcagacgagtggcagtacattgcgagggatttcgctgagggcgtagatagcttcaatctaaacatgcacaagtggctgctcgttaactttgacgcaaggtttgtcctacgttttctatacatcgaggatttggatattaacagtgccatgacagtctcctctacgtccgcaaccgccatgacctcaccgacttcttggatatcaccccggcatacctgcgcaacccctactctgaatcaggccaggtcatcgactaccgcaactggtctatcccgcttggccgacggttccgcgcgctcaagatctggttcgtcatgcgcagctacggcctcaacgggctgaaggagttcgtgcgcaagggtatcaagctgggagatacctttgcagatctcatccgcagccgcggtgatctctttgagattgtgaccaagccggcatttgggctgactgtgttccgtgtcaaggctgcttcattggcgaacgggaatggagtttctgtgaacgggcagaagtggactgtggtg

SEQ ID NO: 3286 - DNA, 953 bp, Emericella nidulans
actgcgcaattcctcaaacccaaagttgatgctaggaagcgagtcggacattgagggcgctgatgcaaaagccagaggaggcccgataccggttgtcgaaagtgatggatcaaatgaggacatgtttagtatctcgaatatttgtagtacagtctggggtgcgaggcctaggaacaattacgagcaaaaaagtcgccttaaaaaatgcaaaagcggatatgacattgacaagaaggtgcttctgtgattggtgttgcgccacaaccagaaagcttggcggtccgtcgcaaacagatttaggtgcagaaaaagtcacaggatccagcttgatcaacacttcggcgtccatatgacttcatcctagacatctgcaccaagcagatgcagttgacagctgccccgcgaagacgtcggtttgcggcccgcttatatttcccactgctatcacgggatcttgcttaggagacttgtcagtcctcgatatgcttgctgggtcggaacctctgtgcagggcaagactcaaagatagacccaatggatgaaaatgtgccgaagttactgcactatgggcacttaggaaagcctgtctatcacccggaaacccggtcgtgggagtttttgcggactctggttcgtcgtaagttacctaggatactctcatcagttacaatactaacaactcggaaagcgccgcgcatatcatttaccggggtgaccaaaaccactgtacaatctcctataatatcagttgaacaatcttcaacaataaaacggtcgatattgtctcggggttatcctgagcttgttgcaggctacggccttgctcacagtgaaacagtttcgcataccatcacagcagcaagcagagcatgtaacgctttggagtccaagcttcttgactttggacgtgcagtggattttgatattgactcgtcgggacgccggaaggtccc

SEQ ID NO: 3287 - DNA, 655 bp, Emericella nidulans
ccccatatgtacaccaaggtacctggggccaatgaatgcaaatcgtcggaagcggccttaccacgcctgcatcggattgcccagctgcaggaaatcgttcgccggcagctcaaaatcattgtcaaagttctctgctgaagcagtttctttgctgaaatccaaattgctgataatcctcggtatctgcgaaggaacttgcttagcagctttgatagttgggatgtcttcagtgtcatcgacgtcgatgcttgttgaatagtcacccggaattgcgtgcatgggtagttgcggcgtcacatcgttttttaggaagggagggccgtttacagcgtctggagaagtagagccaagatgcagaagcgcctcaggaagagatgtttcgtggaaccgtttcaactctagagcaacactggggctgggcagctccaaatcgtcagaccaatcatcaatgaactctcgctttgtctttttcctcccaaggcgtttaattgtacctccgacgagagctgcgcgagggatgttcaccggcaaaggaatccctgcattttggacagaagttatagcttcttcattcacaaactcatcttcatcaagaagctgaatttgccagtccttgtctcccctgtgggggattgagatcagaacgagcaggtcg

SEQ ID NO: 3288 - DNA, 882 bp, Emericella nidulans
gtctgaatatgaaagtacattagcttgcgcaaggttactggatagaaaagggtcatcgtgctttgcaaagttggatgctaattctgaagagtggcaagtagtgggctgtccccttagaacctagcttcaacgtaaacataaagacaaatgggtggtctttgcatcaataatacatacttatcaggtctccttgcttacgatcagcatataccatgaatagctggactattaatatccagagagctacactaccatggctaaacagaatgcgtcctgcccaaattgcctgcgataaggacattcaggggttcctccaaaatgtagctccacctttcatgctaaaaaaaggccaatgtaccgaagatcccgggcgtccgttggcaagctagtccgcgagcagccagtcacgtcggactttgcagaggctagactttaccttggcagggtgatggtatcactgagacttgccaaatggttcgcggtgcaactcctcatggaggaggaactggacatcttcaacccccctccctctcttcattcgtttcgttcgttgttgatatccgtttgcattcgctttcttatcatctaatacagacgcttgcatccgtatcttttgtacaacattaattccagttcccttgtcccctcactgtctctccttaagtgttactttcatcctactgcaatagttctttcattacactcgactgtatcctaatttcaacttggttgtctgagcttatgcgaaatataaactcgcctggttcacgttgatctttcaatgcttaccagcgttctgtgattctaccagatccgggccggatcatgcgtctcttacaatgtctttttctgcagcctacctttacaccggcgtcaatgcct

SEQ ID NO: 3289 - DNA, 765 bp, Emericella nidulans
atactctcttcctcgcctccatcttcagaggcacggcacccatgccatccactccatcgtcttggtcagcagtggcactccgtccctcgagatctaatggctgtcgaccttcatgtgttgcattttcagtggccacggatgccatggatgatctggtatcttggtccagtacttggagtctctgttcgatgagctgcagtcgccgttctagcactgcattcggatgcggcctatatgaataagatgagaacgctatcggactagatgaatggccatgtctagaaagacattactcacaagtctcccaattgagaaccaatcacagaggtacgaggccgagtcgaaggctggtcgtatcggcactcggtgtccatatcctcgcatgacgaacatggctgagtgccattacactatattttacattacatctgaggtcaaaaccgcaatttcccgccaaagagatgccattgtacttactcgagactttcgtgcgcgacaggaccgacacgccacggagaccctcttccgtttccggccttggcgtcttgatgcgtgccgcatgtcggagtcaccgggctgggctccatgcggctggtctgttggcgtagtgattgggacgtgcccagcaggctcccgggccttttccgttagctgtgcgagcagcttgctctgcctcgctcttgtctgtgcggggtatgccaaaaaactagggttatggaggctgttgcccaccacggctgcggcagtggccctttactgttgagt

SEQ ID NO: 3290 - DNA, 1100 bp, Emericella nidulans
  unsure (1)..(1100): unsure at all n locations
agaaatggggaaggtgaaggcagccatatctgcactctgtcccagaagcccgccaagcgagaggggagcgccgtactctcactaaaccacataatgcggcctgcgactggaactactgtgccttctcgagtggctactcccatgtcccctacgactgccatggctatggcttctcctcctgactgtcgtcgtctccttgacaacaactgggcgatcattgttacgcctataaagccagagcgcaatgatcgccgtccagaagaagaagagcacctccataatgccaatcgcaaagcaggtcttcagcatccgacacgtcttatttaggtcatctgctagattgttgccagactggcgcccgaatgcgccaaaggggcccagggagacccaaacactgcncgccgtcccaaccnccgcagtcggcgtcggcaaaaagcgggagttggtatacaccggctatgaaggcgccaaagaagagaaggtcgacaaaggaaacgaacgcggcggagcgttttgtggttgaatgcgaataagagtgtcgatacaccagaagacgggcaatcacagagacgatgaagaggacgagaatgtatgnaggtgtgatcatattggcttttaggtagccatcaatgaaataggcctgattgcgatgggacatgttagtatggatgtctggttagttggctagaaggggaggcgcaccatcatcccaattatggggatgaggaaaactatctccgtcaagcggttgaagatgaagaagatgcttccgatcatgttggcggttgactgtttgttgccttgccttggattatagtacagggctggtggtatttgaggagcgctggacgggacaagggtcaagcgtggaaatgtgatcgcatcgcacggatatgatagatttcagtccgaggagaatatgagaatgaaggatcgtcgcaaatgcgagacctcaatgcaaggtacctagacacctcaaggcaggggagaaaggcgctgtagatcgatctgcggacaagtcgatgcgacaacttcgattagaatcaccaagccaacccagcacgcgcagatgcacgaggagatattcaggaccatgtctc

SEQ ID NO: 3291 - DNA, 989 bp, Emericella nidulans
ccaggtgatgcaaagtagacagtaaccctgtccgtggaactgtccgcggaattaacttcaaagtcttcaaggaatctgatagacagaggtgcagtgattgtagactttgtgctgccggtgttgctccatggtcgtcttaactactaccaagactacaccattttccttctttcatcacatctctatatctgcttgtctcgttgttacagtctcatcttcgaacgcttcatatgagagccgtccgatgctatgaaggctaacgacagacgttaagaagcatagcatccatacaagccatcccagtccgagtttctgccgctatattgacgagctatggacgatttataggtgccgcgttctttccggataccattctgacgctttcctccaagttgtctccatctctaatttcggttccgtgggcgtgcctgacgcgggaaacttgctacgatcctcaaatggtctgactgtaatccacgacccttcaaacgccgtcgctgacatccttgttattcatgggttgatgggagacgcataccgaacattctaaaacgcagctcacaaggtatactggctcgaggacttcctgatgcacgacattcccaatgctcggataatagcctttggttacgacgtggcggtgtggcatccctggattcaggtctcccaaggacggctgtctgatatgctgctgacctgccgggcagtctctctggctgccggaacgacaagcgaaaagtacgtcagtggtccttttctgaagatgaagtaacgagcctcctccctgactgtcgcatagcggacgcggccaatcctgttcattgcccacagcctcggtggcctagtggtctagcaagttttggtcgccgcgcgagaaagttgagtaagccacctacccgccatcaagacaaataccacacgtatctgcttcctaggaactccacatcacggcgccaaaattgcaacctggggtgagcggtctgcccgga

SEQ ID NO: 3292 - DNA, 4078 bp, Emericella nidulans
  unsure (1)..(4078): unsure at all n locations
cagctttcagcactaacgccacagttacatccagaccgtctcagactgtcaggacgtttgacgcgctacgggacggcagtgttcgatgttagtcaggcttatcaaagacaaccctcatattctactaatatcctcgcaatgccattggcccaccacttaactacaggccctcaccagccacaagctcacagctgaaatctggtttctagcccatcggtcgttttccttctcggacagagtcggaagctgggccagcttccgaccccgcaccgtcaagaccagcgaggaaagtttcccgatttggggtcgccggagaggaaggctttgcacggtccagagcatccttcgggcgttctaggaacatgtgttaaaacttgatgagaaaaaaacgtgaaggcgaaggagaatctttcgaggtcccgtgattgtagtggtaattttgagtgcttgggattggttactgttcggggaattttttttttttttttttcaagtcgtgtgatttgggtgatttaattagtattgcctatagggagtgtannggtttttctgtctagaataatnaatacgtagactggtagcattcaagttccattgattgtagagttcaatagcagggggattatgcttggagtttacctgggcgggtacgtcatcgatacttcaatggagcgggatcggggcctcgtgatactcccggtcgccctcagcagtaaccgactgcaacgcggggaaaaggatcttctttgtcggcgggagcagcccctaggttcgtctctataaggagttcgcgaactgaattcgaaatcctcccatgtgacaaaccttgacagtattttctttccggtttaccagcttgaaaggccaaccccggatttatgacggcaaggtgtcgtgatgccccgcgttcggagaatcgagtcagatggatgtcatacatacatagatacatctgttcttgtgattcgaatagcacgagttatatatagttcttatgttcgatatgattctatacggctgatgttgccacattgaagtccaccaacatcattgatcatgatcctagccagatcagatagatcactatatcaatgacctaaccatgaacaccaccattcgctgaccgggacatctcgccgtccctgtcccaagagccaggtaactcgacacgcagcgctggtaccgaaaccgcgttcatagcgaggtcacccaagtccatggccgtccatctcatgtgtcagccagcgtgtagaataccgacagtccatggttaagagctcgagcagcgaagagccatgcgagcaatttgcatccgccaacctagatagacatgagattgagacaaaaagccaccactgtcgtcagccatgaaaaagttaaacgttaagggggtgcctttgtttggatcatctatttggccttcataagagaaaatccggttccttggtaggaggacgtactgggaggcaagtatcaagaagtcaaaatcatgagagataatgcacgtaaaggtctagggatcagtgcaactgttctagatctcgtcgatcctcgttatgttgaaggtttctgcgcattggcctggctcttacgtgtccatgcgccaggatcgctgtccagactgagcttccagcccggcaatgatgcgagggtttagcctactatagagacatgcaggtaatatccaatttttttgagtctttccaggattcattagcgtacatgacatgcaccggccatgcaagaagaaacaaggaacaaatgtggtatctttttacacgaacaaagacacagtccagaggtgcagtacccgcgctaagatgatgaccatagcccccagcccttttatcaataataaaggaaggaaatcccatgtgaccatatcaaccgtgtacccctgtatctgtatcatgtcgaatatcatctgtacaaaaagattattcagtagtagcggaccgaagcccagtgcgcggaaacagacagccaccatgcaaagagtaaaatgcaaaatcaagaataagcgacccgaaaataacagccatataatccctaggtgcgcccaaaatgcaatgcagtcgtgattggtacgtgtcacaaggatgataagcagcatgtctgcgaaagtaaacagaaggaagattggtcaaaatcgggtatcataatcaaaaggggagaagagaagaaggcgtctgttggacgtaatcagtctaccacccctttgcgtggtattcccaaggcccaaaatcagtgtagtggttgaaggaccccgtctttgcgacgtctttatcagctaccccattggagctcggcatcgccacctgctggttttgaggtcctggatactccttcaggttcttcatgtcgtgagtggtatgcctccgcttgaatgcgtttgcggtcgcgctcttttgctgccgctcccacaagaggtggcgccgaagggattcggtcaactcagtagcaagcatgttccggcgggtagtacgcggggaatgcgccacagattgaggagtaggcttcatgatgatcggcctggatcggggaacaccgggtcccttcattgtcaggttctcctcgtcgtcatcagggggcgacgcaggaatggaagggccgttgggtgaggtaaggcgtgatcgctgcaaagccggagtagaccgagaggcatctcccattctaaggggctggtgcatcatcatggtcaaaagtgagcggcgtgagaccaggttcggtcgcgaatccacccgctggaacatatctctctcatcaacgctagaacgaccgctttcagtgattgaatcctcccagtccgagtcttcgtcatcttcaatagcactctcggagatatcatcatcggtctcgatggcgtcctcgtcgttgccactttgtcgctccttcattgacttgagatttcccacttgctccttgaatgttgccaccttatttttaggattgaggttactgcccggccgcttttcaagctggtctgatagcgagctgcggtgaggagcctgcatcatgcgatcttcaaaagaactctcgtcctcatccccggaggaaccaccaagcgtaaacatgttgccctttttctttagaggcgagagtttggccggaacttgagttttagaagcgtccggatcactcgagagtcgaggctgcgaccggtaggatgaagatatctgagaaggagagaaaccacggacaatgctgggcgacttgatcaactgaggcttcgagggaagaatgcctgaagatgaaacactagtgtccgagccattaacattcacgttagcagcatcgctgtcattaccgtctggggcagtcgttgagcacgactcagtcgagtgcttctgtcgctcgtttagagcgaaagtcggccgcttgagcgttgtgtttgaaggaggggtaggagtcggcgtagatgtccggggcgtgatgtcgacaaccggttgggtcagggttgccaccggggagattggctccaaagttttcttctccttgatgttcagcaccatacgctccaagtccaacgatgtgaaatgcttctcctttgctcgccctaagctaaatgaatcctcccgaacaacggcaggcttgtagtcctctctgggccgcttgatatgcttttctatccgttccgcctggtcagaagcagccgattccacgctggctgacaattctggtaagtcggcggcttccgaacgaagcaagggcaagaccgaggtgtcgctggaactttctggttctacacagaaagtctcgcgagtccacaacctccaactgaggttctctagtcgacggccctcttccatgaagtctgcgcatttggaaaatactgcacaggtcagtatagtctcttgcgaaagttcgtaccaacttacccatccacatcccatggaggctctgtgtgtttgctgtatccaccttgtgaatctttgctgtgtccaccgtcaagacgggtgtcgaaagtcgtgaaggcatcttgtcgtcgccacggttgcaatttctgcaaataatctctttgaaagcgttatgtgccaagtgatcagatatgggtacggggtcgccgtctcccccgagc

SEQ ID NO: 3293 - DNA, 1073 bp, Emericella nidulans
tcccaagccaaagaccagcctggtctcctcggaaccactgagaacgagcttttcattagaaagtggattgaggagcagggtcacgggcttgggaccacctccgacaaggacggcgagaactctactttcgataaggagcttgttgacgccgaagttatcatcaccactccgtgagttgtttcctctattgcctcgccagtgctcatcccgttaaccttcatcaccacagcttccaccccggatacctcacagctgagcgtctggccaaggctaataacctcaagcttgctgtcactgccggtattggctccgaccatgtcgacttggacgctgccaacaagacaaacggtggtattactgttgctgaggtcactggttccaacgttgtctccgtcgctgagcacgttgtcatgaccattctcctcctcgtacgcaatttcgttcccgcccacgaccagatccgtaacggtgactggaatgtcgccgcttgtgctaataacgagttctaccttgagaacaaggttgtcggaaccgctggtgttggccgtatcggtgagcgtgtgctccgccgtctcaagccctgggactgcaaggagctcctctattatgactatcagcccctgcgccctgaggttgaaaaggagattggcgctcgccgcgtggactctctcgaggagatggtctctcagtgtgatgttgttaccattaattgccctttgcacgagaagacccgtggtctcttcaacaaggagctcatttctaagatgaagcctggtaaatctgctcttttatatttgattattccgatgctaatgtatcacaaaggttcatggctcgtcaacactgctcgtggcgctattgttgttaaggaggatgttgctgaggctctcaagtccggccacctccgcggctacggcggtgatgtctggttcccccagcccgctcccaaggagcacccactccgatacgccgagcacccttggggcggtggtaacgctactgttccccacatgtatggtacatccattgacgcccaaatccgttacgccaacggcaccgaggccggtcttaca

SEQ ID NO: 3294 - DNA, 1620 bp, Emericella nidulans
taggatacttcgtggaaacgacccgaaccaacttctcgtgcttcgctgtccgactgtgttctccatcttgttttccacttctgtcgaggaaagtctccggaggaagaagaaaaaaacgtcatccataaaagattctctcacatgtcgtctcagcaccgcgatccccacgaatgttcccccaccatcctctctaggaggcgcgctcctggacttttgaagtctcctaatgattgcctgattgtcataccctagccattatggggagaatcaagaaggttgcggcacaaaagcatgaggctacactggtaagttctacctccaaccacatccttgttggcctttttttttgcagaaaggttgacctaagaaatcttcatagtctccctacctagcggaatttgtagctcgtgcgaccactatttccttgccggagctgccttctcaccttcgcacatttccccgcgtttggccatttcccagaggtgacctgtatcactggatcaatgtcctgaatcgctttgacgagatccttgcctccgtcattgatagatacggtctcagtaatggtccccaaacgacgccctttagccgacaatatctcgtacattgttgtacaagtgaagacccaagctagattcgcgggatatcgaggctaaacttgcgggtttggggtacggttcggagggagatagggagcttctggaagccttactcgacttctctagactgctgctggagaaatgtggcaaccgcagcttgtacaatagcagtgaacgcttgggcgagttactcaacactacgtcgctgagcttactacagtctacgcttcgtttgtccctctctttagcacaaagatatcactcacgtcaccggggtggctcgcatcttcaacagagcttgttggcaacgcattacaacattgacctcgagaagctgcaaaaaatcgcggctcccttctcccggcctactctcactagtcgaccagggatttctccatctggtatcaagaataaagaaaaagtccctcagactaaacataatgccaatgacctaacgtcgctcacacgagaggaccatggctgggatgattggggctatgtccacctcctatactacccttcgggatcccgctgagcaaggcaaagcagttactgaaagtgggccaggcggctcccttgcacacgttccaacgacttccacgcccttgcgccgaagccataccacgggctctacttccggtgtaggccggattccttcgacgaggactccccgcctcagtttcaatacacccgctggaaagtggacgagaattacccggcgaaagacgctgatatcccagctcgtagttctacatcgtcgctgagagatctctcgtgcactagcgaatgcctgtggttaaggttgaacattgacagattcgacgcaaaggctgcccatttagtacaagagacgaactcgcatagatttggataccaattgcgttataccaagcgctttcacaagattcatatgatggcccaaagctactgctaaacggggtgtcactggtggcatacacgcgtgaaattttcagttggttaaaaaaggggtggatgtggttttgtaaaaataatatttttt

SEQ ID NO: 3295 - DNA, 1251 bp, Emericella nidulans
cgtgtggtgacaagaagtcgccaattcgacgaggtggtggtgttgcttcggtccccatccgcgagacttctccactgagcttcccaggaagatctacgaccaggcctggcgtattgcactcagctaccgatacaggcgaggtcagctcatcattattgacaacgagattggcattccggaagacgctacgccatattttatcaaggagatctttaagtttaaccgctgggggcgggagtttgggcgatcgactctgattacagacagagtgcacgaggagctgttcgaaactgtgcgttcggtaggagaggacgcaaaaatcctcgaccgtggagatgttgacgtgaaggatttgctggagaccggccgatttgatcgtggagaagagggcattggatccgggggtcaatttagcactcgctggagttgaacaacaaacccaccaaggctacatatagatcgtattacgttgagccatcttgctactgatattaccagtcacttgatctggatgtacaaatagttcttttccttactgcatgaatgagttgttttttctgtttcaaagcacatgctctggctatcccgtttcagacaaagtctatctccattcccatctgacctatgttttattcatactaaattatccttcacacaatattagtttatatataaactatcatggtatttttctattacccaatttttcttgcaatatctaactaagtggtttgctttgttccaactttaatctctagttttgatccacttatagtcattctaccttcactccagtcttttattttgtccaatcttatccctattttgctctaccctggggtcttttttaaactcttacctaatcaccaacatttagggtttggtacctcttattccttggtgttctattcccctatacctttttttataattttatcttctatcggatcaatcctcaatccttgtctttctaggttttatttatccctattaacacttgttctctatataaatattcaaccctatactcccgtcgtctctttcccatattggattctcccagcgagtccctaccttcctcctctattctctaatttgagaaatcaggatcccttatcctcctatttttctacactcactcgttgactgcctttgtattattttatcttctatggctatctcttttcccaatatttaaaatttctatttttaagccaactctgactcactttatctccaatgattctttgt

SEQ ID NO: 3296 - DNA, 1353 bp, Emericella nidulans
gcgccgcgtgagggtggcaagccttaccactttcttaaggatgactccagctccacccgcgagaccgttgctgctcgcctcaaggccgttgcagaggaggccggttccacctctggcggttccaccacctactactgcaccgacaccctgggttactgtgagcagaatgtccttgcctacaccctgccttcacaggaccttattgccaactgtgatatctactactccgaactccctgctcttgcagacacctgctatgaccaggatcaggcaactaccactcttcacgagttcactcacgctccgggcgtctactcccccggtactgatgatctgggctatgggtatgatgctgcgacagccttggatactgacgatgcgcttaacaatgctgactcgtatgcgctctatgctaacggtatgttgtgactcctattatagccctttagtctcatgatgctaatattctcatagctgtttaccttggatgctagattagcatatcactggcgtcagccgaatgctttgctggactgagggaattgctgacctgaggtgaagaactgacgatactgatgatcgaacgcgacgcgacttcatgctatagctcgcaagttatacgagagatggtcattttctcttcatatggttgtacatagcagctgcgaaaatagcatttgattccttgattttgggaaaaccgtatcagtatactaacactgacgcacctccaccaattagaccaatttttttatatttatcttataccttcgtgctgtctcgtcaccccccaccccccgatatccttgtaggttttcacgctcttgatcccattcagataactgttcccactcgcactcttggcccagatcttgacagcattttcattcgcattgtcactccagaaactgttgaagtctattatatactcgcccatatcctcacatctgttcaattaaatgaactctacttttactgtcgggctcgttaccgaattttgctttttgatctcccgcttaacattccctgccttgccactttttccaccccagagtagctgttcttctcctcatcggtcagggcctcattacaccaataaagctttatggtcctgaatttgggtacaatcgcgcctgtaacgtttttcgaaatggggtatgcactgacgacgtcccaccacgcccgattttttgccgcgggcgtactcttttggtcagcaaaatctggattggcagggactgatccccgcagcaaggttcttagagtttgacggtatttaagggacttttcgcgggatttggcgtcgaggcgggtctctattttctaggttgtgggcttgtttaagggcttttt

SEQ ID NO: 3297 - DNA, 2938 bp, Emericella nidulans
gagttgtgttacaatggtcacggaaggtgcgtgggaatggtcgcttagctgttgctgttgctgtttgtgctggtgatctggaataaacgagtagttgccatcatgcaccagctcgttcttctgaaattgaggtgtaaggaacgactgctgcaccggtgtgtgcactggtgtaggcagaggttttgtaggaggagcactgttgtaagcagcgcgttggttcaccggtgacctccctgaggcattgggagtctgctggtggccgttgaattgttgcgacatgcgcgggatgttgtgcgagttggatatttgcaggttgttctcccagccgtggttgttgggaatgaactgctgttgcgccaacattggtgagttgccaaagacgaactgctggttatattgaggaaggtacgattgctgctgcggagagttggagtgctggatatggatctcaggattgtagcagcaaacgggggtcatcgaacgagccttgaagctgcatgagccgtcaaacaaggcagagtaatcggcagaagctgccgtcgcggcgggaaagtgcgacaccgacgacgctggcgacgaggtgggagacgagggcacggacgacggtggggagacgacgttcaggtgctggtggtactggaagggcgactgcagtcggcccagatcttgactaaggtattggaaaggaagatcctgagtgtagtcgggaagaaattgatcgtcttggatgaaaacggagtcgggatagttgaaggaggaaagtgtcgaagtttgatctgatgtgatggcacctttacgtactgatgggtgcatgtacataatgtagtggaggttgatttgccactaggggtcgtggaggtgcgtagtaataggtcggctcacaaggccaccgccaaagaacaggagtttgtttccaagaatctgagggatcgattctgtggctcgggtgctgagaaaggatggttctggaaaggtctggcagtgatgatgaaaccgctggccggggcagaggcagatgctggttttaaatcgagtcgagggaccagatgtttgggtctagcatagtgattaggttagcttcaaatgatgctggactttgtcacggtgatgagcaggtctccgtatggccgatatggcagcagtggggatcgggtgtcatagttgaataatgagtcactaacctatagtgtggtttgcgtgtcaagtgatgtttgaactgtgatgattttgtgtctgaattgggagtctgttcagtctggggggaacattgggagacaggcataatatagcccgcgaatggatgatatcactgaccattagtgactttagtgaagctcatggggtgctgtgagaggagccccccgttacgctagtggtattattggtaacgtactagccccgcgctagagcctattcaataatccgtttatttttaatccttttttaattctaattgattttctattttttacagcgaagatcttgagtgtcaactccaatgcatgaagatccttcttcaggttactgacttcttcccaacccttgtctcgccgattgggctgccctttgacaccttggcccagccacatcaaagttttcctcgattttttctcccgttctccgtcctctccgtctctcgtaccctctcgtacacagcgtatcgagtacgaattaagtacgaatccgcacgctcttatcgccggtggccgagttctccctataaggcagatcggccacatacccggctgacagggaattactaagatggctccacaacccttaagtgcctgaactcggaactcatagtctcgcacagacgaggcccggcagcagattgggcagttaatcgcgtctgtcgtcagttctcgtagtatgctgagtaaacgaataaggtggatgcagtagggctcagccaccgatctcatcccatacctggagatggagacggggaaagcgaccaaccgaggcccggagatctctcgacgtgaggatgacaaatgagagccagagtcagacaaggccttgcagattgcatctgcgtggcttgaattccaaccgaaaaactgtgaaagcgggtcggatgaattccacagaagatcattgttgacttctccacaaccgtcaatagcggcctcgtcattggctggagcggtgctgggcattctgatctgcttgttcgactcgacaaatgcatgaactgcgccacataataatctgattggttggatcggatacggcacgctttctacccactttggtgtggcttgtgcaatcggacttcaccggcgtgaggatcgaacagccggggactttgcctgtcagatcgtgaagcagatccatttagcgcttcgacagccttgttgaacgaccactgaccacgttttctgcttaccagctgcatgcactgcgcaccagggaccgatcggactcctcgggattgagacgaaatcccttgttgttacataactttatttttgccgttggcttcggtgttctcctagatcttgcagctctaaagatatactttccaccacaactggtaaccttgacggcatcaaagttccgaaccgacatggtctggaaagctgacactcgaggctcagtcctgacaacgtggtctctcgtgattgcgatgagttcgaggctcagccagacaaggtcagctgataccagtatctccagccgtcgaaccccagactggcgaaaaagacaggctactgccttgtcttgacttgtaccactgctgagcacatgaccacaatagccgtaacaacatgatcacgcttcagacggcctcgcatatcctgattttcagcaatgggccggtctgactgtttcactggtaattactggtaggttccagctacttgcgactgctgatcaatttatcatgtggttcatgtggttcgagacatgtttgactcggtcgctgccaatg

SEQ ID NO: 3298 - DNA, 1521 bp, Emericella nidulans
gggggggagtttttatctcttttttggggggtgttttaaaacaccacaggtttatattttagggggggggtaaaagtacgtttttatttttggagagagccaaaaagaggtaaaaaaaaagtgttaaattaagggggggttaataaattatatgtgtttaaaaaaaaaggcttatgtttaaatttcaagggggcgtgggtacgggtaagttcagtattttcttttattagaattcggataaatatgcaggggcaaagttgaagggcaatgccatcatgatttcccgtggttatattttttattaggaatgtctttgtaacccttatcatccttctggagtttcttcaagccgatgtttgttagtcttatgaggtgttttgtgccaagcggatggtcagtgaaaagcagcctttcgtgtgatatccgctcttacatttgcatatggattgagtctagtccactttcagcattttgatagctatttttcagcatttgcagggtcaccagagttgcaaccagatccatagagccttggaggatgagcatgcccatgccccgaggtactacagcgctcttctatatcctaaaccactgaaattgtgtatccacttctggactgaatccctagagctattttgtagcaagggcgaaaaaatatttgtgagtgctttaagttccgcgatgatctgttttgcttctgacttgacctttcgaatgaggttcctgcgcaatttgaacgtttgagccatatcttttatctttttcgcgtcgtccatggtatctttgaagaacatataagtttcagctacaatctctattttttcgatcactttcttgagactctcttttgcatgttggatctcgtggtatgcacgtttcaggcgcttcgcatagcggtagagatcttttgcgatcgggtatgcgagtcctgtcgcagaaatagggtccatcatgtgtcgtcacgcataagtgttccaaaaagaagatggactaagggccggcagaagatgagatggatagaaagtctgcgcgaaggtcaagtaaaagtagctctcaagtagccagccttcagctggggggcgtgaacacccagaacgagaataggctatgagaaagtttggctatggtgacgagcccagcctcatattaaagcaccagcagggccgcaagaacaggtttctcccaggcggcgcctcgtgccgtaccagtctccaattgagaatccaggtcttcgtggttggatttaggtaggctgaagagctacagcagcctgtctatgtggccaatcctacaactccgccgctggtgcgcagagacaaataatgtaccctattgagatgtaataaaagtaagttgagtacggggtggccttgcatgatatcaccccacttcaaacaaggccaaaaaaagaagctaggatgatgtgggtggagaggacagagaaaagaatgaaatgcacagaaggaaaaacacaaaagagtggaaaccaatctcagcctgccacgaggggagccaaatgtc

SEQ ID NO: 3299 - DNA, 1273 bp, Emericella nidulans
tgtccctgcgattagcggggagccgagggtcgagattgcagctctatcggaggctgatatactcagtcacgcaggactgcctcagaaaggaagactccgatgtacctggctggatatggagccctggctgcatttgagagggcaaggctcagggagtacactcagggcagatgcttgaatcattgatgcaccataacattaagaattaccccgtgattttagaatataaactttagattcaaaaactcggagactatgcatgtcttgataaagctcttctagttagcgcgcgcaaagaagctatattacattatatctataccgggaccaacatgctttgtccggacatgtacttgggctgctcgatacccatggcagcgtggacagccgtcgcaacgtctacaatgacaccaggctgcttattgaggctccagccctcgggggcgtaggccatgatgaagggaactctggtggtggtgtgcgatgtcttatgagtgcccttctctggaagcatcacctcagcgtgtgtaacattgggaatgctagcctgattctatactagtatcttgattggattgcaaaacttacccgtgatcagcagtaatgaaaagggtgtaaccgtgcttcttgcaggcctcgtaaatgataccaatggccttgtcggtagcagcaacacccttgatagcagcctcgtagacaccagtgtggccaaccatgtcagggggagcaaagttgttcatgacgaactcgaacttgccctcggcaatgcgctcctccaccttcttgcctacgccctctgcgctcatctcgggctcaaggtcgtaggtagcaacctttggtgagggaatcatgtcgcggacctcaccagggaactgcttttcaataccgccgttgaagaagaaagtgacgtgggcgtacttctcggtttcggcaacgtgacactgctggacgtccttcttgccgagccattcagccaagacgttgcccatatgttgtggggggaaggcgacagggaaggtgtaatcggtcttgtactgggtcatagtagaaatgtggatattcttggggaggggaaggtcgggcttggggagcggtcgtagtcgccaggagctgggtgatttcgcgaacacggtcagagtgtagttgaaaaaaagaggttgtcgtatcctgcaccggcgtccttgccacaagatgatggctaaggaaccgtcggctcgtctcgtgtacgcttttaatgcttaagggttcgacttcctgcctctcggaagatgct

SEQ ID NO: 3300 - DNA, 3038 bp, Emericella nidulans
gtccacgggatctgcaaccggcatgtggcgtacactgcgacataatctcagcccgtcgtcgaactaatctcaaggcatcgctgaaatggatatagccaccggccaccagtgcggaaaactcgcataagctatgtccgagggtcacatccacccgacttttcgtatcgaagccgaactccgtttcaagtatccggagtattagcactgacgttgccattatagccggctgtgaattttctgtcttgttgagttctgagtttggcccgtctgcgattacatgagatagccggaaacctaatattgaatccatctcttccaaaaaattccccgcgacactggggaacctatcaatccaaggacgggtcattcctaccctctgcaccccatggcctaaccctaggtgagctgcaattcatgtcttcgcgaagcatggagtccaacttaccagggaaaaaaagggcagttcgtaaaggctgatgattattgtaatgagatatacatcttctttgatactttctgttcggttttgcgtttatcctcttagagtgacgactaaccaaccctgtaccttcgtaagtatatgtgaatcaatttttccatactactcaccccaattgagatgtgtgaacattgctgcaggtttataggatcgggcattgacagcagacgtaaagctcagtaatagaaacacagccacgaaaatgaagagtaagcatcatgatcctgcaattcttgaaatagcatgcctgcgctggtgggcaatatccaaaggaatgtgcacaggtcagagtcatggagttggtgtgtgcttacagacacggtcatgtgatatatcaaatgcgggggttgactccgcattcgctcaaatgcttcgagtctttaggcatataataccatacattagttctattttaatgatagcgctttgattttcccgctatggggcggacgaggggatgaaattcaatcagagttctggcggaagctggtttagggaatcgtagtggtaggataaacctcctttgatgataaggggtctgcactcttcatgactttccttgtattcagccttttaatttcagcttattctttactttcattctcagagcttactcggcattgttgtcagtgcacttatttcaagcaagaacaagctcgcttccaagccaatgaaggggatacatatagaaggtttatcataacgaacttggctaatatccccagcaataagcgaaatagccatctggaatcctttgaatttgtgcgagttcctgtactcaagtgcgtgtggtgtcagaagcagacactcaccgccaggcattcctcaaggttattactggtccatcggaacgcagataacttagtgattgaccgccttcactggagctcgataacattatttccgcaacagaaacgcgcaatagcacttgagcactagagccgaatgctttgccgtaggaactttcacttttccgacgcacgcattcttacagtctactttgaatgcgtctgacatctgtcttccatattgacgatgttcgtgccgaaagcagggtccgcaaccaccctgcggaatccgcgaaggcgtcagcgtacgagttctggcgagtccatcaaggcaccaagtgctaaaaggcaacgatcaattctaagccaagatgataatcctgatacaggaatcccaacatatggtgcgccaaatcacagatcctcgatacctactgcgaccactgaggttgactcgacgcccgcgcctggcggcgagaaccaaaaaaacattccgataaggaccttcaacgcgacagagaagcgaaaaagcgatgttttaggccctatcatactggttggttcctttctgctgtatagttttctgcgtatgttaactctcgttcagtcaaaaacagatttctatacagtatctcaattgccatgtttacctgaccaaatccgaaacctccgttcaggtacgtctagtccgaaatatatccattagccattaactcatagaattagaaaattgcagatgttctttcgccgccggccatgggtatgggcttattatcactcaactcgaggccatcatttggccgtattccaccatggtctcatcgcccttacctaccgatgtatataggcttcccatacctgaggcctatagggatgccagcgatgtatcacctttgggggtgattttatcgaccgcgaccagttctacccccggattaatgatactaatgccgcataatggaaggatcatatactgggagaccgtgtcttgcgccgcatcattaagtcttccacggcaaaagcaaacagggcttcagggatatgtcccagggatgctttcaggtgaatgtgcgactgatatagtgaacgcggagccttcaggtgttatagtcacattttctactgggcgagttgctcatattaccctcagagattctcaaggaaagccggccgtgaccgtaaacttcttgaagaatccacacagcactggcggaattggatttcttgacggcatcaagaatgttttcggggccggatattggagaaaaaaagttgccgctgtgcgtgcaggtgaatcctttcagcggggtcagcgagatatcataattgcaacttcagcaggtctggtggaagtctgggatacccactggaataatggtagtattctcaaaaaccaatatgatgtcaaagaagacctactagctgcaaccaggaaggatgaagcctctgactatgaagtcaaaatctgggatcttgcagttgtcaccagttcatgtgaggacagcagcaatccatgggagatatcggtactggttggcctgttctcgggggtaactatacaaggcgtgtttgtgactcgattgcggctcactgacggggctcgcgttttgtcaacaaatcctatcagtttgcacacttttcccaccgattcacttcatctagagcctcggctcttcatccccaaacctcatgagacggcattcattgtgattggacaatctataatcttgctgtcattaacggacgctgaa

SEQ ID NO: 3301 - DNA, 1270 bp, Emericella nidulans
atttatatacagaaaagcaaagccatacatatatccgattacggtcctagtaccttcccctttttaatttcggtcggataccgtgcgccggctacatcaaaagttgagtcaagggttgtttatttgcagtggcccttgtcggcgttgacgtcttgctatatgggagttagtcatctttgatcagtcttttgggtgtggagatacatacgatgcaaacaccagactcgcagacgcccatctttccatccttagtgcaaggagcaccggccgggagctgggatgcgttacatgccaacgaccaagatatgtcgggctcggagatcctccggcttcccggtttaacttacagtctttccagcggccatggcagtgccaatgagagcgagggtggcgagccaggagaagttcattttgaagtgtagagttgtgttaagaaggtaataggtggaagttgttggttcaatgctttcgcaggtaggctgttgttgaaatcaaagtcaccagctagcccaaagggcgccgtctttatacctcttctcgactccctgacacgcaagatcagcgtctccttttcatccacaagttccgtcctggtccgcccagttacgcaagactccaatagtccttccaggcgcggtgatgatcttccctccttgaccggttctccttctgaacgaccggtccattgtgacaatccgtgtaggcagccaaaacagacccattgagattgagctctatgttggagactccagtttgacatggtcatccaggggattgtcgtgttggatctgccaaaaggtattgatcagatccccactttccaccttatccgaacctcgaccgtaggaaattagagcctctgctgaacgctttgaattgagcggatggtccagcctcgctgcacactgcagccctacaaagtgagcaagtacggggaagctttgcagctgcagggctggaaggcccgggaccacgagtctgcgactcggcagtcaggaccgggcactccggccccatagtccccacggtgatcgcccttggcaaaaacccctggacctgtccgcatgcttgattatgaatgggttttgccattcacctggctcgaggctgaaagtccagcaggactttcactgtgtactttttatactctgtatctggagttctatactagccatccatatgtaaactacctgcatgccaagtccgctgcgaaaggtttcattacatcgtatcgagcgacgagccaagccaggactacgaaaccgttcat

SEQ ID NO: 3302 - DNA, 1106 bp, Emericella nidulans
  unsure (1)..(1106): unsure at all n locations
ggtatcacaacagatctcgaccataccgctaagggaagttatatcttttcagaagaagaggagcaggagttccttgagcttagccgacgccccgacctatacgaagctcttgcgagaagcattgccccctcaatatacggaaacctggacatcaagaaggctatcgtatgtctgctcatgggagggtcaaagaagattcttcccgacggcatgaagcttcgtggagatatcaacgttcttctccttggtgaccctggtactgccaaatctcaactgctgaagttcacggaaaaagtttcaccaatcgccatctacacctccggtaagggttcgtccgctgctggtcttacggcatccgtgcaacgggacccggccacacgtgaattctatctggagggaggtgccatggttcttgcagacggtggtgttgtctgcatcgatgagttcgacaagatgcgagatgaagaccgagtagccattcacgaagccatggaacagcagacgatctccatcgccaaagccggtatcaccaccatcctcaactctaggacatctgtcttagctgcagccaaccccatcttcggccgatacgacgacctcaagactcccggtgaaaatatcgacttccaaaccaccattctctcccgtttcgatatgattttcgtcgtccgcgacgatcatgaacgcagccgggatgagaacatcgcccgtcacgtcatgggagtgcacatgggtggccgaggcatggaggagcaggtcgaggcagagattcccctagagaaaatgaaacgatacattagctactgtcgcagccgctgcgcacccncgtctttcacccgaagcggcagaaaaactctcgtctcatttcgtttcgatccgaaagcaggtccaccgcgccgagctcgacgccaacgcccgctcctctatccccataactgttcgtcaactggaagccattgtccgtatcaccgagtcgctggccaagctaagtctgcagcctatagcaactgaagcccacgttgatgaagctattcgcctcttcctcgcatcaacaatggacgccatacacagggtgagggccagggcacagagagatgatggaggag

SEQ ID NO: 3303 - DNA, 3763 bp, Emericella nidulans
ggtattagggatctagattatatagataaagaactttatctgactggaccaggagctttatacctaatctatcctagaagagtttagaataactaaatcaatatctcaagacacactgcttgatcctagtaccaatctggataattaattatctaggaagctaccttgagacctgtataataagtttaggaagattattaaacagcttacctacctagctggcagaactaggccagatatctagttctctataaactgactaagctaatatcttacagatccctgagaggtccatcttagagcttcaagatatctcctttactatatcaaaggcactgttatatatagaataacctacagtgcaaaggggagtacagataccaagaccctgataggatattcagatttattatataggaattccacaaagcagagatcgaccagtatatatatctttatgctagctaatagaccagttagttggtatagccagaagcagcctattactgctatgtcaataactaaagcagaatatattatagctgcagaggcagcaaagcaggctatctagatcagatactttctagcagctatatcaaagcatcctaagcagccaacccaactgggaattaacaatcaaggtactttgatgctatcatccaacccagttaatcatctacacagcaagcatatctgcatacaatatcatgccatctaggacttcatcgagtatggagatatcaagccaatctatatccctacctcagaaatggtggcagatggtctaacaaaggcaataaaggctgataactttaagaaagcacttcaattgctgcagctgaagtcaaaataaggttctataatataatatcaagatcctcagattaataagataaaggcattcaacacccctttattgtttctgttttatttccttttttagaagcttgtatagcttcattctatttatttcagggtattgaatgaaggggagtgatatagaaatataaggccatgtaatctctggtagattgaccagacattgcctgtttctagaaggttcctaccctctgtatatatatagtagggagagaggaatacacacaagaaaagcaatgaaggaatctatcatcaacaagataggtgtcaatcgtcacatggcatccgatccttagtaggctacgttggtgtagttgatgcagtttcctcctgccctttatcctctgagcatattccacaacagttatcaagtatttattcttgacacgaacgttgtgataaggaaatccatctctgttgcccataacagaaattcaaatctgactacttgagacgaccactggaagtcaacttgcatttgacccaatatacgttctgtttctggtggggactcgctgagagagtctgcgatcgctctacacctgccctaaaagtataccgtaacgtcctacgttgaatttaccaatcacattgagttcccgttttttctttgctctgtgcgagcaagagctggctggaaaggccttcctaaggacctacgcatatttatttaaagggataattggtagtggagtaaaagtggccaaaatccgcaaaaaggctttccaaggaaaggaatggtctggttagtatagtccacgtataagcgaagtttacacaacttttattagcaagtatggatctgactatgcgtacttaagacattacacacccacccttttcctcgcctaccctgggctttgatttaccactcgccagaagtttccactcttggtcaccatctatgtctttgaacgacccttctcgaccccagaggtctacaattcccctgaagtatgctgatctattatagtctttaacaggctccagctcagcacaccgctgcccgttctgcactttatcccacccttcaagccttatgccatgaatatgcggaatgtttatatccattagtggcatatatatacgcccgcatacagtctccttcgagatcgtggtcacctcaataaacccagaattgtcactagagtttctggattcaacattgtaaccaaaactgacacatccaggctcttcggagccctttttgtagagaactctttgcctgtaatgcctggcaaaaacatcttgctctaagcggatgaacttctgtgttttttcctgtggtttttcctgtggtttttcctgtggaattatgataagctgatcgttcttcgtatcatattccagaccaggtaagtttttcctaatttcggaggtgaaatatatccccagcggcataactcctccatggactaccctttcaggccatgtcatctgatgatatctttgatcctccactgttggtgttaagaatagttcccattgatatttcttcaatgtggatacgaagaattgcctcttaatatcgcgcaaatcctgttcctttttctctttatctttatcagttgcctcagagtaccatggtacaaggttttggtctgtcagattcagggcacctatcaaagcccagcattcatcttctttctttgtgaaccttcggctctgtgccccagccagaagatagagcaccgtctgttcgtggggccagtaggctatgagccctgagtgtacaagccaggagagaaagcggcccgcatacctatagttctcggtgtagttattatcccggggtccggtgctgatgaagtcaacggctttctgcactatgtctggagtgccttgtggcattccgtacgaagaggtccaaccctcactgtgccggagaaaagcactggtgatacagtcagcgagctgtgggctgcaacccacaagtattccactgtggcaattttctgagctggtgagtcgatgggatggcatttgcggtcgcaatcaaacagaagcgactcttgcagtagaacaccctcttggagcgtccagccacaggtgagccaaggttcatcctgttgggcatcttctaggcataagcggaactcaaagagcatgtctgcaaggttcttgcgcggcctgaaatccgctttaaggtacgttgataatttagggcaatttgcccaggtcgtgcgatgtagccagacaatgccctctttcgcgccttcaaaaatttgcctgtatatacaattactcaaatcgattcaacaagaggatagtctggaagaaatcatacctctgcttagcgatttcctcgcctgcagcgcttttcagcttttcgcaccgcaatgtgacctttttatttgccataccctggggaacacacatccagtcccaccagacatattttgcacgaatagtttccagcagaagctttttagcttctccaatggatagctcggcgacggttgggatatcccaggggagacctgtttcttgcttttctccttttaccgtgaagcaatatcgtggcaagtaatcggtgctgactggcttgtcaaaatccgcccacataccccaggtgtatgaaatgattccataagatcggtcatcttctatctgatcgtaaggatacacacgccattcttccagatggagtagccaacggggatgtttgctgtcattgctggggatgtaaggctcgccgctcatgtttagatagtcaagatgaagaaaattgggataaccaaatgacagtaaagtctgggagttcaacgtaaactccttatagctggactgcagagttaacgcaataacagtttagaaatttgattcatattcttatatgttgttaccttgagccagcagcttgggctagcgtagtagtgctggt

SEQ ID NO: 3304 - DNA, 3864 bp, Emericella nidulans
ttcggttcatctgaaatggagactgcagggtcggatccccgggctcggctcctgctggaagtggtctatgaatgcctggagaatgcgggaaagactaggtataggggcgaaaagataggctgctatattggcgcctggggggtggattggtcggaactcacgctcaaagacggccagcagcgcaatcccatgattggtgcagctgcagggagttttttcttgtccagctatattgcatggagcctggacttgcgtgggccgacgtgagtatccctaactgtcagcgcaggtgttgtgcgggatgacgaacactaactgagccagcatgtcaattgaaacagcttcgtccgcctctatggtagcgttgcacgaagcctgccagtcactatattctggcgagtgctcgtccgcgatcgtaggtggagcgaatctgatcctcaccccaacccttcatatgagcctttcctcgagcggagttttgtcacccgacggaatatgcaagacgttcgacgccgcagccgacggatttgggagggcagaagctgtgaacgccgttctactcaaaccactggatgatgccattcgcgacggagatgtgatacgggctgttatccgagcaactgccgtgaataacgacgggcggacgttgatcttgacgacaccgtcggctgaagcccaggaggatctgattagacaagcatacagaaaggccgggattgaggacttcaacgaaacagcctactttgagtgtcatgggacgggaacaatggccggggataccgctgagacggccgccatagcaaagatcttccacgagggaatctatgttggctcggtcagtggtcaaattcaagaaatgtatccagctgacatactcagcacaggccaaaccgaactttggtcattctgaggggacatctgggcttacaagccttatcaaggccatcctttcgctggagaagaagacgctgctgccgcatatacatatgcgagagccaaacccaaacagtaggatttcctgtgtgaaagcaagaagagcatcatgattctgacctggcaacccagtacctttcgaaagcgggcgattgatggtcccccaggaggagataccctggccggagggccgaagggagagggtcagtgtgaataatttcggcgtgggaggaacaaatgtccatgtcagtagctgccctctcttaaccagaattcaagctaattgtcttcgtaggtgatcctggattctgcatcctcgcttcatttggagactcgccgcaatcggcagcccactagactcgcgtattcccggctactggtagtatcagcaaacagtgaaaagtccctgcacaaaagaatagaagaccttcaagagtacatcaaggagaaaccagactgtttggcggatctggcctttacgctgggggaaagacgagaccatctggcgcaaagggccttccttcttgaatctgaggcactcgagattggcgcctttcatattgggactgtggattgcaaaacgacctcagaagtcacattcgtgttcacggggcaaggggcacagtggccggcgatgggcagagcactgatagagtcgtttggaacgttccgcgaaacaattcagcagctcgatcaagccctacagagcctccgggagcctcctgcctggaagctggaggctctgttaggtaaagactgttctcaggaacaaattagccgcgcggagctcgcacagccttcatgctgcgcgatccagattggcctcgtgaatctacttgcggactggggaatcgcaccagcgtcagtcgttggccactctagcggcgagatagcagcggcctatgctgccggagcaatcacggcttcagaatcgattataattgcctactatcgaggaaaggctatgaacaaagtaacgcgaaagggtggcatggcggctgtgagtataggacgcgagcaggcgactccctacctcgtggacagaggcgtggtgattgcatgcgaaaatagccagcatagcgtgactctgtccggcgacctggatgagcttgaggatatcctcgagaagatcaaagctgacgacccggacgtttactgccggatgcttcgcgtcgacaaggcgtaccactcccaccatatgcacgatgttgctgaggactacgagtcgtctcttcaagggctctcgacaagtgagggctctttatttatggtgcccttattctcttcagtgatcggtatcaaagtgaccgagtcgtcccagttgaacggcacatactggcgccagaatctggagtcaccagtccgcttcctgacagctgttcaggccgtactcgactcagaggaggaaaaaagccgtaccttcttggagattggaccacactcagctctgtctgggcccctccgacagattctgtcagagcacccgcgcgggaaagtgtgctcttatgtggcatcgcttgtacgaggagaggatccaagaacttcagtcctctacactgccgggaacctctacaactccggcgttgctgtgaatcttcgtgctataaactgcgagggaaacatgcttgtcgacctaccaccttacccctggcaacatgatacgagatactgggaccagacgccagcggtggaggcctggagactacgcaagcacccccatcatgagctgctgggctcacgggtgttgggctcaacagacatagagccgtcctggcgaaataacctctcactggatgatgctccctggctatatggacaccggattatgggcaagactctgtttccaggcgccggatatattgccatggccggagaggctattcagcagctggtatctaggccaaatgtgagttaccagatcagccacctcgtgctaaaacacgctctttttctggacagcaacgagtgtgtagagctcatcaccaacctacgaccagtccggatctcggacatccaggactcagaatggcatgagttctctattactgccgtgcaagctggggaggcgacacgactctgcttgggtcaagtcagagtagccccgccgtcagtagctcccaccatgccactgacaggaagcacgaagctgaagagacgtgtaatgtcagcagcatggtacaaggctctcagggaggcagggatggactacaatcgggaatttcgcggccttgatgacatctacggtgatcctgtccgttatgaagccacggccactgtcaagacgaataatgtatcgcctggtcgatatgtgatgcacccaacaacaatcgaccgctgcctccaggtgttatcgatagccatgtttcgtggcctcgcgcgtagcatcaacatccgcagcctccctgtcctatttgaagagatctttatcggtcctgagcatgcagaactccacgtccaagcccaggcagatctcggcaacggcagcttcatccgtggcgacctcggggccatggcggacgatgagaccatcttttccattaaaggcatgagactgcacgttctgggagacgaaggatactcgtatcaggagagcgagctgtctgccaggccagtctggatgccacacattgatttcttaccccccagatccctagcaaagcctccccgccctgttaacattgtgagcgagttacgcgatcggattatcgacctgtacattgcgcagactgcacctcgggtccaatatgtcgagcctacggaagagcatctgcataagtacaagcgatggttaatgataagcgaaaaccggatagcgaggcagagcacatggcgactatccgactatggctacgcacacgactgtccgtttgactcctccaaccctgccgcgatgacgaactggatacgagagagatctagagactaccccat

SEQ ID NO: 3305 - DNA, 3479 bp, Emericella nidulans
aggaacacggatccaacgatgaagtaaccattaagcaaaaaatcagtgtcttacaagccaagaccagacaaagtccattccaaaattctagtataatttatcatattcgatttttataaagacactacagcccactcggcgactcttatcacaatgtccacttcaatcagaccctcccttgaccccgaactcgtcactgttcacgcctcgatcccttctatagacatcgagacaccctcgaagctctcagcctatcgcgcggccattgcaccaatgttcactctcgagaacgcaatcaaaggctcagaatccagcgtggagcctagcgagatatctatacccggcccagcaggaccaatgcacgctactgtcttccgtcctaagagccgcacccgctctgtttctgagactcctggagtcctgcacatccacggcggcggcctggcaacgggcaaccgcttcttgggcttcacaatgttgaactgggttcgaagagctcggtgctgtgatcgtcacggcggaatacaggctcacgccggagcatccgcagcccgcggcgctggaggatagttatgcggcgctggagtacatggccgcgcactcggaggagttaggattcaacgctgaaaaactgattgttgccggcggctcggctggtggaaaccttgcttggggcattacgcttttcgcccgcgacagggaaggccctaggattgcgggccaggtcctcatgtacccgtgggttgatgacagcatggccttcgcctcgatcacgcagtttggggacattgcgccggtgaagaaggggaatctcgcaacggtgaatgactacgcttttggcaagaatcgcgagtttgcagatatgtatacggcgccagcccgtgctaaaagtctgaatggtctaccgccaacgttgatagatgttggcgaggcggatgtctttcgcgaccaggatgttgagtatgcgacccgactgtggagggatggggtcacgacagaactgcatgtttggccgggagcgtatcatggatttgatgtttttgtgccgagtgctgaggttagtaaacgggctgtggcgacaaggctggcatggttgaagggggtgctgggacagtagctttcattaaggggttattcagactataggtagtgtttgagggttggttttatagactgcaagtttttctggagctgttatggattgcttgttatcaaaaatcatgtttttagcccaataatcaggtgtgctcatcttagtgataattccaacgctttatcgttatatctaacaacagtttcgagctcttacaagagaaagttctcataatatatagactagaattataaccatattatcctgcaaaacaagtattatcttctacagtctatattttatatcagatcaagtatgtcggaagaagcctttatataacctattactgtccctatctgaagagatttaaccattgctaactagatatcgaacgatgagatctgatattggctatacatacgccacaggagtcgagcaactcgtatctcaaccggctacataatttcaagtttgacggatagcggcggattcggcagctcgatttccagtcgtcaataaaattttgtattgggggcttcgcctcgcctctgatcttcactctgcaatcagatagtgagtttaacgctcaatatccgtggaccttatcttaccaatgattccctaaagctcactacaagcgcggtctcatattcacagtattctttctcgaagggacccatctcggagaaggtggttgcaacatcgaagtctgtccatactgcccgatgtggcgtgatgaggatatctttggggtagatatctctgtggtggacaaaggcattatggattgctttaattccatcaacagccccacgaaaaagatcatctgaatagttcacacagttcaacctttctgcattgggcaaatgctcgaggattatcgctcttggttgatgtttatcgttaaggaaatgatccaagggaggattaagggtggatgggtcaattcgatcaatgcagccgtagaagaaggggacaaatcctcgttggcatacaccatgcgaagagaggttctggtaggcgtttgattcgcaacgaaagcggttcaggtctcgacccattttttgcatatccggggtcaccgttatcgtggaactactttgttatcattgttcagagaagacagacctattgcgctcacaagcttcatgacataagtagcaccccgcagctctatctcgtatactgaggatgtctcagagcggttgatctctcgcttgacgtatatgtcagcagggtctacattttgaacacttcgcagacgattgtcttcagagagctccataaggctatcggttaaggtggataattctttgaggtgtgtgcacaagatgtggttaagacaagctttcgttcgactattggataattgtagtcacgtcacatttgtgtctatcacttcactcaacctctgcggtttccaacacgtctcggagtcggagcatctgatccaccaacaaccgggcagtatggcaagtcaaactcttctataatatctttctgttgcctttcccgccatcacaatacaagcgacggttcctgacgcaaacaacaaatccacgctttggggctgataatatcacccaagtcgcgcttggcctagtttaatatgcgtcgctagatatttgaataaatgtcgtcagataaatcttcgacgggctgtctaatttgaataacaggctacgtcacggacgagtgttgaaataggaacagtgcaaatactgtggacagcagttcgcgtagacagcgatgccgtcgattcaccctcgattgccaacagcctgcccactttgactggcagacggctaggcgttggctgtagtgtgaatgtgcgcgcacgaactaaccctgaaaggctggaagatgagttgggtcctgcaaggctgacatcaaggcatacacgcgtataagcactgggcggtagatttggcttattctttcataccttcattcagggaaaagttcagcctcgccgacaagctggaaggactatatatagacttcccgatcataatttcctccagtcctcggaccgttctctctatcatcgctttttcttgccaaaatgaacgctattcagataccttctccggtccagttaggacacacgaacattgacggcgaggaaacaccttcttcggtagatatttattcgtggcccgacaatattcaagaattggacgtaacagggtggctctcctgtgttggaagacgccatttgtcatttttccgcccatcatctcccgcactccctctgtccaataccaaccccattccggttcctttaggaggacaagatgttcccatgaaaccagtaccttctcaccaaccaatctgtcgccgtccagcaagagggcgctccaggagcttgactgcagagagaacc

SEQ ID NO: 3306 - DNA, 695 bp, Emericella nidulans
tcgggcggaatctataatggcagacattgacaataaactgtgatatataacctcggccaaacatacaagagttgcgctattgatataaggggtatatggtatgtgaacatcagtacgtctgcttgtgaaggttctttgagaagaagcagcaagtcttagatttctgttgagtacgcttattgagctcggatacgcaccaagattgtcagtattttgggtatatgctagcaacaccgcgcgatacgagcaggcctacagggctcttgcagaggaactcaagctcccagggagaactgactcagggatcgaatttttcaagctggtgtcacggtggctctcggacgctgctaacgacagttggctgataatcctcgacaatgttgatgctaaggatatgttcattcaagagacagaattggtgttatcaaggttaacctatagccagcccccgggcagcccttaccaaatctcggaattgaacagccgccaggagccttctcacgaacaattagaatatcgttcatattggtgtgatggaggagaaggatgccattaaccttcttcaggcaagggtcacttagatcagggttcactagaaggttctcgaggctggggcaggcttgagaatctataccacttgcagtcattcgggccggttcttttttagacagaatcctggcagtgaagcagtgagg

SEQ ID NO: 3307 - DNA, 7300 bp, Emericella nidulans
attagatgactcttcccagagagggggagaatgcatcgatgcaaagcaaagacgagaatgcacagtctgaccgagtccaggtcgtgcttgttcatagtcgcaatggagaagacgacgcaaagcgtcaggtatgccaggagcatggaccgtggctcgaaggcattcgtcatgaagacccgttgcgacaaaactgttgaaggcgcagaactcctgcgcgattggcaggaggccggctgaccaatcacggttagcgtcgagtaaaattctacgacaaccgtataggatttggccaagagttatctcaccttaaggcaaacgttaatgaaataactagcagtgacacttgccctcaaaggtaaccaaactgtctccacaacccgagaaaaaaggactgtactctttccataacgggaaatgctcctgtcccccttcgatgatcatgcccgtcgagcgcagctggcggagtcgctaatttcaggcaaaggagtgcaatgaacaagataatcagtagagcggcgaggcaggcaacctgaagataggccctcgcgcgtttttgaggctggatccatgtcgaacgtggatgcgaaaagacgcgcgagaaaagagacctgacggagatgcccgcccttggacaggctgggaagaatcgagctggatctcgaggtaccggggcgagccgaagatggagaggaagctggtcctcgtcagtcgctgagaccattcagataccaccttgggccacgtacagttcagcggctgtttcatgggtggataggctggctacaacaagctatcatgtcagctgcgcccaaacaattgttgtgggccccggctgtacaaacatacctccgcaaaaatcccgaacgaatcctcgaccccgctaggccagagattaggcagcttgcggcgagagtggcgaggccttcttcgggtatgggtcagcccgccaggcagatcaatgtattggatacccgcccgtcaagaagatgacgagaaagccgactttgcgtacagaccgttcgaaaaatcgtcatggacaaagcaggcgtcaaagtacgagacccgcagacccgctgagcatgctcatcgtgatgttcaacgtcgtttggaagtgcgagatgagtacatatgggcaggccgtaggcgaagccccagaagacaaaaggattgtggctgctatgggtttagcctagtctattcgtggagtggttgtcatgaacctgggcgtttggagaagcgactggtgcagtgtgagattgactgcggaggtgcctgtgccatcaattaggtgatcttgcgcttccgcagagtcatggttacccagttggttaagcgaagggttagaggacggtgtagatttgggatgtctcagggtctcacactgagtggtaatctatgccaaacatattcctgacgaccccagacttctcgggacaatccatagcgaagtcgagagaagtttcgtgatcacagcctttgaccgtcttgactggaaagaggagccgtagagcaagcgaattgggcgtcatctgcgcagaagttcggggcgctttatcccgcatgcagggcacaagctgctaacccgggattaaggctggtcccctagcgatccctcagtattcaattgtttattaaccagttaccgctttcgaacaaaatgcgaggtcgacacccattgctctcgcctagctgccttactcacttgccgaacggctggtcccatactttcgaatacgaaagcgatgtttagctctctggcgagcgggccactgatagattaatgtcaatgcttgatgtccgagtgctatcatccgctctctatcttactacctgcgctctggctcagattggctttggagcgcacggccatacttcctgacttaaggctcaccaggccgggactggcgcagaccgaaagacattcacttgtctgagaggtcttaaaagtaaattggaatcggacacctcagagggtgagatcggcctgtcgaccggcgtcagccaccggacggacctcgttcaatacgccaaagcgttttccagctgtttcccgaaagatcccataagagaagcatttgtcagcctctttgcaaagtatcccgacatattgagaaaacatcgactgtcggttattgttctactggacagacgggcttcctggcgacaacatggagtgctttttcaagtcccaatcatccgacttgaccctggagtcgcttatcattgcttcattacgctccatgaagctgaccgctgcgcatgaataatactcttatatattacaataggtatcgagagagtctcaggtcaagaaagatctcacccggcggaggctctgtaagcacaatagttaggcgaccaatggttactctatcgagaatgaatgtgtaaatggagaccgagaacaaaggatccaacctatgttcgctattcttctgatccaaagggcagattctcgacgctgtcttgatgggctctatacggcccactcgcataatcagcacatgagtatgccgaccgattacgcccccaattgccatgatgaatttcattcttatcttaaacgtcaagttagacaattggtcaattgtcaactgatctaacagaaccaccaaggacttcctctaggactgcaagcaagagagtaaggacgggacaggcagactgatatccatcacatcgaacgttgggttagataaactccaaggataagccggttggtcttttgggtcctcacgtaatcagcacaaggtgaagagtggtctggccatagttgaccggatgcggatggccctatctccattcaagtacagtatgggagaggctgtgcatgattggctccgctgtattacttaacgcccttcgacatggcgttggctgacaaaagagccggaatctattccgccagttcttagttagccctgacattcctgattgcagctcacctgcggcagcatccgactggtttatattttcgtccagcccagaattcccgtgtggacgtgcaattgcctgcagtgcgggatccaggccacgatgtcccaaacggcgacaaccctacaagagctcgcccaccatgaccacagtgaccatgaccacgacgaccaagccaactccccacaagccgtcgccaaaccactcagccgcgctcaagctataaccgctgttatcgccctctcaggagtcagttttcctaaacaccacagggtcgggcatcctgactgtctccctcccagccatatcaacctccctctctcttccagccaacctcctcctctggcccgctgccgtctatgcgctcgctgccggctgcacgctcctgacattcgggtcgctcgccgatgtggtaggcgacaaacgggtttggttgacggggagtatcctcttcgcagactttaccctggcatggggtctcgcccagaccgggacgcagttgatagtcttccggcgcttctgggcattgccgtggcaatgtgtctcccctgctccgtcagtctaatgacgagaacattcccgtcggggagggcgaggaatttgggctttgcgaccatgggggttggacagccactggggtactcagtcggtctgatcctgggtgggatctttgccgattcaattggatggcgatacgggtactatatcagtgccatcatcagtgttctgctctgtgttctagcgttttggagtcttccggatgaagtgcccaagggcgagccctggatgagaggtttaaagggaatcgactggataggcgcggtaattatcggtgtctccttagcactgctatcgtttgttctggcgtcagtactttcctggacctggttatacccgtgctgatatgagtgcagtcagatcactgagagctaccacaacttaggggagacctacataataaccctctttgtggtctcggtcgtccttctcccgacttttgtgctctgggtaggctggcaagagaggaacggtcggccggctctcatcccaaacggcctctggaagaataccctgttcagcgcgacgtgcatcatagtcttcttcgcctgggctgtgttgaacgctctgcaatatttcacttctttatagtatgacccttggcacgaaccgctgatccagacagctgacgataccagtttccaagagatccagcaccactctgctttcaaatcgtctctcatgttcctaccaatggtagtagcaggcgcggccacaaacatcttcaccggctacacggtcgacaagatcccagttggtgtactggtgttcgcatcggcagtcatcagcacagtgtctcctctaatcatggccctggtcaacccatcctggggatactggcggggtcctttcgtggcaatgcttctaagtcctattcaatctgatggtacgtagattggaatcggtccgtatattcgcacccgctgacgatcccacactagttctcttcacagtctctaacctaatcatatcccgagcctatccagggcacaaccaggctcttgcaggtgctgtcttcaactcagtctctcaggttgggaactctgtggaactcgctgtcagtacagccatcgctgcctccgttacggaacattctcagcaggatacccttgaagggcttccaagcagcttactggctgatgttcacggctatggtcgtggtctgctttgtgagttatttcggccttcgcggtggaggatacgtagggaagaaaagcgagtagagcatatatatagctggagcatttcaagcgtttcatagattcgcattcccggtgacaccacccatacttcacatgaaaacctagaccatgcctagctcatatttctgcgtcggtccgtcttttaactagctcatgatagctcacgcaatgcccgctgcatttccctctcttggtaaacctcccggcccactgtaaagagagcactaggagcgcttttgcggagacgccagcgaaccagaaagcaaggtgagacaacggagtctcaagcggacatgatgggaagcatgtctagaccagtccgttcttgttaggcctaatcgatatttcctgtttgggcgatctacagcggctgaatgggaccgagcactcggcagttggcgtggcccccgcttcagctcggctgcccggtggatctgactgtccgctatcttttcctactatcttgctgtgactccccaacaggctgcatatccagatgcagggatattacgccttgcattaccatactcaagaacgccaggcaatctcactcaacacacaccttcatgagttacaactcgcaccatggcactttcgtacaatcttcaagatcttatcgcgacagacatcgcaaccgcccttcctaaggatgcagtgacagaggtcatctctcaagcaccgttcgcgtctgttcccggtatcttcaacctacgcgacatcagcggtgcggattcgcctctgtatcccttttcagttaacctgcgaaccggtctcgtatatcgagcgggtgccccggcctctacattcacagaacatggtagagctgcgctgaacaccctcggtatcaagaaaatctttgatctacgtcgtgtcgatgagcgcatcaagaatcccagccctgtcattgacggcgtcgacgttgtatggattccgtacgcagaagggggtgcccggccggcaactgtccggaaccttgaagggtccatggaacaggttgtggaaatgtacatgggatatctggagacgcatgcgccgatctacaaggccgtctttgagcacattcgggacgagccagagacgccatttctcttccactgttctggtgagtctcgtaccaaccggatgctagaaggaataaaaagaaagaaagaaagaaagaaaaactaatggagatggatggcttagccgggaaagaccgcaccggtgttctcgcagccttaatccatcggctggcaggaagctccaacgaggcccttatcctcgacttcacactaacccgcgttggacttgagccgggtcgcgcggcgctcctgaagatgatgcaaagtgtgtacggcgagtcagtgctcgacaacccggtcctgccggtggtctggggagttcacggtaccggcatggtggcgttcttggaggctctcgacgaagattatggtggagtgactgggtatctgaagaacgcacttggattttcggacaatgacctcgaggtcatgaaggcgaaccttttactgaatccagagtcgggcagtcgcctgtgatacaacctgagaggaagctgtaggatgtgttactatcacttttattatctgagcccagctagttatgcaggcgcatgcacggtcgctctttctattttgggtagcaaatatgcatgtcactaaattatgctctccactaatgtcatgcacgtgactttgctcggcggtggaactcggcccgacaatattttcttgctctcttccaagccgctacttatcgcagcaaatcctcacgccgggttgtcggactctcctttcagtacagtagagcttgaccgctatacatcttttgccacaatgggtattgcaaagaaaaccaagaagttcgcgcaggtctgtcagcaccaaactcgaattttgaccggagacagtcgctgatactcagcagatgaagcgcacgatcaaagcccgcaacgaacgactcaagaaaccagaaccgccgaagaaaaagcctgacgagatcgttcgtcatgtccaaaccgttccaacaaagctgttctttgttgcgaacactgtttttggtcctccttatcgtgttccggtctacacccacttcgggtcatcgctattcgtgcgatgcttgattaacatcctggctatatggattttttctatgttaacctgctattactgatttaaagttgcttcggttgtttatctttttctgttctgttcctcactttcttgtcggtgctttgcatattcgtttggggttctttgttcgtttgtgtattgtttctaatgatctacttgtgcatcattttttaaatatttgttattttcttttttatgggccaaaacttttgtgaagcatggtgccaattcgtcgtataaatctgtatttcttttctttcatcctcctttaggggatttttattttttaactgttttattttttacttgtttatgatccttctttacttttactataatctttattccatatttactttcctcgtttttttttgtactaaatcctattgtttctataatgttttttactatcctctatctttttctttatcctatttgttacgtttttgtaattttatttttctcgtattttgt

SEQ ID NO: 3308 - DNA, 873 bp, Emericella nidulans
gatccagctgacctcgccttctcgcagccggagttcagggccaggggaagatccattgactaaaactgaatagcgctctgagcatgcctcattgtaaatgtccgctgtaacccgcaagatatgatcgggttgaaaagagtggtcgtgtcgaacagtgctcgctcgactggaaactgccagccctaaaagcagggccagactgccgtagattgcatgcattctgtcaaagatgctttcctgtgtatggcgagtgagctgacagcccgtccttataagcaaggctcctttaaaagcataatatgagtcgctcgcaatgatcggcattcatcagcaatacgattggtctctgcgtaaacgtctgcagggctcgattggagcccaatcccctaaagagccgaatcctgcgccctgggaggcctctgccgcactagcggagcggtcagttcattgtcctattcacggtcttgcagggggcgatcggcattcgaggaggctcagctctttatagcccacgttgtgaaccagcctcggcatagacgagctacgttctttttgaacgccgcgaacttttactccgagattgatcaatggcaaatacgcgtactgcaagttcataataagtgttcgcattgtagctatcgctcattgtgctagggttctttctggcttacgtttgggcacctgtgccacgacctgcattgtcctcgcacagacgcccaaaatctgatctgtgtaaacgcatgagtggtttgacatagtaggcgctgcactgccctccaagtctccgtgtatactcgcgggagtaacttcagccgacggagataactacaatgtggagtatcaggcgacctgtcaccgaccagagcatgatag

SEQ ID NO: 3309 - DNA, 458 bp, Emericella nidulans
tgaaaagctcaagagaacctcctggcgaagggacttctggaactccgaaggtcaattctcccacacttgatacccacggaggaacaagacagtcaggctcgtcggcgcccattaacccttttgaacagccgagagaaccctcagtaccaccagcacccagtaatccattccttgaacagccaagagaaccctcaccatcaccaccacagcctcctacccaagctcccgcccctgcaaccatccatatagaaagcgctgctcccccacccccggctaatatccatatagaagctccatcagctcagcctgccccaaacatccattatggagcgcctgcaccccctgcacccgttatcttcgagactccggcaccgcatggaacgtctagggctccaacccgtttgaatatgccctggaccttccatggtcgctcttgcgccagaacctgtgcctagaca

SEQ ID NO: 3310 - DNA, 3297 bp, Emericella nidulans
ggaggggatctcgctcaaatagatggccggcgcagttggttttggcgctctgcgggaatatcgagacggcgcttatctgcgctcaagtcgctgacttgacggagaaacagccccggagtgagcatatgggatgtagcaagaaagacgtccttcttgaaagtttcagagatctcatagcatgctcgggattcgccgtatgtggcaccacctgccatgaaaacgatgatgcgttgccgtggctgctccccggtcgtgcgtgtccgtgcccaggtcggtttcgcactccggagagatgcttgcgaaagagtgtcttgctgagttgccatagcgtctgcatcagtctgaggacgtgtgtgagggaatatagacggatccaacgttcctcgaataacgtcttctagcatcattttgacgttgagttcgtaacgggagaggattccttcgtccgaatcggctaccacaggcggtttcctattgaaaagtggctgttcgggcggtttgtcatccttcaatggtttgtcaactctggccccgagcaatccgagattagaaatgacatttccgtcctgaggtggaagttgggcatgtgccatgagtttcctgatgtcgccagggagaagtccgttgcggtatatgatatagaacagtaagagtctgagcctgtcagtatggatgatagtgtcatcatcaagtaactgtacgagctgtgatgccagccccttggcctttttataattctcgtcaagcccggttgcgaggcactgctctacagagctaacctcaataagtttatgatcttggaagaacttcatgcattcttccgccatgtttagatgaagggtatacgcgtctctgccttcttggaattctcgaaggccagccagcatgtctttaataatgcccacgtcagccttttggttactggggcgagttagtaaaatgattcaagatcgtaggggggtgcatactcttccgcaaactgtgggttagcggctcggaacctggcgaagtcttcacccaatttacctagcacgtccttcatatgcatatgcctgtattctacccagattctatcgtgatcgttgagctccatctccttcacctcttcattcgtggtgcctttgttgacaaccatcttatacgtaattttgtccccttcctttatgggcagcaagtcgtgaaccatggactgatacgtgaactcatggatcaaaggcgcgaacagatccatcgatcgatctacgaccaagagcacaccccggggtcttggagaaggaggcgggaaatctcggttgaactgcgcgaattggtctagttcctcttgaataaatcgtgccaagtgcgaacacaggacactggcctcgtgagtaggtgtcctcggccgatagtatctgaccacaggatattctcccaatgtggcgcacaaagatacggcctgcgcgtctgttagcagtggcaaataacgacgataagaagctggcctaccttgtgcgccaatgttgtcaaatgctcgcgaataagatggttacagcccggatggaacaaaaccggaaaactccatgggtctcgaaacgtgacaaggcgcgattccctcggatagtagtcgatactgatggtttggaaagccgcgacttgctcctgaaccatctgtgaccgatcaaatctagcgcgcagccccggattaagaactatcaagcgtgtaagaacggggcataatcggaaaggtaagagttgaccaacatgatgtccacaccagatatgactttctgtatctcttcctctccagatcagccagtacgcaatctacgatgtgcggaagggcggagaggatataaagggcatccatcgactggttggtgttccgtcggtgctcgatctgttcaatatctggcggcggagcggatcagacaatgagctgtcggtgcgaaccacgaggttgcacttacgggtgacattaaggttaaggatatcatcttctttgacgacattgtctatcaggctgcgactgccttcatctaacaccaggactttccactgtacacgggcacgtcagttcggccgcgaagtcagatcaggaggggaaaggcgggggtcgcgatcgcacattgtcgcctccggcagagcggatagtgttcaggatgactagaaaccagatccaattagcagctgtgaggtaaaggatatcataatgaaccatttcgctgtacgactctctttcccgttgaatgttaagtagtgagctcatgggggccggccgacagccctcagaagggtttcctcgaagccccgtgattcaagcagaccagaataggcagcagaatctcaggtggagtgatgaaagcagttacactggcgcatagggtgcgtggtagttactgaacagagtgttgtgaaaaaaagcaccctgtttatgaaacgtagcatggctccagagagtacgcagatcccctccgcggttgccgccgttttgcgatcctgcagtttccgggacctggaggcgacttttttgatcttgcgcctcaactactttcttgcacaatcatcacccggcttctcatcaactcgtccaatgccttcgggtcttttcgcggggactagattttacaaaggcgtaccttttccgttctccatcggttactaccctctatgagaagcttcgaatgcacagagcgcctccgatcaagtcggccctgtgctgcgccctcaacaaaacaacttcattgatcgagccggtttttccctcttttccctaagcgatcctagagtaatgcagccatggtccagccgaggcagtcatgcactgtctggggcctttcgaactttgcgccctctgcggcgcaccttcaccacaactcctgcgtttgagagagccaacatatacaagaaacaaacgaagaagcttgccaaacaagcaaaagaaacaggagtatgagtgcatgattatctctatacggccatatgctgatgctgcccacgtgtagggaaaattcgatcccaggagcgccacgccctcgacactatggagacatcacaggctcgtcaataatttcccgcaactcgtcacaagttttctccgggaaatgaaagaaactgatttgttgaattcaaagacaagtgacgagctttggaaaacgtttgagcgcttattttttaaacgcctgtatgttttttaaaagcgggaaaacactaaacatggttttttgctaaacgcgaagcgcccaaggcacaaggcttattttaaagaccgcctttgggggctgaaacctgaactgggaaaatttttgtttgcccccacct

SEQ ID NO: 3311 - DNA, 564 bp, Emericella nidulans
gaggattaggcagtccaaaagtagcaggcgcgttagaggcgtcttgacgagttgagagagtctcttgatcaagagagtcgccggtgcgaaggtgaatctggggatctgcctccagatcccttgacgcgggcggcccaactgggacaatgcgggatccaaactcgacgccaattgtgacatcgtgtgtagaagaaaaccgaccctcgcatagccggatggtcagctacaaaggcgtgatggaagggttagttgacagtttcagtagaagttatcggccgaacatacgctggatttcccggttccagaatcaccgatacagacaagtttagcgatataatcccatggctgtgacatgggtaccgtggagtgtttagtgttgttgcggggaggatgtttttcgaaggattgaattaggccaacctaaaccaccatagagctcatctggggctgttgctggaaaccacaaataaaggcgtacgagtcgctgattccggaatatcagtcagaaccaagctgatcaggatactagaaagcaggagcattagtttgcgttttgaaggggat

SEQ ID NO: 3312 - DNA, 1099 bp, Emericella nidulans
ctgctggtgtttcccgactatctcattgacgtttctgcattttgctcttaatggtttttgcaagagcccacgggagtccggtgtgattttcatgttttcgtgggctgttccttcttggcaacattccaacacccggctggtcctgtgtgttcttttctcgcacatgatggagttcttttctttttgatcaccttctacactaattctggaggtttaccataccctcttgtgcgcgccaggtttttgaagccattgccagtcgagctccgccttgacattgatacctttacctttttttgtcatatattgattttcgcttccctctttcaccttttctggataacttttatttcatcccatttgatatttggatcattttgtttaatgtctgttagaatcgttctgatgttatgcgtctatgccatatccccgcctgttacgttgatattctagtctttccagtttcgagtttctcctctcagcaatttgttgttgttgtctcagtctgcactgcattgctctacatgtcattgttcctttcgtttccttttgtttaaagatcttgatctcatttggactatattgtgacctttgatttgagtggcacatgccatgctcgcgtggtagtgccctgtactataagtaagttgaacacaaaatacaagttggtttggtggaagtattggttcaatttgtacttagtggttctatagctcgaggtcgtagctgtatttataagccattggcgtaagaagtacatatcgaaggcagcttcagctgtacacgccaagacaatagagacatactcacaataaactatcctctgtacagagtagggtcaatattggattcaacctgccataaaaagtagatgcaaaagctagctagctgtatatactacgggcatggttatccgcagacaggctcaataaagccaacagtccatttcagagaccccgtgatgatagcgaaaaatcccagcgccacacctacactcgctactccgtaaatatacgcatctatccgcttcttcagcaaaaaagctcgcacccatgaccgctgttgtgcgcacccaaaagccatcatacacagcacccgg

SEQ ID NO: 3313 - DNA, 1319 bp, Emericella nidulans
ctctattgccgacgaactgctcctggtcgatactcgcgccgcatggcgagacggacaggtgcgcgatctgtccgacgcggcgtacgcaagccgcagcaagacccgcgtctacagcgcgacataccgcgaggccagccagtgcgacattgtggtcatcacggccgggtccaagtacttatacggtaggtgtctggcatttcccagcatcctggctagtggtgacggtgactggacttgcatgggaacaggtcaaaccagcatggactatttgtaccgcaacaccagcattgtgcgctcaatcatcaacgagatgaaaccgttccggtccgataccgttctccttatcgtcgcgaaccccgtcgatctcatgacctcgctggcgaaggagctctcgaacctgccgtccgcgcaggtcctgggttccggcacgttcctcgattcgatccgccttcgcgggcttctggcagacgaaaccggcgtaagtacaaccttaatcccgctggccgtgcctgttggtgaacacctttttcacttctcattttttttttcatttttttgtcccacttgcacaactgccatcttgaccgctagataagaactggttgcttcttccgttgtaaaaatgtcaacaccttgaacatgccactgatcgtctagcttgcgcccaactccctggacctgtatgtcctaggcacccacggcgactcggcagtggctgcttggtcgtgcgccgcagtaggcggagtgcccctgaaggatgcactggggctggagaagcgggtcgaggagagcctcgtcgaggagtgcaagcaccgctcgcagagcattgtccgtgccaaaggagcgacgacgtttggaatcgggtcgatcgtgtgtagtataagaaaagtcggtgctgctgggcaggcacaacgtgcggccggtcagccactaccagccgcagcacgggtgctgtttcagcttgcctgctgtgctggtgaggaagggcattgtgcagacatttcccgtcccactgtcagcggcggacgaggaagggattgcgcagtcggtgggagcattgaagagtacgcttaaccgtgtgctggacgaggagaaaggaatacaggtctacagtgtagtgtacttgtaatggcgccgtgtcagtaatggagaagcattctcattcgaagatactacaataagccgtagacaaacaatattagtacagtgagtgaagagtacatagaagtaaacagtagagtatgatctgtagacactggcggcatatcgcatctagctagggctaggctggagattcacctgaagaaagcgccgcctgt

SEQ ID NO: 3314 - DNA, 1693 bp, Emericella nidulans
ataatcaaattgtcggcggtggatcttatggccccttgcttgaccggaaagcgagcagggcgggagggtgataaagacgggggtatgctccaaggcgaagttgacttccttccccgtcccgggctgtctgaaagccagagaagcgctccagagccaggtacccccacgctcgaactggtgggagcgataggcgcggcggagatccagcgaacgtatttcccacgcggcggtgtcccgttgcggagggggcaggttgagaatctccggctggtttgtgacgcgccagagtggccgaaggtccgggtttcccgcaatgacgatgtcccgagttgactctgcagaaggcggggggagcattgcggaggccgggttgaacgccaccgtcgtgatgaggcagtgtgccgcgggggcctcctcgtccacctgtgtgtgcaacgttgctgttgggcatgggccgacccagccgttgagcgaggtgacgccaggtaggcagccgagaacgcggccgaggactgagcggctgcgccagtagctgcactcgggcagcgcgaggccgcattcgctatccggcgccattcccacgctttggaatgccggcgtgctgaggatcagcatcgccatgaggacgtgtgcgaagtgcttgcccgggagcatcacggcaaagagccagtccatctggacagggtaaacgggttcgtgcaacgcaagccagtcttcgcaggccttcttagcgcaacgccggacggcttcaaggtacggccactgcatccgctctgcgaagaggaacaggccctcgagctgctgctcgtgcttagccggtcgcggcgcgatcgttcggcccatggggtccaagtctgcgattctccgagcgcgcatgagcgcgctttttctttctcgctcgcggcttgctcgattgccttcagctccgcgctgagcgcgtcttgtgctttgtccaggtcctggaggatcggtagcttctcgtcgaatgtgtgtgcaagggccacggcttcgcggaaggcctcgcgcgcccggagatagttcttgtagccaggcatgccctgcccaggaggacatacccggtcggacgattcgggtccagcatctgcagtaccacagaataccttgctgaatacctgtagaagctggaatctgagcagtcactcgaccctggcctggacggaatcgacaacgccggattaacacgcagcgctctgtagaagaggaccgcagcacgctgaaactgcttcgcctcggtagcctcctccgcgagacgaaccagctcccatgcctcctgccgatcctgttcggatacgccagctgatttggcatcctgcacttcccgcgcgagcgaacatgcccgccaacgtggatccttgtgtttgcaaaccaccgctcgctgataatcaacgacgcaaggatcgcacgcgtaaaacgaacatatatccccttcgtacccccggcccattgcattcccatccccgcccccgaggcaagccgcagcgcaagtccctcgccataaccatgcgcatccagtcggcccacgccccctcatacgagccgtcctggaaacgcgtcatagtatcagcaataactgagcggcccgaaagatcctcctgctcgtggtgaaacgcaaagaggaattcgagcacgcgctcgctgtgccccatcccctgcatttccacgaccccgttat

SEQ ID NO: 3315 - DNA, 649 bp, Emericella nidulans
gctctcccatcgttctagacaactcgtaatccgaggtatgatcttcattgccccatgagccccctgctttttaccagttataaagcttctcatctaggcgttgctcatcagacggactccagtcacccgcgttcagccgctccctctttctcatctctttttcgacgtcgaattcgtggttttcgggcagctctagctctccctcatccgtaagtatccaaaagtccaaagactcaggttcagtcttgcccgagttatcctgcgcagctttgctccgtagaatagctttaacccactgaggccgggcagtaatcccaacacgggataaagctttatcggacgcgactgtcacccacctgaacatcaaatagaagattgcgcggaagaaggaaatcccttggtaacatcgaacgagaccgcggaaggcaccaacaccgccagggttagtttggtatcttgacgttcgtggcttgttcttaggcctctgaaatttcttctccttgccataaccactctcccattcagaggcggcctcttgaacttcaaaggcaacaagctctcgattctcgaaaggaaaatccgccggtaaagtaccagaggcctgctgcactgagcgcacccggcgagattgttcaatttctgcgagcct

SEQ ID NO: 3316 - DNA, 2029 bp, Emericella nidulans
aagctctttgaggctggtatcgagaagaggtttaaggatgggggtgttacaattgcgagtatcgtcaatgtcatgaatacgccttcccccgaggacgaggcggccggtatcgatgaagatgggctcttcaaccaggccagccagttcgtcgggtctgtcttcagccgtaagttgcggcatgccgtgaactcctggctccctgcgcgtgaaaccgtgcaagccgcctacaccgaccggaagaacgtgcacgccagcgggaagatcatggttctgcctcaaggcggcgtgccctggaaggagcacctgtacaactttgagaaggaggcaaaggcggctaatattaacggcaatgcggaggacgccgaggttgtgtatgtgctgtacccagagagcgcggccgaagggtccaagtggcgtgtgcaggctgtttccgtgaatgaggggagcttcgtctcgcgcaagcctttgcccgagaagtggcggggtgtcagggatgcagatctcgatggagttcttgctggtgaaggggcgggtatccagagggggcggtgtttgtgcatgcgagtggattcatcggcggccataagaccagggagggggcatttgctatggctgctaagggctctggaataggcgttcataaaaggtctagtggagtgttacgggtttatttagatagattttcatgaatcatacccatgctatgtcttctatatacatttctaattgagtgccctacgcatgtaggaaatcgttgacgaccgccttgaacgcctccggctgctcaaccatgggcaggtgcccagctccagggacaatcttcagctccgcacccccctcaaccttcaaatcctccgccatctgcttcatcgtcttcggcaggacaccatcactatcacccgccacaaacaaccccttgacggacgccttctgcattctctcgcgcacatcatatgcacagagcgcctgcatcgccttcttaaacccgacaaggctgttcgcacgaacaacatctttcaccttcgctggaacttcaggctgtgtctcgtaagatttctcggtgaaccatcggcgcaccgtaacctcggacaactcctcaccgataatgggctccttcgtctctgggtgagtggcgccctcagactcggcgattgcggcacggtcgttccacgctttccggtttgtttcaggagcagagctgtttgtatcgcaggagataaacgtctttacgcgcgatggatagagcagggatgtattgagaaccgtcacgccgccgagactcacgccgatcaggatagcctgagggatgcgcagggcatcaaggagagcgatgatatcgcctgccaagacgtcgacattaatgggtgtttcgccggcagcagcggaccggccgcgcgtgttgtagcggaggatgcggaatttgcggttgcgctcctcggcgaggaagctcttcacgaacgagtcccaaatggtgtaatcaactaggatagagttactgagaacgatgacagatgagtgaggatctgtagagccttcgaggcgataggggatctcaacgccgtcgggggtggtgatgtaagactccacggcggggttggtttgatcggggagagtccgggtgcggccgtcgttcgacgaccaggggccgattgtatctggcgacgcaagagagccgagctcgcggggcgcaggcccaaatgtataggcccagttgtagacacggcgggtcttggaggtcaaggcatcggcgatgcgggcgcgccagggggtctccatggacgccttgtgctcaggtccgccgaggccgttctgcggtgtgaactcgtgcagggcaacgaactcgcgctgagctttggggtcgatggacgccgtgacgaagagccgactgcggcgccagcccggcacgcgcgcaagcatggggatgtgttcttccttgtaccaggccttcagatcgtcttccttgtcggcggggagagtcgagtgttcgagataggacgggccggaagcagcggtatccggctgatcctgt

SEQ ID NO: 3317 - DNA, 890 bp, Emericella nidulans
atccataagccgctcggcagacatgaggcatagaaccgggcctccatgtgacctgcaaaggatttttttggcgccagaggccagattccagaggccaggctggccagcatccaggaacagccagacgatcgggattaaaagaacccgtcagaatcgggagacagtccatcccgtgaccaacctgagcttttgaaataggcaggtgtgtcgaggtatcttccttcgtcagggtcttcacctaggctcaccggcgattctggactgagcgactgcatagatctgccatgcgtgcatttggacctgatttattggggctcgacccactgactataatcttggaagctatgatgttatcagccgcggagtaattattcatgccttacagtgtttgacttctattgatcctttgtgtttactcaagagtacaacttttcataaacgggcacggagcatctcccgaagccagggtcatgcactcggcaagatgccgataatcaactggctgagtatcaatattcctattcttcaatgggagactccaacgtgggaccttctgtgacgcatttattctaaccatcggctgccatcccgagttcctacggtgatctcaggacaagcgcgcatgtgttgtcttgcttccagtgaaacagaaacacacatacccattcttcctaatgactggttcgggatcgggagttgtcatgtctatccgattcggacgtgagcattgttcttcggctgggtacataggtaatgatatgtccatcccgtatccgtgccaatctaacttcatgattgatgctataaatctgcccgcgctctcactaacttgggctacagagtcgacgaagtggtttttctcgtcaatgcaagtctggggaattgtttgc

SEQ ID NO: 3318 - DNA, 1180 bp, Emericella nidulans
tctctgcatatgcccgacaacgccctcgaaagaggatctgtcacgatttccagcattccgtgtttggtttgttacattacaacgctctttgagtcgtcaaaaagacccatcgcacgagttccataaagacccttatttattgcgcaaaatcgaagtccaggcggtggatttcttccaaggagggagactgggctttgtgaaactgagagcagaaatatcgaatgctggcggcgagagtcttcctgggagcgtttttctgcgcggcggaagcgttggcatgctagtaagatcgcgcacacctacaacacctcttgagtccgtagcatttccatctgactgcgccactaatagcttctccttcaaccgcacgatgttccttccactgaagaggacgataaatgggcagtccttacggtacaaccacgcatacccgctggctcacttgcgttctcggagatcccagcaggaatgctagatgatagcggtacgtttgcgggcttatcgtcggagggaatactggaaccaacaggctatgtcagttcctctataacgaggtggtgcatgtgtcttctctcgcattacagtcactgtacgagccggaagacggcgagacccttcaaaaagcagtatatccatcccccggtggcagcgacgagttcatacccttgttcttatgcgagaaacgaatagcacgcaaagatattgaagccctacaaggaagattgactggcttacggcagcacggagagaaaataacgctaaaaattgtgccactgaaggacttgtggaaagagggtatacgagacggaaagactcttgctgcttgggcattgtacacgggtctaaagagagacaacaaactctaactgaaagcgatgcattcgatctatcacgaatgtccaattttagcatcattaagtagtggcgaaatggacaatctatcggtctatggtagtcgcatcagagcttcagtttcttcgccagttcgatgccttccgctattgtcccaattcgggcatcaatagcatatccctcggcttccagtcttttcagttcatcaaataaggaagccagcggcagagtgaagcactctatgaattcgttgtcctcaagttgtggcttgggattttggttttcagggagagacatgtccacgcggacatggaccatgttcaagttt

SEQ ID NO: 3319 - DNA, 637 bp, Emericella nidulans
caccatcgggggttttgtgttgttggtctttagtctttttggtttataagccttaacaaaattccagtaatttctttcatctttggttcttccacagttaaacacgaatagtccaactacactcttgaagatcatatgagatatattcgcgtgtaatcgccaaaatatcgccgaaaactgttcgtacagaagtgaagttaagcaagtgaggcatggcccaatgcattgttcttattaaccgaagggcgtcgacaccagaattatatatttttgtaaacgccccattacctggatgaagcttccagatgacagcgaatagtaggcctatcccagggtaaattcccactgcgcatactttatctcaacttcctcgacatagtctctgatacggccaaactctttgaacccctcactctgagcaaaagaattatgcttttccacagcctcccgtcctgagaagagaatgaactgaccatctccatcaacgcaccatccacccgatatatctctcccccgctcaaagccctttaaatggtgtttggtctcggcgaaggccgaaccagtaccatcgatgttttccgctgcgacagtataacgttcgatcgcaacgacgtgcgccgattaggggtcccagata

SEQ ID NO: 3320 - DNA, 624 bp, Emericella nidulans
caaagaggcaaggcaagggaacaactgcccacattgctgcatcatactgaaaaatactagagtgtggagtgcgtcggctctggagtaggcaaggctcgttctggagatgaccttcgcatcttattataaataggtagaccctgctgcagggcccagacatcatttgccgaatcctaaaagccaacatgaccgtccacattgggttcatgcgatgggtctaggtgtaaaaataaagcatccgggcttggaccgcacggacagggctaacctatcacggatgccaaatttctgcccctgtcttgttcattgtggcgcaggcacttggcctccatacggagcaaagtcgaaacagtctgtcggcctctctcctgcgtcatcataagcctcgcgccattcgcagttttctgcgacaaaagcgcacaacgtccagcttgcatcaccaggaggccctgtatagcagatgtattcgcaagttttgcaactgagaaagggcccgggaatgaataactccttggaagctcacatggtcgtgttttaaggcaccacgatacaaattactctaatggataggaaccggcaccacattccgaccagggcaggaccggttacagcacgttgcaggtg

SEQ ID NO: 3321 - DNA, 1604 bp, Emericella nidulans
agatgggggaagatggggagggtgggtgcgaaggtgactcgtgcggccagtcaggaagccgggctggagccgatcggaatctggaggttgcatgtgctgcagtggactgcgatggcttcattgtgccgttcgcctcaagaggtcatggccagagtcgttttttgcataaaaaaaattcaaactccatctttaccacggaatcctgggcatctggcgcaaacaggatcattaggatcccttggcttctgctaatgccttggctcctgctaaggatttggtgaagagtgcttggacaatgcttgggagtcttgtctcgcagttgacccctgctagtccacccggaaaagcccgccaagcctcggcaggaacacaacctcgtgaatagcagaatgaccaaccaatactaccacgcaaagttaaatcatgtaaaataaataatagaaaagcaccatgaaatcatctgtgtaacaacactcaaattgagttcttcgagaatctactttgcatgaccgatagttgaagacaaacatatgatgcaaacaagggaaatatattcaaaagacttggtgtggctgtcttggggatggagggatgggggtcggtcgcagatgttacgataatcttacgggataaaatcgggaaatatccggccgagacgttttcagttatcctcaaacctacctcaacatcagttgacgttcattttttcagtctctggcgcagatttcaatgcaatgacgaaggaagaggtagtagtaacaataaaagtggatgctacagtggaatctgggttctccagaccccagattttgccaatgggtctcggtcttggtactaggtctggtactaggtctggtactaggtcttgatactacggagctaatatccgcagatgacagcaatgctcaacaagcaaggcgaaagaggggtcttttacaatggctcaatacggtagaatcggcgtttgaggacggcatcgattcaagtcgatcttctttcctcttgcattctttgtccacgcgagagccacgcgaatagcgatgcccgccgcacgaactgttgccatcccttgcgcaaagactcatgggctgggaggctgcggttgacatgagatgacaggtctctagtgtcgggataaaaagaaaacgctccgctagagttcaaacctccagctctcaggccccaccgacactcataataatgaaagtcacgcaggactgcctttgggtgcccggtcccggcttctccagaaccggttagcgtataacgacatatgtttgtgactaagctacttccccgccgatccgcgtccttggccagtttcgccctatcatcgtcgcttggggaatgccagcaattagccaatgacggtccgggcggacagaaaacctggagtagacttgaaatggagagactcaggatccggagatggaaccaggagaagggtggatcggtatcagcttcgagccaatcaagccagtgggccaccggcgctcgatgttacgctctctgcccggttcaatcgacagagaggagtcaatgggtgccctcttactataggcagcgaggtcaatggcccggctgtcatgtccaaagacctccgg

SEQ ID NO: 3322 - DNA, 722 bp, Emericella nidulans
tcggtaaaatgcaatagagccaatggcgcgcctacatcacgaaattcacaagagtcgcagctgtatttgaggagacagtttacggagcgtcaaatatctatattatcggacccaatgaagaactctctcccgacagccctagcggcctccaatctgatcctggcgacccaacaacaatccgcggccatggttacgtctggcccgacgaagcctccaagcagcgcgaactaatggcgtcggtctcccgtatagaaggctggcgcaccacccgatcatactactctttcatccaagacatcgcagctatgtactggccctcccgaccaatccagaaacccgaccttcaccaccaccacgaccgcctccggaccctgaaactgtctgcctacgaggctggcgctatatacctcgcttttgcgcatgcaattaaagattacgccggaatctgccaactcttaactgttacaccggagagccaagcaggcctgttctatctctccatgggcctccttcacccggaccggaacgtccgcgaggcaacggcggatcttctcgagcgcatcgcctccaccccgcaggccgccacttctgggcgcacgtcaatcgcttcgcgaaaacggcgtacttccgtatcaagcgtgaaaaagaagcggccgggaactcgtcccctattgtcaagtctccaagcgacagtttcggtccgcagcagagtttggttgggg

SEQ ID NO: 3323 - DNA, 1115 bp, Emericella nidulans
agatattgctttgacggggacttgctgtggaaccctgcgacccaaagtatagagatatattctgtgatactttttttgtatgtgaggaaacctcagtggcgtgctggggttgttggtcagcttccaacggaagaaacagttcttcaggatcttgtggaaagaactgaaaaaaagtgggatttaaactattccggctttcgcgttgaaactcttcctgaccccaatggcaccgacaaaagttactcattacattatagctatgtcgctctcaaatgcattaagccttacaacgcttttgaagtctttctgtagggtactccgcgcgagaagctgcacccctcaatcgagcacgctatgactatcatgtcatcattcagtttgcttgataagtaccgcttcaaaggctcatggcctaatgcgtcgatttattgtcggggcatctttataggcgcggaactccttggtgttggggatgcgggtcgtctgaaaccaataggctacaaagaaaaaggcagtcttcaaaaaccaccaattgtgggacgtatggtgatcgatgagaatagactggaactgattgagtgcgacgaaaatcctcaagtttaagcagcttgccgaaaaataccaggtccgcatttcagggaggctctatacaactaacagggaacgagcccaaatgttgaacaacggaccaccggctcggcctctcttgcctctcacactacaggaggtaatggacgtgtttaacaccgtcggaatgggcgggtatggagattggtataagttgcactctggggcaactgttgacatatctcaggatatgatactcggccgctgttacgagccagatgccatgaagctgctattcaactctctctcgctggggtatgacttgccaggcgtcctacgcgcgagagaatactccagaaatgtcgatgagcgtatccctgagggcaaaacctggttctggagcgacttccgcactcaaacacttggtattgagtcactaaatggtgaagatgtcggccactatagcgaaacacgggacgtgaagatgtggagggccaactcaggatcatcgatggcaccgcagccaggctgatttccgtgatgcgaaa

SEQ ID NO: 3324 - DNA, 3457 bp, Emericella nidulans
atagagactagtcttcggaatttgtaactcatccgacagctgatccccattcagcaatcttgtcaatgcatccatgtactccagagacgcgtatatcggggccgtgttctccagtccaatcgcaatattcctcgccaggattctgcccgtgtccgtcggatcaaactcgttaaccagcagcgactccgatacaaccttcgcttttgccgcactctcgaacggctccgtcggcgcccccatataccacgccaccagccgccaaactgcaatgtaatcctcctcttcttgtggagtcaaatgaatcccctgccgcggaagacccagccaaatcaccgtgctactgaatgtgtttatcgtcgcgaatgaatccaggtcattgatgggaaggccgtagcgcccggcgtcataatatgtgggatcctgttccacgagactcatgattttccgacgcacagcggagtgtaagagtctgacgcgcacggaggcgaggtggccctctccgcctggctttaaggccttggcgcttttgttcacttggattgtgtgctggactgtttcgaggaggcgccagcggacgacttttgcgcttgagccgcctgttcgggtcaaaacttcaccaacgcggatagcacccctgtacagttcatggtttattagggctgggttcagttttaggatgagatgggatagtcaaaattggcgatgcgtacattccgcctaaaaggctaacgaatgtcaactgagtcgatcaacatatgttagctgtcgtcctgcatgacacggcacagatagaaatgaagatatcatacagcatttgtgacaggcaccaagtgccgccagaagatatcctggccacgctggatctgctcccaatccacccattccggcacggtattgatttgattccagagttcttccagcttagggttttgagcatggttatccctcagcagtgcgtatctatcccgttttgtgggatcttctgaagaagccggtaaactgtcaagtacctcgttggcttcatcggctagggtgtcgcaggttcggatccagggttctagttcgctgccaggacgatgctgcggggtccattcgaaggagtagtcccagtaatggtagacgactcgattgcccttcttattggtggttacggacatcttgttatttaggtgaagtgtagtgaagggtagatagagatagggttgagcggttgcggtgtggtagtatatagctaaatgctttctatatgaggttcgcgatcccgaagcagatagcaacgacccgcggtccggggtccgggccccgggcatagagatcatcaggccattagatagtttttggggttcgtgacttgcaggagagtcacacagtatgctgccgatcaatggtgggtatcgcatgtgaagcagggtcatgcctactgagtcagttggagctcttggcccaactacggatgactttgacgagcaaatgccgaccacctatcaaacttacaggcaccaatgcattaactttcattctttctcctactcatgaggccgcgggtcgaggatgtcacatggagaatagtgcgcgacgcgcgacctatccttgacggcgccgccatccgccatatgacatcttgtgtacccaaacttaagcataggagtcgcttctcaatccatccagggcgccggtacattccctcaaacttgacgtctaaagatgatgcgagcacgtatcaaccttgacttgcaggtcacacttgacctttttctcttcctggttccagatcgcaaagccaaaagtgttgtcgccgtcatagttccagacaccgggaggtacagggaaggtatgcatcgcttcattcacgtaagggtagtatctgccatattggtacccgttgatatagaggtaagctcaaaagctgtttgaggtttcgtcgctgtcaaagttgagcttcacactcaacgccacatcatggccagcggaccacatcatggccagctggtgtgttgaaagcaagattagtgcggtagaaccggactcctgctcctgtaaacccgtcactaggtgatgctcggggccatttcgaatcgtcgaagcctgggaggtgccatccaagaagttcggctgtcaatccaccctcgttgtagcgagttcgttctggatcgagcgtagcaccggttgcacctcccgctgtcctggcgaccttccaagaggagaatccggactggctgttcagcaaggtggaattgacgatgccacgatattcagggatccggaactttgatcgtggcctgtaataccttgcatgacgagaaggacattctctctgttactgaccgtaccattgggaaatgtgatctccttaatgccaactgatgagccgatgtttcccaaaaccgagccgatgaagcttccattcaaccagactgtccaaccatgagcggtgccgccctagacttcaaggtaaatttcatcggcagtgccattaaagtgagcacgccacaggtgcaccccgttgtggaagccgtactggttgctgtagagatacggttttgtggctcgtcgtgcttggagtttccatatgtctgcattcacccatgcaggcccggaatcagaatagttagtaagttgctcgggcaggctgtcctgtactcgccaggctccgagctcgggggttttgaatttcccaggcccatcaatttgtgccgtaagactaccccagcgggtcgtcttagtccttaagcgctttccattccattctatggcctgcacttttttagctgtgaagacctcaatttctgcagtctcgttggtgtcgccccgctgagatgactctgccttcgagctgcgctgccctcaccaggtgaggccctggaccgaaagctgatccagcggtcagaaaatgagttataagcgagattgatggagagcttgccaacttgatcaacaggcgcaagagggtccgccgtcagcgccggcacccaaaaaagatgtgctttatcgcggtccatcaggagcatacgcacatcgttgtcagtagtgacaactgtcgtacctccttgctccttgaaattgacaaccaggccctttcttgacttgacgaatcgaacttttgacgcatcactccgaactgcactaccagatttcgcaccttcaataaagaattcgctgccttcaccattgaacacccaaagcgccagcattggtcaggagtcaataacgccgtaagtcagcacacttcggcggtggagtataccaaatttcttccgccaaaactaagatcggtcacccgaccttttgctacatgaccatttagcgtcatcttgttattttcagaaactgttggcactgtaaagcttcccgctgaggtctaagccgatagccgcaaagactgcccataattgctggtgggatctgtatgtctgatggcatagaaacagcgtccgtatcaggattgctgagttcgata

SEQ ID NO: 3325 - DNA, 1223 bp, Emericella nidulans
acgctttgccataaggctcgttcagcctccgcaatgtttccgggtttgtaaggcaggcttacattgcggcagacatgcatgtgccgagcgttgctgtcctggcgaacaaaaggccgtcgaacgccaggctatgcgaaggaagctgaagcctcacctccgccctatcgacgaggatgtcgaggccgaacatatttgtacccgtgtttgtggccgcatgttgaaatgcggccggcatacatgtccggaaatctgccacaagggtccctgcaatacttgcagagaggctatattcgaggaggtaccctgcagttgcggtaggacagtcttgtacccgccgttgccctgtgggacgcagcccccggcatgctcattcccttgtgagcgtccgaaaccgtgtggccatcctcagacgacgcacaattgtcacacagaggacgaatcttgccccaagtgccctttcctaacagagaaaacatgcctttgcgggaagcggaccctaaagaatcaaccctgttggttggcagatgtacgctgtgggcaaatttgcggcgaaccactcaaatgcggctctcattactgtcaaaagaattgtcaccgaccaggcgaatgcgaagatgcctcacagccctgtcagcaggcatgtggaaagacaaagaccgtttgcggccatccatgcacggagccctgccatgctccgtacccctgtgccgagaagacgccatgtgcgtccacatcacggtaacatgtggctgtggacgacttcgtcaggaccgtcgatgcaacgctatgaaagccgtgacatcgaagggacagctgcagcagccgcagaggctccccgcaaccagccccttatcatgcgacgacgagtgtgcccggttagagcgcaaccgcgcgcttgcggcagctctaggggtcaatatcaacccgtcgaccaccatggcgcaaaatactatctcctccacgaacctaccatactcttctgaaacactggacatgtacatccagctctcatctacatcccccctctcgacgcttcaatcccacgaagcaaccctacactcccttgctacaagcactacccaacgctccgtgcgaacccagcccgcaaaatcgtctatccgagctttcatccactctcttgcatcggactacggcttcgcgagcgagagttttgacccagagccccaccgacacgtattcgtcctcaagcctacaacttggac

SEQ ID NO: 3326 - DNA, 6365 bp, Emericella nidulans
gaatattcgttgccacatacggactttgcaggtcaagaagtagctcaacgttgtccgcccattggtttctgttattttccgggaagttcagttccttggacggccaattcatctgctccaaagtagaccggagccgatttgtgaattccattttcatctgttctcttagcctggacgccatttgccctacgtagtcaaccagatgtggacttgcgccctctgcagctggctgggccttatccaatgattccacgatgttccgcagctgagtatacgatgcgattgctaatcgagcctcagacttgatattccgcagcgcttccttactacggttattctcagcgatcaggccaacttaagagccttcgtagcaccatacctcaattcctcagcatctttcagcaacgcgacataactctgtgataactcgagccttcgaagtttcttgatactggcctcaaagcgcttcgccgcctcgtcgctagcgttggatcctgtcaaggtcttgagtcgtcggtcaatatcggcttgttggtcattgaaagcttcggcttgtttacgggtggtctcgacatgatcgtgggcgtttcgggtggcaaccgagagtgctgcctgtgcttcagctagctatatgatcttgttagcagaacgaatgaaagttaactcggtcagtgttggttcatgcctgtttccgctggagctcatgctgggcccgcaatgttgagaggagcgagtcaaggcttgcgaagtcggcagatgtttgtatcttatcattgaggtagtcttcaaccctcgtccgctcgtgtgctgacagagccgacaccctgtttgccattttgcggctttggtgggaaggggagaagaacagcgaacgatggtgtcgtcgcgaatgatcatcgccgcagcagctcccctccgctcggggtcggagctcttggaacttccccaaaccaatcaaccataattcagcaactcgctcgacgtcatgaaactcataataggcaccaacccagctaattttatattatcgctacctacgtgacggttcaatatgtcgagccctgccaaaaagcgcaagagagacacccagcccacacgcagcatcgcgtcattcttccagggccaaacggccaagcagactgagaaatcggagcagttagcttcgctggcagacacagaacagcatctatctgacgaagctcttgctcggaagcttcaggctgaatggaataacgagcaagatttcgcgtctcccgcgactgtacctcattccgaacctaccgccgcatccccctcaccagagaaggatcgagaacagaagaaggccaaggttggagtgctctcattgcagtcatcaacaggaaccgaggacacgatatctttatctgtccctttcgatcagagccctttggtattcgattcctctaggtacgctggagagttgaaagcgcactggtcggcggagggtgggaatgcttcgtatgctcttcttactagagcattcgttcttgcaaattcaactaccagtcgtatcaagattgtcgatacattggtcaactttctccgggttctcattgaaggggatccttcgagcgtactccccgcagtatggctggcaacaaactccatttccccgccatatcacgaactcgagctcgggctcggcgggtcttcgatatctaaagccttcaagaagatctacggcctgaatagccaagggcttaaatcgttatatgataggcttggtgatgccggcgatgtggcgtttgaggcaaaaaaaaggcagagcttcaccttgatcaagcctaaaccattgagtataaaaggcgtctatcaatctctgataaagatcgctatgagcaagggcagcggaagtcaagaattgaaacaacgtatcgtggagaagcttttacaggacactcgaggtgcagaagaaagtcggtacatcgtgaggaccctcgtccagaacttgcgtatcggtgctgtaaagacgactatgcttattgcgcttgccagagccttcctagtctccaaaccagataatgcaacttttactgtgcatagtcaacacgaactagctcgcctcaagaaggaagaactcgcagaaatctatagcagcgcagaggagctggtcaaagcgtcttatgccagacatccgaattacaacgaccttgtgccctgccttctcgagatcggagtcaccgaggaacttctgctacggtgcgggttgcagcttcatatcccactgatgccaatgttgggtagcattactcgcgatctctcggaaatgttgacaaaacttcaggggcgagatttcacctgtgagtttaagtacgatggacaacgtgcccaggtacactgcgacgaggcaggcaaagtctcgatattctcccgacatctagaagaaatgacagaaaagtaccccgatcttgtgtctcttgttcctcaaatacgaggagaaggtgtttctagcttcatcctagaaggtgaagtggttgccgtcgatcaaaacggagagctccaaccttttcagattttgaccaaccgagcgaagaagaatgttgacattggggaaatcaagatcaatgtttgtctttttgcctttgatttgatgtacttgaacggcgcacccctgctggaacggtctctgcgcgagcgaagagaattgctgcgaagtctctttatggagataccgaaccgctttacatgggtcaaaagcctcgatgctacgtcagccgattccgaagccgttctggactttttcaagagtgccacagagaacaagtgcgagggtataatggtcaaggtgctcgacaatacgcttgccactaatgggtccgacagcaccaactctagcatcactgcaacgccgaaagcagaagcaaaggaaacgaagaaaggtggccgtcgaaaagctttattgtcctcgtacgagcccgacaaacgactcgaatcctggctgaaggtgaagaaagattacagcgcctcatcagaaacattggaccttatcccagtggccgggtggcatggcaacgggcgaaaggcaaaatggtggtcgccgatcctccttgctgtgcgcaaccccgaaactggaggcctccaagctgtgacaaagtgcatgtccggcttcagcgataagttttaccaagcgaataaggaaaaatacgaggaggggagtcctaatgtgatatcgcggccgagctacgtcgagtataatggtgagccggacgtgtggttcgaaccacaagaagtctgggaaatggcatttgcagatatcacgctcagcccgacttatccagctgctattggcttggtaagcgacgaacgaggtctcagccttcgctttcctcggtttctcaaagtccgagaggacaaatctatcgatgaggcctccacgtcggactaccttgcgctattgtacagaaaacagtcggatcgagcgcgggctgaggaaactgtgaatgcagatcagatggcagacttgaaagagtagtataattaacgactacgccatttctgctcagaggttttcggaccgctccctacagggaatttccccgatgcctgtcgacgatctgcagctttgttaccgttggcaagagaacgtcaagggccgaatattagccgagcgtgcgtctgcagaatcaattgtagcgacgcaattgaagcggccatatgtggccctaatgaatatcatcgactatcaaacgtgatttgcctcaaagtgaaaggagattccagtcgcaacgggatcgatgcagatcatatacggagcgcggagtgtagacgtgagaccaacaataagaacttaccttcaggctcatgacgtctgaatctcgaaatcctgtcgttgaagaacctcgcatggaaaattgcgttgagatccatggtgtgtcttgtatagaaagcaggtccgtacagacgctgagggtctacagtacgattcactgttgccaagaagatctgaaacttatcagtattctctgtgcagatatcccacgtgctttccaagacagaagcttgtacacttaagcgaaagaacagaagattttcgatgggttgcgtctcgtcgaactgcagggtcaaccagattcgaacatcacgcaagtactgagttgttgcgactgcaatgcccactgcgcacagtgcagtagtgggcccaggacccctgaggcccagtcagacgaactgacagtgacagccggtggacttttcctgtaactagccttagagaaagaagtctactctgaatccttgccaaagtgcttcaaatagaggcgtcagtggggacgtcgccaggcgtggaggacttgaagtcggaaaagccagcgccatcttgggtgactctaggcaggggaattggctcgagttaagccacgaaccatgagccttgtgctgagccaattgtgcctgactcagaatttcgttgagacgtcggggacattgcaggatatagcatggtacgggtcttggaaatccgccaagaacaccaagagtttcggattgactgccgcaatatctaaagccaagacgaacttcaatctacgcaatgtactctgagtacatattctatatatgtagccgccctctccatggaccctgattcagcttcaacatcatctttctttcgttgcccaggtactgctggctcggtgctttagtctttcgttcccttccttaatattgacggtctcttattgtcactcattaccgaccaagatggccatcattcgttcagtcatcgctgccacagctcttctaggagctgcagtcaacgcccaggttgtgggcactcccttcggtttcggtgctggcaccactggtggtggtgatgcgacccccgctgcacccgccgacacggccgaactcaccgagtggctggcagacgacgaacctcgagttattctcatcgacaaggagttcaacttcctcggcgacgaatgcaccgactgcgagtgctgcattcccgactccaacacctgcggcgatgccggccagaacgctattgaggttggcatcggctggtgtggtgattacccgaccacgacctgtacctatgacaacgccggtttggacgggttggacgtaggcccgaacaagtctattgtcggtgttggtgatgctggtgtcattcgtggtaagggtttgcgtatccacggcacggagaacgttatcgtccagaacatccacatcaccgagctcaacccacagtacatctggggtggtgatgcgatctcccttgacggcgccgataaggtgtggatcgaccatgtcaagatctctctcgtcggtcgtcaaatgttcgttactggatacgagtcaagtacgttgatcccattctcccgttcagagccacctcttaacgactacaggcggaagcgtcaccttctccaacaacgagctcgacggaaccaccgactggtctgcctcctgcgatggccaccactactggactatgtaagttcgcctccagtacctgtacctaagcaatcctaataccagtcagcctcgccctcggcgaaaacgacaaggtcactttcgcgaacaactacattcacaccacctctggccgcgccccaaggtcggtgctcccagcttctggcacgtctacaacaactactggtccgacaacaccggccacgccttcgacgttgaggagtccggtacaaacgtcttcatcgagggcaacgtcttcgaggacatcaactccgcctacaacgatgacggtaccggtgctatcttcgccgttgactccggctctgaggcgacttgctcttccgtcctcggccgcacttgtgtcgccaacagccttaccaactctgaatacactgctgtcgcggatgagagcgtactgtccgccttcccggctgatgaggagggtgacattaccatcttgcccgtcgaccaggtcgccgcttacgtcctggctaatgctggtgttggaaagctctctgctagtggaagcaccagcggcagcagcagcagcattgctcctttcatcaagtgtccctgtgattcccactagcacgcccctggtgtacccgacttttacccctcctgccgttgagaccaatgccattcagaaagagcatgaggtctcgaccccggccgttcctacccccactcctgttccctctagtgttggaagccacgggtctactgccggttcttctcacccgccgggtacgtgcaaggctcgtcgcaaccacaagaagcgggctcgccgttctcactaaaggagtagcaagctggatccgaccttggtctgtaagatcaacggatgggacttgtagtgtggactttgatcgacaaacagattaggtgggcatctagtcatgccaatattgtctacgtggtatttcctt

SEQ ID NO: 3327 - DNA, 1099 bp, Emericella nidulans
  unsure (1)..(1099): unsure at all n locations
cgaaggaagacggcaagaaaattgggaacggtggcattgggcaggtcaaacatacaccaccaactgtacggacctggaccctcttaatgagctgttttgtgttcaacaagcaaccgcatgctgctgagaaagtgagagcaatgatggacaaacacggggttcgttacgacatagatgtttggaacatgattatcaacaattatgccaactcgcaaaacgtccccgcgctcgcgcgagcattcaagcaaatggagtctgaaggcattaagccggacagctttaccctaaaccctttacgctacctacgagatccggagcggctctgggttgctattgatgagttggatcgggccgaattccagaagggcacgttgggaagtgattggaatgccgtggggagtagggagaatgtagagtcactccttgagcagggtctccaaagattaaagacaaccccaaggcaataagatacccatcactcttgttcactttttatgacatatattgatttaatggtgatgtcgtgctctttagcgttcagtgggttcgcagcatatttactaaccatcgatcaaagatcncccatggaatatgtaaacatgtatagtacctgacggtgcaattcactgctttgcaattgaatttgtattcagataatcttcatacacagccngcctgcagtgaaagctgttctcaaccaagaacgccaagttacttaaagggtttcagtttccccgcaacaagcacgtctttcctcaanccaccaaaaaatggagacctgaataccaagcatattagaactgcttatcttcctgaacaaatccgcctctgttttatgcactgacagccatcagaacacagacatatgctaacatatgggctcaatcgttctcctattcgagcgcatttccaaaagataccgaagaagctgtcatttcttggttagcagctcccctgtaaatgaacctaaagtgagtagtctacccattctggttgcggtccatgatcccgggcatgatcgaatgagcatatgaactcgtgcagattatgagaaggaaaacgaggaggagggactgaagatttaacacaaactgcagct

SEQ ID NO: 3328 - DNA, 1631 bp, Emericella nidulans
aaactccggcgcttctgaacgatatcatggaacgtctcattatccacaatttttccgacaataacctgatcgagacccttctggagcccgctaaacgcctcattgatgaactggtcgagtggcatgccgatggtggcgccgtgggcacccatgtagtcgtgcagttcggctggttactgagtcagtcttcgatcagagtgcagagaagggttacaaactctgaacagcaggaggcgagacttcgatcaccttgagcttgctcgactgtttcagctgctcacgcagagagaggacaaacacattcagagccgtcttcgatgccgagtaagctggcatcggagccgcagggacaatcgcaaggttggttccggtactgtaccacaagcagtttattcgcatagtcccaacatccaatgtaacagcgatgaaacatacaagataaagctcgccggctgcgtctcggctttgcgtttcaaaaacggcaaaaacgcatgaacgagcgaaaccgcgctcgtaaagtttgtgtggaattcgttgttgaacgcctcgagatcccatcccccttcctgggtcaaatcgtgtgtacgctgaacaccggcgttgaggtagacgctgtcgatatccggatactttgcagtaatttcttttacgaactccggcatcttgtctgtctgcgtgatatcaaagaccatgtctgcgccttgttctcgccgtacttggagacaaaggcatcaagacgctccttgcgacgaccgacgacaatgacctttgcgccgttctcgacgaagcgctcagccatggcacggccgatgcctgaggttgccccaatgacgagtatgtgcttgtatgggaagggcattgtaccaatgctgatgttctagcattgtagttccagtatactgcgatatgccacgagaagattgcgggtgctacttatacttatttttcagtcccatctgcggtccttaaatccatggagataaccggagtatgtagccacggcatatcacgtgagcgtaagctgatcaacgggatttcggcaccagcttcttgcgtgagaaaaagccacaagttaatctctatgtatgaagctcattgaaagtaggaaacggcagatacagagcttgcagagcgagtgtcaaattctgtagagaggaactgagttggagaaacttacgagtggctaagatggtcggagttaacacccggagaccgtctagctaaaggggattagtgtcattgcggattctgccataattccccgcttttggtggaatttcattggtgacgtcaccgtgtgtctgtccctgcatctaaggcagacacattacccattgctattatgatgttcttaagtcttgatactgacaccaattgcgcgatttcacaataatgtctggaaatcctactcaacaggtcaaggatactgtttacgctgcggcttccacaaccggtgaatgggcgcagcaaaatgttgtaaacccaatcaagacctacgtttctggagaaaagggcaatgatgctggtttgtattgccgtcaaatactgcctatcaccacgctaacgcctcgcagagcgaattgagcccaacataccatatgaagagaacagagaagatatacgagggggcc

SEQ ID NO: 3329 - DNA, 5901 bp, Emericella nidulans
  unsure (1)..(5901): unsure at all n locations
gtttatgcccctttctagggaagggcagctcctgagttcacgtagcactctatagagaaagtagtgatctcaactctacacttgtgaaaaacacacagcaagtgcttcaaagactggcagatgtggcatcggagcttcgagagtactttcctgtgcccgatcaggagtcgctgagtggcatatcacgggtgtcaggctacttgaacctgctataccatcaggtgattttcgcctctacccgcccttattctaaagctaacgctctaaatagtgtataatgcttgctactcggccgtttttgtttggtcttatcgagacgtgcgttgttctagggaataccaacgtaacagtcccaattcccatacagctgctcctgcaaatatgccttgagtctgcgaggaagacggtgctcatactgggtgcactacaccagcagacgctactaggtatgataggttactcaagtccgagtaaaggctgacgctgtcacagagtggttcctcccattcgaccttgagagtacggtatctgcctgcctcgtcattataatggcgaaggtagtttgcccgtctttggtagataacccgacttatcttacggagagaatgtttgatatgcttgatcatatcatagagaaaggaaaccttatagctgcagatcagaagatggaactcagtgaattagggagactttgtgcggagctcagagcgtccccggccatgggccgttattcagacttttcaaagtcccatgccttaccagacacaccgctacatcaccaaatagagcctccaagcacatcgggcgacgatgcctggactggattggccgaggctgcggactgggccagggatatgacaccgtcgcatctgctcgaggtggtggacctgctaaacggggacgacctgcttaactgggtggaattcgcggatgcctcgttagacgttgaagagaacgtggccgcaagtggattagagtagtgcattgtgcctattttgtatgctctacatcatctataaagtccgtggtgtccagatatggagttaaagtagcggcatcgacctgctcctgcctctcagccaccgtccaaccattcccaaaccagccaaactcattgccgtcgtagggctgcaacttgtaatcctcccatctgaccttctcaagcgccttcaagcaatgtaaactacttccaggccaaagtgtcgtcactcgccccttcttccggtcctccagcgaggctcccggtggcgaggacttgtaccagctcacacagtcagcactgtagacggttcggtcaaagtaggtgtcgcagtagtttgtgaaacgttccacctgggcccgcttgggctccacaaggccaatattgtcgtaggccattcttgagatcagctgcgcaagataggaatgaatctgctccatcataatcagcaggtttcctgcgccctggaacgagttcggcccgagggattggaagaagttgggaaacccgtcggtggccaggcccaaatatgtctcggctctctgtctgtatttatcgcggaggttgactccatctcgcccgatgactgggaagcctcctccgatctgaaagccagtagcacagactataacatcaactggacggtgcgttccacatgatgtagttattcctgcctcatcgacggatacgatcggattggtgatcacattcactttcggcgacgtaagagcttccaggtatcccggcccaggcgtaaggcgcttacaaagcggaggataatcaggtagcaactccttcaagagctctggcttttccctgagtcgatgctgcatatctgctgtgtacttcattcgtgccgaatgttgaagactgcttcccctctgcgacttggcatacagtgtctgcatctccagctcgagctctttgcggtactggatgtaggcggccgtgttttttgcccatacctgcttctcatcttcggtataggcaaagttgcctcctttgccggcagtacgtgctgatagacgctctccaccgtgctggttcgatatccaggtcttgccgcggacatagtggtccataccctgaactttgtcgagtagggctggtacgatctggatcccgctgctaccggccccaataacggcaacttgcttgccctgcgcatagagttagtctttggaccttgatatgatgggcgagcgtacctcaatctgatagctttcatcccaggcggcactatgcagcaacttcccgttgaaactatggaggccaggaatagctggccatttccactcattgagcagtccggtcccggtgatcagtacatctgcagagtcctcaaaggtccgtccttctggatctgcctcgtctgcgatctggacaaaccatttaccgattgagtcgttccagcgggctccaatgcagcgggactggaacctgatatgcttgcgaacgtcgtacttgtgtgcaactcgcttccaatactcaaggatctcatccgcgccggagaagaaatgactccatcgtgtccaggactcgaagctcagctggtatgcgtgtgatgggacatctgaactcttgtgagcctttttgaaaacattcccaggtattgttcctgccttaccacatgcacagccagggtacttgttctcaaaccaagtcccccccagctcgctgttcttttcgtagatggtgagatccaagttcggtacagcctggcggaacttgatggccgccaggatccccgaaataccggcaccgatatagatgactttgaggggtcgcggttcgtcaaccgctctctcggagatgaacggtgagaaataattgtactgcctttcgccgagatctggttgagcttcttggtcatgtgctgattcaacactgatactgtcagctgttgagggagctgtccttgccagtgccttggcgtcatagacagtaggggacaatgggaggaaaggggtctcggtgaaggtagacatgattgtgcgttggtattactgttataattcaaagtggtcatttggaactggcttatatcgacaacgagaggtgctatctcgccatcaggaccagtccatttgcgttctcggatcgggttccggatctgagacggttcgctgatgcactagtacaccagagactggattgtttatagcatacgcttggcttattgctcggatcatgagtgtccgttgatgtggtgggaaagcacgccgagtggcgtcggagggttttccgactgagagtctccaactcgctttgaaataatcctatatgaattgttcaggtgtattaccctgcatcatccgatccgctcttctcagactactagactgctcacaatgtccgtaaaccacgttcagcccgagcagtacttcctgcccccgactccgcacgttcccaacagcaggcttcctgtacttgtgtaccgcaatgtcctggaggatacaagtcctcgcaacatcgtaaacactatcgagccgaatggctggatcaagggtgggcagtggaagacgtacaaggtgcctcactttcacacccattgccacgaatgctatggaatcatccgagggggatcaacctatctccttggggtcggccccaacgacccgaaggtcgacgaggagggtagtccatatgggatgaagttgactgtccaaaaaggggatgtttttgttctaccggtaagtgctacttcaagcaaatgcggaatgcgtgactacaccggaggaagctaacgtgggaaggctggagtatgccatgcttcccttgaatcgtgggataactatgagtttatcgggctatatcctaacgtaagcaaatcttctcgtacagaatatagatattgacgatggcaagggcatcctcgaggcgactggtcaccgtttcgatatgaactatgggttcaagcctccagaagagaccagcgcgttggcgaaacagagtgaatccgttgcaatccctctcctagaccccctctatggtttggatgggccgctgccgcggttatggagggaggcagcccgttctcgggctcgtctttgagttgtcccagagagacaaatgtggaggggatacttggttactgtcaagcgatagtctatacaaagagaatatgaaatgcttaaaatatgcgtaaaccttctcggcccgctcgttatctctcggtaagatttttaggttagtttaacttctagctctagttggggacagaaagatagatacggtatcagaggtcggatcagggtccgagataggcctcggtttgaggagaagactaactagtttggacagctttcccgcaaatcttataagaaagttggcgtaaggaccaccaaggaaccattcttgcttgtcattatcgagcttctactatacttgccaattttctgtatacaatggcggcaatcacgcccgaaaacgagtctaagatagcacacgatgcggatgcggcaatgagcactgaaatcggccaggttcttcatgatgctgctgggaatgtggaccaacttcagcgacgtctgtctaaccggcatatccagcttatcgccatcggcggctcaatcggaacaggcctgttcatcaacatcggtatggggcttgccagaggcggcccggcaagtcttctgattgggatcatcatccactgctgctttatggcgctggttaacaactgtattgcggaaatgaccgtgttgttcccagtaagtggagggtttattcgcatggcagacaagtgggtggactcggccttgggcttcatggccgggtggaatttcttcctctatgaggccattctcatacccttcgagataaccgcccccagtattgtgctacagtactggagagatgatatcccttcggctgccgtcacagcagtgacgattgccatgtacgggtgagtgacgttaattagaagcgaggcggccggctaacctcaaatttagtgttcttaatctgctccccgttgggctttatggtgaaactgagttctggctgtcgtctggcaaggtagtcttggtgtttatcttattcggtttcacgttcttcaccatggtgggcgtcaacccccaacgcgatgcgtacggtttccggtactgggtcagtccggggccgctggcggaatggcatactggcggagaccttggtaggtttgaaggcctgctgaatgtgacctgggttggtacctttattgttgttgggccggaatacctgtccatggcggcggcggagacgcgtcatccccgggtttacgtgaagtctgcatacaaggctgtttatttccgcttcggcctcatcttcaacggcagcgctcttgcagctgggattgtgttccctacaatgatccagtcctgcaatcccttgcacgcggtgaacagagcagcagctctgcggcggcctcgccatatgtggttgctatgaagcatctggggatcagtgtcttgcccgatattgttaacgcactcatcttcacaagcattttgtcagctggtaacacgtacactttctgcgcgatgcggagtctctacggcatggcgcttgaaggcagggcacctggattcttgagaaaatgcaccaagggaggaataccaatctattgtctcggtgtcacaacgttgctctcgtgccttgcatttcttcaggaatcgagaagctcccacgttgtgctgcaatggttcgtcaacctagttacagctggctgtataatcagctttatcgtcatctgtatcacctacctacggttcttccgggcgtgcaaggtccagggcgttgaccggaagaattttccatactatgcctacctccagccatacggggcctggcttggccttttctggacggtctttgtggttctgggatatgggtactctagtttcaccccatggaatgtgggcacattctttnctactatt

SEQ ID NO: 3330 - DNA, 1270 bp, Emericella nidulans
atgagtaaatggcgtcttagagccaaggcagattcgagggtctcgtgaagagactgggccagcgcgttgctatcgcgagtctgctggttgaagatcaggacccgtagcttcttcgctgctgaagcttccgacgaagagtctgccttgatttgtgatgcgaaccactgaccggctagcttgatgctttcctgcgtgtgacctccgtctatataccagatgacgttttcctccttcctggtctgacatcttccctctaattgtgcctgttcaagacctttgcgaaactccgcagggagggactgctctctgaagccagcgctgatatccagcttccctaccttcttaaggacttctccagcagtggcaacagccagcgcagcgttgccatattgaaagtcaccagctaggccgagtttaatatcgccatttttctttagatcgggatgactggacacgaattccagctcagtgtgcttgttggcagcacgttcacgtaaaaccttctccgcgcttggcggttggggcgcgctgaaagctttagtgttcgcctttatgatgccgcctttgtgccatgcgatctcctcaatcgtattccccagaagagcaacatggtcgatccccaagcttgtaatcgctgtggcggctggttgttcaatgacattggtacaatcatattctccaccgattccacattcgataacggctgcatccacgccctcactcagataggtatggaaggccatcagcgtgagatacctgaaatattggggcttcgtctgtaggttgtttggatcttccccggccgctcgggcagcgtcatcaaggcggtcccacacttcaaagaagtattgagcgaacagttcttcggaaagaggttcattgttgattctgatgcgttcgcgggcgaatcgcaagtggggagaggtatacaggccgaccttgttgaataccggtgaagatgattgcgaaggcgtaaattgatagaggatggaggagatgaaactggaggtcgagcctttgcctttcgtgccggcaacatggattggattgaggcgattcaggtcagaaggctatataaagagtgggagtagacaagttagcaatcgcaagcattggaactgtgcaagatagactgcgaacctggtatccgatgcgacgcagccattcgacggtctcaggaagcgaccgaagattgagagcatgtctagtttcaggtttggtgaattccttaactattgcgaattggactgcacgagttgagggcctgaat

SEQ ID NO: 3331 - DNA, 791 bp, Emericella nidulans
atgaattattcaacccttctgggcaacagtcttcttggcttaatcattgctcatccggcagtaaccttgttcctcgcaccctttgtgctgaactttctactctagagtgtccacctcgcatccgccacgagacctcccagttacgcgaatttctacgccgaacggccagcctcagggcatttctgtcgacattcaccgtgtatactatacattctggcatttccgctcctattgcatgagactgccggtgtagaaaagagcttgggaaccgctgtctaagacgtcccaatttcaccaaccacgttaaagcctagatcattgttccacggtaaagctttttcacagcaccgtgttcgatgcattaaagactggaatttgtcagggcattgaccggaaaattggctgggctagatgtgacgttgtctatgagcctgcagactgggcatcttcgctctcccctacgccagttgtgcacttgctttctgcaatatcatctcaatggtaaagctgaaaggctcataacgtggcctagtgtgctcatgtgcacaagccatgctccagcaatcctgaatccagcgaaccagcatgcagcgtataccagatagactcagtgactcaacgcggattgcaagaccgcaccggaggtatgttcctgccctgccgttgagaacttactgtatgactcaaggttgttggagacctatttacactggcctaatgtcttatattccacgctgttacttgttccccgcttacagcactttactccatacatctactcttgcttgcgt

SEQ ID NO: 3332 - DNA, 1281 bp, Emericella nidulans
acgaacattacgaacctagtcacggatatgtggatattggtcctgccgctgccgaccatcctgcggctgcagctatccaggagtaagaagattcggcttagtttgctatttacggtgggactggcgtacattatacacccatatggaagtggatcgctgaggctaatgaagtcagaacatgcactgtcagtgccgcgcgcctctcagttgttgtctcgcagggctccacagactttacctgtaaggctatcaccctcctgacccttctggatgatccttacatctcaggggccggcgtccctctgggcatcctctccgtctgggagcccctaggcggaatcctctgcgcaaacctgcctctctcgcacaagctcgtcttgagcgcattccggaaagtcactggccgcacttcctctgagcgtaaccatctttcaccaaccgggccgcgcagctggtatcgcctcgagaattacctccaccgaaaggcaaatcgaaatctagagactagtacagatacttactatacaactcattcatatacagattcgaccgagatgggtggtatcgttgtccaacggaattttgagcaggtttcctcgtatacgggtgttgatttactgcggcaagaggaagagacaggagtgccaggtgagaatccagggacgcgatgatatatcttttactccatatactctccgctcgattaccattggtatttcgaaacgccgaagcatgtttcagggaataacaggatcaacacaattgaatcagactgccagatataagagtccgagttgacccaaaacgccctaacagttacatcgatgcttacagggaagagaaactatgagggtgcaggaataaaggaagaccaagggttttaggatgtgaaagatgtattaggtatgctcggagtggtttcttaatatgagggtgcatcatccttgtcatgactctacaaaccgactccctagtatcttgcgtacagacagctgagccctaggtttcctgacccgaccctgccgcatcagggctccctgtgcttttgcctaatcacattagttagggtctgaagttgagaattgaggcggcgacataacttgatcgctggtattgccaacatgagactacggcacgggcgtagaagcgcagattagtgcaagacttaatcgttgtaatccgcagctatcgtaatctctccagccaggaccacgtactctgtgcacacaagcccgagctcgctcacttccaagcatgcgctgaagtctaaggcccgcaaga

SEQ ID NO: 3333 - DNA, 972 bp, Emericella nidulans
aaaggcaggccacaaaggtgtggtggagttgctgctgaaacacccgaaaattgaggttgactgggctcttgcggcggcggcgggtgagaataataaggcgattgtgcgcatgttgctgaataggaatgtggtcaagtctaagcgtgaaatacagcgagctttgctgttcacagaagaagcccgactggatgaaatgcatgcctttctggttccatacctggagacaatgcccgaagagtgaacagagagtgattgttggtaggtttgttatcattgccaaactctccatggagcttatgaatgaacgacttctataaatacaaaatccattccagctatgcaaatataaagcgcactaacccatatcttgagtcaggatcgcagggtgataagggcgattcaatggacagaaatcgttacgagagccagataaatatggatggaaaatagacacaggaaaagaacaatttaagtctgcaaaggggatgctcgcctgcgttatgcaccagcacaatgtggagtgttaaggtgaatgtgaaacgagagtcacgattatattgagaaaacccaatagccaattatgaagctttagagttattgagagtgaaaactgtacgccctgtctagaggcctagttttaactcatagctcgtaatgtccgtttggcaaccgtaggagtaaatctgcccatttggttaccattcaatactggtgataagcctcattggtcaactgaacggcccatgtcataacaagcaaaagccgaaatacataaaaaaaagctcccaatgaggcatcgcaaggcgtcatcaagctgcattccgggcatgacattaaattgacgggtgtagcaaacgggcatattaaaataggcccgtcccgcctgctatgtttgcatgatagataaaagcgacgcatccgaagggtataaggatgcaaggaatacctcggtgaatgtttccatactatcca

SEQ ID NO: 3334 - DNA, 729 bp, Emericella nidulans
  unsure (1)..(729): unsure at all n locations
aacgttatgtgccatgctcaagcgtggtactttccttcaattcacaacggcgcaatgttcatatctcatttttctacggttgactattttgtggacatacttatataatcaggcgaaagaatcagctaaacattcaactgaactcgtgcatctgaatcgacgatcacgaaacgccggaaagcacctaatacagcagacatccgaccatacctcgaataagcaaagtaagcgtaataagcaagaatatagactctaatcccaagcggcttaaaagacaccagaccctttgactccgctttcagcacgcctcatatcggaatgcagcattaaagcaaactgagaacccaagcactaatacatgaataaaccaggggtctaagcacgcttccgcagaacccgccgtccgcctgttgcagtctcactacccgccggcaccggttgctttcctagatcctgagactgtagtcttcttcgctgcggctgaagcttgagaccgcgctgtagactcttcgttgcagcgctggcagcgggcgggggtttattctccgcgacagctagttttggctactggtgtacctgatgagccngaagatgaaacgctacctctgcgatcggttgccgagacaagtcgtgacagggcagcggaagaattcggcctgccgggcggcctgttgcagactttggttggaaaaagtggccggcggaaagccttttgatagcctgcagacc

SEQ ID NO: 3335 - DNA, 603 bp, Emericella nidulans
cccatccagcagtctatataagatgctatattcaccacctgttcaattcctcatcacgctctctctacaagactttcatagacagtccagtccctcattctcaagcctcttctccaaaaaccaaaaaaaccaacttccacctcttcacaatgaagttctccattgctgccgctgtcgttgctttcgccgcctccgtcgcggccctccctcctgcccatgattcccagttcgctggcaatggtgttggcaacaagggcaacagcaacgtcaagttccctgtccccgaaaacgtgaccgtcaagcaggcctccgacaagtgcggtgaccaggcccagctctcttgctgcaacaaggccacgtacgccggtgacaccacaaccgttgatgagggtcttctgtctggtgccctcagcggcctcatcggcgccgggtctggtgccgaaggtcttggtctcttcgatcagtgctccaagcttgatgttgctggtcagttcttcgaaaatcactttcgtgatgccccaatgctaacaattaccagtcctcattggcatccaagatcttgtcaaccagaagtgcaagcaaaacattgcctgctgccagaac

SEQ ID NO: 3336 - DNA, 5618 bp, Emericella nidulans
ttttttttgttctggggcggatcaatctcgaaggatcgtagatgccggtttttattctctttttgtagtgcgagggagctgttgataccgacgaaggtgactatagaggtgtcgtttgattgtgcggcagccagagaagtcaccgagtcctcatcccttgaaagctcgacgtcgacaacctcgcttagttcgtggcgtttgaaagcattgagaaggacctgcatccattgttattatacgcctttgagaacggagatgcagagttggtcgtttacaatcttgttccccacgccgcttcggccttctccgccgtcgccggcaacaagaagaaaggcaggattgcgcgggtcgaagtcggcagcgaacaaaggacatgagagtgtgatcttcgcagacggtattttgggcgccatattaagaaccacctgcaagcccaggggtgtgacaactaattgcttgacgaccgtagattgaatgaggagtgaagatgaagattaagccaagttggcgaatgatggttggaatgacgttgcggcctggagaacttggcatccaccgctgggtaataatccgtgtaatccgtgtagacctctacgaatgacctacaaactggtaaagctgatgacagtgaaagagattggtctcttctattttagccagaattattgaatctaatccacctcctggccagtaaactcaggtaatcgcttccggacatcctcccaggtctcttctccttctaccagagacttgagagcctgcagaatctcttcctggctcgcgcgcacctgctttgtggagtcgcggtcacgcagcgtgatagtattgtccttgacagactgaaagtctacggtgacaccaaacggtgttccgagctcgtcgttgcgtgcgtatcgcttaccaatgctggcggaggaatcatcgacacggctggagacgcccaaccgtcgaagtttggtcgtcagttcttggaccatagggcggaaggcgggattgctcgataagggtacgaggagaactttagtaggagcgatcacgggagggaacgaaagaacctaaatgatgtgtaagaaaagggagtgaactcgcaaaagggtttgagatacttacgccacgcgcttcgtcgccttcacggtagtagtagacatgttccataagactgtatagaatacggccaataccgaatgatggctcaattacgttcggggtgtattcccgaacattctcaacacgggtgcgcttctcaatcgtgatgatatctttttctaattcaaccttgccggaagcgacaccctcgacatcaacctcaatcttgccagtcttttcgaggtcaagagccagcttctcccgaagctcctgagacaaagcatcaatggcagcctcaacggtcttgccatctttcttgaagcgaggaccgaacttcttcttgtccagctcaatttgccattcctcgaccttcaatggctctgcgcgagtctcccgaacgaccagaggggcaccagtcttgttcttgtgcacattaaggtcatatgcgctgcggtctgcacagccaacacactcaatccagccgtaactagtgtatagctcagcatcccagcagtcgcatgcatagtgggccatctcgttggccatgtgttggcggaagcggagcttggtggggtcaacaccgagcttgagcaggaacaactggatacgggcgaggaagtatccaagagtctcgttatccaccaatcctgtctcaacagcctttccgacagtcatccgttcagtcttggtgcttccggacagctgcacgtctcggttaagcagcgtcaactcaatatttttgacctcctcgaaacgcgcatgcttcttgccaccttcggggtcgacaaaatgctcaatctcagccatcagaaattctcggacacgcaaaagacctgcccgaggcgagatctcgtttcgaaacgacttgccgatagacgctgaagcgaaaggcattgcctgttgattgaattcgagcagtttctggaagttcaagaactgtccctgggcggtctcaggacgcaggtaaccaggcatattgctgctaggtccaaataaagtctggaacatcaggttgaaagcaaccggggggaggaggttgccaccggtaacagggtttctgatgtcgtatttggcaataatttgttccaattgaggtccgtcgaagttgtcgatctgcgccagaatctcctcatattccttgacgactgcatcatccaacttgacagcaacactcttggccttcttctttttcttcgcctctttttctgcatcaacctcgaccttctggccacgagcctccttgtcacccttgagacgagcttcgaggacttcctccaccaaatgatctgcgcggaagatctctccagtcttggggtccttgcacatccaatcggcgaacttatcgacgtggccgctagtcttgagaacttcctccggggtcagcattgtgcagtcgacctcgagcatatcctcctccagaacaaagtgcttccgccatgtctcgacaatgttgtttaggacggcgcaaccgggcggaccatagtcgtagagaccagagacgcctccatagatttcgaaggagggggtatagaataggcggcggcggacgatggaatccaagacggaccggtcaacgacctgaccggtcttggtagttaatgtagccattatgggttttgtcttgctggactcctggataatggcgcgaagggcaggaggggtggtggaaaagtgtcttctgttggcggggttccagcaggaaatgattcggcggggaagaaaagaaaagcgaatcggagattgagtcatccgctgacacgtgagccgttccttgatcaccaagggggcgatccggccaaaaaagatcggattggaaatcgaatagaccgaaaataaacagatgcagagcaatttaaagaagcaccagaaagacgtgctctgtgctcgccttttaaaaagaaattaagatatttgaagcttccaggccagtaaaccgagtccttgcaaaacagaaaaactgccgtattattgactgtacggttgattgactacgggggcttaccgccggtcaaatgtttctccacaaaaaattatctccgctccaaaagtctggacggattgaagcttcagtaacaccaccaagtatacgtctataacccaacatggtctccaagaaagcgtcggcgaggcctccctcaggcataattggcgacttcaaggttcgcaataagcagaagcgtcaacttcttcacatcaaacgaaagcgcgccaaagatgcggctcgccgggctcagagattcagcacgaagaaggaagaggctaaaaatcctaagttaaaggaggaacgacttaagcgaaacattcccttgaccttggagcggaagcgtgtatgggatgatgccggcagcgacgttgaggaacccttagggctgagtgtcgatgtcgagcggataaagagactgaagcaagaggaagatgaagaactcaatcgcccgttggattcgggctcagaggatcgccacagtgaggataatggtagtgacgaggaagatgacgaggacgatctcgacagcatgttagctagtagcgacgaagaagacgaaggcgacgagggtaaagagagcaaaaaggacagccgcggccgcaaaccttccgctattccctcagcaacggaacgtgcaacaagcccatcccaatcaacaaaaagcacgaatttgaatttagctccggaagcgctcgctgcgaaattcccatctctcttctctccagactcgcaacgacctccgaaaatccttattacaacatccctcaactcaacccttcaccacgaagccgaaatccttactcaactcttccccaacagcgtctacattcggcgtacggcgcacgccacgcccacaaattttccatccgcgagatcgccaaattcgcctccaaccgcgaatacaccacgttaatcatcctacaggaggactcgaaaaagccggccggcctggacatcgtccaccttccgaagggccccatgttccacttcagcatcagcaactgggtcgaaggcaagaagatacccggccacggaaagccaaccgaacattggccagagcttatcctgaataatttccgcacaccgctcggtcttctcaccgcacatctctttcgcacgttattcccgccacagccggatatcgagggccgacaggtcgtcactctccacaaccaacgtgactacatatttgtgcgtcggcaccgctacgtgttccgcgagaagcgggaaactgaaaaggccgttgtgggtgcggacgggaaggagattaagggggcggaggggatccggacgggtctccaggagctgggccctcggttcacattgaagctgcgccgtgttgacaaaggtatccagagggcgagtggacaggagtgggaatggaaagggaagatggagaagaagaggactttgttccagttgtgattgcacaatgcgctttttgtggtttgcattgcatggagttttggttcgtaaaagaagtctgggcttgattttaaggttatgcaaataccacttcgactgtctatagatcaatttgatgagatatatcacaacctgagctcgaaacttgcgagcgcggttttaaggagattgctcgttttcggctttagacacttgggccaggtacttctcctaacataaacatcccaagcagcaggacgctttgcatctactatgccataacaacatgaaagcaaatggggtataatagcataaaccgactattgtcggcacaaaccaccttaagtcaagctcgaatccaaattcatctcattatcgatctgtttcagcttctctagcaactcattccttcgcaaatgcgccctcgagaacggtttgcgtgctgtcactgtttttacacaggctgtaattttctccgcagctaggatttcaattttcaccttggcgcagagatcacgcactccttcctccgtccaattccccgtcgcggtgagaggacgcagactataagcctccaagccttcgaggagcgctataagagccatcttccctagggttttctcacgcggatcattggtccaggtcccgactgggattgtacgttctatgactcggacgtcaacgaatcccgctgcagttaggacgctggggaggagatggcatagatcgcgcggatagcctgtggttccagcggcagagcgcatagcagacgttaaggtgttaaggtaggaatcttccgaattcgggaaggagactgtatccgctgctgggtctgcgtcgctgacctcaatatatccacctggaactaaatggcggaatgcctgcctatagatggaggaccaatctgagaaggcgcccgcgaggccgcggagatggatcaggtcgaatggctcatggtaggtccattcgttccgggcgtcatcgagctggaaactcacattggggagatcgatagtgctgccgaggctgttgtcaaagacgcctatgtcggttgcaacgatggtggcgctagggtaggcggcgctcatctcaatggcccagtcgcctggccctgtaccaatgtccaggatgcgagctgtttgtt

SEQ ID NO: 3337 - DNA, 774 bp, Emericella nidulans
agtttgtcctctaggccctggccctaaccctggattcaccgcgccgtcggacgacttcgcctgtgatgcttcacgctcttttcgtttcttttcaacctccgtagccgcaagttctcgctccttcttggccaaaaacggatccgcctcatacagccagccgtctcccttcttgaactctgccgcctttagctcttcaaagtcgctcttccaaagctttttgaagtttggtgggagcatcatgtgtagattggttttgttgcacacatggaagagcgcaaatgtcgcagcataatgacgagcttccagcgcccgttggctgcttaaaactggctggcaaccgtatgcgagggagtgtaatcgtttctctagtcttggagtcgatgcgtttcaagataacggatgagacaaaccctccgtcaactttgtcctatagcgtgcaatagttagtactgaatcagcaccacaatgcgcgcatgattatttcctgttcaagctctcaccatagtatattcaggcttctcccatttatgtttctggcaatgttctgacatcaaattgaccggcaatttccccgtccatgatgcgccaccaatgacctgcttgactgtaggcttcttttgctcgtccgctggttgttgcgctttcttcgcgctctccgctgtccgctcagcggcagcttttgcctgctttgtcccaggcttgggcacgcctccacgggcgtcagacttcttcttgggcggcatttcaggtggttactatccttgacaaagacgc

SEQ ID NO: 3338 - DNA, 1461 bp, Emericella nidulans
tctatgcgggaagaccgctccaatactgccagtgaccacaatgcgaccgccaggtcgaggattatgtctcatgaagtgagtcgccaattgagtgccgtagattactcccttatagttgatgtccacgacatccaactcgggggccggaggaatgtcatcaacgctcctgttcttccagtcgtatatatagacggacgaagtatcgacaatgcccgcattggcgcatagtgcatcgatacggccccagagcttgcgaacttggcggaagacattcgcgtactcatcgtacttggatacgtccgcagggaaaaaccgggcattaccgtcagggatcgtctgcagaagagtctgcccaggttcacgatgtcggcctatacaggcaatcttccatccacgcgcggctagatcccgggcaagatcggctccaatgccagactacaaatacgaacaggttagtgggagctcgacaagccccaggctcttggtgtactcactgtggctccagcaataatggcaacacgatcttctccatgtgaattcatcctttaatgtacggcggtacgcacttggtattcagtaagcgggattgggattgatgtaacctgtagaatgtttttttcaacgcgaaacggccagccttctgagttacgtgtgtacaaaaacgtaatctaactgcttggagtaatagtaaggtcgctgatgcaggatccagccgatgtggatcagcatcaacgtgtctggtccatcactgactcgctatttcttcccacgtaaagggtcgagcacaataacttgggctgtattcgaatcgcagctggttctggtaacgagcccgtctactctgtctactccatttcctgagtttgcttatcatctttccttctaattgcagctttcaatctaattcctgttgagcgccgtgctgtgccgtgccggccccagcttaacgaatctacctcgctcttagattcagccactccaaatctaaccgtggagtcgttcgatttttgcgccgcctcagtatgtactctatataagacataaactaaaccgtgtccaggctcacagaacggtatgtcaaactcccgacgtacaaaggcccagtagctgcaacacgagctggtgacaacaatgattgattcatattcatcaacgagtggacgttaggttaactgcaggcagacttcctctaaagaggtcaatatactgcaacaccatcatacgccgcaaggtgataggtgtcagcatcggttccatctcggtacaagtctagggaggctgaacaaaaaaaccttttcaccctttttattctttttacttttggtttgacggtatattgcgtattatagtttacgaagagccgccttatttctgactggtaacgtgctgcatgaatacatgcagttccttaccggtctagacaagcagccaatgcggaacgagccgccccgaattgacggg

SEQ ID NO: 3339 - DNA, 1204 bp, Emericella nidulans
ctggccgcgcgacacgaaaacaaatacagcgcagacaccgcatcagcaacatctacacgctaaaatccctgcgagaccattttcttcccatagccgcctatagccgcctaagaccaaaacaattcgtctgtgctcgtgcccagttgttccgtccaggagatgccgtcatggtgcgataacgtcatggcccactgacctgtcccgaaccaggagcgatccgctataccagaacgggcccggttgagggaacctcgtcattcgagtcgagtggaaacagtctgaatatataaatttactctttgtcaaccgcaactcgctgaaacaaaacccctttgagaaggttgagtgggcggccgagaatctaccattgcggcctgagtcacccgatgaagaagcatcaatcacaacccaagtcttttgatccactctcgagccagggacttcgatagtcgccgttcctgtgtctagttcattccagtccagttagttcgtacgtcgctgtctagaccaataccaacttcatcacgccaatagcttcactgccaccctgagccacccacggcagcttcgacaactgcctcagcatcatgcctgggctctccaagctcaagaagcgtcttgctgcaatcaaggaggaatggggtcccctaatggccgccaaagaggagggtgatgaggtgtacaatttcccggctggaggtgggcctaggcctggtcagaacaggtaggccttctttctcgttgtcatggcatgtctctagctgatcttgagcgcagttcgaaccaaacgccctcacagaaggagaaacagcccgagtctaccgattcggatgggcgaacgagtgaacgagcgcgacgtagcccagatcttgatgctatagccgaatagtgatcgaagagctaatagttatctgtgctctactcgattggattttgtcctgttgttgaacctcccctttctgcttaactctgcttcgactcttagtcctgtatactaccaagtttcttttcctctgtctcgatcctcgctcttccatcatgtcggatttcaagccggttcgatcttcagtactgcttgggaatccttggttaaactccttggttggcagcattccaactcaattcgcaaggtattaccaccaggctctaactgagatgatcggcgagcgagtgatcctcaatcaatttcttcttggagaccagc

SEQ ID NO: 3340 - DNA, 1327 bp, Emericella nidulans
tgtttcccggagggatctgccaagtgaaaaaggggacggaggtgaattttgaaaaccctccatgttttcctggagtttcaatgggaatgtgtatagtagaaaaccgttggtcatccagaattaagggcccaaacggatcttaggcctttggtcaacagtctggctcggacaaagtctccaccccttcgggaaacccaataaaagatgtccatcccaaactcccagccaagggaagattcagtttcaattccaaaggttaaagttttaatgctacgggcaatgaaccccgcgaagggacctatttaaaccaaaatcaccaactgtttagccggtgtctgtcaggcaagggaagcatgtaatgtcaaaactcacgtaatcgccatcacagtgctcaatgtgagcaatgtgaaaagtccctccatggtctgccgttcgtcccgtagctcgttttctctctaaaagactcgggacatcgtgtcgatcgcgggtatctgtacggacagatcagtttagtgcttgaccagtcaggagtcaagcagtgcagtaggtgtggtctgcgtatcccatgtagagccaggaacgagctcgacttgggactgacaatgccggaaacgtggcgtcggcgaacgggatccgcagcgggaaaaaaggccgccaccaggtacgtacacaatagagagccagcaatatacagcgcgattgggaaaagagagccggacttctttatgtgtattgtggaagaattgggtcatataacggagcttgtctggctgatgatttcttctaggcacggcgattttgcttttggttgagttggtattaataactctgtcatatcggccctaccccgattgccgccgctgtaagaaccctacgttttccaaggcgagtagctggcatggacccaatgcatatggctggaaagctgttcatttaatctagagtcatgctaacgcagctctgcttctatgggctaatcatctggcaagcaattggcgataaataataaaaaaaaatggttgatcaagtcaataactctgtgtctgcaccttcaggaattcacggagtcgttcttccttctcccgacgagtttcttctgatgtcaaagtgccatatacttcgtctgtctgtcgaaccactttctctttgacttcagccacactcacttggcccaagccatcccatacctcttgcatggtgcctcctagtttatcccaaaatgcacgaatgccaccgacccccccaccttgttggtaactctcgaaaataccattcccggcccatctcggtcccaaactggccatgaggatagtatcgagatccttag

SEQ ID NO: 3341 - DNA, 1101 bp, Emericella nidulans
atcagacgaaatgactcccaagtgactagccgtgcatccctcatgcatcgcacgatctccacaaagaagcgcttgacatcgatccatgacctcgtccaactcgaacaactctgttaggtctgaactgccatgggtaactcactcggtccttcttctctgttggttgcatgcatggtgctgtgtactctcaataggactgtgtatgtcgtactcagtctctcttcgctctcgtactcggcaacccagggccttttgtgcctcacaatcacatgaccaaaggctaaatacctgtttaacggcaataatggcatccagcattcttcgagtcgacggggaaagcgtcatagacgataatggaaacgaggtcatccggcgcggacgctggaagtagtattatgccctatcctacttctgaaaacctctttctgcagcagactaaacttaccagtgcggacaatcatgccactaccactgcactcttttatacctgacttactttctgcaagatgtaaaagcaacaacgctcgagtccaaatgggtacccccaaggagcgagtcagacggttacgttggcggcaacgaaaagcatttgcaattgaaggaagaaaagaggccactggtatttgtcgttgctgtagatcttaatgtagatggaggactgaaggttccctcattaactctgaaacgacttgatggctaacgaactaggaatatagttgggcatgtgcgtgtatgttccgctggcttagcgcccgctgactggctaactgctgccttatcgataaggccgcccaaaaaaaaagttggagcggaaaaagatggcggggttaatcggatgagaatcgcctggtgcagtcgctcattctgaatccgtcgcttgtctatggtcattcttgtttcagcactctcggtaaatatatctgtattgccctgttctttgggtatccggtatgactcggtgattacatcgcgtgataattcaacgctctaacactcttctgggtccctctctgcaacggtaagtgctcatctacctgtggtgctctgtactagtatacgttcctttactgaccatgtaaagatcgctaggctgaaaaccat

SEQ ID NO: 3342 - DNA, 725 bp, Emericella nidulans
cccaaacacgggaaggggttattcggaatattggggccttaacaacccaaggggtcaaggggagggcccagcgggggtccccttcaaaatataggagccgaaaggtaagtggcccgagttttttctaacttcggcagctggcatttatttatggtctataaggtctataaaaggaacatctgtgtttccagacacgccactgggggcgagtagtccacctgcagatagcgcgggctcagtgcatcccccggctcaatcaatgtctgatgaacatttgactgggaaatatcccctaacgtcataggaaatataccttcaatataaacagtcatggctacaccttcggcgatcccagcaatcagtcagttcccgcgatgccccaaaagagccatcttcagccgctgactcaactgccgactgctccaagctccccgctcccaaattccagctccatatccacgacctccgtcaccctgcctctcaattcttccttacttccatccctgatctcgcatctacccttgaaaccgccctttccgccatcatccagaatctctacagctctccaaagtcggggagggcgataaatggggccaccgcgacgaactccaggaaccgaaagcacttacaaacattcagaccttctgtcccgccaacccgctcggtcacagtcctcctacgcgatattggaggcgttgcttacacaactggcaaggacctcgaca

SEQ ID NO: 3343 - DNA, 1459 bp, Emericella nidulans
tatacttaacaaactgctcaacaaactggcagggattcctttggacctcgcatatcctgtcgcttgtaattcaacgatttcatagtctcgagcgctcaggctcctttagataagcttgcattactttcacaattcctttttttctcgctatgatgcaccgcggaggacacacattttgtagctagttgcacttattggctttcccaatcagcaagagtccgttcattttcctttagacgacgaatcagctcttggcaaacatctgcgtgttgttgtttgatggaatcaatttgttgtttgcatagccttgtgcgttcaatttgtgctttgaagagttggtcgaggacgctatggcattgttttctataaccattcaagacctcatttactgtggctttctcgctctcaatttgacgaaataggtactgcagagttattagtggatactaaagcacaattatttccattgcctacctcattgttattgcgcagcgtcctctccattcctacgcggagctcctgcagagttggttgccaagatatctgaccagcagtgctttttgacagttcaaacgccacattctgctctggttcagcagccgctgcttaaccatatagtccaagaacgcgttcttgaatttgatgctgttcttcttgccgtgacccaggcgaaacggacgccacaactttcaagaggtgccgttcgcctgcactcacctgcgggtggcttgcgcagggttggtggcccatttcctctgtaagagtggtccgtgatgcgctgaaatctgtgtcagattctctcggggccagctgaaaagtgcagggggtttcgcttgtctgattctccgttgtgtgataggtggtggtgttgtaaagttctcacattcttttgcttttttgttcgatctctaccctatttttgctcttttctgcctattatattcttcttgtattattttgttgagattttaatccttctagacttcattattctatttatcttgttttacacttaatgatatttcctttctctgtttaattattattacacttatctctttcctttttaattttcttcatgtattaatatcttttcctttcatttttttctgtaacttaattcctactgttttcctgttttatccttatttgtatctttctgtttctttgcctatttttgtgatattattactatatcacggttgttactctctaacttcttttttctctcatccttttatttattcttattccctttcttatttcatctattttcttagtcattcttcttctacatattcattcttctttactactcttgaatattttttcttacaaatctacgcttttgtgtaattctattgtttctaatattctctattttttctcaatttgcaattcatttccttctattatatatctgtcttttcacttcttcctcatctacttctctcttccc

SEQ ID NO: 3344 - DNA, 1527 bp, Emericella nidulans
tccaccactttaagacggattcactgactcgactgctgccagtcgacacagtcgctgatctgagtacatcgtcggcactatcttgtgatcgcttctcccaatgcccgtcgccgggaacacatcgatcagcgtgccgaagactcgatccgaggatggatcctggaatgcagtatctgacaccaccagaatggccgccttcaatcgctcgtccgccatttccctcgctcttttgaaaatgagtgtaaaaagagttggagaaggatcccaagaaagtaggagggggatgtccggagtcgcattattccgctccgacccctcattgacacctcaggcacaaaatttctgtaagttctttcctcgacaaccatcacgaaaaacatccattaacggaccgatcacaccaattgtgacaatgcgagttccttcccccgagcagagtcttcttcaattccttcgtacagcacttcaggttcatcaccgcttcgtttccggttcgctgtctcgtgcggagtcccccatctacgtcatcggcaatccctccgccgacctcgattcaatcgtctcagccctcgtgtactcgtactttgccaacaatcgtgttccacgcgactacccacgcccttatgtgcctgtgattaaccttcataatgtttctcgcgggcccgaacttggcaggttacgccctgaattcttgattgcactgcaactatctagatccgatgcgggggacactgtggagagctcgcctcttgaagaacactttctgactgtggcggactttgcgaaccaagtgaaggaacgacgtgttgcaacctaattacaagctgattctgtcctggtagactggaacgcgttgccggtgcgaacttaggacacccgctaggtgaatggatccctacctagcctgccagtagagttaactgtcctaggctgcattgaccaccatgcagactaggggttagtccctcctatagatagcacccagcctagcctgatcgcgacgaccggttcatgtacttgactcgtggtcaccgagctcgagaaaatgggcctttggcacaaaatcgctgaaatgcccccaaatgaacaagttgtggcgaaacttgtgatgggcccaatccttaatgacacggccaatctaaagccaagacaatgtgactaattggatatttggttagcattactttttccaaagcaaccccaccgatgcctgatgggagttattgattttatcgtgagttaagatccaatgtgattgcttttattgctaccctggagaattttaggcggctacaaactgggcgtgaattacagtgacctataaatcggtctattgatatgtctctgatagcatcctgtttctaatgtagcttttacccttatgttgctgatattccttaatcttgtggattgttctatcttccaatttatggtttttctatttttttgtctttatagtactttttgtatcttatctttatcacttttttggcttttttttttatctattttcatatttttttttgt

SEQ ID NO: 3345 - DNA, 637 bp, Emericella nidulans
ccaaatgcatgttatggttggggttaatgtgcactcttggcgtaacgtcctagattgcactcggatatcaagtttagactcctagtagtcgtttgatgtactaggggcgctacatagtgtcacttgtatcgagtaaccgtaagtccaattcattctgctagcaaatgttcttattctattgagttatacaatgcttatttgaatcccatatttcggtcggtttttcaatctgcaaaatttaacaaaatcattccgatagctgtttgactatgtaaatatataaatatatatttatataacgacggactcaatttggaaaatctgtgtaggattgctcgcattgatcgtcgtatagcagtagatgtcatttcagctattcctttttttctttcttaattttaatttcagcaacaatgctgcactgatggctcgtgctagacgtacagaatcaacctcttactcgtggtgggcatagcgcttcttggcatcttctagccccaactgactcaaagcatcttgcggttttaattccttccgcaccttccgcaagccactgactttcgaacgactcgttcggaagttttgcaatcgcttacgttgcttcacggaatagaaagttacgctcggaaatgcaaga

SEQ ID NO: 3346 - DNA, 492 bp, Emericella nidulans
cctcttatggccaccagcccatgcgcttgtagctctcgaccatgtctcttctctgtcggggccgaagttcctggttggtttccaaccggtggttgtctcgaataatgtaccatcaagtgacatatcctggtcttggagtacatccctctcgataaaaggactaatcggccctggacgtgtaatgcctttctcttcaatcaggtctgaccagccctgtaatgacacctcgttcatatcgtcaaccacgtcatccaggttcaactttgcgaactgggacgccagggaacctaggaatgagcatttcagaccgaacacctcagtaagagcatcagccacatgttgctggcgagtatcgttgtgatcaacaacgttgaacagaataggggcggagccatcagtgggagcactgtatctccattccgcagctttccacaaagcgctggcggcatccttgacgtagagggtattggtcttcaggtccttggagtaaag

SEQ ID NO: 3347 - DNA, 4640 bp, Emericella nidulans
cattttgaatccaatcagcctctctttcagactctcctggcctctgttcaatttcgtacgttgattgaccagacttggaaagaagttaatgatcgggtatggcgaaacggatcctggaggacaacaatgtcccccggcatttctcagcaaattccgtcttcacggcaagccgtccaaatttgaaagagcttacgatacaatggctaatccgaggttcgtctctaggccgtcttccagctccgagctccgcacccctgctgcgatcgggctgggaagtatccggttgacctggctggcttcaggtgaggcgacgtgttcgagaattgaactatcgagtgctaggaaacaacctgccctgcggccgtcgagaacatagagcctttgaagttcaaggggccgcaagctacctcttacctcactgaataggcttatagtgtactttccgcaaattttgcctgccggtgcgatcctcgacgagctcttacagagtaatctctacatcagatggcttttctggaatattgcaggttgaatacatctctgattttgtggtcattgttatacctaattctctggaggtaggcaccttcgtcccattgacaatggcacaacccctcgactatgactgttatgcggggtcagcagctgctggcagactgttttaagagcattatatgaatacaaggaaggaaatcgattaacaacgtttgtactgttctgctcgcggagcagatctcctctggacgcgacgggtcgatagtcaagaatgttcggtaagcttacagctatgttaacaaccatgagaatcgtcgaacatggacggacatggacggacatagacgagaaaggtgatactaaacccacggatagcaacaacaggaaggtgacagaggccacagaaaggtttgttatctgagaatgagcggagtttttcggtaagctttgagttcagaatctgtccggtgtccgatggcaaagctaacttgtacaaagtgtctgtcttttctgtcgggagagtcgaggctgtacaactttagctagcgagattacgcgctgttggacttctttctctgggacatcccactgctgctggggggttaaggggttccacacctttaatacgacgacccaccctgccgcaagagttaaaaatggtctcataccgatcactatgaaacgtagcctgcagcagcctatgcgctcgatcaatgttacgataatagtcgggcaaatagccctaacagccggggatcatgactaaaagacgtcggattattggctcaacaaatgagccccaaaatacctccgttgcagcttggctccgatgcaatcagcaggctatcaagtaggtctttcgtcctctcgtttgttctaaaacctaccttggcctcggtagacgaagcagtactctgtaatccgtagaagcacgcaccggcccactgactccacagcggctcaaaagcagcaccgggcttggcagagggtcctcgccggcttaatttcttcaccctccagcactttctatacccatcccggttatgtacccatatccgttaccccgtacacattgattacaagaaacaacaatatggctcccttgccaccagacatcatggcaacccaactctcaacaatatatctactagctgccatgttcccctctccgggcgaactcgaactcgacgcgtcaacaaaggaatgcatcgacaaagtgcgagaatggtgcgaaagcgaagatacatccgcagctgcaagtccatccgctatcccatcaagcattctcctcgcagtgcacgccccgctctcaaacacaaatgggaagactattcaggttaacgtctccatccctctgcattcccaggacagccggacggcagatgaagcacccacaataacatattcccttcggcaaccagactggatgtcgaaagcagaggtggcaaaactggcctctggaatgcccgctggtgacgtctttgcggcgttggagtttattcaagaagctactgcgttcctgggggatctgaacgcaacctcaatttgtgaaaacccctcaattcccactcagagtatcagggagccactcgttcgcgtctggttctacttcccctctctctcaacgcgcgcgaaacgcgccgatatggtcaattatgcgccggactacgggctaacgggcttcgttcttgccgggaaaccgggcgttttatgtctggagggtgcgtcgaaggatattgattcgtatatgagctttatcaagacgcactcgtggggggacattcctgcgcatcagaagaaggttagcgagcggtttcgagagacggtgagcgttgagagagtatttgcgggcatggaggagatcacggacagcctgggggaacggggtgggcagagggcgaaccgcggggatatgcaggcattggaggcttggcttgggaggagagggctgggagaggcttttgaaaaggtaattttttaggttggagcttatggtttatgcagcacggatgaggtcttgggagatctttgtaaagaatatctgaagcgagccaaaaactattcgtatagaacaaagcctgtcttatatagttacaacaagttcacccatgatatccatcatagcagtcagtaaaaaggcaggtcatcccggtccaacaaccccacgatattctggctgaaagagaaccagtctcccagattgaacccatccaccgcatcaatggttccatcaccgaagtttgcaccagggctgctagtatcagcttctaatgatgacatgcgcttgttgggtatgcgacctgagattccagcgggtagctgagactgtacaccgaaggcgcagagctgcgcatccacctccatcctgagcctccgctgctcctcactcgagcttgctgttgacatgatgtcacaatagcgctgagcgacggtacaaaacacatggaacaagtggtagtgtttggcaatcgcaggcgaatgcgggcagacagactccattgaggtgacgaaagcttgcatctggctcaggtcttgaaggctgcccgtttcaattacatggcagaatagcacaataaaaggcacaaaggggacgaagagaatagacctagacgaacaatgagttgtaagctaccaaagagtggtgttccagacgtaccacgttatatgcccagataagagatctgtatcggtcgtgccaaactcacgaataaaggactggtggccttccagtgcagcccgtgctgattcaagactttcttcgttgaatgttgaagaagaccccgtttggaccggcatagcgcggtatatcagagtcaacatagactgacggaggacatcttcggatatggtgctggattttatcctttgggcgtgctcctgggttgcggatcgaagccaggattcctgtagaaattattagagcccgtagctacacaaggatagggaggttgtacagtggccatcctgcaatccgtcgagagtccctgcagctgctgcgctagtaccgtcgcacgatgtctccgtacatccactggcagagaaagagagccagcgcaatatagttcctcgtaaattctccctgccaagcgagcaagttccaccaagtacccaaagtactccataagctgagagtccggcgacgagcttgttcgagacgatggcgctgggacggtgatatcgctgtccaggatggtggaagactggccattgcgtaaagatagagtcttctcaagaaagtacaccagccagaacaatagtcccttgctgttgggctggttcgttgatgaatcggtcccgacggatcgagtatggtatcctagaagtcgcgcgctttgagaggcagcattcactagaatggacgccagagagccctttgcattaccaatcgcatatgtggccttcgtgcggtagctgtcagccggaaatgatctgtacgcggaggccggagagggcaagacttactgcaagaacaagagcgaataccatctcgtggcttggctgaatataaagaggcagcctggacagggcggtttctaggttgacacgacaggtggacagtaagttctcgggattatcgtttagggagctgttcgcttgttgttggattacgccagcccaagttgcgaaaacttttgacatggtattagccttgcggttgtcaggcaagacgcgatgatagcgtcactcacagtataaggctgcattgacgataataaactctgcatccgagtactcaggcgagaaatataccttcaggcagagatctgagaggctctctgagcttaaaaacatcttgaaagactccgccagccgttggatatctacgctgtctgtcaaaataaaacgtggttagcatcaatttcccacttaaaccccttgtagcaataaagcaagcaccttgtgcctcccgtaggatgctcacagtcacttcgattggaggcatttcgtactttggcaggcctgcggctggctctaaccgtgcgtgagggaacaaggatgtcgccgcaagcgactggtagctaaacgactctacaaactgaaacctcgtcttcagtaaacatgttccctctccggtgatgtctctctcttgcaagaaaaaaacagcgtagtgtaggaaacggacagcaaacgaagactgccccccc

SEQ ID NO: 3348 - DNA, 1828 bp, Emericella nidulans
actacgagatccacgaatctttattttctcttctctatatctattcagctttctacttttttatcctgtcatttctggcgtgcatggtgcatggtaaaaaaggaatggagcacagcacaaaacttgaattgatcgagccggttttggagttcttggatggattgaatttggattggtggacaaaatcattggactggttgcattcatattgcatttacatttgcattcaccgatcttgcctgtatctagcgttagcctacaaatagctatagcaattaccacatattacttgaaccatcaacatcccctggcattgtatatccttgattctcgtggtaagttggtccaccggcctagaatcttctagcatcgacttccccactcgatatacctaggcaaagagtctaatcaccttatactcaagccggttgcaagttaattaggcgggtccctccaaacaaacaaattgaagttgcgcccgcatatgtagttctgctatcttcgaaatttgtatactctgagtagccttgcaccttaaccgtggcggcgtgcctccacctcgtgccctgcacttcaacagaatgggttcaaaaggtgcagtaccgcaccatccatctgaattgttattaagaagacttgttttggttataagaatttagattattatgtacataattgttcttaataatcggtacgtaccacctagcaatatcgaagaatatcaacatcaatagtcagtatccactcaaccgcccactggggttcatcgggggaaactcgggcttactctagtctctgtccaggaacgaattccagtttcagggcccaagttttgagactggagtttacccggggtctccaggcgtcgggattcgggacacgaggaattcggaggagaggaatgaagtggggatcctcgtggtgggtaagtagatcagtatagtgtatacataagtgtgatggcagtgagagggagactcgattctgaacccccgacattatccaggtagtctagatatgaattgtagtaaatgaagctcatgtttcgttaccctgatcagatcgcttgactgcctgactgcgttctcaggattctgctgacacctgggatttaccagcgaatttaccgaggataagttctatatagatatgtcatgtaagaagaattggtatcaccctcatttttaggtatctaaatcaaaaaaccatctaacccgaacaaagcgacgcccgctataacatacaaaccgacaacccagtgataaatcataatgcaagctcatcatcgtcatcatcccagcccaatgccgaatatatcgatttctccggcgtcacaggcacgacttgcgcctctttaggggcagaagcaagggcagaaacaggacccgacccagaaagattaggttgacgagcggtcaccacagggacaggacctggagcaggtttaggcttcggaggtgtctcaaagaccattgaagagtttgatggggtttttttggtaggtagagcaaagagcggcgggggtggcgggggtaaatttgtttcaatatggcggctgtcgagaggtgtgacagcttctgtagcatctatatgctgtgatcggacgggagtcatgggtcctgtttctgtggtttgagaggctggtcggcggggaacgcggaagaggtttccagtccctggaatcggggtttctgccacggcaggttcggtggtgtctttagatgagctcggaggctgaggtggacggcgtgacggcgtctcttgtaccgcggcatcagttgtaaagggcaaagagctgggcttattggtagatccagggataacttgc

SEQ ID NO: 3349 - DNA, 1578 bp, Emericella nidulans
ataggagggaaattgatgtgaaataaaataagagtaagaaaaataaatttactcgaggtagagataatagaagaggagttgattgaagaggaagataagaagtaagatgaatgagataagttaatgaagaaaaaggagtaggaaaagaggtagtaaaatgtagattagaggggagtaagaaaggggaaatgggaagaggaaggtggaatgatgagggataagaaggagttgatgaagtaagtatatgaatagaggaaggagaaggatatgagataaagaagagtgcgaagattaaagtggagagaagcaggtgaaaaagagataaagagtaaaaacaagaagaggattaagcaagaaggaaaaaattaagggaagagagataatgggtggaaggtccaacaaagtcccccaggagacccttctaaaccatcccgccacagttccagatcccttctttctcagagccccaaaacgcctaccgcggtgggcataacgccctcaaatctcagctggaatgagacgcttgcggactatgccaaagactgggcgaaggggtgtaagtggaagcactctgtacgtaccttattttttttcttgatatatagaatacgtagaatagattttgctgattagagtcccaactggttcttgcaagatagtccggcccgtatggcgaaaaccttgcatacggttacaaaaaggcctcctccgcagtgacggcatggggtgacgaagcagcactttatgatttttccaagccaacgggattcaacgaggacacgggacattttacacagccttgtttgggaacgtacaaagaggtcgggtgcgctgctgttgattgtggattgacggatctggacgatgacgagaaagaaagagcgcaggggtggtatgttgtttgcgagtatatgcctgcagggaatgtggttggagcagatgacgggctggagtatttccgagtaaatgtgcaggagggaagcgaggattctgattcaagttccgaggatgattctgagcacggagacgggggtgagggaagcgatgtttccgattttgggaatagagctagtcgtgggttggtggagtggagtaaagagcgtgttgcatggtgggttgggatagttctatatatactgagctcttcataaaaaaagggggcgctgtagtgaagtacttggtggctcgtcattgctgtcattactcatactaccaacatcatgcatatagatttcccgcagcgggagagatgcaaaatatctattcacttttgaacagtcccagacgaccacccccaaactagaaccacgccaatggaacagcacaaacggcacacaaggagggaggagaagtgggcggcacagagcggaaatggtgggagggcctggatatcgagacggctgacaatatagagaaaaaaaggaagttggaatgaaattagatacgataagacgagataagggtaatcaaccaataatctcctcgctttcgtccagaatctcttccacaatctcttcgaccaccgtctcgcccttgtcctctgtgttggtgggcgcatccttggcagccttgggttgg

SEQ ID NO: 3350 - DNA, 757 bp, Emericella nidulans
tatagtatacagtatgcagtatacagataggtcccgtgtccttttttttctggtttatattccgtctcctctcagcttgcagaggagagaccagtgtcggcaaaatgactactccagcgcaccaggagcccaacgaccctagcaccgtctcagttacggcctcttctccagctccttcgcatcatgtcttcaatgagcagactaattatgtcccaaaaaggacaatcatcaccgtaatatatacggataccccactgttctcagacaatgcaggttaacgcggctgccagatattccttgcctgctcaaccgtcgacctcatagccctaatggaccagaccaccctagcggccagtttgtccatcattggcaacgccttgcacgccagtgacaaggccgcctggatatcaggcgggtatttagtgcacgtctccgtctccctctttatctcatgtcccaatctcgtggacattgtaaacatttggtgaacatgtactcactactatgcacacgcgggcagaacatcaacctgcttccagctcctctatggtcgtctgtcggatatctggtctcgtaaatcggtcctcttcgtcggactggcgatcttcttcatcggctctctcgcgtcgtccctagctcaatctggaacccagctcatcgtcttccgcgccttcactggcgtaggtggcggagccctgatgacggttgcgcagatgactgtaagtgatgtcgtgccccttcgagaacgatggaaata

SEQ ID NO: 3351 - DNA, 2040 bp, Emericella nidulans
  unsure (1)..(2040): unsure at all n locations
ctactcacaacgtaacgtagatctgctctagacgctctagctgtaagccatatagtacgctatggtctcatctccccacccgttcgatctatcatcgaactatattcagcgccttacacccacttgtcgggcagccctgacaatatatattttcccatctggccgtccgagatttcagtccccgtcaagaccatttacggatttacgtttcacagttacacttgcatgaaatgtgaaacggtgaaactactgtagcgtgactggggcaaagtcctctggagcaacctcgctgatagattagggctaaatcacaaatgacccactggtccatctctaggccagatcgtaccaattcttcttgcgtaccataaagctggagtccagccgttgccgtcctagaaatagcaggcccgcagtgaggtggacgacgatgcttctaggtatatgccgtggtatggtcgttctttcctgtttagtggacaagaagctgtcatggacaaggaaggagcgactctggccgttcctgctcatacccttcgcacttgggacttcgcatttctttctgaaccgtgttccttggtatctacatccctatccatccgtccatccatccatgtacctatataaagatagatatatacatgtctctcttcttctatgttcttctctttcttcctcatccccctgtcgaaggacgacggcgctacaaccaacccgatctagagcccagccgtgcctgcctaactacaagctgacgataattcctgtcggcgtccaatgggcactacattggtcctgctctcggctctcaggcatgctctgcacaatttaatgctctgtacagttaatggccgcttaaggctagcctgtcggccgagaagcagtgcctcggctcagagagcctcctactctggaagactctaagaatccaccagatgcctgtcactggcaagctggataagctcattgccggatcagggattattgacagcaaatatacccccggctaccccggccgttcgccaccaataggggcccactgtcatgtctaccctggctaccccggatatcgtatgcacctggacaagccgacccggatatcccgagctgaccaacttcaccagctataacataccttcgctcctactcaggcccagcagactcaccatcaacactggctacaactacaaccacagccagagatgacatcgcttaatattctagtcgtcggcgccggcctctcaggcctcgcaacagccatctcttgcgcccagtccggtcacaccgtcaccgttctcgagcaggccgccgagcttgcagaagtcggcgctggcctgcaagtcacccccaatcgctcccggctcttcaatcactgggtctccgccaatccctctggcgcgaggcccccgagccgaagaccctcaccgtgcatcggtatacgggcgatgtcctagcgcatgacgccttttttgacaagcatatacggcacggctacggcgcaccgttcgtagatgtgcaccgggtggatcttcagcaggcgttgtacgcgcgggcgaaagaactcggtatcgtcgtcgtccttgcagagagggtgaagagcatactagatgcgcgtgatgcagagacctcaactgcgacagtcctcacggagtcaggaaaaacctacacagccgaccttgttgtcgcggcagatgggctctggtcgcgctgccgcgagtgtctcctcaaccgcaaagacgagcccctgccgacgggcgacttggcgtaccggattgtgctgcacattgaccagatttcggatcccaaattgcgcgcatttgtgcaaaacccgcaggtccatttctggattgggccgggggcgcatgttgtctcgtattctatgcgtgggggagacatgatcaatattgtgtgctagtaccagataccctgccccctggagtgtcgagagaggcangctctgtagaagagatgaggggactgtttaaagggtgggatcctgtgtatgtctctcctaccatgtgcaaacatacagacttacaa

SEQ ID NO: 3352 - DNA, 1013 bp, Emericella nidulans
  unsure (1)..(1013): unsure at all n locations
ttctttgcatccagaacgcgcttagcgtcacgtgtcaccagacggcttttccaggcttcttattccatacagttagcaaatgatatctgaagggatggtgtacagaaagatacctactccttcgtctcagacagccgctcatcctattgaccgttctggtacgccaccattccggtcataccacgcacgggtgagctcgactggaacgtcatctaagagtaccagcagtggctatgcaaacgatagacgcacataccccccacaacactcctctaaagccacccagccgcagccgcagcgcagacgccggcacgtcaatgctctagattgtcaggctgaagagaaatgtagcagctcggcgttgattggcggtggtacaacatgactggatacaggcagtgcggcaatgaagggtaactaaggattgaagtttgatgttaggtgttggtgaaaattaccctgagccccggctttcgatatcatatccaaattctccacaacaaaagccataaaccgcacagagagactggggtcattatcttgaagcggcaaagtgatggggctgcgaagaatgtctgaattacggtggctttttagcagcctaggtgtcaagcttggattatgactgtcaaactaaggcgcgtgtctatttgaataacctcaactgtaccgtattaggaagccacaacccggcggtccgcttcttcaaccttcgtcagagccgacctattgattcagctctatagccagctgtcatcagttcatggcagacgctaattaggttaaccttcaaatcatggattcacactattaccgagtcctacaccaccctaacttatgactagtgtacaacattcccagaacaagtctaacaagctagtgccccccgcccatacccctctcccaattctcttccacaacaccccaatacctctcgcgactcctaactctacaccccttcccccacttgaccatgacatggaaaacagccgaacatgccatgcncacaaacg

SEQ ID NO: 3353 - DNA, 665 bp, Emericella nidulans
attgtctgagtaagttgtcttctgttggtaaagacttgaatatatctgatgtggcaatcttttctctatgcacctttctttataaacatctaccactctctgtacgctcccagcatgattttgatgtactctccattgagaaggctacggacggatgagaggggtcatcagtgctagcaatagaccattcggaaagaacggcataactggggtattgttggggtaattccttaatgggcgccagcatatggacacgttatggcgtcaggccaggtgctgttcttctattcttctctccatccaccgtcctaccaactttgttcgggcttcctgttctatataagtagctctgagttttgatgtaggctaatatagagatgcccacggctgcggcagtagagttgggcttcggcataagtactgcggatagttggcgacataatcgccgaggataattgagctttagccggcaggccatataaaggccgatctccccgcagaatctcttaaacacaatcattacacgcaagagaacaactacatgtatacccgcaaagacgttgcccaccataacgcccggcactcatgctaagacattgtcagcaaccatgtctacgacgtgaccaagttcctcgacgcgcgcctccgtcggcacaagcgccatt

SEQ ID NO: 3354 - DNA, 757 bp, Emericella nidulans
ccaaattgagcccttcacattaaccacaaaccggtcaaagtaagttcaaatactgtccccatctccaccatcgtaagggtagcactagccaaatcaaggcatgatcagaatgcacctcctgtctatatgaatgcctgctgcactggcaacatctcaaattccctagatacactctgaggttcagcatgctcaagaaccatgtaaccaagtattagaaacttgcggatccccgtctgtacgcaagctcacgaaaagctagcaaatgactccaaacatgctgcagtatcattgacttgaagggcgttggtattacaaacgccccgtccgtgtacggctatctcaaaatgacttccgccgtctctcaaaactactatcccgagcgacttggaaagctgtatttgatcaatgccccgtcggctttcagcaccgttttcagcgtagtaaagagcttcctggaccctgtcactgttaacaagattcatgtccttggctccggataccaatccgagctgctgaagcaagttcccaaagagaatctcccccagcagtacggtggcacctgtcagtgtgagggaggatgcgagtacagtgatatgggcccgtggcgggaacccgaatgggcgtagagaaccgaagtgggcaaaccccaagggaaacaagggcgatgtccggctgagaacctgtcgcagaaaagccgacagaggcgccggacgccctcaacccgcggcatagagtcattactaggggctttgtctca

SEQ ID NO: 3355 - DNA, 4805 bp, Emericella nidulans
acaacagcctggagacccggatgactgatcatgtcctcgtagttggtgtacagcgtaacgccgtacggctcgagatgctgctttgcccattggacctcctcaggatcaggggagaacgcagcaactagctcagcgcgcggggcgcggttgaggaagttcagggcatggcgtttgcccatgcggccgaggccagcggcgccgacttgcagttttttgggggacatcctcttatagaagaatagttaaagtgctgtaatactgtctctcttgatttagacagcagggacggggccatgaagggctttatagctttggattccctggccaggtctcctcttcaccttttcatgcatcctcatgcatccccgttatggtcatgtacgttttggagcatatcctttggtgctttttccctctgtaccgaatagggctacctagtgcgctgtgctcggaagcttattgcctaatccactggaactggtagctttcgcccgaatacagctcggaggaaatccgacactaaccccataatctagaataggaaaattatacccgggccagcgaactaaactagtggactgactcctatttccaatagccccgtggggtgctgctcgctctcgcacgctgtgctggaacgcaaggtgtggggaaatgtacgaagacttctaatagaaatttcctcagcttaaagattcagcgcgccccccattaggcaacatcatgcacccttaaagactttggttgctctaaatgaaacatgcgaacacttagcggagagttttgaaacccatcaagggaaatcagaaaaatatagaaatgacgtcaaacaaaccacatcatggcccagcagcagtaaacccacataaacccagcaatattgcacagccgtatcaggatcatgagagagtaaacttcagagtctgtgggttgcagagcccggcaacgatgttgcgttgctcagcaccccagaaaaagaggatatcaggactagaacaagcctgtaacttcttgtgcatagtgcataaatatctccatagcatcgggcgcgatctcgcctataggcatgatcctcacattgtgctcgacagtataaatcttgccaaagttgagcctcgacatcgaatcaagtcttccagtttcagctgccagaactactggcaatggccccatggtcataggtggctcatccgtcctaataattggcgttgtcccgcgttcatagagcacaacatgctgtgacggattgaggccagacttcttcaacccccgtcctccatacgtagtgattgcgctgaatccaaattagttgtgtatttggggtgaccgagtacttacaagcaccatgaaacttgctctattttcctgaacaccaccatgcggcggatggtgctgtatataggttccccgaacctcccgatatactgtgggcctcgctccaagacagaagaacgggcagccgagccataactagggctctcatgccacaagattgcaaaaatctatactttgcaagttagtacccagaaaactgcggccgccagggacgctgagtgcttgcctttccggggctaaagaagtgtggtgactggacggtgtatcctacaacgttgtcagtaatcatgagggtaatggaaagtgccgcattactgacgagggtcgagtacaccattagcgctcaagtgtggaagctgcaagtaatttagtgtgcttgttccaaaaacgaagtctcgctgaagctcacggccggctgaggtggcactggatcgtcccttgctctattatcctgtggctccaaatgtgagcattgagtaatcgaaggttcacagggtatccataccccgagcatctccacagttgcaggagtctacactcgaaaacaggttagcaaatattgatgtttacacagctgttgagtgatatcaggggcgtttgttatggaaacgaccaggaaacgggccaagagcggccattcctttttcttaatatcactgttttttcttctatctcttttatacatttccatttgaggtctggagtcaagagaataacaatgtgacttaccccgctgatcgttgcatctcttacaaaatcgacgtggactattatatcattatagagactgtcgtagtccaggggaatcgggtgcccattcgggtctgtgtatttgaagacagtctctggaggcagtctatataccgttttcaggtgagctgcacttaccgtttccaccacgtcctcgggacggagctgtatacgcgtgacaccaaacccacacgcagtgaggtccaggtgtattgtctttgtatgtgctgcccattcatcgtcaaaatcagagtcttccgaaccgctgtcccagtctatagacccaatattggcactgttggagtgtcccgctgcatcctggtcggtattagtggctttcgtgttaccagaaaagacaaaacaagcaatgtgccgtaaatggcttgcaatgtggtgagctgttgagtctgcgcgtgtacatatcggacaggttcgtgttgctgtaggttgaatgccatggctggatgactcatgggatgcccaatcagtgaaggtatcatattgttggtcggcatccttgcaattcttgaacgtgcaaatatacggtcgaaggtcgcgcagaatatgtctcctagcaatacgtcagctattgtcggccagccccctgtgcaagcacgtatctcacctccatgcatggggtctcgctgtctcctctgcacagatggtaaagcagtaggggcattcaaactcgggactgtcagcgtccaccactggaggggctggaagttcaagaggatcaaaggtgccaccggaagtgacaacaaaagtatccgttgacactgtcgactcagtctctagtatgaccgatgtgtttggactggtggcagtagacggctcagaaggccgagtgttcctctggatggaagtcgtttctagctccctcaaccagcgacaaccagtcgcgacgttgtgataatattggtatttaattttccgcctctcccagtatctgaactgttttctgcgattcatattggctctcgccaggcgctcgaccataaactgaggaccagcctcatcgcctactctccaggttcgaaagagctcctctaggcgacgggaatctctttccatatatgcttccatcagatcaacacccgtctcactatccacctctttataggacaacgcctttgagagcccagttcgcattttgggattgcggaccctgaacgagagtgcgtaaagccgattgaccgtggtagagatatttgtcagatactggtcgggcaatgacccctcctgataggatgaaaagtcttcggactcgtcatcactcagggttagatcatcaaaatcatcaacaattgcctcctgggaatggggtcctggcgcaacctgcagggcgactttccctcagttcaaatgggttagtatcgccgcctttcaatggacgcatggcaagcttacaagcagacagggcttcactgaggtcgtataacaggttagatgtgtactcaaacaatggggatgagtctcgaaaccggtagtcgagtgagctgtgcccatcgtggaaaacacccaggtttgatgcccatatgtcgaaccgttgagcctcgttgagaaaccgtcgcagatgattcgtattcatggtctggctcagaacgcgaaatcgtgtacttatttcattgccaataaagcgaagggaagactggggggtggtagtttcatccatatccacgggctcacagatttgggggcaaattttggagtgacgctacccccgagacgtcaaaaaagaggtggtgttcgaatcacttttaagatatgagggagaatgaaggacaaagattacagacagctaaaagaggggcccccggctcaaacaggtggtgtgctggtcgtcagacctctcattgattcgtcagtgtcagctataaattacaaaccgctggccacaaggctggacaaaaccccgcacctggacaaaaggcatcttagcctcgtatctccttcgttgccgctcctgccatggtgctatactgcgacgatgagcggactagaggtcgttggtgttgtcctaggtgcaatcccaatcgtcgtcatggccgtcgagaagtatcggagaaggaaaactcgtattgcctttcgacacaaggaggtctatgtcatacgcttgatacagtctctcagagaccagcactacctcctcgtcagtgacatcagattgaccttgaatggtgctggcgtgaactacgatacgttgtccacagaccgacttccagcgctcttccgcgaccacaatatcgcggaatcagtcaaagattatctgggaagcgactctcatgtgtacttccaggccgtggataggtgtcactctgtgctcagcgcgctgatgagaaggatcaaaggtctcgaatcggcctcggtgagttggattagcgccgtcaactgagctaggttaatataatggggaattttgctaaaagatgatggtgccaacaaacaggacctggacagccttgtgagaacctacggaggccagtgccaactgccagaaatatccggtttcccgtcaagcgagacgagctagataatcagatacaggatctggacagtgcgactatgatgctgaggagaatcagtgcaacatggcggcgctgagagtccaaatttccctgcaaaccaagtcgagacagatttcgagatacacttgggcgttgaacaccgtccgcaaccacgcgaagcgcctctactcggcggtggcagcggcctatcca

SEQ ID NO: 3356 - DNA, 724 bp, Emericella nidulans
aagtgagttgtcagtagtgattcatgctaaaatgtccttagtcatctggagtagacaagtcctcgtaatcgcgaggaataagtgtcagcctcggttagaaactgttcttggcattgtacgtcataggtttatggtctgtctagcagacgctccatctcatcacatgttttcaagcggtgcattttgataatgagcgacaaatgctgaagtaggtcagcttccatatgtagacacgcatcaccgtttctagctcgagggccaccgcttgtgcaaagtagtaacttcttgccatcacgctcttttcagtccgttgttccgcataatcacagtcgtaatgcgtgtgtttgaatgccttgagccttgcctgtggctcttttgaacaaatcttgccagaggaatcagtcgagaaggctgagattagagctgttgacgtgcgcagggtcaaaggccttgggatcgactgccagagaacgaatggttggaacaaagatcttttgtgagccttagaggcatttgactacaagatctgctcattgaaccacattcggtctgcttcgtgagttcagagtgagcctcaacggtccagttgctgatgtcgtgaagtcgtcgagacaatagctgacattctctgcttgagcctcggaagcccatgaatgaagcatgcatccacgcactgctacattgtcgacagtatcaccatttgatcgagaaggacgaatgttgc

SEQ ID NO: 3357 - DNA, 1092 bp, Emericella nidulans
gtttttaatcttttcagctgtgcgagtggatgtcgtcagtgcggaaataatgctcagtttgttttcgggcattgacaaggtgatcatgtcgctagggaagctatcgagtaatgggtactgtagtggcgtgtggaatctagacgacaggaatacctgtgtcagcatctcaaaaaacggaacacgccgttcaaacaactcacctatggaacattggctctgatttgtaaacccgcatcttccttacaaaccccagatctgcttcagccaattcttcctctttatcatctggctcgagacctcgcaagacttgcacctgattgagaacgtgcgatttattgctgcctgaatcatatgtaaaatccaagtcaaattcggttcttaccattgaccctgacttgcaggattcgactttattgggttgcttcgacgcctgccgttgcacattcctatggtcctttgctggcgggacaattgaggcctgtagctcaaatatacgccgagtgctgtcatcgcctgctagcaaggactcgaaattctggtacggccgtagtcgggttggaagagtaatgctttccatggcaatgctggtcaatgccgatgtgtaccattcagaattattgtcgacccgtatggtgctcggtaatcgactgggaggatctataatgggcgtgtacatcgtcgcttcaggcgacatagagtacactgaccgagctttatttgtttcacgtttcagtttggcagtctgtgaaggccgtcatgaataagctgtctttccaggtaattaggccggttttaggccggttgtatgacttgcttgatgaatccttgaaccatcttcaatagcccacagcaggacggccttctttccgtactcatcaactagcctgtccacatacctggctgtgaagccgccccgagcatcatcagatgaagtgaatatgtgcaaggccagtagctggtcacacttttctgcaaatggacgaccgtcccggtcgagcaaatcatgctccttgtcgagctcgttaaagagatcctccccgaggaaacagtcgacaaacggcataaatgcgcacttgagctcgtaatcattga

SEQ ID NO: 3358 - DNA, 4197 bp, Emericella nidulans
aacacttgggcccagtatttcaccaatgccattccagactaccgccgtgccggtatcatgtcgctaggcatgattgtggagggcgcccctgatttcatcagcacccagatgaaggaaatcatgcccattgttctccagctccttgctgacggcgagctcaaggttcgccaggccaccctgcatgccgttgcgcgcttggccgacgatcttactgaagatctcaatcgcgaccacgagaagctcatgcctctgctcttccagaaccttgccagcgctatgcaggagtccaagggcgaggaggaaggccccactgttgacatcatgaaggctggtctcagtgctattgatgccgttgttgatggactcgacgagaaggacgttgctccctaccagaacgagcttgtccccatccttcaccagctcttcaagcaccccaactacagaatcaagggtctcgctgctggtgcccttggctctctcgcttcttctgctggcgaggcgttcctccccttctttgacgactctatgcacctactccaggaatttgccaccgttaaggacagcgaggagcagcttgaccttcgcgccagtgtgaccgatgccatgggtgagatgtccgctgctgccggccctgagcgttaccaggcttacgttgagcctttaatgcgcgccactgaggaggctcttcaccttggacactctcgtcttaaggagagtacctacattttctggggcgctatggccaaggtctacggcgagcacttcgctaccttccttgacggtgctgtcaagggtctcttcaactgtctggagcaggatgacgatgaccttgagctctctctcggtgaggccgccaaggacctcattggccaggaggtgaccgttgccggccgcaaggtcaaggttgccagcgctgaggacgacgatgacgagcccgtcggcgaggatggcgagattgaagacgtcgatcttgacgatgaggatgactgggacgacattaccgccaccactcctctagccctcgagaaggagattgcgattgagatcattggtgatctcgtcacgcacacccgtagcgcctaccttccctactttgagaagaccattgagatggttatgcctcttgttgagcacccttacgagggtgtccgcaaggctaccatcagcactatgcaccgctcctatgccatgctcttcaccattgctgaggagtccggccagatgcccaagtggaagcccggtcttcccctccaggttgagcccgccaaggaggttaagaagtttggtgagattctcatgactgcgaccatcaagatgtggactgaggaagatgatcggtatgtcaacttgagctttatttctatacccttcccaaaatcatatgatgaaaacactcgtttaacccagctcactttgacgcacaagttgcgattgatgtgaaagacgtttatctactcctgatgattcattattctgcctattatttgttacgtggcgttttgtgaccactgctaactcgcataaaccagatccactgtcgctgacatcaaccgcaacatggctgagaacctccgcttctgcggtcctgctctcattgccaacgagactactttgcacaacgtcatccagatgattaccgacattatcaccaagaagcacccttgccagctcgagttcgctgaggaggatgttgatgctggcgaggaaacttctgagttcgactggattgtcgttgataccgcccttgacgttgtctccggtatggctgctgctcttggcgagagcttcgccgagctctggaaggtattcgagaagatcgtccctccgctacgccggcagcaccgaatccattgagcgtgccactgcggttggtgtccttgccgagtgtatcaacggcatgggtgctgcctctacccagttcacccctgccttcctcaagctccttgtccaccgcctgagcgacgaggaccctcagaccaagtccaacgcagcttacgctgtcggccgcctcatcgaacactcgaactcgctgaggttgtcaaagagtttcccaccatcctcagtcgtctcgagcaatgccttcaccaggatgtctcccgcctccaggacaacgccactggctgcttgtctcgcatgattctcaagcaccgcgagagcgttcccatcaaggacgtccttcccgtcctcgtcaacatccttcccctgaagaacgactacgaggagaacgaccccctgtaccgcatgatctgccagatgtacaaatgggaggacccgactatccgtgagctcacgccgcagttcctccccgtcttccagtccgtcctttgcggcgataccgaccagctagaggacgagcgccgggctgaactcatcgagctcgtcaagtggctgaaccagatgcagcctggtgctgccccctgggctgagcagctgtaatgctgtaacgcgcttcgcctcgcttgctatgatgagttacggacgccaacaacttaacgtaatggatactggatagactggacatgttttggacgattactagaaagataccctagcgccgggccggtgagcctgcgcaatgaccacggactgccacagtgtatgggctatggcaacgacttatgatggaagataacagaaaagtttgtatatactgttagaatcatgtctttccttatttccttataaccagattgtgtgcctgccttctctcctttatggctgcctacacagtgtaatcaaatagtgaggcagatgctaagcccgcgctattattagctcgcgccttagtactgccacgtgagcattctgaccgacccaccgcctttcttaagccctgcgtcatcgttcccgtttatctcgattcaatattctccttcgattcattccacggttccctgtggcaaacaatttaagctgagctgatcccaaccctaccttctcacgctcagaaaaccaacaaagtgcaccatgccctccatcacgacacccctgaactggactctcccttcctcgggctccagctccggctcttcaatcaccaagcccatcaagactgtctctaagccctgttttggctgtgactgcggggataccgagtgcgatttttgtatctgtaccgttatgtgaggggatagctaggtatggcgtctgtattccctctgggcatgagttgagtaattaacaagaattttgtagttgcgcgttctggttcagctgggtggatggcggaggtagtgaaagcagtggacagtgtcttaacagatgggctgtggtttataagctcactgaagtttttgcaaagcccttttagtttatatccaagctataagttgttcttgggccaatgccatcttattttcttgtattgtttctctagtgtactagcagacaagttctcttatgagggttgctatcggaagctcccgctaagactcagccgcaaacataccacctctagtatactgtccagcagggagacagacatgttgaagaagtttcagttctcagctattgagctagcgttcggtattgctttcggactacaagatcctacacagcacagcggatttggaggcggtctcccgcagcgcccttcgacaacattaactccacctctgcggggtgctcaggtatactctcttcgactacttcccaattaccatcacaaacctcttacatccctctctgttgcaatccgtcttgccggcttctgagtataaatcatggatatcgcggacgcacttcaaacgcaccccaccgccataaaatgcatcgacatgcatacaaccggcgagccaacacgtatcatctattccggtttcccgcaattacgcggcaccactcttctcgacaagcgcgacgatgctcagtcgcgctacgaccacctccgtaaacgactcatgcttgaaccgcgcggccacagcgacatgtacggcgctattttggtggctgatacggaactcgtgcagaaaggggatgcgcatatcggcgtgttatttacacatgcaggtggattctcgactatgtgcgggcatgcgactattgccctgggaaggtttctggttgatacggacgatcgaaatgttttcccaaagaggggccacttggtagttgattacgaaaagaaagaggtcgaggttcggattcatgcgccttgtggggttgtgacggtttcggtaccggtcattagtgatgagc

SEQ ID NO: 3359 - DNA, 4732 bp, Emericella nidulans
gcacggaggcggttggcatcgagatcctccaggtcgatttcattgagatcaatacccttgacgccgctcttcagttcttcaagttgcttcttgagttcctgctgacggatgcggtcttgctcatccttgatgcgcttcagctcgcgctcacgctgctcttcagcaagtcgctgcttctcagcctcctggagttgctgtgtgcggatgcgcttgcgagtttcctcctccttttgcttgcgctgcagggcatctgtagcagcctccttcttcttctcaatgatgacacgacgttcgagagtgtcctcgtgttccttggcagcaccagccgcagcgcgagtaagagcggcctgcttggcttggagacgagagtcgttgtatgacgggtcgacatacatgcatgtgacgtgaagggtcttagccagacgggtgagctgcaggcgggcaatttcagcaggggtgttctggagacgctgtaccgagccgagttcgctttctgcggaaccggcagcgctgccagagtgcaaagccttggcggatgagaaaacgtcggtgtcaaaggtgaggacaccggagatgtggtcgacacgaatggcaaggtcacccttcttgcaaccgttcatgatgaacttttcaatcatggaaggagtaatctggaaggggtcggggaactgagcaagttcgtaaacgaacttaagctcaaccgactcgtagacctgcgagagctgctggaagagacgggtgaggatgacctgctgtagagggacaacatacttctccatctcgggatcatcaccgatcttcttgaggatgggggtgaccttcttacagatagacagggggtggaagtcaacttccagaatgttgtaaagttcacgaatctcggggcggacacgcttgagcaagcccttgttcagggcatctctgaataggacagcacgagtggggctttgcaacattccgagcaggttagtgagacgagtgttcttgttcttacggacctcgtccacgtcaattagcgcgccccgcgagcgagacgtgctgatgacggggatggccagggcagatagaagaacaaaggaagcggccttcgtcatatcggcctcggtaactgaagggtggtccttcttggaaccctggttggtggaaagtgtgacggcggattgacggaggaggttgtagtaacggctccaggcagcagcgtggaatagatagttctcgctaacaaggaaaatacgagccagcttctcgtagtagttggccatcataacgttcttagcggggcgcttgctgaggctcaagagagtatggatatcctcgatgctgcggaaagcttcctgccagagttccagctccacggcaacgttaagctgctggaacctagtgtccaagtgacgctgcagagtatccgggtcgctgaggttaatagcgtgcatctgggcagagtacttggcggcgttctgaacatggttgcggagaagttcgcagagtctgcggaactcggtcttgcgggtgtacttcaagcagaactggaaagcctgtagagcggtggtctggtacatgatctccaagcgagcgttgttcttcaggatctccaaaacagttcggtacgtctcccacaggaacttgagccatggggtaaccacggcacggtcggttcggtcacgggactgctcaccagaaacggtagcaaggagaatagtctcgggggtctcgattgcttccagatcttcaacgttggacgagggagcggccgactcgagggatgactgaatctcatcggccttagcctgggcctcagtcaccttcttctccgcaagctcgatgaacttcttgagaacgatctgcataatcttattagaccaccgccaacccacaatatcatcctggcttttcatacctcgatagttcccacattggagttctgagcgatgtttttgtactgatacaggccatccttggcagccttacctttgcggagatcgacgcacagctcaacaaagaggagcatgaccggctcgagagacgcgatcgggctgctgcgcgtccgcttggacgtagcatgttcgtggaggacggtcagggcggccggagcctggcccacggcgataagttcctgggccctcttcaggcgaaatgcacgttagaaccaacatgcccgtaaattattttgttccctcccagacttcagaggcggttgcaacctactttcaggacattttcaggtttgatatgcggcggaggcggcatgatgggcgatgtaataagcgatgtttagtattctcagtagggcacacaagtcgttaaagcgaactcgacaagggataggcgcaggtcgagtcaaaaatgcgcaacttgcgggcagcagatttgacagccaaaagtccctgattagatgatgctgccacgcgacggttggcctggacgtgggaggggaggcgtcggtggttgtgcgagagccagaaaaaaacccaaaccacagcccgccgcctactccctccgctttggggttaagcgattaagtcacatgactcatatatactccagtatctcaaccgtccacgaactataaactacgtcgcactcatgtacattctggcattttgaccggtctgcaatgtcctggggagctctgtaaggagcatctgtgcttcagtagaacgcgattgggtctttatccgtgcacaacgagggaggtgacttcaaaagaggactcagtacttactctgctgtcgtctatacgtccgccccagaactggggcccccctcatctactgtcatagctctgtgattttcgcaagcgatgccaatttcaaatataacaactgcaagacgcttgaactgttgacagataccaatgatattaaccaagcagtcaagatcacgtgaggcatatgaaacgccggtcacgtttggtatgtatccggttgggggctctccacacaaagctcaagcttctccagaaatatttgtagggcaacataacaattgacgttgaaatcggcacagtcttaaggggggtatctataatagattttagggcctcccggataataaacgaaaaagaaaaacaaaggctgatcgtcagccgttgatgagcatctggagagaaggaccaggattcagggggcctgggaaggttaggccggtggaggctaacacactttgttcagtacgcggtatcaacaatacaagtaatacaagaagataggagagccccctcatctagtgtcctgtaagacggtaattcggcgtacatacctctcataagcatcagcttgaccctggttcatccatcccgttcagtccgagtgccaggctcttccctcgctcctcttgtcgctctcttgatctctcgatcttttccttcgtcttcatccttccattattcttctattagctttctagtcgcttttcttttatctaccttccttctcgtcgcctcttcctccgaagaataataacgtccgctcgctccctccctgacgccagccctccacccactctcctttccccggcctcgcgtccgacctcaccaccctccccttactccggtcacccggaagcgcaatcaatcgggaaactctgcgacgtgaaaatcaagagcgtcctaaagttattaccgcccttaccgctgtcgcttactggtcgaactccgctcgcgacctctcacgaccgcccacaaaatgcctgcctacgagcttcgatctggaggggacgtcaagaacaagaagcagagtgtggccgacctcaagtaccgccgattgacagagctcaatgcccgcctgaaggaggatctcgaccgtccccgagtcaaggtgtcagaggctgccatgtcgtaagtccaacatcgcgcccgccagcaattggtccttgtcgcagtcgctgatcgcattgcttttgccaggctgatcaattactgcaacaatactcgtgacttcatggtaccgtcggtatggggacaggtatgcaactcttactccgaaaagaatttccttctctaatgccgcccaggtcgacaagcgtgaagacccatacgcaccccaacagcagggaggctgctgtacgatcatgtaatgcctcatgacacatatactagtatggtccgaagcagacctatcgcgttgatgggcattgatacccccggccgctatgaccttacctttctattccctaattccgtgccttggatctctcacattttcgaatgcgctgcctcacggcttgtatcacacgaaacccggcaaccgcattgacattttcgaagctctatagccaaccggattacgcgcgctggccttgcacgccttcggaaatgctgacaagcggagttcatatgtcgctctatacagttggattactgtggatgattattgtccgcgagatagccttgatcttattccttcacattctggtcaaaactttttccacaattcccttttcgtcggttttctttctgcgtttcttctctttcgatctattttcgcaatttcctatgtcgcggtggatggggttctacggttcaaaaacgaaacaacgtctagcaagctttaacatggactggtcgttccacatcttggtcttgattctgtcgcagcccgcttgtaaattagaacagctgcttctgcttctacactagtatctacgagcttaaagcatctaatgcaggtacaaccgtaacacttacacaacacaaacattcgagtaccgtagctatgtataaatcgagggcctc

SEQ ID NO: 3360 - DNA, 571 bp, Emericella nidulans
ttaatggacgcctgaacaagtaaggagacccaagctccagcaaggccgattcatccgtaaccatgataacaatcctcaccctcgtctcgttaccccttcgcccagttaaccacgatctactataggattttatcgacatcagctggccaagaacgactcttcgccttcatccaatacacttcccatatcctccaccacctgcttgcgtccgcgccctgggtcgcgctccaaacccgcctcagcctccttgcgcgtctccgctcaagcagcagcagcagccccagcgcctctagcctcaaccggaaaagcagcagccccatcaacagcgacacagaaaccccggctcctcgccctgaatccctcatgtcagaagcccgatatatgctgcgcctccttgttctacccacgatcatagcttggggctccgggacgctgaattctccgccagcgggcgaaaccatgtacgccttgggtgtcctccaagatctcgcataaataaaccccccagcactcgagtctgccgctttcctaaagaagggaggtgtaatacctgagaagattcctcaagctc

SEQ ID NO: 3361 - DNA, 296 bp, Emericella nidulans
gccggtgaaaggctcccgtatctagcatatctacacaaattgtgctgcctaagcaggatttaaagtcagcagcgtgattagcccgcccagcaagctatgctgacatatgagcctcgtttcaagttaaatcgccgtgctgacgctgaccctagctccagattctgcgcgtccaactcgagtctgttgcggttgccggtcccttcgctgtagatacacagcaagacccagcgtgcccactacacggacgatcaaccccactgttagggagttaccgactaagaccggagcgtacttga

SEQ ID NO: 3362 - DNA, 2039 bp, Emericella nidulans
tagatcgcgcgccgaattaaccctactaaagggatcagagtaggcgtaaggtagatacccttttcaaccatgatcctggccacctcctcagtcacgaaatttccatgctcaatacccttcaccccattctcgattgcatgcagcatggctttaggcgtataggcgtgggccgtgacatacgtccccgcgttctctgcacactccacgatggcctggatctcctgcctcgtgaactgtagctgctccaatcgatccgtcggcgttgacaccccgccactgcccatgatcttaatgaaatccgcgccagaccggatctcctcccgcacggccgtcatacaagcaggcaccccgtcgcagatccggccgagtccgttcgtgtgccccgcgcagcactgaacatggtcatgcgccgagcggatatccccgtgcccgcctgattgcgacagtgcgtgtccggcaatgaagagtctcgggccaggaaagacaccctcctcgattgcttgtttgaaagcgagctgggcgccgccgcaatcgcggacggatgtgaacccgcgatgcagcatctgcgctgcgacatatggctgacgtagaagcgatacgtcgttgaagttcccaaaatgcagtggagagactgggcaagcctgggactgtccacgaagtggacgtgcgcatcgaagaggcccgggctgatgtagaggcctgcgcagtcgacggtgatgtaagactctggtaattcggcgtcgagaggacggctggacgaaacagaggttattctgccattttttatcatcacataatgattctcttttataacaccagctgcgacatcgacgatgtttgctgcgctgaggaggtacgactgaggcgggggccggagccagggcttgatatctgcgtctgttaccgaggccattgcaacaagctctgaatgctaaaaggaaacaaacaagttccagtcaatggggagaagagatgataacaagcgtactatcatgcggagtagttggtgggttaaatgggttgtcggcagtctgcacccgacgtcggcaacctgcattcgaccattattggagttcctccccggggttgaaccgtccactcacaaccattcccaacgctaatcgctgatcaaccactgttatcgttgccagtcatttggagagctaacgatagccgacatggagcggctcgagtcagtcgagactgccctactttataagggctctccttcccgtgctagcctcgcccagtacctgcctgtcgcccaattcaaagtcaacatggacgcttacgacacaaaagtccgtccttcagaggagaagagacggtccagtgacaatgacaatgtcaatggcatagtcgagacatacaccgaagaagaggagagggcgctcgtgcgcaagctcgacatggtcatcttgcctttcgtacgcgccccgaacccaggacaaacagaaacatactaacactgagaactctagatgtgcctcgtattccttctgcaatacctcgataagcaatcccttagctatgcgggtgtcttcggcctcatcacggatctgaacctcacgaacagtcagtactcctggtgcagctcgatcttctacatcggccagctagtggccgagtaccctttcatctacctgatgagccggttgccactaacaaagttcgtcggcgcgacggtcatcctctggggcataacagtgcgcgtcctcgcggcgccgcaaaactacccaggttcgccgccgtccgatttctgctagggttcaccgagggagccgtttcgccggcttttgtgaccattacctctatctggtacaggaagcatgagcacgcgttgcggacggggctgtgggtgtctatgaacggtatcgcgcaggtagtcgggtgtctgctcatgtacgggattgggaggaacggaagtcttgcgctgcgccatggcgcacgctcttcattatctgcggcgcgctgacaatcgccgcgggcatcgccttttttattcttatgccttctgggccaaaggacgcgtggttttt

SEQ ID NO: 3363 - DNA, 898 bp, Emericella nidulans
ggacggtgtttcctggcccaagtacccggctcatagggccagctgattgttagctacacgcccgctttaccgttcttcgaccccggcggcggcatatccagaaaagcgaacataaaatagccatcttgcacgggatcccggcatggaagagatgcggatcgaccctcaaacaagccttcagctcttcaagaggatattcagagcggcaattgagcatgcgtatgggcaattgggtgtttttggaattctccgcgccatacacaaaccggcgcacgacggaatttgtgccatctgcgccgatgaggagatatcccgtctcctgatcaccattttcaatgtgagcccgaactgtatcatcggtgtggaaacgtaatctgcgacagacggtgcgagtagtgaatatctaggttggtcatgggcagctgtaggatcgtaactcgcgacatgcgcgccgccttccgccgggagatattgtagttttgagcgcgggctctccagtgtgaaggttcagtaaggtaaatgagcctgtccggctgtttttattgcatccggagtgcccacgcactcgcacattcgtgagtatagttcctccggcaaaatgtggtagagaagctgcagcgcccagtggatgttcatactgaacccaccgccgcggtagtacgaggattcgtcgcgctcgtgaatcatgaatgtgaagggcccggactggccttctgcctccagtcgcgcgttgagcttttgcagcccctgcgcaagcagaagtcttgttagacctgcaccgatgatgatgatatgtgtttgcttgggcccctcatggtgttccccttctccgtacagaacaaccttcaccagtttcatgtacatcatcgtacagccattccggggtgggtgctgttca

SEQ ID NO: 3364 - DNA, 468 bp, Emericella nidulans
tcaaggtggagtctaatatgagatggaggtcagtttttccgtggaagtgcaaaaagatctatgacgtgagctgacgctgtgctaggagggaggtagcaaaagcgcatatggcgcccaacgagtcaccgattactcttactactttccccagactgggcacgaaggatgattacattcagccttattaccctccatctgggccagctctgcggtctcaatttgttccagacgagattgcgaaccctcacatcaggtttccaacactggcggcaaatattagagcaaggaggggccggaaagttgagttgaatgtgccagtgtttaaagacaaaaatactcctgagccgtttaaggacccaacggtaaactatgatcttcataattggcctgaagatgacgatgtgcgaaatggagctgcaaaagatggtcatgtctacatggacgcaatggcgtttggcatgggcagtt

SEQ ID NO: 3365 - DNA, 809 bp, Emericella nidulans
  unsure (1)..(809): unsure at all n locations
tgacccagaattggtcgccaaagcagtgggcctctgaacttgctttgaaacggggccggcccagaaaacttattgaggatggtggtctaaatgcagaagaggtaaggcgcatccagagacctgaagactgggtattgcatcgcattgtgtttttgatgtaaccatatcagcgccgtcgcacccaagtccgcatggcgcagcgcgcctaccgttcccgcaaagaggcaagtgtctccttgctgaaagagcgcatcggtcagctcgaggcaccaatgaagcagaacagcacggctgtgatctcgtttggcgacgatctcgtccgctcgggagctctagacacgcatccggagctgctcaagccgctcgggaatacagtgcaggcttgcttggcgctgccggcgatccctcataacgagagtgtcgccggctccccgttcgataataccggccacaagcgggggatgcttccgttatcgtctagctctagttcggacggtacgacgggggatgcaatgaccatgtccatccccgagttcatcgaccgcttgcacgtaacctgcagctaccaagcgtacctcgttactgcgaacccgtcggtcccacagcggcgcatcgagcggccgttccgtatcctgctatctcttatgccccgcgcctttgtggccgagtatttcaaagactggttgctcgctagagcaggacacatgagtatggaccagtgggaccatatacccttttttagaatcggaggggcaggaacgcattatccggcttctagcnggaacgtgcactacccgttccccttttct

SEQ ID NO: 3366 - DNA, 1149 bp, Emericella nidulans
tactaaagggatcgtggcgctggttatccttatccacacagggtgtttcttgatcctgagggccttagaaagcttctcaaaaacaggaacaaagtcggggtgggtagcgacaacatccttgccctccacaccaccgtagtcgatctggtgctcgccaggttctcgctgcttgaaaattccaggaacgatactctgtccaacaattcgcttgcccatgtagtcgaccacaatggttcccggtgtaaacaagccattgatgtcgagctggttgacggccttgataccaagaacatccttgccgacagctacacgcgcagcttcatcaccaccctcagaagcaaaggtactcaacgccatcagcaccgaaggagtagaagatgttgttgtacacgaagatatgagcgtactgagcctactggagttgataggagcaacttcaccccgagcgaccaaaacagcaccgcgggcagcagactcgttgtaatcagcaaacagcttggatgtaagccgctcgcggaaaacgcggtcttgaacagtctcgcggggcagttccttggtggtttggaactcttcattccagtcgcgcagagtttcagcattgtccacaccggagatgaggtagttttcctgagaccgggtgatatcgggctgatgagcgtttacgttggaggctggtggagcgacaagccatgggctgctaggaatggagttttggaaggggaaggtagtcagaagatctttctggttgttggattcctggagttccttgaaggcagcatcaaaggacggagaaagctgagaaatcaggttgagaagcgaatgcgcgctgcccttcttgggaatggttttggggaaaggatcgaatctgctgttggagcacttgttgacgaagaacccagaaacgtgggaggtgatctggaactgctctccctcattggtagtaacctggaggtagagcaagtgtcccttctgacggaggtgatgaggtggcgggttccatggagaaagggagatggacttgacggtcttaggagcgggggcctccgacctgggaagaatagtcttcagcgaggaagatccggggatgtcgtacttggcaagcgaatgctccttttctgacttctcgctaccagcctcggcagcaatcga

SEQ ID NO: 3367 - DNA, 3936 bp, Emericella nidulans
tgctgctgaatgaggcgcaaagtctcccttaccgggccggcgattcttgccttttatcatgctcgtcctcagcacaggaatctgcggactcacgaagtgacagccgtaaacctactatcgagtcgctcaggtggctcgtttgcagtccgcagttgaccgactatagccgctctacgccagcttttgctcacgatatcgtcatatgcgcattccagtggaaagtaccccatgataaattcagcgatacggtaaccctacagggtgggagtccttcctgagcttgtccaagttggaatgtgggaaacaggttggctataggtgcgcacgcgcggttctggcccagttcgctcgaatatgatcttcggagatttttcgctcaagcctttgaacattccaatggagctctgggcatgccctctctcttcttatcgtctcccagctatcgacggttccattgcctcctgtcgctaccctcatggtgctaatcaaagggatgcctatcgcataagtaagcaacgacgtcagtactagagggtgtccaaaccctaaaggtggaggggtgaatggccaagcatgttgatcttcttgactttactatcatgatatgttgtagtggaacctaatcctatcccttgactccgacaaggatgtacttgtacttgggcattggcccccgttctgcgtccagctcaggtacctcaagatgtccgattgtgagaaagaggaaaacgtgcaagagcttcagactgcccttaaggagctgggcttagagttcaccccagacgggcaatacgtacgctgggccaatactaatccgaagcatccaagaaattggcccaccattcagaaggcatacaacataggcctgataatattcctcgaattctatacgtgagtaccgcctgtctttaccgcaacaagaagcatcaataacgctagttgtcttcagcacatcaatcaacgcatccggagtatgtctgagcccatttgcatccttggtttacctctataatgtgtttaattattgacttgcatcgcaggcaacaacggcaaaagatgctcggcacgaacttgagattgacttgactctagcggtatttctttttgtctcaacgtgcgtatttccaccacgctcaacatatcacctaatggagtagtgacataaatgcttattggtgttcaggtacgcgctggcgcaagcttttggcaatgtcgtcttccctccgtactctgaggcgttcggtcggaaaaaactatacatcatcagcactgtactattcagcggcttcagcgttatgattgcagcggtaccctcactgggagcaatggttgcaggacgaaccttgaccggcttggtttcggccgtaccgacggtcatcatcacgggcagtatagaggacatgttcaatacgcgggaccgtatctggctggtgtttgcttatatggtggttgccaacttcgcggtggccatgggccctgtgatcagtggatatatcactgcctatctggggtggtaagttaaaggcaaacccaccgtatgccacggaactgacctgcgcaggagatgggtgtactacatttcaggaatcgtgacagggcttgtctccgtattgctgctggggatttgagagtcacgttcgtcgctgctgctgacgtgggacgtcgagaagctgcgtcatgtgacggggtcatgaatcttcaagactcaacccggacgagtccccaaactccgcatttttgtgcgcgatgggctcattcgacccgtacgcctattcttcacggagcccattgtctttgcctgctctctgatgagcggctgcagcgtcgccctcttgtacctgttcaccgaatcgctacctacgatctacgagtcgatgggcttcgcacagccagagtccaacctacctttcattgcgatgggcattggcttcttgcccagtatactgattcggctcatagatgggcgcatcgcagcgcagcggcaccgggacggactccctttgctaccagaaaacaagctggctgggatctgtcttggggcaccgttcctggcagttgggctctggtggttcgcatggatggtgcctcctactatacgcggggtacattggcttgtgacattgattccgctattcttcgtcggctttgcgctcaatgagtttgggaccgtgctcgcaggatatctcgcagacagctatcatagctatgcagcaagtgcgtttgctgcaatgtcccttgcacgttcattgctgtcgtcaatctttccacttgtggcgcctaagatgtttggtgcgctgggagcaaacattgccttgtcggttctggccgctggtgctatgatattctgccccgtgccattcatttttcggtattatggcgccagtcttcgccaaagaagcaagtttgcacagtatagtctgcgcgtgtatgaggagaacactgttgaaagggaatattaatcgttagtgatggggagtcgcatattggcgatggagttatttgattttcctttggcacttataagagcccgctcgatagataggatgcaaccttcccggatgctgtcatcatgtttaccaatccattctcggtctttctccgctcactcgtggtgaatgccgtcatgtcaacggcccattggccaatcatacccacgttgtttgtccttctcctcctttgccgcgcggcggggtgagatcgacgcactcagagctggaccctccatcccccaggtgccccaggcctccaatagtagtctcgaatgttccgtctccacgattcttatcttcctttgaatgcgaccatccccgcttccccagcgtccgttatcagcccggatggacgcttgtgactatgtgagacgtattcgacctcactgactcggccgaacactgtgagccctgaccctacgctgcgtctggctccaaaatctccgcgatcagccactatcgacctcgggaaagaccatggtatgcacccctaccgtctcatactcttaaagcctggccaacccccctgtcgtcgggttcctttgttccgcattcgaccgcagccttttcgagcctgtgcacgtttggagcccgttccagtcatcatggcagagaaatcgatccaagaaaattcctccaggacttctgatatcgaaaaggtcacttcgttgcacgaccctcagaagtcacggctagaccagttcccggatccagatgagggattgagtgaggaggagagggctaagattgtgagatagcgctcggctcgcttaggtatagcaatggattgctgacatggttctttcgaacgtacctaggaccgcgcccttctctggaagttggatatgaaattagtcccctggctaagtttgctttatctagtgtccttcttagaccggtgcgtttcggtcgcgtagattgattggatccatctaacccgtacagtaccaacatcggaaatgcaaagctcgacaacctccaagaggaccttagcatgtctgacaaccaatataattcatcgctcactattttcttcgtttcgtatgcagtctttgagccgttgaccaatgtcctcctcaaacggctgcggccgagcgtcttcatccccatcatcatggtcttatgggtaggcctgcccttcctcgctttgcaattgagatatgtactcacgcgttgttctttagggtatctgcatgctgagcatggactttgtccataactgggccggtctcatgactgtccgtttccgcaatccattatttcttagaacccaaatactgatattgccaggcccgctggtttctcggcctcactgaagccggcctttttcccggtgttggctactctctattatgtgggtacaagcgctcggaatttggtattcgaatggcaatcttcttctaggccgccgcccctaaccgcttcctgggggggcttttgcaactgc

SEQ ID NO: 3368 - DNA, 3267 bp, Emericella nidulans
gagaactattgcaattatcgtccaggggggagggtaaaccttcttatagcctgttatatatatggcggctatgagtagcagctattgcggccgtcccgtccgcataaagatattcgacggctgttccctgtcccgaaactcctcgtccacatcatactcgcactctcccccatcctgccagaaccccagttgcctatagacatgcctgcccatactcgacccctccagcacggcctccaggccccctcggtgcttagcctcatcaagcccccactgaaccaactttgacgcaaccccctgtctttgaaacgccgggtcaacaacacacagatccagcaccatgactgctggcgaagagctcgacgcgatttctttgaccacctcaacccgccgcttatgcagcgagcggtccagctgcagcaagtatcgctgttcaactggattcccagggtagatcgcctctgcattgatgtcaactggcgtgtctccgtgtccaggtaccatggacgcctgcacccagatagctaccccggcgatgacttcctccccgttggcgtcggcgacggtagccttgagaaagacggtgtttgggtttccgtttcgatcggtcgtgatagaagaccacctctcaaccagccgacttattgcacgcacttttccctcgggggtatcccacccgggattcatggcgatccagactccatcgtgcacctgagagccgaatgccgatgcagaaatgtcgaagaaggaagtaaagtcggtgggggatgttatgggggacacttttatagttggcttaactggggccatcttggacagtctcaacgagaaggttaggcagatggagtgaatatgtgtttagcatgtatttagtatagcttttatggccgtgtagtgtatgtgtccttagcggcgaacccgggattaccccaattgtggggcagggcttaagcgtccatgtcgttggcttacactattcatgccactgcaggtacgttcatatcggtaggaatatcaagcctatgctctctcacatcaccgtcttccttacgaatcaatacaatgccgataagctgcgcaatcgcatatattagccatctgcactgactatcatacctgagcatcttagtaccggcacctatcggttgtatgtcgggcggactacgtagtgacatagcacttgttgtaggagagattttaggggggaaaaaaagatcctattaaggcattctggtctgtaatctgtcttactggacgtcttcagggtatttttggtatacgaaagggcgccctccacgcttatgagagcggagttcctttcctttttccgaccttggccgtataacagctatctctaccgctcttatttctgtgcgcacagtttaatgtgattgtcatgtcgttagcaacgctcagtcgactttggatacggcattgtctgcctgctccgtccagagtgaccgcaagccatcatccccctgaaatggaacatattgtctagtgcggagagaagaccaagaaaaagacggcttcgactatgcaggcagcgtagcaaggatggaaagtaggcagtcatccgcgtcttaaagggctcggcctatcgatggcgcaaaatgctacgcgattatcatcataccgaccggcgaccgcacagtgcttagtgctccacgtgtctgaggctcttctaggggagatatcccgtcgcgatatcagagcgggattgcgacatcaagcgtattttgacttcgtgtattgatctggggcgaaaatctggggtagggacctcaaaaacaacgtgtactgggctctctctggatcgcgggcgaagctgatttaagcagctggtgtattcagtagctcagagtcattcagaaggaaccagaagacgattagaggccggctgtcgggttcagaacgttcaggcttaggcgaaaggctttaatggcctaatataaggcgcactcagcttttccgctcccaacaaaacgcggcgccgcagcgatcagattcagaggaagaactgcgcctctgagctgaatctgggccactcaagcagaatacgctctaggcaaaaccctacggctacgtcttcagccattgaattgtcgagcggcgaaacatgctgcataccatcaccctcaacagagcccaaccacagaattctcagcgcaaacgccacaaacagacttttctcttggaagcatcatagaccctgaatacgaacatgtgtgagacatgaaaaagtggaattccagatgcggtgcacgttcggcttggacgggccctgaggaatgtaacgcctggcctggaccacattcaaaccggagttcggccgtacgccggagatcgtggaattatttcccgagcgatatggttgcatcaagcactcaatccgtgcctacaaatgtgggcatatctgcgagcgatgctagtggttgttcgctgtatgtaactgcgtgattttgacaacggcctatgcttctcgtcgcaaaagtggattaaaggggtcgaatagtgacgacagcggcttagccgtacggaatcaaatttggtttcctgtaccttatctctctgtttcagctggactagtctatggatggggtttgtagcatcggccgcattcggtagcctcagggcaacgtcggcccaatgagtagttatggttcgtctcaggtacatcaaataaaataaaataaattcacagctgacttgtgcgttcgtccctcaaatccttgagggccagaatcaaagtgtcatcggcctctaccgatcatcgaggggtggatcaggagcagacttccctcgtgggtacgttgcctacacagacgcgggtccccagcgcaggcgccctaatccggcgacaatatctggggttggaatgttcacctgaaattgtatcgatgtagaagtgcataggtcatacacatttgtgctgcaaactgctcttcgcaggtcatggatagatacaggacattctgatagaggctggtatatctcattccatagtatcgcaccgcaattgattttgatttttttctttttttttttttttggttgaaaaccctacctgcccgcctgcagacacatacaatgcaacaagctaggtggcgtactcacaggtacacttctctaaccacggctcattagagcgctgcttgcggccttcgtcaggacaggacaaaaaccacggtacggtcaggtcaggttcgcttgcgggctcgacgatttctgaccaggagatgtagcattagttcggatccgagatga

SEQ ID NO: 3369 - DNA, 1594 bp, Emericella nidulans
ctattattttcttcaggtgaatcagaagaccatgaagcaagcttcatcaccaactataattatacaccaggcagctgcgcccttgcctttgcatccgggctagatgcttacctcagatagttaataaggggcaagtcgaggcagttacggccgaattacggccgaactgaacagaggggttgacagaccctgagtgatacatcattatactgctgcagatgtagcacaggctgtggctgccttcaagcgtcttgtcagtgttatccatgcgcggataccagaagacggcagcaaggatgacaagtctactgactggatggacttaccatggcttgccggagccaaacgtatatacagagttctcgttatggaatcagctgtctcctgggattggtattctcccctttgcccatgtgaaacatcttaatcctccgcctttcgaagtttggcctagcccactactgccattgacatttatgagccttcaagaattagaaagaacatctattggggaggcaatcgctccttattgactatgtgcgcatagcttgacccttccaactccacagcgcatttcaaaacctaatgcttattgcgatatgtcgcaatgtgatccgttttccgttctcctggagcatagggttcaccttcatcttgatttcgcatggatcaatgccctattttcatcgtgacgtcgactccttaagttaagcttcagagcagctgttgccctcttatctcctgccttttttttgtcactgtcactaatactatagaacccattgcagactgcaagcatgattaagctcctcatctaccttcctgtgcacttcttccggtctaatgctcatagaccatttctcctttactccttttgatgcgttctttgcaaggaagtactgtgatggagcacatttgtaaccactataaagtgatggcaggagactagaaagtgatttcagcttcctcgaatgcgttcttattatgaatagagtaatagcctgccttgcttcccacaaacctgtttgtgttgttgattgagccttacttaatttcctttattgcatctaagccgtgcgtcatatcgtccaagttatatagggtatcaaatgacagtttatttctaacctcatgttgcaaaaaaggttaagctgtgttcgctgaactttctaccttactgctgaaatttttgtcatgttttgcgagcagaaatgcaaacgtaccacttttatatatcagttttatcaacaggcttataggcaagattccaaactaaatttttgtttggaaatgggccgaaacctttttttaaacaactacaggagaagaacctggttcggccttaaaaatccctataactactcaacgagcgaaatggcttcgggacctttttttttggggaacatctggtaatttcttaaccaataggaaccttgccggcattttctataaaccggtatcgtataaagacccccttgcaatttaaaaaaaaatgctgttggggaaacttttaacctggtgattggaaaactctatctcaggagttagggtcttttccgtttccacaaaccttttttcttaaaacagtctcatt

SEQ ID NO: 3370 - DNA, 1653 bp, Emericella nidulans
tggattttgcaaaatggtcaatcgcaaggtcaatttcggctttctgatcgatagcatctcgcaacactggtgagacatatgaataaatgacttcttgcacagcacccatctccgcaagaccctcgaggcgtttgatgtcattctgcaaagcccgagtatcgctgggcgcgtccttttcccatcttgcgagatgagagagcttggccaaagctagtttgactcgatgaccccagacatcctgttcttgttcgagagcaagatgctccaaggtctttgcagcacattcgtaatcggcctcacctatcacatcattaatccagctgagcctggcataaggctgatgcttatgcaagaaccgagtaacaaacgactggaactttttggctgaaaacaggatccctggctgccccattgatatctgacggccaaagaaagcgtcagcccaggcgtctccgaatttctcgaaataaagggatattttcctgtcgagctcgataccgtccggagtatctacgttggtaaacacaaccttgttttggtcctggagctcaataataagctccaccagcgcgctcatgtcctgaaagctctctgccaattcgatggcttcatttagttgcccgatgccagccagtttaaatagctgccatctccgctgtttgatgtgtgactgcttggttgcggaagcctcatcgatcagcttctggtcttcttgggctgagagccagcggatccgctcagaatacatttggcccattatccgaaggtgcctggcactgtttcgtgcaattttcgcagatatttgttgatctcctccgtcagagctggttgaagtttgttgtatagctctgcagctgtcaagttcgagatctaataaatgcccgatttcagaatagctgatgctctgtgaagtccagaattctggaagaccttcgtaattggtggttaaaaccccttcttccaaatatccatctccaattccgaactggctagcatgctcatcccgatatctgaaagccgtctccaacaccgctagagataactcaccggcttccaggatctgttctgacattccgcgcattttgttttgagggatttccctttcctgaggttttatcgcatggaaaatccagggcactatatgttccattcgataactgtcaaacagaaaccactgccgtattggatcgtctgtatcgtccagctttgttttgaacttttcattcatcagtcccaaaacatgcgcaaggaatgtcgctccactgctattgcgtttcctggcgctcgcttccaatctccatattgccctttgagccgcaagcttttccgcaccccataggagctcccaccagatccgccgatcaatgattttattctggtcaagtaggatccgagaaagatcatccaaggcctttgagcgtaatttcagattttgatcgatagatatggccgctgaagggatgaacttagaggtagaccgcagtagcccttgacagatcgctagagtggcttgctcgatttctgggacaggaaaatccagatcgcccttactggacaagttcagtgggttgcctaacatcgtaccgtaaaatacagcttgctcgagtttatgctgagccgagattcgcgcagtctccacggtttcctgcccag

SEQ ID NO: 3371 - DNA, 597 bp, Emericella nidulans
ttgagcagcttctcagcacaaatggtaatgttctgtgctatacatcgacaccgctgaggtgatgcttttcctctctttatctttggcccgctattgcatagagacatctgtttcgcccgtctagacgagcgtgcaaaggtttgtacatgagacatctgtgtgtcgagctgatagcgcaagctttctggattgttttcgctctttatcaattgtactctatcgacacaataccagctcattccttgcactttgaatgacctattgggttggcctattgttgccttggatctataatgggtgatacttgaccaagccgctctcttctgactgcccatcttatatgctcctattgtccaaaattaccaaagtctcaaatttccaccaattaatattgctaatatgaaagcagttcccgctacagcaacgtggctcaccgaccccgaaaaagcgtcatgcaaggccgcctcccacagagcgctccttcctgacgtgtggagatgacttacaatgtgtcttactgtgctttacaagattggtccagtcgagggtcctgatagcagacgaaggtcacgaaatggtattttattaatatgttca

SEQ ID NO: 3372 - DNA, 2947 bp, Emericella nidulans
acacttcctttttattgagcaacacttcattggtatgctctcgcaatatctaaagaaacaaggaatgtttctttcggtcgttttgctggtagataacgatgatgaacccatacatcagctgggccattgtgctcgttgtagcaggtagcctaggatggtactacagcgaagtaaacaccaaaccgaagacctctgcaaaggccgttctagaaaaaacagaacccgtggcccctgcaaaaaagcaaaagcgaaaggcgaagaaatcccccgaacctgcttccgctccagttagcgagaagcctacatttgaattcaaggcccccgaggaggatgagattccggatgaggagattgacaagaaggagctggctaagcggtttgccgctgtgaagaatggcacttcatccgcccaatttgctagtggtgagagcaagagccagaagaagaagaagagcaaggctgctgctaagctcgagcccaacaatggcgagcgctctgcctcccgcgtttccaccaggacttcgtcaactaccggagctgatgctgatgatgacctttcatccgctggttcccctcgggtgaacgccactgccgccggttatgtctctgacatgctcgaggcccctactcctggcgcctccgtcctccgggtgaccggcaacattgactctagctcccagaagaagaaggctaagcccgaaaagttcaaggaagtggaaaccaagaagcagcgtcagcagcgtcagaagaacgaagcccggaagcaagaagttaaggccgccgaggaggagcgacgaaagctacttgagaagcagcttcacactgcccgcgaggccgagcgccgtgaagccaccaagtcggtggctgccaacgccgctgccaatgcctgggcgcccaagtccacaaacggcactcatcgttcctcccagtctcctcagcctgcgcaggttcccaaggttgaactgctggacacatttgagcctagttcaacttccacccagtcgcccgctacatctcagcaatggaaccaagggctcccttcagaggaggagcagatgcgtattctcggtgctggtaacggcgaggatgcgtggaccacagttggtaccaagaaacccaagaagaaggcgaaaagcggatgaaagcgaagcgagcgtttctaaaagccagccagttcctgccgccccagctcctgatcagcccaaggtcaagataacgccgacctacctccctgacgtccttcgatccaacaaaaagggacaccctctcgactccgactgggctgcttaaatttgccgccatatcctaatcactaccatcatgggacggaagacatcgtccatgcgccgaggagactcctacaaaccgaagaaaactctccactaaggactgtacttatcactttggattacggcgtcgggggtgcaacattatagccactgcgtatatggcattatggtctgcttttaagcagcttcgtcagagaaaggatttgaagttgacaagtgacgcaaaggcccacgaagaaaagaagaaaagcaccagccaacgcacgaagaaaaaaagactctcgtattagattcatgtattctctcgaccctgttttgaaccctttcttctcccttcactgcacacatacttttgttccaaattggagtgctcctcctggtttcggccaattttaggaaacggagacttttttatttctgattttgtgtattctacatatttgtactgttagtccggacactgcgtcaagacttggagagtgtatgatcttgaattacgaataggcatttctgttttaattcttgggtcctttgtttttgtcttattctgtttcatatgcacgacttgcgaacctcctagggcagggtcacagatcggatgaagatcatggcgtaccttgcttctgtggggtttgctcaatcattctgccgcgggctgtctgactactgtctcataatttggaagggagccatccgtaaggaattcaggcccaaatcagctgtaaccacctttttggggccactttgacaactgtagctgtgagataaaattgtagatttggtgccaactgctgttattgtatggtatttccatttgttattatgaaagcgatgaagaattgaagatcgacgaatggcgtcactggggaatctgagccctgaaggctggcagccacggctaaaaaaggattagcgcagcgttccgggtatcgtggcctgaaagtcacaagtcacgggcctcgggcggagtcgcagtagaactagtaagagacaactattcaacatccaccctctattgagccttcatttacttttcgtctttctttctcctcgcttccttttctcttctttcccctccttcctagctaaatacaccggctgggatttggttgctctccctcggtcaattgcatcaccaatcatattgttgtttcgagttggaccctgtactgcggctcccactcccctcccgagtcccttcgcgactatcatccatcgtcggcctattgcccgcgcaccaactgcctatataccacagtcatggcgcaaattcgtggcactgcaggctataaccttggccaccaaaatccgttcggcggtcccgcgagcgcagctgcaaccaacgacccgagccccttggacaccatccgtgaacatacaagcaagattgaggattggctggacactatctcggaccctatcaagccgtaagtggttgctcgttcatgtttgtctgtttgtctccaatttcaccgaatcgctggcgtacctgtgagccgtctcagaaattctgacagctctgctgacaacgtgtcatttactccaggtatttgcccgctgttggccgtttcttgatcgtggtcactttcctcgaggatagcttgcgtatccttacgcaatggagcgaccagctcgtttatcttcgtgattaccgcaaa

SEQ ID NO: 3373 - DNA, 1179 bp, Emericella nidulans
gtgatgttattgagtatagactaaccgccctcggacggtggcttctttaatttgtggcctgttttgacttctcttacgagaacagcggactaaatccgctcgatgatatggctaaaatttcccgcgctcgatcgatggcgcaagtcatttcctgaacctcactagcgacctcctcgcgtctactacagcggagttagtccgctatcaggcatgtctgtgcccatgacgttggagaaatccggggttgcaccgaatgcggggaagctgcttgctcggctatataggtcaccatcctcatgtgttcctccattctcactcataggtatatattctctttcagcacgtcatgtcgaaaccatcaagtatttcagtcccacattgaagaggtcgagaagcccgctgtccaccataatgaagccctcagtcaattcaccccgcaggagcggaaaagactcatccgtcgcatcgatctgcgcctggtcgtcaccttgggctgtctctactgcatcagtttgctggaccgaacaaaccttggtgcagcatctgtggctgggtatgtctcttgccgtgtctaggagactcctgctgacaacctagaatgcaacccgatcttaacatgaacgcctccaacaatggatatagtataacttcccttgttttcttcattacctataccatattccagattccggcgaccgttattatccgcaaggttggaccgcgcatcttcctctccgcgattgtcttgttctggggcgctgttatgattgtgagttcacgcaattccgccacctgccgcttggctcaaacattagggtttcgctttggtccatcatgcccgccatgctgactgcgtttgtctcgagctttgagccgcttttccctggtggttaccttgggcccggatcggttcgactcaaaacgatgtgttttacctatgaggcccattgatggaggtttgcgccgccgtcaaataacgattgaggttggggtgggggactattcccccgaaaggcggacgattttttaccaaagacaggtctccgggtcggtggaaataatatgttccgaaaccataggcttaagggcacctttttcgttaaacccaaattttccccccctagggctccccccaggagggtgtgtgtttttttaaaaacaaaccaggtttttttttgg

SEQ ID NO: 3374 - DNA, 2362 bp, Emericella nidulans
cccgagggggcctccatttaaattttataaggccggtgatctcaccccatttgttacctcacttccctgtccaccgaaacgatttttttttatatcactaccaaaagaaatgccctcgcaacaacccagttacgacgtcgtaatcatcggcgctggcttctcaggtatctacttgctgcaccatctccgcatacttggctataccgttcgggtctacgaggctgggagcgacctcggcggcgcttggcactggaacaagtatccaaactgccgggtcgacacgcagggatcgatctaccagctgtcaattccagagggtttgtgagacatggtcgttcagcgagaagtacccctcggccgacgaactgcgcgggtattttgcccacctgagcgcgtgcttgtggtcaagaaggatatcgagtttggacggaccgtacaggaggctgtttcgataagccacaaagaaagcggaagtggacggttgagacggatgatggacgagtgacgcagtgtcaatttctgctgtcgtgcgttggcttaatgacggagaggtatgtgcctgagatcccgggactggagaccttccagggtcggatatgccattcggcctcttggccgaagggaggcgttgacgttgcagggaagaaggccgccgttattggaacaggggcatcaggtgtacagatcgtgcaggcatggggcaaggaagcaggctcgctctttgtcttccagcggactcctaacatctccctcccgatgcagcaggagagcctctcacccgaagcgcaaaaagccctaaaggctgagataccgcgcctattggctgcgcgagaaaagaccttttccgggttcttgaaggatcccagtccccatcgcacattcgaggtctcgcgtgaggaacgagaggcccggttcgaggccctttaccaggaaggcggctttgcgttgctgctcggcgggtacagcgatatgctgctcgacgaagaggcaaaccgagaggtatacgaattctgggttaggaagacgcgagcgaggatcaacgatgcccggctacagaaaatcctcgcaccagatgagccgccgcatccgatggccaccaaacggtcgtccatggagaacgattactttgagcagttcaacaagcccaatgtgcacctggtcgatctccgcgagtcgggctgtgccattgcagccatcaaacccgacggcctcgtgctgcagaacggcacgttctacccgctcgacgtgatcgcccttgcgacaggctttaacagctacacgggcagtctgacccagatccctcggctgcgcaacacatccggcaccacgctagcggaagaatgggcgcaggacggcgcgagctcgtacctcggcttgacgcgcagggggtacccgaacatgttcctgtgctatgcgctgcatgggccgtcagcactaaccagcggaccggtctcgatcgagctccaggcgcggtggatcatcgaggcaattcgcaagattgacgagtccgggctgacctatattgagccgacagaggaggcagagaagacatggaaggcgacaatcaataagattactgagatgacgctattccctaaagctgactcatggtatatgggagccaatattcccggtaagaagagagagatgttgaactttccggggggaatacctatgtatgaggagatgtgcttcaaggcgctgcagaactgggaaggttttgtcactgtttgagatcctttctcctgattaatgactatctatccatgtctatatcaagcaaaatagttgacataagtcattttgtatgaggctggatgcagacgatccttgccttccagcagtgggataccagagcagtatacgttcagtttggaaaggtccataggtgagacgaccgtagtgtgataagttcagattgtccaggtccagacttttgagagcgtaaggggtgagcaaggcgcggaagggattgcggcagagagcgagctgcgacgatttagggctttagcaggtaaactagtctgcggtaagggaggtttcaggagggacggggaaaaggatcacgtttcaggttggttagtactctctgaggatatggccagcatctgtcctatgccaattagtcgagttgaggaggtgtgtgaagtggcgctatggcagcttctgcctgtcatagtgggatggacttggcccttgcgcctctccagccttaggcgttccatcacgcgttgtcacgcgctgttgaggaagcccatgctgagatatcgagggctagttgcaatattgcaccggacggtgatacagagtttgagaatggagcgttccgcttttttgtgccctatatcagccctctatataa

SEQ ID NO: 3375 - DNA, 1123 bp, Emericella nidulans
caatacctaccagaataacatacatggccaggttgtggcgggtgacgtcattattttggtggtactggaaatgtacagagtactgaagccaatatgactaccaagatgaccgagcgatgggccagcctttgcataggaagtagagaagcgacatctaccatcgtttattgcctgcctgcccatcctgacgtcataagacatggagcgccacacggatgacgaaagtacagtaaccagtacgggatgagatcatatgagattatcgggtttcaagaaagggggctttactgaattttgtaccctcagctgcaaccatataggacgtcatgttgaagtaccccataagcgatcttttcccgtgacatggaaatgtgacgaaccgggttgcgctattgcggtgtatcaaagagaaactgatttccgtggattcccgtagagcaatgatggtgtttgaaatagggactcttggttgcatgtcactgtcaacggtgtgaagtcggcagataacaatctagcattgtgtattaatcagaattgtccactctcgctatgaaatagtgaaagaggttaaagtgactagagtagttctgaaagagtctgcgccaagacctagccttgaattatcacgtgactgtaagttttttcgagcggtggctgccagtccctcctcgatcgcgagcgggagtgagtgctaaaaaagaagtagctccagtaacacccatcatccacacgcagagcacatcgaaactaggcgccgctctgctcactttggcttcgatgtttttatttattctctagctcagtctttttctctctcctgtcgcatcttcatcaccttgtctgcttcgcgaatcgcgaccctgccattttgaaggacggaccaagcgcgtgcgcatttagagccacagtccgcaacgactggaaatatcagggaatctgtttctttttcaacatatacttcatatctcgtcggcgacatcgcagttttctcagctttttcgctcccgaacgggctcgcacataacctttttttccctctcgactccaacctcgtcgcgactcagtttcgcaattgtcggggcaacaagtcgtcaatcgccttgattatctaccgtgagcagga

SEQ ID NO: 3376 - DNA, 1125 bp, Emericella nidulans
gggggaagctcccacatctgtaaggagctctgggtcctctgctttctctcccattttaccgagaatatgcaggagggtttttttcgggtcatcgtccgttccttgatagtttttcgccctgagcttatttatctctgactgtcgcactgccctttgcgcatcagaacccggttacgtgagcatacaaaactgcttaccaattgcggtgtagggactctctccctctgtcgcagttatgggtagctggagtttggtggatttggaccgggcagtgtgaacgaggacatatgaattggtttcgtcagatcggcggatgcgtcagatgcaggggggaaggctatctttcgcggaagacatcttctaggttgttacgaagagtctaagatcaaaactgcgtgattaaatatttccagcagcctctggactcgaattttcaatcacattccagacgggctggtgccttgttctctaactgctgccttccacattacaatactaggcttggcacgctgacaaacatctgacattttatgaccagtatcaggatatcagcttggacaactaccaatgttaacactattttgcacatctgtagacaaaatagtcctgtttctatataaaccgcctatgtttagatggtcgtcatcctctcaagtaaatgaaatagccgaaggtggtaaatattacttggcaaaaaactttggggtgcaaattttttaagcccgccaagcttttccattttgtaaggcctcagggatgtttcaattggagtaaaatccattgatatcgtcagcgtccagggttaatgatcactgaatgctagcagctttcttgagagataaccatgatctgcatgagtatgataaattgtagaggtactgaggagcactactccagcgttattcaacttcccaatccgttatattattatccacgccgtatgtactcgtccccgaatgtcacgctccaagagccccacacaatgctgagtaagggtcgccttgctagtgattgaaacggcgtgaatcatactacagcaacccccaagccgacaggaaatgcgtagtggcaaaatatggagagtgttaacccagcgttaggagtgcgagagtcggcggcgttctt

SEQ ID NO: 3377 - DNA, 542 bp, Emericella nidulans
aaagtatgcgaatctcctagcccaggcccgttatactcaaccttgcagctcaatgctgacggtaccagcgtcttgattcccaaaacagcgtttgaagatcaagcagcatcaccgacaaccccgaccccgctctttatcacagattgggaactcgcccagcatggaactcgagctcttgatttagggcaaatgatcgcagaactgtacatgctcaatcactacaaagatactgatgcgggattgtgggttatagaaggttttttacaggggtatgggtatcagcatatcccggtaaagattgccttccgaacgctcatccatgtcggtgtacacttcattttctggggtagtacaacacccggatgggggagtcaggagcaggttctcgatttagtcaaacttggtagggaactggttgtcagggcgtgggagacggatcggacgtggtttgaagggaaattttgggaggtgttttcaaggctaggcctaggtggacacgacggactgtcatcattcagcaacaatgagcagaagatgtcgtc

SEQ ID NO: 3378 - DNA, 4077 bp, Emericella nidulans
attttcaacctgtgaaggaagtatgctccgtagctgcggtatagtacaggcaacctaccaatcgcgtagcatcctcacagagaccagagctggcagtcgagacttgaaggattgcgtgcgggacagacaaaaaacatgaactattccgtaataattacacataagacgcttggaaagagtgaacaagccacggaaaaggaatatagcggcaggtgaaactggacacgacaccggagattgccttgaggctgactgggaattctccatatcacaagaagaaaaagccaagattgcagtccaaggcgtacaagacggtggatgagacgttggaagttaatactttgatggatcacagcgggctactgcggccgtacgagagatggaaacaaacctccgcaagccgtgcctattatcaatattattgcatcgtgtcttgaactttccatcccacttcagatcgtcatggacacaggatgccgggacatctttctccatctgagtatcgtttcgtcggccgtgcgcctttgaagcgatccaagtgaataagcgccagcaaatgacactagccaaggttccagatataatgacagagtctggtataatgacagagtctggtgatgataatgacgatcagtcatggtatggttgatgagagtgatacgcaactcatggatagattagacgataatgattcctaggcatcttggccaattggcgataagtggcactcgcgctccacagcctcggagcacgtatcggtgacttgtttctacgttgtgttctggaacctggaacagccggcaaacccatgttacaactatccaggcggtttcgttaccaagcgggctagtaacgggcagtaataatcgggcgatactcgatacactgaatccatcagactatataatcatggtcagcctaaaccataaacggtaactggctgcttgttgattggatctgctcctcaatttcgacgcctctacaagttcgacgcaagactgaggtatctcgtaaacttaggagccggcgatctttatcttgctgtttgtgtgaaggcaggctcgccacaggctcagctgaggcaagagaaagttcgctcggacagctcagatcaggacggggattataaatgtatcaggctagcagtgtattcaggttagcctgccccaatgttgttgtcttcacccgcccgaaatgatcacatgatcggctctatcttaatagaagcagggatcaatctggaacaatccgttccctggcctggctgagtttcccccttcagagcaagccgcagacgaatcttggagacctaaacttgaataggaaatagtagcggaagccgattacgaagacttgctaattatggccgacactagtacggaatagtaaggagcagggcttgaatagtgcaagcgagtttgcctacaaagcggcttccagggatgggacggatccatgagactcccgaacgcatttcatgccactcatccttcaactatgccgtactcgtcctcaatcctgcccaggtggggaggcagtgtttctttcaagctgcatgcatcaacaaaggtgtttacgaccgtactccatagattagcgctattgcagggttggcccgaaaatgctcgataggggaagaaacccgggaaacacaattgttaaccaagaccaggatggttctgggattccaggcctgtggaattcttcccttgcacttcttttcacgaagttactaggggtgctgtgtcgctagccgctgttgggcgaccagacagatgagaggccgtatcgagctgtctcctgagcgcatcgatcgtctgcattattgtcccttttattgaaccacttagaagccaacacctgcactattaatcaatcaggttgtcaacatcgactcctgaactctgagcatttagcgctcagctaagatgctcgatgctgaacctcttgttgattgtagcctgtaaggcgtaattccgcggcccatggcgaaggccaggattctgcgcattcgttggaagagcttgtatctcttacactgagttgacttctattgtcactgaatgcggagacgtaatgtacccagacggtccagagatgaaaacatcgatactggtcctctattgcatctctttttcctggaacagctattgagacgactgaagcttatagggttcagcagcgtccaagccgacgattattgattattggcatactttgtcgactcatcagcatgacgatacctgtaccgcgtgtttgggggtttctccatcgcaccgccagcctcttagcatcctcttacttcgcattcagcctttcattaaattgggatggatcatatccgacccaaatattcgaggttgcaggttgtagatagagtggtgtatgcctgagcgagaagggtggccccgaattatgggcgagttggaggaaaggcagctcgaaggctaaaccgaacccggttacaatgatacgtcgccaacgagtaatatcgcgtccaggtgcactagccagcgaccttgacgtgctgtgaccgctgtgaccgctgttgggcagagaaactggaatcagcaactgcaccttgatggatcgtcagctgggtggctctttgtgacagacccagccccgatgatagctgagttactcggcggttatcccactgaagtttgacctttgattagcctcgcgacaaagaacaggattgggccagtcgttgcaactgtgctccgaaaaagcgggtggtcaggatgaggaattatggatgctgcagtaaaaggtaatttgtgggcttggccaatacacggaacttcgcggccagagtcaaaagtgtactgcagatgtggtgagtctggtttgtctggttgggtggatgagcctttgcctcagctcggttcgaccagaggtgaatccccaattcgtacacacggctagtcttgttctttctgcgcggaaaattgtgctcgtttacctcgtcctgtttcgcccgggttccaaggacgaagggcgcttgttgtggctccagcgtccaacccccagcagtcacaggaagctgaacgcggcgatctcattggactgttgtcggctgccagtttgcttacgcatgcgaaactgctcgtaaagctgatacccatccatgctcgcgctgtgtccagaatccagatgccttgcatgcaccagcttatgacctggtggtctcactcgtgcagtggataggtacttcgtctgtgattgtgagtcctcaattcctaccagatttgctccacctgcagatggcgtctcctgagcgttttacgctctttcccccctactgtccaacgccaatttttctctgccggcgtccagatgatgattattgattgtctgccgcctaccgcctaccgcctaccgcctaccacccagcctcttctgaagtcctggaattctggtcatactgtgacatattttacccaccactccacgtcgtagcgtcccaccttgctggctgtaccactaagccggcggcctgcctcgcctcccagccaaacttcctgccaagccgaagtaactggtaaccttgtatctgggtctcgtaacattcgataagattcgtatgattcgtatgattcgtatgattcgtatgattcgtatgattcgtatgattcgtatgatacgatagtacgaggctgttgacgcggacgaccaaagtcgaccaaagtatgcttgcggattgtggttgccaggattcctctgatttttctgatttctctaatccctctggcttccgcgagctcgggctcggtgatcaacagcaggttagtcgtgctgagcaatgccccggcccctccctgggctggtgtcgcccccttcctgggcgaggcaggcaggccacgcaccgaaaaggaaagaattccaggtggccccggcaccagaactccaggaggacaccagcacagtgcaccacacaatggtcgcaatggtcgttgcaacttcaaataattctaataaatgtttttatgtgacgctcagataggcgttgccactattattggatcgccgatggggctgacagagtcagttggccagactaatcactctcag

SEQ ID NO: 3379 - DNA, 3166 bp, Emericella nidulans
gagtagccctatgatcgcggacaagggactcggcatccatgtcttcgagttgattgtgcagccactgcgcgccctgaagatacagctcgctgctgccgcaccggtaattctcgtcgtggatgcattgaatgaatgcgatgacgcagtccatatcaaaactatcatacggcttctctccggtgaatgtatgaaagagattaacttgcgagttttcttgactgcccggccagatacagcggttcgaatcggcttccatcaggttgcatccaaagcttacgacggcatgatactgcacgaggttgcacaagagactatcgaccatgatattcgcgtagtactcgaacaagaattgcgcaagatcaaacagaactacaactccctggcttcgtcagcagacgctctcttagcggccgactggccaggttcggtagctatagatcggcttgtagagatcgcgagcccgctattcatctctgcggccaccatatgcagggtcctgagcgattcaaggttcttaccccaacatcaactggccatgttgctagagtttcagagtgccagccacgcttctaagctcgaggtcacgtacctcccggttctggaccagatacttgtcggtgacctgacgaggcgagagaaagaatacttgaccggggagttccaccgtgtgtgggttctcttattattctagcggagcccctatccattactcaccttgcgagactcttgtgcatttcaagggcccgagtagagacgagtttggcttctctacatgctgtgcttagaatccccgcagacgatggccctgttcggcttcttcatgcctcctttcgtgattttttgctcgacgagcacttgcttgagaaaactcctttggctattcatgctccaacagtgcacaactacttgctgcagcattgtcttctttgcatgtcgagaacaaccagcttgaactcgaccagctgttcagaaaatatatgcggcttggcggcgctgaagggcttagattcatctctggagcaggatatagttggcaggatattgccaagcgacctgcgttactcttgtttgtactgggtataccacttgaaacaggcaaataggtcaattcaagtcggcgaccacgttcacagctttcttcaaactcactttctagactgggtagaggccttgggaatcctagatcggccttctgaaatcttgcaggcggtgcaagttctggtttcgcttgttgaaaaggtgacttaccatttacccttcctcctacattccttatctcgttcccatggggctgattaagacctagacgagcaaagggaacgtactatcagagttccttcacgatgcaagacggttcgtccacagccataaacctgtcattgagcgagctccgggtatcttgcattcctccgtccttttcctgccgctacgcagctcaatccgccaaaactttatctaccattgtccgggctggatttgcgccttacctgaggtcccccaggattggggccagcccacgctgcacgtggacggctttgctctcaactgtctagcatttgccgaagatagtagcaagctggcttcagaattcagagtatggaacgcaatttccggcgacgtcttacatgcagttgctcgatacaaacctaagtctacactgggtccaaaacatgactatcaatacggcatcaaggctcttgcctttaaatccgctcacgaacttgctatagtgacacgtggaggccaactccaaagcttcaatctcattaccggtgatagaatagaacgtaccctagattcggctgtacatactgcggtgttctctggggacgcaaaccggttagcgttcatcggatgctcgaatcccttcaaagtatcacagacacagccaaccgatccaacggttgttgtaatagacaacgtctcaggccaagtcattctccggcttcccaatatgggctaccctctgctgagtttgtcctcggatgggagtaccttagcatgttgcgtactgtccaatgccgaaagcacagaaactgctcatgttaaagtattcgaccttacaaaagagaatcttcgttcccatgtgcgcgcacccaaggtgatctcggttccattcatgtatgtgtcaatgataactttgtcccgcaacggccaaaagctcgccatctttggtgaagaagcaaaggcgcccgtagtcctagttctggacatcggcaaatacaaatacgagcgctttctgcccgtattggccaaagtatcatgcatgtccttctcacccagtgctgagacacttacaatcgttctggaaaagaaggagttccatctatatgatctggccacgggcgaggcgcaaatgatacgagagcattgtcgccacgattttgttgtctttgcgccggacggactaagaatcgccacagcttcaaggaaggcgaacgggattgcggtttggaattctttgatcaaccccgaaagcactctgcggccgggacagcggccaacaagctctcccaattatttgtctgcgatatcagcgttttcataggacggctcaatagctgcgacggcacagcagagccaaagaaacacgcttctacttgtggatgtttatagcaagcaaattctgcataaattacaagcgtacggggtgcccgaggctgttgcgttctctgcggacagaagagtcgtcgcagcgaaaacattcttatacgacaataatgaagcagataaaagagacaaagaaggagacggaggtaaattcacatttgaggagctctttgatgatgacattgtcgttatcgagaaagacttcgccggtcccgacaaccggcatccgtgctggctggaggtgtggaaagttggctcaaattcgaccgggaccaggccaacaccgcaattcaagaaggggttctcaatggaataccgcgaggcgatatttgcagtcaacgctactgggacacgggtggcctttgcactttcttctgtcgctggcatcgcacgagatgccgacttacgcaacgccatgatcgtggaggaatgggatgtagtcaacagggaactactttgcacgcacacaatagaccagtccttccggtgttcaagcttgaattcacaataaaacgggcccatattggcccttttaaattcattggactttggcctt

SEQ ID NO: 3380 - DNA, 1521 bp, Emericella nidulans
ggacattttgatagacttgatctggtgaagtgttaagagtggaaggttgtttttgggtgaaaaagtagctaaattatagatagtatggggaaagccgagccgaggttcgagaccccgcagccgtgccagacactcggttacggcagattaatgatcatgtccagaatggcatcatggtatcgatagattgattcattattaagcacagccttagacatagataacacaaccagtggttgtctcctcgacggtgcaccgtatatgcaaggggcttatgctgccgtatctgcgcgggagcgtatagttacagggtcgggaaaatcatgcatactgtatactgtatactatatacgaggcctaggcagaactacagctttgacctgtcagtcttaatagcccgatcaatcagctccatggcctggtaaagctcgtagtcgtgttgtttaggcgttatgacctgaacactcagcggggagtccaggtatactgtccgatcgaccgttttctcattccctaggtaaagtcagcaattcaccattcttctgagtgatctagaaaagggaaggcttacaaagttcccggttcgccttatcccagcttccaataacacgtgcctccatctcctttccgttttccagatcgtctctgccaaagtttcggaccggaacagtcccagccgggtagtccaaaagcacaaacgaagacgtatagccgaccgcgttgtaccgatccaactctggcacaggatgtggcgcaacagggtggatgatcgcgtcgaccgtttgctcatgtccggtactaccatacatccacagttccctgcggagttcaagctcaacatctcctcgggttgcctgtagctctgccagctgcgaaagaagaagcggccgtccccgttttgtgcggcctttaagccaagggattagtgtctcgccagtgctttcgacaaggtctagcattttaatgccgccatcgacgcccatgagacgcccagctagggcttggcatttgggcagggctttcgggacgggtagctggacgacgttgactcccggtgtccgacggagagcggcggcgacttcgttaagaacctttgaaatcggtggtaggggttcgactatcccatctgacggaaggacgccaatagtaatcggtctagacttcctgccgaaagacgaaagtggtgacggccaagcacccgggatacaatcctcgccgaaccattgggccctgggaatgaggtgagtcatgacggcgttaatgtctacgacggaatgagcgattggtcctgcgacggcttgaatcgagatccgccctttggctacgggctggccgtctgtttgcccgccatatggcacacgaccttgacttggtttaaacccgtacaagccgttgcacatggccggaacacggatggagccgccaatatcggttccaaagccgatcatgctgccgcgaagggcgagaagagcaccttcgccgcccgtcgatccgccggcagtgagctggcggttacgcggg

SEQ ID NO: 3381 - DNA, 893 bp, Emericella nidulans
aaactctactaaagggatccacaattctggaacctgatcactctctggttgctttcgctgaagggtaatgagaccaaccgcgaattgtaaaagattcatccaatacactatcttcgtaggcaagcccattcgcttttccgaccttggcttttcttgctttcgcccgtgctgaggagatgatttcgtataacggaactatgaatgaggaaattaagggcagaagtgacgaagtagcgaattccaaacgcctgccatggtctgacagcgatatcagggcttgggcgcgggctgggataacatcgggctcggattcagatgctatggagtcaaaaacggtgcgccgagctgcgggggaaaggtcctgtcgagctgagagggacactagcaaaagggagccactgcgtcgagcgtcgggagaaccttcatggagtaaaaggtgcgaaccagcttcccagagaccgagagcttgctccgggtataccactgaagggccttagccacttgttccgcttcgtcacaggcatggcctagattctgcttctgcgccagtaacttgacggacgtctcaaaatcccgaccccccgaagcatccgaggagcttgaaaccacacttccacgatgcattgagtcaaatcctgatgcgttccaaaagcttgtgtgtccatccgtgtcgtcgtgaacggagttgctgctgtccgacaatggggttgcgggaaacgatttcgcccgggaagcgcttaacgacctgaaaacgtccgcaaagctagatgttgagtatttggagcgcggcgggaatgaaacatcgtcagaaggcatgcgtcctagtggacagagagtatatacgtgaaatccgattgagtcaacggattatataagaatctggataagagcgg

SEQ ID NO: 3382 - DNA, 2187 bp, Emericella nidulans
ctgcatgccatccacgagcagtacagtctctcaccctttgatttttcaatcagtgctgacatgcctagtgcgccattcaaggtagactcccgaaccatggacacattgagccaagcaggcattgacggtagcagcatgcttgaccaaaaactcctatcaagaggaaaggtgccaggctcaaatcaatgccttgtatgaatgctgcagtgctttctacaaagaaaaaggagacgacgcgaaaactcctagctgcccgaaaccgaatctcctaaaactccggatgaagcagcgcgaacaggaagcttcataaccctcctaaaaaccattttgctgctgtccagataacggcaatgcccgttattcgagctgctgtatataccgaagttaaaaatccaccgcatagttgaaagcggtgaatgtgctgtaacaattcctttgctttttgagctcccatgtaagttaagagctagactagttgtaagaactgctggattgttctaagacaatcttgagcacgcgagaggccgattgacctgaacgaagattgaagcgctcgttccgagactctaatgattgcctaattgacattgaagaagaaaagaaaaagaagaaatcggtcagcagaaagcgcgggaggatttttatggcgtgaaggtctagaagctagtctacttcagggctagcggcagtcggccaaaacagcgcgctgggccaacgagaattcatgcgggtgacaactcaaaagaggcagaaacactgtcacgcagctttattctgctgcttaccagtccattgctggcaaactgattttttactattgcctagcttatggctcccgtgagtagagccgccgggtcggccggctctgtgtccggcttcgcgtcatctattgaacgtactgatgaagctagaaatgaacctcgcggacgcattactcgctaggatggcttcttacaacaggaccagcggcaaccgaacaataccgaagtcatcgaaattgacgacgatgacgacgaacccatggataatgaagaggaggagtacaacgaagatgaaatgttagaggtagaagatgacgaggacatggaggaagaggagcaagaactggaagaaaatgcctcagtagaagatcggaacggcagcgaatcacccctgaacctagttggagccccgaatggccagagtatgtcatttcaacatgagactgaatatgcttctgaccgcgttatagacggaatcgacgtcactgcttccgagttcttcacctcagcaggcgcaaggcaggcactgcacccacttcgccggactgccgaccgagttacccgccagatcgaagctttcgccgataaattggatcgctttaaacaaaaggctaaccgtgcggacgaatttcagaactaccaggctgtctaccagttggtgaagggatgccaaaccattgcgcaggacgcgattcaggatctttccaaacaaaacacacttaaaagagcgaaattgggatggggcttcagtaacagcaacggcacgagtgacgctaaaaccgaagaagagctgcaacggttacagctagaagcaagtacttggcagcttctgctgaacctcgtcagtgtgacgaccctgctagtagagccagcttcctacaagcgcaagagactgcatttcaaacgctccatcggtattcgtcagatcgcgacatctggggtcagttcatgaaggcggaccaatatgctgtggaatgcgtgattattatgaaatggttggaacaaactgcgcggtcttccagtcaggacatcgactccctgatctcagaattagagatacaggctgagagaggacagggctcttggactcatggatggctgtataccaaagagactatcaaggggcagaagcggctacgcgcctggcctcaacctctggaaccaaacgacccagggatcacggcttccttactgacttctgagcaatccgaaccgctggtaacacagctagaccccgatgcagtcacccgccaaaaacagaaccttcagagaaaggaccaattttacgagcgtgctacctggatgacgtgctggaaaatgcttcgacagggcgaggactggactaagattaggcagtgggcgtcagaccgcctggagcactggcgcgcagtcagtatctgcgcggtgcagcattataaacagtcga

SEQ ID NO: 3383 - DNA, 568 bp, Emericella nidulans
ccaaggcctggtgcgcgttttggttcggtgtccttgtgaccatgcaatcccccgtcttgacattcgcgactctcgtcatcaattcaattgggtactcccaactccagacaatgctgtatacagctccctcgggagcggtgcaggttgccctactttggatagggatgcttctgtgctatatacttccaagacagcgcaccattgtcgtggttctcctctgcatccctcccataattgggaatatcctcatgctcgtcctcccactaagtgcaaggtggggtgtgattgtttctgcttggctggtaagtccctgttttaacatccctatccatcccctaactccctaccccctcctccttccacgtaaatggtttcttacgctaacaaaattggtaacaggcctcctgcatcaccgcttcctggtccatcctcctgtcgcttgtcgcatcaaatgtaaaaggcaacacgaagcgcgccgtcgtcaacgccatgtttttcatagggtattgtgccggctgcattgcatctccacaactttggacgcataggccgaagtcctcatgggatt

SEQ ID NO: 3384 - DNA, 899 bp, Emericella nidulans
tacgaacgagatatccactcattatcagcgccagcatcgatgagtttcgccttcccgccaccgttctccttataggggtcccgagcagctgtgttcgacgcgggcatgttgtattgcttgagaacagtcgacaatgccaagaatgctgccacgctgctggtggttatgaggttatggccacaggcatggccgatctcgggcaatgcatcgtactcggcgttgaagttgatcagacggccacccgagccgctctttgcttcaaaggaggtattgagaccgaacgcgtggcgagtgaccgcgaagcccttttcttctaggaaatcgcaaattgtgtcatgtgccctacgttcctcgtatgcagtttcaggggtagaccatatctgatgaatatgtcaagttgctacgatctctgtggcctgcaggtatgagtagaacagccaccttttgggtgaaagtgcccaatgatgcaattgcagactggagcgccttcgtccaaggacgccctcacttgctcgatgggagggttcagaatcgccatggcttaacacaatgtaagtggatgcgatcttctcgcggagctgagactgggactgaacagggtgtcgtcccatatatgagtggaggcgggataggtccgcattccccgactcgcgtacgttgctcctgatggacggttggagacagttcggcagtctaatcggtactcgaatactatctcgtaatgaatcatgggtgagatagaggcccaccaagcgccgataacctggcagccaggacgccatagatatctctgagctcacgactgcgtcggttagtgattccccagaaaacaacaattttgcgggggaactgatacgctgtgcaaaccatttagagagacgccttctgaatggttgttg

SEQ ID NO: 3385 - DNA, 1368 bp, Emericella nidulans
atacaatgccgtaggtttggcgacaatgtggcgtttgttaacaactgagagtgatcatctcacttttcatcagcggggaagtgaaagttggagccaacctcgttgattgattggtagaataacgcactgccaggcaggcagctaaacatatctaccgacagctccatagttgggtaatctttccaaggttgcttgctttttgtcagtgacagcttcaacttacttcgagggtgggttacgtgcatatacagaatatgctctttcaccaacctcgcctcgtgcccactgagtctgtcaattcggataatttcaattgttcatgttctgatataaagaggcaggaaagccggcaaagagcggcagccataagaagacgcatcgtgtatggattaatgtatgctgcagtcaccgaacggaaagaaaattaaaaatagagaaaaaaaaatataaagaaaaaaaaatgacaagggtgggattcgaacccacgccaaattaatgacgcggaaacttgataaatcaagatagaggttctgattagataccttaaccgcgcgccttagaccgctcggccaccttgcctatttgttgaaatatgggttaaaataatatattatagtgctttttctgcgctcccccacactattactgatcagcttgcattgcatgtcctagatttgagcctccaggttaacaagagaatgaaatggtatgagatgatataatcggccaagacttcttgtatgtactctgagtatagctcattgtaatgcgagaaagtacttttgtctagtttcattgtatccttaaagctagacgctctccttgtggtaattcatctctatatatagtccagcttggtggcatcttggtgcaattcatcgatgcatctcaaaactttatctccagcaagcaccgataatctatacagtaagatctttgccgtaacctgcatacgactccgaacctacgagcccaattcatgcagagttgcaaactatagcagacgccagccacatcacccaccgcatcatcggtgcatcgaggcgatggcgtcgatatgcagccagtaattagtgacagacggaatatttccccaaaatcgcaccaaagtgacataaccacccatcgttgatggtggtggctgtagcgatgcgatacaggacaaatttacttgtggtacaacctgtagccctaatcttggatgcgggccgtgactgacgtcagacccggccttagctgccaggtgtaatgtggattctacacaatggatcggctgcattgtcttatgattcgtcgtatattctccgagaagagtgtgttagataacgagactttctgtccacattccgcgctgttgacgatgggcgg

SEQ ID NO: 3386 - DNA, 1284 bp, Emericella nidulans
ccctgcattgccctgacacttggaacattgatataccggtccctgaatcaccttcgacgccgcggctggccgctcctgttaaccagaaggtgttttttggtcccgaattgccacttcctcgttgcacttaagcctctcttgcagcattgtctggcccctacccagcccaaaatctccgacggaattctcgactggttcctccctcgcacggtatctctgctccacgacgcttcacggcctcacaatcgattctgcgccgttcgacccccccggcgtcctgcccgcgattatgccgtcattcacgaccgactatccttcccagacggcgacagctacagctacacaccctcattcattcggcccgccccaagacagaacgcacgagaaaagtccagtagggaacacttttgtatggacaaattggcccaatggcgactctaatcacctcgagactccatcggaccgcattctcgctaatggtagtactactctctaactggaccccgatcaagtgcaagctcctacaatcgagaattcctgcagtccaaagacgggagtctgcattcgttaggaaatacatccgctcgggaacagagggaggggaggccatcatccattacaacggacagagagcttccccggaagtcatttgatacgggggtcggctcggcaacaacgtctattgctagtcatcaggtaaatggggcattgatatgtcacaaacaggttaacgggaagcacatggttaatggggattattcgcgaccgtccgttgatgagctggtctgctcagacacgacgggaaatactgcgacagcgcggctgtcgacatcgcccccggacaacagtggccgcctttctccagaccatggcagcctgtccccaactcaaaaaggcacttatcggcactcgtctcccccgatcgccgcaggagtcaagcgtagcaacacgcaagactcggctaattctagcattcgacagcggcatacgttacaagttccgagaactaccagtggccgtcgaagtagtcgtgatcagccggacgacgttgcgtacagcagcggccgcctatctccgacagcgggagcccgccgttcgtctcttgggttggctcgccggaccaccaggacgaatcagtccgaaatcttgtttgatgaagcgaatccggatgaagatgcagcccgttgggcggaagctatcaaacaaaggagagcgtcgagaaggagacggcgagacgaggaagatgatgaaagagttgttgtggaacaaaagttgatcgaaacc

SEQ ID NO: 3387 - DNA, 1146 bp, Emericella nidulans
gcaaaggtaccgattccggaaaaaggccctcgaaagcgagtgcaagtcgtctttatgccggggccagatttggtccattccatgtctacgcccggagtatgaagtgagaaggatctcgatcatattcttggacagtacggggtatgttatgttgtatctatcttaaacttcgcgcaagctaactggtctagactttcatcgtcgagcgaagcgggacagatattgacaaggcgctcgcggcattgcagccatggaaaaagaatatccatgttattcaacaacttattcaaaatgacgttagcagcactaagattcgcttattcctcaggcgagatatgagcgtacgctacttgatccctgacccggtgattgagtacatctatgagaataacctctacatggacgacggtacgacacaaccgacggccgacaagggcaagacacgagaggagcccgcgccttcaaattagcattgctcaaaaagccagataaggccacgctacgacgtcatgacgaccattgctggttttacgaagatattaatccgtcgggcgaatgcaatctctgcgctgatctgagcaagcactgattccggtaagtcgcaagttgggggaggatttaatgagcccaaccctatgggtttgttccggctaagatactgcgattaacgacacgccctatgactgtcatatcttcaggtttctctccagagtcggtctacacaacagtgatgctggctattcttctattttaagcccttaacatctaagtgcagcggtgatatttacgaatcctcaacgggtagcctagtgctgattgccttggcctcttcatcctcatcccaagagtccggtacgcctctcttgggcacatgtctgttatgtcacaccgaccgtctcatttatttccgagcggaagcacccagttatttttaaagcgttctcgttcccgtctctttcaagttatacccttcccatattttatgtaccgatatcgatgacagatagagtccggtagagctagacccacagctggagcagccggccaatgtatatacaaagggtctttctgaaaacatgttttcctctagagcaacccatcatgaataagtaaatccccccccctacctaagattgggtggcgaac

SEQ ID NO: 3388 - DNA, 1674 bp, Emericella nidulans
  unsure (1)..(1674): unsure at all n locations
ggaataagcccgcgagcgcaaacgtcgtggaacagaaacgacgaagcagcaccgatttgagagcttctctcagcgtgtgtcgaagcttaagattgaccccatccaccgtgtacggcgacccagctttggtgaagaaggagatgagacgtcctcccacttccgttcggcgttcgagcactgggctgagttgaacttgtctgagaactttgtcgcattttctcgccgagtgagcccgctatgcgaaagtctggcgcaaattgtttactatgaagagaagatattcaacttgctggtggaatacatcgataagcgcgacagtaactcaatagagcctctactgagtctgctctcccagttcgctcgagaccttggcgtgcgattcgagaggtattttgcggcctctgtgactctggtcgcttctgtcgcggccactcatcccgatgtcgaagtggtcgaatggtgcttcacctgtctggcgtggactttcaagttcctgtcccgacttctggttcccgatctgcgacaacttttaggtatcatgacgccgtacctcggaaaggaacgacagaaaccgtttgttgctcgatttgccgcagagtccttgtcattcttgattcgcaaagccggacttgtctactataagaacccggaacctcttcaactggcagtaacattcttgttcgacgatttccggcaggccgtaacggaatcgaagaatgtggagctatataagtccggtcttatggcgatgttttccgacccgattaagggtgtgaagaacgggttgcactcaattggaacggatatctttcagtgcctattgaagtcggtgtgcactgatgacgatcttcggagcaccctcgcacttgatgttgcgagcggtgtcttgatcaacatcattcatagtacgacgcctgagtcgttcgaacccattatcgatatcctaacgtcctatgtccaatccgatgtcacgactgggaataggaactgcgctgtcgcctacacccggttactctttctctgtgttactacccgcaaaggatcgcgtgtcaagaggtggaaacctgtgctcgaaagcttgctccttttgctccgggccgctgagaaagcatttgatgtcttttccgacgccatcccgcagctactcaccgcagtcgcgtattccctccaaatatcgccaatggacgagatgctgcctttcatgcgtcccctcatggacgccgtgacagttgacagtctctcagcctacttgctatcattctgctctaccttctccgaatggggtgcagagcgatttcacagcgttgtttcttcgtattttaaaggtccgtcgactgttccgagtgaaactgaaattcgttacatgtctagattcgaaacaactttggangaccggaggtcgactttgttaacttactagataagcgggcaagtgcgtacatagaaagtttaaaccggttttagttgtcactttctgagaaagatttgagagcgtgtaaacacaattaaacgcggggctcgagagcacaaattcccaaggttgttgtgggcttttttatatgggggaaaaaaaaattgctgcccggaatagctaccctttttttttgtgctgtaagggatagacttacatcatttctaaaaacttggggtgaaacgttttttctatatatctgt

SEQ ID NO: 3389 - DNA, 3618 bp, Emericella nidulans
aagcaccttatcatttcatagagattgcggtttctagatctacgccaggaccgagcaagcccagatgagaaccgacgcagatttccttggcacctgttgcttcagctgaatcctggcaatacgagatacctgctttgaatattttgaatagctcgcccgctggagagcatcctgaatgcaagtaacaaccgtagaggctgacacggcaggtgttgctagggagcgtcgtgttctacaaggccagacgtcttcgcggttgatatatatgtatgtttgactgcaggctgctcagcgacgacagtcaagttcgccctcgctgcttgtgcaataatcgcagtggggaagccacaccgtgactcccatctttcagtaaagctctgttggtgtttatcagcaatacacgtaatttaaactcgttagcatggggctgatagcttaattaccgtttaccagtgccgcggttctgcagctttccttggcccgtaaaattcggcgaagccagccaatcaccagctaggcaccagctaaaccctataattagtctcttatcaacaccatccgctcccccgggatcaatgaggagaatgagggggatgcggggctaaagaagcctacataaccctcatgccaactcccagtttacactcgtcgagccaacatcctgactataagctaacacagaatgcctcaatcctgggaagaactggccgctgataagcgcgcccgcctcgcaaaaaccatccctgatgaatggaaagtccagacgctgcctgcggaagacagcgttattgatttcccaaagaaatcggggatcctttcagaggccgaactgaagatcacagaggcctccgctgcagatcttgtgtccaagctggcggccggagagttgacctcggtggaagttacgctagcattctgtaaacgggcagcaatcgcccagcagttagtagggtcccctctacctctcagggagatgtaacaacgccaccttatgggactatcaagctgacgctggcttctgtgcagacaaactgcgcccacgagttcttccctgacgccgctctcgcgcaggcaagggaactcgatgaatactacgcaaagcacaagagacccgttggtccactccatggcctccccatctctctcaaagaccagcttcgagtcaaggtacaccgttgcccctaagtcgttagatgtccctttttgtcagctaacatatgccaccagggctacgaaacatcaatgggctacatctcatggctaaacaagtacgacgaaggggactcggttctgacaaccatgctccgcaaagccggtgccgtcttctacgtcaagacctctgtcccgcagaccctgatggtctgcgagacagtcaacaacatcatcgggcgcaccgtcaacccacgcaacaagaactggtcgtgcggcggcagttctggtggtgagggtgcgatcgttgggattcgtggtggcgtcatcggtgtaggaacggatatcggtggctcgattcgagtgccggccgcgttcaacttcctgtacggtctaaggccgagtcatgggcggctgccgtatgcaaagatggcgaacagcatggagggtcaggagacggtgcacagcgttgtcgggccgattacgcactctgttgagggtgagtccttcgcctcttccttcttttcctgctctataccaggcctccactgtcctcctttcttgctttttatactatatacgagaccggcagtcactgatgaagtatgttagacctccgcctcttcaccaaatccgtcctcggtcaggagccatggaaatacgactccaaggtcatccccatgccctggcgccagtccgagtcggacattattgcctccaagatcaagaacggcgggctcaatatcggctactacaacttcgacggcaatgtccttccacaccctcctatcctgcgcggcgtggaaaccaccgtcgccgcactcgccaaagccggtcacaccgtgaccccgtggacgccatacaagcacgatttcggccacgatctcatctcccatatctacgcggctgacggcagcgccgacgtaatgcgcgatatcagtgcatccggcgagccggcgattccaaatatcaaagacctactgaacccgaacatcaaagctgttaacatgaacgagctctgggacacgcatctccagaagtggaattaccagatggagtaccttgagaaatggcgggaggctgaagaaaaggccgggaaggaactggacgccatcatcgcgccgattacgcctaccgctgcggtacggcatgaccagttccggtactatgggtatgcctctgtgatcaacctgctggatttcacgagcgtggttgttccggttacctttgcggataagaacatcgataagaagaatgagagtttcaaggcggttagtgagcttgatgccctcgtgcaggaagagtatgatccggaggcgtaccatggggcaccggttgcagtgcaggttatcggacggagactcagtgaagagaggacgttggcgattgcagaggaagtggggaagttgctgggaaatgtggtgactccatagctaataagtgtcagatagcaatttgcacaagaaatcaataccagcaactgtaaataagcgctgaagtgaccatgccatgctacgaaagagcagaaaaaaacctgccgtagaaccgaagagatatgacacgcttccatctctcaaaggaagaatcccttcagggttgcgtttccagtctagacacgtataacggcacaagtgtctctcaccaaatgggttatatctcaaatgtgatctaaggatggaaagcccagaatattggctgggttgatggctgcttcgagtgcagtctcatgctgccacaggtgactctggatggccccataccactcaacccatggtacccgtgcctcaggggtgagctggttgttgccttgcggtagagtaataacgatagctcagccttgcaggtgatttccgcgtctgtctattgtccttattactgtgtcgagtccccaagttttcttccaatagacatcagtaagagtaccgcttttatattgttgtcctaggaggacattttccatcctagtggagcgctcctaccaccttggcatctgaagctcctgttatcaggactactttgtcgctgtagatacacacagaagcagtaacgtgcagactgtcctgcggtgccacggcatcaataaagaaaagtagaacctctcggagactaatcaaccgagtgccatgatatatatgtatgtgctaagcatagttaacgaaatacagacgattaagtacagctactgaagcacaacctggaggtcacgtgtgctgagttagggtcatattttacagtggaaacctcggttggcagctggctttgcaagataatccaagatagtcaggtgggagtcaggtcggcccaaggaaagcgtaaatccacaaaattctcgaaaaagtctctgaagtacattcctgagtagtggcaactggacgcggtggagttcatgatgcaaacaagactggaagcaccgacgtagctctggcagttcctgcttcaatcccctctcaccagagacttagtagtgag

SEQ ID NO: 3390 - DNA, 362 bp, Emericella nidulans
gatcgcttacgataccctcgaggtatgtgaacccggctagtggctggtaaacggatattcgctgaacaatactctcaggtccgaccacgtcacgacttccgggccgcgagtctcagaggatctcacgggaagggatgagctgtaaaggctgccctccagcttttcgtaagacgctttaatagcagcggggcctcctgctgcgtatagcggacatttagtccccacctcattgcagtagatggagaatttatcaaagatggcgtcagcatcaccaataggctccggtccaatttcggtatagtacttggccgcatcaactacgccatctaacaacatgcgttcgatacggtcaggaaagagtg

SEQ ID NO: 3391 - DNA, 1162 bp, Emericella nidulans
gctaggttataggaaactgctccagcggccctatacgtttgtctaatagataacaatagctctattgttaaaccaagtgcagttattattccggataaggaaagtccaacgcttcatactgatgtatatctatcagagaatttacttcctcccgttccccccccacctagcccagcatagtatcgcatcaattataacctctgtctcaaccgcaaaaacagcccctcaatcctcccttagatttatccaaccctttcgctacttttaaaactgacaatgtgtctcctcctggggcccattctcagcacaacgacaaacgattcgaacccagtctcagagtcgtcctcgccacgtagcaaaaggtcatgtctgaataagacatacacaaccatcaacttaatctcctttcttcgccgtttctacgcaatgcaagaccggaattcaggctgaatagggagaatttcggctaatttcctgtcgtcatcattgcctccatgctgatctgcgctcggaatccaccgcgcaggcctaaacgcattcgtatccggaaatactcctgcatcgcgtaaacatgggtgcctattcttaccctttggagagtgacgatcggatactgacgcccctcccctcgtggggggcggtggggcatccccgatattggcggtgacggtagaaaggcttcttttggcgaaattggcggtatacatgatttcgacgcgggaccagagcgagataccggtgcgtctagaagcgatctgataagaaagtcttgctgcgtgcgagggttgtggagaaaatgaaaacttgttgaaacgtgttgcgagctctatattgttattgtatcgaagcccgcctcgttggggatgtgaagcacacagagtaagcgctatctattggcgagcttgagcataacagcaagaatgaagtgcagttattgacctacaactccttccaatacatatgtttactgggcctggatcttcaccatagaggctgcggaagaagtccatccgctagtcatggttgcctagcttgacatggccttctgattggattagaatctcgacccgagtttcttggtaaccccagccaccggtggctaggaaagcttcatttcccagccttggaagcggccctaatttacgtggctggaccaaagcca

SEQ ID NO: 3392 - DNA, 1617 bp, Emericella nidulans
taagcaatataaccttcgtgcaccacgccactctcctccctaattcaaacattgcatccaagcattactccatctattgaacctatccgcaacaaaaccaggcgagtccgaaaatgtcagcatccaacgaatcctcggcgcccaagaacctccgtcccctctccagatacataacaacccacaatgccgccggaaaagcaatcttctccgaatctattgcgccgactatgcctgtaacaccgatccccgacggcgccgacttctccctggcatacacttccccgacaatcccggcctccttcgccaacgaaaccgacatcgccgcttatgccagctacctggaaccgggaaactcgccgggcctggtgatctcaacaggctctgtctgccggatcgtcgatatgccgcctaatgcactatcgtccatgcatagaacggtgtcgctggattacggcgttgtgctggagggcgaggtgcagctcgagttggatagcggagaaacgagattgctcaagagaggagacgttgccgtgcagcgcggaacgaaccatgcatggagaaatgtcacacccccgggggaggatgggcaggcccagtgggcgaggatgctgtatgtgctgctgccggcgaaaacagtcgagattgatgggaaggcgttgggagaggagctgggccacatcggcgtgcggtcgagtacttaatatataatcctgacagcttgggcaataaaatatatgcctgtgatctgtgatggtgccgtgccggtgtttcatatattaagtagtttgaatagaaaggcagaacatggcggtattttacccctataaataaggaactagccctttctaccttggagacccaggacaaatacagttcagaacaaccccatatgataaattgctataagttaacttgtcaatactcccctcccacttcgtaccgaaagatccggtcgttgatcttccctcctgtcgcccgccatagttgtgcaatactctagaccattatcagcacttgtcttacctccacaatgctgaacgtaccgcgttaagccagaccccgtgcagcatggattgaatgaaaatatactccggaacgctggacccggcgctcctctcagcaaagtcaagattgcggttgatgggcctgtagggcgggatgcggcgatggtgggttggccagctggctgggtttgcttgatgggctaaagccaccgattgggactgtggaggcgaagacaaagatgcggacggaggaggagtgctgtggtgcagttcgtagtcggcgaggagggatagagttggggctgtggagtgggtggtcgaagacattttgatatatgctcctgaagaggagaacagatgaacggtgacggtttgaacttggaaagagtgtaaaagacgcctctggccgaacagtaaagacaggctaagacggccagctcattcagcagcttgactagtgagagttcttttctgctggtgctttcttactgtcccctccctccccccgggaccggggcgcatgtcgggggctcccccacatccagaacaggcgagcgctgtcaggtctatgaatgatggccgaaagatccagggtgctggacaaatcacagta

SEQ ID NO: 3393 - DNA, 3378 bp, Emericella nidulans
  unsure (1)..(3378): unsure at all n locations
ttcactgatcccccacacagatatctgcacgcattttcatacaatactagtcttattccctctcttcattcatccatgttgtgaatctccttacaacattccttccatttcattttcatcagcgtccacttcatgatcatggccaacactctgctttcgaactccagaggcacccttgcgggtgcaatatcaacgtggaaccccgacacaggagaggcctctagcccacttgctatatatagccgtcaggaaatatatgtcggtcgagactcgaggaagtggcaacttcggcccatcacgtttttcctccttccgaactaacgtagctcagccagtacgtcgtgaaggacccgctcgttgggaataaacatctgaggatttacaccggcatcttggaccaagataacccggcggaggatgcaccactggtctatgcttcggacattctcacgaagccgcgcttgtggaacatttacagaatgggaaatggacggaaaagcttccttctcagtgacggtgatatcctccggctttcggagagggtatatctgatttatcgctctctcgataatgcacagcacacgtattttgatcctttccaggttcatgagatgagggtgagtacttaccaatgctgttgacaagtactcatgtgttgcaggcattctcccacgaatacgttatcacgcggcgcaagcttggctctggtgcttatggacaggttcatatggcgtacaataagagtaccggacagcagttcgcttgcaaaattgttaacctcctcgcagtcaagcatcagctggccaaggtaggagaggcacgacacgagctggcatttgggaagaatattagtgcgaagatgaaggacagttatgtcaggttccagctacaggagactcttgagaaataccaccgcgaggcgaagatacttgaaaccctgcaacatgtaagtttggcttctatgtacctttcctagctaacctatgaagccgaatatcattggcttggagaaggtgtatattagtgacaataccatgtgagtttgatgtcgagaaatcaatattctgttctgatatgagtagatatatgttccaggatcttttgaccgctggagacctattctcctacatccagtacaaaggtgggagactgcctgacatcgaagcggccgttattgtgcgtcagattgtcatcgcccttgattatctccatgacagaaacatagtccatagggacttgaagcccgataatatcttgatgacggccctggccgacggatgtagagttgtgctcactgatttcggatgtgccacctttgtcgacccgatgacaaatcgaatgctgagtacggttggaacctttgagttcagcgctccgtcagtactattcgatccttggggatatcacgcactgatcttgtatagtgaggtagtgaggcagaatcgtgaaggatataccaaggccgcggatctatggtctctaggctgcttggcggccgtccttctcaccggggaacctgtgtttgataacatgcgcaatggccatgatgaaaactgccggctgaaagctatcgaagagctaaaggtgaagatgcatcgacttaatgtgggcgaccgagctcaagacttcgttttccggctacttcagcaagatgtacgcaagcgcatggatgtcaaacaagcactgcagcatatgtggttcaccaacccgtcgcacaaggccgatttcgaggcactctacaagcgttgtatcagagactggaagccgcgcacggctgaacaaccattaattgttaagctgaatacttacgtcaacggtcagacccagaaccagaccatacccaggatcaagaaggagcattctttcgtggctgaatcctcctctcaggctgatccggtcccaccatcaacaggcgagacagaagacaagagccccgagagcctttcagacattgtccattctccgtaccatgacaagtctcaacaaacgcgctcttcggctgaagtagcagtatccgtattgcaaccggaggaggactacgtaaacggtataaagcgatcccattccagcattgacgaggttgaggatcgagtttacgaggaggtaatgaacccggtaactggaaagcgacagcacttggtgtatggctactgggccacggccgcgaagaaatgagtgtcttctccatgaatattcatatcacatcggtcttacgagtacgaaaaccgtttctgttgagttgatcctaagccaacagcgggcagttgcagcagacaggtttacgtagttgacgataaaactttcgttttctaaccacttaacaagttactcaccaccagcatgtccaattcaccatcccttcgcattaaaacccatcgaagccccgggtagacatggcgtgacccagaactaaaaagaagctgatttactctactgtcaaactctagcactgctcatttactgctatttcttaccaacctggtcaatccatggctcatgaggaaactntgttagacttcaagatttgtttaccatgaatccgaccgatagcacagtgaagttcagcagggttcactgtaccgtcagaagggggtagagtcatgagactaatgcacgtgaagatagcacatacctttaggaagccctaggtactatgcaaatcaagatcacctaaggtagttccatagtagcctcggaaagacctctcaattacattcaaacagaacagctatctcacacctgggctcaaagaacaaggaacatggcccatttattccatacaactccttactggaagcccatctaccctcattgacctcgccctacctttctaccctaccctaccaccactccttaccagaaaaccgataaacaatatccccgaacccagctgtggggaaaacatagaaccactcaagcgtctcttctccgcgattcacgacgccgtgctccgcgtccccggggatgaaaaggacactccccgcagagacttcgtgctggaagccctcaatgttcacgatcccacggcctgatgtgatgtagtagatctcggcttgggtgtggcggtggagtgagagttgccccgtgtgcggtgggcagcttgctagcccagcgcacatgttactgctgggggtgaggtgtgggggggaagtggagagaagggtgcgccaggttaagttgttggtactatttgagtcggggaaggattcggcgggtagggagcagattgtttctggtttgaggacaatcggttctggcttttgggctggtgctgtggttgtacttagagttgaatttgagaatgaggtcgacggcgggtttggagcttggggactcgctggctgtggttgcggtgcatccatgtcaaaatatatagag

SEQ ID NO: 3394 - DNA, 969 bp, Emericella nidulans
ctcacactatagggaggacccaagcttaaggatctagatcgggcgaacaaatccacctccaagagccaagaaagtcagagaagcgacagactccccgcgctgtaatcggacttgcgaccaccacgaccgccacctaggagtgcagcgtacgactcgacgccactgatatatacacagcttcggataaagatatatgggactaggaacaaaccgataatatgtccacctcaccaccaacagacgcagacgcagaccaagctcagccgaacaccatgcaaatgcaagcaacagagcagcaacttaaagcccgcgctgaaggcgtctcaattgaggtatgggtctctgccaaacatcctttaccaattacttccatggagacaaaaaggaggcgaatgctaatcaatgcatcaaggattacctcctcccgcgttccattaccctgcgactagcaaaatccgtcctgccaccgaatacatccgtgcagaaagatgccgtactggccattcagaaggctgcgacggtgtttgtttcttatctgtcttctcagtacgtgttatcacatctaaatccattttgccactcgcaatcctgaacaacaccgctaatatgttttgtcgtgcacagcgccaacgaagcaacactaaaacgaacagtctcgcccgcggacgtcctcaacgcactctcagagcttgaattcgaggggttcagaccgcgactagagaaggagttggataagtttacagaccttaaggctgcaaagaggaagccgaggaagagtggtgatggagatacaaaggccaatgttgatgctggtgccgagagtaagaatggggtgcaggcggcaaaggatggtactggtgatgcggagatgaaggaggtcgttgtccgagggtcaaaggcgaagagggtgaagagggacggtgatgaggagattgagaaggaagaccaggatcatgaccaggatccgga

SEQ ID NO: 3395 - DNA, 1722 bp, Emericella nidulans
  unsure (1)..(1722): unsure at all n locations
cagcaagtaatctattcccaaataagcaagttagcgaagaaagaaggtcagcttttggccaaggtgccatgcaagtaatgtttagacaacatcttgaacagacaacgggcgttttaataaatacttaaaaaggtgcatgccaattaaagaagatgtatgcggccaaagaagcttttaagaattgtatgctgctctatcttatatcttagccgctgcatcttcaaggtcttgtcatttaacatcctcctcaccgacaggacaggccccacatgtccttgcagtaggtgctggaagctcagccacagtgcaattaaataagggtccagagtatacatgcgccaccaaacactctaggtagctaacgatcattcattatcagtaccggccattccggccatcctctctaatcatggaacacatttgaccagatgacgcaaccaaaatagatatctacctaaatagaccggtcaaatacattaacttagcataaatctggcaagaagtaagtgagcaaggttcatatttgtagctgaaagcaaatcacctgtggcgtgagatctataccagacacacatcaaaggggtccgtaattagagtttggtggccagattaaagtgcagatcctgatactgcggcccaagacttcgggtcctccgcagaactttattggcaaggacaacattaagacgcttataattagaaccacaagagagctaaatgatccacggaactcatgagtaagccgaagaaatgcttactaaatgcaggtgcaaactaactaccaactgctacgaagttgaagcggcttaccaaataaagatacatagtactttccagctagaattagaattccagtataacttcttggaggattttagtcatcttgatcagattgtcaagattgacagcttggccctgacactatacgtcagattttactgaatgatgactttaggtgagctgcgtcagggtgtacggcaggccatgccaaggaaagccacgcgtctttttaagggtccacagactggactagatttgtctccatcaattccttcaatttaactaagtgaaattaagacgatcagttagcatggttggcgtttgagtttccgacgtttccgactcttccgaatgctactcgtccagagacggccggtggtccgaacattagattactttgtcatcagaactttatatggcccttggggttaattatggttgagcccctcaatcggtcactagaaggacagaaactggcgcacctgtctagccggccagatgagttccaggttgtacctcggttgatacccgttttcccatacgttgaaagatagatcaacagcagaggcctggcccggcttatttcgcaaagactctaaccatcacaatctcaatgcaaaatttcgtcagatttttgtcaatggcgtgagccgccttcacccgaaaagttcagtgcaaagcagaataccaacatcctgcgggggtaggccttgaccataagaaagtatactcgatggctatatcgttaaggaagaccatggtaattagctgaaccttataggctgnccgccacccgacccgngccgtcgcccttgatctgctgcatctgcgtccttccaccaagtgaagtacatgccccaagtgcttgccaaccctaccttcataaacagcaatcctgattctaacacaggcaacattatattgcctacaaaaagtcatttg

SEQ ID NO: 3396 - DNA, 9179 bp, Emericella nidulans
tgtggaattacgttggcatcgccgcagagggacccgctggcatggttctagggggtagttcaggaacttctgttattgcgggctggggccagggcaaccagtacgtccctgctgggcctaccagatttgccggtgacatcacggcggtttcgcgtcctgcaggattgttggacggcggaaagtattatcaacgctccaagccacagtacgagtctctttctgtctcgccattctccagcgttcgggaaggaggcgccaccggtgatggaaccacggacgataccgatgcgctgcagaatgtcattgatgctgctgccgtatctgacaagatcgtcttaatcgatgctggcgtttacaaagtgacgaaggcattgcgcatccctgcaaattccaggattgtcggcgacgcattcccagtcatcctgtcgagcggcgagttctccaaaccaggagcagcccaagcctgtggtgcaggtcgggcagccaggtgacgaaggccacattgagctctcagatttcgtaatcagcacccagagccctcaggccggtgcgattctcatcgaatggaatctcgcgtccccgtcagacccgtcgggaatgtgggaagcgcatgcgcgcgttggtggttttgcagggtcccagcagacaagcaaggagtgtgccaaaacaccggacacggtgattacgaaagccaacaaggactgcattgtagcctatatgctcatccacgtcatcccctcagcttccaatctgtacatggagaatacctggctttgggttttctgaccagtgagtccctatacacgctttccgcgcgtttcgttcggtcaactcagcatctaacaactttgactgcgatattcacgtccagaacgaggccgccagagccagatcacgctctacagcggacgtggtttgaatatcgagagcacaacgggaaacatctggctgtaggctgccttcgcggcttcggcccttcctctgggtccatgagctgatacgtgagaatgagcaggtccggcacctctgtcgaacacagcgtgctctataagtaccagttcgtttccaccaagaacgtgcatatgggacagatccaaacagagacagcgttagtgtccccttaaccctttgggcgtttctctaatactcacacgaggaccctcaggtactatcaaagcctccctaatgctctgattcctttcgcgcctaatccctcaatccacgaccccgacatcacctcaagctgcgatggccgcacagggaactgtgctattggctggggtctccgaatcgttgactcgcgagatctcgccgtgtacggcgccggcttgtattccttctttgataactatgacacaggtttgtctctcatgcttctttatttttacgaccttccgtgcattggctttttgtgcatgcggactaataattcgaaccccttatagaatgctccgcgtacggcggttatcaggattgtcagaactccattttcagcatcgagggagaagtgacaatattggtgtcttcaccaacaacatcgcgtattttaagggctagtgagtaggtaccaccggaacgggacgaggtcgagaggtaatactaaggaccgtaacctcgaaaatggctagcacatagcatctcaatgctccttcaatctatcttgacatgttgcctaatactctgtccctgggcttctgtaaccccttttctcgcccaactgatctctttacaaataactaatcgcgtttgtcattgtaattatagagttggtaaggcacaaacctataggcaccatcattattgctacgcacatgcgttattgatatcgaggaccggcttgtccttgaacggtacgttgcaccgttagacgcttcagacttggaggacaatccctcggcaccccttgcagcctggccctatgtgtaaatattgacaggatcccagcagggttttagcgactctacgtagttatcggtgtatccgaatcttgaagcagtagcaccggagctgattactaaaccgccactgggactcgctgtcctagttgcggtcctggtcctcgtgaaacatatttactccaaaccttacctaatcagcgctcgagtaggtgactgggtgtttgagcatgtcgtaaagcacgggttagtgtcgcccctagcggccctatggccagactccccgcgcttctagactgctccacgacttattttgaatactacccacggagattaccaggaggccctggtcaaggactccataggtaagtccctctttaacttgcagtttacaccgcgctcctgtcttcgtctaagggtcctgtctgttccctcgacttgatgaaacgccaagccgccggatggaaccctgatcaatcccttcacccacttaggtaagtggcaaacatgcgatgtggatactggacatgtccaattgagtgaaaaccagctcagaaatccccgaaggtggcgccatttcctgacccccacttgacaggaccagtaggctgaggaccctggaccctgaaacccgataggttcccctgaaacggggcccttgccgaggacctgactccgcgattccgcgttgcagttgtagctgcaatgcatcagatccccagactagccgtgctctatactccacgagacgttggggccgctgaacggagcctggattctcggatgccggcactgccaagcgtgtgcgccagagactcgtgcatgcatggtataacggctagattgcacgtactcttttatggtggtaggcggtgcatcagtacttgggttggaatttcgttgaattctcatactacgctttgctttgcttctttcccatatctcacatgattgactacgctgttttgccgaatttgtgccgaatttgtgagtatgtggcttggataggagcattatcggagaaacttcgaacctgttctcaatgaagggctagactttatagcttggtcggttctgtctgctgaatgaccttttaatgtcgaattgctacgtacatctacggctgcacgtccgtcgacaggcaatgccccatgtgatacatcctccgatgtgttagcccccgtgccggtgttggcataaatgctacgatgacggagttgcccaacggtcagatatctcgtcccaccgatcctggtagccttgttctggaggcctggggccagggattaatgataggctcgctgatcatcatggccgcggtgatcctcgccaacatgaaagggcacatccttctccacaaactgatttttgtcgaggtaagctctgccttggaaaataaagcgacggagtccctggtgcagctacgatggataatgggtgacctgaaatcggcagctgctccttgctatcccgcacggcacattcatcttcaacaaacctcctgtctacgggtggtacctctcggtcagcgccgttactctcaacatctcgtggagcctacataatgtcatctcctggatgaaaaacaggccctttttctcgagaaaggtatccatagcatacatcgccaccgtcctgctggtccagccgtattgggtgctggagatctatgccaactttacatattttaacaacatcaacagaatattcgaggttactcgaccgctggaaccgctattccggtatggatcccgcttttgcctttattctctcgttttgtccttagaagtgattgaggataaaaatcgcagtgctgaaaatctgtgtctcatagtgatccgtggtggatctacacggcctgctcgctgttctacgccattaaatgcagctataatttcggcatcgttgaattggtcaaagtcagcccgcggctgggtatcatgttggcttccatgtgtctctccattgtgtttatcatcgtggatacattcagcgttcttggggtgttcaatagcgcctctcttcccattggggtccagccattctggaaggtatgtgtttgatcaaacataggaaaggttctcgcattctcaattgcccccacacagctatcactcattttcaaatgcctctgcaacaccatcgtccttgatgacttcaagacggccctcgatagcatccgctcctaccatcagcagatccaagcgcgaacccatccgtcgaatagccacatatacggaacgaatcgccgcccgcagggctcggtttcagcgtgccagctcacattggaggaagttgaggagggggtctatggtaatgagggcctgcgcgtcacgaggcatctcgcgtaatgtgatcctaagcggccgctggggtcaggtactcgctgggcgcgggttgattttgatcaaacgaatatctttgggatctttggaagcttctcggagttgggaatcggcacaaatacgtaatttctcatgcactggggatttactctagagttcatgacttccgcatgctggacgtgaattgataataaccattgtatcacaaaatgtacactaagaccattagccaacttaatataattattttcgagcttatgttctgcgtaaagaggtatacagagcaagatgagattaagtcccacacgagagtgaagtgcaactaccctccgcaacccacaccaaagctccccagttcctgctcttcttcacttgtccactcctccataaactcctgcagaattctcagccgatccctcgcatcctctgcttcatccttccaatacgccaacatatctgttgcattcatgaccgcccccttccaaccgagcggcaagaggtcgtgtgtcgccgaactgcggctcgcccgtagcaatataagcgcgctccggtatcacgagcgcaacatcaaccagacgccgtggtgtcggtgcctgaaccccttacgatttttgtggatgcgctcaacggacattttcagcccgcggatgacgaactcctccgtctctgggtcgcggttgccgtgtgcgatcgcttcgagcatgtaagggaagtagatccactcgtagcagtcaaggaggtggcctcgtagaacgaatttcaggacatcgtcttccatttcaggggttgaaagggagagcactggcggcagggaagaggtcctggccgagagtcagatgggcttctgcttaggatagtgggagcaagcgagtttttagaaggatcgcttgaatggcaaagggactgaatttgaactgaaaagaacggggaaagtgaagccttaccattcagaggcttgaatttcaaagtctagtgaggcttctctcatattatgggcgtcagggaatctaccttgtgtctggtgccagaagaagaactggatgacccgcatcgctaatcgtcgaatagcggtttcagcaagatagaaataccacacccgagactcatcacgattaagcctttccatgggcagggatgggaaaaaggtcggatacgtaaatcgaagcgggtcaggttggttcagaccgagctccaagcgcagctccctgatcgtgtgagcagatcagattgaagagcgacggtgatactggtagcacaccgtgaagagggggctcacagttcagacttgagacaagcccagtgtgtggtctctagacagcgaaggtccctctggaggctcgcggttgtactggacccgttggacgagaagaccatcatctctgccactgcggctgtctgcacaaaacacctccaggcgcggacaggctgaaacacagccatcaggtaaacgccggaatagaagaaacactgagtctccagcactccatgggtccggaaaaccactcccagccgcatctgggccgcttcgaagtatctttgaccaaggtgaaaggacggcgaccgccgcgccgtcatcgagctcgattcatggtgctcctgaaaactctcagaaatagcccctattgcgcagatgagtagctgtaagtgtattagccagtggttctcgatgagcaatgcggaacggaacgatatgggtgtgagaggagtcccaccacaaggcacgagggcgcgtcccacccgattccgtgaacgcacgcttggtataggtaatcggtaatcaaatggacgtcaaggattgggtttgcaatatgcacctcctcgagaaacgtgtggagcagccgggtgcatgttttcaggtccaggtccagccgttcgagacgcgggtcgttgtttgccaggaacggctcctgggacaaggttgtctgtgatgagaccagatcgtaaagacttgggcctgcgtcgtatcttccattgaagacgttccaggagaggacggtttcgatggtaagtcggctgaggtctgcgcagtgcgcctggtacaatgggctaccatgaagggtcggcgactcgctgtctgcgactgccgagaccctcgttgcggcttgcatgccattggtgtggtcaacgacggtccttccatgttggatctgttgagattgctgctgttgctgttgctggataagcgactcgatctgatcgaggcgttgaataatcactaaactggcagtgtcaaaccttcggtcgcagtcagtttctctgttcatacatcgagaccagcgaagagcaacaatacgcagtcttgaccgggatagtcgtacccagacaggtcagcagggtcgttgaccacgcatttggcgccgattttttcgcaaaaggaacacgacggcttcttgttgtcgcatttggtcctacgggctcggcacacctggcatgctctcacagccctgcgacgagggtatgcgccagcgcgtctgttcggctgcttagcggccgagctgtcgttggatggtaggagtggtggtagctggatgcgggtgtggggggaagcgagcctacattccgcgtccaatactagagggtccaggcccccggaagacgggtactccatagtgccgagcgggttcaaagcggagtctcgcacagtctaggtgactgtgggggaaggctggggagaaacggtgtcttaaatccactgcaccctgctgaccccagacgaccccggccggcccgtaatcggattgccgttaatttggcgctagacaggaacctgctaactccaagctacttggcttgtagcgcaagggccggccttgcttcccatcctgtaaccagcggggtagagctagtatagtagggggtggcgcccacccacaaggtttagggttccattcaggtcttcgtatcagctgcggcgtttgcccgactttccgctgtgcctgtcatttcagctcctgaggtggagagtgtgatattacagctgtcactctggcttcttacaattacttgctttagggagcgtcctctagggtgccggctctaggtgctcgctttaaggtgctaggtatgttacctatatagccagtggcctttccacgaatggctcggtgctcaccatagtattcgagagcaaattatacatcaaggcccactagccgcgcaaatatggcggttgagaagcccgctgagcacgccaatatcgaggccctcacccgggccgactcagctgatgcgccggtcgattctagggctaaatcagccctcgcgagcgacaatatcttcgagcatgagcagactgtcttgcaggttcttcggggtcatccagtccttatttggtgggcgttttttttcagcgtcagtgcgatcggatggtaaatgcttatctacaaaatctgtgcgctgcttattctctgctgacccggcggctcgccagggggtttgacgctcaggtcaacggggcagtgctctccattccttctttccggcgtgattttggcgagcactttgaaggagacttcgtagttcctgccccatggttgagcgcctttaattcgatctcatctgtcggacagttctttggcggttttctctgcagcgccgttgccgaccgagtcggccgaaggctggctttggcggttggagtgatgatctcttgcggaggcatctttggggaattattctcaaccgctagggttgcatttcttattagcaagctgattctaggagttggcctgggcttctacctaaccatcgggccgctgtactcttccgaggtgagctcgacgatcaggaaatgcgtcacaaacgccagtcactgacaaacgaaaggtctcgccagtcgttctgcgaggtattacaactgcaggggtgaatctgggcatcgtgatcggccagttactctccaacgcggccatcaagggctttggcgagcgaggcgaccggtgggcgtacaggggcccgttcgccatccaattcttcttcgtgggtatgtctatttccaacgtctaatgtctgatagagcaggctcaccaaacttgaccgcagtgttcttgggcctagggcttccattttccgtcgaatccccgtggtacctcgtccgtcataacaggatcgatgacgcgagaaatgccctgcagcgactctacggcgccggcacaaacgtcgacacgaaactcgtggctatacgaatgacagtggcccaggacctcgcagcgagagaatccaaatggtcgtatgctatccgtggcccgaatctccttcggacaaccatatcctgcggcgtctttgtttgccagcacttggtcggcatcattttcgtgctcggcttctctgcatatttcttccagctagcaggtctgcctactgagcggtcctttgaccttggagtcggcgtcactgcctgcggtgttgtgggcaccataatctcgtggttaatcgtcaatcgcctgggtcgccgcctcatcttcaactctgggatggccatcctcagcacgatcaatctcctcattgggattcttgacgtcgttccgacgagcggggctagttggacacaggctgcgctcacagtcgtctgggccttcttctaccaagtcagcattggcgccgttgcctttgtccttctcggcgaaacctcgtccccgtcgctgcgagctaagacgaccgccatggccacggcgacccaggccgtatttgggatcgtcatgaacatcgttattccctacatggtgaatcccgatgaaggcaacatgcagggcaaagtcgggtttgtctttggagggctgggcgtggttgcgacggtgctctgttacttgtatattccggatctgaaggatcggaccttcgaggaaatcgacctcatgtttgagacccgcgtggcgccacgaaatatggggagatatgtgattgagcgctagcgcacatcataggatcggggtattccccg

SEQ ID NO: 3397 - DNA, 487 bp, Emericella nidulans
cacatccctcggtaagtaaagaacaatgcattgatatcaaactggagttaacaagcaagatagaaccgtagatgatcccctcgtcatcgaagtcgccaaattcttaaacagaactccagctcaggttctcattagctgggctgtgcaacggggtacagcagtgctcccaaaatcaggtacccctgagagaatcaaaagcaactttcgagggtcggttgtgtcaaccactttctactacataccaatcaggatcctattaactctattgtgggcagacttcattctacccgaagacgcctttcaggctatccagtctctaaaacgacaccagcggatgaatttcccagtccgacttggcgtggatatctttgacaaggttggtgaggagagtgcacagatacaagctcttgagatggctgagggacacacattgtccaagagacaagcctaaatactgggtgtgatcactgcagctcttagtagcaat

SEQ ID NO: 3398 - DNA, 1071 bp, Emericella nidulans
cagtaatcctgccgacacgaaagccatgttgtgatactgttgtcgtgttacatagctacatatatatctcgcgtcgggtcaaagaccgaaatagagaacacgtgctttatcgagatagcacgatggaaccaaatttatattttaactggtaaaagtcaatacaaggttgggcgcatgattgccactgtatatattggtttgcggaggctccgttggggaagcacagggaagtgaaatcacatgccacgatgcccctcaaaattacccccgttgtgaatggtcactcgccagctgactcttctgacgcaaccgacgcccccgacgcatccagacgcctgaatattaaagttctgattattccagcttcatttagatgatatagtctactgtcttcaccgtatggctcaaagaaaccttcccgggaaacgctgaccgtccggcggaaacgatttaagtgattacgtcaatggctcgcgatgcctagaatactggtctttgtatcaagatctaaacaaaatgatatcggggccaccggatcggatagccatgagggcgcaagctatacaccgacgatttcaggaacgtctctccttcccggaccagtcgcctctcttgtgtccttcgtcgcgcagtctacctctttatcgctacgggtagggacttatttcggcggagtcgctctcgatggggcaagaatcacaacattgaccgggttagaactgagtcgaactgtaatcgaggggattctgaccagagccgggcgggatattgccgttcgaagcagcgggagttatggcaaagcagaagccgagtccattctcgagaggagcgtaagctgatcccgggagtctcatatcgttcgcgcgttcgtgtattaacctgatgattagttggctgccttgcatacgacgataacatccgcgtcgttctttgccgctgcatcctttcaattttcctctacaaccctctcgtccgcctcaaatatgtcccagagagcatctctcgacactcgatgctatccttgggatcaacggaatcatcgagagccatcgcggccattataacccttac

SEQ ID NO: 3399 - DNA, 598 bp, Emericella nidulans
  unsure (1)..(598): unsure at all n locations
atcaacgattcggctgattgcttcgcgggcatttctatcctcctcaaggtgcctttctgcactttccttctccagctgcgggtctgccgtggctctatttgggttctcgataggggaggtcaggtgcttggagtaatcgatagccttgtcaagctcatccggagtgatgaagtgattggggtgtgactcttgtgtaccggcctgatgaatcttcagggcttcaacaaagggtgttggtcttccgtgcacgggatcgccgagagaggcgttacgctcttctgcaagggcttgttgacgggatagattcacggccttgcgctgacgcgattgagccatcaagaaaggatcatgtcttcagcgttccctcgattcagcggaaccagctctggcggacgtatagctcgggtttaaagatagtctggcaagcgggctctgaacatgtgaggaccctacacaanggtgtctcatcattgccaatgataccaacgaaagaacagcttaccggtgaatgccttgagtgaacgcttggacgaaatgcgacgaggcattgtgcagagtgtatcttgccgttgggatcaccaatgcttctcgacttatg

SEQ ID NO: 3400 - DNA, 4098 bp, Emericella nidulans
cgcccgatttttggccgttccgaacgacagataaacgctctagaacctaattcagagtgccctcacgcggaatcacacaactttcacggataccgcggactggataaccttgggttgtcaaagtacagtgggaagcttcataaatgcgacctacagaccgcacgagtcatcggccaagttgatcaaaagtttatcctggtagaaatccctgacgcgaacgcatcaactcttgttcttatcgatcaacacgcagcagatgagcggtgtcggatcgaacgcttatacagcggctttttcaatggctccgaggtgcagacgattgaggtggagccgatagtcattgccataccacctgttgagacatcgctctttagacagcaggcagaattcttccagtcatggggcattgagtatatgatagggcatgcctcagaaagcggcaaggcctcgatatctgtgtcagcactccctactcttatcgcagaacgctgccgggcagaacctgagcagctgattggcatcctccgtgctgaaatctggaaacggactgaagagcgcccgcagacctttaatgctaaggggactgattctgcagaagattgggtccggcagatagcaggttgtcctcagggtattcgtgacatgcttaattcgcgcgcgtgtcgaaccgcgatcatgttcaacgacgtcctgagcgtggatgagtgcaggaccctagtcagtcgcttggctagctgtgtctttcctttccagtgcgcgcatggccggccttcgatggtgcctctggtggaataccctggaaccgatgagggaaggggtagtacagatgaacgcgaggcggattctggcttcaccgaggccttcagacggtggcagtcaacatgtcagtgatcactgctagtactttcgtgagcattatatccgcctatcaatcgggtacagttctcatatgatttttatatgtttcttggcatacgtaggaatatcttgaagctattatctatcagcagcatatgaataaatcttcccttcaatcactgagttgaagaccgtacttcttgagtttcactcggtctacttcggcgcattatacggggcaaaagtttgccttcactagattctactgtacagtcacaccatcttcaattttttcgaccacctacgccggtgcattcacccgtgaccacactgccacccccaccggccttttaccaggaattatatccagcatcttcactacgctcagcccagaaggacgcgaaaagcctactttcgaatcccagtccttccccagtaccagaagctccctcttctcttcaaatatctcagcctcatttcgtccaaaagggactttgtcgccttcagacacaatggaagggatacttcaaagacataccttcaatactccataatattggctttcctcgctgaatattagggcctgaaatccaaccattgcgggcacctttctaaaacgtatcaccctatagggaattgggaggtaactccaaggctctcttccaaggacagcaacatggctgtgtgtagtggacttgaatattctaataaagaaaaaagctgtaacaagtacagactgcaacgtagctgctgtctctagacggctggcatgactgagtggaacaggtcgtgctggtagggacattctcgacaaggaaaacttaacgaccctcaagccttggaaaacccctgaataacttgggttaattcatcatagctgtacacttccctcaactgcggatacctctgaaagaggtgctggtgctggctggtaccgttggcagcggatctcaccctgctttcgtcttcgaaatgccataccttccacgatatggttcgagcccttgccaacttcttcgagacgaagtttctatcggcggcgatcaagttggaagattcaaatacaacatatatgggatggaacaacaatgtgccgtaaaaacggcacttttgttatcgccgggttttctccatttttggcatgacagcaactttagggattgcaattggcgtgaacgctggtcgagcaatgctctcgagagtagaaatcatcgatttataaccttacgcaaggtcaataagtacaccatcgataattgttcagggccaactttctagtttcaatacaagctataacacctcgtctacagcgcgtctaaccgcagctggagcattgcaggcactgacctgttccatcagaacatgtcatgcttctagtgttctttgatacccgattacgaaacctaatatcaccattggcagttaacgctctaggacagctgcgcaatcagagccggtaagagttgcccctttgtctattttgccatttgggtttggcctaggtgtggattgtgttactcttaagactcagggtaagaaagggaatagaagtcaacctgtagctcatcgtgtcagccaaaattttgtgctttttcagggacagtccctgcactgattttcttttcgtctctgcattggtgggattaccactaccgctagagtcggaaggaatggcaccagtgtattcctttcatagaaaatccctcggagtcagattctatgtagatctttttgctgctatgacggtatctgcactgccaatggaaattcctacttcttggactctgatgaaagggaatgccagcgtagcactagttgtatatgatagccaagctaggatcaccgaagcacttagggctaaaagatcacgtgagatgcttcctaaatgagggtctttcctaaggtcacccgttgacctgctctgtttatctttataggacacaacggtagccctctggaaccaccaagagatatcccgaagcccttgccgtagcttgtgtataatgccgggagtaagttgagattctcactatctagctgagagggtgtttaacgctacgcaggcatttttaacaataagagctataaattactgctaatcactaaaccggtgacagcattttaggttccatcagttacagcagtacctggtgtacagcatagttctggaatgctaccagagggctctaagcgagacccatgagtctggcattcgccagacaacctagagacgtgacgaattggcaatgcgaacactttctattgaatccatcaaaacaggaacttgcaaaaagggtcaggctcgacgaatacaggccaagagggcggtgctaatttgaccagaatgtcgaggatctgatcgcatgatatttgtgaagcctggcttctcgatggtgatttggcatgcatgaaccaaggctcataagtttcctaaaccaggaataataatcagccaggagaaggtgtcaattttatgccttaaattggcgggcacggaatcctcagatccacgcccaaggaacaaccgttctcttagatggcaacagtatcacccggattttcccaatgaacgaggcccattcaattcagcaaggccgtgctttactaattccttggggttatcgggcctattacagaatcgtgtgattctgccacagtcggtgtcaccgcatgtggagcagccgtccagtataaacgtgggagcttagagcatgctctagcgatccgacccaggcaggaccagggctgggtgttgtctcggggtttcagtccctatcccagtctatgccagctaaaataagccggtctttgaacattcgtgcaatgagaaccgatgtatgtggtggtctagtggccctgcccctattccctcgacatcctctgaccaggtcgctcattcaaactcaccaatcatctatcattgctctttatatcctaatagggtcactcgtttccagagtatttacttcttccacactatcaacaattccccccccccaaagaatgtcctctactaccaccataaccgcagtcgcttccgcttcagcggcatcctccaactgcagaggtcctcttatgtatgaattgcccgttcaagacgccgcctgtagaatcccaaacaccaacgactacaaatccatttttgagagtgcgcctaccctgtcgccgtacaggctcggtccagcttcgggccctcgtaaaaagatgtactgataaccatgcgatgacacactgtcatga

SEQ ID NO: 3401 - DNA, 1971 bp, Emericella nidulans
caactcatccaggtcatctcgtacatactcttgccgatatccaagccaggtcgacccatggaggcaattggggcatccggccgattatcgagacccagtaaggcccagacaacggcgacttgctttggctggcggtccgatgggaacgccggtgcatcgtagcgggagagggcccggcaagttgccatgagatgggcacgctccttgactgagaggtcttcagggaggtcgcgtgcgcggttaatgccctcaaaggtaccgagcttgtcgacaaaatcggtcgttacgatagaggtcggaatgagcgagggtgcgcgcatgtcgaggatgataagggcctggatggtttcaccctcgcgtgtcagacggtgggcaacctcgtaggcatacatagagcccgcggaccaaccgccgatgaggtagggtccatgaggctggatgcgccggattgtgcgcaggaaaatggtggccatctcctcaatggagaggtcgaagagctccggctgctcgaggaagggggactcgagggcgtaaatccgccggcccttggggagggctttcaggtggatgtaggactcaacggtcccagaaccatccgtcgtcaggaagagaggggcttcgcgggagcgagactgaccctggatcaggactgcacgcgagacggcggcatccagtttgtgctggcggctggagtcgatcgtggtctctttcgctgggttcgtcgatgtctgggcaggggcactctcctcctctgcgtcatcatccagagcttcctgggcggcgcccactgtagggttggcgctgaagaacgcagcagggagttcgatccccgtcttggcgtgaaaggcagcggtgattttgatgctgagcatcgagtccatacccaccgagtcaaaggtcgtcgacggcgtgagatcactggcttccaatcccagcgcttgagccacgagagagagcaggtgctggcttggtgccgggccttgcttccgggcttgggtctgttctgggctaggggtcggcttggtgatgtcctcctccaggtcatccagtgctgagcctcccagctcggcttcggcgtcagccggagtagggaagttggtgaagaaggctgccggcagctctacggccgtagtgcgctggaagttagccaggatggagatggccatctgcgaatcgaccccgaactcggtaaaggtggtgccgggtgagctcttcatctccgccacactgaccccagtctgctcagctacggcctgcagcaattctgtgcccaagtcgaccatatctgacacgctgctaggtgttggtgacctcgacattggggtgttcgagccggaagagctgctggggctgggcgatggagcgagctgccgggcacgctttgccatagacttggccggcgcagcagccaccggcttggtggagcggccgcgggtggaaccagtgagcagggtaaagaagtatagctctagcttcttgaagcagatgttcctgcagactggaacatggcggtcctggctcttggtggattagacgtcgtacagacttgggccagactaatgatactgcccgcgcatcgttgcgtatacaaatcatgcttgagacaggagtgatagcctacgttccaaaaagagacacgtgaaagcaattggaacttaattaacagacgaagccgaaggtaatgtaaagaacactgtaaaatgaacaggtttttctggccacaggtctcccccgatgtcatccagactcttagaatcgactgggggcaagtccatccgcatggagcggtttttaatttagatacccattggggctttgtccttaaccaaaaacccccgtgtcgtgatcggggatctcgtcaacttgggtctcccgattctacaccttttggggcctcagttcgtgctaaacttgttctctttgtgcatccttacgaaaggcgcaacccccccgggggcacacaccatccct

SEQ ID NO: 3402 - DNA, 4504 bp, Emericella nidulans
caaaatctgtaaatcctacaaataagcatttaatagtcaatatataaacaaaacgatacttaaaaaagacaattatctcattaaaagagttctaattaataattgaaaacacaactaatgaactgaaaaattataaaacacaaagagatcttacacataaaaatacggtaagaaaaaagaacacaagaaaagttccattattaacaactatgcaattgctaacacgcatcagaattcgacgaaggaattttccaataagagttactaataagattggaacaaatagacgtagtgcacaagcatagaaacagtcttctagcaatgatttctccccaataatgccggcttcagttgaaatgcagtggaaaaccccaggagccctctttggagtcatccaataaccctggtggaaccatgtgaacgaaactgacgcaagtagtctggcggccgaaaggcagccggaagaacctcggtctacatcattccacacttggcaggcttcctgtccgagctgatggtcttgaacccccacggttagttctgagatgatgcccttggatccgtatcgtgtatggactatcgtgatgctcctgatctccgcaaatcctggaaatacgacgatctcatctggggcccgtttatgaacaaatacgtcttcctcgtcgcggatgccagcactccccttggattccttgttgatgaacttgaggctgctgggtttgagatcaggggcattgacagtgttggcatacattactctgccacactctggcgctggtaccacaactagctcggtaatggtgagatgatcaaggccatttatgatgaattcttgtaggatatgttaggattagggctgattaggcgctgaacgccatataatttacctagtattatatacatccaagtgggcaattacttgaagtatatcccagcacaatttgcaacaacgacggagcaccatcgatagaatcaaccaaccagtcgccccacggcaggaaagcgccgccccttccacctgatctacctagtaatagtcttctccctttgacagagccaccactgaccccttggttccaaatgctgcgtgcttatgccgctgaccggggctctcgatctccccatattgcaacaggaccttcccaatctccttttctaacggctctgctcccagacaatggccgacagccagacggtccaaatccggattccgcgtcgtcatcagaacacttgaaaatgaggttctctgtgagacaccatttcgccgcaaggcaaagaatccaataataatgcaagcaacagtaacaccaagcgcagtcatataggctaatatcaggtactcctgatcataaatgtagaagttgcgcgaggtcaaatccagcacatcaacagtggtgtttgcggcattaaggctgaggagattgtaggtgagattgtgtgagagatcttcaattgctcgcgccagcgttctgttccggcaagaagtcattaagctgttgccataaagataatcactgttactgccattccacatctctggacatgcaaagagaccagtctgtgcaatggacaacttggtaaatgctgtctgtgaggtaatgttctctctcactgaccctgaaacaccagtgcgcaagttaccctggataaggccagaaaatagcatatgtaccacgtagaaccccccattgactgtcggatcgctattctggagtagagagtaagtaccagcttctgagctccagttagaataggcaatgtgatcgactgatataggtgtcagggtctgaatgccgtcgttgaaagtaaggctgaccatgtaggaggtattccagagctggcagacaagctcagttggttgagaggcattattattccacagtgggttctgccctgcagcccatataaaaaagtgtattgttaagatcatgaggagcagccccagagtagacttctagtggccagtctgttttgtttccaatctcactatcccatagtccctggctcaacccgtgcacgttcaagagagcttcgctgaggctctggcacttgtaggaagggccccagaattctaacaagtaggacgaatttgggaacggtgcagggactggaagtacttgcatagatgaggcagtcactgtaaagaggcggctgagatttggtgagggggcattaatgcgtcctgctccttctaatgccgcctcaccagaccagaaggaatcagcaaagctcacgcttggaacacctagcctggaggtctgccgggcttgcatggcaacaacatagagagtagacggcgtaataatagcagtcaagggtatcagcctggttcgattcggacaggtaagtcataggctcattctggccagtacgagtggagacttggtacataccaggagatgattgccagggccgtgagcgtctttgcatacagccataggtcaggggtgaaaaaggcaagcggactgtccaggactgcaaacatgctgtcaatcccacttagcttcacactcttccggcggagggtggcccaggtctcctgcactgcagcgactccaaccgcggagacaaggcatgatttgacgagaaaggcaaagccggtcccaattcggattgcccacgcttgctggttcctagaatcgacaagggtctgatcaaaactgcggtagtagaaatgatgacctactgaaagcatcgccccgcaagtgacaagcccgaccatcagagttggacacctccagccgatcccccatgcggccggtaattctgcgccttgtagtggccgcggtgattggcgacctttgttggagatgcggtcatagtcaacatggccactggttgatggagacatcctatcctggacatgaactgaggtgggcccttttgaacggctgaggatttcttacggaggagagaagagaacccttcaccggtcttatagaggctgcggctccagacaagcctgactatcaaacccgctgtcggcctctgtgcgggtcatagcgcagtctccgctgcaacagccttgcactgcagcctcaatgcagcctatcaaatgctgctgccctaacgcttgggctatatgtgattggcggaaaggccgtattcggtagcaggggtcgggtcctccactcgccaatagggagcgggtgtgagcaacggtaggcagtgcaatccccagttacaggtgggcgatgctgcagggccagtgctcctatctcatccaatcaataatagcagtagcagagtcttatcacaaattctttagccctgaatttattttccgagccccaatgcatatacagcaggacaattcaagtttgtacctgatacggaaatatcaagtggcctttatcgtgtacacttgacgccacgtgatataagcggcccagcatctgaccctgatctgacccctctatgtattgtatcgtgaagaggagatatttatcgaggccttcagggccttcgcgtaaagggccgaagaaggacgttggggcataggcaagataagtaaaaaaagaaataaaacttggacatacaacagtagggattcgcatgtggtcacccaccatactactaacctaccggcgtgtggcttaagtacggctgagcggacgggaagccctgttctccacaccctatggtcgtatgtacttggaaatatacgaaatcaggataatacagttctactaggcaaagatatccttacggcaagcctgtattgacaggttgccagcatgtcagggcccttatgtggtggcccgcttttactagaatataaaatcacacgaatagtatttagaaactattagtatgatagaaaaaatactttccttggataatggagcggacgttaacgcccacgtcggtttgtatggcaaaagctccccaggtggaagcgctggctcatgtgctttgttgggctgtttggcagttttggcgggaaataaaggtgctgaaaccagatggggagacgtaattggtaacatctatagcatgaccgtaggaggtgcgcgatctaggtacccagcattggttagaggggtagtcagatacaaatccagcgctctaaaagtgaccattgttaccagttctgttgctgaacttaacgaactatttccagaccagaagaatatgaacactattccagtggctgcttttctaaggaagaatccagtaccaagtttcctgctagttgctgttcaaggtcaatcacagatttccattcttgtagcattcaaatttcccctagatctgttggttctgttgttgctgccttttgtttcgcaggtcatgaatagggtcatagtacagtgacttgctgtattgtcaagtactggaaataaccagtctcctctgtagatggatacttcggccctggaagtgatgaaaggctggatgtaactctcacagaaaaattcaagggcccatttaaggaatgaattgaaccggattttacctctaataacatattctccttgtaactgcacacctggccctgatg

SEQ ID NO: 3403 - DNA, 1194 bp, Emericella nidulans
  unsure (1)..(1194): unsure at all n locations
tcatctccgaggcgatcccggcttcttcagcgcttggtccttggccgctttaagctccttgatcttttcctgctgctctgggctcttgaacgccaccggccttggcccgacccgagagtttcatggccttattgaagatctggaggatcagcaccgcacggatctgaccaccgaccatctgcccccgatagaggaactggttcgtgcacagactctggatggcctgcatgacggtgataccgacgacaaagcccatcccgcggccgatacgcggggccggctggcccgagcgctgagcaacataggcctcagttgcaaaggcgatctgataacgggtcagatacggagcgaagacgatcagcagtgaagagatcagatggcagaaaccgccgagtaggaactcgaagcggaaggtgtcgtacaaggcccagagcagcggccgcttcgccccggcgtttgttctcttctccagggaaacctcaaagcgcttcgtcaaaacgtcgacctctcgatctgggttgacggtccagatatcctgcaattccagcgggcgtagatagccgacctggaggcgattagcttgcgcacgtgactcgcgcgcgaacgacgtaccttcattaacggggccatccattgaaaggacgcgatactgaagaacgaggccccatattcacgcgacaccgtccgttcttcaggtacgggggggattttttgccagcgtagtgggttgaggctgcgctggtaccacttctgcgcctttggatcggcactttcagcctcggtggattcagatccagtttccgaccgcgacccagcggtcggaggctgccccccgctctcggcaatcttggcttcagaagacaaccgcatcgtcttgagaggatctcatctcgaggctgcgacggagtcacgacccgtggggggagcacaggataaagaggacagtcttgatgggagccatcggtggtatcggcgataagggtgccgatacccgggtggcccattactaagcgttcttctcattggtcagcccaatatgaaggatttctgctaagcgagctctctatagtacgtaagtacaggtattgatcacgtactatcaggatttctggtgaaaacgcaacancagaaaagccattgctcctcgctttgtctgagctggtcaatggcgttgtattgcaatatacaggcctt

SEQ ID NO: 3404 - DNA, 2191 bp, Emericella nidulans
tctgcgcttttgatatgaaaaaggactggatgcggtgcggacggatccagagggctggcagactgattacgcatttgatgatatagcatgcgaactcggcggtcgtcgtcccggtgtcggcagggatggtgttggggacgtcgacagcgaaattcgggtcccaggagagcaggatcagatagatgcattggcctccaacccaagattggaagccgtaccatactaaatagcatgcatgaataactgtcttcagacgagtcagatcgggttctggcaggacgtaccaacgcccagaaaaatacgattccagatgacaaattgagatccccatagtccccagactgcacggctgaagatggggaagccgactaagttggtcagcagtcaatccctcttcgagcaatagtgcgtgcacttgactcactgtggtaatatgccccggccagggagctggcgactagggccaatgtcgccagaaggttgcccaccacgattgctttttgggaatcagcatgagacatgaggagaagataggcagtgaagcactcacagataacggcctgccaccaggtgagcccaaggggtataagagagctaccagtcagatagctggaaatattgcaattgatcaagagccctgaacgactacgaatgagccactcgttctgtcacgagaggtggtctttttagggtattatacaaaagttatgaaaagtcagaaacccccatgttcggtgtctcgcattcacagggcggatatcgtcgttctgggacatcgtcagcctaggcaggatggaaataatgcgaccgagctttttgaagtattaggggccccatacaatccatcgcgattcacgaggtagtgatatcttctttagtgctgtggtgattttcatcttgttcgagagcgcgacctgcataggcacggaaatccattaggtctacagcagccgttgggcaccttttatcatgatatgagttggagatttggagtcatcaggcctgctgcactatatggcttggctctctgtttggtcgagaaaaggctactatcaatgcctccctgtccactagtccggctatctaccgccattggagagaccggactctgatgaggaattgccggtcagctaacgatgcgcataaatttattgctttctgtgtccatcaataccccactcacactaagcaaaggagctgatataaacaagaccagccggcacattgccgtttgatccgggtcaagaggggatatagagcaagacattacagataccgcgaagtaccgactcgcgtggtgcctataataaatggcaggacttcttgatgtctgcttctacagtgtcacttcatgaaatacagaggttgcccgctcggttgcatggcccattcgcctacgggatacgatatcttgtttagaatgcttactatgccaggcctattgccctctaacaaagatatatgcgtcacatatagccgcaatcacccgaacaagctgatccgagcggccccaggagttcgaagaccagctatgttgggttggtatgcgctcttcgactcgctcattatcattatagttgagctagtcaccgccgaagcagaggatgacaggcactagagatggctctacacagcatgacaaggtatatgcttgattagtaccaagctacatttcccgaagcgagaaatctcttactccaaacttcagacccaacctatcaaatgcagcccccacggccccgtctaaacttctcgagaacatccaacgcccgctggatgacgtctggcggatacgcaaagatgatcctcgcccatccccagacgccgtctccaagcgcatagttctgcccctgggagacaaccaagcccaactgtgcaagttcgtgcacagcggctgtttcttccttcgcactggagcaattgtccaccaatctgaagaacacgcataggccgtagtttgcggggataaacttgatatgcagtctctcgaaaccacgggtaagtagattgtatgcagcagtgagtctctcagagctctttgcgatgagcaagggaaggtgcggtgagtcaagaagggctatggtcatgacggtcgttaaagaggatacttcgaggtagctggtgagcccagagccgagacgtaacgtgtcggtggcttgcgatattatgcagccctaagatactgttaaga

SEQ ID NO: 3405 - DNA, 3782 bp, Emericella nidulans
cccatcatcatccacttgccgacaggagagacaatcgacacgcgttgaagagatgaaggtccaactgagaaggtcgttcctacagtgcattatcggcagaatctgcaatctgattcatttacctgtactctgccagtaacgtttcgaaaacgtagtgcttttgtttttgttgaccagactaggagagtcagcagacgaattttagaaggatccaacccctgaccatgctctgctagacaaacggttgcgatgaacgctcggctccagcccgacgcccggttcgtgccatcgataaaggctcattggctgatccctcagtgtgtgagattaatcctggtcaaaactctggaatatgtgggttatggggctggctttggaatttaaatcattattgcagcgcactgaagacgtcagacacaactgcgggtggactgactggtgggggtttgtccacggattttattatttaatatgtctttggcctttattatgccgcaagggcaatacatacaaagtatgtggcgagtttacgttttgtattgaataagactggtgaaagccacgtgactgatataaccctgtacaactatcatataccatctcggcatttgatcttagggttcaaaatgatctggaaatgatctaaagatgacttgaagattagaggcagtggacagttcatagacaaatccgcgtaaacctgcctagatggtcggaaaaggcgaattcatccaatttggcgtcagacgtttatacagatcaagatagtaagatcgagcctttgcctcacaccatttttcttgtcgtctgcttgagaccaaagtgcagccgagctaatctagccaaaggtcctgtttttggattggaggagacagaagagaagcaaattgtaggtttattcagctctcaacggtaaagagcagtggaactatcacctgcgccgatgctgccatacaacgccactacatcaatcatttacctataccggaccgcttcctgttaccctagtatccagatatgcaaacccctaacgttagccggaaacaatgactcgagacgcgtgggccaaatttcgaagcgtgagaaaaaccgaggaaagaggcatgttagcctagtggaagagcaatcaatgcgggatatcacagaatcaaggatcaagaagaaccgaaggagcagtaatatgcatgtcgcgatgggccgggtctctccaaatagaccgggacgtagagtatgaacatcctccgttattgatatcggaatatgagcaacaatggtgcaaatcagaaaagaaaataagaacaatggccaagaagtcattacatccagctgatgcgggatgaatgaaaggagatacagaataaatcttctggggtatgttaaacgaggacaaaatcggagactcatcctgagcccctattcaggaggaaaacatgtacagcgcaggaaaaagacaagatatatgcagacatcacaactccactagcatgcatcgaaagccataatcacatgtcaaaattgtcgtcaacattgaaaatctcacccgcatctccagtcttctgaacgccagccatgcggtgatctatagaattcccagatcgatgggaccgatgcattggctcgtaatcctcatccatacgatcccctacttcgttcttgaaatggtgatcgatcgagctctcattcacaaaggtaaacccttggaaattagcttgcatccctggagagagcggcgtcgacgcggccataaacccattggcaagagctgcagctcggtcatttagcgagttactgttttcaagagcgttggtaaactctgggtcaaagttggacgtatctgtgtcggacttgagcttgggtttgaacggtgggatgacctcttttctgcccagtgcctcccagtcaatgtcatggaaaaaggggtgcgccatgagttctttcgcgtcattctgggctcccaggcggtgcttgggattccggttgagcaggcctttcacaaagttgcgtccttccgtgcttaaagcatcacgagggaaccggaccttgccgaaggcaatgtttttgtacatctgctgcgtgtcctccgcgtagaacggactccagccacaacacatctcaaagacgaggacacccagtgaccaaaaatcaaccattttcgtatacccttgttcatcgagtagtacctccggggcaagatattctgttgtgccgcaaaacgtattcgttgtatcgttctgcgtaagattcgcctttgacagaccgaaatcacaaagcgcgatgtgaccattggcatcaagcagaatattctccggtttgaggtcacggtatacgatatcatggtcgtgtagatgttgcaaagccatgatgagctcggcaatgtaaaacttggcgcggggctcctggaaccgtccctctttctggagatgccagaatagctcacctccagacatgtaatccgtgaccaggtagagatccgtgggtgtttggaaagagaacttgagcccgacgataaacggagaagcagccatagctgttcgaaccaggatatttctttctccaacggtgtgcgcaacctccttcttctgaatgataactttcttcgagagcaccttcatcgcataaattcgccgtgtatccttcttcttaacctggtagacttggccaaaggttcccttgccgatcagcttcaggatttgaaagtcatttggtccgacctgcttcttctccgtcttctcaaacctcatttccatatgaatctctccggaaactcgggagtcccctgctgcccgacctttcaagggaaaccacccgtccaagcgactgttatcttccttaagattcacgcagagtcgcacatggcctaggaaggcttccgagtcattgcggtcatacacggagacgtcaatttcagactggtcaccgaaaacatcactagatagcaacaaagatcaggaaactgcaacatttgaagacaaaaagtatagggataagaagataatcttacaagaccgcttcatggttccagtgtggatctgtgataggagcatgtcctctgtggtctgtgctctcgagagtattgttatggctactctgtcggttcatcggaatagccattggtcgtccagaatcgagggccgattgctctagttccttctgttgtcgtttcaaggattcttgctcctcgtcctgaacgctcttcgaaattacctcgttccactcgaaaacacagaccacatatgggtcgaaccccggttggaggcccttcccctccgaaatcttgacatgcagcttgcctttgagagatgctaccgggggaccggaagacggtgaggaagaagtatccatcgacgacgggaagacttcgttaagttttcctgtgatttcgtcggcggaatctgacggttcgtcgcgcggcgaatgggtggggttcgatgatcggggaggggatgcgggagctttcccattggattgcaaatcttcatcggacattgcccgaggtgtatgaggaggggtattctttaagtgtgaaggatttgacacgttggcagttagcttcgcggcgttctcagaagacgcagaaacatgcggtttctcatggtcgagaaggggagcttcgactaagcaaagtgattccggagtttgggaaagagaagggttgaagaaatgagaggcaaggacgggatcgtcagaaatgctggagacgggatgagaagaataacgacgtgcctgagaatcagaacaggacacgcttcgagatggaggtggatatctcttcagtgtattaa

SEQ ID NO: 3406 - DNA, 3382 bp, Emericella nidulans
gaggaaccgtccgggttggatctgtccagttggcgcgcgatgctcatgtgtttccaaacgagggctgagacggcctcgactttagtgaactgggtggattcgtcgttttcgacttgtgcgagacgatcgcggagggctttgagcgatgatgcgctgaaataccaggtgcttacagaataaggtactgtgacggggttttcgcggtcgagcaggtaggaaccgcttgggtcttcgcgggcagagctatcaatcgtgtattcgggaagttggtcaatagtaacctctcgcaggccgtgatctaatcgccaccgatcacggctgccctctgctggtgtcgcaggcagatcgggtttgccgtttgctagcgacgtcgctgtatgcctggcccaggcatcgatcaggatactgatgcctctcgcatcacatactgaatggtgccatgagatcgcgatgataactccgccatcaataatattgacctgcagaaacgcagcaggcagtccgtccgcgcttggttgcggctgtgggatgaagaggatatcgtgaggaatatcactggtggggaagtgtttcgcagccagatcagggtaggtgccatatacccaagattcctgctttgtttgatccacgaccttgaaagggacgcccgaattgggcccgatgcgtagctccaggtccttgcggtgagaattcgggactggagcaatggtcgcggcgaggtcaggtatctcgctcaaggtcacggcgaggccttgcttcaggtggtgaacaatgtcaatcgaggtttttgaggaatcgcgctcaaagataaagacggcctttgcatagaatcgcattatctgttgatctagagccgagagcttgatcacgtcctcgcttagaggtacgctgagcttgacgtttgtttcttccattgtgagtaaaaccctgagatttggtcacagtcccaaagtcaagatagagcttgtatagatgcttgattgaccgggttctttgcattgcaaaaaaagagttgtataggtaaacaagagcatatatggagcgcgaagcttggagcaggacataacgcgacgcactgttccggcctaatgcaacgccaagcctaatcgccaaatatcgattctcccaggttcctctcaggttcctcttctctccactacacccctacagtcacatactgacaacatcctacgtaaccgagtatcaatgcagatccagcagcttagcgctcaaccattcttgggaataggatcgcatggcagcagagcccactctgctttccttcgcctagattaggcctgtcgatctgtgattccttcgcgtcaaatggcgggtcgatcgtctgcaagtagttcggccggtcctatggcctgggcatcgcagatctgtcttgactcttctggagttacggagtaacctaccttccttttatttccttcgtctcgtcatagtgggctaaccctgttctcttcggtagtgattggcccgtgattccccatgaccactctgcaacgaacacgtccaagggtatctcggatatagcatacttcgggcgctgcaggaaatgaaagtttcgccaccgagataatctgtccgtcagtgattccgtggagggagaatagttcccttggtggaaaagccctagcaacgaccccgatcatggcacgtaatgaaaatggtaactcgatttctgggcatgccctgggtggacctgacatgacggattagaaccgaggattcgttccctggtattgcgtgctgtacttaacgctggccttgtatctttcttcaaacatcccgtatcttgatcacgataccccatgctattcagacggtcaacgattagccgtacctcctaatttctacagccatgagtcctgcatccaggtcccgtgttgagatcgctgatagcgagtcagacagtgagaggctttcttcctcgccgtggtctatactcagcgacaatgatagcaatacatctgatgagcgcagcacaagggctggccccggctcactggagccaatcgcagttattggtataggatgtcgactatcaggaagcgcaacagacgtttctgggctttgggatatgctgaaatctggtcgctcgggatggacaccagggcctgggacacggttcaacatgaaggccttccaagacccgacagggaccaggtctggaacagtaagcggcgcttgatggttcaagaagagtatgtgctaaattgattcatttcttttcagacaaatgccacaggaggacacttcattcgagaagatatatcaaagtttgatgctacatttttcgggatcaaccctgtcgaggcacaggtatgtataaaatatgcatggcgcaggcctttgtctcaaattagcgatcgaatgcgattctaacgcttcgcctctgcaattaggcaatggatccccagcaacgcctgatgctcgaagtagcctacgaagcctttgaaaacgccggtatcacgatggatgcattgtggggatccaataccggtgtatacgtcggtcagtgggcttcggattaccacgagatagctactcgtgatattgagagaccacctctataccttgtgacaggcaccgggcctgcaatcacaagcaatcgggtctcatatgtcttcaatttgcgcgggcccagcttcacagtggatactggatgttcgtcaagtttagtggcgttacatcaagcggtcctcagcttgcggaaccgggaaaccacgcagtgctttgttggaggcgttaacctacttcttgacccacaacgctttcactaccagagccggcttaaaatgttttctaaagacggtcgatcttttccatttgatgctcgtgctaatggatatggacgaggtgaaggtgtcacgggtgttgttctcaaaccattatcagttgccctgcgagatggtgaccctgttcgggctgttattagaaactctgtcctgaaccaggacggccggacacctggtatcagtgtgccgagcgctgttgcccagaaagaagccatcataagggcctacagacaggcaaagctggatttgtatgctgactatgtggaagcccatggcaccggaaccaaggttggcgatccaatcgagacgagcgctattgcagcggccctaacgcaaaggaggtcgccttcccggcctctgcccattggatccatcaagggaaatattggccacacggaaagtgccgccggtctcgctgggctgatcaagtccgttcttatgcttgagaacggtatgattccgcctcaggtgaactatgagacaacgaaccctgacatccatctggaggagtggaatttacgagtacgtaagaattctgtcgaaaacatgacaacactgactctaccagatcccca

SEQ ID NO: 3407 - DNA, 6339 bp, Emericella nidulans
acctttctagcatcttccatggcaagcttgccgaagctgacggcgtcgcgtaaagcatagtccagtcgatcagcacagagttgaggcgatggcatctccactaaagggaaaagttcttcctcaaaaaccttctggttgatcccatgtctggcgaggatgtccggcagccgcgtcgtctcaagataccgtgtcttgtgtacctcgtgatagcttccttccccgggcttggagagggcgtgatcaatgacatgactgagggtggtatgagagatgtcatggagaagagcagcgacttgttcttcaattgtggcaccaactcttcgcacgagtataaatgcaccgactgaatgttcaagccgagtgactcgcggtgtcaggcccaagaatccagtaactccatgctggcagatgccttgcagtcgctgcacctccgggctctgaataagttctacgagcactggctcctggaccagttcttctccgtatatttcatcctggatcaagatgctgtgattatctatgagttggtgtgttttgaggacttcggcactggtaggagatgacatctctgttggaccaggtgctcacagaagcaatcgaagtaggataattgggagaagtatgtgtgcgttcgaggaaggagcgtaaaacaggttgaggaatcgcaagcgccatttagtcatacagcaacaggggcagtgctacgagcaaggggcattaaacggctcaatacgggcttggcgtttgagacttttcactttatgcatgtgttgcttatagctcgccggcctgcaagccaactgcaccaccggcaatgctacctactgtcgttttgagcactgagaatgatccaaatggaccagtttcaaaccgtcattgggtacctagaggcctcaagggaggtaaaaatgcagagaattgtccatctgccgtcgtgcagcaaaatgctgacgtcgccccagaagtcctccagtgtgccaagaataattaatgtgtcttatggacgcctggatcaagcctcagcaggttgatattaccaggcatgtgcattattctgcaacgccaagatcttgaggatcgtcagcgccaagcttagcaaatcagcatcttctactcgttatatacgacccccataacatgtggtgccatgtccaatcaacctccagcagaccttattttctgcataaaacgttgcatcagtagaacctacatctgcatcttcactttttctgcaattgcagtccaatattgtactgctttggttgctcgatccacctctgatcaacaaccctatccacacgtagcactgggccttctgcacatagagcaaccaactaactgtcctcatgcctgccgagttctagctggcatatcgtcatctgtctcactacccctcttttaatgttgcacaaacacgttcctcgtccgcattttttatgtttttttgtgtctggagctcttctccaagcttctgtcagctatgttatttgaccacgccattgatactagagctttgattgactgggtttcaagttactcctcttttctgactcaagtcaacaagcaagccccttttttatagctcttgctgttggcgcctacttgcttgcctagccaaacggcttgtaccctataacgccaagctttccaccatcatcatctctgctttctctggtagatcggtcgtctttccaatttttgcgcagctaaccgttacagactattaatccatgtcagattagtagtttgctgagctagcccatattttggctgctttgaaattaaaccatctatacaacgacagttttaactaaattaaaatatgtctgatctgctaccttgtccatgagcttcctttcccctttagttttggcctggttagtagtatacttgcctggacacatctcttacaatgctttttatccagtagattctctagaaagatcacaagtttgttcatgttctgtctttatcttgtctgcatatttttcgggctgaccttctatatattatcaaatataacctttattagcagcatgccagctacagttaggccggcagtctaattttgtgaatatttaatccctgctgattgaaggctaagtacaggctaaactaagtgttcaatacaggaaagaaaaagaagtttagaaatacctgttttataacgctagcaagagcctgccaggaaacctttataaaaaatatcgttaaaatacctatggcttttttccttctataagtactgtaatatggcaagtaatactgtactaggactagtactgctaacatggtaatagtcttcattctgaagtcttgatcctgactcacaacatccactcccgccatcctctcagcctgcttctactcagatactgcaggcagttcagcaaacaactttgccatgtagctaaatagatactgcccttcaaataaacaactgccaactttccgagtgttacggatcctgttgggactcaatatccaggatcgggagcctcagatgagcgatcaaaatctcaaacccttctctgagagatactacatcaggaaccaacgtgcttagccgccgctttcagatcaggctcctacatgatattgttattaggttacatccgtatgaccccacaaatgtattcagaactatgggagtcgccgccctggacgatcccgatggtttagtcttgtctcgcattattccaccacttcgttcccttatcgttagctctacgtgatatcggcatccttagctgtttaacaggttgacctgccctgaccaagtagatccttaacaaggagctgagggccaactttgatgtcctgcgcaccaatgccaacactaacccaaagataagcctggcaatggccctggtacttccggtggccgcgatgcccccagaaatcctgacatacctaaggtgccaattaccaagcttccgttctagccgcgaaactctgacgttgccgctcttgccggcaattggaaagcggatgagattggtacttctaccatgatctgaaggatgacgtggcagttaacaagaggaacatcatcttcccctccaactatatacccatgtaccaatatataatgaattattcacatgtctaaccaagcccaattattggcgggctggagcgggttccggccggggttttgtgggcgggtttaaccagtctaatcaagacctatgtacagtcacacacacggtacaggctcactgctacatgtggctgcgggcctcgcataagtctagcacttacgtacaggctcatgttttctccttccaggctattggtacagcaccagacccgcagccacgttagggggtgcagactgccagctacgctaaaggcgctgctggggagtaccttttcgttccgtacatatatagggcacttctatgtatactttctaactgtataagggatagcggtatgcacagtaataaataatataacattcattcaactctggttaagtatgctatatgaaattaggtaagatctacacttgctgagacattctcccccagcggactcagtgtcactatcataatcgggctcttacatgttgctttgacagccttgccccggctcaatacggtttccgaagattgagcgtctgggttatcgccatcctcgcttttcaccattgtcgttaacaatgactataaacgcatatctgtccacttatcgatcgaatgaacgaactgaacatcagggtggtccgttcaaaatctcgatcacagcgtttcgaagtacctggtcgattggagtaacccttcgccagctcgtcggtttcacaaggccttcggcggccaaccataccatgtcgtatgcgcttgttcagtactgcctcagccgacttcccatacaacaccttgaacaacttggaaatctcaagattccctttgaaatacacgcagccccgttccaattccttcagaaacaccacagtgcatttggtttcgattgggtggagagattggtctggagaacgcacgacctgcacaagccttacaattacctccgacccgaattactcctggctcaggaaatagactcccagagacttgttgcaatccttaccattatgcccggtgaagattatattcgacactatgcaagcatggtagaggttgctcagcatgacggtgcaatattctcgaaccatggaccaatccactgcgtactgtaccctcacctcacgcagtccatgatgacgtggaccggacttacagaggctctctgccaacattgaacctggagacgttgtagttctcggtttcgtggcggagctgctttcacgttttgcctctcttgtacctacatctcgaatgatctggcgacaagactcgcagtattacggtctggtccggctcgagcttcatccggggctcgtgttcagtctcgtaggcgccaagtacagctactggggcaatctaggtgggcgggttgtcacggagcttgccgctcgcaggccacgggccatatgttatattgctaagcagggcacactgctctcccctgacgatattcactgccgaatctactcacccacaagatactgcgtctttgacaaaggcaaggcctgctggcatggagacgatcacccagccttaccaattaacccactctcatccagatctccaacctttgatcgaggtctgcatgtttcgactcccacaatcgtcgagcaggatgtggagttaagaacacaactgggggcccatggcgctgcgtccattgacaacgaactggcgcagatggcaagagcactcacagacatgcacgaagagaacccttccatgtctcgaattcaattgctgcccatcatgttctgtactgactaccttcgacgtccagaagagttgggaatgtcagtgccattcgatctgacatcgcggaatcaaaccgtgcaacgcggcaaggaactcttcctggccagggccgcccatttggttctagaagcattcgatgttatccagcgtccgaaggccattatagtcgggacaggatatggtgttaagaccatactcccagctttgcaaaggcgcggagttgaaatcgttggattatgcggtgggcataaccgtgctaagaccgagaccgtcgcgacaaaacataagattccatgcattgatctctctctgaaagaattgcaagcatgccacggcgccaatttgctcttcgttgcttctccgcacgacaaacatgctgccctcgtccaagaggccctcgatctcggcggcttcgacataatatgcgagaagccccttgccctcgacatgacaacgatgcgacatttggtcgatcaatcgctacgctcttctcagctgtgcttgatcaaccacgctcttcgcttctacccgccgctcattcatttgaaggttgcctcaaaagaaccggccaacattttgaccattgacattcggtacttgaccaggcggcttgccaagctcactcattggaactcttgcttctccaagtctgccggagggggcatgatgctggcgatggccactcatttccttgatctcatcgaatggtttacagattatccactcacccatgactcgatggaaaccattaccacgtcaaactcgattgctcctctgccgaccgaagacgcgcaaatcacaaagactcccaatgtcgagtcggcgttcgagattagtggctactgtcggtcgtccacgaaatactctgtcgaatgtgatggggctgcagacaccgaactcttttctgtcaccatccaccttgcgaatgaaaatgagcttcggtttatccagcaaaagggaaggcctgtaatgctggaacaacgtcactcaggccgggaatggttgcctttgaaggtgcatttggaacagcgcgttcgagatggctctccgtggcaggtatcctttcagtactttgtggaagaattggtggaggctatctgcatgggcaagaggtccgcatttgcggacaaatccactggctttgatgactattctagacaagttggagtcttcggatccagggtgggcatatactgatgcactatatccggtatttcggctagtcatggacgacgaatagaagtcaattgtgcttgaggctttcgcaacgttatgaaacgtctcagtgttgtgtagtagcattggcaagcagctgcctcgtggccgcagcaggacagacagctgtcgagctggtgaaagagaagaatcaataggtgcattccgaaagtagtggagagccacatacgtgctacacaacaccatttctatgaaccatgattctgtgagagaattaagatatttgggggggggttcctgattgttaagccctcccttc

SEQ ID NO: 3408 - DNA, 623 bp, Emericella nidulans
gtcattcctcgtgacgcgatacccatcagatcctgaaagccaataaagcctcccaagcaggccaagactctcatacctattataaaaaaaatagctttttgctatatgcaaatcctaagattggggattttccagcattaagcaggatttttagcgtgtcgtacggaaatataaagggccttctgccgcccttttctgagtgctggtggttcaatacactgctagcgctaatgttttggtagtagggcggtgcaacacactgtcatatgtttattggtgaaggcgatttcaagagcgactctatcgtgctatgtctatctaatatttaaattcagagccggtcaatctctgcacatacggcgtccactacatcctgtgtcttcgcgtttcctcccaaatccgctgtaaggatgccagcctcacagactcgctcaacacagcccatcagcttatctgctgcatctttctctcccagccaagagagcatctcagcggaggaccagaacgtagccactgggttcgcaactcccttgcccgtgatatcaaatgcactgacatgcaccggttcaaatagcgacggattcttcctcgtagggtcaagattactgcttgggccacgccga

SEQ ID NO: 3409 - DNA, 1675 bp, Emericella nidulans
cgagatcatcgcggactgcgctttatggccgcttgggccaccggttcactatctgcacctcatccaggctctagcggcccatgggtctactatttcactgttctccaaaccattggtctggctgcctcttcaattttacgattgttgcgctcgccgccatttcttaccggctgcatcatgctccagaggtgataaggtacttttgcttccaaaagcaagatggctgccgcatctcgtccgttcgattacctcgaaagcctccccggaactgtctttttcaagctataccagcagccgtccaccgctctcgctatcttcaggcgcatgctgcctgacctgggtatgtatattatgtggtcggcgattcacttcgatctcggttaatctcacacatatgacggtagcaaaatgcttcgttatggcgcttctctatttgaaggatccgcttccagcagcggacctggaaacttgggtcagatctgagagcctgaggtgagtctcctctcaatctggtgtctgcgttctttgaaaggctaacaggttatctttccttagagagcgggatagtgcgctatcaatactggcaaggttacatattctcacgaatgcgaccaaaaaaggttccgtccgcgcttacatggtcaccgatcctttcgctgcatccctccgacaagcactcacgggtgcgaaagaaacccagtcctttggttgcttcaccacataccggacgaccagactgttcccattcacgatcttgatgagtacgcgcgccgacagtgggagggtgttctcggctacatggttggaaccagtgggctagggattcaacgcgatgtgaatttgagcaaaggcgtgaagcagcttctgcaagccggacatctggtggagatcagggatcgccgtgttgagataactcaagatgggttcgcattcgtcctccaggatgtgggcacgcaggtctggcatatcttgattctttacgtcgaaagtgctgaggccatcgggatggatagcgtcgaagtgctgtctttcatattcctcctcagtagcttggaactgggcaaatcctacgaaaagaagcacttgacatcgaatcacgtccgcactctaaccgatttagcagactttggtattgtctatcaggattctcctgaggcgagccatttctaccctactcgtcttgcaaccactcttacgtccgactcaagcgccctcagcaaccccatctctggcgcactctccgatccggacggcggggattccaaccaaccgggttctggattcattatcattgaaacgaattatcgactttacgcttacacttcttcgccgcttcagatttcgcttattgcgctcttcacgacactcaagtaccgcttccctaacctggtcacgggaaaagtgacccggcagtctatccgccgggcgattgaaatgggcatcacagccgatcaaattatctcttaccttgctacccacgcacacccgcagatgcgcaaacacaatgtcgctcgctcgacatccaaccaggctggaatgccaccgtcagtccttccaccaacagttgttgaccagatccgtctttggcagctggagcgtgaccgtgtcaaagctacgagctggatttctgttcaaggattttgtcagccttgccgagtacgaggctcggtgtcga

SEQ ID NO: 3410 - DNA, 489 bp, Emericella nidulans
ttttacggggggaagacggggggcccattccctcaaccatctccttgcagagatccatcatctgcgcaaatggcttggggtcacgccccagaataaagccaaaatctgcggggaagaagcgcccgtccggcgcaaggagaagattctcgagatgcctgtcaccgacgccgaggaggtatgtaatcacgcagtagccggcgcaggatttgatgtaggtacccatagactccctgcggacgccgagaggctcgctttcatccggattaccggctacgaggcaggcaagcactgatttgaatttggcggaaacggcggatagagaggttgacgggataaaccgcattgcacctgctgaggcctcggtagctaggatgccgcatggcgcgagccttagggctaagccctccttctgaaggaggcggtccctaaggaagataaaccgaacgacaagccgaacctggcgaaaaacgccgccgacttgaaaagaac

SEQ ID NO: 3411 - DNA, 1668 bp, Emericella nidulans
cagcatccgagcttgacgtagccctcggtctttagaacaaagtagccgtattagtgcatactcggggttgtcaaggttagacatctacagtgcggttgccacttcaaatggcatgtccaccaccagtgcctggtgtcgaagtctggcagcatataacagtttagacttaacgtcgtcggtgaaattgcgaggtgggtataatatgaagcgttcgatcgttatgccaataaatgaattgttaaagtctttcgacgcatccgagggactcgctaaactctgaaggaaaggtgtgatcgagttcgcgagaatagcatcagctaagcgtaacatgtcaattagtgcattccatgtgagcatcatataggcagcttacctttcacgcgcaagtccgacttattcgcggtcttgaatgtcaaggccagggaaaccttgacgatagggtcaagcttgaaatgatccaggaaggtagaaagatcgaaatcacgaaaaatattgccttctgacgcatcgacagtctccgctatcttttgggctggttcaatgtcctgcgaaaccttttgcatctcctgaactaaaagtgggtagtttcttgcattctcaacggacatgtgcagcccagaaaagatttggggcgcattgcccgtaagcaggcgtcggaaatacttcgagaagacctccattccgttcgactcaacgagctattgaagtataagtatcatgtgactaatatcttgtacaggttaagcacttaccttgtggatttgggcagcttttgtctcccacttctcgcggccctctttctccgtaattgaatctaacagcaggaatacctgagcaatcgatattttcgccaatgatgactgacttccgtgagccgctacggaccccggtttgtcgggaggaaatccggtcggtgaattcacggttgtgccggacagcagcggagagaaggttgcgcctctggaagaacccgtcccgcctccacctcccccggagcctccgccacccgctacggatcctgctgcggaagccagatgcgaccctgaggatggggtatgagctctgattttgggagaagagagagattggctgggtagcgactggggttgctgcgagccagattggtacgaggcaaagggtcctggagtggaggctggtgaaggtacgccccgaccaagcggatgaccccttgaggagctcaagacggcggagaacgaggacgtaagaggagatgaagttgaaaccccgggaccagggctattactctgaggttgcccgcggccagaaacagaggggttcgaaaggttagtcgcaagcggtgtcaacccccgacgaacactcgactgcgacaccggcggaccccagggagattgctgtgaccgtgtaggcctggtcgaggaagatttatcggtgccagaagcaatcgacgattgggaggaagggggagggggagggaaggtcatctaggagacgcgatcatttgatctgaggttgctggtaaaatattatgtgcgatgatggtagtcaaaaagacagacgccagatgtttgcctaatgagtggttctggcaagacagagaaaccttgcggtggggggaggtgagattgatggcaatgatcgaggatgtgttgcttgtggcagagaagttcggtagtcaatggcacagaa

SEQ ID NO: 3412 - DNA, 842 bp, Emericella nidulans
acgggaacacggtaccatgtgtactttcccttatctgacgcccatactatgcgactatgcatcctctttacagctggatcctttaccgactgcttttattcttgcccaccccgagattgcacctttctgcttgacgtatgaaggttgccatgtgatgaaccctgcaaggttcatacccgaaggcggcttatccactatgacgagggttgaatacgatacaatgaagaatcgaggtcgagtgaaagaggaccgtttctagccgatagaaaccttgagaatgataactttaggttgccaaacgggacccctagtaataccttcataatgtatagaactgaagagaatgccgaacggtgtgtagaagctgcagcggacgtttacaaagcgtagatgctggggtaaggcgcgcccttatgtgacttttacggggagactatcaataatcatctctgtcttcgagtgggaatatgcagtagcccaatatgtagtggaactgctaatgcatccattaaaatacacaattgtaacctccaggcgctatttactcaagtcaaagtcgctaaacgcaaaaggactgttgctccattgtagacatataaatggagagaaaacaaggtgccactttttgtacatcattaaaaaccgtgccaagaaggccaataatcgatcgggatgaccatccgcttttgccaggcaagacccgcttttctgtttgtaaaattctattgacaaaaccttcccggcatattaaaccggtttcactgcttttttagggcttatagcagggaactggtttgtagcgggcggggcctttttggagggtcttgttttccacacttttt

SEQ ID NO: 3413 - DNA, 5133 bp, Emericella nidulans
acaccggcaagaacgacaaggtggttgtcaagtatgccttccctagtcccagcgagttcaaaaaccggttctacgtcgcaggtggtggcggttactcgctgtctagcgatgctaccggcggacttcagtacggtgccgtgtccggcgctaccgatgctgggtacgacgcatttgactactcgttcgacgaagttgttctctacggcaatgggagcatcaactgggacgctacatacatgttctcataccaggctcttggcgaaatgaccaagcttggaaaagccctgactcgcggtttctacggcaagtcgtccgacgctaaggtgtacacttactacgagggatgctccgacggtggccgtgagggtatgagccaagttcagcggtacggagacgaatatgatggtgctatcaccggtgccccggctttccgtcactcgcagcagcaagtcaaccatcttttcccagcggaggttgagtatacccttgactactacccacccccctgtgagctcgccaagattgtcaacgcgaccatcgaggcttgtgacccgcttgatggacgtactgacggtgtaatctcccgtacggatctctgcatgctgaacttcgacctttcctctgttatcggagagtcgtattactgcgctgagcagaactacacctccctcggcttcggcttcagcaagcgcgccgatggaagcacaaccagctaccagcctgcccagaatggcactgttagtaaggagggtgtcgctgttgcgcaggctatctataacggtttgcacagcaccagcggcgaacgtgcttacctctcctggcagattggttctgagctctctgacgctgataccacctacaactctgacaccggaaagtgggagcttactattcagtcaactggaggcgtcttcgtggccaagatggtggagcttcttcaattggacaacctcgagagcctggaaaacaccacctacgacactctgatccagtggatggagaccggtatggtccggtacttggactccctgcagaccactctccccgaccttaccaccttccagagcagcgggggtaagcttcttcactaccacggcgaatccgacccctcagtccccgctgcgagctcggtccactactggcaggcggtgcgcagtatcatgtactcagacgtttcatacaagaagagccttgaggaaatgcaggactggtaccagttttatcttatccccggtgctgcccactgcggttcaaactccttgcagcccggcccctacccagagaataacatggaaatcatgatcgactgggtcgagaatggtgtcaagccatctcgtctcaatgccacggtcagctccggtacctatgaaggtgagactcagatgctctgccagtggcccaagcgccccctgtggaaggataacagcgacgacttcgagtgtgtgagcgatgcgaagtcgatcgagacttggacctactctttcccagccttcaaggtgcctgtttactaaacagtgctcgtaacgtatttcacaagcgagcagtgcacacaagaaagtggtacacctccatattccaaatgaactggtgtcttttcacactcggatatctcaacaagtcagtttcgagatgtataagtatatatttagtctatttaggtagcatctatttaggcattagagattttgtcctgctttaaaatctatctgagtattattgattatgatatatttctggtataaaaagacgccattttatatggaatacggtggtgcaccactcgcttgtatgcgctgctcgcttgtgaaatacgttaagattcgtctgacgtcaggaaatgcgaaaatccgtctcattgtcaatatatcacgtcgaacgtgtactttagtataacaagcttatatccttatacataaaagatatgtatatatctcagtagtcggaatgtattcgcagtctctctcgcacaccgtgcggactgctcaacagatctcgtatattcattgctaacggcactgtattcggaaagccaaatactttagaagcacgcgtgaaataaatgaataaattgtcgaatattaacctatagtttggatgcagtgttaatagagagttagtgctaggtacatttctgatgattttagtccggtagtggccagtttatattcatatagcaccttaactgtaatactaagatgacaaatgcagtcatagtatttctattacctacaatgctagaggcaacgtgtatctactatgaagtcggttacatgcctatcattctatacacaactagccgggatgaatgttggcaatcctgtctagatcgaccacgcaagcaggaactacggagaaattacctgatcctaccctaattgtgggcagagtacgtcttgccgcccccgatgatttattctgagtagatttactcaggatctgatcctgatcgcttcccacatctctcctcagctagaaactcggttttccgggtctctcttagtagctctaatcagcggtagatcatgacctgtccgggcctgttagagtcagtctgttcagccctggattgtggtgagtatgggagaatgttgatcgtttcgttatgggcgaaaacggaaagctatgtttagcggcgggcttcatgaaatcgagatattgggatagccccgcaacagtccgacgaacaggggatccgactcgactaattgaggataactaaaatctccagaccagtagtactccattctgttgtcagacaggcaattatcacgtcttcacagcctatgttgaagtgtatatagacagggtaatagtagcgatctacagatgagtaaaccggaaaatgttcgtagcatgaagagcttcctgccatcacttttgaagagatatccaaacaatccttcaataccaattcaaaccccttcttagtcgatccccattactcgtctcagttggagaatagagtccaggcatatgatgaaatctcacaaacattatagcctaataagacgagtctatgcagaataggtattggcagttgacccgtgggttgcccaagaacccgcgcggattaacgggttgggtatgggtcttgccctcgacatccacggcttttgtcatagttcccactcagccagaaagggctaacactctggatagttacgttctggctaatatacttgtcgtcatatatttagcagtagatctggaatatacagttactcccgtgtatatttctctgaagattgattagagcctggggcagataccacgcatatttctacatagtgatcgagttctttaaacccagctagtgaaatgtgaaacttacagctggagacacttacaaagtcaaactggtaattgaatgacaatgttcaggcgatgggcgggtaagattggcccactctcccttcactcggcccagtggtttgctcagcttactagaaccagtaatatagtgtaaccgttaatgaaggctgtacctatgcatagagctttcgccggccgagtagaaagaaaatgttaagtaacaagcccaagaaaataggtgtactcgattggtgacagcaaaaccaagccaatcaccgatcagcagtcaacaatcgatgccgggtctgacttctgagacagccggccgggcctagcatctcttggccacattgattaatctgtggcttccttagtgagagtccattgccgattatagtgcgtatcactgtgacttatctctactcaaatcataagccgtcctaggagtgttggaactatgagcagagtccctgttccacaaaggagaagagaaaggctgtaatccctgatagcatcagctctataacgggctgaactggaagcacgcttttccagtttgtatattatatgcgttggtaaactgaaggattgccgctatcacaaggttgcagcgctaacaggcgggcacctaatctggaccccggtcgcttaccaggttatataaaccagcggtacgtgttgacagtagtattttactcaaataatctgaaatccctgcacttatcatcatgagcccagaactctttcatttcaactccaaacgtcttgtctaccgagctcccgagtttaacgaagcggacaagaggttcattcacagccagatcgtcaatgatcccaccgttcaaacaatgagcagcgaacgcctgaaacggcccgtgcctgaaaaagccgctgaagattttctcaagttgattcaagactcattgttgggggtgataatctgcctgcctgcttccgacaaggattcaaaccctgtgcctatcggccacttgaacgtcttccgcacttccccttctcacaccgatcatcaccgctgcgcttccctcgggatttcgcttgcgcctgaatataggggtcaagggtacggcggagaggccattaattgggctctggattgggcatttcagcacgcaggcctgcaccgggttaatctacaggccttttcgtacaaccaaaatgcgctgaagctgtacaggaagctgggattcgtggaggagggaagagagcgcgaatgtatttatcagtatcgagcatggcatgacattgtttcattttcgatgttggaacacgagtgggagttgctgagaaactcaaatcaatgaatgcaaattcgtcattctcctcaaatggccatggtttctttgttgtgaggctcagctgcactcctatacatcgctctatacaacttagaccggggcttacagcctatgttttctttttcttttcttttctttttttttttcaactcaaacaactgctccgtagaaaatacaagctgtcgaacacatttcatatgacattgccgccttctaggtcagatagagggcaccgagataaaggctctcctagaatgtactctagccctcccttgacacaaagtgatcataagctccctcgcaactttaaatatcctcatcatccaacactgtccccaactataaccaaggatatctctgcagcaggtaaccgcctatcctgaaaaggatataaatgtaccttgacattattgtaaacatcaaccattttttttaggagaagaataatatatagattcgcatcagttatggtattagtgcaagaatagccaattcattataaatc

SEQ ID NO: 3414 - DNA, 963 bp, Emericella nidulans
aaagcaccccaatccccgttttttttttttgggcccctttaaaagtcataggtcaatccagattccagtagtgaccgttaatcctggccaacctctcggatttccaaggagcggggatagctttaacaaccaaggcttaccgggaaactacttaccgccctatttagggtaccgtaataatccctccgattgagtttggtcgagtatgctaaaaaagacgaaagggcttcatgcgtatgaaagccaatttaaacctttgagtggtttattgcgacaggaattaagaaaggactcagcctgagtgtccattggccaagaaaggtgctgtcaaagcgccagggccttgaacaagtagttagggcttttttgggcctgtgataatggtcaattctgataagatcctcatcggaaaaaatgaatcacctgtgcaagaaaaccaaagtccaatagactaaccgctgcagagaaacgctctgattcgtcaaatcagatttgtttatccgcttggattatattaatagctggcatctgaagctaatgcaccattgtcactgcgcgggccagtcatagcgcagccctaagcgcgggtctcagcacgagaatagatccattgtcctcccccgctcgcgatcggcaagtcctgaagaatccatttttagaatttgtgaatgtacctgcagatatgctgggttcctaattatggcatttccatgtcaggtctgctggcacaatcattggcttgacttcccgctgggaagattgtgccagcgagagagttgatgttgagtcagggttgtcttgtaaaggagtagattgggcctggctgttttattaacttttattttctctcgtcccagcgattgactattatcatcgcccaggttttctgagactgaatgtgatccaatttgagatcggtactccaagacaagtggaaaagctggagactttgactatatgctc

SEQ ID NO: 3415 - DNA, 1454 bp, Emericella nidulans
ttttacatcaaatgtggcatccatgatgaaaagtgctggttcccggcaacaacggtctgcaagtgttgcgggaccctagccttgccaacccccttgggaaatctttaccagagggaatccaatccagttgaccccggcttttggaccactcaactctttgattgtaggtagacggctttgagcagtccataaccccggtcgtgtcgccatggtagctccctttgaggccgagaatgttgatctgttctttgcttgcatcccagccataccggtcgcacgcagcgcggaggcccatcttgagagctacctccatacctgtgctgccattgtctgtatagaagaccttctgtaggcgagggttatccacagtcttcaagagcgattccgccaacgccaaagccggctcatgaatgttcccggggaacatttacatgcccgtaacgtcctgcggcatacgcagcagatagagcaaggccgggatttccgtgaccgagtccctgtgtccaccacgatgcggatccgtcgaacgtggcttggagtctgtcttgttgtgccgaacgatccgcagtcacgtaagtctggaagaaatcatcgtatgcggaatcgatgggagtgatatcctttgccgccatgccgtggtgctgcgtaaatggataccagattgtcttctgtgctcggcttgccatctcgtcgaggtattcgacacgctgcttgtttttcaaaacaagctcatctaggagcgagaccacatccgtgctttttgtaactgagctgtaatacttgtccaacgcttccagatcgcgagctcgcgagtcggggtcttgctcttgcggacgccgaggcggtgcaggcaccgggacaagcggtatgctcttgccccggaagtagttccccaagtactcatgattctgatagtagtcatccttaaatagaaggacggagtggccatcttttccgcgggcaagagagactcgtatgcggatatagaggatgagattcccccaagacgggagtgagcgaccaagatgatgggcaaccgaagaggtcggtagaggtcggcctgggagttcccattggggcccggcgagtgaacaccaccggccgtttctaccagagcgaacccgactccgtcgttggcccagtcggaaagggtcctgtggacagaggaaaggatctcgtcatctcgaggaatctgtcgaggttagtgtgtgcttatgttggcctaacaaaaatacatgaactggaccctacacgaatatctagatgaatgctgcttaacctatatagacaatgtgcttggctataccaatgaggacctctgccagtaccgtaagcacatatgaatagtcttgaagaaactggaagaagcaggcctatatttggatataagaagtgcgaatttgagtgcaaggagacaaaatacttgggctttttaatacaggcgggaggggatc

SEQ ID NO: 3416 - DNA, 1487 bp, Emericella nidulans
ccagaactgagtcctttgaccgccgtttctgattgttcgagagacaaaagagcctcatttccaagcttcgagtgcggcctcaggcatttaggcccaaaagtatttacctgaaggggcttagcgcttaaagcacctggtatggactactcttaagcctaacagtgccaccaatagacctgaatttagaaatctaagaaatttaacgctctcgattctcctgacccgcagcggtggtctattccaacaggtctcagctctttctaacagctgtcccgcccaagttgcgaacgtctctcgtaaacggggaagatgccgccttggccaaccgtgagcgagtatacagtatgattggaacctcagggtcgacctcgtataaccggaagcacggccgatgctggcatttcggccagacgaaattgacaatctcggatcctgtctcactccttgatatcgatttggaagatggacgcgcggcggcggcgattttccgacggtcgttggtgacagtttaggctaacccgctttcggatggctcagcttgcggggatatgatgacatacgtcagcttcaacgttcctcagcgactgtactattgtcctccctagtcttgacccctgcggaaccacatccgactggcacgatgagcggtttcaaaggcattatgaaggatggatggcacccaaaaggccgggaggggagaaaagagagctggcggaacgatttcaagggcgtcaaccaggtggtgagtgcttcggcttgccgcacacagtacgtttactctaacactttataggcaggatggatgggtaaaggaaaagaccctaaggatgaggatagggaaaatcacgtttcccggccgctctcatcgctcaaagacccatcttccttcggtcctccgcctatgcatattaaataccacggcgctgctgcactcccaaacgaaaccacgccggatcgcagcggatcgggtgcgcccttgagccgggaacagatcaataactcgtatacccgaaaacagcaggaagaggaggaggaacggagaaaggcggaggaagctgcgaaacggcctccagtgccatatcgcgcaaaccgaacaggaatcgatccgagcactcttccaccaccacccgtccggcggactggttcagtcgcagaatcagcgccggcttctgcaggccctaggccggtaccaagtgttccgccccgtgtaccaccccggacaaacaccatcacaccagccttccatacgcctttcccttccgcgtacacccccaatcccgaaggggcagaacagtctagggccgcagatgactacttgaatcaagccgcaacttgcgtctgggcaggcccgggtatctggtcggcgctggcattagtgggccggcttcaacccgacctggcgcaccgagtacagtcaagctcggtcaagagcttaagaccgattttcagatgggacaaattgggtctcccgtggctggcatttcgca

SEQ ID NO: 3417 - DNA, 563 bp, Emericella nidulans
  unsure (1)..(563): unsure at all n locations
tctcattgcattatcctcgaccctccctgcaagcttgtccaatcaatcaatgaacaaccatctgaaaatatcatcacgctcgcatttttctgcggcgcgcataccggccgaaatgacccccattccggtccacacggaacaatgcggagcctcgtggcccaactcctcgagtcacatcctgggttcgacctccagacagtgcggaggatagcgcagctccgtggaggcgatgtccatggtctatgcgagatcttccatgagctcgtcgctcaacttccggccgatgttgtggtattctgtgtcgtggacggggtgaccgtgttcgaagagcggatggggctaagagaaagtggggaggaagtagtcaaggcgctggtgcggactgttcaagaatgcacccagaagaagcccgttggggaaaagagtgtgttcaagctattattgactagttccaggaatagtcggcggctgtggaggttgattccaggtgaagtggaagatgtagtttggatgccggatgccgtgccctcgttgggcggctttacggtaggcaagtggnacac

SEQ ID NO: 3418 - DNA, 1310 bp, Emericella nidulans
atcattactagtcaaaaaaaagtactgacagaagtgtcgcataaaagttctctgccgcagaagtgaacgggcttcgggaccaactgaaaagaatcgaagattcaatgaaagacggcaacttcgttgacgccaacgggaatgtactagataaccaggaagaagtcaaattgcttctgcaacggtgttggcgctggactgagatagtgctggaacggtctgtcacccgctagccggagctttcagtcgtctagctaacctgagaatagtgagggtaaaattgatgagagatttcgagaacagtatgagcgactactcgatattcgaaaccagctggatcggctctctgtcacacaagcgtggtctctccgcgaaacagatctgttcgtttaccaacgtaaacttgaccgaattgatgaagcaagggtaaatggcaactttgtcgacgctgagggaaagccagcagatcttcatgcacagcgggtaggcgtcatatatcatgtttatgtggttaccggagctgactagggaaattgcctttagactctcctctacttgattcggagaagctatgcgtacatttagcgcacgcttaatgtcctcagagcctgactcagaagcactatgacccgtatgcagtcagctccaaacactgcggtgctgtctgctagaggacaaagaaaccggtggtgtatccaactcgcgcgaactctatccatatagtatgagggtaagcacgctcaactttctcgtcacatccaaccacccactaacacgaataagctcaattcaattgacaacatgcgcgttgacggtaaatcctacatagtcgatgacatccccgagggacaaggtggagtgaacgccttgcttgccgaatgctacgacctagtttgggaattgcgggccgcggtggcggacgacaaggagtaatcgacatacctacgcatcggctcactattctaatgctttctctattcctgctgtgtcttctgtttctcttcttccatgtatgaacgatttggaattgggaggcttgctttgatatggttttggtttgccaatggcgttttaattaggtgccatattaatgtgaatctgtgaacttgcatcgtaatgatgtcccatgccactgattagatacatggcaataccataggtaggtgtagtcttttgtagaaggcgatgctatcttctaatgccttggcggcagctgaacatttaaagcagcccaatgaacaccgccggataggtataagacgggaagtatctcgcacataattcattggtctagacatgtaattaacatgcta

SEQ ID NO: 3419 - DNA, 865 bp, Emericella nidulans
cccagagctatgggtctgctagccgtattggactgtaataactatggcagtgtgcatagtagactggttctggtgctgctgccttatggcctgagcacgctcatgcggcgtatgtgctaagcactaataatgcaggagccagacgagaaagaagcccatggcagtgcgccgcgggccatatagagacccagcgtaatggcgctcgagacgtgtagcaccagtctgcatgggcgtgactcgcaacggacagttcgatccaggctatagactatctgtagactgagcgacacagcgcccgcttacagtacgttgaggatatgcaaggaagtgacgaggctgatgtaataccagcataatctctggccttagcgaataagtctgatggctcatagttggattaatctcggatgtcctgcatgcgtcccgtgcctgaattctgccaaccggacattgagtactcgtgtcgtgcgtaagaagaacagcgccaaccggaccctcactggtgctcctgcaaatgcccctcgttcacaagagtcagaagccgcatgaagccttcggcgcctttgccggtctccgagccatcctcacactggccccgaaattttcgaacctttcccaggcccctcttaaagcccttttcccttgtccacggcccatgaccgcgcggaggtggttttcctcttgcaaaacggcgtggtctatccttgtgcgccggtccctctacccattgttcctctagagtagccttatagatgtctcgtaattgatcgcggagaggcgggtaacgttaaaaaggtccttaatctgtatcgacagtagctggggtgtcaagtcttgtccatccgcacaggctgtccttcggacc

SEQ ID NO: 3420 - DNA, 2690 bp, Emericella nidulans
ttttctctccccgcacgagcttgcagagctgcacagctccctcttatgccaaatgattcaacgaccgtaaaccttacccagacttacatgaaacttaagacggaaaataaaccactacatgcttctggaaaccgacactgccttttaaacaagccctcaatgtccccgtcatccccaatttcgatacccctctttgctgaaaaccaacaacagctcctcctaaaagagcacgaagccgaagtctcctcatctaaactcgccagcaccgcgttcgcgtcgccgctaacgcgccgtactctccaagcgtctggacacgcgctaaccggcataatcctttctcaatgccgcactggtctcggaggtcggctagtcggcgagtttactgctgacgcggctatttcgacggaaggtacgaaggggaaaggaaaggacgatgatgatgcgaaatcgaacattgctgcgaatgggaagctgaagcttggtacgcatgggattagagttggggatgtcgtgagggtcaacgaggtggtgagtgctgggaaaaaagctgtagggtcagggaaggacaagaagaaagatggggattcggcaaagggcccagagggtgtcgtgacgagggtcggggagagtagcgtgtgggtagcttttgggcagaacggcggcggcggccgttcaaaggaggaggatgaagaagttattgaggagctttatgggaaaaagctttggctgtatgttttccttctgtgcgcagttggtggcaaaaaaaaccgattctacaaaacggcagagggttggagggaagggagaacaatatgtcggactcattggctgaccagagtgttgtagtatcaagctggcgaatgatgtgacttttagacggtatgtcctcggcaggcatgattacgggtcggcaacttgttgctgatttgacatttttcaggatgaaccaaacgatggagaagatggcgaagatgtcggagtcagattacacgcattttgtacgagttgccttcgggcatacaacaccagtccagccggactatgaggcggctgggccggttgaattcatagacccgacattgaacgactctcagaaggaagcaattcagttcgccttggcctccagagacatcgccctcatacatggacccccgggtacaggcaagacgcacactctaatcgagttgataattcaaatggtcaaaaggaacctccgagtgcttgtttgcgggccatcaaacatatctgtggataacatagtggaaagactggctccgagcaagatcccggtcgtgcgcattggccaccctgcccgcttgctgccatcggtgctagatcactcgctggaggtcttgacccagacatccgacgctgcggctatcgtcagggacgtgcggaaagagattgatgagaagcatgctagcatcaggaagacaaggtttggcagagagaagcgcgcgatctaccaggatatcagagagctacgccgggagtttagagagcgtgaatccaagtgcgtggacaatttagtccgcggaagcagcgttgtacttgcgacactacacggagcaggcggtcatcagctgaaaaaccagaaatttgatgtcgtaattattgatgaggctagtcaggcactagaagcccaatgctggattccactgctgtcagcgccaaaggtcgtccttgctggtgatcatctgcagctcccgcctactgtcaagtccacccctcataaaacaaaggaggcaggcgaagatggagagcaggatgcaaacggaagcttctccctcgagaaaacactatttgatcggctgctatcattgcatgggccgggaataaaacgcatgctgacaacgcagtatcggatgcatgaaaatatcatgcggttcccgtcagatgagctgtacgaatccaagctcattgcagctgagagcgtcaaatctcgccttctaaaggatctgccttacaatgtccacgagactgatgacactaaagagccggtggtcttctgggacacgcaaggaggagacttcccggagaaagttgacgatgaggaattcgcaaaaaaggaaagcctgctcggtgaaagcaagagtaacgagatggaagccttggtggttgcgaggcacgtggataacttggtacaagccggtgttaggcctgaagacattgctgtcatcactccatacaacggccagttggctgtgctatcacagatgctacgggaaaagtacccagacctggaattagggagtgtcgatggattccagggccgcgaaaaagaggctgttgtggtaagcctcgttcgcagtaacagtgaacacgaagttgggtttctgggagaaaagcggcgtttgaacggtatgcctcctgcccataactcttactaccttgagtgaggtctgacgcgattccagtggctatgactcggcccaaacgacactttgtgtttgtggagcttcgggaccatacaaggaaagttgtttttggcttacgcctagttgatttggtttgatacctgctgaaacgacgttgcttttcccgacggggagatgatttttaaacatggtgtgccttttgaaaaactcgatttcgctttctaacccgagagctgtttaagtatttccttttttttcctccggttttgccacttccctgatgatgaatttctacttaatttcgttttcttt

SEQ ID NO: 3421 - DNA, 568 bp, Emericella nidulans
ctagaatatatatatggattcactaacgctggaaagatcccgagccaagaaatggacgcgtacttactgatatccgcccagtgcgtggggatactgatagtttcagaacacacagccgattacggaaaacggtggtaataaaaccagctgacccagtacgagtcagaccttgtataggaggttttccaattggaagtcatgccggcgggcttcagcgccattcagcaatcacgaccctgaagcagtctgtccacttggcgcagtcttggtcggtcaaagctcgttagctcccagcaagaggagctagcaagccatatcgatgatccttgctatctatcgattatcaacaggtgtcatcgtgtggcaacggtgcggggaagagatcgcaggcaaacccaggccattgaagcgaccactgatagactcggcttaatctcctccgaggctgggcgccgtaccatgatggagcgtgagtctccttcattttggtcttcagctttgttctgcgagtctaccgaaaccctcacgcgcggagacttcaactctggttcggtctgtgcgggtcacc

SEQ ID NO: 3422 - DNA, 2629 bp, Emericella nidulans
tcacagtggtcgatctcttgctttgagacgacgctcagactcggaggagccgccaatatcctcgctcattcgagtacgctgctcgctcttccgctggcggcgagcgagccgcttctgttgattcttactgacgctacctgcaccagaggcatcgtctgagatatcatcggaagatgatgcagagtcccgatcgcgcagaaaactgctcagaatatttcgacgaggcgacgatgttcgagatgacgagccttgccgggagcttgaaggggacgggagattctcttccagcttcggtttaattttggataacgcccttttgatggacattttgacagtctgcagagtacgcacttgaagagtgcatgcgattgaggaggggaacaaggatcaggaaaggcagaagcacaaaaaaattgaggggcggaagtcgcgtcgggcctggttggaacttaggaccctgaaaggaagtggacggaagggtttgtaagtcggttttgtcagctcgttgattactcgaggttgagtcagggacaaagaacaggaaggaaccaaataatacttatatgggaggtaacctggaagtatcgcgtctcgtcagccttaaaccaaaaccttgatagcccagttccagggcgtgatgtcatcgtctagggaaagacacatgaaggacccgggccatggtcgggaccatggcccatcaatcaattgcagggcaaatctaccggggggccatttgcgacagtgcgacatcattgcccgtcattatttactatctaaagaccatacctaggtaactacaacaatccttcgttcttccaaggtccaggacaatcgctgacctcttataccatagatcggctgtcatctccccagaacagtgcccgagctgtctcggccctttgggctgcgctacacttgccttggcctcgactgcaccctcaatttttccctctcacaaacaagctcgctcttgttatttccctcgattgccttaatacatcctcctctcgcaggagcgagttctatcgtcttccaagttctttcaccccgggtgtggttttctaaggctaatacagtaagtcgaacttatccgcccggctgcaagagaccgttcgaggtcccttgcttatcctaggtaccgggtcctactacttgactctagttccgttgctgctacattctatacggctgtccagctgcatgaagttgcagtcatgacgacttcgcgctggtggctatatgtccaggcggtcttctggcgttgtctgatgcgcctgggcatgatcttccataacattccgcatccacggcctccgagtccatcgttctcgcgctccttcccgtccggctcgtcgaaagtggttttacaattctactgtccaccgggttactctcagacccgtaaggagggccgtcggctgccggtggtcgtcaactttcacggaggcggatttacgctcggaggtccgtcagacgactccagatgggcgcaggccgtcttatccgaggttggcgctgtcgtcgttagcgtgggctatcgccgggcgcccgagcatccgtttcccgccgcggtcgacgacggagttctagccctgcagtatctggccagtcacgcggtggagttaggcctggatatctctcgtattgccctcagcggattctccgccggaggcaatctggctgtaaccgtgcctctgcgttttcgggatatgctgattcaagcggaacacgagggctggctgagccgcgctgactctactgtccagctggtgtctccgactgcgagtgacttgcatattgttgcgctcttctgctggtacccaatcctcgactttgaggagccccgtgagcatcgtcgtgcaatgagcatcgaacccaacaagacacttccgtctttcttcacaaacctctttgacgaatcctacctcccagatcttgagcagcgaaagtcgccgtatgcgtcgcctgtgcatgccacagacgacgcgctgcgcgattctttgccccacgatatcttcttcttcatctgcgaatgggatatgctgctaaacgaaggccagttgttttgccgtcgactgcaggatatcaacaagcacgtgcgggcaatgatggtcgagaaggcgcggcatgcttgggacaagtcgcccaatcccttccgcaataccacggaagtgaacattctctataaagacgcttgtgctgacatgaaagcaatttttgagaagtaaactcttctcaagtccgtattttcaaatcacgtccatggttatcatttcgtattcttagactctggtgcaggcactatcaacggcatggcgtttaggttagatggctctgatattggaacttcattgtacagtagtacttccagctgcagatcaccgaatatgattatttgctgcggatctcctaaggtcaattcctcgtttaggaacattcgatggatcttcgtattcgacgatgattctgctcgttggatgaatgctaccagccgctcatatcttatggaaggtaattacggactattatcacagtaataatatcatattatcgaaattgaaatcatgataaatcattatatatatttccgattttttttgccgagcatttctgaaatgatagtagtatg

SEQ ID NO: 3423 - DNA, 820 bp, Emericella nidulans
atcaggatccaaggccggtgtcggtggatttcgccctcaagttgttagcggtccacactgtgtttcttggaccaccaacttgtcagggcgggtgctttgtcatttatgaagagcccgcggtacttcacactcggtgggccttgcttcgttgccttcgggagagcgtagatggtggaatgccaggtggggggtacgtctgtccagcagcggtacctgctctctgattaatcggttcggttgacgatagcttacaacgtggccttacggtgactgtccacactgctctgcgagggtatatatcccatataccactgccctttatatgctgcccgcgatgacaagcgcatcctttcccttttgatagtccgtgacaaccgtcgtgcgaaacgtctcccattgcccccggacatctgtcacgttaagaagccctcttttctcaaggtcctgcactagccctgaatcgactgttgctgctataatggccgtttttgtcgatcctagactcttgggtccgtatgcgtctacagcagagcgacgaggtcttcttcccgtatattctcgatatcatttgccaggctttctgtagcgatttcgacggcaacagggtcttgagtatcatatagtattgcggcattatgaattggaactgctcctgcctggggatggaatgtaacaatctgcttctctaggatagccaggcttgttgtaacgagaacagctagaagacatacaagggcaaagggcaaagctgccattttggtctatacaggagtaatctgacccaatttcctcgggcgcaaggatacccgaacctatatat

SEQ ID NO: 3424 - DNA, 679 bp, Emericella nidulans
gcgtgcttgaaacttggtcgacagcccattagaattcagacctgcctcgttggcactagctcgctggatttagctcgtgtaccctttcttaccatttcccccccccgttgatcctgggggtcgcaactcaaacccgcacaaacagggtcaatgccggtttcactgatgtttcttgcggggactgtttcagatatcgaggctaatcatataaattatttatagcggagaaaagtcccatctccaacacgcacgagtggcatcacactcgcgcccgctcagaaacccccacctcatcgctcgctgaaaccgcgggcggcccgtttagtagtgctctcgatactggagtcaaagggtacggcgtcgaccgccatcccgcagactcaaagccgtcgccaaatctggcttctaatgcacagggttcacgatttgcccggagcaattcgcatccggtgcgaccacatacaccaccttcccggttaaatccccagaaaacttcagcggctggcgaatcgtcgccaggtaaggaccaaacccgacagcgtcttatccaatcggcctggcgtaatagtggcggctcggatgctttcaatggctctctggatatgccagatgaatcgatgaaaacacggagtaccccgtcaagccctgagagtaaggataaggcatccacggaagtccc

SEQ ID NO: 3425 - DNA, 1588 bp, Emericella nidulans
gggagctcctagaacgaggtatattcataagtccaaagtgctgcccgtgcagctgttgtggttcctggatcgcaagatactaatcctgtccaacatgatcttcgaccagtcgggcctttagagaatcatcaagtctatggttcagcacatccttcgcaaggagctctctctggggctggcgcagccggtcaagtataaagacatcaatccgaaggactgaaagatagcttacaagcatgagcgtgatagtgcaaagcaaaagtaacatatcaagctggtcaaaggtggttggagactcattgaaccacttgactcggcaacaaaagctcaagccttcatggacgaacacctagagcctggccgaacgggctatgtagagcgacaacttgcactgttcctggtaggtgtgtacagcagggttaaaatgaacgacacggtgacggatgcgctggcggatagaggtgttaaggatgaaaatatatactgagccgctgcatcagcagacttagattttgaaacgacagctgcctcactagacgggctgttccaccgaagccgactcgaaaccgctgaagccgtgtatagaccagatgttgtcatcgccacttgtaattgctaatcagaggaaatgggttggtgtatatttaaagaaaaaaaggaactaagtaatcagccgcatcaatgccgatcacaggtgcgtgcgcaagatcggcatctaaatactcagcgatagtctccctgttagacagccacttgcagccattcttgtctcagtattcgatgtagtcaactgaacttacaggaggcagaatacttgagttacagcgttcactgaagtatctgatcccctcgctagacagaaatttctatccgttgtaccttgctatgcccttcagaatcaacttatcctagagcccctctgctcttgtgcctgccctttctgatacactcactctttattttgccgatttaaatagaatcacacctacaccccatcttctttctccaccaaaccaaccccagctcgtgtgcccttacgatccactttcttgagaccgcttatgacaggaatatttcatccacctactggagccgggttcaacagaattatatgaccataaaggtagctttttacacttgaagaatgaaagtccggctctgtaacctcttcgctcctgtcagtaaaggcccttctgaacccttacctttatatttccctcatactcagactcttgttaccacccatgtcatagatacgtaattttgcgaatataatctggctcccccattaaattccctttcttttttccttcagtccacctctatccactatcctccctcttcgacttcctcctgcataccttctttaaatctatattctcttacttcccccactatctataatccctcctcacttttctcttcactccacatcatccttcactacttcactctatatttgccattttttctttctttactcttccctcatttcttcctctccactccacttctctttcctctctccatctcacttaaatctcttccactccctttcttttctcccttccatctctttctccttatt

SEQ ID NO: 3426 - DNA, 1344 bp, Emericella nidulans
tggatgcgttagtgtcctctatgcttgagcattatctctcaataattcactacatactcaaacggtctttatttgaagaacatgatcgtgtctaagctcggcgacccctcaacatcggcctcagtagccagccaaaaatatctcatagagaattctcaaagagggtgcaagcgcgcacatcgtctcttcgaatgccagcaacgtcaccgaagccaccgacactctacaggaagagcacccttctgcaaaatttaccgaccatgtcttgggaattagtggtgatcatgcagagcaaaacctcatcaagctttttgaccacatttttctcgcagaggacggcttgctcactatcaaactactgagtatcgatatctcctccattcatcaaaccggaaatctgctctgttatccctatttttcaagcaaagctaggctcttcgaacttccaggcacataataccggataaaagctgtcacttatccctacaactgcagtaatgccgatagccgatactgaactagacactcaaacgcgtatatgactgctctggatggggctataaagaccttgcaccagtttttaccagttgttaaactgtcaggaccaagtattgtcagtgcctgaacgcagcgaactcgtcgtggggctagccgggttgctcgaggatgtagacgacattcgttgacgggcaaggttagcacagtgcatgaaattgcagaggcgtatctttatcatccaatggaagatctgactgcggtggcctttgtgccaggacaaaatcaacgtctgctttgttgatcagtctacctggaatttggatggtggcttcgctgagaaagctggtccataaaaactagaatcacgatactggaagagctatcagctgccacgaataataaaatgagagacaacacttctttccgaatggaaccctctaaagtggtttctaagcgattccaaaggtatatccttgctctgccatgacggaagtatactaacacggccactcttgtactacctaaccttgattcgcccctgataggtagacaagtaaccttgtagcggacatttcttcatgcaagattgactgtaattgcgacgtgatgaaggaagaaaatgctgcatattaaaacggggtaccttatgcaaagaaatcagcctcctgataacacctataaggaaagccccctacctgccgtccttgaatgcaattcttcagtatgatgcatcatcctcctacattttcccataccttgtagttccccatcttcaccaattatcttgctgtaaaagtactctctttccccagaagacaccctcttctatcgaccttccaaatttcc

SEQ ID NO: 3427 - DNA, 2081 bp, Emericella nidulans
ttctaccctgttatccaaatcaccccgcgcgtattggtctcttgtctcggcatcgagatactgttgcacttgagccatacgagagtatgcttccgcacagaagcgcagttgtatcttcaccagggcttcaaagctggggtcgaggtacggaacacgcaagtcaataagttgaggaagttcagtaaatagttgttcattcagctgttcgtacgcctgcttggccatctcgagttctcgctcagtgcgaggcagcttcgtagcgtccttgtcgggcttttcgaccagtcgcttcactttggccctcatggcatcgtaatcgagcagcttgttgtttctcttcttgatgcactcgttaacatcagggaagtatgcacagaagcgggatatcggatcaagcacggttgtcctagggcatgtcagtcagcgacgaaacactctgcgcagaaaaacgagaatcgtacctgtaaggaccatccagtgctttgatggtctcggcatccaggtcttcgacagcctgtttgtagctcctgctcacgccgtctttggccccggcatcaccgtagaaagcatctatcgtttccgcaatgcgcatctgcgaagccgtcatggctgagcgaacaatcagcacaccgaccgcacatcaactcgctttacaattgccgtacctcgcaatgagtccaagtatcccttagcctccttctgtaagcgattcgcagcggcctccatggtccggtatcgtctgcatggggatcagtaaaccacagcccacagccgccgcgaatatcaagttttcataccgttcttcaatttcatagtcacggtcgttcgtcctttccacgtgccctatatttgaggaggcgcagtatcagcatccgtcccaggtccaacgggcgtatcctgctccaactatatcggcctgtctccgggttccatcgctacggatgcggggcagactcgtctcagacatacccgtcttcatcatcacctgcgtcgtagcgcggttcacatttttcttgaaacctgcagagagcacacatgtcagtgtgaatctcgtaggggtcctgtaccgcgagtatgatacgcacctgcccaagacatgttgggacactgatctggatatcaccgagagagtaaggccaatcgtcaatgccagaaaggaaaaactcgcgaggttttattgaagatacgagtatagagttcaaagcttaaatgatgagcgagtttgatttcaagaacggaagggggagtcgattgaagcctaatgcgggaccgacgatgatgatgtttccagtcttaaagttccctgttcctcagtggcttggatgtggctgggtagattacagctagtatagaaccgccaaatacagccagattctgtgtatacttgtactagatcaacagcctcaacacacacagctaaatcgaatttttcttctagagatcgttgaataaagtagaaagaagaagaaaagaatctctggcgctcgtccaattaatggctgccgataggatggatgcagccccaagtgctaggcatatccagctattttgtccacgaccttagcagtaactcattgtaagtactaacttgtttcttttattccacccttttggcgactattcttgagccgctatattttgaaacgtaactaaagacatattcatagattgtgctatagccgcgaccaaataatgttttcgtaacagatggaagagttctgctaggcgcggctgcaagcgccataagcagagctaggcctctcacaatgcgtgaatgccagaccggacctggcaagattgtaacatcagaacgcactcttcaagagttcctggagggtagaatgtacacttgcaggcacgaaacaatgtgctgcaatcactgctatccggacactcaatcaacaaacatatttcaagatgagatgggcggctacgacgttgcactttgtagccggcacagcacgctcggcatcagtcaccctgctaacaatcgacatcataaaatgatgacattggtgaatgtgaagctcagttcattccgccacgccacgaacatttccccgcgatccagctatagccat

SEQ ID NO: 3428 - DNA, 3041 bp, Emericella nidulans
  unsure (1)..(3041): unsure at all n locations
gcgctacaataatgctgatatctattatactaatggggagcccatagatttgacaagggggatacgactagtgtgagagggcccaagcactcattcctggtctatacctccaaatagtccaacagccttgtgaacagaaagtctgtttcgctgccagaggtctccattttctattcataccacgttttaatcttctgaatttcgtaacttgccctctcgccgcgatcaataatgtaccagctcgcccatcacggtagaactagctggcccgaatttcgcgtccatgccatagttcgctgcagcgaaatacctactaccctgaagcccgagctgggcgggctagtcctctagaaatggtctcccctcgttgacctttcgctggcccaggcgcctatacgggcctacatagctgcgctgcaatgtttaagcgccatcgctcaggtgggctattgagttcagaccaaagagatgatgcaattgaatgtctgtctaatctangcaacggtgtattcagcctagcacgatgccaagaggatgcatgttagcacatgccgagtatatattgacgcatgggtgtcagagcttcacccgcattgacttttccgtaaaagtaggcccagacctagaaaaaaaatgcaaggcaggagcaatattttttttagttcactccttcttctcttccagctcctcaaagcgtctaaggtccataggcttctccaacaacggaatgacgtagggatcgaaagtcttccagtaggggttgttcaagtggtaggtctgggagccttcgttgaggtagcgctcaacgatacagaagtcctgcgggtcgtggaccgactgcatgacgtgccaggaaagggtctccttgtccttagagtagacggcggaagcttcctggagcttggcggatagcttggagatgctctcctggtcgggcttggccctcatgtctgtggtgagcggataagttagctttgaagaaacgggaggagcgattacgcacggacgacgatagtgtagaccattttcggtttataatggtcggtttatgaaatgataaacgctgataatctagaggtcgactcgaggagctgtctgcgactcaaagagagcccctccggagttctaagatagtccgctccggtggggtatacctacacaattacacatagattctgccgtggatattagtagctaaaggtggagatttctgcctataaaatcataccactgggccgagataattcttacacagagtagaggctagcaactaacttgcctatacatctctcaagaaatctactgccagttcttggccggggcgctgacatacgcgacgactggggctagggcaagtccaatcacggtggacacccctctaacaaagtcatatggtatcctgatgggagggtacttcgagtggtcgacttgactcattaaaatcagggaggagtgaaactcattgcgattgggctgtatgctatcgtagcctgtttgaatctcctacagcaagcccttagctgctaatacaaccactgtctcaccaatgtcgtaagtcgcttgtttctcccgtaatctcctcttccttctttgtttttctctcataaataatctttgctgcaagctccagggtatcgacgcaatcgacgtggatggagtgagaagactcgctgcgctagtttcgtttcgtctgtgcactcttacatagagtaatgagtccagtttcttgaagaaaaatatctcgtcattctccaattcgaagcttggttctttcaaattatgaaatatgactgctgtttcgagaagtagagtcgtgtttgtccagttccgaagcggcccactgcactttatcgtttcagtttcgagacacttcgacgagatgtacgcgaatgtggcacaatcatcagagtcggcgagtattcgcgcccaagagctctgcttttcacatggtattttgaagcctcgtaggagatcatgttcgtgaggccatgaaaccaaaagataccttccttccctatcgattcccgtgtgttgaagcacattgaacatcttacgcaaaatgcccaaggtatactggtacagttgaggagtgagcaacctgaaccagtctttaagattgcctcccttgaatgaatccacaatgttgtaattcatcttgagatcttcccatagttcttgctgctcattagtgtaggtagcggtagcaaacgttggcagcagatcagccaccatctctcggagggcgacacggcgtgcaacactcgtgcaaaagctgacctgaaggccccagaggtcatccaagaaagggatcagcatttcatcgtcttgctcaagcttggactgttttagagttctgccatgcattttgcaccaaacaccgttgatctgatataggacatagttgccagcctgaaacccagactgtctctggttaagctcccaccatgttggatacgtacccaggggctcaagaattgtggatgacttggcccagtattggttttcgtcaatcgtgcagagcccattgactgtaaccactgctcctatcactactttgtgacgccgctcccacttgataggagaccactgttcggccgctacatcttggctccagtggtattttcgaccgtcataagtaatgaaaccaccccccaacctgatcgcgtacggcaggttgtccaagcgtcgggcaatgacctgtcccggaccccaggtatcaagaatgtcctcaatactcgcgagaagatcatgttttggcccagttttttcgacagaatcttttgtctccgcggaacgaatcctgaacgtgaaaactggagactgaatcatttcacccatacaggtgagattggttaagcttgctatgatctcatggtatcgactgggagacacctcatttcctgaaagcacataagtagtttgcagagtatccaagaagaagaattgtatgggccccatgtgcgcttgaaagaacgatagaaaacctaaagagaggaattgaatcgctaggcaacaagaggtttccctcaataagcccggaa

SEQ ID NO: 3429 - DNA, 1031 bp, Emericella nidulans
tcaaatcctcatatactttgatcagtgggtcactcaaactcgacggctgaggggaatctccccatgatcatcctagcttgtctgagactcaaaacatatcgaataatcccgctatgcttcgagaatgtggagctccaagcccgcaaggcgcaaaatgcgatgccactgcatggtggtgcgcggtaccccggaatactgggcgttcggcatgtcgggggggagcttaaatgccgggaatctgccctgtcggaatcgaaccgctagtccttcaagctaaggcgccgcgaagaatgcgagggactgacggtgaccccacattagtcaggctgagtaacagtggagagactcatggacgtggagggttgaggagagttcggaactgatgtgacttgaaatttgccgaagaataaacatgaattggtgccttatggtgacgctggcagagaagtcgtagaaggataggatttgatgtgttgggaagcagcccatcactagcgcaaggtcacgtgtaggggtatgccttatactgtacgtagaaatgcagcggtttaaaggtgttattctgctctatcctaatttaacaagctgatcttccccgccgtcaaggcaaacacaatgggcaagtagactccaattcctgcctccctcaacgcctggagatgcgccactctccgtctcgccgcatacccagcctcggaaatttcccggcactcgcctactggtccgaacgcaaagcgcttctcgggattccaagggctcctcccattcacaaatgcaatccaacgtctcctcatatccttacccaccgcgtcggcagatggattgaaggacagatcaatgccttcgaataggaaaagcaggtcaacggcgtggtgggatcgtgcagacgcttgccatgggttgacctggtcgacaacgtacttgaaaacgcgtttgccggcggcggccatcttgtccgagatgagctcgaccggaagagtgtagcgtgcgtcgctgaccaggtcccagggcaccgagtttgcatgcttgct

SEQ ID NO: 3430 - DNA, 1086 bp, Emericella nidulans
  unsure (1)..(1086): unsure at all n locations
gacagctaccggctatatccgattccatgtccgctctcgttactaggagtcccataacaaacgacatgatcagctccgcatgaggtgaaaaaatgctactcagattctcgctcaatcagaactcttgccttataagaacatcaactagatctccgtccgttatttcattgtcttccagggaagactgggggtccagtcgatctccatcaaaggccagatacacgactagtccaggagaaatacttctcgcttcacgaaatgctccgataacctgggatatggttgttgtcaacgggatctgtatcttaaaatcatcgtgccctggacacttgagtatgatttcatttttagcatgctgttcggtaccctctgagtgaggcgacccggttgattctggatcaaccccaaccacgtttggtgaaaatcgatgtctagctgcgtatatttcttcagtaacggcttccatatatactcgacacgcatctgcatcgctgaaaaacttgtcaaagggtgatgcttcattggtataagcactgatattcaggcttttacaagntgtgacgtcaaatagtctgcggccttccaagtcaaaaatactgtcggttgaagaatccttgggctggtcctggcgagcaaaccatgcaaggcgcacttctttcaaggactgggacattttgcgttggataacaaggggcttagtattggcgatttctgacgtaatgagaatatggacaactgtgtcatcataagcagtgtttcggtcactacgagttatgcctggctcgtcccgcacccttgtgcctttcaggcgaccctttgtatggacatttgcctccgggccaatattcgtgactgaaggcgagggtgtagactccgcccgcatgtccagcattctgctcttcggtgagtctggggacgttggggacgttgaaccttccgcgaccattgttggtacttcattggatatcgaaccttggcgtgcccattggggttcggtaatgctgatataaaaaatgttatgcccaaacgcaggttgcgaaggcggagaattcgcaaccccggcgttctcgtctaatattcacctcg

SEQ ID NO: 3431 - DNA, 2299 bp, Emericella nidulans
  unsure (1)..(2299): unsure at all n locations
aacggtagtccggaaatccgcactcgatatgatgaaacggtatattgatgagcaagccgctgcctagactgttttcttgaaagcgtgatcaccttttaaaggcaatagctcttgaagctcacatttcatgtatgccacatagatgcatgcagctggattcccgcaactataatggagatgtcggaaattggcgtttgttagcttatagccatttttcacccaccaagaagaaatacgtcaagaacatttgaaaatatagtagcatattgacagtcccgaacgcctctgagataggagagcagatgtactaatacagtggtcagacaagtgtcttttcacatccctactctcgccgtgaaactagatctctcacagcgtctaagacaccataatacttctgttcggagggctacagagcggaacgagctgcatcttgctccgcaagaaccggcttattgcccgcttgcttcgctggccgcttcaatagcagcatgacgctctctccactccttgtcttctttgtcccgaatctccaactcacgcagccatgcatctcgcttttcttgaccctttcgtagctctagcgcctgctcgaattctctacgctgcgttcgctcagttctgtagtacagtccaccggcaaccacggtaaggagagtaagtccttgggcgtagatacgggcacggaacatgcggttcatctcaactgagtcgcccgccttcattgatcggtaagcacgccaaagcgcataacaggtggcagcgcatcctaatagcccgactgtggtcagacatttcatgctgtttcttgccagcagttctcactcaccagctggtacccatggctcctccttgaaccgtcttccaaacttctggagcggagtctcctcctgaaattgtctaaaagcgatagtcagaaactatacttcggcgtcgctccgtagatgggcgttgccgtttgcggggacgtactcgtggccgtcgaacgacgatggcagaggttcgctcataatgatctcctatcttgaaatgaccgccgtagtattgaggacaagaattgcaacaataatttgggtaattaagattcccttactggctgttagagtgatagaattacgcagtgacgtcggggagcgactggacatcatctccggcagttctggtaaattacaatatgtaccggttcttacaatacatatgagacaaacttttgccagattcccgatgctaatcatagttcgaaatagacaaccaaagcgctaagggatgcttacgcatatcacctaagaacttgaaactcatgacatcccgtacgtacagcgcctggccctggacccgggcgaggaagagtaagttccctttttgggaagatagggctgaaacgcagggttgatgacataaccttcggcgccgatcacggaatttttcagactccgccaaagaagcaagtccgattcgagtcataagcccctctatatacctttttaaacaaattgattcttgcaatatcccgtttctagtcctgaaattgcccagagggcatactgaagcagaacaccaaacatgaccgagaacgcgtccatgaatggcgctgcgacaccactttcctcgaggttgagcaatttggctctgacggaatactctgctattccgactcctacttcggagaaggaagaatacaaaggacccgacagtccacccgcgtgggatatccctgatgctttcttacttcccaatggctacccggatgtgcgacatgtccctgctgcctacccaaatcgttctaccgctaacaatcgttatctgcagtatcttaaactgattttgacttcccgcgtctacgagatcactaccgagtcccctctccaccatgcagtcaatctcagtaaccgaatggaatgtcgagtgcttctcaagcgggaagacctgctacctgtattcagcttcaaactccgcggagcatacaacaagatggctcatttgaccgacgagcagcgatggaaaggcgtgattgcttgctcagcaggtaagcaactcaaacaagcggggctctacagatcaggctctgatacatctatactgtataggcaatcatgctcagggtgtcgcgtactctgcncgcaagctcaaaattcccgctaccattgtcatgcctccggcaccccagcgatcaaacacttgaatgtcgctcgccttggcggtagtgttgtccttcatggaaacgatttcgacgctgccaaagaagaagctcaccgccgggaaaagcagcacggtcttacaagcattccccccttcgatg

SEQ ID NO: 3432 - DNA, 981 bp, Emericella nidulans
gagacacagggaggggtgctcaaccagactgtcgggcccggtacgcgtcttctgcaccaccatcagctcatagtgcctaggatgtccgacctcgtttgcccgtttgagctgtgatcgaggagatctcgattgcgcgcctgtcatcctcccattgacgtggactcattttcagtctcgttgcggtcaccctttgggttatgcttcgatagaggcacaccatctcatgcagaggcttcttgcgtgcattgtttacacctttgctgctctctccggcaggtactggccctccgcacaggggggctgtcaacatttgaggcagagccgtatataactgcggtggtgaagatgcatgcggctctataccatccctgcccttacctggaatgttccgcagcccttttgagcctacatagaccctcgttcccaaggcctatggtgaccggaccttcgaactgcacaggctcccgttacatgataaatcccgtgaaattatgacggccatcatgcacaaaatccgagaaagcgcaaggtttcgtcggagctcgaccctcgatggggtgatgcggccatttcatcgcccaacgagggttcctggagccagtacggagcctcagcagggaccagcccggtatccgccagctcttctgatcgcgatcatggccccaagcacggctctggagagtcgtctcggccacatataatcagaggcgagcatgccagatctcgaaatgaggtccctgttaattcattgaacatgccgacaggatactacgactcgaaactcgagcgtcaaaagacgaaaccgcgcctcccgaaagcgcagcctgtccagccaaaacctatcactctaccaaaatcctgggaaaagaaggattttgaagacgattcggcgaacgaagctggcgacaatgtttccacgctaaagtcacagcggaggctcggaagagatgatgcccactctcgtggatcggaatctcggcc

SEQ ID NO: 3433 - DNA, 850 bp, Emericella nidulans
gccctaagctccatcacgaattcttgcctgtaagcaaacatcatccgattcttctctagagccaggcatctctggctgcttggagccgatattgagctcgctcttgtcgagtgcccgagacgcaagcacgttggaaagtatgggaatgagccccaatcgtacccaggcctctttcctttgatcatggccaattgtctcattcttcagggctctcagagcagcagcttgtgatgacaaggaatccgcattttgtagctggaggaagataggcggcgcctcggcgcgagtcattgtccggaatcacgacctgccggaagaacccgaaagggtcaataccaggattgtcaggttatcttttatgagtccaagggtgattttagaccaagagcagtaagtttggtgatggggatgggcgtggggggatgatgccgagccagatgcggagtgagtgtcgtcaacggcagtactgcgattccggactcgaggtcggagcttacaaagtacaattggagtgaccgacagaacgagccagtaggattaacgagtagagagactcatcgaaagacaagcatgtctatcatatacaaaacgccaaactgcgaaatcgagggacagataggagccacctgcactgagaatggccagttcattctgagcagatcgagcgtcagagacgaagggcaggcttggcaatcccgcggtcgtcgcttgaccgctttcggaaactcatcatgtgaccatcacatgagctcaagatgctgaactaccacgtgactcagccttatgtatgtgcttgcagctcaaaaattgctcagcgcacgagcagttcgaccgctcgagaaccacccga

SEQ ID NO: 3434 - DNA, 625 bp, Emericella nidulans
catcccctcggctagtccacgcaagcagtgacgcatcaaaaacgcaaacttatagaaagcgtcatatttgcgggattttttcaggaagattcgatcactgaagtaaggttgcgttgttctgcggtggagggtctgcaggaacttataccacttcccttcaaggaatcagatagtatcatatcatgtcatattatagcacaccctctgatcgatctgacttatatgagcctatattaaacgaatatagattaaatcataataacggcgtattcatgtgttgcgttgtataaagcgcactaagtcctggcgacaatcatcgcaactataccgcaggcatctcgtgtcattcgttggcttgaaggcgccaggcagcgcgggctatgtactatttgggatagcgacattgacacaactaaatgtttatatctctaatctaaatatatggtatggacctaatgagaccgcccgcgcataatcattgcatgcaagtcgctgatcgtcgcgcttccatcaagctgcattaaatgaatattcaaaccaaagtttctctgaagatcagactgtagttctagggcagcgagcgagtcgagtcccagacttgtgaagtgtgagcctgcacgtaccc

SEQ ID NO: 3435 - DNA, 2678 bp, Emericella nidulans
gtatgcggggtggaatgtcgaaaatgtcaaatactaggaagaaagatgctgcctcaagtcgagttcacggggcacattgcaggaaagatgtacaagaataggggccgtttgtgcctggggacagatgtagctgatcctgttggcggcagagacggatcgaaactaggcgcctagggggcgagtacaccggatttaatgttggaaaccgaattcggatgggtcagagtagaggtttccagcagaatggtaatacgaggtcgttttaggagtcggaattgagaaacgagggagtcgaccagcgaagtcgaggtgacaagagagggagcgagcggagtcgtaggtaggcactagacaagaggcaccgcccagtggggaactttcagcagcactgttgcgcttacgacgtactttgtactcttagtagagcaccttcggttcctaaaaaatatttggcacttatataattatatcataaagtggaatgggcgtcgcgagaatattttgagccttgttttatgtgtttaatacgcggggaagcccgaattggtccatatataggtaactatatatcttggtcagtgctcaagaccagtccatgggggaatctgtttgcactgcgtagaacaccatcccaccgtatgaaaacaaatcgagaatcaggcaacggtcttttcaaagccatacaaatccgtgaaaatcgccctcagagcctgccctgtctttccttgccctactcaaatgacgtcaccctacctgtctctcttctcatatagaataagctccaggcagtatctttctgttctcatccgcaaaccatcaaatactcatagcaactgtactctaaaccctcaaacacacactacgatgcctgtccttcctgaccccaagatccctacttcaggcagcaacagcgactcctcaacttctcaggaccagaacaacaaagccaccgctcaagattttctctccaagggtcctcagattcctgatagtgagcgatcctgcttcattgattctaacccagcgatctaacgagctatagacatgccgcccaaagcatctcgagaagaaatcgaagctcgcatgaaggaactcaataaatgagtgatacctatctgaaagatcctgagaagcagatatcgaattggaaaactttgcggcatcgctattagctgaaatagtccatttaatcaaaaatgtaatgattgtatgagggctggcgggcacacagatgtttctaccttgtattccctaaaagtcaccgtatttgttaaccttactacatgagcagtccagtattcacaaaataaaatgaatctccctggctacgacattacacactctctctttttattaaaacaataaaagtcgctgaatgggtgcgacagccgatgcggctgtataaattgcatcataccacgtgacctcgtgctcgccttgtgcctcagcgcgcgaggaacactgctctcctcgcgtaaagaggctcccgatgccgcctgaacgacagaatgtgccggtgaagctgtccttgccattagtacgtttctggtaccgtacattcttttccatcgtgatttctgctaacagagtacgttgcagcaattccagcaggacatcttcaccgaactccgcggcgaagatgagctggtcatcctcgcccgtggcctaggcctcctccgcctgattacgaacttgcttcacttctacgatgcagcagggaataatctggttctattagtgggagcgaatgaccgagagaatgaatggatcggcgagggtatgtgcctcaagcgataacccatccagaagtacgccgctaacatggtagaagccctggcggagcattatgcaataagcaaaacgcctcttgcaaggggtttaaaggtcataaataccgacagggctacagtgccgatgcggtgggtgcgctttcatgggctatatgatggggggctaattcctctagggaaaacatatccgtcgaaggcggtattctgagtgtcacatccaggatactagtcgtggatcttttgtccagtatatccctcctcagtcgtccccgatgtcaagctgctgacccgttcagagctacttgacccagagagggtgactggattggttgtactccatgctgacaagtaggccttgcctcccggttgtcttgggccagctgacttctggtagaattgtcgcgacgtcgactgaagcatttatcattcgaatctatcgcaatgccaacaaaagtggctttctgaaagccttctccgactcgccggaaccttttactacgggattcgcgcccttagccaactctttgcgtaaccttttcctacggaaagcttcattatggccgcggttccacgttactgttgctgaatcgctggagggccatcggaaagccgaagtaatcgagcttcgaggtccccatgagtgataaaatgcgcgagatacaaaacgcagccctgagtgtggtgagcttttacttgggaactaagaaagcgaacacggattagacatggccattggaaccttgatagcgcttttgatggagctttgacattttcatagacgccagttgccctagtgcattgtgtgagctttagaccaacaaatggagcgtttaaggacctcggcatactaaaaactacatgcccatttaaagcattatctacacatag

SEQ ID NO: 3436 - DNA, 704 bp, Emericella nidulans
gaggatacatccaacatctcacgacaacgttggcgaatcctagcgccaccatgtgcctggtgttgctaacttgcattgctggcacacccccgcttggagcgagagtgggtaggttgtgagtgccggttgactcgaacaaaccgagaattgcactgtgatggaggaactggtacagagtggccatacaaggatctttgcggctgaaacggccactcgaacttgtagacagccattggctgaggactcaggagaggataccgctcctagactttgaccatgccatgggttatgacgacgtcggacggtgggatcagaccgatggttatcaggcgagtggttacccctcgaccagcaaccccacgtccactccctttaacactgtccaatctgtgaaccactatatcgatgccggtggtgtcccatcaaacaagattatcctaggcatgccaatttacggccgtgcctttcagaacaccgatggccccggccgaccttactctggtataggccaagggacgtgggagcagggtgtttatgattacaaggcgctgcccagaccgggtgccaccgagcagctggataccaacattggtgcgtcctggtcgtatgatccttcgtcccgtgaaaaagtatcgtacgatactgtggctgcggccgacctcaaggccgcctacatgagatcccccggcatgacggagctagtg

SEQ ID NO: 3437 - DNA, 2244 bp, Emericella nidulans
caggatccaggggggcctgacactgatgcccctcatatctgcgcgatccagtcctatgaatgtcgagacctggcctccaaagcacagaataactggtcgctcaggcttcacaggcacaatgccaacactaggggctgtgtccttggtagccttggctgccagtgcaagcttggcctgcagttcgttaaaggagctgcagctgaagatcattccttggggcagactgggattagattgccatttcatgttgaacgatacatcggcgagactcgccgcttggtcttgtgagtggaggtaagatgccagtgcggtgctgtatgctgcaatgctgcgggcatcgaggccggagatccagaaggggagtcgctgtccaccggacaaggggcctttgacaggcttgtgcgccgaatgtgcgacgatcgcgcttgaatttgatccacaagcaccgtagttatttatcaaagccaccttctgggctccgggccacgaccgcaaggctgtgactacctccatgttgtccgagggctgtgcgtggataccggggctcatggtgttgaaactggcttgcggagggatgaagttgcctcgcatcatcatcagcaccttgatcagggagaccaggccggatgcgccttcagtatggccaacatgcccctttactgacccaatgggcagaaccgtatcacgtcgaggaccagccacggcattccggatgctttgccattcagcaggatcccccacaggtgtgccagtgccgtggcattcgaccaacgagatgtcgcgtcgggcgatacgtgccttgcgaatcacttcattgaagagcgtcgatagggacggtacattaggaacaaagagcggcgtagtgttgaggttctggttgacgcctgtagagcaaatcgtccccaggacagtattgccatcggccacggcgtttgagagcttcttcagaaagacgtaggcaattccgtcgcctcgacaatatccatctgcaccagagtcaaacggcttacactggcccgtcgggctgatgaagctgccagcggccaagttctgcgtccattgcaggcttgtcaagatattgacaccaccacatagcgctgccgggacttccccagaaagcaagtctctgcaggcattatgaagggctacagtagacgaagagcaagcggtatcgaaggtcagcgatgggcctgtccaaccaaagtaatgcgagatccggcctggaataaaacttctgagctcgcccgtcgtcgtgaaggcgctgggtggatggcagtggacgttggaatcgtactcgtaggagcagaccccgacatagaccccaacgtgcttcttcctctcctgctcagcagcacttgtcatagtcagctcgttgaaatatccagactgttctagagcttggtaggcggcctcgagggaaagtcggccctgggggtctatcgccatcgactcgcgggggctcttcttgaagaacttgtggtcgaaagcatctgggtcgcgcacaaagtttccataccacttccggttgggaaccttgttgcgaaacatcatgttgggcgttatatggtcgttggtgacgagctggtgctgcgaatgtccggtcttgagcatttgctggaactcctccaggtcgttggctcctgcaaccttgatggacatgcccaccactgcaatcacattttcgtctgcttcttgaagcggcggctctgcgacttggactgattcagtatcgtggacgggctctttccccttgtcgtattgtcggtgcttgggcacatcgacctccttatagtcaagcatcgctccaaaggcacgcaccaccgggggaggcaggggtcgatcgagaccaaattcaacgcgtgagagctcttccttgttaagcgtcagcatcgatgtggtgctggtccagttcaactggttcaccagcatagagcgcaggaccatcccaaccaagtccgtttcttgacccgagacttggtttatgggcagtgcaagccgggcagcaacaggataccgcagctcgggcatcgactggcacagttcgaccacggcttcggtgaggcgtttgcgctctgccgtcggggagtgaagctgccccttgaaagcgagctggatagccgtgacgccagctgctcgaagctgccggaccagcttgggtgcgaggcgatctgatactgtcacggtagctcgggagtcgtcaaggatagcagatatataagcatcaggagaaagctttagatgtcg

SEQ ID NO: 3438 - DNA, 2775 bp, Emericella nidulans
gagaatgtgccagatagctaattccaattgactggagatgtaattcccgactcactgattgcgcaggcattgccctgcgatacgatagtcgcggtggtggtagtaatcgatctaccagtttccttcgtttcggccgaggaccaaagttggtgagcaaaaggaaaagaaaaaagctagagaatataatagacatttggaagcgttggagaccgtattgactgatatccatgaggagcgaagccattgagagtaatgcaggagagacgttgggaaaccctcgacatctatacatagtttccgaaacgggtttagcgccacttcgataagccatcggcggagcactttttttttggtgaagatttcattctttttttcaaacaagtgaaagatggctacacttctccctcccccaagtaaacgtcagaagacggagactgccgagaaggcgcgtctgcagcaggagattcagggcatacctgacgacttgggaagcgtgcgagtgcagttctttgaccaagcgaccggttcagctacaggcccggcggtgtctgtcccagtggccgatgcgacagtaaaaaatcttgagactcttttgaacacattacaaggaaatgtaggtatgcgcgctgaatttattcgcactgaaggccagcgctaatctcgccgacgccttaggaagaggatgaacgagtaccataccgatttactttccagtccgatgacaaggacagcaaggacagccagacaattgatatcctagcagacatataccactcccttttgaaacctggggtgaaaacaaccgaagataccattcaactttactttactccacaagctattttccgggtaaaggccgtttcacggtgctccgcctccatcgccggacacggggaggctatcctcgctacatcgttctcacccgtttcttcttctacaatggtttccggcagcggagactcgacggcgcgcatatgggactgcgacacaggaacaccattgcacactcttaagggacacacgagctgggtgctagccgtcagctactcgccgaacggagcaatgatcgcaacaggaagcatggacaacacagtacggatatgggatgcaaagaagggtcaagcgctgggggcaccattgaaagggcacgtaaagtggatcaccagtctagcctgggaaccctaccatctgcaacagtccggccaccctcgtctcgcctctgcatcgaaagactccaccgtcaggatctgggacgtcatctcgaagcgcgcagacatcgtcctttccgggcacaaaggctcagtaacctgcgtacgatggggtggaacaggtaaaatctacacctcctcccacgaccggacaatcaaggtatggaactcgcagactggtaccctgatccagacattgtccgcccacgcccaccgcgtaaaccacctcgccctgtccacagacttcatcctccgcacagcctaccacgaccacacaggcaaagtccccgagtctgacgcagacaaggtcgccatggcaaagaagcgcttcgagaaagcagccacaatcaacaacaagatcgttgagaaactcgtctccgcctcggatgattttaccatgtacctttgggacccggagagctccagcaaacccgttgcacgcctcctcggccaccagaaggaagtcaaccacgtcacattttccccggatatggcctatatcgcctccgccggattcgacaaccatgtcaagctctggaatgggcgagacggaaagtgcgtcacaaactaacctaaccctcaattagagcaatttggctaacctaccatcgcaggttcatcacaaccctccgtgggcacgtcggcgccgtctaccaatgctgcttttcggctgattcgcgccttcttgtttcctcctccaaggacacaacattgaaggtgtggaatgtgcgcacaggaaaacttagcgaggatctgccgggtcacaaggatgaggtgtttgcggtggattggagcccggatgggcagaaggttggtagtggaggtaaagataaggctattcggatatggaggaactaggttaggcacgagtataaaatcatgaaatcatgctgcgcattatgtgctcttagatgagcgtccaatagggtcaaggatgtgtattatacctctggtgatacctagaggaggtaaaacaatgtagtaaatatgaccgcgtgagcaaataggacatggccgggtcaaaatatcgtacaagatcgaccaggcaacatgccgcagtgatagaagcagaagctcaagtaaattatatattaatcacctcgctatgctaagctaaaatacaatgctatatactttgcagttaacacccagtcatccaaaagtatatccataccccttcttatccggagccatccattactgtagatccatcatatcacgtttcccccctagggctccaccactccatccctcaaaataaacctagacatactgccaagtctgcccgacaagctcactgggcaccgcaattgccgagaacccaagacagtcttccacatcaccactgggaacagtcgcattccccagcgccccaaacaccttccagcggttatcctccgttgggcaggccataaaaccgctcgcgccccatccgctgtacatgtaatgtccgaatactgagccctcagggcagaggatgtactcgaagggccctaaggaggagcccggcgggatgtaggccgagtgggcttgcgtaaatctaagcgcgccagttgggtcgacgtaa

SEQ ID NO: 3439 - DNA, 1181 bp, Emericella nidulans
gcctttgtctgtcgatcctttgtagcaagtacgttcctcctcgcccctagctcactggagtttttgttgctaatcaaatctatgttcagatggcttctccagaacaaataccctcccaagcactaagtgaggattcttgagttttcttttgttagtttttataccagaggttgccggctgttgaagggatacttttctaagcatgggcgtcttgatgcagtttcgaaatgattctgggttaataacaaatataattctgctttcaaatgatccggcactcgattgaatttccttcagcgtattgctgggtagagctgacggcaaaatgctaggggaactactacttaccaggcgggaggagctgcgtaaatcggcgactttggaatgatatcttgatatgagagtttgatctttgtagctctcaagtatatttgtagtcttgcgcatatatctggtcgaacgcaatcgcagaagcgtcacgcgtaactatcataaatcaggcaatgtctaaatgtctaaaggcggtggccagttgtctactacctgaccaagaataacatgtggcatcaccgataacaacaaataaacttgcagaaacaattgatttggaactcgctagccttactgatataaccgtctaatacactgaatctagtgttttccgcggcggtttgaattggaacctcagcgaacgccccccacctcccaactactacgtatatcctccgtaataccgaaaacttgctgagaacaaaccagaagatggtatgagggtcccctatagatttttttgatattcttgactgagagtgatatttcttcatgtagaattcactgttcaactccgctctgaagcagtcatctgctatacgccgtgacctagacacatttgcacaatcccctgcgacaactcctgcagcattacaaggtaaatttacgcttgaaatcagtagccagttcgagtagtcgaagtcccgaccgtacctacaatcaccgatagtttctgactttgcatcaggacagattgcagcgtccttagcgtccctatcgcgaacgattgatgactactcagcattgtcgaagcgggaattgataccagaaaaacaggagaaggcgtttgaacgagtgaagaatttccgggcagagctacaagattaccgacaacattttgatcaactcgg

SEQ ID NO: 3440 - DNA, 1185 bp, Emericella nidulans
aagaaaactcaccagcgccagaaagtaggccattagtgctacgaacattagaaaacctctgctgctgccgaagccgactttttggcatcgccttgggcttgaacgtatcctcatcatcgctgagaccacttgagcttgtagaatcatagctcggggccccatcagccctcaggctcggactagcgctacgatgtcgcccaccctgttgaggatccggctcggcgggttcgtatgagaacgcgaattcgtattcttcgtccgaggctccgcgcgctgcctgagcgtccaagcatagaagctggagaagaacgtcttctcgcctcccgtggaggcatacgtacttctcggtctctaaaactcgggagtggccacatttcttgcgccggtggcaaatccagcagacggtttctttgcagacggtgttgtcgcgaagctgaaacgatcactacgtgagccactcttataccaacactggggttgatgccatcggttcggaaccacctggtgccctgggagcagacccctgattgctattttgagattgagcatgagatgtgaaatcggcagccaaaggcttggtgttagtgtacacatgctcatagccagatttcggtctcgcagacgagccgttcgttgtagcagtcggtcttgtgccagcaccagattggcctgcgcgtccgcgaggatcaaaagatgaccatccaggcatagcgttccccttcatctcctggaacccccgatacgcatccgcacgagtctgcgtttgatcgggggccttctcccacggctgctttggtgcagcccttgcatagctggcgtacctctgagcacccgtagaaggaccatgatgaaacgacttgggacgttccgtaaagctcgccttcgtattcggcctcgcggctgaataacttgttgtgggttcctttcgaggactaggtttggtaggcccgtagtagccatttcgcaatctatccgtatcatacttcaaccgctggtgaggatcgatcaatatttcgtgagctgcctggattgcctggaatttcgcattcgcttccacttctctgccagggttccgatcgggatgatatttcagagctaaccaacgtcagacacgctcgacttcgtcattctccgtcgctatctccatatgttttcctcacctagcttcctaaactgcttcttgat

SEQ ID NO: 3441 - DNA, 954 bp, Emericella nidulans
  unsure (1)..(954): unsure at all n locations
gtcgggcgccagtcatgcccgcatagcctccctcgtcaaagccatcctcgtccaattgaatgtcaggcgcgtacccgtccagatgatgttgattccctgcggcgccagctgctgcggcgactgctgctgccgctgcccactccgacacgtcttggccggccgcagctgtagcggcctctaccaagccagcaagctgattctcgctcggcgcatatccactcgttgaaatgtgtgtactctggtctgcgccggatgaagcgggtggttgattaccagagaattcgcttgatggtccggatgggggatgttgttggtttgtcggagcggtagacgtcatgacgaccgtgttttcgacgctcgcaggtatcgcaacgcgctaagtaatatggataggttaattccaaagctgtcacaagcagctgcttgtaaaggtaatagagctagtatagactccggcaaatgtacccctgcgggacggatggtacaccctcgcccgctaccctccaggggcagtagaacaggctctgaattatcgtttgacaaaccagtcaacggctggagagtcaaagcttccagctgtataatgaagtaaggtagttggagagtcgcactaggtcgatcaatcagatggcgcgatgaggctgtttgtgtagcttggagctacgacagacaatgcaaacttttcgttcaagaactcctccacttaatatgtcacgtgatatttttgaggcagattccaggcggcattactcaacatccaatggtatatgcgtcctacggtcaacttgtggaaatacaatatggatggtatcttaacctcaacttttatcattgaaaatcttgtcgaccaattggaaccagccaaatgatgcgctacgtttgagataccgctcgtatattcatgcccngtncatcataacagggagcatcacatctttattacaaaaaacgcca

SEQ ID NO: 3442 - DNA, 4898 bp, Emericella nidulans
ccaccgaaacctctgcatctgacccctctgaatacaacgaattcgcggctcctttctccgttcaactttgggaatgtcttgtccgtgtcttttcgcagtattggcgcagccctgtctacatctactccaaggccgcactgagcatcctgacttcgctctacattggtttctcgttcttccaggcacagaacactagacagggtctccaaaaccagatgttcagtatcttcatgctgatgaccatcttcggtaaccttgtccaacagatcatgccaaactttgttacccaacgcgcgttgtatgaggtccgcgagcgtccttccaaggcttactcctggaaggccttcatgacagccaacatccttgtggagctcccctggaacaccctaatggctgtcatcatgtatttctgttggtactaccctgtcggtctctaccgcaatgccgaacccaccgacagtgtccatgagcgtggggctctcatgttcctgcttatccttgccttcctcctcttcacctctaccttcgcgcacatgatcatcgccggtattgaaactgccgaaacaggcggtaatatcgcacaattgctcttctccctttgcctgattttttgcggtgtcctcgccggtccggacgtcctcccgggcttttggattttcatgtaccgggtctccccgttcacttatcttgtttctgccatgttatcgacgggtgtttctggtacgaccgcctactgcgaacaggtcgaatacttgacgctctacccccctagcaacaccacctgctccgagtacatggacccctacatctctcaggttggcggttaccttcagaaccctgacgccacgtccgagtgcacattctgccaaatctctagcacggatacctttttgtccgccgtctacagtaactacgacgacgcgtggcgcaacttcggcctgatgtgggcgtacatcgccttcaacatcgctgccgccgtcttcatttactggcttgcgcgtgtgcctaaggggaagaagaattaaagtccggcttaaatcttcaactctcttctcttctctttgattcccctgaataccacatttttttgcgtaatgttgcgagggttgttggtcttttttggacttatcttttcgtcttgcatatcattgataaacatttcagcacatacataatagactagatctcatcttcctcgaagattacatacctatttacctaccgctacctgtgcctcatttcttatacctacttgctttctatacagccaatctatttctactcagatggtcactcgcttccttctgtcgtttttacttttcctttcttcgtgtactcaatccgccacctttgtacctctttttattcttttcttttccgttcttggttaaatacattctcattggctgtgacagtcaactacttattagatatcggtcaaatctgattagtccacaaattaagttcagaacgttgaatcaagcttccgggctattctgagcgtatattccatatgtgatatgtccaatcgccactctcgaggtcctggtcgagtccggcacccaaaaagtgtaggaagtgcctatatagggctcagccctgccgccctgccccgcagtatgcgaatgaagccgaagaacctgtatatgattagtgatggttttgactacgcggtctaacttcacaggaggaaaaccaagctggaatcatgctcctgagctgggaacgctggtgatagggaaaaggaggacaggcaatccctagggggcaggccatccggctggcatgggtgcaatacagtgcagcctcgagctacggccttcgctgggctctcaaccaccccctgaacgctagagccgatattcgatgggcaatacggttgttcaacaatactgtctattcattatcgccacatcatactaggaggacagctgagtacttattgtctcaggggggtaccaatacacctgggtggtcccaagcgccgaagtaagagacttagctacagctatttcaaccctccagccaacaacaaactttgtcccgtcatataccccgttgtagcaagcatagttaccacattagccacctcctccgggacacccagccttcctatgggaatacctgccgcaacttctgggatcgcctgagcattaggaatcataccggtgtccccgatcatggcgggcgcgacgtcgttgacgctgatattgaactctgcaagacgtgtggagagattcttcatcatgcctgtcatgccgcctttggaggccgcgtagtctgcacgtactgatcttagtcgttgattcaaaattgaaggcaggagaaacaaagcacatacggcagccagttatccccccaccagaagcagctatctaagacatgaagatgattcggccccagcgttgattgcgcatatgttctatcatcgcctttgaccaggatgaaggaggcgcgaaggttgacgtttatagtgtagtcaaattcctccaatgtgatgtcccaaacttgggggacgcgttttccgtatccagcatttgagacaaggatatcggggcgctggccatgctctttatctatttgaagaaacatgtcttggatttgttctgcggatgccacgtcgacttggtggatggaaattcgcagatctggaaacgttgttttaatttgctctgtcaaggaggttattgcggagagattgctggcatatgttaatgctaggtgaacgcctttctcagcgagttggcgagcgcaggccgctcctatcctaagcgcatgttagccctagtcactgagatggtgtgaaggggtgggctcaccctccagaagcgccagtgatgagggcgagtcggccgcgaatctcgtttaactgcgccatagttgagttacacaaggtagaatttgaatcggggtaggctagatactttggccctggcgcaggtataaacgactagcagacccagggatgagggcggttttcctcggatcggagcaacccccgataccccgcatcgatggtgtggggggacagtctatggatcacggtctccacatcgggtatcgtttcgattccactaaatcctgacagggatacctaaggcctttcaacagtgatcagaatagaagagcgctcgtcatatcgcctgaccacattggaatctgccattctcgatcagcgccggattggtataaaccaggattctgcaaggcatccaacgataatgtgccaggatctcctgagacatagtcaccaacagcttcgagatccaaccaagagaaatcgtttgctgggctgaagtgcacatagccgtcctggccagacacgcattgtgaaagggggttcgtgttttgcatcacgatttcattgctttgctgagtccctgccggcgaagctggagcggtggcttttggacgccagagaagctcaaggagcctagaataacgagctccaatatcatccggcccggcactggctcgcttcagtacttctgtggtccgagtaacaagttcgcggacattcatctcctctgcagggagcatgacaccaaatgatcgcgcctggtttgttagctcaattaagtacacaaactagagattggggataccttatagagaaaaactgcggcgtatatgccgtacagatagacccttagtggcataaaacggaggtgcttttcaggatcggccgtttcgacaagtatggttaggtaaacttttgcggcatctaatgactcaataataaatcgggcatcttgcatcgaggccacgttgtcaaacgtggctcgtaaatgctccctctgggagcggccatcgtttttctgctttgacaaggactgggaaattgcagcttgaaaagcgaaagcgttggtatagagtctaagatattcgtatgacaactgcaaagtagtttgcataggcggggaacctataccagttagcagatattcgcctcagaagcagcgcgcgtacatttaagcgagccccaacgcgacttccaccgcaatattgcaagtcgaaaatcgtctacatatttcacgtaatcccccattaacatcatctgattactcgttcgcattccagagtaaagaagatcgtggacgtttccgtaaagttgtgtgaggtccagcgtagcttggaatatctgggcataatcctcgtcccccgctttgacaggctgaagtgacggaaaatcctggctgacaaggccagtcattgggccagggccgcgcgaccagaacgcacgcccaattctcacagaaataagccgatccgagatatagcagcttgtccagcgagtcgtctgcgtgcttctgcctctgtatctccagaagaatccccgcgaaatgaggtcctatctagccccaaaaagtaacctgagcgcagggcaagcccgacatgcatccaggcagcacggtcctcctcgccgcgcccaactcgttctatctttggccgcaagccctgtggttcccattcggcgagcagaagaagtgcttccacggcttccacatcgcagtcagccccggcagcaatactggaaatcagttcatgcatatacttggagcagtactcatgaatctccggtcgctcaactaagtcttttgatgctattgtgataacggcagtgagcagatgtttctcattatccgcgaaggcgtccagagcagcgcggtggaaatattttcgagggaccagggggaggtacgggtggaaattttctgcgtagcgagcaaccaactgccaaacggtacccgcatcaagggatcgcgattgcaccagcctgtacgcctttataccggttttcgtctgaggctagccacatcgccattttggagtgcactatatggggaatatccgcctgaaccagtgcgcacagaggtcgtagttgcaggactaggccc

SEQ ID NO: 3443 - DNA, 1437 bp, Emericella nidulans
  unsure (1)..(1437): unsure at all n locations
gcaaatgcatcttcaaactgccgctccggaacctctctttcgcgatgactccggctcaacaagctcaacgcatgggtgatggtcttggaagagttccaacaagtttatacggtggcctccatctatcgcggcatattcgccaaggctatccagcttatctgccctgaaagcaccggtactggtggtaatgagaacagaacagtgacaggatcttcttccgttccgttacgtatgggagtatctgcatctacatttgcacccataccgattccgcctgaatcaaccgaactggaccatcaacacgtcggtactactgctactgtcggcccagagccaggccaaggagcagctttgactgacatggtggatgccttgttggacgagacattgccgttcaatttctgggagacgtgggggcagatgtgggttgtttttgtagatggaacaattcttgagaatggtgcccagaaaacacccagcctatgtgtttccataaccaaggcccttggtccccagactgattcgggctgcttggcacgcgacgcttaggatcactctgtgatttaccatccatcaatgaacccattttctgaacgaagctcgttagcagctttaacgtgctctactacaatcgtagccagtgactgtctgggtttacctgtccgcgaagacattgccaagctcaagtacagctaggtattttcaggcatgtacgttttatcccacacgacaagtacgatttcagaaggaacctcggaataatgtgtatcattctaaccaactctccttcgttttggacacattatagcggagcaccccggaaggtggatggttgtttgtgtgactataactacgaacgcgcttgtagcgaatcttcccaatggccgtcctgtaaaggttggagttggccctctgtggaaaattgtgctcagtattcaatggcgtcctgagcaaaatgaaaagcatgctgcaagtggaacttctacgcactatatttatctacatcctagccatattaagcccctcagcagcttcagcgtacgttattacaatatccggccagtgagagcggagaccaacgtaaccaataaaaaccaagaccaagatacaccgggattttttccatgtttttattttgcctttcattatgatagacaggggaagcccgcaaagcatcctagaagtcgattgcaggcaccagtcagcagttgctttggtaccctgccaacagnggcagaccttattatctgtaacaggaatgttcaatcgggtgcccaagcatgtcagccgatctaggtggagaaccgcaaattctttctttccaagaaaagcaaggccttttgccttggcccctaagggacaactttttttaaggccgaccccacctttggtttaaggggaatttccggaaaaaaaaacaccgggtttttttttttt

SEQ ID NO: 3444 - DNA, 2382 bp, Emericella nidulans
gtgattgaatccataagtgcaactcaggaaagtcggaagctgatccgcccccgctacgcagtgaatttgtcctgccccggatgtcttccgtccccactatcgcttcctctgctctttggcatcatcctatcttcttgttccattggctacggtttttaacatgctgcattaccaattacctatctttaattcaattcatcgttgctgagcctatcccgggaagaatgacggttcttctcggagtctcagagcgagtgttgacagaatgcatgactcgctcgttcttaacgagcctatggctagtgctaactcactggcattgtcacagcgagcacgggcgtcaggaaggacttgagataagatcccatgtcaccgtgttccggtcccgtttccatcataccatttagagacactatcatctgggctaaccatattctagggggggcgcgtttgcatcactttgagcgcctgatgctgatgcatgtgaagaccattctatcgatttctccaatagcatcctcctagctttagagtctacacatcagaactcgccacaatgctttccttccagttttctcacttgaagagtacgagttctcggcccaaactggctttcttcctgagactcctcctctgcggtgcttgccagaccattattacgctccctgtgagaccgttgcccaagatttggctgctagtattgaaaacggtactattcgccaggctgtcgagagtctgccgttgctcaataccacgaaactgcgcaccaagccagaatggaggagagcctatgtggtcctttcctatcttacacatgcctatgtttggggtggtgaaatccccaaggaggttggtgttttgtcctctaggcatttgatatggcttctcactattagtgtcacgctaggttctgccttctgctatctcagtgccatacctggaagtttcacgatacctagagctgccttctgtagcaacatatgcagcccttaatctctggaactggtcaacttcatcacccaacgatgacctcacctgtgccgacaatctctccgtcacattgtcatatactggaacgaaagacgaggagtggttcttcatggtctctgtcgccctggaagcgagaggagcccgggtcatcgaaatgatgctaaacaccatccaagccgtgactgtgggcgacgaccagagaatagtcgcatacctcaaccagattactgaaggatttaatgagctggctcgaattctggaacgaatgtacgagaagaaccgccctgccgttttctttcacttactccgtccgtacctcgctggaagcaagaatatggcatctgctggtcttccaaacggactgttctttgaccaaggaaacggtaagggtgaatggctccaatacagtggcgggagtaacgctcaaagctcccttatccaaacttttgacatttttttgggcgtcgagcacacagccatgggaggtcccactaagactgagcttccaaaggcaaaattgggaaagactccatacatccaggtatgccaagtcacctttctcgggctgttgtttatgagcaatcagacattaatgatctattgcaggaaatgcgaaactacatgcccggaccccaccgacgcttccttgaaatgctcactcgaaacgccaatctccgtccgtatgcgatgagctgcaagctcggctcacctgtgagagatgcttacaacaccgccgtcatggctctcggctcgttccgcgacaagcacgtacagatcgtaacgaggtacattatattggcctccaagctccctcctccagcgaacacacctgtgcggataaacctggcttcgacaacgcaaacccagatgaaggactcgactgagaaggtttccacaggcttcagcggcacaggtggaactgatttgataccctttctgaggcaaactcgtgatgacactaaggctacggcgtactatgcggattgaaagatttagctgcttgcctgactttgcgagcccattgtattatgatagagtataccatttgatttatgagtttagcgaaaatgaagtgatttttcttttccccgagtctagttattttatgggctatctcaatgttccgcagagggaagttgaaaaagtctgaggaccttccagagagcgagagattgtcgctttttcaacaccagccataatggagcagaaccggtttattttctgtgaagggatgccgaccagtgtgataatcttgaagctgcgattatgaggctgcggttggtggagcatgcatgcccatgggcacggcccttgagcaagaaaagagacaggacgcggcataaattgttgcttctctcacacagccgacgcacgatctagttacaggagtca

SEQ ID NO: 3445 - DNA, 3606 bp, Emericella nidulans
  unsure (1)..(3606): unsure at all n locations
gccggagataaatgccaagaaataagcgagtaaagaagcgacagggaactagaagatgaaagcaggtgagcaaacgagtagaaaggaacgagtcggcgggtgagggtaggtgggaaggaggtataggaaagaggaggagagttccacaaaataaaggagacagagaattaagtaactgatagcaataattacaacaagttagatgaatttaaggggaaaatgcaacggcctgttaaaagcatacaagcatgagccacagacccactccggtcaagaaccaagaagccgtcccaagtgctcggaaatcccctccatcgtgggcaataaccgccatcgaaggcgccgcacaatatcatttgccccgcaatcaggagccaacgcctgcgaaactctcgcataccgtaaaaagcgcaggcgcctcagtctctctagcccataccgagggtctccggcaatagatgccaacaacgatgacgcctcgacttctggtacagcctatccgaagctatcaaggaagccgtccaagctggacgagtatgagcacatgatggggaggggtacgaccgctatcgacagatctcagtctccggaaggcactgagccattccctgagttcgtcgcccattagcacggcgaagaagaccgatttggcacataaaacgtcctcgtgttcgagtcgatgttcaagctgtccccaaactggttgcatattcaggtgagccgtccttctgttctacatcatcccgtgtcttagtatggtgctgactgtcgttcaggaatcgcttggattgtcattgatggcgctaatgtgttgtttgaatggatcggactgatgtcgagttgagcagcacgacgaattcacgacaataaggtcagaaggcgcaggcttgccaactgtcatgtacataccttggttcttgctcccgatttatgatagattgtgattggccaaatagtctctatagacttaacgaatatgatctttaccctaataatactgtacctcttatcctgaggctcgtggtgcggctaaatggcgggtcccaatctcacgtgacataagggagcgcaccgcccgcacttcgatctcagccaacctgcgggcagcttctttcctattttgtctaacacacctcttggtcttcctaacagtccgcgatttcttcctagtatcctctcatcctcttcttaaccgcccattcttcatggagatatctcaaaattgggcgattcttgcgaccagctttgttgtatttctctttcgaaagctttcagttgccgcgagttttctcgtgttgttaaccgcgctttcatttctcgactctttgtcgacaccgtcgcagatacccctcctccttcaattcattttatttcaacctcagtctcgcaccatcgcacgccatggatttcgttaccaatggccagccctctcctaaggatacagttatgaacgacgcgtctccgtacgacgctcttcatcatcaacgaactaatcggcaattcactagcgaagacctggctgatcctaactacgtccctaaccccgtcccattcggcgcgaagaagataacgcctgacgaaactcatcgccctttctaccatatacattcgagaaagcctagtcaaaggcctgatatggtcctgaagcatcagaaaacagcttacagcacgacccgaaggcgttatgattcactctccccaccccaattccaattcacacgaggacgaactggatcccaacatgaacaggcaccacttgtgttgccccgcgtcaatgagattcagccctaccgattgaccgcaacgaccgcttctcgattgaacgccacaacctacagcagtagtctcatgaatccgatgcgctcgtctggacacgactcgatacttggggctggtcttcgtggtcgtgaccgtccgctctcgctgttcggatccgaggcttctcgccaagctgcgatgatccgacctaggaagcgcgaccgcgaaggcaatatcctcgacactacgggcagcatatttgtccgcaacaacaatgccaatgatgggcgcaacaatgaccaacagcatatcgcgtcagccgacgctgatagtcccgttttgaaatattgccgtggtggcacagagtcatcatttagtgctgctgtcgataatattaagaaagtaaatggggatccagttcaacctttggcgcaacgcccttccttccactggcagcgcgctttgccttcaaagacgaccgaccccgcaactcctggtaagcaaacaggaagctcgactgctacaggccgtattcctggctgctggccatcggcatcgaaacatggttcgatgccgctacttcctgagccacagcagaccgctcagacgcagcaccaaaccgagtctcctgtaacttcccaagagatatgtggccaggtcgacttgcccagcaatgcaaatccggagccggccaccgttaaccctgaccaagctattctggacgaaactccctcttggactcaacactattctggcgtttatggcaccctacggatagcttactctttccagtgtggtatggtgcagactgttgcaaatgcattccatgttgcactcgctgctgccagcactataacccatcaaacgcaacaggcgctgggaactgtaacacagcgggtcatggccatgtacagacaacgtcgctttgatcgtgcgcgttcgcgtgctcgtgcaagccctgccgctccggctcggcaacctccaactacaatagcctctcctgctcgtgtgaacgttgcgacactgccgcctgggcagcaggagcgtgtgcgaatcaaccagtggcgtagacgtcgaggatttcctgtcaatgaagaactcccattcccgaatatgacaacgccaatgggagctctattctatgatccgcaaataatcacaacatcttcgcctagcgtgcagcgcagtcttgacctcgtggtagataatgcctccggggctactttgcacaggcatcccgcgcagcggcgaacatctgtgaacgaccgcgatgacaaaaaccggcctcaagcacccaaagctggggattctcaaaaagaatctctctggttcccaccatgagccccgcacncccgacgtcgccccttcctgatacatcaccccgcgtacccgccggcttggactccagcacaagggtcgtttccggtctcccatagttaagcctttgcctttggcgctttcgccagtgggctaattcatccgccgagtcgggacccgggcttaatgaactgttgcgcacacagctgaacggagccgatgcgccgtcaaccgtggctagcgatcagcgtactggacccgatgaacagctatacgcgcaattggctgcttctctcgagccgtatgtggatccttgggcgcagccgcgcgacttcaccaaaggtactcctaggtctgctgtcaaactcgtcaaacccaagatagagccagtccccgacggccggtccgagtcgatttatgcaaaggaatatgaagagatgcaaaaaatgaagaatctggagtatgggccagttggacgacaggtccctgagggtgttccgtgcgggcctctcccggtaattggaaagcgta

SEQ ID NO: 3446 - DNA, 1835 bp, Emericella nidulans
gtcctatgtaacaaaggtaccgcgtcgccccctcaaacgccaacacagtagacaatgaaacctgacttcttccagcttgacttcctgcacctttccttttgccttggtttctggacaacacttcaacccaccatgtcttcccgttgcgattctgctttattgccagtctgatccccaacctctctggcattgctaatacttgtcaactggtcatcatgccgcggaaggacttccagagagacctcgcagatgctcttcttccaggtgcgttccctcaactgactgacgtcagagctggaagtgaggatggttctttttacttcacctacacttctcccttcgacgctccatccatcgatgtggaggtatcggttccaggtaagatccaaacacaagcatcgttgagagctaggctgacttgccggcagacagcgcagagtatcctagaggacaccactactttgtattcactatctcggaaaacgttcccgagaatgttccccgattcctggaagattcgctcgatagtttccatggcctccctcttggcgctttcctgaacaccgtctccgattgcctgaatagggctacttcgggcgatgacgatggcccccggggtttccagcaggacagcagcgctaacgacagcgaccaggattccagcgctgatgagattggctgggaggtgggcagcgatgttggtctggttgtcaacccacaggcaaaaactatcgacgtgaagaagtgcatccgggccgatcttcgcaaagctcaaaatgctgcctttcgtgtagggaatatgggtgatccagaaggctccatcaaactggcgacttctcggcgcatctccaagctagggatctctggtgaggccatgaaggcgtggggcgtccgaccgtctcagtatctcgtcctcctcattcaatatccgtatggttaccggcgtctaatcgatgtggtccaaaggcctgaaggatgcggtatgattaaactatatgctggcgtctgtgcggattacaagcctagtttgagctccgcgctgcatgtgtttgctaacgaagctgcacctggaccgcctgatctaggtcaggaaactaacaaggatagcatggagccggttctacactcaatattcattgggaagtctctccaggccctactcaacagtcgcttcatagacatcgtcaaataccgtttagagaagaagttctcatggacaggagcagagctgtacatgaacgacggtcagggaaggctcctagtctctgatgaatcaacatgccagcaaaaatactttgagccggactggcgagggtcgccgcccagctttctcaaacatgatcacctggctaatactgtggatccatctgacatgtccctactcctcgtcgccatgccagttacagtttgtcgatttgtcagggtgcaccgaattctgccttaactgctcctgctatttctacagctgttctttgtaaccctcatacctttcgtttgctccattgttttgttcctcttctctcctctttttcttcttttttattttcctcttttttttttatattctttatctctctcttcactatttttatttttttcctctttcctcttctcccccatttttctctactctttttccttctcccttctcctctctcactccttcctctctctttttttttctttcccctatcttctttttcttcttatttctatcattctttcttttcatctcctcttcttttttctcttcctttattttattatctcctcttcccctttttctttttcatttaactctctatctatcttttttctttataattctcttcttc

SEQ ID NO: 3447 - DNA, 732 bp, Emericella nidulans
  unsure (1)..(732): unsure at all n locations
tatctggcttgtccaagtttctttggcgttcgatcgccttcagaccgccccaaaacttcagcagaatctccggcggtcagtggcaagctgagtcacccgcgaccctggggtggcggccgtggccaatgagcgcacgagaagtaacttgtatgcgaaaaggccagatggccgctgtcctttcttcgccgctctgtctccatacaagaaggtgtccatagcttctccagttcttcttcctcttctctcttctatctctctcccacaaccctgttcacctctcttcacttctctccttccagtattagaggttcggttgccttattacttccttttttttcgttcccgctgtattcacccattgtttttcgagcagcgtgtgttcctccgtctcttttttgcgacttcggctggagtcttgaatctcgcatttcgacacataattcgccatggcgcgtccctctttagccgcggtgtggccaaaccgttcgcgactggaccactatcttctccttctccttgctttatcgcgcccttcgcgtttttggattcggccagcccaggagatgatcagtgcangaaaactatgaacggtattggaatgatttggaacaactactcgatgtcaattgagcgatagaatttggccaagttaactgtcccttttgtggttgttcagatcgaaagttaattttttacgacaagaaccgatactcttcttcttgctttaaaaag

SEQ ID NO: 3448 - DNA, 3041 bp, Emericella nidulans
actctggtcttcaatcttactggaccagccagaatgacagtctcagatctccatgaggctccccttcgttcttagctctcaataggacggggatcgcatttgctggtgcctgctgggcgctgcggaccactgctttttccggtcgaactgcacactaccagtgagtagtgtccttggttggacgaaaatattccccacccctgttggttctgcatcgtcatctccagctgcaattgccgttcgtcagtctactctggctgctggatggtgagggtcttctagatctaggcgagattcagcatcaggctgaagatcggatagccggataggcctgtgatacccacgcaccgcttggaagccctacataatcaccactaaggtattagaggccgatataagcgagataacagaatgaatagaatgcgggaagggtaaaaaaaaaaaaaataaggggcaggtcgtaaggtaagcgccgatgcggcgactgtttcgcaaacatcgtctcgtgtcacattctgaactgcaccccgaaaggggtttttaattacaacaagcttggtatcaatgaatagagacataacgctggaggtaaaaaacggggtaacaatattcaggtatacaatcccacaatccactacaagataacaggacgtaaatgcaaaaggtttcccgaagaagcgagtacaaatagaatgaaatgtagcatcggtataggtgctccagaacgaaatcaaggctctaccttttcagaccctcccgcacccttcagtttgcttcgtcctttggagaacaggcccttatcggccttacctgcttggccacctaacactcctggagtatgcaggaaatcctttgcagactgttaccgcatggatccgagcggcgcatatggccgcctaatatggcccgactttgagtggtgagatccatcttggagcgaagacgcaaggtttcctaaggatgcaagtcatgggaatttggtgcgcggtacgctgtttttgaactcctcacatagaggttttgagttgcggcttatgacatcgtgatgctggggatgggcatggaacgtaacctgaagccagtttcctagaccggtattgatggttgcaaattgatctcgcgtacggtcaaaagactgaatccgttcgtacggtgactgcatgttgagaatgtctttaaatcctagcaggcctgtctcgtcagacacaggcggtgtgtgcgttggtcgttccagggttggcggcatatggctggacgagtctccctcttcggcccgggcaagtgtctctgtagtctgggaaagggcaggctcatggccatggtcactcaatggaatgctaggagcatccatcgccactggcggtacgagagtaagcttaggtttctcaggtgtaggaggtccaaccctctcctctgacgcgtctgctatctctgattgttgtttcgtgggcgctaccacggattccgggaggacactatcttgcgaaaaggggaactgcccgggcatcggtggcggtcgagcgggctgggcttgtgtgacaggaacaggatcctcgtcttcagacgattcttcccaggagaagcgttttttgagtttaggctgggagacgtgcgatgggggaggagttaaattcccagttgaaagagcttgggatgtcgccaggatagtatcaaatgtcggtccagacggttctgaccctggggaagttgcggtttgcggtgccgccctgtgggcctcatattctctcgggagtagattattctctccactggtatggggtggcgtgccattctcctggttgtcggagggtgagttctctctgcttagggaacgaataatctcctttcttaaccgatcattctccgtatcttcaggagaattttccgtactcattgccggtatgattacaggaatgtctgttgatacagccggattagagacaatatttgtctgaacgttaagaggtgcaggcaagtcacccctcgtagcctcccgagagggttgtgggatatccgggttaaagacgtgctgctgaggctgcgtggccagaggggactccactggtgatccagaggatatttgagccagttcggacgatgcagtggcatcgggcccagcaacgaccggcctgcgagaaggactgttgccagggctgggtatgcttagatcccggcgatgccctggcttgaagaccatgttgccttcggtcggcgtttctgtattctcattcggctcttcgtggatggtcggggttttgtcatcggtattcccgcgacggggaatgatgggacttatgcccaccgtgctatcgctatttgagcgagctatgctgtcagcaacggtacttggagtttcacgcccatcccaagcttggttgacggcggagcggaagccgagagacggattgtgatgtaactgatgtggttgatctcccggttcctggttgttctgagggtcgcgttcgggttcactgaagaaaccagaaccgaacgcggataagcgcttcacttctggcaatgagagggccggggggtcgttcgatgctgccgggggggtactcgctttcttgacactggcttgttctgcttcgtaaataggctctggggcttgagcggcaggagggactgtgttctcggaagactcaagaactgtaacacctcctgaagcgcgttcgtctgtcgatggcgcagccggggatggtcggcggtcctgctgctcctctcgcatccgcttatagatgtcagccggccggactatgggtgccgttggactactggaggcggctgggctctctgttggcattgtctgagctcgctccatcgagcgcgagcggcccgtacttggtagtggtggatggggtgtccccagtgaaagggtgctcgagacatccggagtgctctgattcgcacttgtacgctgggtctgtggttccggggattggtcatcatattcatattctccatactcatcttcaccccagtcatcgccgtcgtaagagtacttctttgcttcaacccagcgtttcgtttttgcccggttc

SEQ ID NO: 3449 - DNA, 806 bp, Emericella nidulans
aaaggaaggaaggaaagacatcgttgagtgattagccataaaagaaagagagagccgaagatgctggctaactcctccctgtggggagttagttcggaatagtctgtagaaaacatttcggtgtatatagggctttttcttgtcggcaccagcatccagaagaaactggaccacctcggtgcgcccgtgctgaactgcagccaacataggagtccgtccgtactcgtcagccctgttcaaatcggcgccctgtgcgaccagaacacggacgatacccatatggccgcctttcgaggcccagaaaagggccgtcctgccctctaagtccgtatggttagtctgagcgcccttttccagcaagaaagatacaatatcaagatggccccgttcggctgctagcagcaacggagtcgagtccatgtgatcggtccagtcgacgttgcacccatggcccgatctcaaaaaggatacctgactgcgccagtttagtcccacgatggcagcgtggttgcaaccacgccttatttgagtccgtgggaacataccttggcctcaataacttgctgtagtgcactacgtgacgcaaatcagcgcccgcagcaacaagaatacccaacgggccccgattcttgttcttcatcgccgcgaggagcggcgttggcttcaagcatctggcgccaacataaaggggatcccgcgtcgtggcgagccgctgacgatgtgcgtatgctgctgtgcaggcagctactaggctcggtacctacgacggtcagattgagctgcgccgatcttggagccgagggctt

SEQ ID NO: 3450 - DNA, 1167 bp, Emericella nidulans
caaaaggccctgagccctcgagactttgctgacaccattacattttacaattttctgtgtacaactactctgacgggatatggggtttgaagctatcattctgacgcaactttgtagcttctgtaattggccaccggatcaagtgccccaacaaccactatctgtttggtgagctgatgaaggaatacaataagaatcacttacccatggccaagcttctggattacgccattggtgaatgcactgtcaccacatacacacaacgacaatgccgattcttaaccgtccaccgctgtatccctgtttgttggaataatctcatgcgcaagtgctgtgctatctactgcgaggaatccgatgactacatgaagatgggtgtcctcaacggtcttttcgttctaggccgtagcatcggtctgattgcccactaccttgatcagaagagactgcgcactggtctttaccgccacccttgggatgacatcacgtacctgctccccgccctgcaaaagggtggctcggagggtcgtgttgaggtcaacgtataatttttaataccttttcttattatcacattttctctcggaaagggacctggtgttggacacaagcgaccacgcgggctcataaaatacgtcaggagttatgatggtctatgttaagcatttttcaaattagtttatttctatttttatttttttttttatttgtcagtttcattgttgaatacaccttagagcacatgagacatgaatgtggatgatttttgcgccggttaattgtagtatgatatagggctccaacgttgcaaatagatgataagaagctttcactctgtacatgttggttcagcttactggcttgttgatgagctggttgccagggaatatagggggctcggaaactaaaaagttggtctgtgttctggtgggcctttcgtacttagtagactttaaaatagacctggcattaattgccgcaaccgactattgggattgtccgacaaattaatacactccacaagcgcaagtgcggaaaacctactttggatttaccaccctcacgcttgttgcttttaatttgcaaggatcttccccaatcccttcattttttagtttgttatactaatatttcgtagtaattaaagtggggaggggggggggttca

SEQ ID NO: 3451 - DNA, 3079 bp, Emericella nidulans
atacatctagatattttaatcaataggagcaggaattttttaagctataaggcgtctcctgacgcaagattcagttctcgcagtgatgagttccgccaatccaaattctaagaatttcatctaggctatgtaagtccacggtttccttattggtgagagcatcaactttgaagtatctatcctaccatcgagagagaaaatcaggaacttcaagtccgctacataaccctgcgagtgttacacccacaaacgctccttcattttcgattacaagggtggtttttctttgatatcggcgcgccatgaaacggtaaaggtgctcagaacgggcgatagtttctgctagttcgagcaaataatctgagactttttattgcttgacggcactgacaacgatatcgatgcctgtatttgggaggtccaccgtccacaatggttacttatcttgaaaacttccgagatcgaagatctaacaatccctggtgatgtttcaaaaggatgaaggctaagtgctacttgagcgaagaagacatattggttagtatcataaacgttctattggaagctttggggggagggctgtgctgactgactgagaaactctgaccctgcgaaagagtgctgccagcatggttgatattttgggactaactaagcccttctactttccttggaaactcgtcttgtaaacgggcagcaagggaaaaatgacaaacaaatactttatctttgaaattgagcaaataaaaatctcgtcaacataccacctctgtttggtttccaatccctcgacctttcctcctttcttcctcatctattacaaatttcttctttgctttctccccacatcgattcataatctgtctttttacagacccaaaggcgagtatatcatctccatatttccataacataaccttctgtcgtctttaccaacagctcgtcattacttgtttcctttccatgagcagcacaagagtgttccagcctacgcactgcctctctgtcatttgactgacgcattggcccgaataggacttgatttcattcttgactcagacacgatgccttggcatgcaggtgacggctggggaggtggttccgatgaaaacagagaagacgaagacaatgcggaggtgctggccaatgggttcctggtgacaatcatggtaggtagttccttacctgttatcatcccttatacatcccatgagtcctctggtattcatttccaaaatctttattccataaggtggctgacgatgtgctcacagcagacttttataatgacgagaacaagattcccgacaatggccatggacacgataagacatgccgcaagtaggcaatccacaaaatactccacgagtcaatcgcttatttcatggtagctgcaatagagaaggccactttgcccgcgagtgcctcgagcctcgcaaacctcgggagggtatggcttgcttcaactgtggggaggaaggataagcaaatcctattctagtctggcttcctcctgagtctctctaatcacacaaaagccgagtgccataagcctcgtgtctttaagggttcctgccgtatctgcaaccaggagggtcacccggctgccgagtgccctgatcggcctcctgacgtttgcaggactgtcaacaagagggtaaattgaagaattctcccttggattcacatcgctgacactatatacaggtcacaagacctcaaactgcactgagaaccgcaaattcggtctcaaccgcatccccgacatgctacctgagcgagcatgggaacttctcaggaaggcaagctatgatcgagatttggaaggcttccgcgaggtaaaccctgtcttgctccttaagatacacggtcgatgctaacacgaagcaggggcttaagatatactcaaaggccgttccgaatgctacattcgctgacatcgaagaaaagatgcgcgctgaatcattcaatatctacctcattgccatggtgggaatctcacttatagacgccagaatgagcactaacacttgtgtttgaatataggaaaggcagacgtccgattgtatcagccttatcagcctccagggaaagttgaactgcacctacatcgtcggactcttctacagccccaggccccagagagcaaaccttcgtgaatgctggcctccatcagttgaggagaatattgagcgccttagagatgctagtcttccttatgaacgacagattcccaaatgtagcaactgcggtggtaagttgcccgcgttagctaaatgaacaaggcctaatatttccagaaatggggcacagctctcgcagttgcaaggaggaacgagtcgtgatcgagcgtgtggaagtcaatgtgttaactgcagcgaacccggacaccgcgctcatgattgcaaacaacctcgtgtggcactagtacagtagagcaccttagattgtatattatgtctactacgtacgtagttgccttttccgcagtccacgattctaccactaccgttagtctcgtctaggccgcatatttcagcgttgcacttcgcaaaattcaattgtcacacatcctagccttcaagaacaccctggcccttacagtcattggcatatatgaagtaaggtagatcgcccagtagtagtattataagtagcgcaacagcgactatactctatcccattcgcgctctagcccctttcgcaacaagaacccatactaagagcccttgagcacatcgtcatctcaaagaagcgacctagggcccttgtaccgtctcagcggagacggtcccatggcaccaaacttactggaataggaaccacttttccggtctcaggagcagacaaagtcccctgtttcgaaaaatcttcgtttcaaccataagggccttatttccagggtttaggtcgaaggttttgggggacgtattaaacttttttaagccattttaatttgctgggacattggcttttggttatggaaaaatgggggtggggttttggttttttaaaagggaggcccgcgggattttgtttttaacctcattaaggtttgtgtgtgcactatgaaaatttt

SEQ ID NO: 3452 - DNA, 1095 bp, Emericella nidulans
cctaaccacgtcaatttcacttgccagctccattgggatctttcgccaacccttcaactgcagcgtatgggtcaagcggagaagttcgctcttgaagacaacccaggcttctcggtctttagctcgcgtaatgctagcagcatcgccgtcttcactttctacaccaccaccagtataagataacgtcctcgagttgtccagaactgcgtccacggcaggagtgatcgggtcgagttcataatccgactcggaaacagagcctctccgtaagcctttaatcggatgacgccggcgcgtggatcgacgtgaggaacaagtagacatagttcgggaatcatatctagaagcgtattgcagcagaatcttttccagggcgtcgagtgcgagggtagtgtcagagccctgcgacacagtcctcgtcaactgggcgccatcaccatgtgcatcaccctcgccgtcaaagccattaccggagccgtttgtcgatccgttggacttattcgaatgcttgcgtttggacttttcgcgcgagagccattcgtacacctgactgaagaggttatggcgcgactcctcctcactctgcttgagccagcggtcaatgtcttctttcgttaccgattcgttcgcattgggtacttggcggttcaaagcgcctgcggaagtcggatagtgaaaactctggcgtacggtgaccttactaacagacacgcgacgctgtctggtggtatttgcttcggaagtcgctgcagagtcctgactggggttctgggcggagggcagcctagtctcgacacctagatagtggccttttgcagacttgccagaatccatgaatgctcttgatatgggccattgaacacccagagataaagtgatgccagaaagatgcgtagggaaatttttgtgtcaagtgggtgatgagatcataagactaccagcgcaggacccgcggaggctactagatacgactactattggccggcagagccatgaatcaaaaaaaaaaaatgagccaggcacgatggcaaacaaaggaattcaggacaccctaccttgaagctcatgcctagtgaatgaggcatctccaagcac

SEQ ID NO: 3453 - DNA, 4030 bp, Emericella nidulans
tcgcaatagacataaaccctaagcgaagtgcgttgcttgttcgtagatgtatatgaacttgcacccaagttcccttgaatgcaatgcttgaaggtcacacggccccggctgctcccgctatcgccagctatagagatgcaggtagaatgacgtcgaccatattcttcaggtagtgtctaggtgccgcaaataaggaagacatgctggatgaccgagcaccagcctgggcaaggcttggttaggaagtaatagaccaaccttgaaaagattctcagcacaccttcaagaacaatcccgccctacttctatcaagaactgctgctgttttactatactgtcggaggctcctttcagcttacgttaccaacgaccttagcgacagtacatggagcggaggcacactctctccatgtttatcgaacatatagatatcccattgggtcaaagctcgtgggtacctaggtcatgcgtcatatcagcgtggtttgagattatacactgcagctaccaccccaaggtacctagatatgtgtatttaacgcccaaaaactattgcacctccttcctgcctattctgcacgttcgctgttttagaggctgagccgaatgagtcaggcatagtctctatagccgctcaaggcacgcttctcgttctcgtgctagttctagtaggaatctgcagatagtgtttctgccgcactattatacgcttttcttgttcctgctctaaatacaccatccccctaattagcttttataaggcttttctgtcccacgttgtcagttctaggctctttttggctttctgaatataatacttgtcaatcactcagcgtgataaggttctaggatacggtgctacttgcaatggccagtggtgttgtatactatattagttgctttgggactcgctttgcatctgaccttggatgctttagtcattgcctcaatcaagttctgtgtgaggttgctcttgcttgcatatctctgttccgagaagccttcgcatctaacctctttcgcttttttgtagcttggcgaatcaattcggaacgatgaaaatcaattaccatggcttaacatggctcgcccaaactcagtgttccacagattattttctggtcgaaggtctccgtgcgatactccgagggaatgaatctagtgcactgaccttgcaacctcacgtgcaaccattgtatcacgttccaattcatatataggctcaccaccccaagccatgataagcatgtgacgaatcttgccagctccatgtacgttatagaactttgctaaattgaccttcccgagggaaactgagactgctgatccttgggcttgccataggaaacggtatacctccgcctctctttgagaccacgtcccataaatcagacgtcgttcccttgccgaccactgtagccatacgccgtgcaggtaaccttaaatggcgcttcagttgcgccacaaacccccattggtgtacagtcctggtcgatgttttcatctagttgctgtttgagttcttcaatcaacatatcagcgttgatgaggtgtcggttgctgttccctccctgccggtgcagcatgacgtttgggcagttaacatctagctggtgactctgttgcaggccaattagaaatcgctgggtgcagaactgagcagtgtgctgttggccctggccacggctttgagtatgtagagtttctaacttgcgtgctgaattttggacgcatgaaggcgatgaagtagcttgactaaagccacgcttccttcctctagcggctgggtctgcatcagggtgcggtgaacaatcacttggtgtggtgttaggcagcgcacatctagcttgagactgtttgcgtgtttggcgggtgctggcggacggcggagcaaaagaggatgacggtagatacagtgggtcgtataatctctggatgttatttctgacgacgccacttctgaggatgtatcttccgagtccagcggccctgtcgcagttccgatataaagatctcggagaatatttcatcaaagctcgacttccagatgggctgattatggattgctttattccgcctctcctgatcacgatattgcgagcggaagctcatgaggcacaaacacaatatccaagattgcggttagcggctgtagcaggtaattgaagttatcctcctgacctatttccatgttgggctcacagcggtggtatacagggtgccaggttcgtcgtaatcaacccgcagcaggaccagtgctaacccataagtcaagtacgagtactcgagccctgcttcgagcataacatcatactcttggaccacggatgagccagttagccgggctgcattatgtctcagtttctcggggccctcggctggaatggttttggatttgacgaccttctcccaaagatccattggtcttaaccctgctcgaagatttttaaccgatagcttatggggtggcttatactcgattgtcgtaagaagtgtactcttgtcgcggtacagtactgctgttcagaaagtggtgtctttggttgttcggctttgggttggtcagcttcgtccgcaacaaggctcttagcatgattttcaaaccgaactccatcgcccaagcgagactcaacttgagcagcaggtattttggggagctccgtgataatatcactgacataatcctccacaccgaaatttctcatacatccgcaaatccagttcgctgcttattgcccgctcgaatcgcttccccaagacttccagcacaatgtggggcgagaatattcgtgccgcagtctgacttggtggttcaaaataggagcaaacagagctgtagatctcctgttgtttggattcgcactcagaccaatgctcaaagcggaagggacagcgtttcccggtagatggctgtatcgtccctgttgtagagcgaatcggtatctcaactttcagagggcgatagaaacatttatgacaatattggatgagctcgctgaaagtcgttggttgtgtttgcttcttctcctgccgttggctttcctctgcgtgccgttggcgttcctctgcctgtcgctgccgttcctctgcttgtttcctttagctctactttccttagaaagagcgcttccagatctggtctgttgctagtcatctggttgatgtcttttgtcaaatggagttgatcttgatcgatcttcaacaaagggcatgtgaaaccgttcttctcgggagcggctttcaaggtgcagtgaaacttcattaagtgccttcgtgtgacccatagacacccaggaattatgcttgcctttttatcaatagtataatcatgatccaagagttaggtccagagttctgttttgttctgagagggaaatacggaaagcgcatcagaacacaatgccgtttggaaccgccttgtatattgtcgctctaaatcgtcgttaccccagttttaggtcttcttcccgccaaacagtaacttggaaccgagcctatttccagggaaggaaacggcggcttagacgactacctcaatccaaccgcgtatgagtagggtgagcgcgacactcgccccactgctcatccactccaccccacaagctcacctttctgacccggggccccgcgacttcaaacaagcactgctcacctgctggaataaggacaatggtcttggcgcccgtgggttttgcttgataggcatgctggatacatctttgtgctgcatgatttaagtcgcctgactgaaacatgcagcatcctccagcgcacatggaagctgctgatggtgactgcagatgcatttgcaagtcatacttgatgcctcacttatacatgtcccgtcgattattccaactgactcatatgatgaccaagaaaagtacggggttttggtttgtgggatactgtcatgtcgcggttgcgaactgatactccctttacagcgatagctcactgcaccgtttatgattgtgacacgagatagcttgattatgcccagtccgtttagggtgcagttcgagtcgcc

SEQ ID NO: 3454 - DNA, 655 bp, Emericella nidulans
tacaactttcttggattggaccagcgcgagatggttacaaggcgcttctatggtatttttgcatgattttatactaaagcaaaaaaaaaaaaaaaaaaggggggtctgttagggctgaaggggccaacatcaggccgagacaatctgtttgagtgcgggaacaacggcagtagcgtgacacagcatgctgggctgggtttggtatcatgttggacagggtttgctttcttgtcgttgcatttcctgtttctgtttctgttcccaacttcgggttcccttattccctgtttatctacacacgttttctttcggtcatcatggtacgtggctgttttatagcatggactatcgatatggatggcgatgtgttatgtttctttatcctctggtcttttcccgccctcgatctgagagaaatagacctgtgatgcgagataccaagatctagttatgtgtttcgttagttgactgagactctgcctctttagtcgcaattggttcatacctaccttacctacttttaaggtacagaagaatctgtacagctttattctgacatcatcatttccaagtaagcccatctggttgcgagcatgaccatcccaactgcaatactgcactctcagccttatcggaagtcacctacgggaggatc

SEQ ID NO: 3455 - DNA, 1774 bp, Emericella nidulans
cgctgctttcggatgctgaggctcatcacaattccgatcatgaaaccagcttgtatggcgaagacaatatcgacgactgggacgacgtcgatgatgacgacacggaggacgatgatgacccgtactctgggagcgtgctcaaggccatggtaattcagatgcgggtgatggaaaatcatcagaacggaaaggatactcatgtacgtggtttccaagtcttcgcgagggatgacaaccgtcgacgtattggtaatgctccctccgcctctgcagatggtcgagtccgcaggcacagtgccaggaagtctctacgtggtgctaacgatgatgacggccggggcgaaggcacaggggccggtgacagggccaaggtaacagggttagaggagccggattggatgggagatcctgtaattcgatgatcagattccgtctattcttatttcacttcatgcactccaggaggaactgctctctggagtcggtggacacacattcttgcattacggacacagtttgcaggcccgttggcgccctatgttgggatacccgcttgctaactactatgttgtgattactcatgcaatgactgccatcattgcaatactggcattgataaaaatcatggagtgcttctgatggtattctatttaagtcgttcgttatttcatttggcatgtttaatgccacatatgacaagtacttttttcgaccagtcaatcttttcattatgtagcgtctttacacacccttggcgcaatcatttatttcttgagaagcttctccagctcagcagcaacagcatcaccaacttccttggtggaagctttgccgccaatgtcaccagtgcggacaccggcctcgatgacgttgctcacggcggtcgcaaccgcgcgagcctcttcgaagagggcgaaagagtactgcatcatcaggccgactgagaggattgcagcgacggggttaacaatgccctttccggaaatgtcgggcgcggagcctagtaaaatcaattcagcatatcaatcctcgagaggtgcaataacataggaatacataccgtgaatgggctcgtaaataccgttaaccttgccctttccatcaggaatgctactcagactagcgctgggaagcagacccaaagatccggggataacgctagcctcgtccgatataatatcaccgaacaggttgctggtgatgacgataccattcagcttgcgagggtccttgaccataatcatggcagcggagtcgataagctggtgctcaagcttaagctgagggaactccttcgccatgatttcggtaaccgtcttacgccagagacggctggtagcaaggacattggccttgtccaagctccacacaggaagaggagggttgtgttgcagggcgaggtgggcaccaagacgggtgatgcgttcaatttcagcgcgtgagtagggttccgtgtcaagggcgaacgctgccgtcgtcttccttgcgttcaccgaagtagataccgccagtcaattcacggatgatgttgaagtcgacgccgcggcagatctcaggccggaggggagagctctctactagtgagggagcggcgaaattgcatggtcgcaagttggcgaaagtgcccatttccttgcgcacgttgagaataccctgctcagggcggacagcaccagttccccattcctaataaccaattgatacctgattagctacaccttcaatacatggtgtatcgcgagaagcctgggatcacatactgggccacaatgga

SEQ ID NO: 3456 - DNA, 1399 bp, Emericella nidulans
tcggtgttgaaggtggttgatcccaatactgcggagaacgtggatctcaggaatatccgcattgtgaagaaggttggcggaacaatcgaggacagcgagatggttgacggtctggtcctcaaccagggtgtaatcaagagcagtggtgggcccacaagaattgaaaaggcccggataggcttgatccagttccagcttagcccgcccaagcctgatgtacgcctctgcctaaaaaacttttgatccgatactgacggtttacagatggagaaccagattgttgtgaacgactaccgccagatggacaagattctgaaggaagagcgccaatatttgctcaacatggtcaagaagatccaaaagacgaagtgcaacgtccttctaatccagaagtccattctgcgtgatgctgtcacgatctttatctacacttactttcccgattaagattctccgcctcaagacattgacgtgaccagtcgagttcctgtgcagagtttggctgcatgcccgtcgccaacgtcgattcgttcacggaggacaagcttgggaccgccgatctcgtagaggaagtccaatcgtctggcgctcgctacgtcaagattaccggcatcaaggctcccgccaccacggccaaccagactgtctccatcgttgcccgcggtgccaacaacctcatccttgacgaggccgaacgctcgcttcacgacgctctttgcgtcatccgctgcttggtgaagaagcgtgcccttatcgccggtggcggtgcccccgaatcgaagtcgctaacacccttgcaaagcgcgcccgggaactgactggcacagagtccatctgctggaggcatttgccgaagccatggaagtcatccccaccactctcgctgagaatgccggtctcaactccattaaggttgtcacagacctacgacaccgccacgcccaaggccagcagaacgctggagtcagcatccgtagcggtggtgtaaaagacgatatcactgaggagaacattctgcagcctttgctggtgagcaccagtgccatcgaactggctgcggagacggttaagatgattatgagaattgatgacatcgccctttcaaggtagagggtgacaaactcaaagcaattggagccatatagaaaaaagtgaacatgttgtcatgacacgtattaatatcacatatacaaatcatcattgtattcagtcattacactaagcttcagattcccataagtatttaaacattttctatactaaaagaacggcactggttgagacaacggcactttacaacgtccatgactcagattgtaatgatcgccatattcagaaataacttcatacctgtttgcaagacttgggggcacggcaccagattacatgaggtgccatg

SEQ ID NO: 3457 - DNA, 221 bp, Emericella nidulans
gagtgacacagtacttcaggggcttccagggttccgatttcatcctagaatgtacgttttcagacgcagggaattttcatccctcaggttggcttctgtatcatccagcctggcctatagtaggtatcagtaaatctctcttgacttaagtagatgctgttaggtccaccttacagataaagaaactgaggaatgcagaggctgggcccacaacaaggaga

SEQ ID NO: 3458 - DNA, 6508 bp, Emericella nidulans
gactgcatgtgctcaattgcatcagagaccattagcacttgcatggaaacagcatcaatcagctgggtggggtcgcctaaaaacttctcgttctttaccctttcgacgacgtcactaagttgcggcaataaggcttttagtttgttgtacgcttctgaaaccacatccttagggttaaccacatcctcctcgtcgtattcactaggaacagggaagttatagtcccaatatgtgttctcgcaatgtttctccgttaggtagcacgggaaatgcctcacgttcttccgctcaatatcctcctgcgccactcccgtctccgtgtaaaggtccgcccagaaggcgtcggggtactcaagcgtccagtatacagattgtgaataccgggcgtctatagtttggcactgccccctcagcgagtaatccggcggacagggctgggtcatatttcgatacctgtattcgggcgtctcgcagtggacctctgggttatcgcagttgccctcagggatacagtcgtattcctcgcaatagcggcagtctaccttggggtgctggctatgcttcttacacatatcgcacacttgatggtctctgtgacgagcagctgaagtagctcttgccgttctcgtacataaagttctcgacaacctttttagacgcagagaccacggatttggcataggttttgaatttgccgtcgtagccatctttcatcaaatcatcgtacgcggcgagtgacgaggtgaagttcttctggagaacttcgaggatgtattggccaagacagagttcatctatggtgccgaaatccttctcgatgctttccaagtcatggtatgagccgctgcagtctgggtcatcaggcaagggtggaagaagttcctcgcctccctctcccgtttcatagtcgtagtattcatcatctgcatatgactgtaaaacaacagcccaatcaatggttcccgcgaagttgtagttcttccaatgtaagcgccgggtttcttttgttgtcctgctcatatccgccacccactgagtgtctgtcaagcattagcagaccagcttttgcgcagggagtctggacgtacataccattatacaccataatatccgagttcgaagctccatcgtgccacgtttggacgttgtcaccaagaatcgcaatttcatcaatctcggcgttggaaatgtagccaccagtatctgtacatacacccttttgctgctggagagttgagccggtcgccttcaaagaagcagttagcccccgtgcatccttttttttgctcataagaaaggagcgaccgtagctggattcccctacaaaaatcttgttggttgggactccggcttttgtaactgcatgttgccgccagcaaaaatatccctcacgcagagggtagtaatttgacaagcatggatcgcgccacagcgaaactaatagacagggggacttactcaaagaaagagcataggttgtctcagtaaggttaactgggtttagccacgttagccacgctctctgaagaatctggacacaacgcaccgtgacttcgtaggcagtttcccgtcggacagccctctgttgcatactggttaccggcatcccatttgcctttcttatattagccactggactaaaccgtgtggagcccacctcaccgtggagatcataagccatgaacacaatgtaatcgagctgcttagccatctgggcaataggaaaggccttgagataccagtatgaagccggtgcagcaatgagtaaggacttttctttggctagctgcccacgcatgacgataagaaacttgtagtaattcgggccgtcggtttcaaggcccggtggggtccctggtatgtctatggcctaaagttcgagggcaattagtacagagctcagccaataatcctcatatcttccctgtaactggaagtagacctacccctggatattcccaatcaaagtccacaccgtcaagctcgtgttccgcaacgaaagcagctacgtttgtcgcaaagcttttgcgatttggtggactcatggcctcacgaagtatattgtatgtctctggctcggttgaatagccccagcctctaaaggatttactactcttaatattttccaggctcttgaagtcttcccactgcttgtacgggtcaacgatcttaacacaccagttcgacgcgtctacttcagcaaatgcccagtgaatatgcgtgtagcttaaatcggtatttgcattttctgctcgtagccagagacacttccggttgaagttccaggtctcatagtaaccgattcagccatagttcatcggggagttttcagtgttgcgaatatcaacaccacagctggactcgagtgtgcacgtttgcttctacagcatggggcgcaaccagaccttatggatttagacggttacacccctaaagacagagctgagcaagccaagcagtggaatatgctgaagctgttggagggtgcgatagctcagaagtgaatttggagactatcctgggctgataccttcgacttttaattgttctagaccgctccggccacaacaattttttctaccctttcctctctgtcagcggacagaatttgtttcttctaggcctctcaaacgtggcgattcgtctttccactaatagccgaggtagtacacctgtcggcctcgttcgagtcccttctttctccagcggctttgccgctggactagaatctccctttgtctagcgctagaaataaatgaggtgttgtgccacaatgcaatatcaatgtcactgcgacaagctcgcggcctggcgtgcaatttcccacatctgccgtttgcggtttggccatactgataatctcgcgatccgcaaatcgatgcctgggccctgcagggacgcgttccagaccctgcttggcgagaatttaggtcggcctgtgccgcagtagggcgggccgacccgttctctgtgcgactcgcgcaccgtctcttggcgacttgacgggctaggtcgagttacaattgcccggccgtaagcgagtgaatatcacgaatcaatgctgactatgcggaatgtgaagctttcaaaatctgtcagccgcgaacagtattatcagctgcaggctgtaaatgaaaacgcggccttctgttgtacttaaccaggaagaacggataattcaatagcttttgcaatcatatcaaaggtcgaatgccaatataaacaaagtgggctcctaaactctgaccctcaagcacggactggccttgcacttttacaagggatcaacctcggccggtgcacgcattatgcgggtgcagatactgctgtcgcaagggttccaaacgccttgcctcaggagatgtctgaggggagtgcaagagacccgactcattattctattttggcctccatgaatcgttgaaagtcttgcgaagcggaagattttagggtctgcgccgcagaaaaccagtggatattagccggggtgtggtggtttgttggtctacagtagcctcataacgttaaacttgttagcacccagtagcagggaaagcttactagctatccagggtggaaagcacatttctggtccaacgaaactctaatgtgcaaatcaaccgaaagggaaaaaaaaggagccatgttcttggcgaggaaaacctggacatctctttattcccggtttgaaaaagagtctgtcctcatggtaccttggtaaaatcctacagaaacatttggcaagggaccctcgtcagactcaaacagtgagatgctaaattagggagtagtctaccattatcgcttgttgtccgctctcgccgctcgacatgagctcgcggaaacccttttctgatttgcctaaacaatagacatgcatattcatgtccttggcactgtggcgagctgctgaagcaatatcggagcaaacagtatccttacttatcactggtgttaggtttacctggcgtgtctgcccagatttggacatcacattttcttggttctcagtatgtatatctatgtatatatgtacatgtggtaagaggatcggcggaaatttacaccttcagggattggaaaatcttacgttgaaatgtctacgaaacgttcaatcttcttagcttcggtgcttggcgtctcaatgtctcttacaacccgcggatatgttcgtcgcgatgatacaccgcaactgccttacggcccagaaaccactccctactgtacatggtggattgacaatgacggatctagttcctgtcaggacattctctccacctggcttatccctctgaacgattttcgacgctaattaagtgtcctctggttcttgggagcacggctaaactaacatctcctagaatccgtccatcacagctagctgtgaaggattcaagcccggcaagtcgcactgcgtcgaagcgtggggagagcctgcgcctaccaagcccccaacgacgatcacgacgccgacaacaaccacaaccactactaccaccaagactggaaacgcccctggcacgacccaggctggccagatagggacctgtaaccggtgggatctcgtcaagtccggtgacagcggcaacgtatttttggagaagtattcaggtctgaccctggccaacttggtcagatggaatccggctattgggtctcgatgccagagcttatgggttgatacttatgtatggccttcctatctctccaacagtcgcccggtactaatcttacatttcagctgtgcacgggcgtggaaggctagggagcacctactccctccacgactaccacaactatgactgctcccgtttacggcatcactaccccctcgcctattcaaccaggaattgttgatgactgcaacgactttcacaaagttcagtcgggagacacttgcgccagtattgccccggtccgcccgggatctcgctctcgcagccggcggacctcgctctcaagtttacctcatggaaccccggtgtgggaaacggatgtagctcgctctggctgggttacttcgtttgcatttctcgggtgggtgtgaccgcaacgattacgatgacaacaactacctccggtaatggaatcttcacaccaactccaaccttaccggggatggtgaagaactgcgacaccttttacctcgtgaaatccggcgacgggtgcgcagctatcgcctcaagcaaagggatcagcctttcacaactctacgcctggaacccgaatcttgggtctgattgctctggattatggtctgagtactatatctgcgtttcaatcgtcggggtgaacccgacctcgacaacaaaaacgaccacgaagaccacgacgtcgacaaagggaaatggagtttccacccctacctctattcaggcggggatgacgagctcctgtaacaagttccataaggttgtgtcgggagatcagtgtgggacgattgcgtccaacgctgggattacacttgcgaatttcttgaagtggaatccgggggttggcgggttcgcatgccggtcgttgtggttggggtactatgtgtgcatcggcgttctttagcaaagctgctttatattgttgattcaataggtctaaggcccttctatagcaggcgcatcgacctcacatggcacactgggttagcattcattgtatgttgtaggcatgatatctaggcagtaagataggaacgagaagcgctttgaccataatccatatattaccgtgattttatgtattaccataggaagcattaaaacagctacctaatcaagctaatgaagtatccaatcagaccttgaatgaaaccttgcactaggcggaaaatcggccatgaaatcgactatcaagttggttcttaacctaggaactagatgtttaataacaccgtagtttatttgcattaaagtttatcgagctttgtatcagagcacccatcaagctattttgttggttagttgttagtcatgactcagtccaattcctgcattgctagcagaggttggtgtagattgagtagggcctacactgccatagcgcttgccaccagatgctggtgcaagagtcctttccgctacaacctggtcctgtgataagaatgacagtccgcggaatcttgactgggcaggcgtaagccagcagaccatgtggatcatgccttgcttaacatctacacggtgcggcccgttcgggccgaacgctttaatcgctagggttaacagatagggcttctactgattaacccagagatcagaacccctgctactcagtcggtttaatcaatcaaagaaaagaagcaagtcttgtataaggtgcatagattaagctattcctactgtcattaatagcaccacaacctacgtcttcggttgcacgtacctgccatcatcgccaacgcagcctcctagtctgtgcttctgttttgaagctacaagtggctatgtacacctgtaatacagagctcataccacgcattttttttttttttgaccagaaaaattttacctccaat

SEQ ID NO: 3459 - DNA, 1719 bp, Emericella nidulans
atcatccttgaccagacttcgtcgctttcgatgcattgcgacaatggatacagaataaccagattgtcaatttctttacctgtcaagtgcgtcatcaatctcaatagttctatatctacacatgaataaatcataacctttcaagcagtctccctaaaccactataaaccattgtaagatctatgtattgtcttgtcattcaaatgtcgaagtggactagcacagagatctctaaaaccatcaaagggctcaagacaaccgtcctatacaatacagaccagtggctcccttgcaattgctattatatctgtcccagagtgttgaaactaactagaggaccattatggttaccggcaaagaataaagatagactttgtcaaggctcttcagagtttgtccattttccgagtagactctctggggtttgagtcaatgagtctattctaaagaatggagatacgctttgcaatgatagaaatgataaggcgaagcggttccgcctttcaaggaaacttgtgaaggagctcgattactcaaaagagtacagaaatatcctgagacgaaaagcccattgtctctcgcggagctaaaccccaatatagatgcagaattaggccagcaccagttctatcaaatataaaccactcgagagagaagaatctgacgtgagctctttgtcttcccgtaacaaaaggttaaagactttgtacctccagcacataggtatagtgcaggataagaatatggagaagtactaaatatcatgtgcactttacggcttagcggagagaccgagccttagtttagatatgaatgtgctgctgagagggattttactggaacatgagggagatgaccatgcagcttcaaccccagtccctcggcctctctttttccatctctacgacaacatctataatcaaaagatcactcaatagatctccctgagaatgtgatccctagccaagcacgtctcgcactccaatgtcctatgaatagcccatacttcccagcccgcaatagcctgatggcattcggacgactccaccacccaccgagccaaaacggtctcggatacaatgtaactatcaacagggcaggaaggtcgtgcagacccacagagctcagcatttgatccaaccagagctaataatgcaaaccactcattggtggtagcaagataccctgttctgacgctcgcgggttccaaagcctatggtgtgagagcttaccccgaatttggtgcaattgcgggggaaactttccttggtagtaatggccagggctgacctaaagctccggtttgaccatcgctgcatttcttgatggtgactagttcccggaacgccaacgagagctatcatcgccccctatctatgcttaaggacacatatgcccaaccccggctacttccaaacctaccattacccttggcatcaaggcctcctctcccactccctcaaatcaaccactctctgcactctctcctaatttactcctctgctctcccttctttacctccccaatctttctcttaccccctatttcgccccctcctctcttcactttggtcagccttcctccccttcccccaccttcccctctctttctcttcacttcctcttcctactcaatcgctcatattaccatatcccacatcactctctcattaactccacctctcaccctccctcttcctctgactctcccacaaacatc

SEQ ID NO: 3460 - DNA, 1332 bp, Emericella nidulans
gagacactccagggggcggaaggcacgcgtatttctcgtgccggagctccctggtgctgcgaggggggagtccttgcttatagggaaggcgagctggttgatatataactcgacgcattgggcgtgagtggctaggatatctagacataccataagcctgattcttatagccgtgctgctgatacatgacttaccaatctggctcatctccataggaaacgaagcgcgcaagtcatgcacctcccgccgtaacgttctaagatacagcaaacccggcgccgaagccgcagtcgctccagtgcgagtttcatcttgctgccggacatcgtacatcgcttattgagaagctgcagacggacttggcacacaaatcgcctgtgtgccggacacgcataagcttaccgtagggagccggagcgcctcttccatctgcggtgtgcatcgaaggggcatcttggccgccgagatgggactaaatactagtcaggttaggtagggtggcttttacaagcattcaaaggagagtacgcacttagaactcaggacgaaacatgccaggacggcccggccgctccaacagtccgtacggcgtttcatcatggctcggccggttctcggccgtgccgccttgagtgatcgtcatgataagctgcacgtcctttgaggacggcttgaacagccgcaggtcatataccagcgagatggcaagcatcatcagccgcgacatcaggtctgccctgcccaggaaagggtctgtgctccatgccaaataggttagcgtcgccagcagcagatcgatagtcgactcgactttcaagaacgcagaactgaacagcagccgcttcaattcctcaacctggaccagccggtcctgcgtcgaaaaggtcgtgaccgtgcagatggcctgatacagcaaaggccggttctgccgcagataccagctcgtcatatcgggggtcagattgatgaacgggaacgacggcagcatcctcgacctaaagaaatccagccgtctatcagcctggttcggtgacggcgcaggcgtcgacaggaagacctgattctgagccggattcgaatttggcgagacggcagccaccgactccggcgcgaatgccggcccatcaccgaggcccagcgtcgtgctgggcggcgtcactagggcaccgttgctatgctgatagcggtaggccgagtggacggaatcgccgttcatgtgcatgttaacggcggccccattagacccaataaaggactgcatggcggaaagtagactctccatcttgtcttccagacgggcaatccttctgtcagagacactggccgtctgcg

SEQ ID NO: 3461 - DNA, 1722 bp, Emericella nidulans
aaactccgaaaaaatggcaccgaatccatattttgtcccaaaccttaatagctccttcaaaacctctttcttaaaaagggccgtcttctaaaccgctcctttattgtaaactcaaaagaagacattctctaccttgtcttaactatgccataatcccgtcaacctcgcgcaggggtacagtcttaaaaaacatccaaaccccgatttgggtctcaagcgaaggtcactaatgcgactttcttcaagtccgcaatgggcgcggtgcatgaagggtatgccgccggcaggaaagaggttttgattttgaaagtatcgggcaatgcaaatgtatcctgtcgacctattatatgatgttcccagaaagacttaatgagttcgtcgcgaggctttgttgctttccagctctggcctctgtgccctagggcattgcgcagagtacgttcctggtccttgagcaggtggaagtactgctcgatcgagaagacgtcgtggacatccatgctgtaaaatcagagagagtttcttctggtctctaatatggtccattgaagcagtttctgaaaatatggcaaaatggcaagaggagtttgtgtttgtatgtttgtgttatttcttctgtttttgttgtcagtacttttggcattcactaccacaacatgataaacccggcattttttaagcaattacacagggcggatcttttggtttgtttattcgactagtgggattgtacgagttctgtggtctatctcgcataatgcaaataaccaggccttagatagcttcatgtctgagcactgaaggacgtaccctatctagctgccctagatgacaactgcagttttcctcagtaaagactgcctgagcgtttgatgtatgaagcagcagggtattattgtgggtgagagtgttttctagcgtgcggactcagacatattctgtcaaggataggatttatataccgtgcttgttcatgaccagggcgtcccagttatacagggtgcgaagctctctgattccttcttccgcagagagacattccaagagcgttcgataataagcaggatcctgcagtcaagcgtcaagtatattggcacctgcaagcacctcccccattgggagcggtcataaagcaacagcacctcgggagcttaatgtttagcatacaaaacagctggaggcctgggtaagacaactggagtgatagggaacagctgcattatgagagccatcaaggggcttctacgttgcgccgtccagggtttctctgccagtataaggagcttgccgggtgttaacgttgttttaacgttgtcaatggaagacgacaagctcggagtcttaaagagaaggcaatgacgctcattttctttgagcctcaatgggcctcactgcaacgggaggctagcttcgggagtccttcctggggctgccttattcggggcggatcatacttgagggtgatagagcattcgctctacttgccgttgaagctgtagaattgtaatccactctctatgaccagaggctttgtcaatagtaaaatccggtgagtgtcatgttacggatcagaggagatctcatttatgttcttggctatcacagatgagctccgcacttctctgctctgccctacctatcaagcttactccaggctatgtgaaacttactaaaagcaaggaaattattgcacccgggtattgtggcgtgctgaatgcagaa

SEQ ID NO: 3462 - DNA, 3676 bp, Emericella nidulans
ctggattgaagacgaagacgcaaggcctcgaagcaatctttcatctcactgcggctttttctttctgccagtttatgcgtaactctgggctccggcgttctgctgtaaggcgtgctgccagaatgttgttccgcttcccctatgagaccacgaacttgcttgtgctgtaaagtgtggtggtggtgagcatttgcaggtagttctgcactcaattagctcatgtcgcgactgggctctgcgcatgttgtcgcctaccttgctgtccgtggggcaaacgggactcggagtagttactgtacaaagattctgtggcacttggtttgcgagagaaggaagctctgtcaaatgattgcgtgcgtgtggagacgtcagggtcaggaaaggcgtaggctagaccggcagttggagcctctgcgttgtagatttcggatcgaggattcgaggagatcgcgggtgctgtgcggccagccgcaaacccacggtgttcacgcgatgacaaaggagacaagggcgaagtccctgaataccgagggccccggtaagtgttgttatcagtggagattccccgctctctttgtaagctcgaaacgatagaggtttgcgaggcattcgtgctatggtacggagacgtagggttaatggccaatgagctaattccctggttcatgcggctgtcgacactactgcgacgggattctacaggcttcgctccactgttgcggtgagaaggaagcctcctagttttggtttagagagggcaatgcatgagcgggttgcgaaactaaatttggagacggctgtgctcccgccgaagggggggtagtattgtgcgactggtcgtacggggaccgatcagagacatacgaaccgcgctggggtgaaggttgcgacgaagtgaggaaggagagcgtaggttggttccccgttccatttgttgccgtagagtaggtagaggatcctagaccaattagttgttttatccgcgcggcgatgtcgcgctgaacctacttgtactttgaggcatagaccaattccccgagtcacgctcgatcgtattcaaagaagcgtttccaggtgacttctctgctggcgccggagtgtggcccatgctggcagtcaaggtagatatcgaagggagagtttgcgaagaggtcgtgacaggaggattgtgcacaccattatatgggccccatggccggtggttcagagttgagtccattgcaagattcggtagggatgaatgagtgccaagtcgatagatggaagagtcaaagattctgagacgagcgtattatctcatgttccagcgcgcgaaaacgaataccaaggtgatgtatcaattgcggtccgtcgcaagttatgcaaagcggtaatcaatgcgtgggtatccggtcgtggtaacggccgcgtgggtgaatactggaatgcgctaatctcatgtaaacgcgaaaccaaacacaggtgccttcttcaaggactagattgcgattcctcgggtcgatgctccctccggtttgcgatgcgcccgcgttatcccttcctgcaggtcacccaggtcaatgtaaacggatggcgaatcgtgagcggagaagcactgaggaagacaaccgggaacgagaccgaaaagcaatagaagttgaggttcgatggaacagaatctgcaagggaaaggaggatgcgtgcacgaagggaacggttgtcgatgggccgtaggggaaacggaggcgggacgtggtaataattcgaaagtcccgatacggagaacgaacgagcaaaaagagtgggggacgttcagagggtcaaaaaaatctgctaaaatgagtccgagatttagttcgagaattatcgagtcgaacgagagtcaagacagaggatgatcccaagttcttgagctaggagcgtggacggctcgttggtttgcagtcttgcagagcgagagcgggtcgcttacctttagtgcagacgtttcgactttcggggaagaacgtggcacgagatctagaaggacgaacaattgggcagggaacaactgtttagggcaaaggctccagcggtgaccagccagaacgaagctgcggggagaagagaggagaggagcaaggagctgagtcaacgactaggaacagtccagcagaaaagtgcaacgggccgtggacggagaggggagagattgcggcgagggtcacactgtgagtcgcgacaattaccgccagggcgtgcaactctggtccagcgggatctgaaatctgagggctctgaagccgaagaaaaagcagctgacggggtaaagatagaacaagactgacggaagttgagcttcagtcttgacagccaggtcaagtggtgagcaatagcggcagaaatgattctggctgcttcgcaagtaaagagagtcagggagtacagaaaatcaaggtgaggatagagagaggataataagaaagccgatgacaggggagcgtttttcttgttctttaatattttccttaatattttgcttattatttcctctttttctttttatttttttcctttgataaaaccgtgatgacgaccgaaatgaaaggttagaaggacagtgatgcagtggacgacgctcctgctccaatttccgtatggcagccatcaacgtgccaaccaggagtccgtcccaagtccagatttactcaattcaggtctggtaggtttgtgcttttacttccagccgtcaaccggggtcccgaacatgtacttcaaaaggttgcgtgctacttcgcttggtgtttagacaattccgcgccagagagcgcttacagagagtgacactgcgcaggcactacgggaaacaaattgagcaaagcggactgataggtgcttcttggcggcgcatccaagctctgcctcgtggactggccacctgcgcgcaaggtcagtcgatgctctagtcgagctttcagggtcgtctgaaccgaggaagcgtctctgtaatgcgtacgctgcgtacgcagcgtacgcgagcgcgagctttactttcggagcttcagacagcgcctcttcggtgccagtgaagcgactgaaggcgaggaaagtcaaggcgaagcagccaagcatctaatgattcgcactacgactgcggaccgaattatcgagaattattcgacgcccagtgtccaccgccacgaggcagtttctggggtggatttcggactcgtgtccagccgcagctgctgcaactctcggctgccatttgtcaacgatccagcgatgcataaataattatggcatcttaaatgccaggcaccaggattcgttcagccgtgggttttcccgacaatcccccacatggaagaggatcgacgggcaggcggcgcgggtgccagagtcgagcacgccatgctctttcatatcccgcgcaaaccagggttcacagtcctagatagacgtaatcgtcacctctgtcatgccttacgtgccttacggggcgacgttcctagctcattcctcagtccgtcaataatggaacgatccgttggacggcaggtcatcagacgcaggttgggttcatcacaaccacggggcaggagcaggaatcaagagccatttgccggtcttgggtaatcgaggcgcctgcgttgggcaattccgatgccgatccgtgccagagacagggacttgattgcatgctcgctgagtgtga

SEQ ID NO: 3463 - DNA, 1756 bp, Emericella nidulans
  unsure (1)..(1756): unsure at all n locations
gaacaacttagataggcgaggtttaacaagcggggaggtaagaaaggaaaagatagtagcaaataagcccgaaattaggtaacttaaaagaggatagatttgaagagtcaaacaaaaggcggccattgctttgtagagagatagtgagagaacggtagaccccgccaagaagtatgagcctaacataaattaagaagttcggcaagcccccggcaacccccgagtggacaaccggggaaacaatgggggagcaacaattgtaacccttggaaaaaggggcccaagcgttaaaaccctaggtaccccaaagagtttttacttgaaatttgcctatgccaggacaaaattgtgttgggaaatcgtgcaacaaaatctccaaggcctctataatgcggaacacgtagaaatatgcgcttcaataacgacgggaaagtgcatcgggttcccatcagatctcaaatagcaactgaaaacttctccttcgcttagacactgaggttaggaatgccatattgtcaccgctttgataaaagttgatgctaaacagcattggagacggtcgaccctagccgctgctacttatcgtagttggaaccatagaaaaagtgaataatgcttttaccctgggatcgtcatcttcaagtcgtatttcgttctctgttacttcctgacgcgtcaatgaagtttgacacaattcctataatggcgtagaactcaactaacttccgagttgtagttgaaaggctgaaacatatctgactgcccacagcagatccaatttgggcacaccaaacttcgtgtccttggccactactgtcaagtcagagaacgttgatgcgtgaatgtatctggcagaggcataaatgagtgctgtataatggattttgcaaagttccaaacctctggatttctgcagtaagttcgccttcatttccgccagcctccatagtctccgccttgattttcacagtaacaggccggtcgcccccctttctggcgcagcaaattaaccaaacagagagagctggatgctcttgatgcgctgtgtgtctcaggtactcagatgagatgtcacgacttggcgcagcggaagaggaccagagatggtggcttcacctgcttatgaattctataagttcttaacttgtctccttaccaacctttcatttgagtaagagacaatttgctactgctgacgctagttcctagccatggtattggagcccttactgctcacgctcatattcgccttggcgcttattagcgctcccataaagcctgaagtacataccccgcatgttgtccagatgttaaaagccaattgtgctttgtataagggattcgatctttcccaatcagccgtcgtcaagctctcaccgactccaaaccgggcaaggattcaatgggagaagagtcaattgagaaagaggagtgccaaggaaaggtctgacatcgggcccaagttgagatctctcacatagagtcaaagtgaaaaggtaataaccagagatattattcacaagcctccttatttaacccacttcaaaaacctgattgatatttattcgaaggtcaaggccgtcttacgggtctgcttcatcatcactgatctacagaagtggngtggtaaaggtgtgaactgatcagagaagcataaatggataacagtgcgatgttcgtggcgctattgtttcaggcattaagtgcctctttgagaggtggcanatggcactttngtagcaatataatgctggct

SEQ ID NO: 3464 - DNA, 411 bp, Emericella nidulans
agtgcttgcccttgcctatcaatacctttcttccgaggctgaactttcccaaggtcggatcatcaactacactagggaagagattgagtccgagctcattttcgccggtttcctcgttctgcaatgccccttgaaggacgacgctataaagacagtgcgcatgctcaacgagagcagccgccgagttgtcatgattactggagacaatcccctcactgccgttcacgttgcccggcaggtcgaaattgtggaccgcgaagttcttattcttgacgctcctgaacatgacacttcgggcactaaagtggtttggcgaagcattgatgacaagatcaacattgatgtcgatcctacgaagcccttggataaagagattctaaaaactaaggaggtgtgtattctgagaacgct

SEQ ID NO: 3465 - DNA, 2630 bp, Emericella nidulans
agccaccaactcgtgaaagacaagctcctgcatgagttgaacggagtttttgtccagtacactcagacaggactatttagagagctcgagaggataatcaagaattatttgcgaaactacatgtggagcaccttgctcatgtagacgagctctacgagattgagcattgcagaccgttcaccatggcgtattcgcaactcaaccaagcagcagaagattgtcaaaagcagctgcaatccaaacggcttgccgcccgggcaaaccactatcttgacctccaaggaaagttccctagagatgacccccggagagagaacgagagaaaaaagcttggacttgccgaattgggggcagacgattttgctcttgaagtgaggatgatggctgtacgtccagccggcgcactatacaggctgaggtgcgattgctaaccgcatatagacaaccagaggttactacgaagttgctagctctagatttgtcgattcagtatgccagactgtgcatacgaaacttttcatgaaatgtcgcgagaacctggtcaagacaattgagaatgaactaggaattggagatgagaatggtatgccctttcctccacgggaggcattgactctgaccttatatctgtcagctgtggaaaaatgcaacgagctcatgtctgaggatgttgagagacagcgtcgccgcgaatacttcgagaggcagaaggagaaggtaatgaaagcccaggagtggctgaatgcagagaacggcactaccgatggcgaggacgaactgatgggtgactatgagcccgcggtgaagaccgagctacttgacacttattaaggaatattattgcccagatgttgttctcttcatcatcgaagtcaatttatttcgctgtcatttttgttctatatctggtcatcgtcgttgacggcggggttcagatcgtcccccacgaagtgcccgtaccctaagccctacctgctttaacttgaagaggctgggcgtctttggctgactgcgcatgtacagttctggacgaacttggagctgagaaacaaaatgtaatattatcaagatgagaactgtaacaatggaagttaaatgcaggagatgctgggattgtacaatgagtcatctgctcacagtgtagtaggactgataatacccaatgatagccaccccgccagtgactcccgcccaaaaatctttggcacgttttctccatctcggatctcccctcccactttgcctttagagaacaatcatccacgcccgcaatttttctcttctattactcgcaccgctcggagtgagtagatagagcgtggagtattcattatttcactatgaccgactccaaccctgttcaggaggccgaggcctctatggccaaccttttgctcgatgaggtcactggcgagaaggtctcgaagtctgagctgaagagacgccagaagctgcgcgagaaggaagccaagaagaaggagaaggaggctgctgctcctcccaagcctgctgcgcaaaaaaaggtctccgctgaagacgaggaggcgaacttaactcctaacgtgagtgattccgaatttattctgaaccgcaattgatcgtgtttttttcctggtctagcaatactttgaaatccgcagcaagagaatcaacaagctccgagagaccaagcagccggacccctatccccacaagttccaagtcaccgatgacctccgcaaatacttgaaggagtatgagagcctcgcgaagggcgaacagaagccggatacgaccgttcggattgctggcagaatctacacaaagcgttcatctggtgcgaagctgattttttacgatatccgagctgagggtgtcaaggtgcaggtggtatgccaggctcagaacgcttcgggcgctgtttcgtttgaggaccagcacgagcacctccggagaggcgatatcgtcggtattgtcggtttccccggccgcagcaaccccaagaaccgaccggacggagagctgtccatttttgcgaccgaggtggttctgcttgctccctgccttcacgccattccttccgagcactacggcttccaagacaaggagcagcgctaccgccagcgttaccttgacttgatcatgaatgacaagtctcgcaacgttttcattacccgttccaagatggtcacgtacattcgcaacttcttcgaccagcgggactttgtcgaagtcgagactcctatgatgaacgccatcgccggtggtgcgacaggcaagcctttcatcacccaccacaacgaacacgacatgaacctcttcatgcgtgtcgcccccgagctgtacctcaagatgctcattgtcggaggccttgagcgtgtttacgagcttggccgtcagttcagaaacgagggtgttgaccttacccacaaccctgaattcacaacctgcgagttctactgggcttatgctgatgtttacgacgtcatgaacctaacggaggagcttgtgtctggcctggtcaagcacatcactggtggctacgagaccaccttccacacacagactggcgaggaatacaaggtcaactggaaggcccttggaggcgagtggagatgattccgctctagaggaagctactggcgagaagt

SEQ ID NO: 3466 - DNA, 1308 bp, Emericella nidulans
tcaggcacccatctttgcagcagccgggatagcgtatgactccactagaatgtgataagcaaaggaccaacattggggattgagttcttacttggtgacacttgatgatactctccgccatagcttgacaccttgaattcaatgttgcatttccctcctcggcccggctgaggcgattatgcatatcgaaaagcatatgctctaattgcatcaaccgtgcttcagtagcatcgggggcaggctccgctggtgtgccgggttgtgaggcggcggttttgtggcctggaaacgaatctcgatggattaaggcatgtcgcgaagctcgtcgcttgatctctcgcaatccaacaaggtcgccgcgtttgaaatttccgttgccgtgtttgaattcccagagcgcagagtcaggagatccggtatgaaagacatcgcttactgtcaccgacgttattaagagcgattatgcggccaggaaacggtctacctttatggaaaccatacatattcagttgtctcacaaaggatgaaatgttggtgtgtttaaaatattgactatatggtcaattagtggttgacgatcctatgaagccggacacgcacacgagttctttggctgattcagatgtagtagacatgacaaagctgtcgttggtgctggaccatgatattaaatgctggatgctttgatcttccaacatgctaacatacaacttagctaatgcccggacacagtcagtatctccgtgcgaaacctgaagctagacatacttgtaaagcttatgaataacgcctgattgccccaccataggttgttggacttcaacggcggcaccaatagcctgtccgtgcgtcgcatgcttgctctggttccatgagtctggcgagccattggatgtcgtcgtggtatttgcgcccgctcgatcactatccggggtactgtgatgggcgctcttaacggcagccgaaggaggcggagtgacctccatcggtttagtcgtcaatgtgccggacgggacagatgacgagagaacaggaagcttccgtatcctaccaggcgcacccgtagcaccagacgcgaccgtatttcttgatggaaaatcagcgagactgctcatctcgcgcggcggaacaggggtaatgggcgacagcggccgcacgccgcaggcgggggacgggaacctggaacaggacggcgaaattttcttctacctctcaataagatctgctgtgaaaatggtcaggaaagaggtacgcatatggaaacaggcaatagaggaaaacacacgggagaatagacagtagaaaaag

SEQ ID NO: 3467 - DNA, 598 bp, Emericella nidulans
gtacagcagtcgctaatgccgccatcgacggtaagaatatcgcggatccgagcagactaagttgttagataagctaaatggttgagggagttgatcagaggcagcgtcgatgtgcagtctaaagcccggcggtcgtaaagagtagtggtgatgttgaccgaggccttgttgacattcgggatgctgaagttgacctcgcgcatggtgggcgatgggacaccgctgtgtcaccggatgatgaatcggtttgagatgcaggtgagatgaacgagctttgttgttcggtggtttgatgcctctcacccctaagtgagactgaaaactcgtcgcttcagagacgggaaggagaagatggggtgactccgtacaggaaagagggaagggagaagggtggatattattccaaacacattccagggctaaaaagcgatggccgtaggaggtcctcgatcgacgggggacaatttgaagaggaatctgaaattaccacgatggaagaggtgcttgtcgaacatctccggactacgcttgaaagggaggtctggtgagcaagttgatcaatggacctatctatagttgctaaccgcctcttgcggtg

SEQ ID NO: 3468 - DNA, 354 bp, Emericella nidulans
cgacagtcatcgcggggcgggcgccatacaccgtgaccactccgggttggagccagatttgtggcccctgtagatgacggtgttgtttttgtccttcgcgacatagtaccgctgcgcttcgaggagaagttccttgagcacagctgggtcccggcctatgcaactgatgtaaagccgctcgggggctttggtaccgtaaccgtagtagccaccgccgctagatttatcatcttgcttctcgcgaataaaggcgagcggacgtccgttgaaccagaaataatgcgtgccttcactcggtgtgaccgcaacttcttaagtttatcgcgtgctgtagctttcgcccagtaagcatcg

SEQ ID NO: 3469 - DNA, 1272 bp, Emericella nidulans
ttctccgtctttcgtgacaaggttgggttggacattcgtctggggttcgcggaacggttccagaagacgttgcagcagtcgcaattggtccagacgccgttgtcgctgttgccgctgattatcaaggttcgcaagacgttctcggaggcgcttgtacctgtacaacgatgagccgggtaaaactggaactcaccgcaaggtagtgcccacctgagttgttcctcttcgcttgcggattggtcatagagctccctaggaagttgagtaatatttctagaaacgtgtcagctataagcagcagatagataatgagagcaagcctaacgggtgactagacaggtcgacagtcttatcgacgcctctttcaagcgaggttacctcacgggtagcttgattgaccgaggcccagtatagactcacgatttgttgtgccacatgctggatcgcctgagaggagtaaataactccattgtgtggttctaatgctgaattcactgacgcagaggtacattagtctctggtaatgagacaggagcataacacgaagcaaggtctatgcaacggcttaggtgaatgccacaacgctagatgaagggcagcaaggcgagtgcattgaacttacatttgtgcagtacatcaccaaccatttgtcgctcaggtcctcttctactggctcggtggcataacttcgccaatcctccggtgcttcaaggctttccgacaaaataggaatctgcgccctaatgaacaatgatttcagttcggggatggaccgagaggactccatggccccatagtgactgtagtttgaatgttatgttgaagaagcaccaagcgcgtcacactgccagttatcgataacggcatcacgcacgtgattgggaggacaaggaatcgcctggcagttggtctaagctgctgaattgaggtatataataggggcaagaacattacttaaactgaggcaagctggcctgggacctctaagcgttggttggctgcgtttggtcctcgccgatttgaacgaagcgctttccaaaggcctttggccgatgtatacctcggcaaccactttttactccgcaaagacaggtcaacgtaagaactgctgtcaaaacgccattgttcttccttcattgacaaaaggacagttttatccggaatatcttataaaagagctcacagaattgttcttgctacttcgctatgacagaaagccaacggccattaggcctgctgttcgatatcggcggcgtttggtaaacagctgcc

SEQ ID NO: 3470 - DNA, 540 bp, Emericella nidulans
caagggttgctgtagtgagatagctgagaccctgcaaatattttgcggattagattaattagtgtgaaaacctgcatgcttcgggaaaaagcggaatatggccactaatggcataggctttttttgcgatgtacttgcacggaaaggcactatagtcgttgaaaaccctaatcaccaaacggcgtgtgatttctatgcagctatcctagaccagcggcgggtgacagctggattacttaagtgtactcctaaagtttccaacattacctatggagaacttgactgttctaaagagcttcaaagtagtggatattcctgtatgtagtaaatgttcctaaccagtacctcaattcatgttatctgacctaatttcccagaaatcgatgataatatactgctaggtagtcctggaaagtgcgaaaagccacccatcttcaggtgctgtcaaaaacaatgcatgaagtacgtatggcacttacgcgatgacaaataatatgcatagttcagtcttatgcggggaaggctgataaatggagttgg

SEQ ID NO: 3471 - DNA, 496 bp, Emericella nidulans
tattgttacttacccagtgcgattccgtcatgttatgccgtggagcagaagcatgaaatagcttcagtagtagctctgaagttttgtccaattatgggccttgtgatgttccgaaacgcaatagaacaacatgccgatggggctcggcagactttatgatcctctacgccttatatctgagcgtcgggaaaaccccgagcggggaagcgaggccggcgtttgctggatgctggtttgtcatatggagataatccatatagaagattaaaaaatcctagcgttggatgacagtatataatccctcgacgcatccagacaggcatactctatatctgtatcattaatggaaggaacatctttaattcaaggaatgtgagaatgccttaagctacccgcatggggttcacagagcccacattctgcatcttttctgagctctcagcttcggcttcaagttcagcctagtatcagcatagtccttgactgctctcggtaa

SEQ ID NO: 3472 - DNA, 903 bp, Emericella nidulans
gcgatcatgtttttcatgcagaactaacgggaaaactgctatggtgtgtatttgccaaccaatcccgtccatattgtctaatgcgacatcaacagcttgatgctgggatgcaccctgcgaaagagggattgtcagcccttccgtttttcgatgagttcgatctgagcacggtggatatactcttgatcagccagtatgtggaatacctagtctccttgttgctgttctcccttctagtcgtagggatgtcaggatgccatagggttcttcgacacctcgcggatgatggcacgacgaagtcatcgagtatcaacggtggagtggctcttttggcaatccggcccctgcatctttcatgtatacaagaaacgcaatacgaactagttcatcttgtattctgggtcccatcatctgtattctgtatcatcattagttctggattcatgcgctggtcttctcaaccgatagactaatagacttttgtcggatcacagttttcaagtcgaccacttatccgtgcttccctatgtcctcagcaaaacgaacttcaagggccgtgtcttcatgacgcatgctacaaaagctatatacaagtggctgattcaggataatgtgcgagtcaacaacacggcctcctcctctgaccaacggactaccctatacactgaacatgatcacctctcaacgctgccgctgattgagaccattgatttcaacacaacacatacgataaatagcattcgcatcactccttatcctgccgggcacgttcttggagctgccatgttcctaatatcaattgcgggtttaaatatcctttttaccggcgactactcccgcgaagaggaccgccaccttattccagctacggttccccggggagtgaagattgatgttcttatt

SEQ ID NO: 3473 - DNA, 2511 bp, Emericella nidulans
tgagaaggagtctctaaggaaggtctcgcaggagctcgccacggctcaactgctggcgcataaggataagggcgttcgggcctgggctacttgctgcattgtggatgtgttgcgcctctgtgcgcctgacgcgccttttacggcgaatcaactaaaagtgcgatctactcaacgtttacagatgcgtgttgatattcggttttggcaactgactggcttctttgtctcctaggatatttttacttgcattgtgtcgtcgatcattcccgcgctaggggatccctcaaatccttataatgcccaacacatttacgtcttgaattcgctggcggaggtcaaaagtattgttctcatgacggatctagatcacccggacacattgatcgtcccactgtttataagctgctttgacattgtcgcaggctcagctaaagcctcgaccggcgaaccagttgccaaaaacgtcgaatatgatatgacccgcttgctagtgacagttattgacgagtcgccagtcctcgcgcctgatgttgtggatgtgatcgtagcgcagttcttgcgtgtcgatcctcgcgtgctggatggcccagggaaaaaaggaaaaaaacccgagactcaggtggacgagaaacaagagacgctcgttctaagggactacccgcttgcatacagcatgaccaaaggaatctgccaggcttgcccgaagaggatgactagtcatctgagccagtactgtatcaacggcctaattgactcctcagccaccggaacccatgatgggccctaaaagcaagctcgcagaactaacctcgatgactcggacgatgagggagaggacatcatagaatttgagtcaagcgcatccattgatccgagagctctggagagcatgccccgacgttttgcataatgctatcccccaggttgaagcaaaactgtccgccgaaacggtgttattgcgcttgttagcaacccagaccatcggcgacctgacatctggcactggggttgctggaccacccccgcctctgcctatggaccctgcggtctacccacaggtgaagctggacgactacgcgcgatcaattccgcagccaaatgttctccttatgcctttcgcgccgaagcccttttcgcaagcacacagctctgcgtatgatagttttttgagccgacgcctggacaaatcagcttccgtgcgagcctcttgggctaccgctattggccgaattatcctaacctctgcaggtggttcaggcttgagcgataatgaggagcaaacgcttatcacacatctatcgtcgatgctgcgggatgccgatgagagggtccgcttagcagccgtggaagcagtcggtacttttggcttgtcgcacattgtgaacaaacttggagttagcggtggtgtttccactcaggactctttactcttcatcctcgcagagcgtgttaaagaccggaagtcgcaggtgcgcgaacatgctacgaaagtcttggcacgggcttgggctgtcgcgtctggggacatagagaggagtcatgagcaggtcacgcccctgctcaaagaggcaccgtctaggattctcgacgcctactacaccaacgaccctgagatccacgtttctattgatcgtgccatgttcgagatccttcttccgctaagttatcctcccatcaagcccaaactctcaaggagtagttcgagtcagtcccagagactaaaggactcccaagcggctgagcctgaaagcgaggcagatgtggatagaatccgcgttcgtcgcatcctcaccctcgtaggcgggctggacgaaaaggccaaaaaggtgttcttcgccatgcagaagcgccaggtatccctaagaacagctgtcacagtctatttacaggcgtgcgaggagtacaatgtaagtaacaacaggaccgcgagccagtgacggtagctaacagcgagcagggtggcgtgatggaaaagaataaggaccagatcaaggctcaacttactaaaattgttgacgctttagcgaaaacctttcccgatccagcaaggacatctgcagacttatggaagttcgcaaaaatccatgaccgacgaggctatcaacttatccgctttgcgatggctgctgtgagtgactatcgcacggttatcaaagctatcaaggagctggcgagaaggctacaatccagcaataacacgatcctgcatgagacacttactaccctgttatatcgctgcagctcgatcgtctttaaccgaagtcatattcccgccattatgagcatctcccggtcagatgagaatggattagcggctcccgcgcatgagatgctgaaagaaatctcttcactcaaccccgaggttttggaggctcaggtgcaagagatatgcaaagatcttgaggcccaagccccaaaggccaccacggtgagcgctgccggtactgaggagatctcaaggcctgctccgggtttgcgaagaagctccctcgaagttacgaagagcggaag

SEQ ID NO: 3474 - DNA, 492 bp, Emericella nidulans
tttgggataacttgcataagggcgcccaagacagttagtccggtctttcggacttgcttgccatccttgcatatcctaccgattaccaggtggaccagtactccgagaagctgcaccctacgcaggaggaaaggcatacgctctatcccgaggttgggcagattgcatggcacattttctctgatgatctggacgacctatgccagcttttgtcctattatggaacctacatcggttgtgccctgaatcctcctcctagacagacttatactataggctgatctggcgcagtggattgcttgaagcaccaagttatgctgcttggctctacacccggtgacatcatgctcgggtaggttgccactggatcaccggatacgtgtcagcaagccttgaccgagagcactttgtgaatgccccgagcgcccatgtgaacactatcaggactctcatccatagccctaagggcagaaccactctttctggtcgtac

SEQ ID NO: 3475 - DNA, 572 bp, Emericella nidulans
gttaagataacactcggctggacgataacgaacgggatccgcattggctctgatacttgcggaactgcagccattgattttctctgccctcgggatttcgttaatgagcctaccgtaccaacaaaccatctgcacgctcaatctctcgagggtatattaaagagcccagacccacaaagacccattcacagtgctttgtaggatcacggcttccatataatatctatctgctctggtgcactacagttgagagccgaccatttctgtttcaccgatcctcaagtgacttagccgtacatgtgaaccctgggcgtctagcgacctgcgaaaaggaccacacctgctatgagccgtctagaatattggaagggcgcttacgtgctgcggatgcaaggtcttttgcaagccccgacggactttcttacgaacgtgcccaggctcaggttctctaacctgatggggaccctctaacaaaattccgcgcagatgaatgcattctggacatggacttgtcctgttgagcgccccactgggcaactgtcatatttaaagtgggcatcatttgcaattcc

SEQ ID NO: 3476 - DNA, 231 bp, Emericella nidulans
ctaaccaccacgggagggctgccgttctgacagggactttagtgacgccctccgccgacactggaaaacctgcactgcccggattgctgccgggactgacatccctaaacgcagtctatccggtcagcggaagcaggcctgtgacctgtgtacggagagaaagagggcctgttctacgggtttgccgtgctcggaatgtgcgatgagaaaagccgagtgcacatatcatcg

SEQ ID NO: 3477 - DNA, 504 bp, Emericella nidulans
gagactcgcaagaggtttgtggtgcgtatagcctacctaaatggtttgtccaaaggcttgatgagctgttctgcacgttccacaccccggatttctaacgcggcaggggctaagctcggaatacggagtatttaacaatagtggttgatcataggatgcgtgcaatatatacgatcggaatctagatcctcagagacagggtacgcttcaaggatgaacacggcatgatccagcttagattgtctagtagcgcggacgatattagcgagagctcatgttatttagtccaggaaatagtctgttgagagtcctgtacagtttgtctgtctgagcatggctttaaagtggggagatagaccaaacgaaggcacttatatgtggatagaaagatgactttgtacgtatcaagcgtattatgaggcactgtcctacaggctcgtgtcggtggagtctgacccataaaactgtaagccgaaggtaagtgccatgctttgggaagagaag

SEQ ID NO: 3478 - DNA, 426 bp, Emericella nidulans
gcaacgatgcgcccggtttggcgcccgttccctgaggttgatggacggatggggagtacagctctggcggtgctcgagtaccagatctaggattggcgatggtgtttactaataacccatcgccttactactcgacggaaacggtgcgctcctatgcatcttagcactctgcgtaccgctggcgatctcatcgtgatatgcctatgctagcgctggtctgctccccagcttgcaatatttggcctcggagggatacataacatgtggagtcgcactgccagactgtgcatgatactaccggtatgaggacacatatgctgaggagagacatagatggcctgcgcatgtggacggacttcgcgatcaattggagttgcatggacatgcatgtcacacggattcacggttacctgggaaagaggtcga

SEQ ID NO: 3479 - DNA, 265 bp, Emericella nidulans
gggaaaatcacgctagactacctttttgtttgaacaaattttggtctcaaccctatctgactcgtacaatggggtgggtgtcttttgagagggtgtacgttcagccccccgatacccaagtcattctagcaagccaattaacgcggataacagtcgtctcagaccccgggcatgttctctcccctcttgggcggcgtaaaaaaaaagcctttcactgcatatgatcgatctctccgcgaagtatcccatccgcagaccgttctgc

SEQ ID NO: 3480 - DNA, 823 bp, Emericella nidulans
attttttggctccaacgggggacaacaccccacccatttagaaagcagtccaatttttggcaatacacatttcacctattttagactgcagcttccaccccaacgaatgcacgaacgaagcctgtcccgacccagacctacttctgccctggcaagcgtgcgacaataaaccttctgcttacgcaacgtattgcacaactttaagataccacgaatgatgactggctagtcccgatcgcactgacataactccgtcattaacgaactagttgagggcggactagggatatggacgataagggttttcgcacgaagaccctcatcaccggggaggaactcaggctccagaaagcgtctccggtatgcccgcgacgatgctgactgcctgctgacaagagtcctttcgactgctcaataaagtccttattctaccccaatgtaatacccgctgccctaccttgtcaccggaaaaatcaacacctctcgtttcttattgtgaccccccttataatggagggaatttcgtctactagaatggctcaacagacaataattcgccgatgaccttaaccagaatatttcatgttcacgtatttttgtgtgaaagcttctcacaggtggcaattttcttgtagggaaaaatatttaaagagaatgggaatcaaattcctcatttgaaacccctcatcactccacaaagaacttccataaaactccaactttttcgaactcaattattaccctctttcctctgatactaaagataaaagataacttctccctctaaccctactagtgtataacatattaagctgaaccttta

SEQ ID NO: 3481 - DNA, 623 bp, Emericella nidulans
agacggcatcagagtcgctggttgagagggagtatggcgaaggtcgataccatagtctagcccgaagggagttttctttccgattgtgattgagagttgtatcagcgagacgagggcgccacgcagctggggcggttcgatctcagcctgatatagtggaattacctatgcagccagtcagcagctgtcagccagccggccagcaaacaccacagggccctgagcccccgggggcaatacatgactaaacattccaatccccaaaccaccgatgaatcgtcccgcgaagaaatatgccggcgtctgcgcgccagcctgcagccccgaaccaagggtgaaaacgacgacggccaccatcatcgaatacttacgcgagatcctgtcggccaggtacccgttaaagagagcaccagcccaagcgccaagctctagagcagagaccagccaaccctggatggtcgagcccatgagacttgggaagtggttctggaagttctccatcacaagcaccggggacatgactccctggtcgtatccgtacatgatacatccgagcgaggcaaaggcacaggtcatgaacacgtaggggttcttgagcataccgacgagaccgtggggtttct

SEQ ID NO: 3482 - DNA, 800 bp, Emericella nidulans
aaaggcgctgtcccggattcgtcgagttcgtcaactactatcggatgaagacctttcttttgctctatcatcactcctcgttcgatgacgggaaataccctccccgccgtatcaatgttgaattgtcgtaagtccatgtttaactttcatcttgccacacctttccaaggctcactgacaaataacgtatattagcgctggcggcggccgtaaatccgagctccgcatggctaatatcgatgataagaaccagaagcttgcggaggagaggaagctcccggctaaggtgtccaatacggaaccggtctatattgccacagctgacgcgaaacctaatgatgacttcaccgattatccatccgattaggagaccttctcatggccctgttaaagggatagctctttgcggctttttccgttgaccttcaatgtagcttcccattttttttgcatgcttacattgtctgtttcctgctggttcaactaatagccttcatttggtcatccttttcccccttttcgattactcctagccgcgggctttttacagtgccaatgctcttataatccgaaattttaaaaacctccctattctaaggaccttgcatgcttagttcgcctttcagactcccatattatgtttcccaccacaaactgcgaattattgccaccgcccctttttataatgtccctacatgtcccaccccgtttgaccacctacccggaactcctaatgttccctccaatcgcccccggctctttctctctttttttttgccctttcggccccctcttgaatt

SEQ ID NO: 3483 - DNA, 552 bp, Emericella nidulans
aaaaacggatcgaagccttgtgctctagcacaacgccaatcgttcggaccgactacacaggacagaggagagcacatacataagcatgtgacatacattgacttgtaaagagccaaacacaattatccattcattcaaccgctatgcaccaccccacatggtcttccacatccactgtccaaatggtggctattgcgatcctcgacaagtgtagctgcgccgccaaaaatcctagacgaatcgatgctcaactagacaagaccgccatgccggttgtctgctaccctaatacacgctaaaatcacattctggacagggacccccggagtcacccgcgtaccggaccccctgacgtccttgcgggggatatgggaagttcacatgcgcccaaggcatgcaccgactgccatattagggagactggactcgtttacggctagatcttgacactcagtgccatatcactgcgcttgagctgaccgatactctggcacgccgggcaagggactacactataacatggatggaataataatccgaccgaaaaaataa

SEQ ID NO: 3484 - DNA, 1130 bp, Emericella nidulans
  unsure (1)..(1130): unsure at all n locations
gacagcagcgcgaaacacttgactcccaggtgcttgtcacagctcgaaacactcaggtggacactctaggccttgatggtgctggagcggccgaaaatggcatgaacggaggtgggcgtgtctcgccaggtaaagatgagcggacttcgtccaatctgtctgattcctccacatcagccaagtcagcaaattctggagtttcgcctaccagagataaacatgcgatcccccctagacacagcagagaagctatacgcagccaagacagcacgacatcagcaactgcgtcatacgaaaagcgctattcatccgattcttattccacagctcagtcagcaatatcacaacaacaagcagagggcgagtatctccttcgagactcaggaaatgcagagtcttcccaagtgccagggctcctcaacaagtcgcccggcccaagtcgaccaagaacatcggagtggatcggcggcatccgaagagtactgtctctgtcgaggaaacggcctccagctaatgaagattttagtactacttnccgggctttcggaattgatggaagatcatgctgggataagcaatttcacggctggcacaacatttcctcgcaggtcagtgagcgcatcttctgaattgatcagaccgttgaatggagccatatatctgtattttaacatcctaatctttattatttatctaacattttcttcccttctatactttcttaattttaatttttcttatactactatttattttcatttattatttttcatctttctcactattttctttttcatttttctatcatatataatcatctaatatacaatctatattctaaatctctttttttactttttatcacttatcacctatcatctcttattctcacattttttcttcattatcttactttcaacaatttatatctttaaatacctttcttatatcttcaatactattatatattatccttacttttccttactaaattttttacaactcttttcatattctcatttataactaaatattccatattttttctattctatctcttttcatactactatttatttcactcataactatactatcattatcctcattttatttcactcatcatatat

SEQ ID NO: 3485 - DNA, 400 bp, Emericella nidulans
ggctctgtgctgaatcatggcacgtctccgtgctactccccggcttcgatctggtaatgatcctggcctcggatgatgtgcctaagtcaaagcacgcccagctgggcactgggttctggtagatccatgcgcgacgggtaccgctcggacgacgaagctgccgagacctcacgggctatgcggattataggcgaccgtggcacttgcatacagcttgtttatccgctcaatggctgtaaacaaagcgccagacccattcgtgccggcatgaggagtatcacatgggacgatgtcgcttatgaatgatgaggtgctgtaatcgatgcgatcgcggagtacgtgcgataactcatgagatctccagttttggtacttgacatgtgcactactactatggtac

SEQ ID NO: 3486 - DNA, 352 bp, Emericella nidulans
caaggcattattggccgaagaccgccagcaggaatccagtacctgacctcggatcttccacgtagctgtcttctctgcgatgcattcactggaaaacccttgccagctggcactcctagtctacagacgtccctaatctcaatctgtcgtgacaccatgcgggccagaaacttacctatccccatatgatcaagactttgcacggagtgcgggtcccctacaactcgatgccatgtatacggcagacagttaagcgaaaccggaccgtcccactgagccaagcgcattatgatttccgcactaatgataacacccctgcggaaagccacacacactgcttgtagcggaacta

SEQ ID NO: 3487 - DNA, 559 bp, Emericella nidulans
  unsure (1)..(559): unsure at all n locations
aaacatccgctgagcgcggccccgcgcactctgtgtctacattccgatggtttctttgctggcgctaactgaaccgcgtttggcggtagttgtgccccacgggggctacctgcgtctagaagcagcggcccatggactggacgggctggcagaggtcctcccctcatagggagtgacggtggctctactgagggatagggtactgctgtctaattggtagcatgccctacaaatagatgccaatattaatagcctgcacacggctaagcaggaagacaaacagcaccttcgtccactgcacctgtaaatacagtcccaggcactctccgagtgtgccaacacctttaggaccggcgataccactgctactcgactcttgtcagtggagtagcccccgactggggacaggggcgcaaagagagacttttagcggagcagtccccactcctacgctaggccatctggcatgaacgccacattagaacttgngtcctgcgcaacttgtcggagagactagaatgggctatacactccgcgagggtaagctctcgtatacata

SEQ ID NO: 3488 - DNA, 742 bp, Emericella nidulans
ttagatcctagtagagtctagcgagggcctagacctctgggttcgactttaggctcggggtaacaaccaatgcaaagagcaagtgagaagcgaaaacgccccttgcactaacccgagtaaaggcatcagagcgctcaacgcttactgagaaggggaaagcgagacgacgggtagcatgggctgacagcgcgcagttctttggatggaaatatagcgcagcgctcaaggctaaccagaaagagtaaatgatcgcgacatgtcacgagcttatacaaaagtcaagatgacaggtgctagtggcgaagtctagggtgctcggagatagtgccggtgccgcagtgcggtcgattaccttagtattactccagactaaatctatatcgcaaaggaagccggcttggccgctcacgctaaaccagatatggttagtcttgcgctggagtatgtctgcccaaggaatcaatggttgagaaacgacaacggttggttcgcagctgtattaggcttctgcgaaacatgcttgttgattgcttgggcatcacgcttgctcgagtctcatcttactggtttagattgtctgcaggcgcaatcgctttgaagttgctaggaactcgttgatctacgtaggctcggatatcacgatggcgcacaaactcaatagcgagctttgtattgcttagaggaatgcacggtaggtaactgatgctatatgaggcaagtagggatggtattggtggaacac

SEQ ID NO: 3489 - DNA, 921 bp, Emericella nidulans
gaacccgctcagcagatcgctgaagctccttgccaagtcagagcgcaacccaagcccggaggcaaagctggcattcaaggccacgaatgccggtgagatcaacgggttgaatcgcattatgtacgtcaatcgtgggatggggcgaacggaaaatatataacagtgttatgtggaacgctaagaaagcgaccgcaaactgaaaggggacacacggttcaagaaggttgacctacaaggaaacatcttggacagtacggcgattttctatactggaaatccaccgttgaagtgagagccgacctgatcctcgacatgtctgacttaactcacactacacaggagaaagccgggatacgcacgatagccggttacaaacatcgtgtgcagcacagagaagtgtaccgtggacatggtcaaaagttgatgtagatgcctaccgacgcacaggtttcactaacgatccaaaagagcaggttttggtgttataccaggcctcacctgatggagagcgactaagatccaaagtccacacgagagccatcttagagtcttatgtccggctgcagggctgaaacgagagccttagcctacgatggttcttttgtcgcccgagttactaagaaaacaagcaatcaaatgtgagtggggatgctttcctgatctataaggatctgcaagtgtcggttaaattgtttaaggcacttgaaaaaatgtcgaatccatatatattactcagccaggggcaatattttactttcccttatataaaggctttttccaattttattgtccaacctttgtttacattcgactaaaattatgaatttctctgaattcttaccataccctcgttccacgctttaaaatttcctcttaacacactcatataattcttttccattcgtccttcttcttttttcc

SEQ ID NO: 3490 - DNA, 1497 bp, Emericella nidulans
aatttgcggttgatgatatatgtcggcagagagcactaacaaaaggttggggtctagtccacatgtctaaatataggctgccagctaacgattcgaagtcacgcgagtatgcgacgcctgagaactcgagaagacaggcacgaactcaggcagctaggggataatatcacggaccatcgcgtggttctccagacgaaggtgctaaccattagacgactgaagaaggactatcaaaggtactgttcaatacgctgcaaggactcacgcatctgcaagtgtgggcagataatccaagaatttgaggagtacgtagatgaggcccagatgtacttggagcgagcagccgtactccaggacagagttcagtctgtccagaacttagtaagacaagctctctgtagtccggaggatactaaccactgtgtcagctgtctgatctactgggatacgaggagctgcgaacgctgagagagctcatggtacgttgttactgctcctttccctgttatacttttctttatatgttcttcttcttggaatttgtcttggtttttttttatcattattgctgcggaaagtctaccctaacaggctattgtaaaacaggcacacacagtccagggatccacggccatggagcaagtggcagtcatcgggctggtcttcataccgtctcgctggtggaggtaggcctttctatgcctgtccgggaactatcgctaatcagatccagaattttttttctaccgaattcgtcaaaaatgatagtgatggtctaagggtgtccgggcaagtgtggattatggcggctgtggctgtgccaatgactgtatgtgtgcttgtattttggcggctttggctgcggtatgagttctttcgcctccgacctctcaggcttgccaggcggtgcctgaaggccctcgtcaaggccaaaagatcgaaggatgaagacccggggatgaaggtctgatgcattttctccattgttgtgggggagagtagccctttatccatgtgctttgcccaatttggcttgataatcttttttgtcggtctcttttttagtccctttgcttaatctaatcctgtctttctcagttcctttcatttgtatgtctggactttgtctttcattttttacagcttgttctcgtccttctccgtttctcttctttcctctctatcattcttcttttgaccttcctttttttctcctctttactcatagctacctctcttatttttctttcctctttctcttgctttatttttgccttttccccctctattttatcttgcttcttcttatttatctttttactttccatcgaatttctttcctttccatctatctcttacttaccctatcttttcctttatcactctttgtttttattatgtcctccttcacttcattctctttctttcatgtctccctcttcatttttttttatatcatctttttctttaccttctttctttctatttcccatattt

SEQ ID NO: 3491 - DNA, 341 bp, Emericella nidulans
cgaccacgccggcaaacgcccgtggataacaccacgaccgaagcaaccgagggcgcgggaaaaagagacgggggaggccggacacccacaagaggacacagggaggagcacgcagaaggccaagaaccgagaacgacacaagaggagcaacagggaaaacgccgccgaagagcaacaagacacgggaaaggacaccacgaagggacaggcacaacaaagagcagagccacccccaccgcgacagacccacacgagcggacacaaaaaagacgcacgacaagcacgagccacaggaaaaagagcgcgcaggacccccggacgacgcacaagacagaccaccc

SEQ ID NO: 3492 - DNA, 453 bp, Emericella nidulans
  unsure (1)..(453): unsure at all n locations
ctcgagattctatagtaacggatggcacatggcgtgtaccccttaggcccgggagtggctcgggcaaaggcctgaggcgcgctatgtggggctcgcatggacagactacgctcactgatctgtaccttggaatggagactttccagacacgccgcgggatttccgcatgcgcgtattcgctgagttgccgaagcctaagctggctctgattatgcacgaccttgttatatgatattccagccggtatctatgaacgatgaacaacagacactgagtcaacgtaaagatttatcctaggtggatacacgcatagtatccatgcattggcctgcatgcggccagcagcttaaccctcgagtctatacttctccgctgcgattgccaagccgagtattgnacaccnttagggctgagaacgcatcgggtccatgcacaactcagagtaccgctcat

SEQ ID NO: 3493 - DNA, 1146 bp, Emericella nidulans
gacccgggtgagaagatcaaggtacttgtttcgcctgtcgcgggttctttcctccgcgcctttttctcgctgttgggcacgtacgggagaagcgagatgtaatcttggagattctcagctgcgctgagcaggagagatattgccgaaccagcgtacaggatctcactgagaacttcgtcgtaacctcatccatgcggataccgtagcagagtgtcagtgtcgtgttgagcgcgtaccgctgcaaataccgtctcacactgacctcagcctcaccatctttgctggcgcgatatagatccggaaaatgcagcatctcttcagatcgaacatagggtgggttggtgttacgcagcgcatgttatagccagtgctagtccccgcgggctcgcgcatatttcctgcatgggctcgttcccccggagatgagttctatcgcttaaccccatgtgttcctgccaacttacgccaccaagttttgccaatgttccggccgttccttctctctcggctcctggtagattcaatcgtatttcgcggtatctcctcgttgggtgttcccgcacaccaccacgctgttctgtccggctctcatctcctattcattatcgtctaacctgtccctcctgtatcttgagccctgtccccattttcctctcttcgtattcacaattcctcctcacttattcgggataccaccttccactacaccggatctctcctcggcttggcctattctcatctctctgttcatcataaccctgcctctgttccttatcctaagtcgaaactcactcactcttcttcatgactcttctcccaatttccttacccaatcccttaatctttcctctaccattccaatctctctctcttccctgacccgaaccatctccttccttgccctctacccctaaccctatctctttatactcccctctactccttccttccccatacattctctcttatccttacctaacaattcctaatctaaccgcactctcctatctgtaactacctaatctccacctccttacccaatatcatctctcctctaccccagcccaaatctcttcctccactcccaaactatacctcttcctaactacccttcatttatcctcaacgcatcactacctactcccc

SEQ ID NO: 3494 - DNA, 620 bp, Emericella nidulans
ccatctgcgatattgctcggctgcgtcctttcgaatttgcgccagattacttattaaaggcagtccacgaggccctttgaagccgggaatgcgagctgaagcccgaatgaactcattgatgacgacgtagagcagaggtaccgcgaaagcaactgcagtcaagaattgcaggggatgttcgacggctctgttgttgacaaacaacaacgcttcggcgatggccatactagcgcaagtagcttctgttgtttgtacctgaaatgtctcgtttgtatctggtgtggctcgaagttgttagattcctgagattcaatagtgtaacctgggctcttatatagcatggcaacgtcacatctaggattagatgacttcggcaacctgcacttggagaggaacttttccgtctcacagagcgctataagcaaggttcaggcgcttagatccaccccgcattttctgaacgacctggggtaacagggtcaagctttgcagatgcgaggatgttgattcgctactgagagctctcgtgttgagagcaaccgagaccataccgcacccggaacaatttcgcctaacagcaccgggataaggccatatctcctggtgtggcgcccgtgcat

SEQ ID NO: 3495 - DNA, 1354 bp, Emericella nidulans
aaataaatgtaaaaataagagagaagaataagttaaaagaatagggatagagatagaaagatgagtgtaaatgagagaagagaagtaagagagagatgggtgatgaagaatagaaatgaaatgagataaatatagatggaaaagagtgagattgagataggtaggatgatagtaaaggagaataaggataaatatatttagatagaacaaaagagaggaagggaataaaataagtataagaaagatgttgatagagataggaaagggatagagagattagaagaaagaagaatggaatgaaagtgtaagtatatagtaaaggaagataggtaagggagaaagagagggtaggatgaagaaacagataaaagaggtgaagaaaaaggaaggtaaagagcggttataataaatagagtaaagagaatgcgaaagaaaggaagataagaagaggatagataaggagagaaagtatgataagatggataaaaaaagatgagttgatgaagaatagtagaaaatgtgtgaaaagtgatgagaagtataaaaaagttaaatgagagagagtgaaagaagggggttaaggaaaaataaggataaatagcaagagagagaaagtagagaaagatagtgtaataaaaaaggaagtataaaagataatatatgaaactgtgaagaaaaacaagatgcaatattgagcatggagtcatggaaaattcctcccccagtacccgtgacatcagcctgacatgtattctctgctgcgtatcgtacctgtccgtacctacatactgtgcgtacgaccgaccacctatccctcgtaaagagttagagaaggcgacaataaagccaaagatagtcttcagcaaggtccaaattttattaattgcgaaaaaggacagagctccttgaatagaggtcgaaatggtgactctgtaagcgccgtactccgtacagtaccgtggcttaagctagttggtgagcatagatcggctccagacttcgcggtgttagcatcaacatccactccaacgcatttcctggtgaacgccgccggccttttatggtttatcgggctgaatgctcaacaaactccttctctgggtttggactacttagcttacaagctcggaccggttctcggaaccagtcttgaccctaatgcagggctgaaccacccatttttgggcgtcgacccggctagtgttttacgcgagtttgtattacctagcgtgccttctctggcactagtagctttaaccaacccttaatttccgatttcgtgagtttaaaccttcctctctggctttcaagtttatttcggtctgtcattctttcggaacgggtttttatcccg

SEQ ID NO: 3496 - DNA, 647 bp, Emericella nidulans
ccagcgggcggtcagagatgccagggattacagctgcccactagaacgggtgtatcgcccaaaccttatttgacgcgtgcgccagttccatgataaccctactgctgacgctggcgcgtaatgctaaccccttcgtcgagtacataacttccatgggtggctcttctgggcggtgcgctaacactatcgacgcatgctccatcctgctaggttaccacaagaaatagatatactcggtcgcgtgacctgaccgcatacgtggctacgaggcccttccaccgcttggacatcatggaggctccgtagcagacggagacggtagagctagcgcgcaaccacaggcttgtcacggaacgaggacaccttactctcatgcttaggatgatgacgactgacatgaacacgatatcgacctgcaccaagccataggctgtaaaaatagctattgcagagtggccactgtcaacaagactaatattggccaacaacaatgcacaaagatggtcgcacaccagactacgtcgatctgcatcacgcaacagtccgagaacatgtgaaatccgtttgacctctttgctcgcccagcatggaggcacccgcgctgactcgtatctgattattcatatccaccgtgcgcatcctagcaa

SEQ ID NO: 3497 - DNA, 671 bp, Emericella nidulans
ggcagctgctcattgccggcacgggcgcctcaagcttacagggaagctggaggctagtagaccgtctccagtttcttggggagaacattgtgtgctaagccagcgacctacacgttgcccggatgggccgccgctatgcacagctccgacacgtcctgacaactagctcaccgaagaaggcccccggtggctggcccaagcgcctaatcataatatctctagaagagagcgtgacccacacgggcagccatgcaggataactgactccagtgacctctcgccgcgaaaatcgggtctcagcgaactgcatcaaaggaggacgcggatgctagccaggaaacgcatcgcattttcctccttgccacatgtaatgtaagccttgatcaaagcggcataaacctggccatccagacgctgaataatgcagaatgttccattgtcatcggacaccgcgagtgacctatactcattatagcactcaacagcactcgtcaactcgccggcggaagcaaaggcgtcaatcattgaggggaagatggaggcgtgaggggtcactttgtgagactccatgtgtgcatacacgcgaaccatcgcgtcaaccttaccctcagtggcgcaggcactaatcaaatggcggtacgtatcgatccctatagtgagtcgtattatcg

SEQ ID NO: 3498 - DNA, 584 bp, Emericella nidulans
actgacagattcacgcggagtgtgacctctgacgtgtgaaatcctcttccggagaccgatgacgcggccgatgactggaatccgtcggcagctctctatcactgtttggacaagttgtccactggggaatgtatcaccttttgtttacaacatgcgcatacgctggtgagaactacaggagggatactgtgggctcggcttatgtgccgctaaccatctttgatagatccgggattggtactgcgttctatccatcccatgactgcatattttttagttggacgagtcagaattcagaaccaccctctactcctatcccccaagcgcccctgtcttcgtccataccatgctggctgcttcgtgctgcaagccttttctggatcggttgggcttcaccaccagacgtacactggatcgaacctacgatgggagtaacctcctttcgagtcgggactcacaacaccttgctggttgatatgactcattatacaggagcacacgagggatgcttagggctcgcgccgtgtcccttagttgaagacgaaaaatctttggtgcaatactagacctggcttgggcacagc

SEQ ID NO: 3499 - DNA, 524 bp, Emericella nidulans
gaaaacggatggaagccttgtgcttaagcatcttgggggcttatagggtttttctccctgcgtatgccttcacaagctagacttggccttcgctcagccaattggccagcccaaatcgttttaccaagttgctgaagcattggaaccgaaccatactatcatggaagaggacaatgatgtttatcagctggctgtgcaggactatcacttcgatactacggtctcaaaacgtgagggacatctattatggacaccggggtatttctgactcagccggatcgctgacctcaaggctggtagggcacttgtaacccgtgtcctggcatacgatatacccctgtgacatggcgagaagaccacaatctggctgactatgttgaacctcgcgtactggatggcccattacatgccaggacagggcgtgccatcagtcctaggagacctctccgcatcgctaggtgctaaacctttcatctgtgggaacttattgcaatgaagatctctctacgcatactatgacttga

SEQ ID NO: 3500 - DNA, 413 bp, Emericella nidulans
ctttgattctacgatccggctatgacttggcgccggtgaacttgacaaggcgcgctatacgcagaaccgtgtgatgcggcggaagagccccaatactcataatgagggtgcgtttgcggttgctgtaaaccatctcgcggcacagcttgtacccctacgatgcccaccatggatctcacagcaactgcccacacactgacatgcgcaaacgagtacataatgctccatgcactgcatatataactcatgcgccaagatgtcgaaacctatgcgatccgaggagctatctgatgctccaggccggatacctatggctttcgccctgctgctctgacttactaccccaatttcttgaggtcgacaaatgccgaacccgaccaatacgatctagtcactgtatgcctctgatcagg

SEQ ID NO: 3501 - DNA, 604 bp, Emericella nidulans
tatagaatccccagatttgaatgaacaagcctttgttctgctggtaactcggccatttttctgtggcagccaccgttgtttctcgagggagaagcaggaagagacaccacatctcattctttgctcctctcttctatacagctaccgaggacagtagacgctcagcgcaaagtcaagctcactcttcctctataagattctttaagacatgatggcaaccatattagggagattacgtgagagattctctcaattcgtttctgacttctatggccatggcgacaatatgccaggtacgcaaaaccaaggagaaggggaataacatacttctcgacaatcatggggtggcccttctaaagggtcgcaatcacagccacctccataagacgtcgttgatgagcaacttgatttcttagttgagccgcatcgctggattcacccttatttttcgtcgcttatagagctagagcagtctgtttacacgaatccctatggttattcacaacgtctttgaatgcaactaatgcagtcttaaccttgcgaccgttggccgtctattacgcggagaccacacagcctgtaggacatcgtactgtgccgcagc

SEQ ID NO: 3502 - DNA, 578 bp, Emericella nidulans
agatctggtgcggttggaccctctggtctcaactggtgggagatgcgaccggatccaaggtcaatgttgctggagttatcacccacgggtccgcatgtgacatcgtgcttgtactatatcgcctatccctgtactgtgccgctgggtctgcctactactgtgacatactgtgcacctgacccaaccatatgccaaggacactgatacctgaactatgtcaggaagttcagcccgacccttgatcgtgagcaacctattctgtgcaccaaggacgcttctctgatcgagaagccaacattggccccacgcgaacctattgaccgcacactattagatctagtgtgcatagtgcggcgcacttccgtgactagtcccgatactctcatgctgggaatgtatagccccatatgtctggacaccgattacactctctcttacaggagctgaagacgccaagccttagaggttggtcgtcatatcgacacgacatgtgactcgtattagaactcgactgattcataacgattatatgctgtcgccatgctggggcgaacggtgatctgttaccgtagaaaacc

SEQ ID NO: 3503 - DNA, 518 bp, Emericella nidulans
gggcttgctccgagcttgactatacctaggacccgcgcacttaccggagcgagcgaagtatgatacagccgagaggggacacccggcctggctgaaccgttaccgcttatacggcgaaccattagctatcctttgccttccgtaagcacgctgatattgtccgaacctatgataatcggtgcgggatcagactacccatcttcctcgattgcgcgaccatcgggacgaaagcagacctcagcgggcggccgtcgccgggagaagcggggaacaagcgcctacaatgttatgaccaacggcgtcttaaggcacggacgctccaacagaccgggagcatcgtgcaaaaccaatcgtgacttgtgctcaggcacacacactgaggccggcaacccagagaactgatgggcatagattgtaccgttccatccagcgccagtgcaccacctaagcgagccgtccgtatccgccatcttgactgacagctgacctgctgaagacacattgcagcctgtgagctt

SEQ ID NO: 3504 - DNA, 669 bp, Emericella nidulans
tcgctacttaggggacccagcttaggatcctgcctcgccccagccctgtatgcggcgagcatatacatggtccttggccggttgatcgtccatttggctgctgagcagcatagccttgtacgagtgaactggatgacaaagatcttcgtgacgggagatgttctatctctacgggttcttatgtgtggtttattctttatcatttttcttctgaactttgtttggttctgtgttttgcttgtctcctgtttttgtttttttgcggttgtcttttgtcattgatctttttttttctttgttttcctttcttctattttatttttttctttatatgttcttctctttcttttccttcttttgtttttttttctttatttagtctgtttttgttgtttttatattcctatttcatttcttttgtgtcttttcgtttctcatttgttcctgtttcttttctttctttcgatgtatctgttctatctattctttatctttacttttgttctcctgtctatgacttcattctattctatttatttcattttcttttcttttttttcattatttcttttcctttctcttattcttctttatttccctgttgcttctttccttctttcgttcctctttatgttttttctttcacttttttttttcttcttctttttt

SEQ ID NO: 3505 - DNA, 502 bp, Emericella nidulans
gaaggagtcacggaaagaaccaggagcgaggcaccacgatggaaagagcaggctccacccaccggctacaaaccgggagaggcccccgcaggagcgaggcacgccgggggagaagcagcgcgcgaacccccagcaaggagccggcgacaacaccgaaaaaaccaccgagcagccacacagcgcacaccccaggagccgcccaccaaaggacgacccacggggaggggcaaccgcaacccccccaagaagcgcacaccgacacacccaaacccaccgacccaggcgcaagaaaccgcaaagggaacacaagggccggagcacccaacgacgcgccgacagagaccccaacgaaaacacaaaaagaacaccacggcgggggccccccgaggggcaggaaccccaacacacacacagcccaaaagcgacaaccccaaaccccacccaagggggacccaggggcagaacaaggccaccagacagccaagaggcaacccccaaccgg

SEQ ID NO: 3506 - DNA, 475 bp, Emericella nidulans
  unsure (1)..(475): unsure at all n locations
tctgagtcatgtacttaaacatctcgatagagctcgcgatggggattgtacacagactgatagcatatggatccaacgtcctgactgcagatgatgctttcccttggccagtgagacccttatgccagcatgagaatgtgctcttgatcctagcacacgagtggattaagccttccagaaatacctttttctactaataactgttccgaatccttttgaatgaaacgtcggaccggcttcaaacattatcaaaggatatacccaaggttgattaggcgcctgcgggggaccgttacatatgctacctactctttgactgcgccgttcagcttgacgagtatgctactcggctgatcacaccaagataatccactgacgtggggagtgggatacacggactgacatgatgttacaaagagcgcaggctcatacgatatcttgactggccactaanacgcactctttttatgaccct

SEQ ID NO: 3507 - DNA, 512 bp, Emericella nidulans
caaatggttgttctatcggtgttcgttgttctggaggcagcatgattcgttttggtgaggccagaaaggcgcttggatctattcaggtgctctagggttcttcatctccgactataggctcacccatcaggaaagcatggctaacagctagtttcttataacatgaaggctggctactcgaaataccgtagcacagtttgggcgtgtcggaagtgagacacgtgttgaatgtctcaagaaagggcagtcttttaaggttctagtattttgtgaacacctgagtcttctgaatgaaagttaggaacaccaaagccataaaccctttttcaactcctataattccttatagttgttgacaaggtggtgtgttgtatatgaataatcatactcggccctctgtcgaatgacatcagggttgaatcactcgccaccaagtccgagatcaaacaattataaactggcagggagtaataggtgcatttaaccccacctcaatttaggtttaatattta

SEQ ID NO: 3508 - DNA, 478 bp, Emericella nidulans
  unsure (1)..(478): unsure at all n locations
atggctgccgaacctgactcctccttttttgtgacgacacgggctaccaaccaggcagaggggagcacctgattctagtggggggagctctacagtctagctatgtcggtggagtggtatgccgactgaagcttcgcctggctcttatagctctcaggcgaacattaggtggcttttcatgcatcgtacgcggatcacacccgactgtgcgcggccctgtgactcgggaatggatgcactaataacccaatgacgtttgatgtcttgccgcgagtcctgaagccacaagaagtctggagtgatccattggaggcaggacgaccatgaatgtagaaacagttctgctgtataatgcccacaggagctcgtgaaacgcggacaactatttatgtccatcaactctcagaagacacacctgctgagcggagggccagtcatactngatgattcgtgagaggctgagcaggggactcgcctg

SEQ ID NO: 3509 - DNA, 510 bp, Emericella nidulans
aggaacctgactgtgatttattggtgcgtgcggggggggggtgctcaagggacgtgatctgcaagtgggattaagtttttgatcacgggagggagctgtgacggaccggggcatgcctaccgcaaggcatccaaggaccactgttgtgctgatccgggggatcatctggcactgcagatggcccacaaggttagggagtgaaccccgagtgacccagggtataaagaatggccttgacactcgtgggaagatggctagagcgacagaagaacccagaggctctgcgaccaggccagaaaagctggactatgctatccaccaggacgtgacccccacccgctgagtccgtcagtgggaccatactgaacaccatggtgcatgtgctataacaatcaacatgagctcggagggatcaatcacacgccgagggcgtcttgtatgatatccaaaccttacaaggatcaatggcaggagatccttggagcaacccgccctcaaaacatgccgttc

SEQ ID NO: 3510 - DNA, 466 bp, Emericella nidulans
ctaaacatactatcgctggagattacacggcggcctagtaaagctgcgtaccttattctcgcaccttgcttggcattatctacgtgggcctagccaaccaaagggagagataggataaccattgcgcgaaggacggcgaatatcaacacctctacggtgaatatatacggctctattactatcgacacggtcaagagagcacacaactacatcgctcagtagctgcggaatcatgctatacagttcacgacgccacacctgatggagcctgagagtgcatagctgtatcgaactggagcggatacaacgagcaaggggacctattgtggccttcgtcttgatctctcgaccatggattagatcaagtatgtgacttagacggtagatcagctaacttaaacgtacctacatacatgtagactgcaaggatgactggataccaaacaccgctggatgcctttctagg

SEQ ID NO: 3511 - DNA, 434 bp, Emericella nidulans
gataaaaactgcccttcaacccatattgctttctccactgcctacccgtgcgaggatttcttccggatggtctgttattagttagcaagacagtccgtcttactcgccatctgtctttacaagcaggaatacctttgaagcgtgctaccaagaacggggctcgcgtccttatgtgcctccctcggtcgaagcaccatggagcccccagacctctcagttcatccgccaattccctgctcactcgtggcaacacttacgtcatgtccgctggatattatgctgcccgcgtcgtcccgacacactggctacagcgagaagacagacgactggtccaagagtctaacagcgctattctcctcaggagcaattcgaccttccagtttcacactggaactacactttaaatacaacaaatcagaccgtacttggttagc

SEQ ID NO: 3512 - DNA, 638 bp, Emericella nidulans
atgaagggcttattagacccagcttctccgccctcctcatcgtgatatctcatttcttggggaagccccaatgtctcgttcgtcgcggcattatacttttgttcttcgagaatggaatcgacggataatccagagtcatccgagtcataagagcttctggacggggaacgaggacgatttgccggaagcaactccgagtcctcgcgatcttcagagctcctcataatatttctttgaatgcgcagactcgacgagtggattaaactttaaaagagagttgtgaatctgaccgatctgacatcaatgaacgacgtaggtcaagggagggtgctcgtaggtcggggacggtgttcgacgagggaaagcaaggggtagaagcgcaaaacacgccctacaggacattagtgtaaggaaagaagattcagaccaatagatccatctcaggcgagaatctggaatgtagaagtgagaacgacgcgacgatgatggagccagcgatgcggaaacactaggcggaggaccgagactcggcgagacgatagcacaggcacactgttgctatcgatccttattgggatgacacctctactggtatggatatacaatgtcaggtctattattcccgggtactatactta

SEQ ID NO: 3513 - DNA, 522 bp, Emericella nidulans
  unsure (1)..(522): unsure at all n locations
catcccgaaaggtttggcacaattgaccggtgcctgtattgcgagacttaaatacgtaaggaggatcctcaaattggaaagggcaaccttacaccgttatactgctaattgtgtgcgccagagcttaacaatcacaccctcaacctaacaattcttatatggggctgatgccccacatcctagcaccaggggtgccatagacgggcctggaaaccctagcttacattttactgcccgtattctagccaccctgttaacaagcggacggtgtctactaactcctacatgggggccgactggatgaatgtaccccttcacgaatgcattgcggtacctccctagccctcgttgaatccccggagcatgggcggccttaagaacccctgttttggcctacaaccacgatctccgtcgaaggcttttgcatatcactgcccaggaacttgtagagcctcatcagcccatgaacagcnctaatgataaggtgggggccggtggaataaccattattacatttatttt

SEQ ID NO: 3514 - DNA, 558 bp, Emericella nidulans
ccactcactaggtgcctatgggactcggccccgatatcgtgaccccgatccctcgacagggcaagcttgatttcttgtgggcaagggctccaacataatcagtcgggacgcattatgttaagaggccatgtatataattccggcccaagcacatctctattgcacccggatctttctcgcagccaattgcccttgcctgctagctgctgagatgatcactactacgcacgaccattgatgtgcagtgaacggtgaaccgtacgggtcaggtatgggaggaacatgtgtcctcccggctgggctggactggacaggagcattttgtccctcgggcaggaggacgcgcataatttcaatgggccagtgctccatagcgcggagagcatttgtaacagggtgagcgcgtatggggatcatacctagccttatactgcctgttttacctacgaactttggacacgcctaacacccccttggtgacactttgttggccctctcctcctttattgttccgacattggatgacactatcctattctatgattccaaccgctctag

SEQ ID NO: 3515 - DNA, 409 bp, Emericella nidulans
cagtacttagagaacctgctcaccggggccaccacttgctatagagccatacgtgcttcaagtgcttctacaccaagcgactagaggcacacgatggcgttgcctggcctgtcctggccaggacatacgctcgaacaaccatcgcgatagacataggaccatttacaccggcacagatcgacactcctgatgctggtcgacctgcaccgatactgcctatactctttattgactaaggcgatgtgcacactgccagatggccaagacactggcttggacatatacttttcgctgcacacttcaaacggctacgtggacgggagttatggtcggcccttgatgtttttgtgtggaattgccacccatttattcatgtccacccgcatgatcttggctgtctcgcagaact

SEQ ID NO: 3516 - DNA, 1075 bp, Emericella nidulans
ggatcgcaccattccatgcctctcacggcactgaggctttctatgttctgatttactctacatggagccggctcttctgaccaccatggacgtgatcatggatggtttcggatatatgctttcgttcggcgatctcgtctgggttcccttcatctacaatctgcaaaccagataccttgcaatgttccctaacgaacttggcctgcggggtatcgctctcgtgctggccccgacagtcgtgggatacatgatcttccgcggtgccaacaaccagaagaaccgcttccgtaccaaccccaacgacccgcgggtcaaggacatcaagtacatcgaaactgcttctggctccaagctcatgacctctggctggtggggcctagcccggcacatcaactacctcggcgactggcttatgtcctggtcgtactccctgcccaccggggattccggctttgtcattgtcaacagcgtgagcccgtccactggcgaacttgagaagcgagccgtgcagacaccagagtcgcgcggcgcagcttttctaatcacctacttattcttgatctactttggagtcctgctccaccatcgcgagcgtcgcgatgaggagaaatgcaagaagaagtatggcaaggacagggatagatatacttccctcgttcgcagccccattatcccaggtgtctactagtcggtgacaacggctggattgagttctattttgattgacattaacatattaatatatacactatattgtctttatatccaaggcgcctagtggcagaaggcttgaaatggcaggggaaaaagtttatgtactttaagaatctacaacaggactgtacgatatgaactatcgcttgctcttctttgaaccctttggatccatcacaacgggaaccccccttagattaaaaagctttccccctgatccatcttcacccccactgcttatgcccgttattaggcacccacccggccaaatattcttcgagcattcaaggcctgcctttagcaagaacgacaccgttaaaaccccttggctcctgaacttttatatgtgccccgggaccca

SEQ ID NO: 3517 - DNA, 389 bp, Emericella nidulans
ttggtgtaaccgacgattctaggggggcttttttaagatcgacggttgtaatacaaacccagtacaatgaacatagctagcacacgggctgctcactagggcgcatttcacagaccacacagttgggatggtcaataaaaccattttacgtaagtcagatgagggaaaaatactttacagtgaatgactactcacgggcacttggatcgtctatccatgagactgtagtgaatacactcactactggagaaaggttgaatacaggagaacaacaattatggctccaaagcggggatgacatacgagaagcatggacaaccaaggtgttggggtactgagcgaaaagacttctgtgtagggcagataagccagttccaaacggacaagac

SEQ ID NO: 3518 - DNA, 1411 bp, Emericella nidulans
acttcgctcaagcgcttacctccttctccgcgcgaagcaaacttaggccgagggttctcacgggagacccaatgcggatttcccagacccccagcgccccctgcagctagcaagaccggcttgtccatatgttgcgagagatccaggtatataggcgcacgcggttcgagcgcagcaatattctgcctccgtggcggattgctgggaaacacggtcgtcaggaaatcagacgggttcgccccggggtagagggcccagcggtcgtggcggatgggctgaaaatcgagatcctgccgctcgtcctcgtcctcgccctcgcccgacttcgccttctccttcttcattttcctctccagtgcacgccgtcgctgttcctcagcgaccgggtcgtaccgatccacttcgcgcaccacggtccccactggaacctggataagaacgtcttcaccacgtttaccacctttactttttccttgaccattcttgcctctggttgctctgattaccccactgcgagcaagcttgtgtagactggtgagcccttcaacggcttggatatattcactgccaccactgccgtcatcaccgtcatttggtggcccttcgggaatatacttttccctctgaaacgagacgcaaccgtacccaccgtcgccggcataaatcgttgagcggcaacgatcttgaaagatgaaccgggagtagtctttgggtgacggattgagatgtgaaggagcgttactagcaatggctgcgtttatggactcttttggctcggtatctgtagcgtatccgtgacctgtatgggtgttattgcgcttataactatttggtggataagcttattcacaccttttttaattaacaaaccacgcctgactatgaactattttcatctagttaatttgcttcctcacttcattatttgtgtctagggaacggggctatttctggttaatatatttcggttccgcattccttctaaatatggtcttaggtactttttaaaaaatacctttctaggtttgtttactttttctacaagtatgctatgtttctaatgccttacaatattctctagtgctagtttcatttagttcttaaaataccattccctccctttagactggacatatcccgggctttaataacgtcccttctattttccctctagtaactacacattataaagaccaccgaattcttgtttatttcttttagatctttttttatcatttaccttctcattattatcctatattatttggctctcatatttcctaacttggtctaccttccttatttttgtctacgtaattaccttcattcctccttcctcttagagtttcctatttaccttctatcatctctctttatctcttctatctaactactttcttctcttattatc

SEQ ID NO: 3519 - DNA, 469 bp, Emericella nidulans
cggctcgacggcatggtctgagtaggctgtggaacagtttgggctgacttttattcacattttaccggcgagccacctgaatacggggtgcctggatgacgcgcttcgttacagactggcaagggagggtaagatgctttcagcaggaccagttcatgccagcagcaactctaacccctgagaatacccatgaggactatagatcctgaagcctttgaccgggctgtcttaactgagactaatcttgggtcacgcaatgtgctgatgtcccaatccttgtcgttacggtcaacagactggaacattatgagggctagggtgacacatacatacccctagccggttaattcacgaatcattcccgcgtacaacagtgccaataacataatctgtgcgacggagaaatggcttgaatactgtctggtgcgtaatagatgcggcatgcaggccgatatactctggattgccc

SEQ ID NO: 3520 - DNA, 510 bp, Emericella nidulans
aagccatgtacttagacagcgtgtcgagctcgtccgacgggctcgacagcaagcaaacacaatatccatgggagacggttcctcagaggcgatttctggagcctagggtacctagacctcatgggggcgttcgggggcctccggcactctgtctggtgggccatgcttacggctggaacttgaggcaactctctcggagctcctgcagctgtgaatatgctgtgtctgaccagcgtccactatccgcttctacgcctaggactcgatactctcgctgaacagctgtgtaatagctgtctcactccgagtccgactgactactgtcactgatgcctcagccgacactgacccggccgaggacccccgagaccgattatcacttgttgacgcgacgcagctgggaaccatactgatatgacatagctgggagatgcatgcgcatattgttccgacggcgccatcgatgcctttgcattgtctgatcgtggctacgtgcatggatcgacacct

SEQ ID NO: 3521 - DNA, 800 bp, Emericella nidulans
gatggttcttttaagttagaagtactcttagtggtaaatatcctaaattcgaatgtaagttggaaatatctcaaagacaaacagatcataaaggttttagtaatcaggagtttttaaataaaattgctgatttctttcacactgaagttaaagaaacaagattaaatagatctactccagagtatagagttagaactactaatttacaaggtaataatcaagcaaagagttattttattaaatatccattgtttggaactaagtatttagattctatagattgaatgaaagttgtagatttatttaataatggtgaacataaaactgaattaggtaaagaaaaaattttaaatataaaatctaatatgaatgataaaagaactgtttttacttgagatcatttacaaaatttttacaaattgaaaatataaaatatagtccaaacaatttcgagagaaattgagtgtctaccttaaataacttaccctaaggggtaagtttttttgaaacaagttttatacttatagtatgggattttattcgttcaccaatatattgggttttcctttggttaaccgttgaaccttattcctatttttcaaaaacttgtggggggatccttttttcaaccttttttgtctttggcccttgggtaaattttgttttaattactattttctcccgtaagtaaattatactaccttatgccagaaaagttatccttgcttttgccttttttaaggactcacctttcgcggaagggaccgatttttttattgaattccacatacttttgttgt

SEQ ID NO: 3522 - DNA, 1022 bp, Emericella nidulans
  unsure (1)..(1022): unsure at all n locations
acatatgaagaattgttcatatcacattgcggcccgtcttgggggataacggcggctaggcatatgtggctagagggccgcgcccctccctctgcgctctgctgaggagtcatgtaaccaccaaaagtttgcacagcctgctgctctgagtcagatcgggagcctaggtttgctggcgcctggattagccctattatcactcagctttcgaccgggcgtgtaaccggaggctgagccgaccagtcaaaagagtgccagattgcatttaccacggctctgctggccagcatggacgtgattacataaagcaatggtgagtcttccgcgagctgcgaccacaagtactgaggacgaggcagcgggtgctgctgatgtacagtacatctggccttcagcaactgacatacggccgaccgtccattcggatcactcgcaacccgcaaggcatctgacgctaagcatgggttggctcgactaatcgtttggcccttggggcgcggagtggctgctaggtcaaccagctggccgacctcttgccgaactcccatgggttgacctcgaaaagtgtatgcaggcgcgcaagcttagtcgaggggcgtgttccaaccattgggtttgcacgagtgcatacctgccactatttgccgggagtggtgatactggcactggacaggtactccggattagacggggattcatgccagctggatccgacagtgcagatactggagctgtggaagacctacttgctgcagtgtttcatacgcgagcactgctaagggtcttgtcggccaaaggggacagatgattgccaggataggatacgtccccctatcagaccagctgaaccttggcngaaaccgcaaaaccgcatatgcagcattcaaccaattgactgataatggcgtaacagctatccctgggaaaatcataatgcactgacaagcaggaatgctaagcttcagaactggaacggcttcgccctaagaccattttttaatccatctaatcccaggctcatg

SEQ ID NO: 3523 - DNA, 575 bp, Emericella nidulans
  unsure (1)..(575): unsure at all n locations
acccccgtagattagtctaatgtggcaaactcacggcaacgaatagttttcaaacctcgtcaccccaaaggagcggatggggttctttccctttagctctatgccagttcgcgagtagttgctgccctatgtcaaccaaatccaaatccgcgtgtttccctggcgatcggaatgccaacctcaattccccatttgcgaacctggtctgctcgcttcttcgcctccggccactcgagtgccnnccctagtgctctggaaaggcgtcaaagtcagaaactcgcaccaaattccggaagtaaatttctgaacgtacagcagacccattatatcatgcccggatgtcctgcgagagtagcaatttacctaaaaagccagaggatcgcgaatggtaaaagaaaccgattgccccgcaggtacgaggggaacaccccagagcgtataacacttcttcaacgtgggacagccgacaagagaggtaaaatagatgtcgaccaaacaatctcaggctagccgcaaaagacgcaaaccacgcggagtgataaataatggtgaggggcatggaggggaatgcgctg

SEQ ID NO: 3524 - DNA, 632 bp, Emericella nidulans
agccaacactttgggagaagctgtttctagctgcccaagctgcaatctcgtttggattcctctagacagcgctaggttcgtggaatcaagcaccgcaggtatcaactgtggttgccactccagactgtgcgacacatgctgactgctagctcgtatttatacatgatgcactcgtacaaaggtcttatggcccgaaaccgctccattatatagcttataacgacccgcagctgatttgtggataaggctttgcatcaatttacttgaactgggtgacgattgacatgacacccacagattactcacagcattcctagtgtggacctactcatgcacgcgatactggacaggatggctacgtgctgaccaaggaacaacatgtggcttgcgagacaccatctatactaacaactaggtgaatggtacagcagcagtactatatatgctacgatagcgtgaaggcgtggtatattatccatctgcagtcccaatacggacttagacggcagatactcactaagaatccaagactgctccagtagcagcgaatccgaaccattagcgagtattgccgtatacgatagctacgctcatgttcgcgtttaatattacgctgggcctttgagatgaga

SEQ ID NO: 3525 - DNA, 1266 bp, Emericella nidulans
cagtgataaaaattttatttgttgataattttctatatctacgatttaatcttttatttcttaatttagattctatatttaaattatatgaattaaaataacctttaattaatttcattactaatctacttgcaacaggtattaaacttaaagtatttttattatatacataaatactattttttcaatctcttacagcaggtacaaaatttttattataaaaacttacattctcatcatttaatgctttttttttatatgtattttttattttagattttataatatttaacatttatatttatttatttgtattaatattaatataatttattatataatattaagcttgatatataaccaagtctatttcattattattattaaaataataataattattatacatattactaaataattaattaagatgttgggcatgattaaaggattattgttagcaatactcaccttttagtcgttgaacgttctttattttttagaaaagtaattgataattactatttcattgctaaaaataagtttcgcttcaaatacacttataaacataagttatttttgaaatttacccaatatatttccaatatattatatattggaggacttacagttaaaaatccctagcgtaactttttctataatccaagacctttccttaatgcatcttgtgatcatatgccccgcttacgcgactgatagacttgtaggtcaaacagtaaagcaagatttagccattaaacttttaaagtataattaatcatcatattaattaagataatatacaaaattaatatgacaaaaaacttttaaatattaaagttttaaatacatctattaaccatatagttaaaatcttacttagataaaaataaatatttgacttaatttaacaataactgtatatttataaaaataaatatagcaaattaaaatatttgtaataaaattacaaatttacaatatgaactttggatatacccaggtattttttgtggatctgtgccccgataaccgccttccatcttcaaagctatttaagaaccaattaggttgttaatgtatcttcaacacctaatcttgaaacatctaaattaattttgcactgaacagaaagtgaaagggctttttttttagaggacagttctgctgtttcaattatggaaatattgaacgtgtgttgttgtttttgcgccgtttaggcagattgtcttgactttgaaggcgccttttggcttactgtttaca

SEQ ID NO: 3526 - DNA, 502 bp, Emericella nidulans
ttcgcagacagtaggtgtgtaacgttgaaaggcttccgggcgacatagcacggcggtcagcatgttagtacggctcagttaaaaacgagatacctgttcggcggagggtctagcgcttcaagaagccttgctgtgaagtttcaaagaccattcccttcacagagcgccagagaatttgcgagtcgtccaagacgatccgtgctcttggtattcctggcgagtaatcgccaccttcttgagctcttctttatttgttgcaaggcgagaacctccaagccaggcgaagcgaatagggctaccgtagcatcagtatagaacgaaatgaggattcagtggcagaagactcactctttaggccgtcggaccctaacgacacactctgctgaagcgatttggcgcaactccgtttccctgccgacgtcagtgacacgcattctcgaaagtagacatttgatatcttacagtctttccatgaaacccggtagcaaggagttgcctccaa

SEQ ID NO: 3527 - DNA, 572 bp, Emericella nidulans
ttgcatctcagaactaatggaatagagcataagaggatgaggatatgtctcccacttgtgcttatatgtgcttttatcctcaaaaattatcgctgactggggggggttggatagatgtgacaagcctactgcaacagccttgaggaggttacttgctctcaagtgaagctgaacccttctgcgaaggtgacggtccacagtagaagataatgtcactgcgctctagtatcgcatgctactgatatgatttcccactggacactaggcgatactaacagatcgccaacgagtaagatgagtccaagagccctcttgaccttgagacgcagtaaaaaccatgctaaggatcgattccctatgcgagtggttccactacactgcccccgacgaacgagtgatgattacctcccgataactacgtagtgaggtgtgcactataactactggtaatggagagcctcatcggggatcagcaacaaacaacctgatggcgagttattagaaaccgttgaagacgcggagtacgcacaagccacagctgtatttacttcctggaagggaaggagctgtta

SEQ ID NO: 3528 - DNA, 528 bp, Emericella nidulans
ctatgccatgtactgaaagatacttacccaacgcttcatttttccactctatgccctgcctgactagcatacggaccatgctgccgtccacttggttgcatccttaatatgattgtgtctgtttgctatgccaaagatacaatacctgctgcacgattgaactattatagaggccttatagtaccgatgagctccactagctgcctgttagatgccatgactccatctgatgcgatcgcatccagaacatactgattacaacagggggtacgttcagattccacttccgatatcatcataactgtattgggacctggaagggcattacttccatgtggacgcaaacattcttgctggtgctattgatccggtcctactagccgctgagaccgacctacatccaccctgaggagcatttcgagggcccatacgttttactgggtcagctccttgataattaacctagttggccgctgcctggtagcgcttttgcacactttaaatacccctggcgcgagtgattaaccc

SEQ ID NO: 3529 - DNA, 525 bp, Emericella nidulans
  unsure (1)..(525): unsure at all n locations
ttgcgaggacaagccacgggggccgagaatagttgggcactgctggcctaaagtttccttctattgactgaacaagagacacgcttggatgggggctgtaccgaaacctttggaagtatcatagcctgcactgaaggtgcactgttgaaggctcatacaggcgaaagcatcggtatagtgatgtttatagagccgctcactacgcaggcctggaactcttaagagaaaatcggatcgcgcacatcggggaacgcccgaacctgagtctaacaggggcgaaacctctactgaggcagctaagcaaccgaaccttcaaccccaccgtcgtgtgattaaagacaggtgcccatcatctgactcggatatcagatgttggaactgatggtgtaccaccattccataaacggntgccatgactttattctcaaagagcactgtcgaagctttacagtccactagcttatacgtccacctaaagaaccagccgtcatggaggacccctgtcacgatgcaaataaccagcga

SEQ ID NO: 3530 - DNA, 420 bp, Emericella nidulans
gtacgttatgggcacttggcgttgtagactcctgggcttgcaattcgatgtactacagtgcgttacagaggtggcactcctttggagggaacggggcgtctctactgactataatgactgcgcttccacttaacttagacaccgtcctatgtcgcaggagagcctgcttaaggcacggccctgtaactgctcttcctggcaccaatactcgactatgaaatggggctaatactagctggcccttggtgggcagactcgacaatatggtaaactcgctaagaaactgttcctgatctctcgagatctctccccatctgggatatcgaactctggccctcgagatgatgctcctcttagcggaccactggggcgaccagctaaatttgttaatcccgcttatgcgccagaccaatgccgacc

SEQ ID NO: 3531 - DNA, 378 bp, Emericella nidulans
ataaacagagggggtacatgtgcgcccataaaccaattgacactcgcgacgtatggctataaacaacagcctgctccgctccatctttctggagcaatgctccactataaaggtgggacggcaggaggatcaaaaccaacccagaaaacgatgcacacgtacaactcagtacgcaccgatgaccacacaaagactagctccccagccttgaaccaatgcaatgctgaccctatgcgcttaaacggactgaaggacaccatcggagtcctatccacagggggatatgctcaattctcggaagaacaccggtactgcacggctcatctttgacgacactactcgtaggtctccccaacggaaacaaagtggacctgtaca

SEQ ID NO: 3532 - DNA, 688 bp, Emericella nidulans
acctccgcttgtgggatcatgctgaacgggccggcgcgcgactatcgctgggcttggggtttcggctttttcgcacgtgcctcccccactcgctcacgggaccgaccgggcatatgaacctagtccgccgttggtcttcatccccaagtctcgtgtttatctacaacggcgtctactcggacgatttgggttgagttgacgctgaactcgcgtacgttccgaggtacccgtgcctactcaccaccgcgatgaccaccgctgctccctatggccggagtcggaaacactccacctcgattagggcgacgctgctatggaccagctttataggatgctggtcactggacgggacagcgcgctaggagacctgctacagggtggcaaccaggtccagtccataagggccgttcccaacaccgacatacctttgaaagtcatcagactcctaccgacggtcctgactaacatgcgggggttcggctcatagcccgccggacttactggtcaccagagtgctaccaacacctctttccgtcggagagcccagagaacatcctaggagcgtgatcgacgcatgtgggcaggttcgtccatctcacagagaaagttttgcctgaaggatcacgtgccacattgcttggttggggaaccgttctagaggggtgcgtccctcctgctgttcggcaca

SEQ ID NO: 3533 - DNA, 474 bp, Emericella nidulans
ccccggtttgttgctccccttttgccgaagctctgaccggccatataccttacccgtgcgcggagatcagcttttttttagcacagggctagcaggcaccatcccaggatagatgtcagcggctcctggcaccggtctcttcggagcggtacatgtcataacatgactagggagccctgcactgggagccccgatacttcaacaccacttctagtggagtccaagaagctatggcctgccgggcagtatacaacgaggatccagtcggcatgcttccaagcgttgatgacacgcctcggcacctgcttgtacgaccatgctccggatctgctgactgaggaagcgactactctaaaggctgcgtacgcctgtgcgccatatgactctgcttacctaatttacgggcagatagagcctaccgcgtggcgccatgccatgagacaaccatccccggacttgacacattaaacaagc

SEQ ID NO: 3534 - DNA, 465 bp, Emericella nidulans
atgtccatgtactctaaacatcacattcgacgtgcacaattgcgattataccctctaccgcacatcgcatagccataccgcatctcgtggtggcctcgtaagcaccagtctgagaagatccagagtccctcgtgagacacatcttcatgatacacgcagagagccactaatcttgtgtgacaatagtcaccacgcgcccattgtgtgtaatagcgtcatgtccttcgttatcattgctttcagtgccaacatactatcttcgatgacagagctgtgcattgctaactctgattactatgcttatccaggcatagtcaaggattttatatctaaccttaattcacacacatcgttaattagcaacttactgctctctataattgacccatggcacaatagcttctactaaggcaccctgagcggacggctggctttctcttgagcaaaggctgtaccttctaacac

SEQ ID NO: 3535 - DNA, 791 bp, Emericella nidulans
tctttcacgctgctaaggcgatctttttagagcgcttgcagagaagagatagtaagcaggtgcagtttccgacttggaattttctatccccttcctcaggctttcacaattcgcgtgggtcgtcggccaactccaacagcccgtaccaatcccaccaacatcagtcttatgttctatatccggtcgactccgcaagcttaccgcctgaagactcgtatgcgcatatggaggtgattttctttttcttgctgctcacggatttcgcttcttgggagcggcgccctgagcttttacgagaaatcctgtctatgaagagcacattagccaggctcgttcgagaacatggtctcactgcgtcgagcattgtcgtggacccccaacaattgggaagagtgggttcggcgagaatgcattggacgcaccaaactcattggttactgctttttcaaccttcattctatcatgttcaacatcccgcccttgaccttgaacgcagagctcaaattgaacatggccctgctcacatgacctttggaaggaatgtagtgtcgcttaatggcgtcagcttcttcgcaccccacatggcttggtggcttctttcctggaggctcttacttggatgctgacaattggaccatgcagaccaccgcacctatatcacggttcggaactatattctgcaacttgcgcttattcaacaagtttttcgctcggaaacttttgctttttggtgcaaagctgcattgaacgagtttatgggcagatgactcgcccctcccgccttgggcctt

SEQ ID NO: 3536 - DNA, 991 bp, Emericella nidulans
cagctgatatgttttcccttcttggatttgtttctcttatacctggcgttcatattgcctggatgtgaagatgcgttgattccatctgaatgtatggtggccggaggctttcgtccatgagaggcttgtcgtgcacggggccagctggagcaggaaagaagtgtccgtacggtaacagttggacatttgggggtgaaattccgcatcctatctattggatttctgaataaacaagcggcttggtaattgtacgaaaagttcttattgacacgatagcatgaagtttgctgggcgatagtgatatgaacaccaggtataaaatgtctatggggcagctattgcatatggtcctggttggcgtttagtgatattataatatgtcaacctggaaaattgactgcctaagactaatctggtagacttgacgctttttggcttaggagtatttttccaataatatcagcattcatatcaagcatatacagactctattgccagttgcagtaggtttgtaagttaattgcttttttgtgtatgcacaatgcagtaggtggaagggaaagtgggcgataggggtaaataaggcgccctgtcccttttgggcaactttttttcctcgcaggatatagggattcctcgcaaaaaaattttttacacgcccgataatgttaggtcccttaccgaaaccggagaaaagattcgttttgctaacctttttttcaagatggcggtttttagaagagcgggacccttccgcacccatctggggatggaattaagcgggtttcaagcttttccttttaataggggaaggtatttttttccaattatattagcgggatactcttacgtttcaaattttataaaggcccataaatcccctgtttgtttttcctaaagaaagtttctttttctctttttattgtttttttatattttttactcttttcttttttttatgactcatattttataaacattacgaatcttc

SEQ ID NO: 3537 - DNA, 842 bp, Emericella nidulans
taggcagttctcaagatcggcgatgaccaggatccggatgtttcgaattggaaaagagcgtatctgatctcttccatccgtgcacaaactacggtagatccctttaccaattgccgtttgattttcttaaggtaccgtgctttcactagagtgctgcgcgcgcggacaatagactcggccgcatagtgaaccatgacatggacggccgcaagcatgtcatcgccacttcgcttagaatcagggacgtcggaaagaagtctgcttgtgattgttcggagccgttcaacatcgaagaccgtgtgccatgagatttcccgcagccaggcaaccgctgtgctgtactgctcaagttcaacttggaacgagatgcgcagcatttctgagttgccgagacctctggcaccctcaatgctatacccaacagtgtctcgttccaactcgacaacaacctgctcaaagtttatgatcttgccatcgcgctcaacagggaggttaaagaaggcttctgtgtagacagacaagagtgggcgcagctgcaccgggacagattctgctgagatgaggaccgacagctgaacaaagctgctgggaatgtgttcgaaatggatgaatacaggaagatctgatccatcagcatccacaactcgttgagctttgttgttttggtgcccgagttgtagagcagctccagatctcgcagtcattgtctccacgaaatggatggactcaattccgggtatcttgaactgctccaacatctcccgcgggatttccttgtcgttctcagcttttgcctctcaagcttctcacaagctttttcaaccattctcaccagttgtttt

SEQ ID NO: 3538 - DNA, 2022 bp, Emericella nidulans
agactccactcgatgcgagaccagagggaacgagaacgaagatcgcgggtaagatcgcagctgctgcgtggccacgcctaagtctcgaatagagattgccgagaagaccgattgtgaaagcgccgactgtattcgcgacttcggagttggacccgtgcttggtcgtggagaagtagtttgtgatgtatccacatatggcgataaggatcatgaccggcagctgtttccatttcgcttggttgatgatggcgacaaagatgacgaagaggggcacgaagcaaaatttctggatgtagaccgagttataaacatcgaggttgatgcattccttttcagaagactcgttgccgtccatgagaccgtagattgttgttccaacagttacaccatatcctaggaagagcgaataaataattgcataaatcatgcggattgaaccagcaatcatctggtgggactgtagttcgagactagcgcaaaggacgataaatccagggaggataagagcaatagaagactgggcgagcgcggaaaaacagaagagattttgctcttcgccgccaatggtactgcgaatggagccgaaagcacgggcgagaaaagatgtcagcacggcagcggtgacttcaaagacattggagtagagcactgatttgggggcgagaacgtgctgcatgaatcccactatggagccaaggatgaagatgatgggcatgtcgatggggcgagcttgaaaggaaaacgggcctacagctgcagaacccagtccgtagagaagaatcacaagccacttgttataccgtggcttgcggtccatcagctctgtcaactctgcaatcgcggtttgaatgtccaccatatcgtgagtgactcgtttataacaatggtgaactgcctctagccgcccgaggtccagcccttggggaacgcgaacgagtttaacctctgcggtacgagtgaccgggtcgtcaaatgacattatcatgcagccaggaaggtacatgaactgcgcattaatgtccaaaactcgcgccgtcatctgcatgtactcctccagacggtgggtcggagctccgtaacgcatgaatgcgcgacagagctgcatgatataacgctgacggaagatgatttccgcgatatgaatcgtcagcttgacttccttgctaactttgtcgttcttcttctttttcttcttgtcaccagtctggagctcgaccggcggcacgtctgccttcgcccaggcgttggacgaggcgatatggcccatgctcatggaagctcgcaccagagacgtgtcgcagtgtgatccgactttttgtaccaatgccttggctttatctttggccgattcggaggcgtcgtcgttgatgatgtcgacaccggagtgataccaggcgtgacaagagtagcctgggactccgtctccgactcgggtgccgagtacaagctcgttgttcgcgaatgctgcgctgcattcgactgcagctgcagcagggctccgagcacgcctcctggtaaagaggacggcgctggcgtatgtgcagatgcctcgacatcgtccgccggttttccggccaccggttcattagaagtcggtaagcccttcatgccctgcatcagccgttcggcctcggcgcgcacggcttgctggtactgagcaatgtttgactgctcggttccatcctttcgaaaaatagcagccaatgcgtcgtcatcggttgaacccagcttctcagggtcaataagggaagagcccagtccagcttcgtgctcgcccattggccgactcagaatttccgctaggcgactcgactgatcccgaacggtgcgagcagctccccgccatcgttcacggctgaggagggacgtacctgtgatggaaagcgtatcattccgagcttgctctgcttcttcagttttttcctccccgcggggttccgggctggcggaaccgcttgacgcaggattctgaacgcccattgggttggcaactggagttcgtcgtcgagaactcaagaaatc

SEQ ID NO: 3539 - DNA, 971 bp, Emericella nidulans
aatcccctctagaaagttcgtgttctgcgttctgaagatcaggcataagtcgaattttgggaggagccggcctgttgtcaaggctagaagcaggcattaacggatggtgttttcaaaagctaccgtcacgcactcctgaatacgtcataatggcccaggcactgacgggaactcagttccacgaaagagtctcttttgcttcacttgaaccagctagcccaagtgattgtgaatctcgaggacaaaaacacagggacagctcaagatgggctctgctagcgacaaccattgttaaggggcgattgaaggaaccgttgagagtggaatattgggaatgcacaggctgatagcttacttgggaatgtaagcgagatgattaaggattatcccccggaagctgcgatctcgttaatcagaattgactttgacacaatgtccaagaacgctagatcgacgactacgagccacagtcgaccagcaattccgccaatgggagccgacatcgttggatcaaacgcactcgaccgataggaatttacggtgaacgcccttcagcgccctcccgcagattccctgcatcgcccttgggcgccgaaggctgtctatacgggaataatgcagaatataccgaggagtacatatacccacacggcctccggcactttcaggacgggtcggttgaagttctgcttggctccagtattcgatctttctcaaacttacgaccgagtcagtgatcccttggctagctcgctgccttgacctggccttggtcactgcccattcgccctggattagaactcgcgattcgcaacatcacacctcacgttgaggatagcgtcacaggacgagctactttgtctaagtcaagcagtctgcgaagagagaagatgatatccttggaagcaccattaagcaacagttaattatcgcgatcggtgataaactacgactagattacaaacttgtgg

SEQ ID NO: 3540 - DNA, 3313 bp, Emericella nidulans
atcaaacgaacagagggcgtggagatgagcctctgtaaatcatgactggtcactggatcatagtacttatctcagggcttaactatcatatcttcaacgcgttgtgaacttccacttcgatgcaaatccacgcgttccacggactcaaatctcctacaactatgagcttaccacagtttcctacctttatgatatattcgtcactgcgcatcggtcagggcggcttaagcgatggcgaagggtacttgtgtggcccggtggttcataaacctcacctcataaattaatcataaattaaagatggcagtttcaaacacaaacagcgactatgattgcagtgattcggcctcaagcactggatagttttccgccagtccttgctccgctgccttccctcattcctgaacctaaccagatcgaaacggccggctcgctttggaatcactggcattccacgcagctttctattacggcgtctttacttcagtcagagacatattgatctcagctcagagcgtactagccgacggtttccaaatgaaacaggacttgccgatatgatagggcatttgaacatgactgaggcggcatagtgactttgtctaagccagcatcggatttccatctccgtgatgccgagttgggccaaataccgcgctttactaagctggaatctacctctcggcgaatcctcccatggatcgtccgaaaccctttggttcactgtacgtcacctgcttaaagcggagatcaccagagagaacactccattcagcctgacggttccaccccttcctgaaatcgagtcatctaaatcaaggcctctttcttagccaaagaatgcaggaatgttctctcagacgaggtcgagacaagccaactgcggcttctgatgggctgggctcggaaataataggccgtgcagcacattggtcaggcgaaaattccctgttttgcacttagaacacggggaatctgactggattggggcttgcctgtgcttccccgcgttccgctgctgtaccccagaaaattaagttgccgatctggggccgagagtgggcgagtggacggactaaagtgccccatttattcgtacaagttgaatagtgtcacagtataaaggacttccttccccgcggtaaagtcaccttgaattccaactcgtttaaactccaattccaactccacatctttcaattctcatattttgctgtgcaaaaaatatcatgactatcgacgaagacgagaagactgccccagtgcatctggagtacgacggccatgaagccgacgacgactccatcgagaatattgccaccagctggttcgtctggcttgtctcccttacagcatctattgcgggcagtctctttggctacgataccggtatcatctccgctgtcctggtctatctgggaagcgacctcgatggacgcccagcgtctgagaacgagaaacaattgatcaccagtttatgctccggcgggtcttttgtgggcgccattattgccggtcttactgccgacaaggtatgtatgcatgcttattgtctacttcctgggttggttggtactaaccttcatctaatagtttggtcgaaagcctgccatttatgtcgggtgcgtgctatttaccgtcggcgcagtcctccaaggcgcagcatacagtatcgcgcaaatgtcagtcggacgcctaattgtcggatttggtgtggggagcgcctcgatggtagtgcctctctatattgcagaactatcacccacaaaagtccgcggcagactcatcggtctcaataacatgtccatcaccggcggccaagtcatttcttatggtatcggagcagcgttcgcgcacgttccgcatggctggcggtatatggttgggcttggaggcgtcccctcaatcatcctggcatgcctcctccccttctgccctgaatccccgcgccagctcgtctaccacggcaagacacaagaggccgaaactgtgatccgcaaaatctacaagggtgcctcggatgcccaggttgcagcaaaagttcggttgattgttagggcatgcgatgaatcacgagaactcaacaaagactccacgcgctgggccaagatcaagctcctgcattcgaacccggcgtacttccgcgcgctggtgtgcgcctgcggctttgctgtcattgcccagatgtccgggttcaatactctgatgtactactccgccacgctgtttgatcttgttggcttctcagaccccgttgcagtgggaatagttgttgcgggaaccaatttcgtcatgacgtgggtgaacatgatgcttgtcgacccccttggccgccggcgcgtcgtcctcctaaccgcctggggcatgtctgcgggcctgattgctgtagctatcgcattcaagtttatccctgtagacacctcaactctcgaactcgaaaccgataccgtcagcccacctgccattgtcgtgctcatctttatcatttggttcgttttcttctacggcgcgtccatggggaacacagcctggatgaacacagatttcttccccatggaagtccgcgcaatcgggacgatgttccagacttgctgtacctggggctcgaatataattgtatccagcacgtttctgagcatgatgcaggggataacgccgtctggcgcgttcgggttttatgccgctatctgtgggtttgggtatatcctgatttatttcttttaccctgaggtctcgggattaagtattgaggagatcagggaagtcttccaacatggatttggggtggcctattcgaggaaacttcgaaagacaaggaaggctgcggccagggcagcgagtgccgcaggggaagaagtcgaagcgaagacggtttaagatttcgattcggaaattcagtatgactgccttcgtccagttggagagttaggtcgaatgctcgcacctacttaagggtatatataggtactcggccagctagagctatcctggccctagccctaacacatatatatatgttattgtggtcttggctcttcctacctcctacgcatagagcgactagatcatgatgcactccctatttaatagttcacctagccctgtggaaaagacggtctagaaaatattttatcgaattaccctggttggtgcccaatagtgagcgtaatgataaccatcattaccaatgatttttcattatccttgctaatgcatctttacatcattagcagaccatcccaatccataaagagtatcgtcctcagacgttataaacacagaacagatagttatccctagctcgtccatatta

SEQ ID NO: 3541 - DNA, 1360 bp, Emericella nidulans
ataaatcagacaaagacatgcgtaaacacccagacgtcattgcagccggaaaagcaaagctgtatgcgggggtatcgatgaacatccacgagcccgtaccgccgtagtataacgcgcgcgaggtagcatgaacgagtagttcgaggcccacaggcaccgtagttccgtccccacgggaggcagttgcattggcgcgcacagcaatagcaagattggtcgagtcagcaccaaagaaggcaaagtcttctctggtgaaattgaaggatgttatttcggtagtcgagtaaacagtcgtgttttcgtagaccacgcgctggagggtgttgaggtctaggatgttaatgccgtacgcgcccaattcagtagtccctataatggctgtaatcacgtagtactggtttccggcggttgtggtgaggaaggaggagatatagtagcctgatatagggttttcgtcggttggaggaagggtttgggcagcggtaatgctgtagagggcagggatacgagactggatgcttgttaggcacgtcatcaacgggtcatgacaactgagaaggattatctacatctattatggtttcgtcattgtcagggacaaatacatagcccgtgcaatgggagatagagcataaaatgaggaaagctcgctgggcaatggccagcatacggggcattggaagaagcaatgacaacgccatgtctgactctcaccccaaaggcaacaatcagatacagatgtcatttttgagtgcagcctgagcagagctgtgtacttgaaatctcactcggcttacaaaggccgagggtgcgcagagtcctctaatcctaggtgggtggcacagcaattgctgctccttgttctcctctttcttacacacaataaataaagcatgtattttacccccacgtcattaccggtcaatcttgagacccagtcgctttcaccgggctgagcttgtcgaaattatgtacaacagcctcccggaaaccgtcagagagaggatcgttacgaacaagaaaactcaccgcgatcacaaccacccaaaacgtagtcagtgtgacctgcgccgacggcagcgtgttccacgggtcctttaccattggtgccgatggcgtttacagcaggacctgtcggatcatgcacaacattgccttgtaggacaatccacagcaaacaatggtaaaaccctccgcgcctgtacaaagcaacataccatctctgatacagctctttcccgtcacagtcaccaccaggccagggttacaacatccggtcagagagccgggcgatcatattcttagcgcggctaaaatctttctccataagaggctgcctaggccgacgaatgagagaaca

SEQ ID NO: 3542 - DNA, 6128 bp, Emericella nidulans
agtaacggccgccagtaaagcggagaatcgcagattatccccggccaaggggtggtttatggggccagtacggaaacaatgagattctaataataacgaggctgtagatccgatcgccaaaactcgagactcaaccgggcaggccggcaacatcaaaatggaagtcaaagattcctgaaaccgggatttagtctcacctttcactgtgctgcaggagccatccacgggtgtttccacttagcgcacgccatccccgcgaacgaccaggacgaactgcgaaacaaagctagtctcactctcaagtcccttacggctatcttttacactggaggacgggagtgtatttcaagaagcggccacactgtctcgaggctgcccaggggacagaaaaactactatcagaagtggtcccagtttatcttcaatactgataccggcatggtcctaataaggaaaatccaccgaagtacccagcagattcgtctcttgggcttgatacctgagtaagaagtaatgacttcgccatgaacaatattgatgacttggcgatttccagtcaatgcgcgcaaaagagtcggaccaggtacggcgcgatgatcgaccgacaggcgagcgggtgagacaaatgaaaggagctcaagtctcaaactctacgagggatccatcgctttgacattgggtctagacaagacaaaacaaggttattctcaaatgccgttccgaggatgcagccgtcccaaatatgtatggtgagatgggagtgagaggatcgtttgaaccgccgtcagaaaatccttcttgcggggcgcaggtggagtcaagtccgaagcgaaatgaactaaaagaaaagccgacaaggaaggaaaatgcaacagagcagatcaaatcgctcatttcagtactcaggaaccgaatgacttctgcagtctggaagagttcgcttgcctaggctctggcacatacctgaatctagacaggcaggaatgttgggcaacccagtggatcgacatcacggctatgtcggtaggggagtgtccgaacggaagtaaatgatccatacctatgcgaaacacgatgtgtctgggtcagccctggaggctgtcacgggtaccctgtatgcgagcctaggtagtaggtgagtatcgcgggttcaggtccggaagcttcctcgtcaatagtgaactcgacgccagttcctatcaatctcgacgctctcccctacttctccctttccaccgtaccactttgctctccatctactccgctcggcgcccacttcgtcagttgtttcttgtcctttgagcgtagtttgccgtgcatctttcagtcctgccgtcctcctcgtgtctccgcgggacccccttgttcacagcagggttctcgtaccagggcggccatccagcggtaaagtggtcattgaatctggtgtctttccccgcgtccaagcccacaatatagcagtcccagccctgacagcgaatcgctgatcgcgggtctgatccttgtcccatcaagattcgccggcatgacatcctgcccagcgctcattgttctccgttagcggctgcagcaatctggccagcatcaggccatctggtccaatcaggtacgtacgggcggctctcagtgttggttctgtgtttcccttgtgagagtacattcactcgaatcgaacaaggggaggaagggagaagaaaagcaaattaatggaaataataatagaatttatccactttttcaccaccccggtcttggattcgcctcttctgcacttgcatgtggaggctactgcttgtcgacaaacgggcgtctttcttttctttttgcctctcgtgttcatgccccccaaggcttacagtccggtctctttttgacggggttgcaaatcgcagcctcacaagtcatcaaccttctttgttgcccatctcctgcacaagcctcgcgcacagtgaggaggccatttgcagcggaggctccttgaagccgttggcctggctggtgtgcactagagaactaggtagtcacccgctgtccaaaggcctggggggctttggctggaatcctgcagcaatcctcgcatggggagctcgtcccgagaaagaaactaaagaagaatcagtttcagggccgtttgcgccatgagtgtccacctttagatctcatcctggtacccactgaggcccactcacttcgtctattccattcctagtgcacgggagcttccagtaatccgcgtggcgacgaccggtatatcctcctgcggagctgctgtccgaggtattccccattgtggacaaattgttcatcactagtatcacgtccctgtccctgcgccggattatatacctggccttgtcctggaaacttatctccaacggggttccaggccctgattgactgcctggattgaggccggccacctgtctactcgttccttccaagactcttcattttgttcacgttctctacaatacaccaactctgcccaacgaagaacaaaaggagcaaaggtatgtacttctacgtgacttggtattcactcaaggctatgcccgcatatctgtttattctcttggctaaccttgcgcgtgttttccaggttgtctaagggttggctagggcttagcccaggctctcacccattcgcctgagtgcctcatcaagctattgatagagacccacggcgacgttctcaaaaacgtgttctctgccggctaaaggctcggcgcttgcaaagacggcattcgtctataaaacgaaacgaacgccatgtcgtcggcctactatattggacccttcgggcgtatgttacctattgccgatggtcccgcggagcaagaaccggatcgtccagctaacctatcagttccgggatcccatccatatcaacttccaccgcctcgtacttcagcaccattacagtttggaacagatccattcttacgtccacgaaatcgagccgacaggctagacgagagagaagagccttccgtttactcgagcagtcatgggtaccagcaaacgaacgagcagctttcctttgtcagtcaactttttacacctaccgcgcaattaagccggtcgccatcaccatataacccaagtgcttttgggatctacttggcgccacacgagcctggagaatcaccccagcgctataatgagacaaccgcgccccctacacaggcgcgctcaagcatctatgaaagatccagggcgttcccggacgtagcaacctcgccgcaatcgaaaaacttacctcctatatctcacatttcgactcatgctcctggccgtaatacgccgacgtacttgagtaacaacttgaattcaattcacccgccatacctacctagttttcatggctataatgaggaacccaacggcagaaatttcatgaagaccccttcactcagtacaactgagttgagtcagcgcggtgcttctggcaaatcagcgaaacctcaagtacgtctgcacgtcgtggatgagcgtttcattgagggtgaaggcctgtgttatatatacgctgacggctctcactgccccaaaatcattgatggcatgccagttaacgccaactggggggtcacgaaagctggcaagcctcgaaaaagattagcgcaacgctgtcttacatgccgagaaaagaagataaagtgtcatccaaacctgccgaagtgcgaccaatgccagaagtctgggagggaatgcagatttgagagtgcgtaagtatatggacaacagagtgccacgaacctgaattgctgatgacgttcagaccgcgtgacaccgcgcagcatcgaaggcgtcgcaattcacgaggaaatatgatataagacataatactgcaacggaggactctaacaatgcaggtacctccagttcactatattctgttgcgagggcttcagagagctctacctccctccctggaacaaactcacagtctcccctatctgatgactccatgcttacgccttctgctgtggatagcaaccataacaacattagcgatcccgaccggcaatatgcgacaaggccgcagcaccttcccggtgaacgtgagcgtatgccgcggcattcaacaggcagcgctgccagctcaccatccgcggactacgcggagatcttgacggagatcaaggacttggatgaacacgacccactggcgactgactggagaacagacccttacgcggtcgatccggaatctgcaactcatttcaccggatggtacttcacatacgtgaatgaccgcttatactatttgtttccgcgaagaaggtttcctcctttggctcaattcatgcccatacgaagtcttttgccgataatatgcttctttactgcatcatggcactgggatctgtcttctcagaccgccctggtaagatcacagctatgaggagatactcccgcattgcaacatacgccctcgagcacagccagcacagtctatccttacagcttgcacagagccgcattataattagcctttggtactacgcaattggcgcactcgtgaaatcttgggatgctgccggcgccgcggtgcgaacggtatgcggcctgcgttacaatgtcgaaatggggggagttattgtagagcaaagccagccttgcgagtatggcctacatccacaagctctgatagaatgtcgtcggcgaaccttctggatcgcttttctgactgatgtgagttacatatcaatcgccctctccccgcttttaccccttctgagctcagttgtctctaatttccgttacacagcgcctgtcgtgcttctatgccccttcaacgaccttcatctcctcccaaacagccttcctacgtctcccttgccgcgaagagatttacgaagcccaggaatataccacagttcccttcttccaaaatttccttaatcaagtcccctccgaatcggacgaactctccaacctaagcgtcttggcactcctcatagacgtgatatcaatatggggcgatgtctctgaccacgttttccgcctatctctcatcccggcagattcatacaacaaactcttcgaggatttctataccgccatagtccgccgatcagaccagtggctctcaaggcttccaaaccacctaacatttacggctgtaaacctcgaacgcagcatccaagcacgaaacactgaccatttcatctcaattcaccttttgtatcatgccgcccttttaaaactcaaccgttacgcacgcgcacagctccttagacctggaatggcaaaacagtacgttcacacagcccgcaaccatgctgcagagatactccgcaccgcactcgcgcttgaacgctacgcctccgatcacaacgtctctccaatgacagctgacccgaccccaaggtccgaaacactactgctggatcccttccttggctacataatcctctccgcagtagacgttctcagcgccggtggtctagttatcgacttgcctgagtgcatcaaccttatccgcgggggacttgacgttgtccgtgacctcagcagcttctggaacagtacgaagccgctggtgtcggctacggaatcacgcttagaggcgctgattgaggcgcaccgctctgtttctacgagccgcaccacacttgaagggagagtggctttcttgttcgatggcccctcgctggacagtcaaatccagaatggcgtgcagaagcaggattcgtccgtgaatgaggacctactatatggcggtctgccaagggagcagctattccttgcgtttggggtgatggatgtgtcgtgttcgttgaggaatgtggtttgggttcgagcgaggcgtgagtgagtgggggtccattggtcttatatggacactgtacgaatatgggttaatgctagcatgtgcgatatacggttcacgagattgcggccttgtgctgcatataaatattatgttctcgaggctcgccccggcccatcatgcccccttttttttttttttgctcagctaatataaatttcgatcgagctggctgtatatgatgtgatatcaaaatcaagcacaagtagcaacttggggcacggcttcagagaccatgattcggagtatctaaattctgcgcggacactacctattatttgatattgaa

SEQ ID NO: 3543 - DNA, 721 bp, Emericella nidulans
acgaggttctgggctggacaacccgctatgatgcccagctcatatcgactattcggatttattctgagagcctaggagtcgcaacctgaccggacgttctctttcctcgatggccagttgggacgccgccctgtccaggtatccaaccctctgcaatcctatgtattacctcccatcacaagaatctgcgcagcgacacgggtcaggtggacgccccctcagcacacggttggagcgccttacctttccggctttggccgtgcggagaacacagaaacaaaaaaaaaaaattgttataataataatattgctgacgggggagacctttctcctgcggcggccctgcggccctgcatccactaggcagtctgtggtcggtttctttttttacctcgacttgctttttccattcttttttctttttcccagtccgcattcgatggtcttaaaatgagatgttcctcccgggcgcgaaggcgaaacccaggagcacagtgcggtgctgaatctggggaagtggaccagaccgatcacctcagcacagacttcattccagtttatgacaccagcgaaccttgaattttccagatgatcatggatcagacttgcggaccagactcgcagccagatcagatgatggatctggccagaaaacgtaattaaccatctagacggcgcttcccagacagttctgggtttcgtaccgtaccgtgcacaagac

SEQ ID NO: 3544 - DNA, 2905 bp, Emericella nidulans
  unsure (1)..(2905): unsure at all n locations
acccgaaacttccaaggcacagagatcgcgtccgggttcttcctccctgagatcctaccatggatctgatgtttgaagccaaggataaggagcaggctgttttggagctgatgaggacgtataagctaccaggacatgatcttttcaataatattctgccttatgtgcgcaccgacgagaataagccgttcaaaccgccgcggaagtcgaagaagaaaaatggcgactttgtcgaccttgaagcacaggtgccgcccccaaagactgttcccgaagaggaagtcggcatgggtggcccggagcggagggtctactggcctccaggaatggaagaatggttgaggccaaagaagattgtgcgaaccaaagctctaaagacccccaagtctaacaagaaggccccaccacgagagccagacggggagcttgatgctgccctggtcactcctagcaccccgaccaaaactacgaaagccgctgagcggtccccaagcgtcaagaagcgcaccagcagaaagcgcaaagcatcgtcgcctgatccatcgaccccatcggcttccgacatagaactgtccgatgatgcaaagccgcctcagtcgcaggctaagagcgatggagtccgtcgaagtcgacggacgaagacagtaaactatgcagaagacagcgagtcagtctgagtgtatatctgacgcaacaccctactatatatgtaccatattgttcacataacccggcatggatatagaagcagaaactcactttattttgtcaaccaatgccttttcacgcccatagttggttcaaccaacggtgtcaatacctagccaacggacaacaaccattcgcacagatgcgcatttcggggccttgcgtgcaaacccctcacgagacttgaccagttcatttcacgcgtcaacatcaaacacgattatattaaaccagcttcgggactgaagtcttgcgcgattctatgctagcgttacgctagacccggccgtacagacgtttgatctgctcctgcaagcatcctatcttgccatggatactctccccatggaattaaccagagctcagttatattctacattacacgacgagattgatgaggatgcttctcacacagcatcaacattacctccgcttttcgttatttccaacggcaactggtgctaactatggataacatgaaagtttcaaactcactgccatcactgttcgttctggatggttgtctgtctagaagtgaagaagcgcagagacgccctaaagccattcacggcagcaaagggccaatgccagattcttcttgaaacttcaattttaaggcttatcgctcaacctccacacggtcggctcggggattatttcatggagccgctcctgggcgtgcaaaggttgttcagagagagccattggattatccgtcgacaaggtcggacaactccaggaatctccctcctttcccaagacgtactttcaatcgttggatggaggcttatgacaccgcaatcgcactgccctgcttcgcaaaggagatggagaaaactgagttgttggagagaagggtcagggaagttggctagtgataaaacaaggacgagtgaccgagcatctatcagcatatatgatagcgagatagtccatttcagaaaagtaaaatgcatacggtgatccttgaagtaacctttaatgatactcggaaaatgctatacagggccaatcacgtattgagggatgccctccttggctaaggacgatgaaggtgtgcgaaaattatatataatctcgtagcaaacgcgctacctagaaaggcggaggaaccgaaacatcactcaacatcagcccctgtgccttccccacactttatcagaaccagcctggacagctcagctagaaggtttgctccccaagtcgtttattacagcggcacagataattgaaacgctgcgacatcgtcgtctccgagcaggtctcgttgaaaggcattcttggtttgtcgccgcctcagccgttgttgcctcgagcttgtctgcgctgagcaaacatcaactcaatcacgctaaccaaggcctggaaacacagactcctcgactatccctcttagttgattatcctacgtcggtattctctaaagttcctcgaacctggctccaaaatcattcatacgtcgctggcgtccgccgcctaattccgtaaggtggccagtgccgcaccaacctttccctcaccctcgtcgcataccaagccagaaacctagaggcaaattctcacaaatattccgtataatcctcggaccctacgctggccgccgtgcacacctccggctctggattttccgtcacgagattatccccgcctttcgacaccgggcgcaagcgagagtatatcgagcgctcgtccagcgacaggcgaggcttgcaaagcggtcgcgggaaggaaaactaggtcttacagagctattccgacggagacggcggcgccggggagtgagcgggcttatcgggggcctgctggtgccttctgaaaaagcagcgcacgcggcggggaaagcggaagcgcctggagcgggcaagagagctgtctcgatgtcagaatacgngatcgtcttcatcgtcaacatggagtagcggctatggctttggtaacgggcgcgagcggggtgcgcggcggaagaaagtctttgagtatttaaaggcagcgaatgagttacggcagtcatacgcggcatcgtggacggctcagcggaatgcgtcgcgcgaattgggtgacgagtatatgaacacgcctggtgcgtttccggatgttgagaatgcgcggtctggcgatgaggagatggttattttcccgagctatgcgaggcggctagatcgagataggatngcngcgcagatgatgtcgcaacgtg

SEQ ID NO: 3545 - DNA, 1073 bp, Emericella nidulans
agatactggggacgatgatgccatggtcgacgttaccgcagcgagcagcaaacccaaaacacgcaccgcacaagttactcaagatctcccggtagacgcgcatgctggggttgatgaggacgacgagattacctgaggtaaaatagaaggaaaggcgatcatttcttcggccgtagctggttaatcatccggcctatctcgacggcagacggccccgaggccttggcttggagaagctcaagggtattgatatcttttgccttgaaggcctcctctccagcctttacaatcattccgcatttcacccacatctcaattctttcctccgcgggtagattggtgcattttgggacgaagacggaagccagctttgtgtttccagctcctaaaatttcgttatagaaaggcttcacgatcatgtcagcgtgcatgacaccatgataaatatctttgctttactcacctcccatcctattggtgacttcttgatcttgccaatctcttccagctctccccagtcacgcttcgctactagcgctcgtagtctcaaccaccaatacgtcctctctggcattttaaagtcgctttggatcttttgtgctcgcctaccgtaccctgatctgatcagcctgtagacagtctcattcaagctcaggccaaggaattcagatcgttccgccaggtctttgtccagagcttcctgtgttttaagtaattgtgacgactcatttaacaggttccgatgtaataccaatgtcgggtctttagagtccgaaagtagtcgagaagcgagtagaagcttttcttgtttgcgcggcaagtcgctctctttcagggcatccgaaagaagcacatttgacccgtccaagggtcgatcatcctggtaaaacagatcttttagcaactcgggatcttcctcccgagcggttgtttccacaagtgcagacgccattggccgtgtattgatcatcctgaagaagcttgcgataggaagtttgctcttcaaatgaagaagaacgtagttaacaagatcgtcatctccgctctgtagagctttgtccagtgcgatctca

SEQ ID NO: 3546 - DNA, 1926 bp, Emericella nidulans
  unsure (1)..(1926): unsure at all n locations
caaaaagaatttcacgttgaaacaggaattgattgatgtcgcatccctagcttgccatcctgcgcaggattcctgggcggcgtgaattaaacagggtcgagttctggaaactctacgtaccgatttggatcagcgctagtccgttttgggacgagccaacgcgaccactgtccagttccatttctccttctcataaaatatccctcgttcccggtctcttcacaatcataatccatcgtctatttttcagtcgttgtaaagacacctttgtctttttcttcttcacactctcttcacattttattatccccctttcttttcgtctcgcgcgttcattggcgaccccgtcgtcaaatgaacctgcattatcacctttctccggaaaataaggtacagtcctccaggagatccgacaactcccaacaactcagccaggattaagaccctaatcagtcctagtgttgcctcttcccattgatgaagaggtcccccgcaagataaatggtcttcaagccgtttacccatatcgcgcgtcagagtttcaccaaagccttcactcatggctatgctcaatcagtagttgccgcctcgcagtcgtcctacgcgtcgtcaaccacactcaatcatctcaccgttgcgaacccggcaaaatactctcgaactactcagttacaacatgtcttccaaccgtcgagttcttcaggtgccggcgcgaaggccagccagggtagctcgggtggtggtgatgcaggcttagccgcctactatgcggcgtggcaacaagcccagcagactggtgacgacagcgactggaaacagttgcagttgaaacgaggtcttggctggaaaccgctcacggaggaagaagcgagtaaacgaaaggacgaaaatggcctgtcccccaccgctcggtccgatctcaatcactctccgcatctcacccaggcctctgtcaatgccgatgtgagtgcaaaggttgaagaagcagtggcccgcgagatccagatacaagaagaacaagcacgggcggaggaagcgtcggaggcgcaggatgcctctgccaccgaggcattcccggacctgccggatgatgtagctgctgttggtgatatcgcgacagaagagtcccgccttgcttcagaaaggatcgagcaactcgcctgcgataagaagtttgtggatatccctggtgccttcgcagctcttcttcgagacggccttacgccgaccgttggcgcctacaatgctttgttggactcagctattgaactccacgatgatcgatcacaggcgatcccgaaggcgctcgatgtttactcggatatgcttcgtcgtagggtaattcctgatgaacaaacgtaccggatgctggttcagctcttcgtgtacgtgcccacgaccccatgaaagcgattgagtgcttgagcangaaaggtccgtttgtgaggaatggggacctgaaaggtatgctgacttcatggcttgaaaggcctttggctgaggggctttttggatgccttaacttttaacggcactgccaatgcgatttggttcgatcatctccgcattggatggctgcccctaggggagggccatgtctggatccccagatctaaagaccctccctctttcctagatgccttgttccggatgaaggtggagttaagatgtatggtcataagactttttatcttggagtccttatattttttgaggtatttttatttttcacctccttattattatttatcactaattattttcctctttattgattctttattctttctttctcatagttattataatcaccttattcttctattatcatttagtttnatgtcttctttctatgtattctcttattcacattcttcgtgtttgtattatttcctccgctactattctgttatgagattcactata

SEQ ID NO: 3547 - DNA, 1524 bp, Emericella nidulans
ctcctccctatcccctcgagtgcaggatgtcgcatctcgcgcaggagtccgagcaagcatggtccgctcaacccccgatagcttgaatacagacatccggtagtgcgtccttcggggatcgcagttgccagcttccttaggtttggagaagcatagccaggctcacgctcaaggaaattgggagcgcgaggccgctgtcatggttggttctgttgtgggggtactgtagcagtagttgtgcttgagtgtcttgataaagcgacttagtttttatcagtctacattttaatgtactggcagcggtggttcaactgtatttgactctatctatctcgcatagcctaaggcgataatacaatatcatataaagctgatacatgacaggactcatgaacatcgcggtgcagtggtgctctggtggatcacgtaggcgtcaccttccaaagattggcgaagtcacagggtatatatatctgcgctgaaacgaagccctattcaatgagacgaagcatgccattgcatttttgagcacctgagcccttgggcgttgaggttttgaagtggtcacctcatatatgcctgatgacaaagatgcgtacgaatatttcttgcatctttcccaatctgatgatatgcgtctgatattcagcatgacatgtctatgtcatatcttctcgacttgaatagttgcagcagcgaggaggccaacagggaggaagaggcgctcaatgtggctgccacgaaatgaacttgccgtcgagcatcccgccaggctttgttaagaacactaccaaaggctcagtacctgctaagcaattggccttaatgctgttgactaatatttggactttctacaataaaacaggcccccgagcatgcctcctcatttgtcgttcgacagcagtggccgtactacttctcagccagaccgaggtgggccactaacttccagagaagacgttgagatgcgtgagcggaagattcagaccctaacacaacaggtcgaggagggtcaagggtaaagtccagccaggcgtatcagcaacctgacgctatgtgccggtagagatggtgcgtcttaaagtttggtctgcgaccatgtaagcttcaagctacttgtacgctttgcgcttactgttatctcttgtctcttgcatgataccctgacaactttgcaaggggaagatcatacacctcaacttcataaaaggatctcctcctaaagcaatcttgtccgcttccatcctgttgatgcggcgagcgcgaaatctgggcagtggtttggttggtatataagtagtcgaggtctcgctgtccctgggcaagcggcaaagcagaactttgatctggctagtggtgggcgccgcttcttgaggatgggtaagagggtggatttggaccgagattttggtgtctggtgcgtgaatattggggcaacgcgattctttggtcttgatttgaggcatatttagctccgtgggttgggaagaggcagaactggttgcgaaaatcactgagagatct

SEQ ID NO: 3548 - DNA, 2118 bp, Emericella nidulans
taacagaggttcttttttcagacagtttcttcagctgcgggcgtcgagaaagcaccgcctcgcaaacttgtcgatgctctatatcgcgtttgccgtttcaaaccttgcgtgaacagtacaagaggcttctccacacgagctctaggaaattcgtcagcttcgcctctcctgtgtcctcaatctttccaatctttccaacccgcgttcagggctctgaaacttcgctactccaagtttgcatgtggaaggaccccggctaccagaaccaaagtacatccctcagttattactgcagtaacggtacagctagtggccttgacctccttactcaattaagctctgtctatccataggagaccagctgcccagtgtcacacagcaaacacctgctcctctgggtcctctcagaaccagtcgcagcgatcgtaagagtagccgagttacctgtcacatttgccaaaccaaccgcccagatggagctggtcatgtaaacgactcccagttcgctttatctaccacagtagagctgcggccctgctgtagttttccgctggtacctagctgggggctgctggccggcgccctgcaccgagcaccgcacgcaaactctgcccgatcaatcatatttgtctaatcgagcgcgctttgaaactatattaactatattgacaccatattaaactttcccttattgaggtggtgcatttaagagcaagggcaaggttcattgaggatcgagatcgaaaccggcagtacgtccaggcgactccatgacggccacgcaaatgccaccgcattccagccaaacaacaccaccacgggccatccagtaagtttgccatggtagtggtattgtaaggccccggcccacggcctaattaatgtgttgtgtgattaataaacagcaatattctcctgagccctgggccctgacgaataatggtgggtagccgtctgactcggaagttggtcactcttccgtctatggctcccgtcgtcagcatgactctttcagagcgttccctcttcgccctttcgagccatcgttataccgtaggtacatgatgacctcagccacgtaccgaacaagccattcaggtgatgagctctgaagactccaggcaactcgagtgtttcatgttcctgcaggtttctcactacattttggaacgcgcgttttcctccaccgcgtggactctggttatgacgaatacttgttgttgctcgaccatgatgtcacgtgggtcgatacaatctgggcaattttcgtaaggacagaagagcacgaattgttaggcatctgctacttcaaaaacgagcaatttcgccacttaagatcataatcacaaactgtgccattaatcaagggtatcctattaggtgaaacaacgcctgtccaagcgtaaacacacagataaaagtgacaattaggttgtatatgccaaaatatccctgtaccgcattaatcattcaaatcgtcgagtactaaagccgtgagatcctcatcttccgcccaatccactccgctgcccacaataatggcgcttgcaacgcttttcatggtttcccatttagctttgctctgtttatgctctgcttctagttgctcaagttgttgtttcagctcagggtcgtcgagctgctcccgccaggactcgtcgtcctcggtaagctcgagaagctcccggaccaactcttgattttgtcggtggagctgcaaattctctacctcgagactggagagcttcttcaaggtcgaagcttgcgcctcagtgaagttttccagcgccaaggacagaacatcgcggcggttgaccagacggaaaaggcttctgcatcatcgttagccctgatacagttcgaaatgtctccagggcaagcgcggcacaaagcatacataccgctcagcaggggatgttcctttcaggtgaacagccttgaggatagggtctgtaatgagcacggtgctgaccgcttttttcctcacggtatacgtagctctcgcgaaagaggagctcgcgttctgcagcggcaagctcctcgacattatttgtggagataacttctagttctaggaccgtcaataaaccaaggatgtatcacaaaagaacataccga

SEQ ID NO: 3549 - DNA, 2152 bp, Emericella nidulans
cccttgatgacggctttggcgccattcttgccatcaattgacaagccataaatcaccggcctgccaaccaagacacccttggctcccagacatagagccttgataatgtcggcacctgttcgaatcccagaatcgaagagtacagtcaacttatctccgaccgcgtcaactatctccggaagcacctccaacgacgcaatagctccatcaacttgacgacctgcgcccagttagcatgcagcgaagccatggggaaaaggaaatatgaagagagattgagtgccatacctccgtggttggaaactacgataccatcacagccagcttcaagcgcaagcttcgcatcttccacatgttggatgcccttgagcacgagcggaccatcccagtgtttccgcaagaaggaaacctcgtcccagacatgaggcgtagtggatagaaccttgctgatccatgccctagatgctccaacgatatcgtcttcgacttttgaaccgctttccttttcgaacttggcgcggaatactggatctgagaagccgacctggttgccgattccgcggatgaacgggatgtaagcattatcgaggtctgccggcctccaggacagagaccaggtgtctagtgtgaccaccaggacagaatatccgttttcttttgcccgtttcaccagtgaaagggtgatatcgtcgtcgccgggccaatagagctgaaaccacctcttgccgtctccgctcgcgttcgcaacttcttcaatagagctggtgctcgcagtgcttagagtatacggtacaccggtctcagcgcatacctcggccaaacctgtctccttgtccgggtggaatagcccttggacacccacaggcgccataataaggggcgtcgggtaatcttgcccaaagagatttacactgatgtcctgcttatccatctacagagaagcaaacttattaaataattcagaggtaggacaagagacaggggcatcaccaaccttcctcagcatcttgggaattctgtaaatgccggggacatcagtcgttccatgtcctacgtagacccaacagcgaaggaatcagcttacagcttccattggcgaaatgccagacgattactgtccatcgtagccttctctccagctcctccggcgacataattatacgcgatgtcacttaaagcctttcgggcctgctcctcgagtaaacgggcgtcggtgctgacatttggcttcaggcccatcaaggcgccttgcccgtaaatctcttgctggtactctccgtagttctgtgacatcttgaaagcaacgtgtagaacgagatatgtctggatgagatcgtatgagggttaaggtacacagagcgaaccccgatgtttggccttactccacttcctgctagacacgtgagggggagcctgctgctactagtatgtaagattgactgattttcctgccgaggtatgcagctgagtgtcagactcatactctaaattctcatgatgatttcccaaaatatttctttatttttatcttacctatcaaatagtagaatctgacaaagtaattgattaactagaaaaagagctgttgatatatgccaaatcgtgaaaacattcctaaagcgtctaatatatagtacctcgtggcctggggcttgttgtcagtgcgatcggcgaaaatatactctgtgcatgcttctgtgaactcgcccagcatgaagctatcaacgcatccagtggtcttatgcgagttcatggagtgatcagacgcgaactctcggtggtctttgagaggtatgaggcctgatggtgcttcaaaaggcagaccatacaccgacttagtgctctatttgctctcagtaagggagcgaatcaagaatctcacattgcaacaaacgatcaaaatattcgaatctgagctagtcggctttcagatatattttgtgaaacctcgtactctacatcggacttacattcgtactattcctcctaatcattcctgagagggtctgcacaataaacctcggtaatttacatgtattgaaaagacatcctaaaaggtgcttcactaaatgtggtcaaagcctccatggaatgggggtgggactgccccagaatatgctctttctcaaagacttgatacacaagcgatatg

SEQ ID NO: 3550 - DNA, 904 bp, Emericella nidulans
taagcgctggctaagacttctgaatcgtccaagaccaccggcattcttcttagaggtaccattctcggcgtgattgcgtcgatcttcatcttcttttgacactttgcttgcctcgagagctgccttcaagtcgtcgtcttcgcgccgttgtcgatctttgagtcttgtctcaatctcttttcggcgctgcttctctttttctttctcggccgccttccgctccttctcttctttgacccgttcttttttagactgcaaatcgctctttcgcgatgttagcggagccggtggtgtctcagggattggcggtatagggggtaatgaagtaagaggagcaggatcaggatcggaagagggtcgactttctgagtctgtggtagtatgttcaggatgcgttgatagttgaggtgcggttggagctcgtttcaagcccgtgaaacggtcatggtcctcatatgtcgggacctgggatgcgctgtgggcgtgggcaagtgttgccgaagaggaaaacccgttttgcttcagagtagacgcatttacttcaacaggcggctccgtgttctcctgctcctgctccttcatcacggcctccatggttgtctcctggtagaaaagcacatacgcacaggctagccctggtttgtcaccaaagaagttgcgtacatagttcttatccaccggctctaccatttcatcatcgaaaagcagccaacctctatcctgggtcttgatgatcgaaacgtagtgtccatggtaaggaccaccgccgatgtgtacgaccaccgcatataactcgtaaagacgatcgggatcctcagcatcatcagtcgtgttgaagagacgaaggtggtaggggtagacaactctatgaaagagtttctgtagtcgttgcaggtattcggta

SEQ ID NO: 3551 - DNA, 2035 bp, Emericella nidulans
ttatggtgtaaggtgtgtcttaagaaatttttataagaagtcgagaggggggggattgggtttgaaaagggtgtgcgccctcggaggaccaaggaaattgtttttgtggtacgggcttttccacgcaaagaggagaggggatgtattttcttggcccaccaattaggttccccggccgggagctccccttcttgcaaaggatggcggttggctccaaagggccaagacgggagttaaaaacactcagtgtcccatggcttttggaaaagtgttttagcacaacacccttttcaaggttcccacaattaggggtatacaaattaaaggtccctaatggtggggtaaacaacatctgaggttttgtaggggggtgccctctgcgcaatcctttacaggatgtcagtccgtgagagtattcttaaagggtggtgaaagtttatgctggcttgcaaaaaattggctcttctatggcacttggcgaaggagatgcaaattcgtagaaactaatgctgccctctcttacgagcagcaaggtatgtgggacaaagcgcagcaactctatgaaaatgcccagatcaaagctcgttccggcgccatgcctttctcacaaggcgaatattacctatgggaggatcattggctcatctgtgctcagaagctacagcaatgggatattctcagcgactttgctaaacatgagaatctgaatgatctcctcctagaagctgcttggcgaaacatagaaaactggcagagtgagaataaccgagaacagctcgagtctcttgtgaagtctgtctccgacgccccgaccccaagacgaactttcttccaggcgtttatggctcttttgcagttccacaacaagaaagagaacatccaggagttcaatggtgtttgcgatgagtcaattcagctgtcgatccgcaagtggctgcaactgccgaagaacataacaaatgcccatatccccattctccagcacttccaactcttggttgagctgcatgacgcgagccacatctgttccagcctctcacagaccaatgagcgtaaccttgacaccaagtctgcggagttgaagctattactcggaacctggcgagaccgtctccccaatttgtgggatgatattaatgcttggcaggacctggttacgtggcgacagcatatctttcaactcatcaacgcgacgtaccttggcctgctacctccccagactaacaatgttgccagcaactcctatgcctaccgtgggtaccatgaaacagcctggatcatcaatcgctttgcccatgtctcccgcaaacaccaaatgcccgatgtttgtattgcccagctcagccgcatatacacgcttccaaacatcgaaatccaagaggcgttcttgaagttgcgtgaacaagccaaatgccactaccagaatcccaaggaactcaatagtggtctggatgtgatcaacaacacgaacctcaactacttcggtgcgcagcaaaaggccgaattttacacgctcaagggcatgttcctcgcaaagttgaaccatgtcaacgaggccaatgaagcatttggtgttgctctttattacgatttgaggttggctaaagcgtggtctgaatggggtcagtacagcgaccagagattcaagaacgatcccagcgattatgagctcgccagcaacgctgtcagctgttacctggaggctgctggcctttacaagaattctaagtccagaaagctactcagtcggattctttggttgcttagcttggataatgatgagggagcagtcgcaactgccttcgagaacttcaaaggcgacacacctgtttggtattggatcacctttatccctcagctacttacaagcctatcccaccgtgaggcgcgcctgtgcaaagctgttttggtcaagactgcgaagctgtaccctcaggctctgtttttcttgctgcgtaccaacagtgaagatatgcttaatatcaagaaacagcatgaccagaagcaagagaagctagcacgagcccgggggcgt

SEQ ID NO: 3552 - DNA, 3157 bp, Emericella nidulans
caccaagtgtatatcgaacatagcggtgctggtgttggcaatcgtcaataactagtagctcagaaaaaagtcaatacccagtgttgagcgcacagtcctatcaggtatagcgcatagtacagttggcagcttcgtgtctgtcatagaacgccaatttacgtcgctaagacgcctatgatgttggctgctagtggcaaccgtccctcatgtgcttcaggcgggaaggaggtaccaaagaagctgggtagtatctgggccgttgggaaccagatcttcaaagatgaaggaatgaagggtcttttccggggcggagcgattcgggtcgtttggacggcaatttcgctcagtatctatctaagtatgtatgagggtggtaaattttttctggagaagaggaggatgcgaaaggctgaacaggatacctagatcgtagatttgaatatagtattagattttgttcagtagagtagcggagtttttatactttaaaacataaaggtatcagatgcaatggatagtaaagggtcaacagccagaagaaatagccaatgtcaaacaatcatcgattgagtcgtgtcggcatccaagtccataatcattcaatcatgttcatcgtcaagcatgtacaactgaagaaaaggtagtcatcatccaaaagtcgtgagcttcttcaaccaacttggcctctttggcggttcaccgtacgaacgatcacggtcgtacctcatccctctgtctcgctcataatccccactcgagctcgtcttcccatgttccctctcgcgttccctttccgcccgcctcgcctcacgcctcctggcccgtatctcttctatttcctggtcagtcaggccaggatacttgcttcgtcgcctcgactgcttcctcaactcccgacgcgcctcttcatctgacgacatggtgtggcctggtattggctcgtccggacctggcggcatgtcgagcacggtgggcacaatgggaggcggctcgggcggttcatcggcttgcgagtctacccaagaggaagtcttgtctttgcgtgcgccgagcggcattggggttggttttgtgggatcagctgcgcgggattttcggcggctgcggctggatctgtcggcttcacgatcgcggtcacggtcatctttgtaccgatggataaaccggattcgctcacgttcgccttcgggctcgtggctatcgaggtagaaatctcttggatccctatcgtcaacgcgggaacggtgccgtcgctgcctttcgtagccgtaaccggggtaatcgtgcatctctgcttcccgctctcgctcctgctggcgtctgcgttctcgtcgttccgctgctaagcgagcttcttcctcccgtgcttcttgttcttccctacgaatgcgctcctcccgagcggctcttcgtgcgcgcctctcctcgcggcgccgctcttcttcttcccgaagctgccgttcttgttcttcgcgctcgcgggctcgttcttctcgacgagctcgttcttctcttcgacgtgcccgtctctcctcgccttcgcgacgctcagcctcacgtagctcgtcagctgcagcctgcggagcctggcgtgacgcacgccgtgctctgcgtgcagttcgtcgagcctccgcatcctcgacctcggtgtcaggaaatgcgccgacgacagcagggtcggggccaaggccaaatccctcgccgtccgaggctgggcgcgtagagcgtttccgtcgttcatcgcgccggcgtcgagcttcgtcacgttccgtctcagttgcgtatctgctgtcgtcatcacggcgggatcgagacttgcgacgctctggggccggaggttctgccttggtgcttcgtcggaaagacccaagcaagcccattaaaccggtaggctctggtctcttgggcacggtgcttgatcgcttcacacgacgttctctttctcttgattgtgaagcttttacaaacgcgatgtcatccgggccggagaatacttctgggcctctttcatcctcgcgaagctcttcggggttagatctcgactagacgatgtcagaggggcgatattattgaaataggtgatcttacccgtcgcgctgagtctcgtccagatcgcctggagccagaatgccttgagccttccttcgagggttggtcgacgtcttctctatttaccacgactaaatcttcctcgtcaagggcgtatgggtcgagagcacctaaggttattagaaccctgccattatgataaaaaggttgtacgtacgagactttctccgctccctatgcctttcatgctgggaccttgattccttaacgcccatcatcttcgccactttatccggcgcaacatcatccagatgcccgctcgcatctatttcgaccgactgttgtttagatgaccgcttggcagcgtgagcagcagactttctggcagaattggtgcgagaaggctgtggaggtgtgccaagtatgaagtttgagaacgccatgccgcgactagccctaacttctcgccgtctgtccttgtcggatgccgaagatctctctgcttcgttctcagattccctcgcccttgactgcttactcgacttagacctcacaatggctggcgctgcttccttcttgctgggcctggcatcccttgtctgtgacttcttaggaggcgtggcaccccagaagccccaagtggtagcaggtgtgcgctctacacgagtacgttccttcttgacaggcttctcgggtgtcttagggttaccatcgtccggttctaaggcgccgctagccatcatatcttcagcggtgagaggttcttgtggcggcactggctttttcgagctctttttgctcttcttggccatcttctcaggctttggagcaggcgctggttcagtctctacgtctagggccttctcacctccttcgggtgatgcatcaggttctgctggagtttccagctctggctctggctttggctctggctcagggtccgcttccggcatgggcttcaactcaggtacagccttctttaacttctttaacttcttcctttcggactttgtgagtgtaatcggttctgactccggctccggcgcaacctctggttctggttctgctctgcccagggccggttcagcttcagctccagcttctggcc

SEQ ID NO: 3553 - DNA, 3403 bp, Emericella nidulans
aacttccccgagtccattactcagcctgaaattctccaagagatcagccaggccaacaatgacccctcagtacacggcatcctcgtccagttaccccttccccagcacctttccgagcatgcggtcacctccgctgtagccgacgagaaggatgtcgatggtttcggagcgattaatattggagagctcgccaagcgtggtggtcgcccgctttttgttccttgcacaccgaaggccgtaatggtccttctcaaggccagtggtgtcgacccagcgggcaaagaggcagttgtccttggccgcagcgacattgttggaagccctgttagctaccttctcaagaatgcagacgcgaccgtcactgtgtgccattcgaagacccccgatattgctagcgctgtaaaaaaggcggatattgttgtcgcggcgattggtaagacagagttcgtcaagggcgactggatcaagccaggcgccgtcgttatcgacgttggtatcaactacaagcctgattccacgaagaagtcaggacagcgtttggtcggtgacgtcgagtacgagtcggcctcccaagtggcttcaaagatcacgcctgtccccggtggtgttgggcccatgacagtagctatgcttctggagaatgttgttgcttcggccaaagcatactttgagaaacagaaggagcgacatatcaccccgctcccgctcaagctggccaccccggttccctcagacatcgccatctcccgctcgcagtaccctaagcctattactcaagtcgcgtccgagatcggtatcgcatctcacgaacttgagccgtacggtcatactaaggccaaagtgagccttgaagtacttaatcgtttgagccaccgccgtaatggccgctacatcctggtctgtggtatcactcccactcctctaggagagggcaagtcgacaactacgttgggtctcagccaggccctaggtgcacacttgaaccgtgtcgcttttgccaacgtccgccagccgagccagggtcctacgttcggtatcaaaggtggagccgccggtggaggctacagtcaggtcattcccatggatgagttcaatctgcatttgactggtgatattcacgccatcactgccgctaacaacctccttgccgctgcaatcgagacacgtatgttccacgaggctacccagaaggacgccgcgctgtacaagcgtctcgtcccagagaagaagggcaagcgcgagttcaagcctatcatgttcaagcggctaaagaagctgggaatcaacaagaccgaccccaacgagcttactgaagaagaaatcaatcggtttgcccgccttgacattgacccttcgaccatcacttggcgccgtgttctggacgtcaacgatcgacaccttcgcggaatcaccgttggacaggcgccaacggagaagggactaacacgtgaaactgggtttgacatctcggttgccagtgaatgtatggcaattctggccctgagcagtgatctcgcagatatgcgggagagacttggtcgtatggttgttgctacctcgaaacggggagagccggtcacttgcgacgatatcggtgctgggggacgcttgcggcgctgatgaaggacgcgatcaagcccaacttgatgcagagtttggaaggtacgcctgttctagttcacgccggtcccttcgccaacatcagtatcggagccagttcggtccttgcggaccgggtagcactgaagctggcgggtaccgagcccgaggaggaccatgaagccaagactggtttcgttgttacagaggctggtttcgacttcaccatgggcggagagcgcttcttcaacattaagtgtcggtcgtctggtctttctcctgacactgtagtcattgttgctactgtgcgtgccctgaaagttcacggtggtggtcctgagatcagccctggagctccactacacgaggtctaccgcacagagaacaccgagattctccgcaagggctgtgttaaccttaagaaacacattgaaaatgcccggcagtacggagtccccgtcgtggtagctatcaaccgcttcgagaccgacaccgaggcggagatcgctatcattcgcgaggaggccatctcggcgggtgcggaggacgcagtctccgccaaccactgggccgagggcggagccggcgccgtcgacctggccaaggctgtcatcattgctagctccaagccaaaggactttaagctgctctacgatctcaacggcagtatccaggagcgcattgagcggatcggtaaggccatgtacggtgcggagaaggtggagttcagcgaactcgctcagaagaaggtcgacacatacactgcccaaggcttctctaacctcccgatctgtatcgccaaaacacagtactctctcagtcacgaccccagcgctgaagggcgctccgactgggtttaccgttcccatccgcgatgtacgattggctgtgggcggtggatacctgtaagtcctgtccctaagttttgtcacatagtttcgactcaccgatcattactaggtacgcgctcgcagcggacatccagacgatccccgggctgccgaccgctcctgggtacctgaacgtggacattgaccccgagaccggggagatcgacgggctcttctagaactactattgatggaattctcggcgtgattatagttggttttcacgggtttacgacgggtatggtagcattgttgtgaggttcatttcaacttatcgaacctatcgagttgcaaaaacatcggggtagttacatcttcaacaggatcggaacatgaatatgcagaataataattgtcttcttaatttacggtttgtctggtctgcgggtggtgcgatgcgaatatcaagtactgtatagagtaggtacactatagatcggtgccccgcagaaggcgaccaactccccccctccggctagccacgcaaaggaaatgtccgatgatcgcaagttcgggctacagccggcggaaaatttcttggtgccgcgggaaaacggtcgagtggcctcctaccccaggaggagtaaaacgtgaatatcgtctcacaaggtgacggagaccgtgcgacagactgacgggaaatctctcgaaactctgatggtgttgcgctgcaatggcaccgtagacggagaaatatcgcctccaaatccgccatctgcactccgcatgaaccccgtccaaagtttggagtctggaaagtcgcctgcgcaacgtcatcaaccttatacccatctaatcctcgttcctggccattttctgattctccgtacccctgtaagctccatttatcaatcaggaatcagacagatatcaagtgtagtcccttattctcattattgatgtgtgttatccaa

SEQ ID NO: 3554 - DNA, 1089 bp, Emericella nidulans
ccttgactctccgactttccattctaagaagggccctcattcggtaaacagaaccgagagatcagtgactctttgacaggcgagcctccaaaaactgacaagcagaccgtcttttccgacctgatccaaggcgacctccctgcttcggaaaaggcagatcgccgattgcaagacgaagcccagctcgtgattggtgcaggtctcgcgacgacaggatgggccttgactgtagggacgttctacctgctcagtaaccccaaagtgctagctcgtctgcgacgcgaactagacgaagcgatcccagcgcgcaatccagagaaccccagcggtgccctcgaatgggccgagcttgagaaactcccgtacctaacaggtgttattaaggaggcagtccggctgtcacattcgaccacttctcgcaatgtacgccgtctgccgaaacctattacgtataaggactgtgttatacccccgcgcacgcccgtttctatgacgattccatttttgcatctcgatgaagacatctaccctgagccgaaatcgttcataccagagaggtgggtgggataatcctaaaacgacgaatggcgcccctcttgagcggtacttcgtcggtttcgggaaggggaccaggtcgtgtctggggctcaagtatgccctccatatccaagtctagtggtgtttctgtgctaaccaagggaatgcagtctcgcttggtgcgagctatacctcgttttcgcggccttcttccggttcttcgactttgagttgtacgaaacagatttctctgacatcgagctccagcatgatttcttcctaccattccccaaatgggattcaaagggcgtccgagtgtttgtcaaggagcggagtgcttgaaggagcaaatacattctcatgaatatctatactactctaaatcaacgtcaacatcgtcgtgaaaaatcacagtgccccaattcggccgattgaacctcttccccttgggcttcgccaatccatccatatctttcatctcctgctcatcaagcacgaaattctggctgagattcttctttatacgcaccgggttcgtgcttttcgagataa

SEQ ID NO: 3555 - DNA, 1108 bp, Emericella nidulans
ctaaagaccttaatagatgtaaagagcttattaataaatttaaaaatacacaaaaaacagaaacctatattaataaggatattatttttaataaggggcatatattattatttatagttaacagatattgcagtcaccatattatattgttgcctaattctgcttaatgttaccgccttcgagcggggtaatgatcttttagctcctggtggcctaaccaccaacaagaagaacacatcatgagatcggaatcataaaatcatattgcgttttacacaagcctactagatactgggaaggataatactataataaactatatacatatttatttaatgtatataatatttatttctaggcaagataactggtcaggagtacagtaaatattcatactaattaaataatctaatatagctgacttatcaaagccttctggcaaaagtttggggaggaagagaataatctcttattgatattaggcggggagcttttgactgcgctggctgactaagatattacatagctttatcaagcctcccagaatcgcagcagcaacatacaatgagatatatatatattatattcagcctaagtactatgcttaggatagggggggggtaagagcaaggcacataacaataatcctatattttagtagtttttatattatctacttaattatttttctttaatatattagttcttttttctattaatgtatattatctatctaggcagcagtagctaagattttctagttatttaatttatatttccaagtaacctttttaaaaatactttataaatttactaactatttatcctgctattataaaatacaagtaagaataaaaacacatatattcttaatcttaatattgacctagggatctattagtaataatagattgataatagtaattattattagataatttatgtataaggccaggattcctgttatagcttagctagtttttattaaataggtttagaattttctattatttaatttaatttataatcttaataggtcttcatagtaagcatagaagtttaagagactaattaaaacctacctggtagggattaaatacctttttat

SEQ ID NO: 3556 - DNA, 567 bp, Emericella nidulans
  unsure (1)..(567): unsure at all n locations
aaagaaattatcagctatcaattgttatcaaggcttatatagcaaaagtggaaaccacattacgtaggctcgatggaagaaggtcaaatgctgatgcaagtgtaaccgctgttcaactaaaggccctaataaacatcgacaataaccagacgcctgtgcccaaccaaaccaccaagtcgcaagaacgcccagacaagagaagctagagtaagcaaaaagcgaagcatatcgaagcagcacgaaagcagcacaactaggctatatagtaataagtaactttgggccaaagagtatgcaatgcaatgtcatcctcacacacggacaatagcgtgatagggcaaagaacgagacatgacatctgacgggctaatggttttaaaagagtaggtaacaagaagatggcagagtatcgaagtacccaaagaaaaaagtgctcagcactcggtgaaaattcagatcatgcttgggcctttaacggacaggacttnctgtactgccgatccggccactgggcttgcgaacgcccttggactcgccagtcactcggcgggaactagaccgaacctt

SEQ ID NO: 3557 - DNA, 2293 bp, Emericella nidulans
aaggtaagccctggaactcgagatgttcctttacaactggaaaggagaaaataggagttattgggcacgctaacactagttgaatagcaccgcaacacccccgagaacaacccgtccattcccttcaagttctccgaacagaaccaacagctcatcgaggaaatcatcgcccggtacccccctcaatacaagaaggcagccgtcatgcctttgctggatctcggccagcgtcaacacggcttcacaagcatcagcgtcatgaatgaggtcgctcgcatccttgagatgcccccgatgcgcgtctacgaagtcgcaaccttctacacaatgtacaaccgtgagccggttggcaaatactttgttcagctttgcacgacggtacgctgtatcatttcgcatcgtaaaaatgtgtgatcatgactgacaaatcctcaagacaccatgccaactcggcggctgcggaagcgacaagatcgtcaaggccatcacagaacacctcggtatcaccccaggccacacaaccgaagatggcctgttcacattcatcgaggttgaatgtctcggtgcctgcgtcaacgctcctatggtccagatcaacgacgactactacgaagacctgacccccgagtccatcaaggagcttctcactgcgctcaaagaatcccgtaccgccacctccggccaggttaagatccctgctccaggccctctatccggcagaatcagctgcgagaacagcgctggtctcacgaatttgcacaaccccgtgtgggatcccgagacgatgatgaggaaggacggtgccctggacggggaggcgcagcaggcgcaataaacacataaagagcgagaagaaagaatatactagtttccttgttgggttctttttttccgttccgcgcgtttccccttcatcccgagctggttgacggacaaggccatcgggtgctggttatgtatgtatagtatgttgtttctggtcttgcattgagggaccaggagcttcgatagaaggtttagtacccaatgaactcttacctgtcatgctcatattcgatctagctacagtctgctattcccagtttttcatgtacatcaggatgcggatgcgaaacatcctaatccatacacagtcccaccaatcaaccttgcactccaagagagggcgataaaaatcttcgtatcctgacagacctggagctccaagacctggaaaagaagctcagatcgcattttcaacaaccatagccggcccctgacaagtcattgtctcatcctcggccgcctcctcagcatccaacaaagtcgcccgcccaccccgttcaacaagaactttgttcccgcgccgctcctggaaaacattcacgtcgatcgtcatcttcgccagcagatggtaaatatgcacatgtctcgtctgcccataccgcctactccggccaacagcctgaatcataacagagtcgtagtcatactgcgtttcggcaagaaacggtgaaagaaaaataacgtggtttgcgcactgcaggttcaatcctgccgccatctcattacccagattcaaaatgaggactttggtatcaccgaatccctccttttggaacttctcgattttcgagcttgttttctggtctgttggtgtgatgattatgtgttttattcctgcagaggatagggccattgaggcgaccgtcatgaggtccgggaattggacgaagaggagggcgcgctcttcgacggggaatttggtgatgatgttgatcagcgcctcgagctttgttccgccgtgtttggagcttcggtcaatatccccgttactatccccatcgctggacatggcagttggagttgaagtagtgtcgcatccaagcgtcatagcgttaatgatattaaaatttttgccagacccgcgacatccctcgaccacgcattcctccttctcaagtgttttctgggtgcagtctgaatttgaacagagggcatgaccgcacgatccgagaatgttcagtttggataaaacgcccggctgggtttggcaattgtcacacgcagggatggcctgaggattcgggttcgtttggatctttcggacggctgtgaggaagcgaagggctcgtttgcgatggacccattcgacgaccagtttgcggagcacgcctgtgacgtctcggagctctgagtcaaattctcgaggttctgtgggtttggtagggaggagaggctcgctcttgttctttttattctcgtcttttcgcgtgagagtaggcttagccttcgacttctgcttgtgtctggg

SEQ ID NO: 3558 - DNA, 6542 bp, Emericella nidulans
cggaattttgtttccaacttggctaccagtaaaagaccaaggacaagtcctgggatcggccgcctttcatccacagcacgaatcaaagcttgcagaatactcatccctaacttcctaatttcaggcccacctctgtaataactctttctggaagacatcgatcatggctgcagtggcgctgctgaaatacggaaccagcagtctacacgacttagcttggccagtcagcattccctgtttaagaagcaagcatatggagaaaaccctcccgccagtacctttggatttagagtattgtacgataacaagccggctcaacgaagctcaatctcactaccggtatgctgctccggccacaattgcccagaaataagggtgaacacggctatatgcacacctggcttctttcgaaagctgaattatgaagatctgaaataattgaaacggatcgacgggcgagatgagctttgctcagaactaaccggtgcttcattagttatcctggattgtatcacagtactgaactggaccaaccacctcgcctcaagtacaatcacgcccttcaggctctgggtatatattttatcctatgggtggcaggttattcccaaagtactctgcaaacacaggatcaaaaaattctctgtctgatccagctacgtatcgatgccatggttctccaactatggtagtcaatagtcactgtcgatcggcaatgtaagctctgttgaatattcaggcatcagacttattaagtatttaagagctctaatttccgttattagcttgccacattcaatagagaatacgtcttctggcctacatatgaagtacagcatatccacaaagtgtttctcggcacagtagtcacaaagacattgccattggtctatcaaacagtggtctcgcttaaatgtagccagagcccgagagtgctttagtgctgctcgacaccttgtatgcgattacagaatatcttacgggtggtgtatcatacgtgtacgtaccgtattcgtacgaactgatccctcgatttcggccggttctacgctcgacccggaagctctcatgttcatcacagcttcaaaaacattactagacagaatgcttcatccatcactatttcagcactgattaacctgacatggtgctcctgctgcggtccaactgaccccaagttcaatgtcggtagggtgagttgtctgggagcttcagcctcttatagtaataaaaaacgagcaccgatgcgtgaccaagaccctcgacagcctcctctgtttcgagagcccaatctcaaggacttcttcttcagcctcctggtcagcaggatatgaagctgaggatcaaaactcactcggctggctatcattcagagcctcacgaggtgatgattgtggctttctaggtgaagtgagatatccgtattgtggaagctctgttgccctgcagaaacagcgggaatcgcggtcggctggtcaacgaaggcgcagggaagaaatcaccgtagctgtatcaaatgtcagcagctaggatgaccgaggtcaggtgcgttgccggggcacactgaaatggcggcgcacttgcatacagatccaagtccctctccttctgccacgcctcttgccacaccctacttcgcataacttgcaaggactaggctgcttgtgcattccataactaccactaaagaaccgccagtctcatacatgaccatcacttctttttgttctattccagggcgtgattatagccctcgagaaacatgatcgcatcatatctgctgatcgatgttctgggggtctgctgtgcctggggagaagctccttcgaatatccaaggtgaaacagttactcacggtgcaggtggtcgcgtccttattttgcaagacggctggcgttcggcgttacgtgtgatacaggcacggggtaacctttttcgttaaacatcctatatttaccgcttgttatcttcgttctagatggagcgcgagatgccaaataaccgatcgcaccctaatcatgacacactggcgcgttctcgccgctgtcgcggcgatgaattggggtggtttcttcagtatgactcttcttgataccctgcaaacgcatactcaaaccagtttctctagtttatgacatcccagcatcactgtcgacgccgttatcgaagcacctctcgctttcggaccatcagttcgcattcttagtctcagtcctctacactgtctacgcaattcccaacaccgtccttccctttctcacaggcccggcagtgcaacggattcggagagcgagcggtgctcttgactattacatcaagcataatactcggacaactgctatttgctgtagcagtccacactaggctcgagttaggaatgattgctggccgcgtcctgatagggattggaggagaggtggtaggtgtcctcggatgcgaaatcatcacgcggtggttccagtgattgccctcatccttgggagaccgccgtacgctgctaacagctttccgcgcttgctacagagataaaagtctttccctggcgctcgcaattaatctaggtgcgggaagactaggcagcgtcgccaacacagctattatcccccgattgatcgagctgtacgatgtgacatcagcaacctggatagcaacagcgctctcccttggtggcgtaactctaggcgccagctatctcctaagtatcacgaaacgcagttacgattactctcaggtcggagatgagaataaccccaaattcatcgttccgctatcgttccgtcaatacccctccagttactggctactggccctgatctgcttcctgagctacggctgcctgaacacgttcaccaattccgcacaacgctttctagccacgcgttactaccacggagatcagcgcgcagctggatcagctttgaggtacgtacagtaacggtctcctgacagaagcacagccgcaaattcacaagccttctactagcatccttttcgttctctcgggctccctcgtcccttcgtttggcttcctgctcgattgcttctcgtccacaaactacacacgcgctttgatcactagcaacatattcctactttccgcacatgcaattttcttaaccggtgtgagcaccagcccaaccctcccgctatgtctcctcggcacggccgacgccctatttagcgtctccttctgggccagcgtcgtgcgcagccttctccccttgtctcttcccaccgaaacgcatccccaaaacacgcctcttctaaagactgaggacgggcgcacagagcaggtctatgtatcaaatacggtctcagacaattccgagtcggccagagaaggttttgcggatgaaagaagggcaggcgggcccgccgtgcgtcgcagtgatgcagtacgtacactgggcctaggaataatgtctagcatgctaaataccagcacggcggttattcctgttgccctggcggtgatggagaatctagctgggctattgggactagaggctgtgtttttgacgctagcgctggcgggatttctggcgactgtgagattggcgtggatctgagaccatgtctgcatcgtgctaaacgatctttgtcctaatgactcacgatgctatagatttatgaagatttgcagttcggaacagtgatgatgatgcatgggtgagtatatggtgtctggccatctaacccaccattcttggtaatctggcagacttcgaaaggttctagagtggctctgtttgctttgaggttttgatgggtctgatgctccaaggttcttgtataatttcctatttgcgccttttcctccacgcaaacttagcaatgaagtcttcgtaaactcgagtaacccatattttctgacccgcaagcctttctaccgtgattagcatcaagtagactctagaatattccctcacagtgttccctttgccgtcgtcccgtactcaataagtaatcccagcacatctttcccccgccaagccgtgacatagtagagcgcattcctcccatcaagatccaggtgccggtatcagcgctctccttaagcagcaatcttacaacgatcctgtgcctcttcgctgcagcatattgaagcgccgttgcgagtaattgctgcgcctctggcgaccgctgagaatctgagaacctcacgatcgataagcctgaatcagctgcataataccaacgaattgggaggttcaggaaaagtataagccgggagtaatactgagtttgacgggcttcaagagcatatgttcagaccctggggcagggcaaaagtaagtgtgagtagcggaagagaactgggtttgactgagatagaagagaaacaacgctcgtctcgtcaaaagggcgagatatatcaagttatcgcaagtaaccagtagccggctggctcgatggagccggcatacgtggaatgatatcagctcctatggcgttgagcccgtatgtgctttccttatctgcagtgtgcaagatcatcgaactcattggcagtaccttattcttgctctggcccttggggctagcgtttacctgtgcgaagttcaaaggtagttacacccctcatgatcctggatgtgttgtctgagtagtttgcgggcttccaacatgcttataatggtgtatgaacccgtttgactcaccattcgtctgcttcatatagcaaagatcttctcttttggccagcttaaagataaaaattaccttcagagcgttttgcagcaaaaccatgttgcgagagtatcaggtaatggggggaaagccttcaacgactccaacgcctttcaatttccaacaacaagccgagaaattgcatgacctcttttccagaaaagggcaacgaagtagaaccgcttttttacattcagaaccaaatcttttctctatcaactcatgagggccgttggtattggcggtgcggtgcgtttctgtgtcttccgagtccgatttatccactttcttcaaccaaccctttctcagaacctgaagcagctaagtcgtgcgagcaattaagagggttaccggcaatagtctgggacgtcttttgtgtccggatcgaatgaactgtaggtcttttgctcagtgtgcagtccgcataacgaaccacaactggttgagaacccattggatatgaccacgtatatgatcagagaaaaggatgcgcgtcaaggcatcactatcggaccatgaaagcgcattctactaactactcacgcactttattccatactgtatcgccaacagacctcctccagaccctgatggggtcgacgtggacacggaccactacgtaccccttgtgccccgtacgttgcagcattcagattagggctggctgtggtgtaactgacaactcaggtccagcgcaagtctcccctcttcacaccgctgttctgcctcgatatattctccttacgtccctccgttgctcctctaactatgcgcaagcttccagtgcagccgttatgcaggaaacgatccttataaccggtgcgaccagctcccttgcaacacgcattgtccacctcctccttaccaaatactcttcctcaccccaagacccaagtctggacgagaatggccatgaatatacactgcttttaacgtcccagaacccatccaagatcaaactcaaactccctaaacttacgtcgaacacaaacatcagcatcagaatcaggaaactcgacctgtccaacctctcatcagtgcatgatttcgctacagcaatcagcacagacgtccaatctggcaagatcccccggctaaggagcatcatttgtaatgcttcctactggaacttacgcggcgacggagaattaacagacgacggacacgaggggacattccaggtcaactacatcgcgcaaacagccctcgtcctccgtctcttgggggcctttaatcccgggtcaggagggagtattgtgcttctcacctgtgatatacaccgacactggcccctcagaagcgtgcttggtcgagcacgtggcctggaaaagtatccccctggaatcccggcagatctaaacaagctggttgaggttgaatcccagtcacaccctcagtctgagcatcagtctccagagcagattctggaagagctacaggagaaaccaacgatcaggaaaaatgaaaagcgtggagtatatgccaagcggcatccagcggtacacaaactcgaagatggctctgattatgtggatgtatgcattgatccgcgcttaagggccgtactttctatttcctttctcccttaacattcgtcactctactggcagggggtgtacttgcatttctttgcgtaactgaatgggcaggactgccctaccttttccgatttagcaacccggactttttactcaaagcttgaacatccccgttgctaaattctccgtccgagctcagcgcaccttgttttctctcttagtgaggagcagaaaaaatcctatcctgcttgggtttatatttcccatctcccacttattatttatctccgactaattataactcatatttctatt

SEQ ID NO: 3559 - DNA, 2271 bp, Emericella nidulans
ggtaatatcagagacagaagagaaatctaccttgctttcttcctctcagtagcccacagctgcccgcgacaatttggctcgccgcaaagacaaggcaccgcattcggatccagcttatcaaccctctccattccggggttatagtcgaaggtcaattctgtgccgggtttgatttctcttaatgcgaagaacgccaaatcataaaggtagtcatcgccgtgggtacgggagacgggaaacatacggcagttggggttgcaggagtggttgatgaagcgggtggcggcaccatagttcgccccgtcaacaacgtaactgctttcgtcatcaacaaggaagtcgagactaaagagataggaaggggcgttacgcgtgttggcgattttttcgcgctggtcggccttggaggttgtgattacttcaccaagatatagatctatgaattggccagcgcggatggtatcaagcgaacggaggcctgtttgcttggttagtagatcagtccttttttggtccaattttgcaatagcagggtgcataccaaagccacgcgctccagtgtggaaaatctccaggcggatagtgcgtcccaactggacgacgcgattccagcatttctcctcacacccgcacagagaattgcattcgaagatcatggatgtgcgcttcatgaactcaggccgaaggaccatgaagcgcggattgtctcgggcacgcttgtatgcaatgatacgttcttccgagtcctcttcttgtgcaagacactggcatctatctggtaggcagatagtctcgcagctacagccggattggaattccttgctgataggtgctacgccctctcggagcttgtactcgttgatgaactcgaagcctgtggtagctttggcgagacgcttctcgtccgctttggccacagtcactgctggacctttgatggaggctagtttcttctggagattcttgcagagcaagtctatcacggggcgtctattcttctcagttaaaaaggggcctggtgtgccaatgactaaagggacaccagcgcgattggttttcctagcagctggatatgcacccctcattgcgcgcctttcaagagcatctgttgggtagtatttctccgacatacccgtaatctcgggagtcttgacttctgcatccgggagccgctcggcagaatcaatctctttctttagctgtactgatggagatggaatgactactctcagggtctccggcgctgggcttggggcataatggcctgcggctgagtctgtgcctgaacttgaagctagagatggagctgatgctgggatttggcgtgcctgacgcgcagcaccagtaccagggccggcaccaactctcttaaagggcccggacaggctatcatggccaactgggtttcgagaggaaacattggtggttctggtctttgctttttgagggtacgcaactgcacttgcgtatgaagactctgagccggactcggcggagtctgcatctgactttctcttgaaaggaattgtagagttcttggtgtgaggagagggagaaagagtgcggtgtgcaagtgtctgccgcccaagacttttgataagagggttaggaatctgaaaacggtcagcactgacccatcgtccagggagcacgataaaccgataagttcttggttattgtggtattcagagataaaaggaagacgcgaaactaactccaagctaagttaacgtgacttacccggggttgctcctctggatcagagtctatcgtgaggtcaaccagcatgtcagttgccataagcttgatagtgggacgccaaaaagtaaataggagagccaagtgcaagagagatagagggggtcggcgaatcgaaatctggagatcacgagcttgggaaagccagacatcacaacagagctcggtttctggtgttttttttgtcaggactcatgtggttcaattcattgttaactagactgcattgggttagtggatcttcaggttttaatcaagtgttgtcacatggtttcactactattcaatatgattaatatctaagaaattagagactcattttcctggcattgattaattgatatgtaatattgacgactgacattaaatctgtaaaaaaaaattcaaaaaaatcttggcgaatactatgtcaattcagaagccctcaagtcagagcaacagtttgcttaaatagaatgaagcgggctgattggaagtttgaaccacctagaaaccgcccggtattttccttca

SEQ ID NO: 3560 - DNA, 3790 bp, Emericella nidulans
  unsure (1)..(3790): unsure at all n locations
ctgccgatatacgactcactatagggatcctttatcttggtatgagctcttgtttgccaatgaagttttcagctcgtttgtactaataattatgtgaaggatacacctacagcgaccccaggccatccctcttcaagtaattatgaacgcagccgtcgaatactgttgctctgctaactcgacaaataggcttttctcgccgcttgcgtaaattaaacaaaccccacgtcaatcgaacagacatcttcctacggtcgaatttcatacggcatgatggctgaaagcggattgggcgtttctgttatccctttctatttgggtgattgcagcctgtcatccattcatgtgtatttttaagtattttatttcaagtatgttgggacaggttaattagagcacttatctctggttcacttgtctctcgatttgagataccagtggcacttttgtctcagtagctttgactctgccattagagcaatgttggaccgcttcgcctgagcatataacaagcactcatgataagaacagtcctttagcaagcagtgatagtaagctatggagattgcagcattgtttgtagttaaatacgtnaaaagttattgctgagtgatctttgtcattgttactactcggnctcggcccgccaagcgaattctttttgggacagaaatcaagagctgaacaactaagcatcagatattacaaagttacatctcacgaagcacacactgagtgacaagctctcacacccgaaaagttcatgtttggcaatgatggcttgtcgtcatccgtggtggaaaccatagcgggattcacggcaggcacagcaacaacactttgtctgcacccgctggatttgataaagactcgactgcaaggtacttttagtccagccactttgcccctcagggtacaacacgtctaatatcaggctgtacacagtcgaccgaacctcatcgtctcgagtcggcagtttctctccgagtcatccgcgaaatcttccacaaagagggcggactcatcgcattttaccgcgggctaacgcccaacctcatcggcaactcctccagctgggcgctctactttctattctacgacaatgtgaaggagattctagggagttggcgatcgcgctccaattcaaatggctcgcagcagcgcccggagccgctggaagcattcgattattttatcgctccgggtctgcaggtgtgtcaacaacagcagttagaaaaagcgagtcaagtaaaactaacggctatgtgtatggcataggaattataacttccatcctaaccaaccctatctgggtcatcaaaacccgcatgctcgccaccggctccatgtcgcccggcgcgtatacctccttcacagcaggcgcaatgcagatacttcgctcagagggagttcctggcttctaccgcggactggttccgtcactcttcggcgtcagtcacggcgcactgcagttcatggcttatgagaaactaaaatttcatcgagcgaacgcacattccgggggtctgcaaagaaaagagctcagcaatatggatttcttcatcatttcaagcgtctcaaaaatttttgccggctcaataacgtacccgtatcaggtgctccggtcgcggctacagacgtatgatgcttatctcgcataccggggacttcaggacgcaattgtaaagatctgggctacagagggcttgggagggttttataagggtctcgggccaaacttgtttcgtgttttgccaagcacctgggtcactttcttgatgtatgagaataccagggcatatctatcgaaggtgatgtcgaacgcttgatgattgcggtatggagtcgtagcgaattcgggtgaacgtgaggcagctttctcttgacatactgatttatctgtaccctaccatatccaatctcaggactcctttgttcagcatttatacatagagtatatacaattatttgcagtgataccgcgtgcggcacaaacacacgaaattctaatgtcataggaacgccctgttctatgcaagtcattcatcatgacgttggtccataccggctatacattagcaagtaaaacgacaacgcacgaactgggaaactgggaactggtatcttggtaaactggaatgcaaacataactccaaaaccgaaccaaggcgtcaatcacagagatgaatatgtcttactcgtcaccgcgcttctcaatgaagtatgggtcctcgttatcctcatcgctgctggatgcgcctgtgtatacggaatcttcgtagctcccacgacgggcttgatcatcagcaccgggacgccggcttccatcagcactaacgttcgtcttggaggacggagagattctgcggtccttcccacgccccttgatgcccttgttactattcttgtatagtcctgcaaaatattcccacagtttccggtcttgagggctcatgtgttcgccatcaatcatagcggagaacttcttggttagggcctggagcgtctgtgtatggaatttgttttgatgcgactaaacgcataaattagatcagttagctgaccaagtcacacaaagttagactgtgagctaaccttgaggtttccaagctgcgtgaactgtttgccgcagccctcgagaaggcacgtgaatggctttgtttttaggtgggtgattttgtgggcgcggacgttgcctcgctgggcaaagcgtttttgacatacgtcgcaggtgaaaggtttctctccggtgtggcgtctctgatgggtctattttcagtttattcagttagtcccacactcgttcgttttgcgcatactactgtagcttaccttaaggttacccagctgcgagaatcgctggccgcaagtaggttctttgcagacctgttatcattagccacatgccctctgcggatttgtcttactcataacctacaaacggcttatccccagtatgggctctcatgtgtatatccagatgggtcttctgagcgaaactctttccgcagtgcggcagagtacaagtgtacttgcgcttcttcgccgagcgggattgagactcatcggcaataacagcccctcgatgatttacaactgctgacatgtaaccctgggcgaagccatttcctcctccatgggtcaactgctgcaacggcggtagcgactgcaatgctgccggctgcgaggcttccttggcttgaatcgctttcatcaacacatccacctctgttgagaactcaacttcgctcgcatttgggttcttctcatgagcagatactccgttaccaggagctgcggcgaccgagctggattgaggtgcagctctctgctcgactttagccacggaatctccggacaccctgttgacagcgtttctggcaggtcggatgtccgggatcggctgggctaatggaggctctgaggcgaggcgcgcagactgcgcgttgagcgagtgattgggaacgaaaaaatgctggtatcctggatgctggtgatggtgattgtgatgttgggggtgttgtggttgtggttggtggtgttgatggtggtgatgagtattgagaggatggctgaagctgtatgtcgccgaaggtggcttggtggtacggcaatggaaacgatgctgtagggttggtgtaaaaggagaagttatggttgctgttggaccccagcatgcgacgtgaagcgtcagcaccaacggcattgccggggaactcgttcgatacaggctctgcggtgctcattgactcagttggatgcaagactagttgctgttgtcgtccggatg

SEQ ID NO: 3561 - DNA, 2384 bp, Emericella nidulans
gattctgaacactgtccccgagctattttgggtatctatctacgacaacagcgcttccatgtttgtcccgctaacccagccttcctctaccatgtcctcttcaacctgcagcagctccttaggcgctgagcccttgagttgggcgagtttctccttctggccttcgatagcggctgcgattgcttctttgcacgttccatcgcgctcctcatcagcacctccgtctcttcgggctaatgcggcggcgccccgatagtacgtttgagcattccgaaggagagtcgcgccgtactgttgcgccatgctgtgttcccatggcgcgaaaccgagtctccacctgctcatttcagcatcgcctctcgcgaggtgaatcttgggtaggttttcggcatctgggagtttggacgctttggttaacatgtctatggctgtggataatgcttgccaccggagaccaagtgactttttaaggacttctgggtcgtggggcggttgttctgccgaggctgtgttgaaggaaataaacgcatccgctttagcgcacaggccttctgggtccgctgatacgtccagatctccaaatgaagacaccacgacgccgtgatatgttgccacgtctatacgtccgcttcggtataagacttcatttagcgcagcgttgaatctcgcccgggacaaattcacttcatagtggcggttcgagccttcaacaagtgtggaaagcttcttctggagggaatctctagaatactcctctgcccatttaagcccaacgcccggaccgtacgccaggagacagtccagagtaaaatgagcatataactgagcaatagcggtatccacacgcatattcttcttcactggcttgacaacaggaccccatggatcctgctctgactgctgcgactcaacatccggactctatcgcatctgatttgattcctggacctgctccatacgcccaccctcccaagactcatctggcataatctgctcatgcatctcagtatatttcagctcctggagcacaagacatcgctggaacagctcgatcgcctcctgcaagaactttgcggcttggttaaggtcttcctcgaccggacgcttcgtatcagtgacagtctccgcaagactcgtcaacacctgcgccgtgttgaatagtgcatctgcattgtcctgctccaataccagggcctcccggtgcgactgcaaggctacgctcaaggcttcaaccagcgggattgacagttgcgctgcaagtcgtggatgctgcgtgatctcgtactggactctcgctctgtgcaaatacaataccagttagcgtttacatcagcatatactccatctattttccacactctgcgggaaaatgcagtatcgagaatacgtgaacatacttgttataagctagatcaaacgcagtaggatgtttttgtagcccctcatcatatgtagcaatggcgcgcataaagaagcgtagcgattttgctgcatcgccggctcgccatttctctcctgcttcttcttgttcaactccgacagctaggaattcatctgctgttcgaggggcctgctgctgcgcggactttttcttcaactttgtctccttgaggaaggactttggtttcggcattataacagaacggcaccaggtacacaatgcagaaaaaaacaggggtgtctgattcagcctatatgaggcaaacagtaaagggcagctgagaggcaaagaaccgatgaaataatgccagatgacgtgcaagtatttttctgatatcccggccaatgtcgatagtgcctgccttgatcccaccgctttaccgaccgcttactgtccgcggggatactctagactgggaaccaataactagcatcggcatgccgagcctcacctacaagattccgatttactcggcatgccgagcgggtccatatgaaaaaaccgaccacccactatatccacatctacgcccacgagtatttctggctagagaaaacgggagcaaaaaatgacctacgcagggctcgaacctgcaatctcctgattcgtagtcagacgccttgccaattgggccagcaggccttgttggtttactagctaagacttttggcattatagaagagcactgtacaatgggccgaaaatcgttgacacttaatttagccctaagagttggggcgactgtacaatgcatgtactgattagattactcaagtagtaatgctggctgccttcacagccttggcctttcaagcgtatggtaatgattgaatgatggacagtctcataacgttaaaaccgcgaatatgtaatctcttcctatacatgtgttaactcacatgcagcacatggaaatgaccaaatttactcatgcctgttcaac

SEQ ID NO: 3562 - DNA, 1613 bp, Emericella nidulans
catcacatacaccgggatctgaagctgtgacttcaacattaccagcgtcgacaggtctggagtaagcccaccccaaagaatagttcttgcatagtctgagtccaagtcaattgctatgcacatcaccaactgtgcccaatgatgcatgaagatgccacaaaaagaacacgtactcgatgcgatcagccccggcagcggcagcgagaaaggcggcatcggaattgaagcaggcaatttccaaaaggggcattcgctggggcgttggattattcatagctgcggcattcatgtagatatattgccggaatgcttcacccttctggggttgacgctgacagcttaattggggattatgtaagggatttgtcaccctggaaatatgactgtctaagactaatctggtagtcatggcgcctttttggcttagcggtatattttcccgataggctttaaacggcttgaggcggcacgggcgctgaaccagaaagggaaaaatatcgcccaaatcatccaacaactagctacatgttagggcccatacttcccagcgcattaaaccgtagaccccgtcggagggagtatggagatgaaataccagatccgaagaggaactgagttgggaggacacaggtcatctttcggtgtaccagccttggtgttaacgtgtcgcacaaataagcggccacacattggtcaggtctctccaggatctattacaaagcaatgcttgtttttcctctattatttgggaagctccataggattcatccatggaactgaaatcatggctgcgggcacagccgagtgatcgacagccataattacccttgaagtcttaaagtgaaccatgttttggccccagcagggaagaaatcttcactaacccacttcccaacacgcagctgagcacataatttgtcctctaatagagcacggccgctcgttcattccgttgtgaggcttgctggccagtaacgtcagcagagccccaattttgatagtcatggcatctgctagtcctgtcatacggagaattagaaaaggggaacgcccctttcttttctccttcctccacctttcttgctcatggtgtgtggaacggtctcctggacccggagcttttaaagtatcacaatgagatcatcgctggttctcgaaatctcccggctaatcctcctcatattattatcattaaacgcagcatcagcagcagacaaccgaacatgttatatggtcgatgaacagacaattgccgtcgaccatgtgccctgcaccacaaagcacaccacccactgctgtcacaaaaatgatatctgcgtgtcaaatggtctctgttggtcccaaagaaatggcgatatggttttatcccgaggcagttgttccaatgtgaattggagtggagattgtgtatctgcaagaccatgtggtatgcttagcctgctctcatccactcacctaccctcatcctacagacgtgccatgctaatctctgattcgtaccacagcccgcgcaaatacatcaggcggataccccgtcgttaacgccgatatcgccaatcaccagttttgctgcggctccgtcttaagctcctccgcgtccgatggaatcgagt

SEQ ID NO: 3563 - DNA, 3749 bp, Emericella nidulans
gtatatgcagtgcccagggaataaaagacgcgacggacttataagttgaagatatctacaagacattatttagtataagtgcaatacagaattagttcccggtcgcacgaggctcttgtacctccgaagccattggcatttaagattccttgaactccagatattcgttcccgcagtccacctgtcatgagacaggacctcagtgcttgatgggttggtacgtgattggaagaggtcaacttgaatacatgaatgtttttgccatgccctgccgttccccttggcaccagggagctagaactaccggaaaatcgcagtgtttttgcttgccttcctgtatagagcctggataccccaggggacgatctactgggccagagagccggaagccggtccagccctaggattggatgtttcattttaaggtaacggtcagtcaccatgtatatacatctcgggcgtctcccgctcgtacacggtggccttgacttctgccttttcatacacccgtaagtcttaggtacgagcctagtgaagtctgtcgcgtacctgctttaacccttgagcaagtagcaggcctgtggagctagcacctacgattatgatatgcaaagccatgtcgggagagatgaaagtgaatagaagagcgttggatactttgagtgaaatcatacagagctgggagactgcctcccttttaactctgctagaacgatcaacaagtgctattctcgtaagtcttcatcattatgaccggggctggggtctgtaagtacgcccaggaagctgataggaatacgccggtcctaatacgcgcagatcgtataactaactcaagctctaaatagagctggtatgaaccgcaagagtgctattttctccagcccgaagcctttgctgtaagcacttggagtttgactggcgcaatgctctaaccataagctgatagttgtatggggcgtattcgtagagaaggaggcccagctgcgtgagcgtatccgtgaagctttcagtatgctaatgtatcctcacttcccttttcgttgtcaattcttgggagcctcaccacatccaagtacgctgcgtatgcatgtccagactgcgtaccttgatagcatgtggccgtatgactagagcttttgggagtacatccagtgtctagaatctcttcccaagttgtagaagtacgtcccatcaatccaattttagttgttcctgtcctctaattagcatctgatgtatcagagccgtcattccacgtcaaccacaagctgggttgcgcaggagaggtcccgcttactgctgtgcactgagttatattggaacagatgcccaattccatactccgcacgagttatggcaactgttgctgcagtagctaggttgcaagtgccgtttttcttttagtttactgggctcaattcgacttatcacaggatagactttcatgtgatggaaaaatctatatctactttgtaatcagttgccacgcggtgttgtcatataccaatgtcaagttcatatcaagcagcacattaagaactttcaagtttcggtccaaaagccatcctgtcccagctcgctacttggcggaccgtctttgtacccgttgctatgaggttgcaaaactaggcacgtagctttagtgccgcgttttctgtcagtatcaggataaacggagagagaagtggcccgacagtggattaagaacaattctgttcgtcccttctataagggccaactctcagatcgaagcagatattctacaaaacctgtttaggttatacggtattccgcccgtcagtgcccatttccgagtccctgaaccttttgcagcactccctcactgattgatatcatggcgtcctgaagctttatcagcagatacatattaaaagccagctgactatgcatattgtgtatgttggaagccaaacaattagtgtgagcatagtgactgcttgcttgcctgttagggcagtggcaagcgaccatttacgttcgtaaaacttttaaactcatcctatgccatatcgtgagtgattcagatggcctcaagagtatgacatgatgcctgccatggccagcacaaaagccgcatgaagtatacctaggcaagcctggaaatgtgagggcagaaccgaaattcatcttgaaaccctaagagactcctgccatggtgagtatacatatcacaacctcactccatctaattcttacgttaccaaatagggaagagagcggatgatcatgattgaaatcaatgttattaccagtgtagtttgctactagcaaacagacgcctccacttccatgcagaccagccacaccgacaagctcatcaatcgatctaacctcaacgcatggttccttctatatacatgtactaatggcactatacgagcagccattgtcgacacaactcgcccttattggaccctctccacgttctcagcccttccctcggctttcttctcctcatccccaacagtgacagtcgccatctccatctcatttcgagtatcaacatgaccaccaaccttctcgttctccatatctcgaagttccgcatcgcgattgccatacaaaccgatcttccaccacggcaactggaataacgcatccatgctctctagggtcctccccttcgtctctggaatgctaagccaaacccacagcccgcccaggatcgtaacggccgcaaaacaccaaaacgtgcctttggggtcaatcccaccgtggctcgtgggcaggagcatgttcgggacagcgcgcgcgttcccgtactggttcgcaaagtgcagcgtcattgccgtgctcgtggccatagcgcggatacgcagcgggaataactccgccgtaagcaggtactgcatggagttccagccgagggcccatccaacaccagaaatgtaaatcatggcgattgcgccacgagatgagcctttctttgactcgggaaggatgtaggagtcgtcgacgcccatttccggggtgtctgtaaggaaggcggcaatgtagatcatcgagatggcctgcagggtgatgccgataagcagggcgcgtttccggccgattacgtcgacgaggaagagggcgcagatcacggttgctgcgagcttgacaagcccaaagactgcggttacgaggaggccttttttggagcctctgatgcccagcagggagaagaggtcggtggcgtaaaccgtaatactgccagcaccggaccagtaaagtccagaatgcatcagacaggatgctcccatgtaaagtaggtgggtgagacgaataagatgggtcgacgtacctgtgagagaatctgcaccatagccgcaaggtacaatcggtatagattggacggaaccaagagggcttctttgagcacgcccagccagcccaggcccatcgtggcttccatctctgcttcgtgtgcggctcggatcccgttcagctcttcgagaacgtactcatggtcagttgggaggccgcggagcttagacaggttcacgagggcctcctcatagcgagagcgtttgatcaagaaacggcgggactcgagttgcaggaaagagagcagcaacatgagcccgccgaacatgatatgcaggcttgttgggacttcctggcatcagatgggctggtcaccactaggcctatgcggttaaagttcaataaaaaaggaagtcagtcgcctatggctcatgtgtagtagcaaccacgctctcagcgcccccaaaaacaacgaagtc

SEQ ID NO: 3564 - DNA, 4776 bp, Emericella nidulans
tctcgataagtcctccctccctttttgtttccaccgctcgatatttttcttttatctttctgatttgaatatataacataccccatatcccatggctttaactcacatcagttgctggcttttggcttttttttttcttaacacttcttacatggttacaggtaaccagataatgatttcacgcaatcaggcgtgtgtatctagttagcttacgcttacgttctcttgtttctacatagtcttgatattagcttggcgtcaaaggacgggtgggtgcctgagctacttctctctctccctttctctatacatattcctatcgctgctgctatctcttcctgcattggtgggctttgtattctttattagtctattcgatcggattgttcctagtgacctggatcggactgataggctatttctgaatttcaaattgtacttctatttggtacctatttaactaattcttgctcttaagagtctgatatatcatctagtttctgtatcgtgcttcgtcgtaaatctgcaatgtagtctagtgtaacttaaaagcagacgcaccagaaacaaagaccttacgtctgtatgtgatttgagcccctagcgccataactccaacaattgttgaagaccataatagaatatgcagaaaagtttctctagcgtaattatcatgtactacttaatcacctctctcgtcccccggaagaacatcatacccctgcacagcctcttgagattgattctcatgattgacaaccaaaaaggaaacaaaaacaatcgtcgccccaacccaatataagggcgttgcatactccccctgcaaaaaaatctggcccaccagcgaaaggggtatcgtcagactaagccccaccgtcacaacgagcggagacgtaagcagcatcgcatacgcccaacagatatcggaaaggagagaggagagcgcgttgatgagaataatcatccagactctcctggtattgggtaaggcgaagggctccacaccagttagatgcaaaagcacgaaaccgggccagagaaggaacatgttgaagacaccgactaggccgaagaagagctgcatgttgacgcgggactcgtcgccaacttgtcgcttcagcacgaccgtgtagacgccatacattacggcgctgaaagcggccatcgcgtcgcctagggcgatctcgccggcagatttgggtgggaatgtgcttccactgccatcacggccggcgctggggtcgtcggttgcggagaggtcgacgcgggatatgaggattatgcctagcagtgaagcgatgacgccgagaaatttgcggccggtgaatttctcgacgcgcagcacggcgccaaagattagggtccatacgcctggggcaggttattatttaagattgtgtgtcttgggttcatgtgtaggttaagtaacataccgctggtagatgtcaggattgtggtgctgccgacggtagtaaattgtagacatgccattgagaagtagtttgcctagcatttaaaatgcagttgatcaacacatatttcaggaaggcccatgttggcaccctatcacttacagtaaactagtggaactccattagccattattcaccacaatgaaagcacggcgcaaaagttcgattgagggaacaactcacccacaacaaacaaaaatgaaagctcagcttcgcggtctccttcagacctaatttctcttttctatgacctttacccacactacctctcctagaagcgctccacgctccggaaccatcatgcccatgcccatgcccaaaatcggcgccaggaccagtgccatggtcatgactgagaatgcgctcagattcagcgcttgaataactggaatcaaagcgttgtagtagggtttcaaatgactggatctggtataatttccccgcacggaagagactccagagcctgctggagacgattgtgaagagtggcaggatgaagattgaggtattcaggtaggtgacgaaaaacggtttggagtacgtatcatcggcgaagatagtctgtgagaaggagtgtgagagttcttgtttgagaatccaagacagttcggacaaatacctacactagccagaaagttcgacgcggtccatagtatcaccactaccaggagcagacagatgcccagggtctttctcgcggtaccggctagtccagagcgtcttgcgttcgacggagtctccattgagatccaaaaatcctgagggtttgcgctcagatgagagtctggagctgccgatcgtgcgtgagattgcgttatcagtcgcaatcatggaggtggcccgctgcggtgagatacgcagcgcatgaccacggcattttcaacgactgtctgctttagtaactagcacatttatattaataaaagactactctctaagtccacagccatatttataaatttaggtttatatatggagatggttctagaggtcccaaggcgtgggtggtccaccgaactactgcggggtcacggggagtccccttatgcacgcaatcactgctactccgtaggtgttgtcaaatagtaatgatgatattccagactcctagtaaaccgtaactataccctcatatagaccaaaacatcaagagcagagcgcagtcgaatcatccgaaccagcacgagaaaaagacgtggaagtgtcaaacgaggaacgccgaagttggatatacagatacgctcatggtaaatcgcatttcttcaagcttcgagcagacagtgtctaaagcgcggcagaacaaaaaaaacataccttaaccatcaaacaaggataagagtgtagcacggtagccgtaatcagcaggcgcaaccgtcgcgctcggtagtatcgtggatgttgatcggatcagtgtagtcgccaccgtattcttcagcttcttcttgagccaaagcacttcgagcaatgactatggcggatatcagcaatgttccagtgtaacactactgaaaagaaataccttcaaaagcttgttcgacgttgacagcttcctttgcgctagtttcgaaatacggaatgtttcctttcgactggcaaaacgtcatggctcgcttagaagagatcatccgcttgctttcctccatatcaattttgtttccaataacaacctagaaagcacgattagccgagcgcaaccacggcccgatgacgacttacgaatgggaaactctcagggtcgcgcggactagcctgaatgagaaactcgtcgcgccactagtcaagtgcctcaaagctcttggagttattcacatcgtaaacaaggacacaacagtcagctccccggtagaatgcaactcctaatgactggaatcgttcttgcccggcggtatcccagatctactccacttggttaatttgtgaatggaacatgcggtaccgtgaatacgtgcctgcatcgttactaggcggtcatcgactagaacttcctttgtaagaaaatcggcaccgattgtagccttgtagcttccgctgaacttcttgttgaccttgttggggaatcggtgtgagcggagaaacgagccctgcttgggaataaaaggtaactgacatattggttcatcaaacttgttttaccgacaccactgtctccgagaataatcacctagaaatgataaaagtcagctcaggacagcggcgtagtggcacagcgggtaaggtaccttcagcatgaccttcttccgtgatgacatggttgtggctggatagtcaataagagcgcaaagcaaaattttagaaaagaccgataagagttcccaaaagcgagagattgtaggctcaaggaccggcgccgacgcaagatgataatcagttgggagaggcgatggtgaggagtagtagttgggatctccgctcctgatgatgaaagcggtgtgacgggggaggcacttaaagatatgaggggtcgtctgttttagccttattgcacttatatagtgcagcctgccccatcgcggcggtttctgaccagagcgatcttagaagattgaaacctcgcttggttgcgccctgcgatgcgtccctgagcattatctttaccccatgaccttctgtcgtgatttgtatggctcactggagggaagagtacgcggcggcgttggcagctcgtgatcggcgtgagaaggccaacgtcgctatctacaatgcttgtacgcacacctaagtatccaattcccaatggctgcccagccgactgacttttccgtttgctccagatagccagctcgccgatagaacggcgtcttcaatgatagcagtttcggatctccagagcgacgctcagcgatcggcactttctactccagtcgccgatcctagacagcagcagccgtctccggcatcagggccctctccgcaggacataatactcgcaattcgggcagatttagccgaagcgcaacgatctcgctcggaactcgaagaacagctagcacgcgtaacaacagaattggagaagttgcgaaggaggaacatccaaaacggcaagcggatcagttcgatggaaagtgaaatcacacacctgcagcttagactgaaggatagggatgaagaattaagagagaaagcgaaattgttggaggtatggtaccctattccttggtatgagttttatggacggaggagtattgacacccgacgtatatggtcacaagacgagatcgccactttgagctcagctcaaatgctgagagcgtcgaaccgctcagaggagaatcagactgatgtcgtggatggccggtggaaaaga

SEQ ID NO: 3565 - DNA, 3181 bp, Emericella nidulans
ggctgcaggagtggaaggtgactgtcgcttggagtatcgagcgataaagcgaatcaactgcgaccacacctccaaaaactaagcgctatcaagaaatgaccaccccgcgaagacaaggagcgggctatggaaccttgcctatagtaccattgctaaggtgcttggcacgcagtgctacggtcgtgtgaatacgggaaaagctgcgatatgagactcgcttcccgcataaattgcagtctggctgcaaacctcagtctggactcaacccatccccgactcgttcagccttgaccttttgattgaagcctgacttatcacggcctccgtaactgggactggagagacccaactcttgcttgctacgattatggccgacacactaccaaacgaggccaagggaccagatcccgacgagacagtcaaggaatgcgtgccaggccgcattgagctccagtcgatgagccaagaagaggacaagagaattctacgtcggatagacctctagtatgttgtctgcagctgtggtccgacttcgcttatccctgataccagcctactccccattatggccgtgtcatacatgttccagttcctcgacaaatccgctatgagctttacagccattctggggctggaggaggatctccatctcgaaggaacggattattcctgggcgagtagcatttactatttcggctacctagctgcatcctaccctgcagccattctgctgcttcggttccccgttggcaagatgatttctatatcaatgtacgtttataccatggaatgccacctcttcagtcgctggcataatgctcattgtatcagcattatctggggcaccgttctgatgttgatggcattggccttcaatgacaaaggcctcatcgccgttcggttcttcctaggcgcaaccgaagctgccattgcccctggccttagtatcgtggtttcgatgtggtacaagaggtccgagcagccctttcgccacggcatttggttccaaggaatcaccatcgccggaatttttggtgggctcgtggcatatggaattggtcacatccgaagcattgctccctggaaggcagtatccctttatatctgcgcagttgccaaatagcccctggctaaccttttgactaggcggtgtttttgatatttggcgccgtcaccattgcctgggcatttgttctcttctggtggcttccggacaccccgatgaacgcgcggttcctcagcgcagacgaccgacgcaaggctgtttcaagggttagcgagaacatgacagggatcaaaaacgataaattcaagctggaccaatttgttgaggctcttcttgacatcaaatgctgggctttagttcttattcaaattacgggttcgattcccaatggcggcgtttccaacgtaagtccttcgggcctgcagcaagccctaacccttacacttttactcaccagaaccttgctaataaatgccaccagttcggctccattataatcgaaggcttcggcttcagcacgctgaatactctgcttgttcagattatagtctacgttttccaaggtgtgctcgtccatctttccaccgcaggctgttcatggttcgaaaacagccggacatactggatggtctggaacagcgcgctctctattgggggtgccgcaatggcccgacagattacacccgataatgtctgggcccggtttatggggtactgtcttgcaaatgcttatagcgtcaacttcccgttgacgcttgccatgtcaacggggaatatcggcgggtttacgaagaagactacggtaaatgcattggtatgaatatgcatctcatatcagcctctcaattaaagcctctgttgacatgatttatcagatcttcatcggctactgcgccggcaatgttgccggcccacatctctttttcgatgacgaagccccgtcgtatccttcaggatttctagcaatgcttatctgcttcggtgtatcgttagctcttgcccttggcttgagatattatcttatctgggagaatcggcgtcgggaccgtcttggacctgtagacaccgacgacgccctggaggagctggatgctgccgttcttgacaagaccgataagcaactcctggagtttcgctatgtttattagtgtggatttaggcggcagtaaggcctgattcatcccgatattcttaccaacttccagccaaaatatgctatcgcctagccccccacttggggtcagcctcatagtcctgatataagcaggctaaatccaaagcagatgcaattgcatgactctaatcgccttattatgttttcagtagtgtttgtgcaatggcttgaacaagatgattggttaaaatagagcaattggagccccaacagttagatcctgtttgacattgatattctgaaatccatcactgcaggctctcttcaatcctttagttggcatcgagttgactcggctaagaatattggaacaatgacaataatatcttaattgtgagactacataagccctgtgtcaatggcttgtaggggaacatggaaaatgccttctcagactcaacagctaatcttttccctattaattaacaagtcagcagactggttacatttatttgtatgagtgctttggccacattttgggttatcaaggactcttcatgcatctagattctggtataaggactacctagaggaacttgttagctttgccgtattagctatgcagactatcgctccgacaccacagtcaacccgggagaaagagttgtgatctttgtcaccactcattatcttccgaacttttggcagttttgtgtccgagaaagaccattcatggcatggaaaaaaagtgaaatgaagaccactgaaaaagcctatcacagaccataaaccgaccaagctctgcctgtagcagaactggtcattctgatggaaacgaaggcctgtttacagaccacagccttatcggcctgaacgaactaacaagcctttcttaggaatctttgaggtaccttagcaattttttgcaacctgataaggtaacatataagactctgataccctattcaggaataccattctaataacatagcgctttaccaacacagcaagatactaccgtattcaagctatttatactaataaacaacccttatttaaat

SEQ ID NO: 3566 - DNA, 1012 bp, Emericella nidulans
caacctaactaaaacgctcctctattgacgtcgaggaaattcaggactcagaagacgagtttcttccatctccaagcgcgatcctgaatgaattcttggtcagcccacctcggaaagggaagcaaagtaacaaagatacaaaacagaaccggcaagaattgcctacatctaccatcccctcaagcccgagtccaaaaagttcgttggcgcgtgattcttctctgtctccaactcgacaaaccaagaaatcaagaacaatccctcccgtctcagtgaaaagagacctccttgatttaggcgagcagatcacaaaagctgtccgtgcccagccacgacgaaaacagaattcaaaccctgtcactaccggaacgcgaaaacgacctacctggcatgagaaaatcctcatgtatgaccctatctatctcgaagatttcacttcctggttgaatactgagggacttgctcttgtcgatgaagacagggaggtcgccatcggctttgtccgtcaatggtgtgagagtaaagggatctgttgctgttttagggtcaagaagacttctgaacgtttttagacctgttggtaacttattttccctccttttttatcttttgatttggcttaagttgagaatatgcggtagcgttgattggttggtatctgtcttcgagtttgtcttgaaatgttgcatatgcggcgttatactacacctggaatacccttagtgcaatggaagttatatggtcgcgtttcgccacattatttgatattttgaggtatgcgaaacaatatgggattacaaacaacaaggcatcaagatattaaactgcatggaccaagataagtaggtataaaaatgcacaatagacctctggtgccgaaggaaagatgggggtagatttgagggagggagggaaagctcactcaaaccacatcctttcatcaaagtctgcatcgtcatttgactcactaccttcttgtgtttagcggtaaagatattttctacattaagga

SEQ ID NO: 3567 - DNA, 2560 bp, Emericella nidulans
atcggcctggcaagtagagccaaccatgtcccagcgcgattcgagttcatgcgagtcgtccgtggacagggaccgtttgagatccacacgtgcaggggtttctgctcgtagcatgtccgagtcgcggtagaacaccatatactctccgtcctgtctgggaatgtcaacatcctgaggacgctttctctgaagataagtcgattgcaattgaacatggtggttgtcgccgcgaatattgaagacaccctcaaagagcggccgaggtccgtcttctttcacgtatatcctcgtccacccaacaggctcccacatcccttgtccttttcctcgtcctatcaaggttcgccctttaaagaccttgtgtttgtctcgtgcgataggctcttcggtatgaactttaccgtccgctccaagatactgcacataagcatcgtcggcaataatatcatagttcggttctagctcaagttttatccgctgtttcttgtctcttatcgtaaaggtgatatcaaaatgtgaaagatggtcaacgcggtaggttctgccggcagccctgatcgccggctgctcaagggaggaaactcgtcggatagcgctaggcgtctgtgatctggcttcatctctggtaagcatggtcgaagcgattcgtacaatggtcccgaaaacttacctagtacgctgtctgtaaatagcgaaagtacgccaacaattagcggcagtaccgggttgatgagtctcatggccggtgattgaaacgaacggccgcagtagtagaatcggtgattatttccaaacgacagaatttgactgaagaatccagagagggtccacgaaaaggggcgaatgaatcaatccaatgcgcttgtttgattcattgcataccaagaccgaatgccaggcaacagcgaaagaacaaataaccgactcagctcggctctccacgggtcccaagagaatgaaacagctatgttcagcaccctgacacccttgcggctgcttcgactccgcttgaattatggaggaaataagatctcttgagaatgtcgatcggagacagggcggaggtaacggagtagatttgaggccctgccaagattggggcgcaggctgcttggcgcaacaacaggacaaccaaagacggctgaataaactcgaaagaaggagaaaaaaaacagatcagagagtggaagaaggagaaatcaagagctgaaagaggggaagagatgataaaacaagagatgtgttctgtaagccaaggaatggttggcactacgacggcgcttacagaagcaccaactagacaatggcatttatagtggcttatgcttactacgggtgtattccgcgcagccctgtgctgataaaccttgcagtcttgggtgtcgccttaattattttcagacgtagaatggtatactttgtgtgcagcaagcgcgaaatggggtattgacgctccacaggttgtacactgtacactgggcatgctttcttcttccccgtcactctcccacaatgcttcagacgctacagtcagcgttgacggtagcacaggtagctctgactgagtccatgtccgttcagatgctggaagggtatcttgaggttccgcctcttgtcgctgaaacatcttgctgatatttcggccgtcattatgctttccatcgcccgctatttcagccatatttgtcacagcaagattcagaacgcgcagattccagcccgtcctctcccggtggagtttgcggaacattggtgtggccaattctcggacgacacgttctgccagggcgtctatgggttcgtccagattgaagacatattgggggagtgatgccgagtgggatctgcgactataggtgtggtcagatccctgggtcgaccgtggtattgtagacaaacgaaaagttcgcggtcgagcaagccatcgagctttcgtttcttcgcgtagcctaggtcccagagaggtactgccttcggcgtcactgtagcgctccgtcaaatccatcctcattcggcggatcaagctagcagcaagtgacaacatctctttgcgaacagcctcaaacgtgtccaagtggccatatgagttctcaatgctaatctgggtgggtgtgtcacgagcttcgccgacctgagtaccatctactccatgcaatagtccccatattttcaccccgatatcccgaggagctccaggtccccctaggatccgttccagaagcgaagggcccatgcctggaaacgcacgaacatcgcgaattgtgactttattttcgaccgccgattggtctgatgctgtaatatgagatatgagttttcgagaaagcttggaaccaatgcctggtattgcccgtatctcccgcgaatcaagaaacctgagcacgttgctttcgcagtcccctgtcgagctataaggtggcaaaagcgtcgtctgattattcggcttatgagcactacccacgaccttggcgagaagtttggaagtcgagatgcccgccgtggcagtatagcccttctggttttctagttgacttcgaaggtaggcagcataatgagacgc

SEQ ID NO: 3568 - DNA, 2201 bp, Emericella nidulans
gattcggccatatcgaatgcgggaaaaggttggatatcgcccctcttgaagcggggtggacttatcgcgaaatggggaagtccctaatgaggaagtcgggtctagactatatcgggcattgcaggcaatgtatatgaaagcctggaaggagaaagaataccacgagggcagatgctatcaaaccagcgtggagaagtcggcgcggtgtggtgaagatttgggatttttttgtggttgatccaggtaccttacaaagaatagacacctcatgcctcaggcattaaacttcatactatgaacaaatacagagaagtatatcatgtttggcaaaggtcaagtgaaggtttacgcgagacctccaaatagcaatgctctatagttttattcagctggcaatctcagcaatctcccatacgtgacccagtattccatcttcagcaccctacttaacatcaacaccttcactggacacctccctctccctcaatattcgaaaggcctccagtatggtcttgcccatatctgcaaacgatttaaaactccccgttccatcctcggcttcccttacttccttctcagtcacccactcaaaatcccgatgctcggccggatccagcttcaccatctcctcccaccgtctctccagcgatggagaaacagtcccatcattcagcttatcagctggtagccccgcgtcatttcctatgacctcagatgcaggggtagcagccttcgcctcatgcacttcgacaataaacgtaaacttggcgaccaagtccaccgagtcaggccgctgcttcacccactcggtcttatccaccagctcgacgaacctggagacatgcagaccgcactcttcgagtacctctcgcgtaactccgtctaagatgctcccatcttcggggtcacaggagccgccgggtccttcccattggccgccgtaggagtcgtcaaaagaccgctggaggaggaggacgcggagaggccgttcctctatttcagtcccttcatgaatatcctttgttgcagtgcgtgagaagatgaggccgccgcctacaaagtgtgtatattgagggttggcggcgcgaaagtcgggaaaagggacggcaaagcgctcgaggtgcggggcacccgtataattgatcatcgaacgcatctcgaggcagttcagttttggctgaggtcgttctgagccagctgatggttgttggttagtttctttaagttacgtcaatggttctgcctgattttttcgaggaaggtgactcatgaactgtaatcagtacgagaatctgcgattcttagtgatcagaattgtcttagcacagccagcccagattatgatgactttaagaggcactccaggtggtggcttttggcctatcacactaaatagaagcctgatattggggcttacatcttcgtagtgtttttctatctagaaacgtagacaaaattcgctagggcacacagtcctaggacaaggttaatgctactatggatcaagaggcaccactcatacccccttaactacctggaagcgcaatgctcatcgttgatccccgtcataacatggccagtcttgagttgagctgcttttgaggaacaaaaaattccgcaaagaactgtccaatgcgcttatagccatcgatagcaatgaccgactaaacatttagtaacattgatcagcaaaaatggtaaaagaatgattgaatgaactaacattggtcaggtcggccaatgataaagccaccatgctgtgaactaatacccagatattacaaaagctcgccgtgtcgtttggtatagctttcgttggccaagaaaattcttgtgcaggtttgttcaggaacagtctaatatcccaatagcagtgagccactcggaaaatcgaactttgagctgactttgccataacgaggtagaacgccgcgcgctctggacatttaacaccttgtccggccatgcccaaagcccggtcaataggctggggatcatccccggtagccgttgatgagaagctctccttagccagttggcccacctatctaaacttacattctaaaaggggctgttaacttccgaataaccggctattcgagttgtgatttccgaaaaaatacctcacccgtggttgccggtataacgccgtttaaaagggcgatatgacagaactttccgccaatttgtgaagcaatcca

SEQ ID NO: 3569 - DNA, 3570 bp, Emericella nidulans
  unsure (1)..(3570): unsure at all n locations
gtccatttcattcaatactccaaaacgcctataccgagagaacaaagcttagacacagaagctcacgccaatgcggccaacccgcagccagtaccaggcattctgtctgccttgcctccccgtaacgcgtcccgaaatctgtgtgggctaaccagtttaaaacaagcatttttcatcttgcacggaaaacatgtggtctctctgtaaccaaacaatccatctcgtggaaataggatgctgaaatacgtggcggtgcaattattcgctgttccacaaaatacggagtatatgcacaccatgtcccttttcggtacttgtagtggacgggggcagcaagaatagtaacaagctaaaagctaataaacccgcataaattcgcgctatcagacagaggtacgtacgatattgcgaaagccacctgtcattcacaacttggactcggggtaatgaactggcgcgtatctattctcctttccgcacgcccgtgggtcgtctccagctgcagcatcatcagttaagttcagccttaggcatactgtaccaagcataccatcggccgacacgtgtactcgacaactaactttccgtagtaaatagtacggctgatgaggctgcaaggctacaacggcaaaatgtcagattcaatctggacgatcggacagggatataggccgccggcttaaggaatacgtatcgaggctctgcttatggctgatcatcgcatatcaccagatcttatttcaggacaaaatcgtactgatcttcatgctgatctcacgaatctcttctccaacgaggttctatctattcaagctcagtaaattttcaatataccgacttgcctcaagacccaagccctcaactagcttgcccggtgctatatccatcctcacagtttgcgaagatccaggtgacgatgccccgcccaggtccctaaaaaaccgggcgccgctcccaccacctatactactggcattccgagtgtggcctgataaggcggcgtgatcgcttgctcggcggactataaaggcttcctgttgtttggccttgcctgcactatactcggcgagtcttgttgatcatctgctgaagtgggaacgcggacccaaacaatccaccacccgcggcttgtcttgcacgtccgttcgagctcaagtgggcgggaccgggtttctatgtatgtggtaaggacacggtgatgaatgcttatcgtttcgactcgggatagagacgaggttccagctttgcgttggttgtgtgatgtaagatctgggatattgggaatggaggagcgaatggagagattgtgtgggtcgaagacaaggtcatataccgggttagcttgtttctgggatttggtgttgaactccggtaagctatttatacgggtttctgctgttgatgtcgaggtagaggcgctgagtggtttctggagaggacccagctgatgatgtatgctgtggtagatggaggggtcggagagagttgatgtcgtgctgtcgaagaggaaggtgtaaatgaatggtcggtactatcatagtgagctcgtgtgataattctaccaggaaagcaaagacttactacgtatacgacgacctgaagtggtaccgagtctgaactatgagacttttgactgtatagacgggctagtcaatggcttacctgtttctttctgcgaatctgccatctgcacgtgtattgttctcttggtgatcttttcagtcgggctagcagagggttttgatagggctcgctcctccaggccttcatctaggctggtaacctcgtcctgtaacccaataatgaacctaccataattatcaggtcgcggaaaaccctttgggcttgggagctccttcgtgtctttttgagcatttttattagctgattcactggcattgtttctcttagaatcgtcaatttgcggcgggctagatgccccactggatatcccgggcagagtccatgacgagccatatccaagagtgagatacctcacgaatgtttctgttcctgttgttatccaatcactttctttatcttccgataattgagagcttccatcacttgcttgtgtcttcgcaccttttttaggttcttgtgaagacggtcgaggtgggggcgtgcccccaacaagcggcgggggaatacctggggaaaatgaacgatctgggacagctccctgcgcagcattgaagggtgcttgattgcttgtggccttcccagaagacgcagctcgcactcttttcctccgtcttcgccgacgcggggatgtaggatcctcaccgactccataggcatttgcaccatatctgtatatccactccatccactgagatatggatacaagtgagctttttgagacagccccaacacctgagaatatgacaccgtccgacggtcgtggataaacatccgagccaagccatccgtattcagcatcgttctctgacatgctcgctgcttgagagctcccggcgcggtcgtacggatcaccgtatcgcgacaccacaagatctacgagaccttctgtcctcgaaacaaagtcctcaagtacttctcgttctccgcttccccactcctcttcaccgaccccaataccaagttcaccgccgacggcgagctttatgccattgtagatctcgacagctggatttccactaaggagaatatcccagttccatgcaaatctcaaccaaaaatcctcgaggagatggcaaaacgtggtcctgccaacattttcgtatagaatatgaagactcggtccatggtgaaggagaaaggttgaatgtgcccgacgcagttgttggatcaggagttgcggaggagccgtttccctggacgagtagtgaaaaagggctccagaggcgtctctttgcgaacgaantttattattaggattcggcagtcgggtcaggtcgacagactataagctcttagcgttcgttctgataacgctttcaatgcaggaggtgcgcacagctagaatccaccaatccttctctaattcgtgcaacactgtttgtgtcttctctgtctccacgtaatcgacagctttgttttctgagaaattccttcacgactcttagcacctactctaacatgttcgcaagtagcggttcccaccttgcgaaggttaccatgccctgcgccaggccaacctggcgtaacctctcattcaagtcatcgccaggctctttattgtcagtcgcagcagagctatcttgtcgtcgcaaaatgctggacctcgaggtgtagaagacaatttgctcttcgatcgtttcatcagtcgttccgagtaagggattgtagatggcaagaaacgatagctgcgccggcactacagacgaaaaatcgtcctccgacatggcatctcagcaaaggccagcccacaatgtcattgccaggacgttgttctcgttcatacctcatcccccgcaatctggcttgcagtgggctgtgacatcacgtgtcccggtagattgccagtcggagagctttcggagcttcacgacgtacccagactaaacaagttgcggcgactgcgcaacaatgtttcttccaagaggt

SEQ ID NO: 3570 - DNA, 6929 bp, Emericella nidulans
ctttccctgcgactcttcctgagattacggcttgaactctgacgttcagcaccataatcagcaccataaacatagttttggctctttttcgttcttctctgcgggtactcacttagtcccggcgcagaggcctcgggcacaccgtccagaaactcattacttataccgccccagtgaacgcttttaccgtggcgcggagtgcgacagtatcgaacgcccttgtcgttgttactgctgttgctataaccaatgccagaaaggtcaccttcctcggcaataggggttgcaacctcctcaccgaactgtggactcagcccacggccgtagtatgagaggggctcatggtcgtcgtcaggatcgtcgtagtcatactcacgccggcgatggtggagttttggtgctggtgagagacttgattcacgatcgtagtcgcggttgcgggcccgtttggcgggattgacggctgcgatgagaacgtctgaaagacggtcgacgaggctgtaaaggataggcatttttgtctgtcactttgaaattgtttgcttgtcagtttcaagattatgagaagggttttgcttgcttaatttgttattaaggcatacaatatcgagggagagaccataaatagacctattgtacaaaatgggataaaggggatgagagacaattgcagtcgctggtgaaaggtttatttatcttgatgagggccaaacatatcctgtcagaccatttaagttttttccggcattgacttgatgaaaaggtgaaaggacaaatggctgcactttgtgaaagggctcatgtatcataagagcaataaatgatcatgaaatccattcaaacccgaaataactctctaaaagagaatgcctaacctttgtcttacttttattcattatagtcttgttatacattcgtcgtattgtacatgtcaagcccagaccgaacaagcagaagaaggtatctctaatcaagctattagcaaatagcaaccacggcaaagaacgagcacactcacacataagagatgagaaggaaatatcagacagtattagccgcatgccttgcgcgcgcctgagcctcctcttcagcttgtatctccctctccagtgccgcaaaatccccctggaaacaccccttgaccggctccgtcctcacatcccaaacatcctcactactcgggcctgtcttatatttaatggctttcttccgataatgatcccggatgatcttcttcttctcagtctcccggaacgtccgcgtcttcatacacagccagaaattctcccagtgctcgctgcacgatcgtagttcgccatatctataaacattgacaaattgtccgcctagcgactgacaaaagaaggcgtagtcaaaggcgtcacggcaagacatcgtatccgggtagagggattcgggggctatggacgttggtggagattgaaggtctaatgctgatgtgcccgtagctgagtctgtggttgcgccttcgactgaggcctgttgtgtctgttcggcctgtttgatgtcgctttgtagacttgcccataatttggcgacttcggcgtctgcttgctcttctcggctgagcttttgtgactctgattgttgttgcgttggtggttgagttggttgtgctgagggttgagttggttgggactcgggtgagtcctttttaggagccaatgaattccagagccaacccatttgtacgagtctcgacctgtgttccagacaagtaatgtgtatatataggtttcggtgtgtagttaaatgcaatgttatcaatgggcggagttacagagacgatgtttgttctgtttgcgctgtttgtctccgccgcttggcggtgtagcttaggacccgtcattgggtctaaaacgaaccgataatctatgaactctaatcggctagatcgactctgacgtcacccatcgcaaacgaccagcagctcagttcttcatcgctcgtctgcgtttacagtatgcttccatcctcgcaagcatgacgcgcgccctattctctggaagggtgttccacggttaccggcgtttgccatgctggcggatctcttctgcttatcgggtcctgaatgtttatactgcccgacaagcaagttctaccagtacaatcggctctgcgaacgtcagctcgctcgagacgggacatatcactttggaagataatgaagggctagtattcgtcaacagtgagaatttacgcgtgtgcgtcttgggtattggctcaacatattctagatattttcccacgaaagcttcaatggctactacaattgggccctctcaatggcacgcattcctatgagaaagctttgaaacgcatcaaccgtccgcaacttgcagcgtccgatccgctgcatatcattcgccgtgtacttccccaagacctggacatcgacgtcaaagacgtcatcccccgcttccgtgaaggcggtgcctttgtgaagtatgctcgcaaatcagaagcaacagacgccgaaatcgaggctagtatcaaagagcatttggaaaagaatcctatccggccgtggttcaaccccttccaacaagcaacagttgctcacgtccaaggcaggccgtggatcgaagacctctatcgcattcctagtccgcgtataagagttgaatttcatccagctacacctgaggggtcagcgacagagttgaccacagaagtcctctactcggttttccgcaggtatggaaaacttcgttatattgagcaacagccgccggactcgaaagtcacgccaaggtatgcattggttgaattcgcacgccctagcaacgcggttactgcaaaaaactgcgtccacgggtttaccatacctcctgaaggaggagaaggcaagtccggcactcgggtcaagatcaagtatgaaaggaagattagactgtctatgatcaaggactggctcctgagccatccccgtctagtgattcctgccgttgccgctctcattgccgctatcacagtgactattttcgacccgatacgtacctttttcatcaaaatgaagatcaaggcgacgctgcagatagaagagaacaaattccttcaatgggtccggtaccaggtcagcaaagcgaatatatacttcagacagagcaaacccgatgttcggggcttgtcagcaatctgggaggatcgtcataacgatattgaacagctcaactcttggttgacagaaagtgcggaaaccttcattgtgatacacggcccgcgtggctcaggcaagcgcgaattagttttggaccggactttaaaagacaacaagtataaacttattatcgactgtaaacagatccaagacgccaaaggggacacagcgaagattgcccgagcagctagccaagtgggataccgtccagtattctcgtggatgaacagtatcagcagctttatcgaccttgcggcacagggtatgattggcactaaggcaggattctccgagaccctggatgcccagctcagcaacatctggcaaaacactgcggtagctctcaagagcatcacattggagcaccgaaagaagacagatccggatgcgcaactttccgatgaggaataccttgaggctcaccccgaagtacggccagtagtagtcattgataactaccttcacaataacccggaggctaccagtgtagtttatgacaagatcacagagtgggctgcgggtctggcaaccggaaatattgcacatgtcatatttttgacaactgatgtgtccttcgcgaaacctctaagcaaagccctcccgaacacggtctttcgaacaatttcactaggcgattgctctcttgaggtcggccgaaaattcgtgctcaatcatctggaacatgaagcaaggaacaagaacaaagatacccggcacgaagaggacctggcagaacttgatagctgcattggcgtgctaggagggcgtcttacggatctcgagttcatggcgcatcgtatcgaggctggagaaacgccccgaggagccgtcacccgcatcgtggaacaatcagcctccgagattttgaagatgttcattttgaatcctgagtccgaatcacagaagtggactcaccaacaggcctggcatttgatcaaaaccctcgcacgctcgaaggacggcagcgtaccctacaatcatgtcattcaatctgacttgttcaaatcaaacagtcaagctctccgtgagctcgaacaggcggagctgatatcaatcgtcaccgtcaatggctcgcctgagagggtgagggctggcaggccggtttatcaggctgtgttcaagcgattgactgaaaacaaggccttgagcagccgcttggatatggaggtcttgtcacagctcatcagtaaagagaacaagagcattggaaagtacgaagaggagctcctcttgctagggaagctgccaaagcagcctcgagaactcacagggagaatccaatggttgctgcagaaggtgtacaactcgcagaacaagattgcaaagtatgaagctgaaagtgcagcactccaaaagatgctgcaaagtgagcattagttatcatatttactttgcaatagtgggcaggcccgtatgtattctagaccaatttctactctgtatattgatttcacatgcttgctgcgtttgttacggaatctgctgatgtcagctgtaaattaccgtatcgccgcttccaaggtcgactaacttctgcacgaatctctgccttttcattcagtagcaagaaatttttggatagttaaccatctcaattccaatgactaaacgtatagaatccgttttcttcttataattcattcctgccagggacttctcacctatacctctgggctttcgaccctgaggttcatgcgacatcttcattagagacatgaacactatacaaggagcctatgatgggctacagccaaaaacactggtcttggccgcgatatacattttgatatgtgttatcatttttacgcgcatcctcaccggacttcaaagctataagaagacagacacagcacagccgcgtcggcctaggacagcgccgtattggataccatggtttggccatagtctttcgttcgctcggaatcacatagagtttctagagaataccaggttagtggaatcatccttattgcattatattttgctgactctgtaggcatcgactgaacgagactgtatttgccatcgtgatgagcggggcaaagcacaacgttgtcatgtccccatcgatgatcaagtccgtcttgacatttagaggagtaacaacggccccgctagttcaacatgtttcaaggaatattctcggtgaccggggtgtctttcagaagctaaacccctctgaccgtcatgtgtttgtccataacgttccaaaccaattcatgcatgagccgtcactatctcagacatcaggggctgccgcccgattcatcgaacgtgaaactcctaatttggtgactttctccgcagctcctattgaccagatgctctgggagcggccgggtgatgtcacagttatcgagggaaagggccagcaagtctgcgaggtagatttcttcgccctcattagatattttgttgggaccgtgacgacaacttctctattcggccaagcgattttggacacttttccaacattgcttcaagatgtctggagtgttgatgaccagttcgctaccttgtccatgggaccgcctcgctatttaactccaggaatttctgcagcgtatatggcccgtgatcgactattggatgctcttgcaatatttcaccaagctttgctactctgggatgaagggaaagaccttgggatggaattccgcgaccttcgtgatctggaagacgtctcggagccgatcaagaaccgcgcgcgcatggcgaaggacatgggactgacgccacaagagagtgctcctgcgcatctagcattgctctgggctatgaatgggaactcgcctaacatcgtattctaccatctccttcatctctacgctaacccgacgctcctggaggatcttcgaaaggagatcgccccgtttgtcaaagtctcgaggccgactcgagaggaaaccgggtttccgatactggaggcacctagactttctattgacatcgataaactgtgtgattcttgtgaacttctgaaagcgagtttctacgagactctacgcttggactctgcagggttgtcctttcggcagttgaccgcagatctgactatcacggagagtgaggaagaggcctcaaaggcaggccggttaacgccggagtcttattcccttaaaaatggcgagctagtgatcataccccatggcgtcatccacaacgatccgacacacttctccaatcccgatcaattcgaccctctcagatttataagaactgacccacaatccggccagaagtacgcaaagtctgagaccatgactccattcgggggcggcatgcctgcctgcaaaggacgtgctttcgcggagaaaaaaattctcgctctttccgcagcgattatatccttgtggcagattacgcccgcagagggaaagaaattcaagattccagagcacagaatctcgagtgctgcatttttgccgaagaatgatataagggtgcggatgtcaccgcgatacccttcgtgatgtacatagtttggttatcgactagaaggtttgtatagaaaggcaatgatatatgatgagttgtgcaaatatgcggggaaatcttttgttttagcactagcaggatatgccagcgaattgacgatgtgccgacataaagcagggtccatatattcaaggtcagaccaattggaagtcaggtcaacatgctggaaaagaatccgagatacgcggacttacgccgatatactcgagccgatcccaccataaataacgtaaatacgtgacttacaatc

SEQ ID NO: 3571 - DNA, 2288 bp, Emericella nidulans
ggtaggggacaatgtactacttgatgagacccgccacaaagcagaacgcaaccccggccttttgcaaggcaaccgccgactcaacatgcccgtcagccagaacaaagtaacttgcagtgactgtcaagaaccccagatcaacgaggggaacaccagaatatatgcaacgttgctcggcagagaagcaactaggaaggtaaacacgaacacggcctacaaggtcatgaagaagccagcggatttattgtactccactgtatctgtaccgccgtagacttgggcaacctcaaacgcgggtgttaggcgggcgccgtagccggcatagaagagacctaagcgaggcgctattgctgaagccctatttttcataatggggagggactgatgggcgaatatgcaccaaccgcgctgaacgtgtacgcgaacccatttccgatactcagctcccactgcgcagtgaccccgagcccaaaggcgaccatgaagaaaaagttcgcgacgaatgcattctttgttttgacgcctcggtaggagtattaaagtcccatccgaagtctgctcgcgaaggaaatctggctttatagtaggcgatgcggaggtgggaaggagaataccgttgcagtctggcagcggcctctccgccacctgatcgaatttggggggatagaatgataagataagctccgcgaggcctttgtcatagtgcgtacattattttgccccttctcactgccagacctctgttgtgagcattaccaccatcccacctctcgttgagacgagacattttcagccaacttcctcagctactcttgaaccgaattagtgcgtgaaggccgtcgacagagattagtttccttgcactagttcgttggcaatttattacggtttacctgcttttgggctttcagtgggcggtgcggtctgcttgaccacttcggatttgatatacacgtgttagtggactacagcaatccgggtccattatcagtcagcctttacatctttgcaacccccacccaaccatatggaacgtgtgtgtggtcggttagtgcctatatcacgatcaatagtcatctatcctagataagcaatgcagcattcattcggaatggctgtccggcagatataatatatctgatattcaagttgctgtcacctgctgaacaccatagactttgccttgagaatcaggattccgggcaattgctgagccattactttactcgaagattcagttcaccccggaaaagaagctgcatttctctggtcttgaggcccctccgcctatcgcccagcttttacggactctcatttccaaccctcaactggcggcttacatcaaaagctttcacttagacggttttgcctgggccgcagaggcagtccgattcaagcatcttcagattatatttcccacggtcagctcaacgaaccggtcgttttcatccaacggtctggagtcccatagagagactggtggagttgggaactccgtaatggctcagccgatgctcttgtgcgctgcttttatcgcagcttcaaagtctggaacatctacatcttggctacactttcacacgacagagtgcgtttactggtttaatgctccaatcagcagtctgcgagcctggaacctattagctggtggaacctattagctgggcaatttccaacaccttcaagaactgtcattccttcgttttgaatatggagacaaaggatgcggcaggatatcaagaatactccagctatcttgcattcttctatctaccaaatcttcgacacatgtctgcctccatccataatccggataagtgggcatggccgcatcatacccacctgttccatcaaagctaaaatcccttgaaatcttctcctccgtatacatcgcgaacctcactctaccaaaatcgcgtggcgattccgcggcactcgcaaacttcaacataacacacccgccccatccgccggccagccatacaccattatcttctgctcctccttcgtgctctcccccaagcccacctgcacttcaaaccaatcatgtcttttccagaacgtcgcgccagtccgcagcaggacattacaaaaattgtcttcttcatcggtactgggtgcacgctgcaatgcatgagagcgcgggagcgacaggaaaccatgtcaaggaggtcagactcattaatttgaacgccgccgggggacgagtagccgtagaccgtgtatgcttgggtgttgaaggcggtccgttctgtcattgagagagcagggtttgtgggccggcttga

SEQ ID NO: 3572 - DNA, 4421 bp, Emericella nidulans
gaaacagtggtcgtttggaaacaccctaggtatcttgactggcaggggtatgcacgctatacaaggaaagagacagtcaatccgaccagtcacagtatatggtcacagcaaaaatagatgcatcgaccgaactaaaacgtcatccacccctctttcatatccaactctcctgggagacccggtcccgctcccgagctgggtcccgtttgtccctctgtctcaaagcacggaatagccgtgaattcacctagttcctgaggcaggttggagacgaaatgatcgagcccaatgtgcggcatttgcgagaacgcatggggtgtcaagaaatccgacggcgaggtgatatcgtgatgcgggacagctgcgttctcgttgtgtaactggctctgagagttcataaggcttgaggttggagtaagactggccaagtgtggttgaactccgctaccgccagactggtaaccgtcttgcccctgcccttgactttggaaaatgttggtatgtgtgttcgcgttcgtaagagtgtgcgcatccggagacacaggaccagtcttccaaagcatttcccaattcttaaagcggtcgtaggcagactcatgacttcccgactgtccggcgccctgcgaagcactatactcttcaagacgggagatagccctctcaagtgcctcaataacactaaccgcagacctggccgacccgacacccatggacataatcttaataagccccatgcccttctgcagcgcttcccggagtcgttctgtacgctttgtcaagctctgcgcaagaatgaccaatagtgcggcgcggcatgagctaaactctgtgaaagaggcacgggcaagacccgtttcatctcgaagtaaccggcaaagatcaatgatttcaagagcggcctcgacgcagtccgtgacaagggttgagcggttcttggagacaccggaggacatgggcgcctttactggcgagatctggaaggtggcagaggaaaagcccttcatactgctgaagagaaagggacgaccaaggaagattcgtgttagacagtagtccagctttaggtgaacgtttgctctgaaaagcgggccgtttgggtttaggtctcggcagtcagtttcttcagggagggtgttccaccagtcgaccagatgtatgcggagggtgaggagtcgttcaaggcagtcttgttgttggtttatgcggcatttccggagggcgcatcttaaccgtcagcggcaacaggacaactaagttgcacgaacttacatctcatttgagacctccccaagtttgagggtcaattttatcaatgttaccatattggtatggttagaaacttggccgtgcggcatcaatccagggaaatcgacaggcattgcagcgtctacatccgtatctgacagagataccggtctgccatggagaatgctgactcgtctgaggacaactgttagcataaggcgctacacattacatgccgcatgactcacttctcgatggtatatgctgtccaaaataccctattccgaatctcgatcacatggggcggtagcccctcgccgctgtacttccgatgcataccgttctggatcgccattttcaaggcaaggccaaaataagtgtagcaaagacctgacgtatcgagcggcaatagatatgtcccaatcaacaggcaggcctgaacgcttcgaatagaggcggtggcaataatgtcaggaagcaatttggatgcaaattggtagaacgtcaacccaacctcgtcttccgagaaatggtcagcttcgctagttaagtggtttaccggggttgccgattccatgtgtgcgaactgtgttccaatcgctaggaccatcaggatagagcacaccgcgccggcatcgttgcatccgagactccctggattcacgtaacaagtgttgagcttatctttgagccagtcctcttcgacgtagaagttgtttgtttgcgcgtacttgaaaaacatctgcactaagaagtcggccacgaaccgtggcggtagacttgtaaccgaagcggctaccacggcgccagactgtaattgcgttgcgcgccatcgctcttcaaaaggctctgcttcggtagatgcctgaatcgagtcagttggcattgtttgcggattgcaatgaaaacaaggcaatctacctctggggactcggctttcatccactcatcaatcttcttcttaatcttcattgagaaattcagataggagaattcgccggaatattctgtcgagccgttagtttgccgtaataagagcggaaccgccatggtctccatcccgcatttaggacatacgcgtcgtattatccggcaaagcctttattgtaaagtcctcgtcctcgatcgccaaatcctccatatcctcgttgtcaaagacgaccgaaggtcctccatccgagtctgaaccacggtgtttactcttcagctcctccgctgttttccggagcgactgtatatcgaaagaaatgttcggtacgtagtgctgtaagatccgttccatgcaccggatcctctccgactcgagcatgtcatgacggctgcgcgcggcggttcgttctaggagtctatagctccagaggcccataagcattcatccaccttgtataactcggggtaaaagactgtcgactcacgagatggacgatgagcgcgagagcctgtctgcttggtctgggtgcgtacaggcgccctggcgaagatatcgagtgttgtgatggcaggggaggaccctttcgcctaggtacgcgacataaggcaagctgagcaacagatgagtgtcagtgaatacatgcgactcttccgtcttctccgtgaaccaaccgtcgttgctgaatcccacgccagcggcaaagccaatcagcaagtcgtccatgccgagaagacttccagagccagcgcagaagagcgcgagcacaaagtagaagacgagaaagctctcgcggtcaatcagctgtttacgttcggcaaatctgatcgcgtggcgagccgcatagccgatcgtaaaaccgaagatcgctccgaacacacactcgtacagaatggtgacacaaaaccagtgaagcgagacagcgttcgcatccgggcggtaatgcaaaatgtagtaggacaggtagatgaaaggaaacgccatgccatcgttgcagcctgactcggcggatagcaggtctcgcaaatgcctgggaacacgcttggcaaatttacccttaccgacaacggaagaggcaaggacaggatcggtggctgtaacgcacgcggcgcacaccaaagcctcaagccaggtgagcggcttgatcaacgaccatataaaaagactggtgatcaaccagccccaagtcatgaccggcagaagcagtaacgtgactgacttccaatgccgttccatatacgcctttggcagctcgacgcctaccgcaaaacattgtacaacgagcacaatgcgggagcattcaagcgtgattttgtcaacatttccccattcaattgggttgaacagattcgcagcatggggaccgaagatgattccacagatggtagccacagtagcctcgccaatgtacaacttctccttgacgaagagagagcaaagcatgaacaggcccgtgaaacctcctaggatcatgtacgccaggtggggcttatcgatatcgagatgatcccacgccatgacgaaagcaagttatagcgactccaaaagtaatcagattatccgcgatttcagcttatcgtgaagttttccttgctctagtcgtaacccagagcccatgtgaagcgctagtcaaaccatcacaatcgaataagaaacgctgcaagcactagcaccgaggtggacatgccctgtcgcgagagatccggatccgatggatttgatgcggtcgcgaagagatgctagaggaaaagaagaattagcaaggcgaagccacttataagggaatgtcagggcggaggggcgatcgactagtgagcggagcaaactgcaacggaacttacccttctttgtaaattgtagataaggtgagttaatgtgtatgcacttagtggatagagccagctctctggggggtttaacgagtgacgtataaaactggagtaaaccaagacgacaagtgaagtcaagacagattaagaggagtcaagaggaggacaagacgcaggacaagaggggagacgctctcggcagctgggcgggcaacttgggaagggccgaaaatgggaaggagcaaccagaaaattacgaagcgaagaccaagaccacgatcgagcacgagactcggcaggaggggaacatggcctatgtccaagaccgtcactggcgaatgaggacttgaatagcagcacaatggccttttttttggggcttggaatggggaatcggggatggggaggagaggaaaaat

SEQ ID NO: 3573 - DNA, 14909 bp, Emericella nidulans
  unsure (1)..(14909): unsure at all n locations
ttaggagaaacaggtggagaggagaaagttctccgtggggaagttaaagaaggtgatactgccaggtatatatagaaaaggaatatggcactaccccagttataaaagtgtgtgaaaaaagggattaccacccgcaacacaggcctgggattaagattggagtttaacaccgagtggaaaggcgagaaagtcatatctgattacgtccaaccgattataacaccagtggcattaggaacatgcccaacaaaccctaaccaaggtatgctgctaatattcaactcgatagagcctatgtcagggggtccatccggcaaagcaaacgggagcatcagttcgctgttcctaatgagctcttcgagcatacatctttccaacattgcgtggcctgcgttaaccgcccagtttcaacagacgccaaacgtccatcatagcgcactcgtttgaggtgttcatcttcatctgctatttcttctacgacggtgtcctgaacgcctcagcccatcgctagctcggccgaaatcttccagtataccctgagaggtcggggaatgacaaccaactttgtcgggacctatctcggcctagtcaacggacagttcctcaatcccagtgccatggaagacatgggctggcgatattatatcgttttctgcgctatcttgttcgtcatggtggtcgcaatttacctctgggttccgccaaccaagggtcgcactctgaaacagatcgcagagatcttcgatggccctaaaaaacatctgactgcaggcgccgctgatgagaacaggacacgactctcgacaaagacagctgaagtggagcttagggaggatatagcaactcgaggttaaggatgaaaggtgtcccgagtccgacccgcttcttacgatggcgctgccatgacttccttcccccaccgcctggcctgcttcttctatcgttgttccgcgcttgcccccgctccttctcgtctccagacgttttgtacacaggttgtggcctagtcagatggaattcaagtctcacttcagcccttcacaaacggcaaacctagacttgttaaaccacgggttggggcggttttcaggcctagctgatccgcccacgcggtttttggggtgggttacctgaacagtaaaccgcccatgggtttagcaaataattcgaacccaacccaaataacccaaaataacccaaaataacccagttatgcatataattactctaataagcagtgatctacgtaactaataaaatactgtatttaaatactgtattataaatcatctaagtaagaaaatgtaatctaaatacagtaatatacctattcagatatcttggcaacccagcaggttgctccgccgggctttggggcagccaaaaatattcaaaacccaatggataattagaaggtccacccaacccatttcttggcgggttggggcgggtttcgtgggttgggtttaacaagtctacctccaaatattgaaagtctatttttaactggccaggacatatccacccaggatccagggcttgcttaatttatactccagccatcttcttagcttgttatgaggaaagagctcaagaataccctccatctttttaaagaactcttcctgactgggtatattctataactgatagacagcctccttagcaggataatctctaaactttttataagagttttgcttcacatggacctggcagaagacaaggatatataaaagatattcatcccattctaatacaggatagattttataaagataatcaccaagaaattccttgtcatataaagcaacttcaaagccttttcgcaactgctctatatggttattagtatcctcaacaagcgccttagaggccctctctatagaattctgaagcaatagagtctttcggtgcagttgtcgaactgtatggggtgtagcaaatgtactagaacccctgcttgatgccaggggggagatggtgtagaaagcgatacatgaagtttgctgagaaccctatctgggtcatatggctctatccctgcggcagcaaagctgctctgaatgttcttctcattaaaaatactctgatatgcacggggataggcccctacaaagtcaaacttgtcgatatggtgtttgccaaggcgtgatcttgattcaataagacctccatatgcacgctttagcggaccaaaacagccaatatctagtggttgtagtagatgagatgaaccagcaggcatgcaaagagatattatgccattatcctcacagagcttgtcaaattgaggtgttagatggcttccatggccgtccaagatgagcaatcgatatcggccaatcgtacgaggagtactggcaggaataaagcaattttgaagccagcgaaggcctatctcgtctgttgtccatccattgcttaactagatcctccaatcacctggcaagccatgttctgcataccatccttctataaagacccttcctttgaagataatggtggagggaaccgaccatcccatggcgttgatacattcaattgtagttacccattcacggtttcctggctgaattagataaggattgcctggcatcttactcctagcaagtactttagcagttgctataagccccatagcaaagccagtctcatcaaagttgtagatatctgctggcaaaatccccttcttgctgcagatctctcttagatcacaaaaccactttttgatggctctaggattctcgcattcggctcgctgatgattatagcgccttgcgaacggagattttagttctggataacactgtttgaagttagtaacccagtttccaccaactggctctggggggtattggattcggtttggaggattatattagccatttcctccacatgcgcaacgcttggaggacagccgcgctcatccctagatactatccattgtactaagtaatcctccttagttttggatagcctcaagttgtggttgcgggcttcttgcctgaattcatggccattaagttgatctcggagtgtacttcgcgggacattaaaaaccgccactgcttgacgctgagacgtgatttcgccatttttcaacgcgtttattgcaagttggagtctgccttcttgctcaactaattcttgacgcggtcggagcttatttcgtggcatggtggatgatcaaagaggtttggaatacggggagattttgggtggggtggacggatgactgtgggtggacggctgacttgataattacgttaaggccatgcatgacacatggttggtgtgggaaacctaggtggtgttataatatctgcgtagtcactgtaaatggagcagagatgacggctcaacagtttattagcgccgctaccaaaagtctgggactgtcagtcacccgttctttcactcactcacgggatgaatgaacagtcagtccacccaagcccccacgacccgccaagaacaaagagacggaatgtccccgatcggggagcagcgccgacacataaatcccaccatcctccccgttcccgctcccccgcaacatgacagtagtgccgtctggtcctgccacgagttctccccaacatcggcacctttcatggcaagccaagatcttgcagctcaccaaggcgccggttctaatgtttccgtcgtccgatctcgtggggctagcgcctgcgagaattgccgctcccgaaagaccaagtgcgataaccggcgccccagttgcggattttgtttgaagcgtcgtgtcccttgtgtataccaggatgacaacaatgccgggtgagaattcgcatgcgacccccagcattcactgagcgatctgcctaacgtagccagcagattgataacaggcgcggacatcctccaagcggtcaaccgggtggcgaacctgattgaggctcaacagagagaccaacggcggcagcagcagctgctgctgcaggggatgccatgtgcatcttgtgggtctcgctcgacgcctgcttggggtccgacttcacaatcctggtctccgtcagcttgcagccaaccagacaatgctaataatctagggccaggccacccgtggccacgcgagaccgttcgacctcaaggggtcgaatcggtcctcggctggcaaatattggccttgaatcttccaccgtctcggtgtctctttgcacagccggtggccgaggccgatcagccgtcctcgctgcctgatatgagctattcccagctctcgcgtctggagtcgaagtacattgaagttcttcatacaaagaatccgattctagatctgaatgaactacatcgcatggtgcttcacgtcgcggagaatgggccggattggtccacacgaacctgcttggtagccctggtctgcgccattgccgtcctttctgaggcttatccagggactatcacgagatctgcggcgcagccaacgccttcactggatccggacgatgagagcggcgccgacgtcaagttgtcgctgcagttttggaacattgctctgaaacgtcttggctacgcaatgcgtgagaacagtgttgaggctgttcaaaccctggtgctagcaggaatctggtacatgcatcgaatggaacccctggaagcctggaaacacttcaacctcgccggcgcagcctggaacaccctgaggttaactcgattcccagtggttgatctgatagacaacaccgatacgacgcccaacgagctcactatattacaagcgctctacttcactatctggaagtcggattgcgaactgcgactggagttgccggtgccaggcccccctctcatcaacagcacggaattcccgttggcgtttccccagccgcccaggcttggttcgcaaccgtcgacgcccgatgcgtcagagagtgagagaagttggtattattatctcacagagattgcagcgcgacatctgctcaaccgtttggtgcaaatgaactcggagtgtgccgacacgccgacggagaggcaggtgacccgtctggtcagccatgcggagatgatgcaggctcaaatatccgactggtatacttcgttaccatccatctttcattttgccatcccggatggctatgatgctgatttcccatctgatcctatgatatttgttcttcggcatcggtattttaccctccgggagctcgttgcgagaccttttgtccggctcttggttgatgggctacttgacggaatggatcctttgattcgtgtccgagcgcggtcattcgcgtcagagtgcatgcaattctgtatgctcaaactgtcccaaaccgtggcataccgtcatcaaggaaactggtatctgctgcgatccatgacgacttcgtcattgatcctggccgccgttcacctggcacaatgccgactacgggagggcgaagctgccggcgccaccccaccatcagagaacctgatgccgccagaagcgtggatatcgcgagtcagggatgctgtggagtcagcccagccatttttcgaggaaacgagcggtggcgcttcgaatatgaagcagatgatcttggccgcattaggagctgctcaacaacgttcggcgtggtgcggttagaggagctatggaaaagaagtgacttaatacaattggctaccattggccaccgttcttgtccgggctttcctactcctgtaccatcggggactgtccccgatggatgatggatccctgtctggggtcttgagaacggactcacatgtggccagggcttgcctcgttatgagctggaccattgagttggtgaatgtaggtcagccgccagtgcgacaatagacaattactatattaactaccgaagccgaattcggagggttggtctgcttcacctcaatgataattttcacctcaacgataaatttgaagctattcagaatattatacaacaacgccttgcgaatcccatacaaaagtcgctaatgattatctttaccttcctggctatcttatggttcaatcagaatttctttatctgccctgcgttggcgagaaattgcgtcgtttagctcgcgcgcgctttgcctgacgaagaaactgacgcctttcttcctcgctcagatattggatatagcgattagcgtcttctgcatctattgggccagtttctggaagccttttcattgattatattgcgggctgaggcgctcggtagcgaagaaatagctgtaaaacatctcgaaattaaccagctagttccgacgtccgtaaagcgcttttaaagacgcggtccacacggcgtttaaagctttgatgaagctctggactattatcaatgtactcctgcgcttttgcactacttcgacgaagtcctcgtttagtagatggcggcaatactgagctagatggcggcggtggcgtggtatatatctcaagctcaggtgtaggactttttttcttttgcagcggccccagaagctctacagaattgaatggatagaggcctcgcttttttaaagtatctcgaattgtccgcgctttgaaagtttgcttgcgtacgtctggggtctcctttaaaaaagcacctttgtcgtcggcttccacactcagcccagcaagaaaattgttccactttcgatagtagtatgtatacacttgaaattgctggccatcgagcatttgaatgagatgtgtagtatgagatggaaagcagtacagaattatagagttctgcttaccgaactctaggaattcgtacgttaggtgggaaaccatggccatcaaaaagtagcaatcggggctcatttttctgctgaagacggggtcgtgtatagcgatcgaaatgatgaatctatcaaagccaattgaatcggtagtatagctttcaggcgataaagctatacggtagttgccaggtatctctgaatcgtaccatagctccatattgnaagggtgcctttaaagatgaaacaaggcggtagaattaaaanccgtctgcagcgatacattctatcccactgggccccgggaacaatagagtcgtggagttagggtctaattgctttgtatggcacaattttcggccaaagcgaatggttctgttggctcttgggcgaagtgttctgttgcagccagtcggccaatcctgctcaggatttaccagggtatggagacagtacttcaatctaagtaggcttattttcaagcaattccgagcagaaactagggtgtggtgctgagccaaagtaggttagggttgttagtatggtttggacaggagatcagcgatggctgtacgtatagatagtattttaacaacaaaagcaaaggcactggtcagtgtcagatttagttaggggaacctaacctcttttgaatctctctatatctgtcttagacttgttgaaccacgggttggggcgggttctcaggcctagctgatccgcccacgcggtttttggggggggttacctgaacagtaaaccgcccatgggtttagcaaataattctaacccaacctaaataacccaaaataacccagttatgcatatcattactttaataagcagtgatctacatagttaataaaatactgtatttaaatactgtattataaactatctaagtaagaaaatgtaatctaaatacagtaatatacctatttagatatcttggcaacccagcgggttgctccgccgggctttggggcagccaaaaatatccaaaacccaatggataattagaaggtctaacccaacccatttcttggcgggtcggggcgggttggggcgggtttcgtgggttgggtttaacaagtctagtaatggataccactgctatccagtcgccagtatagcatattagttgaattctaacaatcttaaactatttattgcttcttgtagctatttttaatggcaggctatagttataagttgaatatttcagccaagaatatagaattcttatcaaattctaatattatagagtctgattacattgaaggctgtagctcggtaatgtatagtggtaatatatatatatctaagatgtaacaggcatgtattctttattattcacaagatgttatgggttcctcgtacgaagaaccctttttgtcaggactcggccaatgggaggcctcgtactagcgggccctcgcttaacgagatccctatttctacccacgcacactggacacacctttcttttccttaacaaacccttcttgtatatacggcaggatatagcttagaacaagcatatcatccccttacacaagatcatgctacaccatcaattttttttgattatactgcatattgttatgttattttagctatatagattttgttatcctactctaaataagaaaataccttaaactcatggtgttatatatagttttgtttataacagaaaatttgatggtgcagattaccctcaatgcagataatctacactgcataaaggataaatctaactatgattagtttagcagcagatgtaatctaactatattaggtatagtattgcaaaatgcggattttgtggtgcggactattctaaatcttgcaggttgcagtgcagtgcaggttgtttttctataacccgcaaacccgcgcgggttgatttctaaccctgcggtttgtacccaacccgcaccgagtgcatccctacccaaaataacccagctatgcatatcattactttaataagcagtgatctacatagttaataaaatagtgtatttaaatactgtattataaaccatctatgtaagaaaatgtaatctaaatacagtaatacacctattcagatatcttggcaacccagcgggttcgtccgccgggctttggggcagccaaaaatatccaaaacccaatggataattagaaggtctaacccaacccatttcttggcgggtttcgtgggttgggttgaacaagtctagatgcagcttccttctaccctttcccctttgagcattcataacactttctattagtgacaagttaagatgattaatgcggtttgtaagcccatcagcctgctgcctatgatgtacatttttagcggctgtggagagccctgcaatgaaggttgctaaggagtttgtaattgtgaaatcagagatattagccagatcacagcctagaagggtagggttgctaggcatatcgtgaatgcaggggaggatatgggtatatgttagggtgctaggcaggccagaaataggtttccatgacttttgatgtcaaaccaggcaaatttaaacgtcccagatttaggattgatgatggcttatggcttgtggccagcccaaatccagtgagcgaccaaaggagatgggaaatccgatctaatacgcggttatgacaagtttcatatgcttgacagaggcatcaaacgttccagccgcacgccacgggccgctgaaataaccaggcatactgacaacccgcggtagcagagaagttcagaatcaataagttactatggacaactgtgcatgagcatctataaagatttagtggtatcctgcataccgcatcgccaaggagtcagagtataattcgccattaccactagcaccaattctgtgtaattgtccaggcgacggatctcgctgctcctgtatataagttgagacaatagtatcatataaacacacctggctggtgagcatgcttgacggattgagagcattaacaatgcgctttcagcatatcaaagttgcagcatcatgaccaaaacgccgctgtgataaggggcagtacgttatcccatgaacctataaattccttgggctttttggttatgttgaagaactgaattaaagcgcccagccggtcatggttgtacattcccaggttgctggggactgaataggttaccgtggttgtagtatatagacacctaagtaaacccactagtctacccaacttcagtagccagtggaaattcccttgcctctccatccaactgactccttcccagcccatccaactcagccccaataggttcccttgcaggcagttccgctagatcttcatccatgttcaccaatcttttctttgcaatagccaagccatcaagctccggcctgaattcatcggcatgaagctgagccttatcatcaaagctatcgcctgccgcaccgatctcttccgtgccttgtctctttctccgccgacgtattaaagcccacgctagcacggatcctacaaggagtgcaaaaaccggtacgatcacagcaggagcaataatattgatatccgatgtgtcggaggagggtagatcttctgtgcctgtcccaccctcgttagaaaaactccgatcctcgccccctgcagtggctgtcggcccaaccatgctcgtactacttgcagtcacatcacctgtcgcggtggcactagtcaactctggaaaatcacccgtataccccaacgacgacaaagaagcctgcaactgagactgactagacgagagggacgagtacgaggcaagcagcgagtcaatctccttcacgagtgtgacattgctgttaccgctgcctccgccctgttcgtcgcaatacgcgatgaactcattgagttcagcagtggtgctgccagatgatgcgctggcggtggagttcgaggaaggcgagttgacgaagagctcgatacattgcctgcattgatcgaccaggtctgaaaaagtggaaccgtcggcacagattgcggccatcttgcctcttccagccgcctcgaggaaggcgccatctatacaagaagtggttttaacattttttgggctttattagtctgttgggctggagagctccagacctcttatggtctggtcttgtagttgaagggcggaaatagaagcgagcggtggacgtactgcaggtttcatagcaaacattggggatctcttgcgaatccaagtctgtgctggaggaggttgtttctctgcgtcttatcctgcgcagggcaaaaatgttaaagaaaactccaactggtatcggggacgacattgcggccgacggctgtatctgaactgatacagcctgaaaaagaattataggaagagtcaccaagaaatcttgaacataaggaaagacaaagatgggagcctgacaagactgagcgattgtagcacttaaatgcaaccggacgagataacaaggctgtaagaagcaaaaataagaccgctgtcaaatcaatgcacgtcgcttatgcagaagaaaagaggggtttgcgctagggttcctgtagtatagatgataggatcaatcgcctagtctctcctcaagtatctaccgcactctagcctaatggaccaacgtatatgttcaaacaaggggatgggaggaggacgaaagggagcatcagatcgccgctaccgacttaactattcggaggtgaactttggctcgatcaaacctactttgtggctatcattcaggaagatggctgctcgtgggttcatgcgtgatcgttgtagagccatcgcagcagcagcaactgtggatgtgaagtgtcgacattaccctgcactaatctatccactcggtgtctggcaagcgaacaagcatttgactatgcacagatcaacgaattcagtgttaatgcctactgacacactgtcaatcaacgcgtcttaacctccagcccttaagtgaccagccaaattggcaatctggaagcgtcctttgcttcttatatcgtactgctcagccttgtcaacacatatgccttacctctgtccctatagcagtccaacatgctatcctgcggcagacactgcgatgggtaaatcgttaaaccactactaaaaatagtcgtaggggttcgtccagaaacagccagactcaaccccctaattccaagatcccagggttcccctcggtctctgctaaacaggcccatcaggccaaggtaggaaactctaatttgaaagccctgagctctgcaactagcctacctaggcgtgtcaggataaacattgctaccctcacatccctcagatgcgctttatttatatcttgaacttttccattactgcttacatgtttcagagcacccaaagcggaaagtcggttatatactgggtactaacggtatgaacagttgtgtgctttgagagtatctcagtactggtagtaggaaatacgtctgattgcattactctaggacttaggatagcaatattcaatgctaatcttactctgctgcaggctgctgaacagagcttaggcgtgttgccagcctcatatgtctcctcaattgcttccttttctttgtgcttcatgggagttgaattcctcgaggaccatcttcatcaccctgcctgcgtacgatgtaacctcctctgctctgtgtccaagaaggaaagatataacctcctggattctcaagtctgtcgctaactgaaacgcagaccctctttgtctagaccggctctccacaaacacctcttagcgtcattaacttcgacaccgtaattcatcagcagtcgaaccaggtagccatggccggcattgactcctcggagaaggggcagaactatgctgtaatcctgcaggtagatgacaggttgggcagcctggtaatctaagcaaccaaggtagatgcgccccatgtgccaacaagaatctcgtaaagcaaccattagtctgttccgtccgcgctttaagccagggcgagtgtcattttcaggcaattacttccgcgtactagcagagaagcaatcctctacttcctgctaaagatcgcccgctccaaggcgcatttcgttctgcacctggatgtgaatggaatttcgcttgagaaggtatagccaagcaccggacctgaaacaagactcgcatttgtcgcaaacacgggacaattttcagcacacacgcgtgctagaacaagatcccgaggatccgtttgtgggtgcgacatccatcaaaccatctggatagctgattctcgcgagctcatattattttctataggcagtactacgcggggacctctgtatgatggtatttcatgcaaactttccgcatgaagcaggagtgtttcctacagttcgcgactctcacaactggtttctgcatcgaagaccaaggcaggatccgaactcagttccagtagaaccatttagcgatgactcccggatgactacacccaccgactatgacgagagcacaggtgcttgcaagccgttataatgcgccagacaaagtcagggacggatatgcaaggccgcgtcggcaggggaggcacatgtgtataaaccaatcacggcacgggactgggagacttgggtgggatttaaaagagataccccatgacgctgcaaaggatttacagttgtcacctgagcttgctgcgatagagaaggagcagtccatgctgtgttggacgagagagatgctgcaagcagtgagggattcaagcaggaggcctaagacaacggcagacttgagagaaggcaatgtaatagactaatgaatgcataaacatgtctcgaaaatcaagctcgttcttccggctgtggttatgtcaatcttctggtaacctgcagtcgtgttcaacttgtcatgctcatgatttatttgcatctttatctgaccctgaacgcggctgttcgaaagtggcgtcctgagtaggtacttgagtaacatcgtcgcataactggacaccaagtgatggtactcttctgatgagtccctgcccttgtttaacgctaaaagctcggtggcaatggaagacgccggattgccgtgcaaggctgccgtaaggagctatttgcagctgagggttcctgaaagcagtctaacagcagcaaaacctactggggtccaaagccctaaatcacaattgtgtcacaaataccgctctagcgcatcccagaccctttacaaggttgtaacgctagccatgtagtagtccaaaagctctactggatatgggagctaagattcctggtggtcttgcaaagaaccggcgcaaaaataaaaatattcaacaccatctggagcttgcgctcctgtaatacctctccagtcggcagttctctcctttctccttctccactgggctatttatttcctgtgcttccatttccacagctcacgtctccaatctcagcatgtgtcgtgtcactcgtgtgtcctggctctcgcttggccaaagactaaaatcgatttgcttctcccgcgcgaaggcacattcgtcccaatgcactcgatgccagtggtattcgctgcccagaacccctctgctgtcaaggagctccacgcaaccatccaatgtggggtgcgcccaaaaggtgctggtgctaacaagaaagtgtggagctattcagacgccctcgccaacgtcccagccaacgcgaccacctacttcagctccaccagccttggaaatttgctgaacacaaccggcagctgggagttcttctggacctatactggctgaactgatctcagccgaataacccagcgtactacggtaccaagtattcgtgggttaatgaagccgtcggcctcaatctggacgccgttcatgacggtttctacttgttatgctactttgatcactgtcctataccttttttttcgtcacctaaggtaggggctacctgtcttcgtaccctatccatcacttcatttgtgttcttcctatcgtcttttatggatttatttgttttgcctctcccctttactttattcagtatctttccttaaatctcataatcttctctcctatggcttactcccttacttagatcgtttacttcactctttactaccttagttcagtcctctgtttccttctactaattcattctgttctcttaatcatcttatcttatccttttccttttatttaaccttatttatcttcttggacccccccaagggcttttgtaggggggcgggggc

SEQ ID NO: 3574 - DNA, 11615 bp, Emericella nidulans
tgctaccttttgccttatctgcttccttgcatgcatcacattggattgaataaccctgctcacgaacgtattggttggcgtgctgactggtttatctataactagttagcaactggttttaaagcgttgtagaataatcatacctttccgtcgcgacggcgggggatctcaggcttccctaccccatcctcttgtcttgcatcataggcttcgagcacggctttgtaaaatactgaactagttaggaactagttctggcaacaacaatcttgctgtaatcaccaatcgcatcatcctcctcttttgcagtaggacggccacctccttctttctctaagagatcgaatttatccacgtgcgcttttctgatgtgcttcttgaggttgtttgtgttcagaaaccgagtctggaactagttagtaactagttgtaggcgaacagcaacagcagcagtacggaattggtgcatgcaggggcgcggcagtaaatctctccgacatgtggaatcaggtagccgtgattctaagaagaattagttagcaactagtttaatcatatcactcatggtggtttcttaaactggttcgcaagctcacatctgccttgaagtcaggaaggtctaattcagctttcgaaatcttagtatatcgaatgtaattagggtctttcttgactttggccattatgggggcacggggattagaatatggtgttagcatgtggtattcaagttacgtgcgttgtattgacctcaaacgaccgcggtcgctttaagcgaggtcaggtgagcgcacggaccctcaaggtcgcctgaggttttagcgcggtcgcctgagctgtagtcactatgtatgccccgacaagactcaagcgtcacatgacaaggtcacatgatgtactagctttagatagcttcggatcacacatcctaatcggatcatcagagaacccgccgaaaaaccacgacgaggggagaacagggccccctactgctctaataactgatctcttacactttgctcatcgatcattccctccaccccatggaggtggatgactcccccccaggcggagcccgtccggggactccgctcctgggtgaaaactctgaacccccctcaggacctaccaccccgacccccctaccccggaactccctgaagagaagggccttattctccctacagaagactcccactgcagctccggtccctgtatcctatttgctgcaagccccatcaatctgcaagcaggtcagcatggtagcagacaaccagctagtccttcttaatgattagaaactagcaataacctctcttgctaaagctctagatctaactgtctcctctctacagggccgcccaagagacctggcccaggggcttgcagccagatttgtttccctagcaaaacaggactcccctcagctgattcctctgataacagcagctgcacccccacagccatccaggcagatagaacagccaaaccaacctcctactcctgaagcttgcaaaggccccctgaagaggcaaacctcgcagcctacaacctgggcatccctgacagccccaagagctagtcaggggaactggcaaactattgccccagaacactgtatgcaagccaagcaaccagcacaacaaaagctgaagcagccaaacaagactgaccactgcatcttcctctgcctcccggcctcctctagcctctgggctattagaccacatggcatccaggtcacccttgcagggaaagttccagacaggattgcacaggtgcaagtaatatcaacaggatatgtaattactacaactgaacaaggcaaggtcttcttactatcagagaaggctgcaagcctagctggggatggatactttgaaatactaacagagtatcaccaggttattgtcccctggatcccaaaacaactctggtccctggatagatagatagatactacaattacagatatcagcaatgaagcagagcgcattactggtattaaactactcatggccaaactctcaaagcacccagtagagagggactctatcacagcagtcatagcctttccaaaaaggctacaacaccccttgcaactctttggcctgtccggcctatcaaggcccacccgccccaagcaaaggcctttgcaatgcacccgatgccactgcttccatgatacacgagcctgctgctccagcgaatgctgtatctcctgcagatcctcaaaacaggaacacaactaccgtgtgcagtgtattaactgctgcggcccgcatgcagcagacttccaaaaatgcccagccagaccccatgtccagaggaacactgtcacctgcctctcaaaagatgctctagctgctatctgcaaggcaggccggcttgccttccaacaggagcagaagaaagcagaagaaagctctaaacaataaacagataatacctacactacaaaccagcctacaagacagctcacccaggagctcttaaaccaaaccctgacctcccctgaactatgaaaatactacaagctaatataggaagggggggcgctgtacatgacctgctactctcctttgaagcagatattattcttgtccaagaaccttggacaaatacagcaaaatacctaaccaagacctacccatgatatcagctgttcagccccccgacctgatagactgctaggcccagaactctaatatatatatataataggatctcctagcctattccttcctagaacctatttctctagatattactataatctatatagcaggccttactattatcaatatctattagcctcctaataatctagttgcccctgctggtgctggcttaataccctctatactttctatacttctaggatatactctgccagagaatactatcctagtaggagactttaatatctagtacctattctagcagccagatactaagtcttatactgtcatacctggtacaacaggactattagactggcttgatacctacaagctagaactttgccttgagccaggcacccccacctatagaccaaacatcctagaccttgtcttctctaacctactactaagggccctagtagaagactatctaaagactccaagtgaccatgcaataattagaataatactggaatagaaagagcccctgcctatatacaagcttagctctactaactgggagaaagccagagtactggcaagcccgcctgacctaaccctactaattaacctactagctgagcaactggtccagatatcctaacttgcaatacaaggtatatcaagatataatactcatagactccccaggaccctatagtagactccagaactaatagttatactataccaaataagatagtaataaaatcctgattataaacagctctggaaggctattatacaggcaaaggctgaatactggaagtagtagattgaacaagctacagcacctacagatatatttaaacttgctaagtagattaggcatccagactagcttgctgcccctcccctaaatatacaaggggctcaggttactaccctacagggcaaagcaaatgcctttcttagtcacctcctagagaagggggccctgcttccaaatcagatagaagagggaccccctaataagcccctgggccccctgtacctgccaacaaaagagcactgctaggctgccctctgtgccctacctgtcacagggccaggtcgtcgcgtgacccctatccctcaattcccacgtaacgcggacgggcgccttaccggtgcctatccgccagtaggaatatgagggatcgccagagccgtaccggtccgccagtaggaatatgagggatcgccagagccgtaccggtccgccagtaggaattcaagggacgagccgtactgggatcaacccatatattgttgcagtgggatgcggtggtatacgcaatcaccaatgcgtcactgtaatggtattgcttggagatgccgaactaaccacactggaggttatatgaagggcctcctgatgccatgtacagagagatctccaagcaatcctttcaatattcttcagtaccaatcaagctccctccattggataattatcgttgatagtcatcgcttcgttgtagctagagaaccccgacgttagaccacgtcttacacacatctcaatctgtcaaagcggaatgatgtcataactatcggtattttgtatataatgtactagccagccttgaaggggttggctaagagttagtttttgaaaaaaaaaaaataaataaaaaaaaaaaaataaaaaaaagtgacaggtagcctcatgttattgataaccgttgattccatggtgactttctgccgtacctaatcaatcctccatcctcgacacccgtcacatagggcgttagcgtgtatcttgttatgggttcctcgtccgaagaaccctttttgtcaggactcggccaatgggaggcctcgtactagcgggccctcgcttaacgagatccctatttctacccacgcacactggacacacctttctcttccttaacaaacccttcttgtatatacggcaggatatagcttagaacaagcatatcatccccttacatatctggggaattatctgatcctcgacgaacacaacaacaaaagttcacgggcctgcattatggaacattctttgaaagaggatgtgcgcggggaggtgggattgcgaggagggcataaggtgaaaatacagggtaagcttcttgccgtacggatgaaccatccaagtcctaagagctattccttccattgcacgccgtccgacagccgcaatttttcgcacaatgtcatctcagcactggagctgggtttcttttatgaaagggcagataaaatggtaacaggctctgctggtgcagctgtgcctgggcctgcccacactgtcacgctactaccccagttaccaacgtcatacaggatgttcaagcaaactgtacgcagatcgtatatgtagagatatagcagctacgaggtgaagtgatctagcctaatcatattcaaggtacaccagtcttcatttatgttgcgaatctcaagttgtgttcggttacgcaggcaatgtatttatttacgaagaggaacctacttcatgcggagcgcatcgtagatatccccaataacagtacccatctctcggtcaacaaccagctcctcaggcactgctctcctcttcgtcgagttagatgtaatcagtgctaactcttcccttgccatctcgactaacatccgttagaaggccgttttaattttaacccgtccttgaaagagaaccaaaactcaccatgacagtaaacagccgccctcttcccgctcgccatagcatgaggcacattagtactgttgtcgctattcgcgtcgccaaccccccaaacgcctttcatgctggttctcagtccaggcgctgttgtatcgatcttaccacccagtatcctcaaacccatctgagcggggagtgtagacgcctgataagtaccataatttgccataattgctccacactcttcgaaagtgccatcgtccatgtacaccctgaagatatcgagttcctttcgaatcacttcctcctgaacctcaccaccgtcttgtactctcgtgatgttctggatagtcctatcgttgattgtaacattgtatgcctcaaaaacagccctccagttcgaatccttcttgtcaatccgctcgagctgcgctgtatcatttgcagtgccgtttgaaaggaccctaatctggcgatttagcgtcgggtatagctcacgcacgctgtcgtacgagtcggagaaattcccaataaccccaacgggctggtcgcgatgctcaaagccgtcgcaccacggacaccagtagaggcccttgccgaaggcctcgcggagtccgggaacttggtctggtagagcgtctttgacgccgctgccaagaattaccttgcggccggtgtaggtggttccgttagcaagggttgcggtgaaggaagtggtccgattggcagttccagtggcgttgatagagacgaccttggtgtcaatgaatgtggtaacattgtagaaagatatttgggcacgggcagcggcgcggaattccgcagggtcaacatctggttaattatatcagcgtgggggctcgctgaagactgtgcatagaaggaaaggtaggtaactcggaacatacgatcactcccaataacatcgtgcatgtgcctagttggcttgttgcggtattccccggagtcgaagagcgctatttttcttagaacacgagctagaccgctggcagcactgagcccggatggccctccgccgatgattagaacatcgtactgggtgttgaattgcgccatcgaacaggtaaggataatgcagaaagtgagcagtgttctcaaagccatagtcgtctgcagagctgtatcagtgagaattgtagcacaggtgcccagtatgatattttagaggccatagatatattagtaaaatagtcagggggcggcttcctaagcctcttacgaccaggcctctcgcaaatgcgtactaagtcgtgacgtgccgtcattcctcagtcctaccaaaaatatataatgtagagtcattaggttgccgggagtgggaatgctgcggtagtctgttgccattactacaagagggcagaatattgtcattgacgtaacaatatctacctcctctaatttgtcattgttttaaagagccatggttgtggacagtctgcaatgagcggaaatcctacgttacacaaggctaagctttgcggaagcttctgggagatccacaccagcggcggctagctcggaactcttgcgccttatgaggtctgccgtgtatttgcgcgaaattctggcttgtttcgaagtacggctatggatagaaagctggaatgaaccaaaggagtgggtgtttacctatatttagaataggtgatgtataagaactataattggagagtaaatgggctcaaactctgcaatacttcaagcgtatttccgggcctcgcgtgcgcctatcgagcgaagtagaaaattctaataatagatgccatgtgatacctcactcaatcaatcaaaattaactcttcgtttttcacataggtgcgccactgacgcaggggattggagaactgcaatattgactaggggtgcactcggtgcggtttgggtacaacccgcagggttagaaatctgcccgcgcgggtttgcgggttctagataactaacccgcaccgcaccacaacccgcaagacttataatattccgcaccacaaaatccgtattttgtaataatatacctaatacagctatattagattagccactaaactaactatagttagatttattctttatgcagtgtggattgcccgcaccgcaccgctgcgggttgcggtgcgggttgacattcctaatactgacgacggaacagccacagcctgactgacaaacaaagccatctgtcgcccacgaaagtggacggttcacattacctggatgaggcttttcatcaactctaatttggactttttcattgcatctcatccctgggaaggcgtttatcgcaacccaggccagtctatctacgacgctgccaatttgttcatgacaagtttagttcagcggagacgtcaacgagggtcaagctggatcggccatcaacgtgagcatgattgttgatgttgggtatgtcgtatgcaaagagagggaacatagctacatcaaagaccatcttcgagcgcagttccacaccccgtcggccgagtctgaattccatcagctattcctacaggatattatctctggccatccagcttcatcataactggagccgaggtaactatggaaatccgccctttgctgataacccggctgcgacgaatcggacaggattgtacgtgaatcattttcttctcccatatgatatcctcacatacttctctggacccgttgagagagacaattatcagcccgatgaagagatttcagcttgagcttgataatgcgagcactttgaccgccgcaagagacgcgcttaagaatctcttctgccagaaaatagaagcgataatgaaagtacccgcaagcatcgtcgacgtgtgcgtgccgttgtctgatctgggcctagattcaatgctggctgtggagtttcgaacttggcttatccaagacctccaccaagacctccatattaacatccctgttatggggactacgggcctagactccattgcttcgctttgtgtcgtcgcgtctcgtcaacgacttcccgatgtacaggatgagacaaagcacgagacacacctaggtatgtttgctcctccattcgatacagctgttgtcaaggctccggaactcatatcggtccttgtctcggcacgacgcttatcagacttgctttttttacagagacggggagcctcgaccccatccaaacggtatgccggtctcctgcagcacattctcgattcacacacatgccgattgcctctcatgatgacgtctctgccactttcatggacttggcccgccgaaattggagacttgtagagggaagcacattcgagcctgttctgctcacatgtaccccagaccaccatacactagtcgtgggctggcatcatattataatggacgtgatgagctggaatgtattcttgaccgatctcaacaacgtgtatatgatgcgtcctttggcatcttgcgccgtatcgtacttggattttttgcaagaacagaatcgtgtcatccaaagtggcgagatggaaggcgcaatccagtactatttgcaagagatgcagtcaataccagaagcgataccacttctccccattgcaacgtcgccgccggcctcaccgtagaagctacggcaatcacaaaaaacagtgtcaaaccccagcagacgttcgccgccggatcaaacgtaccagccaggagtgtggagttacacccatgcacttctacttgggtccttcttgcccgcatgttttacgttgaggacatttgtatcggtgttacagatacaggtcgaggcgatagaggtcacttcaacggcacagtcggccacttcacaaatgttctgtccatgagattcagcgtcgacctcaatgagccaatttccaagcttctcagcaaagcaactgacacgactctgcgggcctacggtcatgcaaacctgccgattgatctgattatcagccggctgaatatgcatcaattcgatgactatccacccctttcccaagtggcatttaactaccgcgtcaggggcttgttcaaatgagatctaggcccttgccaactggttctcacgcagtatgaagatgcacgcactccatatgacctgactcccaatatggctatagactcaaatggtgatagtctggtggaacttgtgtatcaaacgaccagctccattcggccgaggcaactgagaccatcttgaaaacttattaccatttagtcaatgatctgccaacgcacatacacgtttcaatctgtgagagccagctttcctcgaaagagggtttcaagcaagttgtaacgcttggccaagggccaaggttgcatcacgcgtggctagagacgcttcctggaccggatcagccagatctatcgatcaacaccagatgctgtcgctgtcaaagatgaggagaagtcgctgtcatatcgtcaatttattcagaaggcaaactctattgtgttcatgttgataaacgcaggggctggcccagagctcagaatcgcagtgctcctcgaaccgagcgccgacacctacgtggctctaatagctattctatatcctggaggggtctttattcccttagacaccggtttaccatcttctcggaatgagacaattctcaaagcttgtgatcctcggttccttgttatgcatcatcacgctaccagctacatgactggtgacttaatgacagtagatatctctgatgtttcgttttcgcctgttcagccaacggatttttgaaagcttcctactcttcacgagtggctcgactggcactccgaaaggcatccgtctgtggcaggctgggatcatgaactatgccgctagcaaaagttgggtttagggttaggtccagtcaagatttagcagcggagctcaacaggctttgatatgtccttggcccaggcatggattgcatatgccaatggtggcacactaatagttgccggttcgaacgtccgaggaaatccccttgctctctctaaattgatacgcgatgaacaaattgagctgacagtcgcaaccccctctgaatacatgctaacggctactcatggcgctgagtatcttcgacactggcgctcctggcgccataactgttcgttctggttgcgaagctgtctccgctcaactgatggaccagctacgggccttacacctgccgctcgctactcctacagactgctatggccctacagagttctcttgcgccacaacttaatgatatcccggtctccagtctcggtaccagtacttcgtctcttaatggctccgtcggcttcccgttgcccaacacatctgtgtacatcgttggttctcaaactcgtgacattcttcctgttggttttgccggcgagatctgtatcggtggggcgggtgtggcacttggcgacctagacccaaaaaaaataaggagaaatttgtcggcgacccatttgctactgccggggacatagcgagggggtggaagaggatgtaccgaactggtgatcgtggctgtctcctggccgacaggtcactcgtgttcttaggaagaggagacggggattcaatggtgaagcttcgtggcctgcgcatcgagcttaatgaggttgctcatgttgttcttgccgcttcgcagggcaatttggctgatgcaaccgtcgctgtccgtggagatttcgagtttctcgttgctcacgttatactttctcagcatcatgagcttgccattcagaacctaagaatcattctatcttgactcagcctaccgcgatacatgataccatttatgattccctttggatgtactaccaatgacgccaaacggcaagctcgatcgcaaggctctccgcacattgccattacccgcggcacaacccattcgggaaaacaggatgaagactaagcatccccccttgaatgtcgcagaaggtgaacttagccgattgtggcgccagattcttggtgacgttgtcggtggagcttcgatccaagcagaaacggatttcttcgctattggcggaagctcattgcagctggttcgcctacaaaacgctctgcgcgagcgcatgggagtcgaggcatctcttcatgacatttatcgcttgagtagcctcggaaaaatggctgcacttatgtgcgatgagaggggccgcttggagtctgatgccattgactggtcggcggagacagacatacctcatgtgcagacggttattgagacagctgcggtcagcaacgtttcagaccatcaatttgaaattactggtactttgcgtcaaaagaaggaagtcgttttgactggcgccaccgggttcttgggatccga

SEQ ID NO: 3575 - DNA, 2130 bp, Emericella nidulans
aacattgacaattcgcggccgcataatacgactcactatagggatctttgtttcattgcttaccattgtctcacttggattcttactaagtcccttgcatttccgggtttcttcctgcacctccacgaatgatgcccccattttaccatgcatcggttcttattttcctatgtcaccggcacttgctgcatctgcatcgccgcatatcggcattccattccaactgagacgtgtcagactgactcactctttcatttgatgttttctcctgtcatcaactggcgttttggatgtttcatgcctatttacctagttagcgaggagtttatggcgttgtttccaactatgcaaggagtaaacgagcgagccgccgcatgagactgaatatctaggtcatttgacacttttgttaccttgcattgcattactttgcatccacactccaccatttacagagtagggtaatacaatctcgcattcttgtcaccacgttctctgttcgaggggttgactctgcaaaatacaatctcaagatgaaacaatgaaacactaaacgctgaattgcaggtctcaggctctgacatgacagaatgttcctggactggaccgtagcacatactacgcatcctgatggtctcgcactccatagataacagggtcgtctgatcaacgcctttgttgttacccagagtacttggtatgtaagccgagcagcccaagtatcatccctacgactctcctatccaacatggtaattctgtacaagttcaaagatagagactcaactgcttttctccttttattatatttatatattttaaatttcttttcttttcttttttcttttttttatttttacactgacgtatctctagctcaacataaacgaattgcctccgccatccatgacgctgtcaccgatgtcacaatcctctatctactcacgagcgcattgcaggctacggcacggccccagtcgctatatggtcaagctccaagcttcacgacatgtgcaacggatcttatcttccccacctcactgattcccagccaatccgttcacactgagtcttcgtgagtttggcagcgtgatttcaacccaagaagcaaggggcatgcactgagagcccgccctgaccctacgcctaacctgacttaagatcgacggatggcgccaaaaaagggttacagctcgtgatcctattatgacacaatcactccgtgcttgctgcagcgcatgatgagggttcatgtgcagttcaccgctcctcgaatggtctcgagtcgtagacatgtcggatatgacacctccggcagcggcagagcagtagatagagtttctagtagtcgggcgtacgcagcgtgattgtttctcgcgtccaaactctatgcaaagagggtagaatggacaagccttagcctgcagatgattcaccggccgggactctgggtttacctacgtatcagccgtttccactaccaacctccagtaccgtaccctgattggcttggcctgacctgacctgacctaacctgatatgcaggtacatacgccatacttcgtacccctcagttctcgaaaatctattgacaagggtaggcaatagccgagggcgctagagccgagcgcttgcatacatattacattttgtacatgctacctagccactatctgcagtatttgatttcgcgccctatctaaccagccccgcacctgggcaacacagtagcggttgctggtctagtctagactgaaccgttcattatgcaggtgctgtcttcgttgcaaccttttgcgaattgctgactgcaggctgcaggcagcactctacgttaaccccgtcaactctggaagtctgagtgcggccgttggaccaagaaaaccggggtgagtgagtccctgtaggccgctgcaaggctggtggtactgctagactgcagataatcctttactagatcggtagagtacatgtgggtactcgacctaggcgcgtggtgtacgagacggtaaaatcgacgcacgcgcaggggcccgccgcgctttccgtgccctgtaaatgcaggcaggtgccatcctactctggcttactgggcctggttaggtgatatacctctaccgtcctgaaaatt

SEQ ID NO: 3576 - DNA, 823 bp, Emericella nidulans
tgctcctcagtgtagacgtgaccacggcggcgggtaaggacaccgtagatgccacccatagcctgctcaggaacctggatctcgacgttgaagatgggctcgaggataccaggctcagcaaggagagtagcggcgtacaagacacgacgagcagtagggataatctgaccaccaccacggtggatggcatcagcgtgaagagtaacatcaaggatgttgaagcggatggagcgcatgggctcctcagcaacgggaccctcacgagtggcccactggaaaccggagacaacggagtccttgatttcgttgaggtactggacggccttggtctggtcaacgagcaagttggcgccagtggtgtcgggaccgaaacaccagatcttgcgagcatcggtgacatcccagttgtactcatcggcaaggatacgagcacgggccttgaaatcgtcgcgggggttgatcttgccctcctcaatggccttggagacctcctcatccagaggctcggcagtgaggtagagacggttgtgcttgttgggcgacttggacagagcagtcatgctggaagtgccagaaacggtctcacggtaggagacgacggggtcggagatacggaggggaacaccagcgtggtcttcctcaagatccttcaagcaaatttcgaggtggagctcaccagcaccagcaacgacgtgctcaccggactcgttgatcatggtcaagacacaaggatcggacttggagagacgcttaagaccctcaacaagcttgggcagatcaccagcgttcttcacctcgacggagcgctgcacgacaggggaga

SEQ ID NO: 3577 - DNA, 1265 bp, Emericella nidulans
  unsure (1)..(1265): unsure at all n locations
agtctcatgatcgcgtgacgattgaggggatgcccgggaaatccccagcgcggggtacccctcgcgccgatcaccgcttgatccattggctgaatagcatcagttccgcagtcgccagctgggttgtcataaaaggcacgagtcggtcgctggggactcttctcttaaacttcctgttcactctctgttccgtctcaatggcacaatataccaaaaccctaagccccgactccctgcaagacaaagtcctcgtcgtcacaggtacgcgtccagtgcctgatactgcatcattactaacagggacaggcggagcaaatggcataggagccagcctcgtcgagtatgctgtccagaatggcgcatctgtgtgcttcggggacgtcagcgtacaggccggcgaggagattgcaaggacggtgaaggccaacgccccatcctctcctacccgcgcagtctttgtccccaccgacgtgacaaagtacgactccgttttggctctcttcgacagagcgatggaggtcttcggacgcatcgaccatgcccgcgcaggcgcagggatcgtcgagattgggaacgtctttgatccagcgctggatatgcagtctatccgcgaggcaagtcaacccagtcttcttaatatcggtagaggacaggttataacaaattgaaaatagcctccacccacaaaggtcctcgatgtgaacctcctcggctgtctgtacacagctcgcatcgcgagcgtgtatctgcgccagaaccgctcagagccagaagcagaccgctcgattatcctcatttcctcggaggcgggctttaaggaatccccgggcctgtttgtctaccaagcctccaagcacggggagatcggtctcatgcgcgcactgcgactctacctccacggcccggcatccgcgcacaatatacgcgtaaactgtatttgtccgtggatgacgaccacggagatggtcaagggtatacaggagggatggatcaaagctggcttgccatgaactccccatggatgcagcaggaatacggcagctgactggggagatgtaactcttaatgggaccctcgatgtatgttgagggcgaacgggcatgggagattgaggcgaatatggatcgccttgagcctggctggctatggagaagagcccagtaagtccctatgcataggggcaagcagagaagtgggtataggatggtctgcgcattgtggatattgaggggtaccagcggtactatttccggatngtctgtcca

SEQ ID NO: 3578 - DNA, 1495 bp, Emericella nidulans
tgtcattgatggcatcgaatgacaatttgataggattttggagtttggccaaggcaaccgaggcttgatttggatctaatgatgctcaggtcagtccgacaatcatttgtagtccagcgataagattcacgagcgaacgaaccggaggcgatcttgtccctggtcgactgaagtaagtctattgcatcctggacactttgaatgctttcggacgattttaatcgctttgacaggcgctcgtgttctttctggacgagatccatcgtgagaatagcaagcggatggtcccacgcggagctcagcaagtccaacggttaccgctcgttcgtcgctcgaagagcaagagccatgtggagattccgagtaagagacttcacacgcttcagatatcaagtatcacaagagctgatagctatcggcagcggctctcaagataaatcagtttgaaggttggaagtcatgagtgcagctgagtgaggagatagtcgctctcccccatccgcaaatcatccaattacgacataatatgtcacgtggcagtgctggattacccctcgctgttgttcagaagaacgaacagagttcaatatggaatgggcagacagctgagaaaagtcagaagctcaagtgtccaattagttatgctgccttcaggtaacactccagcgagcagtatggaagccccagtatgttccgatatgtccatgaagatgtggaggaaactacaggcgcgccttggcagactcccatgatgcacttatttgccttgcgcatcaggctgcaattttttaccaaggcgaccaatcaccagtcaggaaagtccagaagactctcgcttacactagtgcaacgcttagtgtcttggcgtatacttataagactgcggccgccgccagacttttataattttttcttctttttttctccatcctggtgcaagggttttacacgtgtcagtgaggagccatccgagaccgtgtttttgctagttgaaaactacctagttgaccgctccaattggccttagggtcggttgggaatttttgaacacttaaagaaactgccctgacttcatcttgcacgaagtcagtttgatgggctgcgcccatcgttaggacgatttgctattcatcaccggcatccattatggatgctggttgggatgagaagtttttaacatcctattttagggtatatacatttgtaatgggatgtattcgctgctggccgctgtgtggcttctgctcataacttgcccattttccccatcccaacctgcacttatgttctaccatgtcttacattacagggcctaaatatcaattacattctgcctgagggcatcagacattctgcttgagggcatcaggcctagcgttgaagagcagttcgcgctgaactgagcgcaccataaggttgttccacggcacacaatagcgaatctcttggaaagcattcgaactttccgtttcttaatagacacataagactcatg

SEQ ID NO: 3579 - DNA, 1202 bp, Emericella nidulans
ctgcatctggtgccgttgggcatgtttctgcttagcatatcctcaagctatccttatgcttttgtcttttgttgcgggtttttgtcaccggtcgactgcattggtttattctccggagttaggtttactagaccgctggcgtaggactgtcatcgataaacggagtaagaattctcgaatattatttagactccagttgtgaagagtggttaacaaatcatgcaccacaatttcctattcagccactagattcgactaagcgaggatcctgctctacgaactgaaatgcagtaccgcaaccggctgacagtgcaggcatcttcacacggcccttcatcacaaccgccctgctcgtccttgctggaggatcccagacaacttccgcaacagtcttccgggcccgcgttgtgccggattccagaagcccagtgtcatctacatcatataacagcagaaggtccgcaggatctccgcatttcaggcgcacgtcgaaagtcgatcgagggctagagttaatgcgggacagcgaggatgaggacaatccgatagcgtctcgggcccgcgtggagacgcattcatatagcaattctgcgtcactcaccgttccggcttggtatataccaacgcctaaacaagcaaggcttaatgggtccgcggagccccatggtgtaaacgcgtttccgacattatttataccaatcacggcgtcaaggccgtgattctttatcatggaagggattggcagtgcacctcttgggttggccttgaacacattactgggtgctgcagccatatagcggccactagtgggcagacctacgtcctttacagggagaacatttttcatggtttttttggttcaggcaacccaagctattttttatgagaagagtgaatagacctgttctagtgttctctacaaatctatgcttgtcttacgttccttgcctcacagccctcttaaatagaagagggctactaagtgcttcctatctatatttcttatctatcttgcgctctatattttgtgatgttctcgttccacacaaaccgccttctttctctctatctattacatatatttttattagttctatgtatgttttttattttctttcacatatttctctttactcttcagcgttatcttctatttctgtctgtcatcctctacctaattcatatacggattcacatcacta

SEQ ID NO: 3580 - DNA, 6730 bp, Emericella nidulans
gtcgttgcgagcgtgctttttcttgcgcctttgactgaagttgtgctttcaattccgccttccatgtcgaaaggtggtgtagtcgagattctttgtaatactgctgtagaaagtctgggttcaccacgctggaatttctcattcgtgggtctgacagaagctgagcattgtattcctccgaggtcatttctgcctttgaaagcgcacctggctgttgcgggctcagcgtcgtgcccatgtcggtgcgttggttttctgcaggctcaccgggagtgatgactggctcccctaggcgatctccctgcccatgaggtggaggggagctgggtgaggtagcggactgagccggttgatccaaggaggagaagctgggaaagtcaccatagtctgattgtgtcgcatcgttcgactgcttactcgcgggcgtctcaggaggatcaggggacctgtcgtttgtcgcccgctcggatggccactgtgatgtataccgacttgctcggctttcatctttataattggtccggtggctgttcgcttggctgacaatccgaccaccttcaaaattgagaactttctgtccctgaccctcgtccaaaactcgatacagatcccaaggaagtaggcgtccagcgttgacactatccacaacccaggccggcttgacaacgcggtaccgccgaaattcctccctcttcttgggagtgagcgagctcgcgattatatgggttgcggaggtcttgccatcgagatactgaagaaagcccccaccatggcgcacgatgagtttgtgaaggtcttgcagcgatggttgagtgtagccgttcacgcatgctacaacagaacggaatatctgaggacagttatcggccgcggcggaggatcgaatatcattgtcgagattctgaagtttggtcttcttgcggcgcatatagtcgctgaacccaccaaactttgaggcttcatattcttcgccttcttcatcgtcaaatgcgtctagttgcgagagagtattagcgaagtcatcccaagacacaggtggcgttgagcggacacttacggctttgaattcgtttgcgcactgcgctcgaagttgcgtctaaccgagagcccatgaggggcaaagcaagatcacctcatgaccgggggagctgaacagagtaagacggccaatataggtaacggagtagcctcgagaaagagataataagacatctttctcgcggatagattcgcctgcacgatggagcttctgcctaaagatgcaggagacgcgacaacggtacgaaatcatgtgataatcttaagggcagtaattggcggtacatcaaagcgttgtaggtccaagcttgcttatagggtggaaagctccaacggtgaaaaaaaataaaactgtggcaaaaatggagccgcttttatagttgcgattcgatttgttttctctcctcttctctccttcttctcttaactggtcgagctttttcttcagaatatttgtcgcggttgatttctttcgtccggacctgaaggcgctccttttcttcgagatctatccctctcttgtcgcgctttagacgatcggtctttcgattcatacagcgttgccctagcaattgcgtttcatacatttctcataatctttaagcgccttcatgatgtctggtgtccagcccgttgctgtctatgctctccgggtgcccgctgatggtgccctggtccctgcagttcccgatgctgctgccatggtttgtcagtctgttatatgtatagagaaacatgctaaatagtggagcagttccgagtgagcatggctgccattgaccccgatgaggcccccgagtttgatgatgacagcagccgccgtcctcgagcgactctgaggattatccgcgctcccccgggattggatgaggaagactcggacgacgattacgaagacgaggatgactccgaagatgattccgaggatgatgaggaagtcaacggaggtcccagcgataaggagaaggcccggaaactaaaggaggccgcctacctgaaggagttggaggatgctatgtcggaagacgacgagtccgacgagggtgaagagttcgacctgaaggccgccatctcaaagctcgtcaagggcaaggctccagccactgatgatgacgacgaggatgctgaatctgatgagggtttggatcttgatgagatggttgtctgcactctggaccccgaaagggtatgttgcttctcactttcctatgcgtacgcccgtactgacagtatatttgcagaactaccagcagccccttgacattactgtcgctgaaggcgagcgtgtcttcttcaaagtcactggaacccacaccatttacctcactggaaattatgtcatgcctattgacgagccccgtgatgactacgatgaagatgatgacgaggacgaggaggattatgatttgtctccggatgaggatgagctcgatatggacgagctcatgatgggtgaggacgacgagagtgatgacctcgatggcctggagaaccctaggatcacggaaatcgacaccgatgaagaggaagcacccaagctcgtcgacgctaagggcaagaagaagcgcggtgccgatgaggctgctctggaagctaaggatgacaaggcgaagtccgcggccaacggtgagagcaagaagcaacagaagaagctcaagaagaacaacggcgaggcttccgctgtcgaggccaagcccgagcagaaggagaccaagaaggttcagttcgccaagaacctcgagcagggacctacgccttccaaggagaggaagcctgatgagaagaagcctgctgataaggcagagaagacgactggcacccttggcgtcaaggaggtgaagggggtaatcattgatgacaagaagctgggtaaaggccctgccgctgcttctggcaataccgttgccatgcgctacatcggcaagctcgagaatggcaaggtttttgactgtacgtttcctggttaattgttcttttggatatttggatatggctaacattgcccctttacagccaacaagaagggcaagcccttcaccttcaaactcggcaagggtgaggtgatcaagggctgggatatcggtgttgctggcatggctgtcggtggcgagcgtcgtatcaccatcccctctcaccttgcctacggcaaaaagggtgttcccggcatccctggtaactcaaagctgatcttcgatgttaagcttctggagatcaaatagagggattcctttacaacgtatggactctgaacgagccgggtgtaagcgtacgtgtggatgatatacctccgtcttttcagtcttttgtcttagcttccacattgcttttgtcttgcccaaaagaaccataggtgttataggtgttatcgaatcatacttctttcccattacaattctaggtaattcctcggcctttggaaaggaaggtggccactgccaccgtcgcgctttcttgtttgccgtagttcactcagtctcattgccgtccattcaatcgtcccattatctttcttctcaactcgtgtccgtcttccccaggcgctcgcaaattcagtcgtttatcctgctgctccatttatcattagccttcgcatgcgcctcgacctttcgcgttatcaagtatcttgctaacatctgcacaatgtccgaggaccaaggtcagcaaggacagcgcttgtccacggcgcgaggctcaacttgcctcaagcagaccatgacagagccagccttgtcggcaggtttaggtaccgatggtcctgtcggggccgcaaaggacaacatacgagtgcgcatccaatcacgacgccgctctcgcttactctctcgtttaggccgtaagattcccactcagggtaggttcacggtaggctggtacttttggttcttgctaatatacacctccctagctgtcgaaccagtcaagtctcatgagacccatagccattcttcagatgccgaaggaacctcacaccaagatgtctctgatcgtcgcaatcacccatgccatacgccaagaccatcaagccatagtcaggccgactcctttgaaagcgttgcacgaggacagcaaaaagagcaatcgcgaacaatgagagaggatgccgtgagtccagtactactcgatgtgaaaaggagccagtcaactccagtcgagcttgcgaagctcgtgtccctaaagctgtcgacgtcgtttggcagtcgtacggtgattcggcgttcgcagcctggtgtccgacagagtgtacgagctgcgcagcttcagcgaatgatgctcgaccgtggtaatcccaagagagagagaagttctggctcatcgacccctagtagcaaaagctcgccagttgacagtgtctccacggcccctacttctgtatcccctgggagtctggcaccctcagggagtaccaacaacgatccagcgtcaggtttcaagcatatcgactcacaagctgacttgccggaacgcccacttagtccagtgagggagtccccgatggtttcaccgacgatccagaccactgaggcaaccgcaatcgtgaaagtattcctagagacacattttcatactctcttatccgggctcgatgcacgaacacagcgtcgattggagctagatcagtacattgagacctttcctctcagcccagaagagtggttcgtgtcaggaaacactgggtcactcaagagcgagattatcttcgccaatatcgagtcctgaagagtcgcccgcaagacaaaacctctcgcgctggaactgcttctctcgcaggcttcgaacccctcaagatattgggaagaggaagtttcggtgtcgttcggctggtgagagagaaacgcaccgacgagcagactcagtcgggtcgagttccgcttgcccccaaaactaaccaccgtcaagcaatgacgggggtgaaaaaggatgtctttgccatgaaagttatcaggaaatcagtgatgattcggaactgccaagaggctcatctgagagctgaacgcgactttttagtcgcttctgctaaatcccgctgggtggttcctttgatcgccagctttcaggaccagaaacatctctatctggtcatggactatatggttggtggtgatttccttggcttgctgattcgacataacatactacgtgagagcattgcccggtggtatgtcgcagagatgattctgtgtattgaagaagcgcaccggcttcgctgcatccaccgtgacgtgaaacctgacaactttcttatctctgaatctggtcatctgaaaatatcagactttggtctggccttcgacggacactgggcgcacgaccagtggtactttacttatcaacgtcactccttactcaagcggttgggcatccagatcgacggtgacgctgaagaccagaaactgtcgcacgacgcaaacatacagtcccttggcacaactcgtgaggatggaagcatggaagatgactggattcaccctcccaccaacggcctcctgcactggcgtgacaagaaccaaacccgaacgatggcaagaagtgtcgtcgggacgagtcagtacatggctccagaagtcattcgcggccacccttatgacggtcgatgcgattggtggagcctcggcgtcatactatatgaggtacttactttttctctgcctttctgcttgtcgctcgtttaacatccgcatagtgcttgtatggtttcactcctttcgcttccgaggatcgtcatcagacaaaactcaagattcatgtgagtggtctccaatatagcttgttcattatgtctgggttttgctaatatagcatgaaaaagcgtcacctccagacattgtacttcccagtccaccgacccacggacaaactggtatcagcagacgcgattgatgtgataaactcccttcttcaagagaaggagttccgcttgtcttcacccaaatacaaacaaaacgacgctattagttccaagccggcaaagtgttccttctataagccggactcttcgaatccgagttatcaaggtcattacgtctaccccgatgatgcgacagatatcaaatctcaccggttttttcgtgggattaactgggagcagattcatcgcacgtctccaccttttattcctatggtcagagggtgggaagacacacggtatttcgatgacggcgaacatcctagcgaccgcgaagacgactcttctgactccgagctggatggagtccaggataaatggcatccgcttggcggcaagggagggcttcataagcctgacaagcctttgaaggcagatgttaaacccagttcgtatccgaaaggaaatgatggcgccaaagacactgcgatcgcttctctgaagcacaagaagagactaaaggaggcaaaacgggctcgagacaagatcctaagggataagcggcttcggagaactgtactagaaatgcgtaagaggggcgcatttctcgggtacacgtatcggcggccaaaaggcgtgactctgataacttcagagcgaggccgacaatttctcccgaggagcaggttaacagacctatatggctgacgagagtcagacggtacgagttcttaagatagttttatagttggctttgtgtttctcttgtttgttgtgtcactggcttggtgtattattggcttcgaaaccttccatctcgataacattaagagtcacaacagcactgac

SEQ ID NO: 3581 - DNA, 2481 bp, Emericella nidulans
agccaatcccttggcttcggttagacgcccttttgctgctcgtaacgtggtatcttccatattggcgacctgaaatgcaccaagtttccatggcttggatcgctgcagccacattcttaccaatttcttttggctgggctgccggtgatgtatccttggccgcctatattcaagctgcgcttgccagggtcgagtcgaaaacaagaaatgtctcttcccttggcgccgttatggctttcctctactctacatatatcgttctttatgcaattacctcccctatactcggcagttatatcgatcatatctatgaaaagacaggcggacctgatggaaacggcaatatctacgaagcgatccggaacgtgggcagcgtgcaattcagcgtggtcgcaattctggtcctagtggccacctttgtacctcgcggatcattgtctttgaatccgaagatgctccacgatgaagatctggagcatgaattaccggggctcgcacagctgtcttccaaggaggatttcaattagggcatataccacaacatcacatcgtactctgcaaatctcactatctatttgccactgaatatcctttccgttgtgccataattaagccagaattattcgcccaactttaacgatatattccaaatagagtagagttatggtaattggccctagcaggccgtaagattgaaagccatagcgttcaaagaaacccctattaaactcatttgtggttatccgcctccaactccgatggctcgcctctgcagccactcaaatgaaacggatgaatactgtgatcccagttccaatgaggctgctgctgctgctgctgcggaaacgggacctgcgctcccaaaggagacgaaattccatacccaccatcaaagatcgaagaagtgccagtctgtgccggggccaagggcaagcaatggtctactgagacgaatcctgtccccgttccagtcccaggagcagtacccggccgagatccgggtccaaactcaagcccaaccatagttccatcggcagcaggctcgtgaaggagcgatgacccatgcgctctcaagcttccaggaaacccagtactccctctatcaccttcactcctttcagaatcaacaccaactccaatagcagcgggagtggaagaatccacccactgcacggtgcgggtattcttcgacgagctcgcgcaatcaccactcccttcttggccttgcgaaagccattgcttatacacgcggttccagccgagaagaaacaagagagagcataggatagccagaaatgctacggaccccactacaatcccggcgattgcaccaccgctgagggcgttgggggaggaggttgaagaggtgcctgcagagggtgatggtgacaaatgagtagctgttgtctcggtattggggttcgagccttcagctggcatagattggcccgggaggagcatgtagggggcttcgagggcagcttttcgttgggattcccatgtttgtgtaatgttcttgatggatgttgctcagtttgggccgcgaaaggtggtgggtatggatgagggtacgtaccgggttaataacgcctaccatgccgttcctgatgcaggagtctgcgccagtacagtcgaagaaggttggctgatcatgaacatctgaggttagctaagctcctggattcctgaaagggctaaaagatttgggaaaatacctcttctcgatcaacagtccaattccacgtcggcaacctgccaacaacctgcccgttcacctcattgaaatcgttcttgatcccggagaaaaaataatttccatcggcaggcatgcatggtgctttccagtctgcctgcacgacggagtggttacgaggatagaactcaaagactatcaagtcgccgacactagcgttgagtgaccgaggcacgtagccgtgcgggtcctctttgggaccgactcggactgtgtatgttgccttcacagttgatgatgttgctgtatttgagttcgagaatctggatgctaatgttgatgaagggttgttgtaggacatgattgatgcctggtcgagagaaaccagctttgggggtaaggtcgggagcgttgtaatggatatttgaaatagcgagtatggcgggagatagaaaagaaaacaaatataaggtgtccataatcagatgcagccaaccgcctcattctaacaaagcgttcataactaggattctattatagaccgggcgttgaaagcaaagacgaggcttggaatgttcggccggatgtaggttttggttgagtcgaggctgcaacaaagaacctctaccgggtttgagtacgccttgaaatgtcatctgaataaagcctcagggcgattcacttggtagcacgctcaaaaaggttgcaaattggtactcaaacacgatcatcataatgccctagccggaatccaaaccaccacagtagatatcacggaatttttgcac

SEQ ID NO: 3582 - DNA, 2386 bp, Emericella nidulans
ttatctatagagagttcatacctcccttatttcggatggtaagaccatttgacacagtaaccacgctcacaggtttcgcaagaccgagttcaaaaatagcatgtttaagcttaacgaccgtgcgttgcatctcaaggcgtacgcacagcgaagcacaaacgaatgaccagcactagcgtccgcagttcctccatggctgtcaagtttctctaatgagctggtcctttccagcaatggcgatttgatccgctggatgcacgtcactccttggaagcaagatgttgaatcatttagaccgtctgggtattcttcaggccttaccggcgtgagacttcgagtcggatagagatggaagaagatgggaaatgcgcgtgagctcatgcgcgatgcaataatttacaatcgcaaaaacccaagtgtggtcttctttgaggccggaaatgccggatctccgaagaacacatgaaagagatgaaggagctaagagataccttcgatccacatggtggacgagccgcgggttacgagagatgctagatagcgaggtagctgagtatgggggcgagatgctgtatatcaacaaggattcgcgtaatccattctggcagatggagtacagtcgggacgagggtttgcgcaagtatgggatgattattccccaccgtaccatttggatggggatgggccactttacaatggcgaggatgccagcagttacaaccgcaatcaagactccatgccattgaggacgttgagaggtggtccgattactatgagcagcaacctgggactggaactagggttaattctggcggagtgaatatcatcttctcggattccaatactcaccacagaggagcggagaattaccgtcgctctggcgaggttgaccccgtccaattgccaaaggacagttggtatgcccatcaggtgatgtgggacaactgagtcgatatcgaaaaaataagcggacatatcattggacattggaactctcaatcaccaaggacattttcgtcgtctccacggcagaaagagttgagctgaccaacttcttgggctggggggagcagagcagcaggttcctttacacattctccaacgtcacttggaaggccggttcgcccaaggcctttggatactccaagggcgaagaaagaagttcttctcgacaaaaaaaaagaccagcggtgctccttccagtattcggcttgcttcccggacagcacctaatgtgttcgtcgccaacggagcagatatcgcacttgttgacgtgtaagtcgttgatgaagacggtcaacgggtccccatctctctaaatgaaatcgactttaccctctctggtgcggcaactttggcgtggcggtattgctcaaggccctaataattacatttttacaaaaacacttcccgtcgaaaatagtatcaaccgcgtgctatgacgctcaatcacacaggcgggcaaagtgattctacgtgccgcatatgagggactcaagtcagcctcgatcacactcactaccaagcccatctctgttgagagcggcctgagcacattcatcccagtgaaggacctgcagcctcacctctcacgcggatccacgccagctggagagtcctaagtagtctcacgtcgggcagtggaagtcctcaacgtgacagctggcttgccgagagtaactcaacggcctccacaggcaacaacgaagagactacatggcgaagcgactcggatcaggacactgcttggatcgaatattcttgggaagaaccacttaatgtgtctcagcttgttatgaagcagcgcagctttcgtaccgagagataccctatcaaagtcagcgtgggtgacacgatcgatttcgagggtacgactcccacttcgcttgggtacgtgacgcttgatcttaatgcgacaataggtgaaagtctgaaggtggccatggatgaaaacgacgacctaggggttattgaagcagagatctacactccggcttaaggccacacctatactttttctcatcagcggactccaaggctcatacgctttctgattggttcagatgagactaggaaatattctttgtggtccactctattgtacttccttcttgcatgggcattaggtaaccagaagtaaggtacttgctgatcagtattgtacttagcaccaaaataccatgctattttatgcttagccggattaaagactcagataaggtaattatatattaaaaaaaaaaaaaataccaggcagtatcacgtgattacgcgactatcctgacgcgatccgtcaagcctcgttcgcccaggatcagctatcttgtatgatcttatctccatcatttgcacctctatgagggtgtcttccgtttctgggcatctg

SEQ ID NO: 3583 - DNA, 2562 bp, Emericella nidulans
agtggctttttcaatcctcttcccaaggtcagcattcacacggcggaacatgccatatgtcgcctggcggaccctagggtgagcattgcagaggtgtcccgcaacattacccacaaaattctcctgctgtcccggctggcgaccaaggactttccagagcccattggcctgaacaaagtcctcatcagtaacaggcagctgctcggttactaccgagccagcccacttctcgtgctcctgggacgccttaacgggcttgtactgcagcggccggaaggtcgatgggtagttgggattcgcgccatggttgccattcacgctcattgcgccgtcgcggtggaagggcgtgaatgcgcgcagggggcagttgacgggaatggattgatagttcgacgtgccgaggcggtgacggtgggtgtccgggtaagagaagaggcgggcttggaggacgggatcggcggagggctcgacgccggggacaaggtgggagggagagaaggcggcttgctcaacttcggcgaagtagttctcgggattcttgttaagggtgaagcggccgaagcggcggaggggaacttcggattgcggccagaccttggtcaggtcgaaaatgttccagcggaacttctcggcttgctctggtgacagggtctgaacatagcaggtccatgaggggtattcgccgcgggcaatggcattgaagaggtcctgagtgtgccagtcagggttctcggcggccaggcgcgtggcctcggcgtccgtgaacgtcttgttgccctggtctgttttgaggtgcagctggacatagttgaaagtgccatcgggcttgatccatttgtaggtgtgaccggagtagccgttcatgtgacggtaggagtagggagtgccgcggtctgaaaagaggtgcatgacctggtgaacggcctcctggtgggtggaaaggtagtcccagaacatggtggcgtctttcaggtttgtctgtggattacgcttctgggtgtggatgaacatggggaatttgctagggtcacggaggaagaagacgggggtgttgttgaagacccagtcccagttgccctcctcagtatagaacttgcaggcaaagcctcgagggtcgcgggcactgtcaggggagcccttttcgcctccaacggttgagaaccggacaaaggttttagtcttcttgccgacgcccttgagcatgtcgatgacgatgatatcgctgatgtcgtcggtgacttcgaactcgccgtaggcgcctgcacccttggcatggaccactcgctcgggaatgcgctcacggtcaaagtgggcgagaaggtcgataaggttgaagtctggcaggaggagaggtccgttgggccctactcgctgcgaagcttgcgggtccatcacctgggattgtcagcctggttgatagcactgtcataggtataccttacaggacagccattggaagtggtataaaccgggctttcattgtagcggtacgtctctggaacgcgttagtttcgattcagaggccaacactggagacaaagagctcactttggtcgtcgttttggcccattgtgatggtgttgaagcaactctaacgctaattgatcgctaattgaagtcgaaaaaagaattgaagacaggttggccagaggacatgcgggggttatatgcagtccagagtgctcctcatgaggggacagtaataagtaagctaatgccaaatataaacctttcgagttgaaactgcttcatcgcgctaagaaaatctatatagagagcttcgaccaatcagagacgctgagaagctcaccggtggtgccccactatcgaagcggaaggtctttccgatcttctctctggcttctttgctgtctatcagccaattatcaccccaaaaccatacgatcttcagtctcccccgcactaagcattgaggaactcatctgacaggttaaacggaatccagggccagctgtcctcgagaatcggagaattccgcggtcaggttccgcttcgacccaatcttgctccagatcattattccttaagtcgatggcattgggctatggaatcttataatcagagcaacctcttcagcaggaggggactgttttcaatgatgttccaagtatttcaggtggcggatgatcgcatcgtccttctcttttagttcaagaaatgcgagctcggaaccgctctcagcctcgcgtccgccccaaaaagaccacgatctctcatctactatgcttgccccaaccagaccgatcttgttggttattaacgctcttctcacgcgatacttaatcgactttcagtctctgcctcgctcgtgtcgtctcctctcacttctctagctctctctattttcttcttctctatgtaccttcttttattcttctatcatattttttcctacatcataccccttcttctcttttctctatcaacttttcaatttttactctcttctcctctttacttcctttactcattcttcacctttcatttttctaatctcccctccactttatcctctcttcctctttaaatctcttacttcct

SEQ ID NO: 3584 - DNA, 5444 bp, Emericella nidulans
gggaaatagaggaagtagtagtgggagagggaaggagagggaaggtaaagaaagggagagagagggggaggagagtggagggattacagaaagaagggatggagagagggaaagaaagatgatgaccagaccgtgaaataaccattggaaaatgagcttagggactagaaaataaggaacaccagacaaccctcaaggtaatataggggcgccgacccatccaccagtcccccgcaggttaatttacgatcctcttcctcaaccccgaagtgtccatctttttccagaaaccccttcccatcttgcgctccaacgcattcggtacagagggataagtaatgcgtgccgctctaagaatccagtaactgctctcaagctcttcaatgcgcatcttgtgtcccccaccactgcgctggccgagcaagggcttgtattccgagcggcagacttcgtccgtgcagaagcgccggctgcggccggtccagtccgtggggcaggcatgacgtttaccagttatgcagggctggattgtgatggagaattccttgttcatttggtatttcaaggaggattcgagagacaatagaggattcactggggagtcgttggttgtagagcggatgtggtcccggatgagacggtagaggtagtcagttatagcagggttctcgatggtcactttataccagttattataaaggcctttgaaacagagggtatgggaggaggcagagggagacaaaccaaaaagcaccgcagcgagtactcgccgaaagcgatcgcgctcctgggcatcctcaaagcgcacaacatggataatcctacttgaacaccttagcttcaccttctccttgtcgttatcactcttcttcagcgcccccttattcaccatgtccacccagtcactgaaaatgaagtaatccccctcacggtggttcatattgaagtgtacggcctgccggtggcgctcgggagtatcaaaaccatacagacacggaatcaacggcggagcctccctaacgtctctcggaatggtggattccttgcatggatacgtgaaaacagcctgtccgcatatcgtccagtgtgccttaatatcctgtagcagatgggcgcgcgagcagtaccgggtttctgagtaggggccacacttgggacagattacggttgctccgtcccagaggttgcagcgggcagaacagcctgtttttgcgcacggaaagccgtgactgtcgagttgccaaaagaagtttgagggcttcttggatgtaatcttgccgcggcagctgttcaatgtccgtcgtagaacttgagatgctgcggctggaggttgaggcggacggagagggatgcgcgtgaatgcttatcacttggggtgataatccagaggcagaggcagcagtaggaggagctagtccggtgacattgcctgctaccttacctctgcccttgtccttggtgcggtgagcgctcgagggtgcagaggcagcggtagtggtccgaggagtagatgcagatgcactgggtgtccaggccgttgagtttgatgctgtgccactggaccttggagtcgaggcacggagaacaggagactcactgcctgcaatggggacgctgtcgtgctggatttccccttctataaggacaggaagcttttcaatcatggggcttgtgtgtttgacggagctctgcccaaagagcgaggttgacgatttggaatctagccatgcggtatcagcatatttcccatgttatgtgttccgaagcagggacatggaatgactgactttcggtcccagtcggaaccttgggctctccagccacggcattgtcagcgtctgtggtcttctgcgtagcagaaagctcaggtgaagacggttctgccagctcagacgccgaggtagtggctcccgaatctataaaaatggtgtcagtacgtctactgcattcctgaacgagagcataagatgggaactgacttctggggtctgtgtgaattttgggttcatcagtctgcgctttactagggtcagcatgcttttgcacagataaaaactcagatgaaggtagtgtcgcatctttctccgagcaagatttgggctcctcagtgacagctttgctagcgtcggtgttcttctgccccagagatgactcgatcgaaggtagccttccatcattgcttggagaagtttcggctccatcagtcgcgttatcggctgcatggaccttcctttgaacagagggctgctctaatggagagagtgttgtattgttatctgaggcttcagtctccaatgcctcgacgcgttgcttgcctttgcccttggcattatcattaggatattgatcattgatcaactgtttctctgcagcaaggccagcttcatagcaatcctgtgaggtacccttctcacgcagggcgagttcggcactgttacctttctcaaaggcctctgagagttcgccagcttgctcctcgacagtaacactgctcccggtattattcttcgcaggtgtacttgaattttcgccatgttcctcgacgggaacattcttacccttcttcttgcccttagatttgttcttcttgcgcttgtcagacatgaagtcgaggaggctcgccttcatgaaggccatagttccttcggaggccgagcctggagtatcttcagcagagacgaaagtcttgttctcagtcgaagattgtaagtatgcctcagaaggcggaccaggatcggaggaaccactaagtgttcgagctcggaggaggtaaattgcttcggtatgggtttgaaagtcgttggctggttttgtgttaacacaaaaaagtgagaatttgcctcatagagtagagaatgctgacgggagaatggagaacgacatgggtccgagaaagaatcacttcttaccagtgttattacctgcagacgcactttcactatcatcgtgactggcaatctgactctgactcgtactcggaagtgaatggcttctcctcctcaagcgtgcggctttaggagagcgggattcgatctggtccccggggcgactggacgcatagtgaaattcatccttcccttcacattcactctccagaggactgggctgcaccgaaggctcttcgaacttcgacgtaacatccggagacgcgggggcatctgggctcgccttcatctggttcctattgcgtacattgcccttttttccggccttcttaccactacgccacggcactgcgtgactggaggttttcttgcgaggcgccatttgcacgttcagtctgatgcaatacaatgagcttgatgcttcggctctctgtgaataagcggtaagtagaaaggacatacttaagattccagaacaacgtagtgagctgacttgtcagtaagagaacgagggtgagaacgaagtttgctatcgaagccgagttgggcccttttttgatgcttgtcttgctgcgtttcgttcttttatgcgttgtgactcaggtaaactttggggtttgaaagaagagaaatgtgttaaggatggatgaaaggcgagaggttttattataagttgactgttcatcgccatggcgatgatggtgcgatgattgtgctgtttccgatgcaaaagtggtactgaacattacgacttgcatagaatacagcatggaaaggtaaattgatgtgaatggaagactactgctaaacatggctttgcataccagatattactctttgtgagcgtttgtgcttaacttctctatggattgtctggcggcatagaaaggaactccaggcctttgcataccgatttcctgaccgggaaaaggcctcttatactatgctcgatggcaggaggtatgatgttttaagacgaagaaccacgcaaggactgacattatatgtctacagacaggtctacgctccgcatttcgtccataacaagccgactacacctccaggtccggaacctagagggctcgagcactttaccatgttttccagtctagtctagcttatatacgtcttgccaatcgactggggtacttgggaagtcgtttcaaatccgccggcaaggcagcaaacatactctgtggtggacaacatagtcgacgagatagcgggcaacttgagggaccgaataatcagtgactggagcgttgaagaggcatccgtcagtttgacaaagcatatgatgcgatgagtatgtgccaactaggctctatgatatgcgcagaatacagtttactgaatattgacggtggaatctatatcgcaggtcccttcgtcagcagcttgctggtcaccgtatgtgattaaaggctggtggacggaattagggcacagatctgcctagatacgtaccttcgaagaagcaattacccaacagctttgcggctgtagagggagatgcttttgttaacaatatgaaattcattagggggggttgccttgttatgtggtggactctaacaagtgaacgttagttgaagcacttcagaaacatattttgcaaaaccgagcgctgaaacccattagcatttcacctaagcattactcgatcaaagcccaaacaccatcactagatttcaagagaagtcctagatacagaagaaatcttatctgataagttagacaatgaagatgtgtctccgttgtctttatttggcccatcacgtgccgtcctcttgtatctccatccctctctctccacctttccaccctcactgcggtcaggcagctgatctcattcctcagatcaaaacgtgtctaataacactcagcatacgaactgttgactaaagttctagcaatcgcttaccagtcaagcaatggcccgctgcttggtctgcggcagtccagcggcaagtgaagcaacaagcgcctcagtcatgaatgcctcaaagacgacccgaagagactcgacaaataactgtccttgaaagaaaactcatgtggagatctcggtttcactgagatcctgtcctcggctggcgccgttgcggaggtcaagggattgggcgacgaggctgcgctctaagcgcccacgacatggctatatttggcctcgcaagcgctctgcagaaatccagtttgccctacctactggtgtcactggatggatagtagcagaatcctcgcgcgagatgaaacgtaccaaggacgagatcaatgtttactcagtgtttgggtggcttcggaaaccgtctattgcttggtatgaatagactgccttttgtctgaatgactacttgcccaatggaagcctattttggtcttcaaagcactcttttccacgaattgccttgcattcaataaatgggggattacccccgttgctgctgttctcctgtcctattgttctgctcttttctccctttcctatttgggccgactaacactacgctcacttgctattcatttcgatagatttcatgcggtatgaattcttcatag

SEQ ID NO: 3585 - DNA, 1631 bp, Emericella nidulans
ccttgattctccgcgagtgtggttcagtccagatgaatcccgcatcgatcactcgaattttgttcagtccccttaattttttcaagcaaagcgccaacaactcccgcgactcgagggccgcaacttgccatgagttcggaggtaagagccagcgctcacaatcgcgacagaagtttagaactgcctctcgttggatgccctgtgagatatcgatctgaagtttcatgcaatcagggcatatcgtcgtcccaaccaacggagccccgcaattgtagcagagcgttcttgaaccttgttagttgattagacctttgcgaatggaaggaagaggtgcttacgtcgggatctcgctggcaccatcagcctgcggtgccataggcacgggaacatcgatatccatcttgattttccctttgtcagaatatgatgatggtctgagttgagtcggggcaaattccgtgattaaagatcgaaaaaaaagttcgcccctcatccgattagtcagatagtttgagatcgataagatcacgtgaaatattgtctttccagctgattgtgatttcctatcttatctctgctaagacctgatagatcattataagagatatttgaagatgaataactgagagtcaaaatgagcactagagtgttggagtggaataatgacgatatatttcggcagcgggtatctaggtacgcggcagcgcccaatattttacacgtacatgcggccgtggaaagggatacttacgaaggcccttgggaaagagatctttactcatcagttaagcgaagatgatacgtcttcagagcctccagagaaaccgggctgggagccttaaccatcggatcctctccgagttttccagtcttgggaaaagcaatgacatcccgcacagagtccttgcccagcatgacggctaccaggcggtcaaaccccagtgccagtccagcatgtggtggacatccggcgcgaagtgcttctagcaggtgggaaaactctgttagtcgctcaggtggcatctgaaggacgtttcggaggacgaattcctgcacagcagcatcatggatacgacgactacctccaccaagttccactccattcactaccaggtcgtagtggtctgcaacgactttcgttgggtccgtaagaagcaaatccacatcggcagcactttttggcgcagtgaaagggtgatgtgtagaagatatcccggcagcaccgccttgaccgggttccgagtcgctgctgggagagaaaagaggaaagtcgacaatccaaaggaagtcaaatcctaccgcagcgggcttaatccggtctcgacagtagcagaataaagggcacgacgaaggtcaccctatcggagtcgaaaccgcttgtgaatggagcggcttcgcgggcttgcattgcgagtaaatccccgtgatcaggctcaataatttcctccacatattcagcagcttgtaagccgaatggttgcagtccgcataggggctttcgtgcatcgtatacgaatatacccggcccgccttgtggggtctcattgaacggtgcaccggccggttaatcaaggaattttgtgataaaataaaacatggctgcaggataggtgtcgttaccattgattttg

SEQ ID NO: 3586 - DNA, 2431 bp, Emericella nidulans
aaaggggccaacttgaaattgaagggcgggccaataagctaagagggcatcaagctgtgaggcccgtggctggctcaagtgggcctgttcaggatgcaggctcgtcttaagccgcaaacggaaaagagcgatggcgcagttgccttccattggtcaatatgtagatgcctagcatggcgggcatccagggaaccccctaaggccgggagggtggccgatgagtggtgcaccagaaaagaagatcgctgtcgagtctatgattcactgatgattcatccgccacttagtttcatccgagtgccggcatccccgcttggtttgggcctttgcgcatcgcagaatcatcgatagagatttattttgactgccacaccgtactcagaagtttcgccggtctgaaaactgcaggcgatgtggtaccgtagccttgcaagagcagcaggagatctcccgttttcgagcgatggtcaccgagaccaaagatttattgcctcgaagatgcgagctaaaggatggtttgattttggttgaagagacggtatcatcatgatgcgacaagcaaaactaccggcaaagcagggcaatccgccccaacgccatcaggagtggccaaatcctggattaacggaatctgccatgattcccacgaatatcaatatcgcgcagacacggaaagcgaaagcctctgtgatgatggcagtaaccgaattcgatacctaataattacgacggccgggctcgcaaagtagtagtgtggcctcaaagctcaggctgccgctctgccacccacccaaagtagtttcacaccatagaccagcagacccagtccagagactagagtcgctgctaagagtcccagttccagtccttggtctctgtttcgtttcctctgcactctccattccttccctcctttccaattctcccaaaacacacactctcctcccaacactgtccaccttgtttcgcccttgtccttatctaataaccctctactcatcttacgctctcacgacaactcttccgattctcatccgaccgcttgccactcttcatccacctacaacagatccgatagctgcgtgtactcgaagaaccctgagccgaccgggtctcatcttctttacctcttttaaacttccttttccacagtcaccattcatcccacactctttgcccagtcctcaccgtctctaccgagcgtggttgaccaccgacttccgcgcccaaccgctggtgtccttggtccccaagtcactctgtccgttacggcctccgaaaatgtcgagcagaacttcaagaagtcgagtgttaccgctatgagtgatgttgacactgccccttcgctgccggctgtcctggatcccggaaaacagaacgcgtttgcagtcaaggcgaacaatcagcctgccttgaggccttctcccaggagatcgtcgctttcgccaccttcccagaatgaaaatgttcctgcaaaggggttagattctgttgctggtgacaaggaagggccaccaagccccaaggctgattcggaggcagaaactataattcaatcgggtcgcgagtccctgtcaccagagaaaagacgaaagttcatcaagcatgaaccgaaacgacgtgatggtgatgcgaatgatcgtgatggggaaaatgaactgccgtcaagtgatgtccaggtgaggaagagcaagcctgcggattatagccatgatgttagcgaccgtgaacagcgccagctgagccctcaatggagagacggatcaccgcctattgtgaagctagaaaagtccgacgatgcccgatcggtctcgagcaggtcagaaaccatgaggacttcgagaaagcggagtttgagtgagagcgtcaatggcgattcggatgttccacgaccagcacgtcatagggactcaccggttcggagccaggaggaacatatccttagtaatggtgtcaacttcacgcggccggcttctacggatcgttcggtgtcgcctgttcgccgagctcacaagcgaacggcttctggccagcagctcacaaatggaaaaaagaagaaggcccccgcagctttcgctactgggtttcgaaggcaaagctccgaggatcgccaatcagtgtcatccgcaaatggatctccagatgccgaatgcttatgctcgaaagattgcttctgccgacggagcttcagcgtccccggccagacacacttattataagaagatacgcgatcagaatggcagaacccgcctggcgcgtgcttgcgcggctcaggaattggatcaggttaagcagcggtatatggaacgtccagaggatttgaacgttcctgtcaatgcgggaaatacacctttacaaatagcggccctagaggaatgagcgccgattgacgaattcctgatcgctgcaggatgtgaagttgaacctagcc

SEQ ID NO: 3587 - DNA, 9284 bp, Emericella nidulans
ggccaagaagcaagcgaacaccaaaggctaagcagccgcgtgacgggaaattatgaggcgaccgcgaggccgtgagactactcagaatagggcgggtttgtcttgtaagcgggtgggacggccgttccaggagagcggaaccagcccacaacaggagcaggagcaggataaggatgaatactctgtgaactttaaagatgggaatctctccagggttttaaatgacctagggcttcaatttgcggggagaagcgaagataaaagctgaagtgccacctgggcccgtgggttgccttgctcaacttttgggcttattctcgctgcacacaaagagcgcggaggggttatggccaggatctcctagccatctatttttcctagcatcaatcacattgcaaggcggcacctagtgtcatctgatcagatccagtcccagcttgaggctccacaggcagcggatcaatcaaggatgataaccatacagaataccaaggacagatgtccatagggccgattcgcctatctgaatttctatcccccaatcttccccaattcccattccaagagacccagacagccgttagctgccattgaccaactcggttacgccaacctcgacaaggtttcgctattgattctttctttggtgccagactcatggtttctactctgcggatcccccaaattcaagttcatctcaaaaagcactgcatcgctcaagtttcagtcggtggtgagagcgtcacctattcctcagagcagcaagacaacaccgtagaaacacagtagaattgatacatcaaattccaatgtcgattgccttcacagctgaccgtcgaaccagcgcttcggttcttctactcgcgattcccttgcatttgcttttttcatgacccagggaactggaaagccaaacacgttatgattttcgtcaccgcaagtctttactgctcattgctcagcggggtgttcagtatattcgaatatgggctggagcatagagacgacggggggtctggggtttttgccaggatatctacttgaagagcgccagtagcccagactacgattcgctttgttcatgttacaatgcccagtcggtgcaagccacccaaaaagcagatcttcagatgtcagccgctgagccgcatgtagtcttctgatcgctgcggtgggttccatctgtctgtaaagatatgaatgaaagaaaaactttgctagtcggagcaaaggtggtaggtttcaaactcaagagtcgttaggaagccattgccaaaagatccagttgaatgctactgcgcacaatgtgctacttatcattgcttatacatatcccggtacacctacagtactaatatacaaacagcgcccctgcatccagccacagctaccagagcttgcaggtaggctgcttgttggggcaattgaatgcctctttgaattctagggaattcgccatggtaccctatcaagcctagggtcagtcccattacaactgcagtgcccagggtacggattcgacttacaataattctcgctggcttaggcgcatgagggtcattatatatagcctcttgggccttctcaggggtcgttttgctgcaccaccaatttgcgtaagagatgaagaaaacctgctctttgctgaacgatgaaagcccaggtagaatggggtcagcatgtgcctcgtcgcgcttcttccaggcgtgataggccgctgtcaatccccctgcatccgcgatgttctcaccaagagtcaagcgaccattgacgtgaagctcagagtccttgccatggactgtgaaattcgagtactggtcgatgaagcattgtgcgcggtcctcaaatgccttcactgttttctcatcccaccaatccgtgtagttccctgtctcgtcgtaatgacgtcccgtagaatcgaaggctttgatatatgcgtaagttcctacatatttcattggatagaaggcctgagcttaccgtgagagagttcgtgcccactcactgctccaaacgctccgtaggacaagtataacggggcaccttttccgtagaatactggtggctgcatgatcccggccgggaatacgatctcattgccagggggattatagtatgcattgacagtaggggctgtcattccccattggtctcgattagttggcttacctagctcggaccattctttctcaaccacaaatctcgaaacggcaaggccgttctcgaagtaagtatcattcgagattgacagactctggtaatatttctctacatcggctgggtccatcacgttggggctctttgtcgggtacccgattttctggacgatattgccaactttctgaatgccgagtttcctcacttcagatgacatccagttggtttggtctagggtgaatacgaagcgttcctttatatcggaaacaatctgatctccgagtctctttgactcctccgggaaagcgtccaagatgtagaatcggctcaagatccatcccagatcttcatcgacagtggtgatgcacttgcgccaccggtccatcttggcttgaggatccttcccagcgatcacattgttgaattcacgcagtggctcaatctcggcactttcaacatgctcagaataggcttgaatgattttccacttgaagaagaattggatagtctctctcgacgtgtccgccaaaattttggacagcgatttcatataagacggagagcccacaattatacgattagtttcgtagtccgatggggcaaggtccgagataatgtcagatattaagatctggggtagaagtgactcggtttcctcaatgctgcgcgggttgtagtattgggtgacatcctcttgcacctgcgtagttggcgtcacatcggccaaggccgactcgaatgctacgacgtctttcgaaaactgtttccccttcttgctcccgacaaattcaccgaggaccgtctcaacaaccgcggtgtagtcgctcacagtctgagtgtcattgtagtactccctcgccgggaggccaatctttctagggggtgtcaaaaagatcactacattgtccggatcacggtcgtctggctgtacgagagtgttagtcctaatgttgtatactcatacagacgggaaggctcaccgaaacagacggaagcacaagagcaggaacgccactcttgtagagatacagcacagaatcggtcaagccggcttcagtccctcccatagccgaatcaagactatatatcttctcgaagtcgttcagcaatttcaccagaggctcgtttccgcggttcctaaccgcatcttcatcaaaacaagcgttatatccagccttcaatttctcgaatatctttgagtcagcggggtccgacggtccagtagactcaaggagatggcggaggcgcgtttgagaagcctcctccatataagtccctgcgaagatcgagccctggtcggaacgcatatcatgctggttcctccaaccgccacaaacatactggtcaaagtctgtgcaaggatctatattcgcgtaattggggtccaagttgcgaagaatatccgaagcggcgttgacgcattccggggtctggcagatagtaggtgcttcagtgtggggaccatcactgttagatggctcttctgcaatgaagaggtcagcaggatcgagagcacaatttactcagcatactcagcatactcagcattggcgatgccaggtacccggctgtcataaggagaatggcgctccctgtccacagcgttgcgtaacacgatgtggagagccatgatcggctcggccagcaccgcgatcttccagatcgctggagttttgagctctcttctaggtattcagattcagaaagagcggaacacttctcaagctggtgttcaaagtggtcttgcaggagaagggttctttcctcgccatcatcactacaaaagtcaataatgatctgctcttaacttgagtgcttgcgggtgcctgaagctgacctcattggcgagtccggcagagtaatcctatcacccatttcgtcaatcagaagttcatgagcttcaactaccagttaatacagagtatataatgaatataagacactcagaccatgtgctcgctcagagtttatgaaggttgtaacatgttaggcgccccggcgttttggagactctggattggtacggctgatgatgtaatcactaaatggccgatggtctggggtatgaggtagacgcaagtctgggtgtattcataccaaatagccaagcttacaaagtcaaatttgttccgaatttcactttaaaggactacattgctgtctgtaaattattggcacttgattattttcacatatgtctggcaaacttggatgggtttatgcacatgcgtatatatccatcttcagggtactcaggatgtttactctggcaggttattacaacccgtcctcagcctaacatctgtctttgatactaatcccatcattcgaaaagggctcaagttgcatatactcgcgcatctactaagtcctcaaggattcgggcttcgggacaactccaccgctctacatacgtgcccaaacggctccggcgcacagaaccaatgtgtcctgacctggttcaagtcaagcctgcatcaatcacttgaactcgccagctggggtagaaaactcaacaaaagggagaccattcagaactaattcgttacccagcccctatgcgcaacttactacaattgcacatagaatggtcaggctctcaggcatatcttgtgattgccaattgcctttaaaaatagaaggcttctgttacctatgaatcaacccttatgttcgatccaaccgtccatcctcttttgtttcagagagggatgcgctggactggtcagttcgacacatcatctttgaccctggtccgtaaggttagcggccgccaagtccctctgaagaacgttcgtttaaaaaagagtattgtattcgagccctgagactagagtgataaaaggacaccaatttctgtgctgtgagggccgcggctttgtttggttgcgtgttgcttggacagcatgatcgctttgctgggtgagcttgacggtccacttgacagcacggatattccatcggtactctgtaatatgggaaagtgccgtgattacagagtaatctgtgggtacgtcaatggcaggtaggcagttcctattgagataatgcttgaatggttgtgtatcaagcgagcgagggccaagccgtgcttcaggcccctgcccagggctcgctaactgtcatgtgctgacgtttggaagcttccgagcagtcccagtgcggaagtactttacttattcagcccgttttctcatggctatacttgcgattaacaaatgatcattactggcattcgtctgcgcggataaagctaagaggattagcgactttttagctcccgcgattgcaagagactctgactctgcatcttaagccgatgcttataatgccatttgggccacaagtccgaaccagagcggcgtagtctcctggagaagaaagacagatgcaataatggcaatcacattgtagatcggagtaagtagtaatatcctcctgcttagcaaaatctttgcgtccacgactcatgcagatataacgaaatgcgtattttggctaatcacaatatgccaagaatagccatgccacggccactctggaatcaaggcgggctatgctgctgtgctctgcatgtgtcgcgaagacggtgaagttctcaaccccagagcaggtatgcaggtacccctagcccctgctttactcggtaggtagtgtggagccactggaaggacggtgtcttatccgttaaaagatgaaaccggctggccggaagggcaagcgtttcgaagatccacctcgtttcaagaggcggcttgtcactctttcttgtcttgaatagcagcaggcaactcaatcatggttgtagcggctgggatttctgtctaatccgagaatccattcacacagcagaactgaaatacctggtcgatagaaccgttgttataattttctcttttttcttctagctgcaccgaacgccacggacctgtcactcgcaattttgcatgtggtacctgtgattgatggacgggcgggtgtattattctgacccatcggagcgggatcagggcctcggcgaccgttcattggtaagggtttagcatattacgaggaacggaagaggactcgctccacactcagaaaccgtcggcaagaaactagcggcctcatcactctgctgaccttcgtttgatcttgatgaagtagtcttaagattgaggtgaagaaagtagtagcattcagatcagggagaagcaaacactagttttgccctcggtttcgaaatccgaacattttagagtcacgtcgacgaagccctcagttgatatatctcaagaaaaacattctggaacagcatactttctcctggctcgttgcaagcaaaatatttgccgatctgtgcatgcgagatccgccgagtcgctggcaccaggcctcgtggcattatgttccttagcatattagctttagtccgtaaacgcaggctaggtcgctctttcggttttctgaggtctgagcactcggagcgcgcttcactttgtccttaactgagttcagagaatccagagaccttggtgttaccataatccaggaaagttgaggcggtatgggctcatcagcggtatgatttgggtggagtggtctagagagaatgcagcgcttaagaggtcaaactgggagactggggggaatttggggatccattcttaccgttcgtcccgcatagcatggccgtgtctgggagaggtcgagacggttgtttgtgcttgaattgcggtcgaagttgtcaaatatcaaaactgagaactggatcatgtagggaaggcttctgctgcctactttttattcgatgttgtccgccttgcagatgatggacgtcaaccaagctgtcatctggaattcgtcgaggacccagcgcgggtgcaggatcaagagccgaaccatccaagaggattggggcagttctagcaccaaagcggtagggcattgtttagctgtcaggctagctgagtagcacgcacggactaagggagagctagcaggccatcgcgtccatcggctgcttccctcggccaattcggccaactgcgctgactgtttctgttcctggacgattgttcctcggactggatttatttttattttcgatcatcatcatttagctttcttaaggccggccccagaaccacaaactgcagtaggtgaatccaccggcaacgaggttagctcctcccgtcagctcctagtgctgctggcttactagggcgatgaatccccctcctccgatcggacgcatcaatataactaacgaattgcacgacgccctcacaaactccattcttctttctgcctcctgcagcgaatcttcgacaagtctttctagaacctgtctctccttccgtccctgccttcctaacttatccgttccttgtcgccttgtacctggacattcatctctctcaattctactcggcactaattaattcccctttcctcctttcaggtctcgcttgcaacctggcataccgttcgacataacggttagcaacgtcgcctgaggaagctcgaaacacggcgacggaatcaatcattgtcaacaggctccctggatctgttcttagaatcgccgtttccatttccctacaggatttgcaaatactcatctcaccctcgaacggtcccccagtcacccgtgacgtccgactggcacttcactgctaccgacggtttacttgatagcgccgctattcgcgtctagcagtccgcatctgttaatataactgtcatactgagctggaaactgcggcgccgccccccgagtcgtgagggttcccttaggcgctcgattacaaagctataatcagagtcggaggttataggattttgcgcgcgggcaacgaaaggctagtccaaatcatcgcttgcttggtgtgccagggcttctaagaggggctttactcgtatgccttctggttagcgctcggaaatcgcgttgagataattcccattggtttctttgccttgtgttcaagtggtaggtgttttttgctttttttggccgcgtcttccttgattaccccatacaagggtaagaagagactagacgttaaatttcagttttcggaccagcgtacggtgcattaccctttcgctcctctttttatggtgtcccgccgcggcttgaggacactcctgattcggtacggcgactgttagcaatggtgttgaagttttaagtccgtatctgcttttgagtttcacactaacggactttccctttctgagtacatagatttctggaattcctgattattcgcgcaactattcgccatgggttgtatgagctcaaagcagctcgaagcgggggatgacaaagaagctatccagcgaaatgcgaggatagaaaagagcctgaagaacgataagaaagtgatggatcggacgatcaagattctgcttcttggtacgtacaaggttgaataaccactgcaaacatgcttatggctatcccaggtgctggtgaatcggggaaatcaaccatcattaagcaaatgcgcatcatccactcgggaggtttcccagaagatgagcgccgccaaacacgagcagtgatctattcaaacattgtggttgctttcaaagttcttctggacattatgcgaacggagaatatcgatttcgaacaagaaggcacaagagtcagtgatagtacctgcctcgtgatcatttgtatgctaaagctaatttgtaccacgcaatttagcctctagcagaattcgtggacaatctagagcccgatgtgggtgtcgaggaagcattttccgaccttcgagttcgcgatgcaatgaacgaaatgtggaaagacggcggagttcagaaggctgtctcgaagggccatgagttcgctcttcacgacaacctgaattagtaagctgggcgatgagcagttccttcgattccaaccttactgatgattatgtagcttcttccattcgctcgaccgattattcgagtccggctggcttccggacaatcaggatatgttacaggcgcgtttgcgaacaaccggtatcacagaaacactatttgaactaggccagatgaatttccggatgatggacgttggaggacagcggtcggagcgaaagaaatggattcattgcttcgagggtgtccagtgctta

SEQ ID NO: 3588 - DNA, 5046 bp, Emericella nidulans
aaaattcgatggatgagtgagtcagcgcatgaggaagaattagttctaacagcctgtgacagtccgtttcatagccccatagtaacgttggttgtgagtcgagatcagcgtcttttcgtagctcacgaagacattctgtctcgatctccgtactttgatacggtgcttagggatcagttcccggccggaagcgtgaacaaggctttgattttgcccgacgagtatgtataaatgcccgtgtcagtttttataaatggcatatttaacgcaatgcagagagccagaagttatgtcctgcgttctcgagttcctgtataaaggtgactatactccgcgcctacaacccaaaaagggccggaagacatgggaactcgagagcttccaggacgccaaccacccgggcggcagcggcctgagccagtcgacgatctttcactctggagtgggagatctcgttctccgggatactgcagtgtactgcgcggccgagaagtatggtctcgaagggctcaaggaccttgctctgcgcaagcagggcttgcatactggtatcccaatcgagatcctactccggtctgcgcgatatgcgtacgataatacaccggactcagagtcccgtctgcgcgcccattacctggccatgatcattcggacccgcgacatcttcaagcgcagcggaaccatgcaactcgagatggaaatgggacacaagttcttctttgatctgttcgttgccatgtgtaatcatatggacgatcttggagagatgaggtactcttccgtatatacatatactcatattcagcgctaacattcaagctctcagctggaagtgatctctcccggaatctacatggtgcacaacattcagaaacagaaaatccaaaaaaaaaaaggagaaaagaattaatctctataccgaattcaaagcacatcatttacgccagattgccagaacaacatgcaactttttttccaactgaaatttgcgcttttccaagctggctgccggcatcggcgccatgaaagttgcctaattacttatttgcgtcgactgcaccacgcccattaatatctgttcactgctctggtctgtgttttgcgagttaaagagactgccaaccacctgcccactgttatttctgcacctttgtgtcatctccactctttgagtcgctcatggtacttaaccactgcctggtctgaagaggccgccgggagacgaatataatgtgtgacatgaccaggtaatgcttatgtgcttctaagactcgagcttggtagaccgtaggcctgaaagctgtctgaggtatgcccgtgtaaatctaggttccagtaaactataatctatagagtctacgcatgctctagaaggtagctacatgtaatctgcagaagcggtacacagccgatcagacagcataatggtagagcattggtctcatattcctactgtcttgaggccctaaacagtaatgctggatgggtttctcggccagaaatacctcgagggctggcgttaggtaaaactcttctttctccctctttcggtggattcagtaccataaccctcaacacagtgagacaagtttgaatgatgagttcgacatcaagatcctcaacactgtatcattacccagttaggaagaagactaggcagcggctgtgctcgtaatgtaagtctgcagcaaactctctcagcctcacacatcctcgcagcctcatcgtccactaccccccaacatccacctcatcatggagccaaagcgccgaaaactctaccacgagtccgatactctctccttatacagcaacgagtctgagaccgtttgcctctcggatactgagtcggaaacaatctctgagaccagctgccgcacagtagcccatttcgctcccagaactccgtcaggattcctctctctcccggcagagatccgtttcctcatctaccagtacgccttttcatcgtcgtcagaatggtctgagcttgttcaagtcacagtcgaacgaggcccttcagctccccgccgcgcagcctataaaccgtccccgcaccaaaagctgaatttgaagtacacccggagccctgccctacaccttcccgtcgccctgctggtaacaaaccatcagatataccacgaagcggtcccagtccttttctccggtgttgtatcgggctttgcatctaatccgacttctctgaccttcctccttgtcgcttttccaacactgcccgcaatagtatacagtacttgcggctctaccccgcaccgctatatgtgcaaaatggccctctgggcgatcagctgtcatgggctgtgttgtgcgcccaggtcgctcgtctaccgtcgttgagacgggtcaacgttgtgtacaatcgtatcgaggatctacggttaaatccggtcaggtctcagcacgcgcggtatgggaaatggctggccatgatacgggctgaaaaggagccggaatttgagaggcagaccactgatgctgagatggctgggtgtcgaaatcggttctgcgagatcatcgctcccacttgttaggttatattattctactctaacctatgagcctctgcttcccgcttcaccctcccccaaactcgttcttgagccgaaacactgagaaagaattctccagccactcatcaggaacctggggtagctcgtatgcatcggttccagcagctgggggaccggctaggtcacgcaagaagtccatatgttccctcatctcggttgtgacatcgtggaacttatatgtatcccctttgagctcacctgctccgcctcccagctctcttggtctcctttactaggtagctcgcctccatgtccggcgtgatatcgggccaccgcgacagcttcttactccatcatccggaaagcaaaggcgccctaacaagcccgagaaaaagccaaggatggatcgccgattctgaaaacatgctgatatgttcctggtactctgtcggcctttataacaggctggtgagataagaacgggaccgagaaccggtatccagtcgcaaatataagtttgtcaacatcgtccagcttggagccgtcggaaaacgtgagcttgagtttcgtacgatcctggccttcgatctgaccgattgttggcctcacttcgacattcgacaagttccatatctccgttatatacggactatgtgagcttcgggagacatatagtggaccgcgcacgagcatgtatatatcccccacagcatcactcgccgagaagctccctccgacaatcaccactctcttgctggcgtactgctcccgcgaccggactgcattcacatgctccagtgtctccggatgagtatttaccacccgatccaatccaggaatcttcgggagaaacggctcgctatattgtcccgtagcaactatcaccgcatcaaactcctcctgccaccataaatcccttttccccccttccacggcttccggccgcctcagcgtcaacctccatttaccagaccatgttttctccactgatacaaccgtggtctcaaacgagatagacccctgaagccactcaaccaattcaaggagatattgcgcaacagtataccacggcctcgtcgcattcccgtccccatacctctccacggatataggggaattctcctctggaagtggagtgtgagtaaacgccatcaaatctgcaggcacattcgtgtctagccagccatacatcgccgtcggcattgtgtcgtctgagggaacgccggcgttgtcctctgcgggaatgtggacggtttctgtccctgcaccggactagccgtgctcgggtatgtccctgggaaccgctagggcgtcacatcgtaattccaggttccgccagggcgatctcttctctcgaaaactcggattctgtcaaacactttctcgtcgtgcaacgctcttagggctgagatgcctgctggcccggtgccgataatggctacggtggggtagcggcgcatcttctccctcctgctcctcttcttggacttcgaactcgttcaatgcaatcacccgttcttttcttttcttctaaaattctctccaaatcagagcctctaggggaaagatttaatctatccatgggaagaatatgaaggagccatagctgaatgtcgtgtgatgatgctatttcgaagcaaaagcacgaatcagggctaagggcttacctatcgtatcactgactagacattcctgcaactcatgatgggccatctcacactcggtatcgcagttaatctacccgaatcataaggtccttttataaataatggattgcagatgtcgaacacatttctttaatcgttcttaaatcataagttatcgaaccatcaactcgcctcattcatgtgtcaaccgaaccatgacttaccaaaatctgccagctccattgcagcaagatcatggtttcacatgcttttccgtttttgttgcctgctctggtatatcagatcatcttgattggcacataaaccacggttcatgcaatcaagatccttgatggacgccgcgactatagtacctgatcaaccaataagatcaccctaacccaataccaacaagaactggatcgaagtggcggtgcagtggcttgaacgtggagagtgtagatctttgcgccacatattacatcatcgtccagtgtcacgcccaccgtcacacagccaactctcatcagaacgctccatcccggggaatccaggccacaaaatcctgattagagatttacacctgaatataatcgaaagtgatactttaagacttctatactccagactccattagaacagaaaggtccagaactgttctgaagactcatttcgtatgcagtaatttaacagtttcttaaaagcaaaatggggacaagtccaatgcgactaccgacccaacacaaaggcaccttccgccttagagcctgtataagaacacaacaagcacggtggtgtggatccacgatcccgttctgcaccgaggacgaagcttttacagacattacagcgattttgcccactggaca

SEQ ID NO: 3589 - DNA, 1025 bp, Emericella nidulans
acacgagtcattagggcaacacatgcccccagaagttccaggcagaacaaaaagcttacgaccaggcgagcactttgcccaaagcttatgtaggccagatcagcatatgtcaccaaccctcggtcaacgtcgagacattttgccaggattttagcggtataagaagtggcaattgctgcaaagagaaggaacgtcaaaccaaatagccatccggcgtgtttcatggctagcggcaaacttaggaggccgacgccaatcagcacgttcaccgaattgaataccgtctgcggtacagtggactggccgacaacaatgctctctcgcgttccgtcttcgtgctgtacctgcttgacaagtagaggctctccctcgtggccgacagcaggctcactgtaggcttgttgctgcctgtggaactctataacgtgcttcctagcagactcgctaacgcgcgacgatactgagccataggaagtgccgagggctggctccaagtgacaggagctggagatgccatctctttggccagagctaactccatagtcgcttaaaaggggccgagtgagagccgggtcaaggtcaacatgtgacgaccctagtgatcttatgaaattaccgcttgaagattgccattcctcgtctgaatcgactgttgcgaaggaagggcgtcggggaaacacctcagggaaacatgcagctctctgccatgaccgggcgaagttatcgatactattgacgccacccgcttgtctaaatcgcatagagaaggatgccgacctatcgaatgatgaatggggaagatgtggctctctggaagaggcttaccttgatcgcccgttaagatattcactttcattaggctgatggtcagggaatgctccagaatccagtggcgaggctgtggatgatgttctatatgactgtgaacgctggcacccagtatggattgtatggcaccaatacaatattaacgtgatatccgaggctatatacaaaaagtgagtgtggtgtgcaccacataacag

SEQ ID NO: 3590 - DNA, 2660 bp, Emericella nidulans
acggaacatgcagttctaccaccattactagatattcaaaaggtaccaagccatccgaaccggattcgcagaagtctgaaggaggaaaggagattatgaggcaagacctggacgcataaccagaaggctctttagaaatggacgtatgcattttgcgaaatagtgcaggttacccaagatacattgaatgtcaatctagccaaaatcgaacaggtagcactggtctacttccccttcctgtcgtctccagctccctctcccctctccttcttcctcttccactcctccttgatctcctcccactgtttgacttcgttatccctcagatcgcccggaaagaaagtacccaacagactcttccccagcttttcgtatctcctctccagctccatcagcgtccccataaccttgacctcccctacgacctccacaaactccagtggaacaccatacgcggccggggtcctcttccacccagcaacaaagatattctgcagcattccaattcccccgacggcgataagataccagctcccggtatcgattccgctagccgtgatcagcaacgcaacccaggcaatacccagcacgatcgtcagaagctgtgccacaacagtaatagtcgggtagtctatcatgctgaaccccgtcgccaaatcctcgagatcgagcccgacgccatccgacacgatcgcgatagcatgctgcgctccattccccctcgtcagcacaaaattcttcttgtttcgattatccagccgtcggcaagcccacttctcgaccttccactgtgtcaaggccccggttccatagcataacaccgtcgccgcgccagtgatcatcagcacaccccagtccccattgattccagcggggatactagcaatccccagctgtagcaccgtacacagtatgccagaccagtagagcaggtccttgcccgggacgcccgcctgaagcgtcttgcttggtttatatacactgacgaccaatcctgcctgcgacggccgtggcaccttaatgccagaatcagggtacttctcatcttcgcgtgcttggtcgaatttccagcgggcgtcgatcaagttctgtgtcttttcgcgaatcgccggatgcatccagtagtcgtagtcgcgcatcatccggccaaggacccagctgttgttaccgcggacgtagccgtttttcccgttaataagactgcaccctgtatctgcgtcgggcatgaggcggtactcgccgagggcagagcacacagcggaggttgcgtaggagacccatcctgctatcatttagcaatccagcaaatatcaggtgtattattgcgcaggactggaatcgagacgcaccaaatgagaatgcaactggcgcaatcggtccgccgacaagctgcgcgagagcgcgatggattagatccccgccgatgagcagaagaatggtaaaggcataatttgacggattcgaccattcctcgcgaaaactgtctgctgtcgcacccgggtcaaacgtgcgggatgcgagattctggaggcgctggaggggtgggagtggcagcgtgggggccatggctgaccctggggcgtggaagtgaaggaatgaggtcgagaatgagcctagagatgaaagatgcagagctagtgtgaaattgagattatctgcaagccaggaagtatagttcacttttgatatcaacaactagcatgctgtcgcgctcttgtcgcgcagtttgaccggcagctgaaaaattcgcggtcaagagggctggactgagctgggctgggctgaaaatgctcgggctctctcggttaccatgacagttacataaatacagctagtaaagatacggggatacgttatgcggggttcacagctcgtattttgcggcctgttgcacgggacagggaaagccctagataatattaacgtggctagctggcaaggaacaaatagataactagttcgttcaactggcagactactccatcctatgctctttcttaacccagattttactaggcatgaatagtatggagaagagcaaatagtaaactctctgagtattaatacaacaaacagctgatgctttgtagttggtgatcttttgaccaaatgacaaaaccgccccaaccctactccatgttgggaatagcctcaatcctgcaatttatttactgattggttgatcatcctaccagccacttggtccgcttcctcagtagggccgtccgcacagtactgactccctctggcggctcttgggtcatccagacggatgcgatattctgatggatgactacatggatcccatcctcctgtctttcttgaagactcgccacgaccgccggtgctgttgctctctgcttcggaatctcggatagtatgactgcgtaggtctgccaggtctgccactcgacattactattgttcctggggagctggacgagaaaccacttcccatcgaggtcttgccctgagtccgcagaaccggcgcactggatcgcgcacccgcgttccacgcccgcaaagggctttccgagcccaaaattgacgagaaagccgtggtattgggcgagaaggccgggtcgacggatcgggttgaaagacgcaatatccaaaccggtctcagcgccagcagatgtgatctttgcggtgcgaaagta

SEQ ID NO: 3591 - DNA, 1689 bp, Emericella nidulans
gcatacgtacgaacagatgcgctgagcatcgataccggccatgacctggtacgctcgacccagctcactccctaaaacccaaactcttttaacaggtaaacaatacagaccacactcgaagggaaaacaagcacgaagcacctcgaagccgcagtcgacgcagacacagccgcagccccaacttccgccgacgaaccgcggatatcatatatccgcgaactcctcccctacagcggctatgtcaaccacatttccttctggaatacgctaatccgcccggtctacctcatggcctctcccgccgtcgtctgggccgtcatccttttcaccacatgcatttcctggctcgtgctcatctccctcactatctctcaaatcttctccgcaccaccatacagcttctctgttggtgcagtgggtgccacaaacgtctcatccttcgttgcgtctcttatcggaacactcgtcgcaggaccattagtcgatggggttgctcggaggttatctaagatgaacaaggggatctttggtatgcttctttccctctgaccccatccataccacctaccaactggactaacgtttccatcaacgctctagagcccgaattccgcctccctatcatgataacatacctcctcttcacggcaaccggctttttcgcctggggcgcctccctctccaacctagacccctggcccattcccgtgatcgtgtgcctgggtctcataaatctaggtgtgcaactagggacaacgggcgtggtgacgtacgtggtggactgccaccgtgagaaagcaagcgaggccttcgcgacgatgaactttgtcaagaacctgttctcattcggacttactttctatgtgaacgggtggatcgatacgcaaggggtacgggatgttttctacacaattggcggtatcaccatcggtgttacactgcttacagtgccgatgtatgtgttcggtaagagggcgaggagctgggttcatcggcatcggattgcagagaggctgtaaggactctcaacctttgtctctgagttgaagttgtggggcttggttcagtgggaggttacttatcgttcttgagtttgaggaaataggtacataagcgttactgggtcaaacggggtccgtgtcagggttagggtttgtgggataggtataattggtatacggcggatagttccttgggtcttaaatgcagagtttatattaatacattcaacatttccgcatggtcaaagtgatcagttttgactatcatgtcatattataccaagataacggccatacaccccaccttccattatcctctcgccgtaccctaacctagccagaggtacagttaacctgcaggagactctcgttgacctatatcatccattagcgaacactcctcctcggcagacacaggcgggcgaggtgaattgttgactcacattcgtgcaaataaagtcatttgtaccgctcgggctgacaacatcaatattctcaacatagatattggagcaaacatccggactcgagcaaacaattgagccgatgttcggatcccgcgctgacgatgtcgttccgtacatattggaaatgtagacgtcagagatggtcaggttacaaaacatgcgtcactgttagcaaaggcaacacaatccgacaaccttgggggatcacatcagtcaaggta

SEQ ID NO: 3592 - DNA, 11699 bp, Emericella nidulans
ggccgataatacgactcactatagggatcatacctcaaaccggcttgcggttgcaaagggcggcaaactcgttaacctctgcgctgtggggttagcggaatttccgcaactgagtcggagatatgatatcgattggttctggcaaggcctagatgactcgacagcttatttcaaagctttgatctcgaatcagaaaggcgttcatgtcactgactctggaaaataccagcccatcgatacatgcagtctaggagatatcaccttcctccccggcagatactcgaatgcccgcgcaatgattcgcaataccagcatttcatgtcctgggtcagatcttgtcatagatatcagacatgaagcaaaacgacccctcgtatgaatctaccagtgtcaatgcccagaacattactccgtatgtatcacgtggatgatcgaccagggcccaccggcgcggtaggtaggctagtgtcgcgtctcgccgctcagacaggttatctggactattgattgctttcaagtctcgtctccatctcatcacatcagtcttcactattttttggtccaagaccttgcggtggtaagttcttatttagaaaacccttcgtcaagaactgagtgctagtcccaagagaagggagtgaaaattgaatcaaattcaagaatccatcttctaccgcagctacggagactaacgctgtcatttctacagacgcgttgacgctcgagctttaatttgactgcaaacgcctcatcgtattctgccacatcatcttcgtcattcgcttccctttcattcataattgcgcttcttccccatctaatcgttaagttacctttcgcgagttcgtcaccatttcgttctctgcaacaatcatggcgcttggcaggaagcgcaagtcagagagcgtttcagttgttgaagaagctggagaggctgatacaccttccaaaagagtacgtgaagttgaagcctgtatggtagatatcctcatgagtgaggagaatcggttgcgaataatgattggaatagatcttgtggatcgcaaaaggctgacatggtttccattgacagatcgcaacagacgccacttcaaccacctctacgcccgcaacacccgctacaggagagaaaagaggtagaggccgtcctcgcaaataccctgtgggctctacccccgttcgtccagatggacctaagagaggtcgcgggcgtccccgcaaggaaacaactggcacaggtatctaccacctttcggttctacagcggttttagagtgttttggttattcggagctgtatggtcctgatttatgacctctccatgtgtctaacgcagattagctactccaaaggctaaggcaacacccaagtcgaacacacctggtggcgtctcgcggggccggggaaggccgaggaaaaatcctattcctagtgactctacaccaactgcagatggcaacaccgccaacgatagcggacgttcttactggcttatgaaagctgaacccgaatctcgaattgaaaaaggaaaagatgtgaagttttctatcgatgacttgcgtgctgcaaaggaaccagagccatgggatggtgcgtcttcttcttctgatgtagcaacaaatggtccggctaattcagttgcctaataggcgtgcgcaatcccgttggtaagaacgttgatggagcaattaattgaagacttttctcacgaaaacacagcacggaagaatatgcaatctatgaagaagggagaccttgctttcttctaccactccaactgcaaggttcctggtattgccggtgtcatggagatcgttcaggagcactctccagacggtaagacgtccctaaagtgacgaggttggttctgatgctgaccctttattcactatgcagagactgcctttgatccctcccatccatactacgacgagaaatccaagcgtgagaacccaagatgggtcgtggttcacgtggaatttcggcgcaaatttgataagctgattacgctaaatgaacttaagtctcacgccggtgctaatgcgccccttgagaaccttcagatgctcaagcaagggcggctcagtgtctcggctgtgagcccacaagaatgggacttcattatgagcctggcgagcaatgaggcggcatttggtccctcgaaggaaagcaaatcatacgatgctaatgaaccggccaaaaaggatggaggcgcggagaagacagaggctaccggttaagataaagcaatgggaaatcaagctatttcgtcgcttctcaggatctaagttcgctttattggcaagcggcattgatttcaactttttctttcatgtataatcaaagccactttcatcttctagtttcattgctcctatatttccccatagctcgcagtttaatcattctcagcggcttaagacagcgaagtggagatattgaggtcaaacggcagtgcacaaacttcagaacggtgcttggtaatcagctcttgatggtcttcctcgaagctttatggctcttaaatcaagggctttacagttggtctccgccatttgacgtctaactgaattcctcagaagagcaagtctatccgatgaggggccgccaaggcgccacgcatccgacggttcttatcttttatatcgcatcactgcttgcagctccagaagctctccaacacctcaccgtacctctcccctctcttctcctcttccccgccctatatgtcctctctttcatcttttctccctcgattccgtctttgtgggtttcgcactctctcttttacctttcagtctcggcggcagttttattcacaattgaccatggccaccgctgtcagcttaactgcccccaatgggcacaaatacgagcagcctattggtttatttataaacaacgagtttgttgcatccaagtctggcgagaaatttgccaccgtcaatcccaggtatgcatctctggtgatgcacggtagtagctatattctaatatacgcgctagtgatgaagaggaaatcacccaagtttatgctgctggagaagaggacatcgatatcgcagtcaaggcagcaagaaaggccctcaaagatccctcatggaagcttcttaccgcaacagaccgaggcaatctgatgctcaaattggcggacctcattgaccagaacaaggaaaccttggccgtcattgaaacatgggacaacggttggtagaatttgtcaattttatctcaacctattctctaactttcataggcaagccgtaccaggtttccctaaacgatgacctctcggaggtcgttaacacaattcgctattgtgccggatgggccgataagatccacgggcagaccattagcacaacaccggccaagtttgcatacaccctacgtcaacctattggcgttgttggccaaattatcccatggaatttccccctagctatggctgcatggaagctgggtcctgcgttggcctgcggcaacaccgttgttctaaagcctgcagagcagactccgcttagcatcttgtaccttgccaaattcattaaggaagccggttttccaccaggtgtcgtcaacattgttaatggccttggtcgtgtggcaggatctgcattggttacccatccaggcgtggataaggttgcctttactggctcgaccatgactggtaaggaaatcatgaagatggctgcaggaaccatgaagaatgtgactttggaaactggcggcaagtcacctctgcttgtttttgacgatgcagacctcgagcaggcggccaagtgggcacatatcggtatcatgtacaaccaaggacaggtctgcacggctacgtcgcgtattcttgttcacgaaaaggttcacgatgaatttatcagacttttccgcgaggccgtggcgactaccagcaaggttggagacccattctcagatgacacgttccagggcccccaggttaccaaagcccaatacgagcgtgttctttcttacatcgagagcggcaagcaggagggcgccaccctggtcgacggcggtgtcccatacaagaacgtcaaggacggcaagggtttctttattgcgcccacaatcttcacaaacgtcaaggacaacatgcgcatttaccgcgaggaagtgttcggaccgttcgtcgccattgccagattctcaactgaagaggaagccatcgacagagccaacgacacaacctatggactgggagcagccgtcttcacgaaggacattgagcgagcccaccgtgttgcatctgaaattgaggctggaatggtgtggatcaacagcagcaacgacagcgacttccgcgtgccctttggtggtgtcaagcaaagcggtatagggcgcgaactcggcgaagctggcttagaggcgtacacccaaatcaaggctgtgcacgtcaatatgggaaccaagctgtaacctgtttctgatgttaagatatttaaataaggaatataaatgacaatttacgagttttcggtccgaataactatcatattgtttcttatactatacgctgtatgtacggtttccaggcgatctgaattacagcctgatgcctatttttatttgtatgttagccttcgagctagagcacagcatctgccatatatgcgggtatcaagaaacatatatatgggcttacatttctatctcacgggatacagtcgctatctaactattcacgttccgtaggttaaatacaagaagctaactcttatatcaacatcacaaccagaaaccgtatttgttgtctgtcctctaactgagcatttgcaggttttcgacgggttgcgtttgttatcaatgaaaccgtaatctattcaatacctacgaaccacccggtctctgcagcttacctaggcgttccggcctaggtaaagtaggtaacctgcgtgagtgtacatggaaagcagattcctgtggttctgaccgttgtcaagacgggctctggccgttccggtgtcccggccacgcggcctggtccctcaattgacaagacctcggatagtactgaggttccagttaggcatatacgtaaattagttaaacgctcagcaagtacttgtttttatcttttacgatgcattttggacttcgcttctttcttcttctgctccagcctgccgaagccctagctcgtattaatcgtccccctacgcagacgaaccaggggatagcaagctggtggcgtaccccgattgctggattcaagagacacgggcttctattgaaaccggtgtcgctgcttcatgcatcgttaacttcatggtctttagcatagcgtggttgtttctcatccagtcaactttcccagggacccttatttctgcgaagaatggtggatgattgcccacgaactatgcaaatcggacgcccgaaccggccttcagcatggacatccctgatagactttaagaccatgtttgctgcgatacaaacatcactacctgatcttttccagagtgggcaagcaggtgagtgcagaaagtgccgagaagacatgcgccctgggctgcctgatggcttgggtcgagatccacggacctgcttaaataacgaaagtttgcgcatttgtaagccatggaggcatagccatctaggaaggatttggggcgttgtttgcttccctttcgtcgtcatcggtgcgatacgccacgttgcttcgagcctgaagaactgcaagtgacacttggtaaatcgatagtaccagtcggatttcaaacaagctcagctgcctgcattttaggcacgtagcccagctgaggaagcaagcaagcaagcaagcaagcaagcaagcaagcaagcaagcaagcactcgcagtagccggggatcgctagtctaacaggcgacagcgcccaccccgaccatgcgtgcataccaaatatgcatgtaatttcggccccagttgcagggcttgcagccctagcataggtgctagaccctttgctggcagtctcacccttttccccaacgtgcagatcgaggtgtcagagagcggagatggcaacagtccgagcgctaatttccactgaatgagaacagagtggcgcatgtttggatgatgtcgtggcgagtcgggaccaggtagtatgtttcattgctacctaatggcttatgtatcgacttggagctcgagaagacggcgcccgcttcagaggaagtctatacaagttaacttcataaagcggtggtaaaaatcgacgagttgaggcaggaaaggaaaccggaacattcatgggcacgatgcgggataaccccggaacttcgaagcgttggttggagatgtacacaaacaaggagttggccgtactgggtactttgcttttagcggcatgagacaccaaagaggaggtactatgtacctaaggggacctagaacaggttcgaaggtgcccaaaggttgtaataaataacagcgataccgtatgcgtatggttgataccggtcgttacaaagtacgggaatagttactagcggggcgtgagaaaggagctttagctgcagttccattcagcttatcatgcatgtcgagcccatgtaagatacgttgtcttgcatgaagaattgatcatgtgagtgagagttggtgcgcccatacccaaagtatttaaatcagatgcctaccagtctggctgcctgctgcagcgttgtgggaaggcatcgcgccgttgatcaaggctcgctcaaaccgactaatcttggacttggaggttaggttctggaatcggagcagattgaaggaacaaatttaaaaaatgaaacaagagaaataatgattaaaaacaggattgaacgttttagctttacctcaccgcattttctgcgtactccgtacgttggatccagccaggggaaggcagagccgactttgttggtgacggcttggtgacatgaagtggaacattactccggaatgttgtccagaattgagaatccgaagagctatctggctctgcaagcccgtttgcctcctgcaggtactattcttactacatactccctgcgaaaactgtctccgcaccagctgatgcaccatcgtactgcatgatgactaatcgaggtcgaacctaggggcaggcggtaccggagggcagtatgccgcgacagtaattgcctgtcagtacgggtcctgaccctcgacccaacagcgggtttcgttatggtctattcccaggagtcaaacaaccatgcaaaagcccagtgaagctctttggtgtgtatcagccaagctgaaaaccgacaagatcacgtctttgcggctaggtggcagcaggaaaagaggcttctgacaggtccacgatcgagcgccaccggtgacgcgccggcagcgcactggcgggcccgtgggttcacattccccaagggcacagataacaagatgcattgcagaggctgcatctacccctgtgggaccggtccagccccgggacaaacagggtgaaagggatgggggcggagtgctggaggtagggaccattgtgagggtcaaattcccttacacaatggcttaaaattcggaagtaacggttactcgacagtgggcatgtacatgcagtccttctggaacaattactgcctaaggaatcaatgatccgcatccgaagataggggtccgcaaggtcctggccagcgagtgaccagttccctgtgcgcagtggacattgctgctcaaatgctacaggcaggccgagcaatcctctgacggtgttttgacagcatgcaaagacaggtagctccgtatatgtgggttgcttgaatcgtgggtacgccagtagtatatgcaattccactttcaagcatgttgctaacatttttggaagcaaagagccgaaaatactcagacagggaatctctgcgcgtggggctcttgtgtactggcctagttcatataagttatttagcctgcaatattttggaatattgcatggaatcgcgtgccctgtttttgaagagcttccataactagaagccctagagatcgagaatcaaccgaaataaacggtgaatcggtagcatcaataagacaacaactgaggacctaaggaggtgtccccgcctcaatgaccatttttgcagctcgatcaatcgccccttcctgctcccgaatcccaaataaatcagctgcaacaaaagtatcatgcggcgcattatcaatctccacaaactcaaccctacaccctctctttttcagattagtcataaactcaacgtgggaatcatacaacacctccgcacgcccggtctggataaagatcggcacctccatctgaaactcctgtcccagtgggctgatgtatggatagaatgggtgctccctattccacccgtctggaatgtaacagcgtacgccccagtcacccaacgcgtcaaagagaaagtcggttgagacgttgcggtgacggtcgtattggctgcttcctggggtgccgagatcaacccaggggctccagagtaggaccgcgcgcggaagcgggaggtgatgatctgcagcctcgttcttgatgtatcgtagaaatgcaatgaccagattcccgcctgctgaatcccccgagagcacgatgttctcgggggccacgtcaagcgtgtacaggagatatgtgtaagccgtgaccgcgtcctggagagcggcagggaagcacgtagtgcgatcacgtgaattcgacagtcggtactggggcatcaggaccgggcagtccaggtccttgctcaatgcaatgggacctgagcagaatgcgtctgcggggcgagcgcccccgagcacgaatgcgccgccatggaaatggaggacaaccagcctgggcgtcttgcctaccggtggcggagcttcataccagaagccagcaatcggggccgggttgatggctgggttgctagcgaggacactgacgtaaggggaggagtaacggtgctcgatcttctctggatcgatgaacacaaagcgcgccttgtctgcgcctggttcaagcgttttgggaagctggaattctactgcagtcgcaaaataaaaccagaatctcatcagcctcgtcgtcaatgccaggcggtaagttcggccggatcggttcgatggtggaaggtagtaaagggcagcaaccaggacgcgcagtggcaaagttgagaggtaatatactgtgaagagaaacttgaaagggtggcgggtaaaaagagacggcgacgccatgatgagaagattgaaaactcgtgagatgtaaggcttagctcaagggaatcgactttacccaaagatggtttttatatgttcagccagagtcgagcggggaacaagcaaggccgcaaggctgcaaagctgacagactagtgcggctgaagcaacgagcttcggaaactgaacacctaaacagcgctcggcaggtgacggaaaatttatgactaataacgcaaacctacagggctgatgccgctgggaacgaggacgagtgtatgtgttcgcagctagggctctgggcaagatgcggcaatcaggttcgtgtataacctggagctcttcaatcgttgcaagtgcctgctgaaatgtggggtatttgaaatacgtacaccgaggctgagctaattaggacgctctcgctttcagctacttctgtttattcaatgagaaccccggcagcgaatctcgtcaagagtggccttgcttagggcatgacgatgattttagtgcagaatggtgcagaacccgtctccgctctggaaagaattgagcttaacgagcatggagcagctaagtactaagaaaagtctgtccgactagggcaggacaggacggagtttatctggcacgatgatcaggttcagacaaggcacgaggtcaggggagttgctcggacctgctcctgcttttaacagagacgaaaggtcaggtacaggtagttgaacttcaatctttgtgtgcacaaatgctgactcgctgatacaggtcctaacccaacggttttcgagtgtggagtgactgagggctgcagttatcaggagaaggtctattggtccccatctcccttggcatttatctgacagttagccatacgcaacctagctctgacctgattaatgcaaatcagtacccacgccgctggccgatctagtttggcgaattcgtgctggaggcggaatgtcagcaagtcaagaatcaactatctcgaaagcatacataggaggtataagccttagtctgcagtaggaagacctggctcggagtctgacaacgacgaatcccctgaagccacttaggagaaagagtatatgcagcacctggccatcgtgttggggccccaggtttaccaaaagttgacttccaaggccaaatattagtgatcctaacaaatattaccctgtcagacagtaatcacagccacggtcagcgttgtcactttgtagtggtgcgcactatccgagcacataaacaagaatttcttcgggggatggacctacaaaagcacagagtattcggaggagccagttatagagaatgagttgtagacggcggttatatgttaggatcgggccatccagcctttgagattttccagctttttcaggtgtaaagcaaaggttatattggctcattcgtctgggtgaatcacttccgtgttgtataacacggcctatactagcaccagtagtcgatacccgaccgacgttatcgcaagggcgattagacccttccagctatcttgatcttcatagatacggtatccaagtaattgtgcaacctaatcaataggactgcatctcgtgttgactcttatagaattggagaacctcagcactctccaacgtctccgttctctcagcgcattttttgaatgactaccatcaacagctgagcacaatgctgcagcacgtgcagatctagatcacgccgccagatgccgtacgcttcccttcgtgagcatcggttgagctcaggaatgatctttgcggttgcagtttcatgtttgacatattcctccacgaccgaagacactgtaggtattgatgttacagatcaatgattaccacgacctacttgaggcacattcggtgaactttaatatcataagcccagttgttattagacttcactgcagccccagtgggacagcgatggtaaaattggacagggtatgtcaaagcgttcaacactgcaggccctggatctgtgaccacaacgaaatctgtaaaatgtcggactgaactgacccaaggccctggccaagccgcgatcataagggggcccggctatccgaaccctaacagttttgacaaattgatgggccggggcctgtgggtcagaagatcgaacaaatataactaccgatgtccttttgcaatgatgtcaagtgcttagatgtgcctcgaagtcgattgaacgtcttgaaggtcaagtgctttttctgcttctttccatacactattgaggtcaatgcatattggcagtgccgtcttaaagcgctatatccggacaaccggaggcccggtgaaacagcttcgcatgtgttaggcactggatatgttagggaaggagtctggacaatatctcagggtttcgagagcgcatcttccgtccgtaaaaaagcctttgctgtggtgtcatgctcccagggggcaaggcaacaagcatctgcatcaactgcccctgcgtatggcttgaaggatcctagtattctataggtcacctaaatcg

SEQ ID NO: 3593 - DNA, 6993 bp, Emericella nidulans
ttggcgtgacgtaccagcttacaggtttgatcgccatggaaagggaattgggaatgagtcagcttatagactgtatgatgccggattcgtcaccttggatgtctcaagcggcccgattttgcgctgctcatcttgccttggatattgtttacggccccggctggataattatgggggccattctgaaagccggtgtatacagcgaaacatcggctggaataacggtggtataccacattctgtgtggcctcgccttatcatctttctccattttcggagcttcgttcttcaggaaggcgcactcagcggtatatctgtcgtccttgcctgccttctcctaggcgtggtagcccagatggctccagcaaaaagcaacggcccggttgtcattcttggtctcctattcccttccatgaactatgtttacttctcgatattcgtggctcgttgggaaagggaaaattccgctgcaatactgacggaatccgcgccaaacaacccgtggagcctccctggcgttgtgttgtgggtgctgttgattcttcagatcattatctacccaatgctggccgccgttgtggaacggatgctatacggcactgcttcgaaaaatcgacatgtttccagttctgggacttctgctgcgttaagcattcgcaatcttaacaagatatatcggccgggatggttctatcggacaataggaccattgttcggtagcaaccgccagactgttcatgcagtcaacaatctctccatcgacgtcaataagggtcagataatggtcctgcttggcgccaatggatcgggaaaatccaccacactggatgccattgctggattaaccaagttgtcatctggcgatatcaacatcaattatggtacagaagaaccgggttttggtctctgcccgcagaagaatgtgctttgggacaatctgactgtcaaggagcacgtcaagattttcaacagactcaaatccaccgggaaagttgatacagaagaacaaattatgcatctcctaagagactgcgatcttcagaaaaaggccaaagcacgctcaaaaacactttctggaggacagaagagaaaagtgcaactagctatgatgtttactggtggctctccaatctgttgtgtcgacgaggtctcttctggcctcgatccaatatcacgaaggaagatatggcatatcttgttggcagaaaccggctccagagcaataatcctggcggcgcaatatctcgatgattctttcttgcttgctgatcatattgccattctgtccaaaggtgttctgaaggctaagggatctagcgttgagttgaaaaaccaactaggttctggatatcgcattcatgtcttcaatgtccctggatccgaaagggcggttcaaaaacggtttagcagcatacacaaagaagtccactttgacgaaactgtttacacagttcaaaattctgctgaagctgctcagtttgtctccgagctggaacaggagggtatgatggagtatcgtgtcagcgggcctactattgaagatgtttttctaaaggtcgcgagcgaattggatttcgagccctcaagaggccgtgttcgagaaggcgagcgagcagcggatcattcctctgaagctgatgatgagaatattgagcgtcgctcgctccatcttatgactggctgccgtatcggcataattctccaggcatggtacttgtttcgcaaaagactgactatcctccgccggaaccctcttccttatcttgcggcatttatgattcctgtgatcgcagcaggcctcgtgactttgtttctcaaggggttgcgacgcaggatgctcgggagaggattcctaccgaacacctgaatctaccatcgcagatcaatgggataacttgctccttgtgattggcccatcagacaaagtgcagccagaacttctagagagcttcgtggtctcaatgaacgatcaatcagacgccgtccagtcatctagtaatgcgtcccagttttatattgtggacgactacccagacttcagcgattatataaaagccaactattccaaagtgaccccaggcggggtttaccttggggactcctcgtggcagccgaccattgcttggaaaggagataatggcaatttccctcttgctgcgcttacgcagaacgtgctagatcggtttgcaacagggatgtccattaacatcggtttcgactttttcgatattccttcaacgccggacttctacaataccttgcagcttgttgtatactttgggcttgcatgtcagtttatccggctttcttcgcactatacccaacctgttgagcggctgaggaatgtcgcgcactccagttcagcaacggggttagggcactatcattgtggctggcatatataccttcaacttgtgtcaagttgttgcatcaagcgttctggcagtcatcattttcagagccgtgactaatatctggtaccatatcgaatatctatttgccgttttcttcctctacggcttatgtggtacgttatgcgcttacctggtgtcactctttacgaaatcgcaactcgcagcgtttgctttcgcggccggttttcagtgcgttatgtttctcatctatctcatcgcgtatatgtgcgtcctgacctacgcatcaacggacaagattgactcgtacattgatataacgcactacactatcgcgatcgtttctccatccggaaaccttctcagggctttgttcgcttccttgaacgtgttttctatactctgtcgaggctctgaaggtcgagagatagcgtcctaccctggagagattggtctctacggagggcctattctttatctcattcttcagtcaatcttcctcgttgttcttcttgtatggattgaaggcggcactcctctactttcctggttacggcctaaatctaggcaacgcgacgttgaggagaaagaactcatggacagcgatatcgcggaggaaattacccgtgtatccagttcgaaagataatctccgtctgctacatgtcagtaaggcattcaagaagtttatagctgtggaagacgtcacattcggtgtcggggcaggagaggtcttcgcccttctcggacccaatggagcagggaaaacgaccaccatctccctcatccgtggcgatatacagccaacacgtaacgagggggaaatattcgtcgaaaatatctctgtcctgaagcagcgcgctgttgcccggtctcgcctcggcgtttgcccacaatttgacgcgatggaccaaatgactgttcttgaacacctcgtcttctacgcccgtattaggggcgtgccagatataaaccacaatgtcaatgaagtaatcaatgctgtcgggctcaagcaattaaggcatcgcatggcggcaaagctttccggcggaaacaaacgcaagctatccctaggcatcgcgctgatgggaaatccttctgttctgcttctagatgagccatcctccggcatggacgccgcctcaaagcgtgtgatgtggaagacactaacggccgttgcacctgggcgctccatagtcctcacaacacattcaatggaggaagcagatgctctggcccaccgcgccggtatcatggctagacgtatgctggccctgggaacaacggatgcccttcgtttgaaatatggaaatatgtaccatgtgcatatagtccatacacaagcaccacatactagcgatgaagacatggagaagatccgcggctgggtgaccgataactttccaggcgccgttatcgagcagaaaacataccacggacagctgcgtttcagtgtccccgcgggcatctcccccgagaaggaaagagctgctcacagcgacgacagcaagggctcatcttatcgtgatattcggtcaactgatgagctccgctctgtctcgctgcgttctgatgtctcgattcccgtcgggttaggaccagacacggaaacggggccaggaaacttcagagccagaagtggtgtcagcaagcttttttctcaactcgaacagaataaggccgcactgggtgtggagcattactctgtcagccaaacgacactcgatcaggttttcttgacaattgtcgggaagcatcatattagcgagcaggattctggctaactgcttaccttcgaagagttgtgttgcgttgtcacgttcttttttcttttggaaagctcgtttagttagcattcttgtacatatagcatctagtatatatctgaccatctcaatcgtaattacttggaattagacgcatacaacgtccggcataatgagctaatatctttatagctgtggcttttcgtcccatcttataattttgctgactctatagaaatagaaggcatcgcattcgccattagacattgggatccgcacgtttctatcagcttgtatagccatgacttgatagagagccttttattcagatatcatatcaataaaatctttgtcctttttctgcatcatgagtaagcatctttgctcataatggacacggccagagcatcatttgtaaagcccatgcaaatcccagcagctgagcgcgtttccaatgatcaagtttgccaacctagatgaaattggactatagtctgagagctgtgttttcggctactgtcaacttatggtcttccatcgcaactcaagagcagtatctgctaaaccttaggacagtcatgaatactccctcccttcccccttctctagacatcccccatttcattctatactaccgctccgttcataaaatcttgcttgacaaactatattttgccagcttcaaacatacaacagctctgctccaatgccctaccttaagagggacgctccgataaggttcgataaatgctattactcggtgtggagctgagcacccataccgtcatctggtgatgtccgcttccatagaaagacaacggtattggatacttgggatctggaatccttgccgctaatagaccactactgactactacacagagacgcacggacgctgcaaggcctttgcctttgcttgcggccagagaacataataaagacgatcacttctcgcagacagcgctgattattgcctcaaaggatgggaataagcggtttattgagatactactgagtgatgtctgggtggaataaactgcagaggtccagatagaaatgccacatcgcgtgagaatggacgtcagattatcgttcgagtgtcgctcaaattgcagcaagggcggaggtgctgataccaagggtacgacagttgctttttggaatcaccacgagagcatcgtgcgtttgctgtttgacggtgcaacggtggaattctcccccgtggctaaactggaaattgggcgagcttacttttctacgctgctacgcgtgggcgttagcagatgatgagaatactggctgagtttggaatagactttggagagaggatacaagtccgttcctgcacgtaatctgcacgtttagcacaattgattgcgcagttggttattatggaagcagcggagttcagagacaacactgcctgggtgccaatgttaacggctggcgtcgggatgctcttaagctccatcaaacggcttcgacaaggcaagagcagacaatctatattcagttgctaattaaacctacgtcacatcctagcgtggctgattggggcatgcgaacatcgtcggattgtttcttcatcaaggcgcaggtatcaatgcctcggagcccaaaggagatagaatcagcagcttcaatctgcactgagtggacggcgtggtcaattgatcaaagcggttgcgacaaaggggcacaaaagcgtagttgccaagcagcatctggcacagcgacctgatgatggagtgggcgccggaggcgtcgctcgacgttccctaggactgctcagaaaacatttgtaatccgactgtttgtgatgcgatagcaacttcaaatctgatatataaccacttgatatccaatgaaaataaggcaggggagatgaccatcttctagaggcaagcggattccagtattcccaagcccggcgtcgacccatcgttttgaatgcaggctggtggagtagcagacatgactgtatcaacgtcgatctcttctggaaccactatccttcttgtgaaagagcattgaagagcacgacccgaggaaacgggcgaatcgctaataaggcgctctacgcccttcgtcctaccgcccaacgccccacgccctatgaccggctggccgtcccttgacaccgtacagtatagcgatcgagcgaggcctagatactcggtgcgtcaggcccaggtcatctgggggactgtagtattacagaaaacgagagaatgacctacctgccaatcaatggagaagagcagaagaaattctgatcttcgccatagccgggctcgctatacgagaatggcaaacaccagagctatgtatgatgcatggatgattgtaatctgccttgtatacacgaaaatcgaagagtatcgccagattcgatagataacgctcgtcaggcgtccgtggaagtgctggtcatgcggtgagagtaggctactgcagtgctccaagtccacgttttcgtggcatacgagtcgtggctgcagcacgagaccgtgagtggctggagagatacataagacccggattttgcttcttgcttcgagtaagaaacagaagaaaagcaaaaaagggtactgtgaaatgcgtcgatattcgttgcgtagaccttgatgtgttccctcagcagaagccaattaggcgctttccgaggttcttccggggagattctctctagtttccatccatctccatccttcctccacactgcaccgacccatttctatcttctgactcatagagcactatactccgtatcaattcagatactgaatccaatgatttcatcttgaaatacgcgccgctatttgttttaatggaatggatgctcagctgcttggc

SEQ ID NO: 3594 - DNA, 8161 bp, Emericella nidulans
  unsure (1)..(8161): unsure at all n locations
cttctccatgatctatgagcaaaaggcccggtatacggcaccgcatatggcaaccgcgctgcaccccgccataacattcacattcacacttacagcttttatacgggcgttatcgtttatctggatgaatatctgcatctcgctatataacagatggtataagctttgcttggatacacgcaaacaagacactcaactcaacagtttcagtgtaaacactggactttcagaaggctcaggcttctcagaccgcacaccctggtaccgcctcacattccttcttgagcgaattgccttcccagttgcagggacagtattcggagctgtcccaacaattcatgccgtctttatgcatttccggacagacaggctggtgtatcgggttagtaagaagccagcctttgtggtggcggtctgactgggtaattttctgtttgggtattacaaaccatcaacccacagcttgatatgtgtttaggacatcaacgatacctttaatgatggaatcttcgtgcttagcaagccaccaactaaaccattctagcctccgttggctttgaaaagaatccgcctacatctagatagataggtaggcagatagcagcttcatgctcggctcggatacttgcatttgtttgtccacggtctcaggcttccagccaccatctgttacaggcgatactacctcgtcctccaagctaagtaaaaatgcattggatgcaacatcgccctgtgagcagtgcctccttgcatccgttgccatgctactatgtactgtactcagccacacctcaggtccagacagtagggctgcattgcatgaataattaggctgcctgattaatgtcaggggcactgcaccccttgcgtattaatcactggacggatccccattaatatcatgctcattactaacagataagacgcaatgatcatacgaaggacacaccagtggcgctcaggagccttactctatggccttactctatggccttgctctatgcttgactaggaagttgctccatgtacggtccaggggaccagctctgtaccagccagtattgtaatcccttgcccgtctgattatatgcaattgacctcgcgactgtccggctttaccaggtcttgtgggttagtttggcctcgcctaaacatgaacaaagtggacaatgattagaataattaaacctactctctatggagtagtcaagccgtgtctggtctcttcagtaggttcttcttgtaccagggtgcaagtccaagcccgtagttacctagtctggtacagctgacgcatgagctatagagctgctgcccatcagctgccggtagacatcgactgacaaaggtgatgagcttaagacttcaaactagcccttcagctcttggcgtttcatttcagccactctttgaggaacgaagtctgaactcgctagccagacagtgaattcatttcgtcttgtgggaaaggcatcatgtcatatgttgctctgctatttcaaaactcgtacgcgacttcgcggcgcagtatgcccaacaatatgacaacggttctgagtaatgcgtataaaaggttcagtctttcgaagatgacgcatagaaccctctcttcgaccaattcaggcggcgtcaagcatccgtttagaacatccatgcgggagtgagacagcggtaagctctgcccacaatcatctgctgtccaatgctgtcatgattgatacaaatcttgcacgtattctgccgcagaggtctctccgcaacagaagtagtagcttgctggattatcgtgacgtatgttacatcgagatgccccgccgtccagcataagtctcgttaagccctccgcattttgatgcccgggtctccagattgcacaaaaaggaagttcgaggcgatcatgtaaacgcggggtgttatcggtggcggacccacgtcttgggaatagtggcgaccttgcctaattgggaaatatatggggcttgcccagataccctagtgttacccgggccggtggtcgcgaggagtttttcatatcttagcccactatcagccagtccagtttctgccttgagcctgcagtgtatgatcttgcacaatggagaaggaataccccgacgacagtcttgataaggctcctatcagagaggatgcggtctttggtgaaatcagagaaggcggcgtcaactaccgcgatgtaagtggcccatggtcgttttgaataagattgacctaatcaagtcgtggtcaggttggctggaagggaacgacagccttgatgatgaaggcccagctggggctgggcgttctgtctatcccccaggtcttcgacacagtcggcctcataccggggatccttattgtgttggcgatttctggaatgaccggctggtcaaactggatggtgggcgtcttcaagaggcgccatccagaggtgtacggaatcgatgatgttgggaggatgctatttggccggattggcttcgaagtgctgggtgcggcgtataccttgcgtgagtgatattcgccatacgctcttttacttgctaatgttcccagtttggatttttgtctcgggatctggcatgttgagcgtgtcaatcgccctcaacgccctctcctcgcacgccatctgcactgcaatctttgtggccatttgcgctgttgtcgggtttgggctttcgagtatccagaccctcgccaaaatgagctggcttgccatgggtaggtaccgcctgtatcattgttgcgggtgagtgctctactactctttgtagttctctttcctgaccggtcccagtgtccacggtaacaattgccgtcggagtccaaggccatcctcccgcaatcgacggcgtcgtacccgaggctgactacaagctgttcaacagccccagctttgctgaagccatggccgcggtctcgacggtgtgcttgagctacgccggaacgccggcgttcttcaacattgcagccgagatgaaagaccctaggctctacactcgggcccttgcaatctcccactcaatcattacggtcatctacatcgtgtgtgggacggtcgtgtactactactgcggttctcatgttgcatcgccagcgctgggctcggcaggggcgctgatcaagaagatctgttacggtatcgccctgcccggcctggtcgtttccatggtcctcctccttcatgtaaagtcctctccctcttcgaatgaaagcacgcttcgctgactctcccagctacccgctaaacagatcttcgtccgcatgctccgcggctctaaacatctcacatcccacacgctgatccattgggtagcctggttggggtcgaccttcgctgttgctctgattgcctacataatcgcgagcggcatcccagtttttagtagccttgtctcgttcgtgggcgccctgttcggaacaccgatgtgcttccagccttttgggtgtatgtggctatatgataactggggctctgggacgtcgggtaagccactaagctggtggttcaaggtctgctggagcagtttcatggttcttgccgggtgtctcttgactattgcagggacgtacgggtctattgttggtattatcgattcttataacgcctccgggggttcaagtgcatggtcttgtgccaacaatgatgtctagcgcggcagaagagggcaatgccgcgtttgaagttgggcatttggcagatatcaggtggggacctgttggctcttgctgccttggatcttgtagaatacggctgagatagaccataaaattgggatatccatgtcttgaatatgtatgcaggggcgctcgagagacgcgagtcctgaagaacgagcgcaaatagccaatgcagcaatacaggaagaaagccagccgcatttagacggcatcagcagagaacacccatagcccacttggcctttttcccattccccggctccattatgttcatttcatctgccggctttctggtcggcaaagcttcgtattatctctgacgcattatctcgattgcctatctttgcagagccagtgaaggattctcttgactcctgacatgctaaccacatatcctggtgttgaaacatcagaattcttcaaatagtttgcatacggccatcagcttttaacgactctctgtgtgaagtacctaatactggtctgtattataaggttctatccatctcactgctctgtccaccagacaatgggcgtttctcccatattctaatcgtgagttacaggcctagagatggcctgacgtcgtggctagactagattttctgtaacatatcagcgtgctcaataaactctttcccgttcatctgcagtcgatgctccgaatctgatgttgaacttctgtgggtatctaaggtggttattctactatgctccttgagtcgcggtagagatgacgactgttgagctcagcagctcttctaaatataggatatggttggtactatacgttctttccgacgttctagcatagcagcacagacttggtggtaaggcaatggttggattctagctcttgttgacgttgctcgagcacgtaccgtgctattactcttacatggcgcactcgctgtcctttggtagcaatcttcgctcttgtactagcgatagtactacggggggtatatgtgtcaacctgttcctttattcccaatctacagcatgatcctctaattgtctctttagccacccgctgacacgctggggagtccaatcaaagcttaggccgtctagaaacccccaagtgtttctcccattgcttgtcaacctggaccctctcttcctgcggaacggcccgccaagcgtcttgatatctcttcactctcgcctcccactgcgacagtctggaatgaacaaagtctccagtagcccgcgcactctccttcgcaagctccatgggcactaaatgaccggccggcaaaacaacctcttccactgcgccagcctttacaccgccgctcccacccaaacctgttcccgtgatctccatcttctccctccgcgcctctggagttgacagttcagacttcccaccgaagatatagagaacaggcggcttgagttcgggtaaccggcggaacatcagcaccggctctgggcggtagaaagggtaatcttcgtcaatatcgtctgggtgcatatcttcttttggatctccacaacgaagaccagagcgctcgtctatatacgagggacggcaataaaagaacagctcttgtgctttggttgtcgtcaacgtcaccgctcccggtccatcccgatccgttataggatacaggagcgtagggagctcgcgaagtccatactgcgtccatttttcaagaactctcttatcccatgcttggtagaacgggttagaattgaatttttgcactgcttccgcgcgagaccgccagagatcccgtctatagatggatgcctgtgcgaacttcaatcccacgtttgagcgcgttatagtcgggtcaactaaaactaatgcgctgaatagggacgggtgcataagcgagaggtgggctagttgcatcccgcccatgctgtgcccaactccaacaattggctggcggatttcgccccggaactgggttatcatcgagaagagatcgcgcgcatggtcgtgccagtcggctagatgctagtcagtcttggtactccttatgactcaactgagagaaaacaaggaggatagacggacgatcatcccccagaatcccctcattcatgataccactctgtccttgttgcataacgtccgcgatccagatggatctgatgcggcgattgtggcttcgcagtcgttcgtatatatcgtcccacagaggctcatacagctcctttgggaagccatttgcttgcgccccgatcaaggtgacatcaccatcttttggatctggattatcaagcggaatgtactgctttacggcaagtctgagctcattttcgtggcctggtttgactgcgcccaggcgctctcgaatatgatgagcccggactgtgtgctcgattactcggaaatgcgacatatgtttacgaattgacattattgggcgcttgaaagctcgggtgcgtattggactgccgagcatcactgatatatgaaagtatgacgggggagagagtgaggagtgagtattatgtcagatatagatcgggctaaaccccgccccgccgaaaacgccgaggctcattattccgtagtcagtcccgcccctgtttaattgctttgagtacacaaccaaccattatgccccgcgtcgctgtcattcagtggtcaattaaggtatatacctaaatctctgtatactgatcttggcgctaactgcggtagaacctcgctgtggaacacaaccacgcgacggcatgcgaatacattcgctctgccgctgcacagggcgctgagctggcagtgttacctgagtatgccgtcaacccatttccaatctagccaaataaagaagcatgttctaacatggaggaagataccacctctttggctgggcaccagaagacccgctcttcgctacgtatgcctcccaaacatcaaagtacctgcaggcttaccagtccctcgccaaagagctgaacatctccattgtcccgggcacattagtggagaagcatcctcacccggagcaaaactcctctgaacctgtagagggtagggacggagatcaagacgcctatgtcctctataacacagcatacttcatctccaacactggcgccatcctcggccggttccggaagaaaaacatctggcatcccgagcgggagtatttgacttcgtctgcgatggaacggcatgaggtctttgatacgccgatagggaaggttggattgctgatttgctgggacttggccttccctgaggcgttccgcgaactaatatctgccggggcggaaattgtggttgtgcccacttattgtatgacccctttcacgatttactcactgtaccttttatgtacttgcatcgcttgtgacagaagaaactaacgagtcatagggggtcgctacgatgccaaccccgcagcactcaaacacaacccaaactcggaagcgctcttcctcgactccgtgcttacagcgcggtgcttcgagaatacttgcgccgttatcttcgccaatgttgccggcgaagaacagttcctgggtatgtcgcgggttgttctccccgtcgttgggccggtcgcgaagatgggaaatgaggagggggtgttggttgcagaactggatatggaccttgtcaagattgctgaggagaattatagggtctgaatggacttagggagggaaggatggtattactcttatcggcattcgcagggtaaattggagggtccgtgaggtaagagtgggtgactagcggctcaattgctgatggtataagagtattctatggacaccgtttggtctgaatagcctattactagatatatccacctatcatggcttgtctcgggcatattgcccagtcttcagtccagcagtttattccaagttcgggatatagccaacctaggcaatcattctgtcacaaagggcaacatacttcaaaccagactgtaggatcgtgctgctctgccccattgaaagcgaaacataacacgtaccggagcctatgccggtctgatttctaacctgagccagatttcatcagctaacccaggtccaaccatatatacttacttctacacacgcctcaagcattagctcttccaaatggagcctttgggcctcgtgtacatatacaactttaacccaaagccacgttgcgcttgctcttagccttgtgctgcacagagagcgtgcttttgggttccggcttccgtcgctaaagggcttttttcgactgtggccccagctcccttaagctgcttatagtgtggctttggtcttgtggctcagcggttggcatgtgaaggggtcagatgttggagttttttgagcatttcagattgggttgccttctgtgcctttcaatgatatttgccgctgattcaccagtggcgcccattctgattggtgcgtaccagggttttataggcctcctgtnctttggtgctgtgcccctggtctttttcttgcngagcgtcatcataaggcggtgctaattcgtgagnaagattctgggcccgtcctc

SEQ ID NO: 3595 - DNA, 10727 bp, Emericella nidulans
ggttgtgctgggctgggtttgtagtgtgggccaatgattgacgaagcaatggcaagatgaaatgataatgaggttatgaacaaggatgaggaatgactgaaggatgaaatgttaaagctcttatgttttgtttataattatacctctacctctgcctaccccttaggctaatgcgcctaattgatataatattgtttactgccaggcgattgtccctatatagactcaatgcagttgtttatcttggtatcttgtatattggcaggatcattcgtggagctgctgtaagccttttgagtcggttgaatctcaggtcagctttcagcctttagtctagtttgtctgcattattgcgcagcgttccctccctagtgcgatgcatcatctgctgcggggtgtttttggtatttattactgaatatcgtcaagctttgggggccacgcaatggctctcccaacacgtccactggattcgaacgtgaccctggcttggctcgaaccagagaagcgagcaagaaacattgcaagtcggagtcctagaggaactggaggactgaaataacagttgacctccccgagtcagaccaatcgtacagatagagtcagggcacgtcaacatttgtgctggaagtatcttataattgggacaccgcacattccttgccttcgcgcattgctgtattgataatactctcaagggacataagactgctgcaggagaacggcattctaaaaagcaaccatgtaaagcaaggtcttattcttaccgagccaaggtctgtggaaatgacacccgggtagagacatacgggtagatgactcctaccctgagagctcgctattataattatgaacacgttcgaccataccaggttcctcctaagcttatcctgtaagtttatccttggttaccatggagctcaagggaagtctacacctactctaaccagaagcacaggccgatggacaacaacaagcaactcatgtatagtaaggaatccaaccctggttcctcagacttcttcctcacgataacaacggctgcacgcgctgaggtggtattgcatgcgttgtagcgacgaataacaagggtcagcctttgcttaagctattgaagcggtacatgtcgaaggcttgattcaacccttaccgtcgactgggttgcgccttgcttgatgggtacaaccctcgaatatacgtcacccggaatgtgcagtacaagcctgaccaaagatttcaccattgaaagacatcccatgtacatgagagccatatctaatccctttagcgaggtgcggaaggtatgtggctgtagctcccacgaacaatcggggcttatcaatgttcgacgccgttgagccaaaccgaatctctagcagtgcgatccgccaccaatttcgcttgtcttgttcaagctccaagaggatatacgaccgggggtagaaaagacggagtgggatgacggacagggtgtgggtggcagagagatggagggtcgacatggaaggaagaagcagtcgccagacaagaaagcaccagctactcccgtctcagtcctgctcaggtcacaaattggtatagagactagacatgatttggtcttcgttccgcatatgttgagatatatcccatagagcctctgcaggaggctaggcagaatacagccggtcaagcgaaggacgtcttgataaaagtctgcaaaaccaagcactgcgcccactcactttgattatgacaggaaagttgtcatgatgagatatccatgaagacatacaaaatcgagcagtctctcccacagagggggtccagtataaagggttggctttggcaaaaaacaaggttgatcccgcctcacaacagtttctggtagatattttgctttacgtacttttaccattatattcagaatgcatttacttctccagagcaaagcgcggcactgaaatgggtaaacttgcggcaatgcacaatatttcccttaatataggaatagaagcgagggtcattggcatgtttcgctgtagagctcctagtcagggacactcggaattaaggctagacaatgtcctcataacgccgcatgctaaagtaagaaatcagccggcatataattgcgccaagggtaatgaaaggaagaactccaagaccacacgcgggatgcaacaatggcggcgggtggatcaagaggtaggatagtatcgaaatccgttcaatgcagtctataactatgaaattaccgatacccaatctaaaccacagccggccatgtccgctctaaaaaagtgtcaccttggtgactgaggagccgccggttctcgccaatcatgcaccgagagcctggatggtgacaacgttgcaccgatcaaggaatgccagagcctcgtttctggtatgccacgcatcgttgtaagtcgcgctcaaggtaagtcgtccgttccaggttcccaggaaaacagccagcccagtcaccaaatgctccctggttacccatggattgtccaaggtgaatgcgccatgcgtcggtgataccgtgttgtcgatcgcccccaagtctgaaagtgatactgacggcttgttgtaaggcactgggacagacggtgttgcattatccgctggatagggaggtgtgatcattgcccagtgcgagggcaccatttgaatacgctgcttgtcgttgcgattttgcaggtcaaagcgacggacggcgctagcaattctcatgtactcttgtcgtctcggtatgctgtggtcgaaaagctgttcaggtgcgccgatggaagcagctgggacagtcaaatcaactgccaggcactcgccggatacagaatggtaaacggaggctgcgtgagcaggcgtgttgtacgggtctttgcactgtggccgttcatcaagaaggctgtaattgacataccgcaccgtccgcggccgtgattgtcgtttctggaggtcccgaaggacgatgccgatggcagtgtgatacgcatgcgtcaaagtcaagcccagggatctgcatgctttgagtaaacgatgcgttgactctgtggacagtgtgatagccactcgttggtgtttccctggtctagtcgcgtactttcgatgtggaaaaccggcaatctcgacatcccttttcagggcggcattccaagcgactgtcctcgtaagccgggcctcctgttgtttgctgagcgtcggcgaaatgtccgcagcgacacgcaacggcggactcaaccgtgtccactcattatcaaagtttggaacggtgtaatcatcgccttcatgaagggcttgggccgcatgggcgaagagagtatttaggagcattaaagtcccgaccccgtcgacaatatcgtgacgacagcgaagcaccacgtctgcggtcatcacacccctatgccggccaggacgctttatcaggaacagagtcggaagtactggaaccggagggtccgagttgcaccactgcaagccggacgacttagtacggataacgcgaaacgtctcctgcagccacatattttgtacctccgggctcgagatcgcctcatagacttttctgcacttctgctgctgctcgctgtactcaacacgagatgcgatcgtcgggttctcataccgcaaccgcagccaggccttccgcagagcattttccaccgcgatatcagtcgcctgtaccgagaaggatatgtatcccgttatcgcaaagcagcaacggccacacccttcgtaggtcttcgcgagcgaggtgtagaactgctcgacttcatcgatatcacgctcccatcgagctgggctgacctcggtccaagcatagtcgccagttggagtgtcaagcgaacccatgatgcctcgatcgcgcgactggtgccaaacaagctgaaaacgcctcgggatggaggggagatataggcatggcaatgtctcggtaccaagtcagtcgacgttctgcaagggaggatcagccggccactgtcccgatcaaagggtgaagatagacgacggattgcccagaacgggcgaggcactcggcccgtcgtccgtatcgaatgcggatcgccgtcatctcagtttgacacgaccgattcccgaccagtttcaggttaacatcatcttatcagccataatggcgatttctatcgcccatggccagaactggggctggcgtgattgtttgttcggttcaacttcggtggtgagttcaagttcgggagtcagtcagatcggttccgggagagcgttggtttggtttggttttattatttaacgtcactcggcggatcacggggcccacgtgatctgcggcctcccagggggcatctggacgtgctgtctaaacagaactccctaaaactagctagatacaggtttgaagcagcaactatggacaatatatgttggaaatgagcggaagaagcatccggcgctaccctggcctggtcttcgagggcagatgcccgttttgactacctatagattggggggaggggccgtaccctttatccaggtagatgtgtggactgtcgcactatcaagcgctccggcgggcccagttcgggcatatatccttgaagaaggatgattcttgtatgatgcggctgaattcttcagccccggcagctgtacttaagagccagtctattatttttgacgggctgtcccttatatatctctatctatctttccagcactttctggtgtatgggcagaagaagaagtacactggggtcttggtcctaccacaagagcagctctccaggtagtctgagtggttgaagcgctggtggtatgccataaagtctccgtggcctgtacgggcggcgacgagtcggccaagtacccaacggggaagcttgtgctcgcgggtgcggctttcctttgtatggggtctgatatccagggtcttgtaggcttgtggtgccttactagtatatgctgtatatgtctctgtacgaagccactgttttgtctcccgttgtaggtatgcaggggatggggggatgttagggctgtatatagaggacccaagctttgcaagcttgtctgccagcttgttcccagcaatcccagaatagcctgggatccagcggacttaaaggggcttccgtggcctggttaggattgagggagcttccaaccactgggtagcaagctggccaaaggactctgacagtctgtgcctatgtggagtgggcctatagcttgctagcagggaggctgctgctaggttgtctaggaggataactagctgtgtagagtaacccatacatggttatcccagggctgcgcgtaggccttctacagcacccatgatttccgcatcatagacctctgtcctggggcccgcggggccatgtcccttggttaccaggatagggccaaagtagactgcatagccaaatcctgccccttggccagttcacaagctgtctaagtatactgatatctataatagggcagggctatagtctttgttatctgttgggagcatgcataatagagggagaggcagctctattatagtgtgctctggcagggggctaaggaggagctgtaggatccttttaagcctggttttaggcctgcccacagtagtctctgcggctatttgggcaattaggtatttagtatcaaggctcatgtatctcactactgccctctggaggatgctgttgagtagagcttctgggtctggtaggtctgctttgcggagaagtgctgcagtaggggtagtcttgtaggctgggataatagccagggctgctgtgcagaagagagaaagcaggaagttaactacccctttttgtcttttgcctgtatagaagacttctgcactgtacagagctgttaggagaatatactgtataactgctgcctgcatggaggccactaggcagctgtgctaggtattgctaagtctctttaggtgctgggcaagttatttcccgcggctgaagaccaaattaatataggctttaaaaataagctttgtatccagaagaactcctaaccaacatatatatagggatagtgtaatctccccctataccaggtagagtaactatagggagatgctgctgctgctttctagagaagtattatatctctgttttctctattaagaaagggaggcctgtctctgtccctagggcagtaatttgcttataggcccctaccagttattataagctctcttccagggtattcccagttaataatatgcctatatcatctgcatagcagaaggagccttctaaggtagagactattcttgctgcatatagcaggaagagtattagggataggggggattcctaggggagtcctcctttaattagtactgtggcagtgccttctttaatataaacagatacaaagcagccagtaagccagtccttaaatagctagagtaagcctttatactatccttgcaggcataagtaagaaaggagctgttggtatattacagcatcaaataccccttttatatctagtaggagtagtaaagcatcttttccctgttggaaggcctcctctaccctgtaaacaagaacctggaccaggttaatagcagagtgtcccggcagggccctgaagtagcagggggctagtatatctgcctgaattactcttacagctatctgctgtgctaggaggtgctctaggcctttacctagggtagagaggaggctaattagctgccaggcattgagttgggtatagtccctcttccctggttttggtaatattattatctttgctgacttcaggctcagtagaaagcagccttcctctatatacctgtagtatagttgtatgattatatctcctaggacaggccagagctccctctaagcagtggtggcaagcctgtcctccccaggggcagaggggggtagggcatagagggcagcctagtagtgctcttttgttggcaggtgcagggggcccaggggcttattagggggtccctcttctatctgatttggaagcagggcccccttctctaggaggtgactgagaaaggtgtttgctttgccctgtgggatagtaacctgagccccttatatatttaggggaggggcagcaagctggtctggatgtttaatctacttagcaagtttgaatatatctgtaggtgctgtggcttgttcaatctgctgcttctagtattcagcctttgcctgtataatggccttccagagctgtttatagtcagggttttgttgctatcttgtttagtgtagtatgcctgttagttctggagtctactatagagtcctggggagtctgcaagtattatatcttaatataccttgtattacaagttaggatatctagaccagttgctcagctagtaggttaattagtagggttaggtcaggcaggcttgccagtactctggctttttcctagttggtagagccaagcttgtatataggcaggggctcttcctgttccagtattattctaattattgcatagttacttggagtcttcagatggtcttctactagggcccttagtagtaggttagagaagacaaggtctagggtgtttggtctacaggtgggggtgcctggctcaaggcgaagttccagcttatgggcatcaagccagtccaatagtcctgttgtaccaggtgtgacagcataagactcagtatctggctgccagaataggtgccgggtattaaagtctcctgctaggataatattctctggcagagtatatcctaggagtatagaaagtatagagggtgttgagccagcaccagcaggggcaactaggttattaggaggctgatagatattaataatagtaaggcctgctgtgtagattgtggtgatgtctggagagataggttctaggagggaataggctgggagatccctttatatatatattagagttctgggcctagcagtccatcaggtcgggggactaaacagctgatattataggtaggtcttggttaggtattttgctgtatttgtccaaggttcttggacaaggataatatctgcttcaaaggagagtagcaggttgtatacagtgcccccccttcctatattagcttatagtattttcatagttcaggggagggcagggtttggtttaagagctcctgggtaagctgtcttataggctggcttgtaatttaggtactgtttatttgttgtttagaactttcagctttgttctgctcctgttggaaggcaagctggccagccttgtagatagcagctagagcatcctttgagaggcgggtaataatattcttctggatatagggtctggctgggcattttgggaagtctgctgcatgtgggctgcagtagttgatacactgtacacagcagttatgatcctgttttgaggatctgcaggaaatgtatcagtcactagagcagcaggcccttgtatcatggaagcagtagcatcacgtgcattgcaaaggcctttgcttggggcaggtaggccttgataggccggacaagccaaagagttgcagggggtattgtagcttttttggaaaggctatgactgctgtaatagagtccctctctactaggtattttgagagcttggtcatgagtggcttaatactagtaatgcactctgcttctatgctaatatctgtaattattatatctatccatctatccagggaccagagttgttttgggatccaggagataataacctgatagtactctgttagaatttcaaagtacccatccccagctaggcttgctgccttctctgacagtaggaaagcctttccctgttctgttgtagtgattacatacccagttgatgttacttgcacctgtgtgatcacgtccggaaccttcccagcaagggtgacccggatgccatgtggtccgatagcccggaggctggaggaggccgggaggcggaggaagatgtggtggtcagtcttgtttaactgcttcagcttttgttgtgtggtttgtttagcttgcatatgctgtttaggggtaatagtttgccagttcccctggccagctcttggagctgttagggatgcccaggttgtatgctgcgaggttcgcctacccgggggtcctttggatgcttcaggagtgggaggttgatttggctgttccatctgcctaggtggttgtgggggtgcaaccgcaggcatctgaggaatccgctgcggggagtcttgctttgcgagggtgacaaatctggctgcaagtccctgtgccaggtctcttggacagccttgtagagaggagacggttaggtctagagctttagccagagaggtcattgctagtttccagtcattgaggaggattagctggtcatctgctaccatgctgacctgatcacagattaatagggcttgcggcatatgaggtataggggcaggagctgcattgggagtcttctgcggtgagaataaggcccttctcttcagggagttccggggtaggggagtcggggtggtaggtcctgagggggggtcagagttttcacccaggcgcggagtcgccgggcgggctccgccttggggggagatatccacctccatggggagggggggatgagcactgagccaagtgtgagagatcagttattagagcagtaggggtgctgttttcccctcgtcgtgagtgtcaccccttaagtaagctgctagtgcttcagattattcaccatcgtcatcacgtgcaccgcgccactctgcagcgactttaattgagcttggacataaagacagactgtccagacctcagccattatacattgggatacagtctcgacatggcagatacagcacctcaagtctctttcaagaagcgttcggtcaagaagaccaatttccgcaagaagccagaatcgccgccgcctgatgcggactctgactccagtttcacctcctccgatgacgaagaaggccataggatcaagagacggcgcaagaatgcagcagtgtctgcgtcttcaacatcaaatacgcgacgcacaacaacctccgatgaaccagctacggctggcgctgccgttcctttaacggcctccaatgacgccaccaaacattctaactggtacgatgacgagttgaacgagaagaacctcttaggtaccacacgagctcggccagcggctacaggggcagatgcgcccgacggtacatacaagggcgcggcgaactaccaatcgtttattcagaaaaatcccaacgctcctgctaagacgttcggtccgattaaagcgcccaccaatgtgcgaacagtaacattcatggattatgcgcccgatgtttgcaaggactataaactcaccggatactgcggttttggagattcttgcaagttcagtcatatgcgtgaagattacaaacaaggctgggagttggatcgggactgggaagtcagcacaaagggcaagaatctgggcggtaaagtggtatcccagagagggggtcaagctggcgaggatgaagacgatgaagaggaacaactcgagaacattccttttgcctgcatcatctgcaagaaaccgtaccagaatcccattgtcaccaaatgcggacactatttctgcgagtcctgtgctctgcagcggtatcgcaagaacccgtcgtgtgccgcctgcggagccgggaccggtggagttttcaacgttgcgaagaagcttaacggccttcttgagaagaaaagggagcgtgcacgacaacgccgggagcaggccat

SEQ ID NO: 3596 - DNA, 9616 bp, Emericella nidulans
atcaattttcaagggctcaaaacaacatttacctcgtcccagactatcggaatcgtatcctggtcttcgcacctgtgcaagacacaatagctctccggcagaaaggccctacgctcctaggggtcctctggatggaagtgttcttgtttctggtctttctcagcgcgcgttactataccagggctttcaagctccggaacatggggtgggatgacctcttgctcgctataatatgggtgagtctgcagtctgcctgagacattcacttgtgtttgtgaacacaccggctcactgtttgtctggcccaaaattctgatggccgcgtttgccgggctttgcactgcgtccgcgacgtacggcatgggagtgcacgcggcggatctcaccttccaccagagcaccaatggtatgctgcttcttctggccggccagagtgtcatagagattgcgatgggagtcagcaagccctctctaccgctccctccgcggccaggcttcctcgaaagacgcacccaactacgatagccttggcggatcctcctacagaaaggctacagggaatcggacaaagaaagttatggaatggatacgctagccacctccgttgtgccgaaaagccatgatcggcatgatagcggaagtcattggttgaaaggggatgaggaagacgttgacacgagacgaagcctaccaggttgttcgcctaatgctaccgaaggtagtgggtatggtcataataccaatgtctatcaaacgagagaggtcatcgtggagtgtgaggatagaaggcctgacgaggggcacggggagggaggatctatcggctcacttgggaatgaggaactggcgagtcccagtatgccccgttagggccaggcaacatatctgagtccgagtctgctgttatcacgcaccgtatggctgcttgtggtaatcttactggtttgtattaaaagcgtttagccttttgctaaacctgtattacttctatatgtggatactcttattatatacagcactttcatatctcatcgccaccaatcgtttcttacaggtgtaatcctttgatgcctcactgaagcctctatagagcaagaaatgcagaatggggtagcaggtaactatgccttgagcacggtcagagtgattaaaggatataagtagtaatagtaggcgtgaataggtatgcatacgatgcacgagaaatgccgtactaactgggacaacatttcaccccctccatgtcatggcgcttttgttgcagagccccggttggtatgtacaaccggagggtgagcggatgtcgatatacatctcatcagcggttttacgatgacctcgagtacgaatgcatttttatcagagggcaatcccatcagacgagcgcgggttatcacgatcggttgttatcctcatcctttctaaatcagaggaacatcttccgctgcattggctcagagaccatctacacagcaaacattaaccggactcttccccaaaatctcctgcttttgatcaaagaccagggaaaacgaaaggggaacataccatatgataatccagatgacttataccctctatgtaatccacactatgattgaccggaaagccaccaggcagaccctccaacatcttcatgaaattttgcccacgctccaaatgaaaagctccttgcatctgcgcctcgcagtgggtatcgcccttcccatgatcatcaagtccgaagccataaaagacattccgcgaggtataccgcccctcgacgaaagtgcggttgttgatgacctcatctcgaacatactttgggatccgcttgggcttaccggggccgataccaaagtaccaggcgtcgtagaccgaggggtcggcgcaggttatatctgtgggaaatacggggcggtcgctcacgagccaggcgaaggagccgggattcatgacgccgtaagttatctggctgtcttcgggctgcgagggacggagcattgcatcttgattaggctgttagttttgcttcgtgggaacagtgaggatcggggtggtctaacagcgttggacagtttgagcgccaagtgctggtacgaggatcagtttgcggtgtccagtgggaagtgtggccgagtgagcatacaatgactcgcgaaaacaatcgtctccagtgccgggtagacatctttattccagaagatcgctataaatttatccagactggggatttgtgtaatgagcatggtacttccgctattgtggtcacgttgaaggaggacaagatactcacgcttcgaaagacgatattttcacctgaccaggaccgacagctggtcccccgcgctggtaggtattcttgtgatagtatatatcgttcggctccgctgcgccagcagcaacatcctccttgttcagccactgggggcaagcgacgaggatcttgctcatgtccgcgttgacgctttcccggccagcggcgcagatgagggagtttcgtatgtctatactaggtcagtattgtctgcaagccagccaaagcttttagcaacaagtcattactattggcatatttccatccgctaagtgtatcattagccggaatatcaaataaactaagtaggggagaggacatacttcctccatatcccagccgtggtaatgacaacgcgcgtaatctgtataaggtctttggtgttttcaatgtagtagggcttcagccaaacatcagtccaggttgcagtttcaggggatgaatgttcctcacgtaccaacgtagcattcatatcctcatcaacgacaagcctctttaagtcaaagcccgctactaccggactggactttactattaatgacgacttcgccgagtgagaaagagtctcggtcgaagacatacatttccttccatccattgatatggtcacccccaggcgtggcagtgctgatcattatcgtagggcagtcggccggttgcgtctcgccgactgcgtcaggttgcccactcaggcgtattgtctgtacatcatcgacagcgccgaatgggggtggatccccgttcttgtggttcgcctgcaggtattccggcggaactgatgctctagacatggcggctgtagaaagggctaggacgagatatacaagacgcattcttcagtatcaaatcaggtgtgtgatgatgacagagaaaaagaaaaagtcgttgatgcggtgagtgaagagcaaggttggccaaataaagtaacgccgttagctgctaggagtacaaatagcaatgcaggggcccgcctgtgtgcggctgaggttacggtttcttcagtgaggccagcacggactcagcctctcaatgagagaccctactgtcaaagaaagagaggtcgttaaggacttctgtcagattttcagctgtcggtgcggttttcatcgggcgtcaatctttcctaatgcgataaggcaaatgggtctggaacttgttagtaataatggctgtgcatattgtgtgggtctctcccaaatgagcaccaataattcatgtataataaacgtactactggcttagaccgggctaaaaccgtcgtatccacaaatagaagggacgctaagagtgggaagagccgagttatccatccctatttataccccccacggatcatccaaggccaatgctactctatatagaccgggtcatctattgaagctcaatatatggcaggctttactccgggcgtcaagaaactgatagataatttatgtctcgcctgtccggttcatatttgtggacattttcgaaaagctccttgcgaccgcgcggtccaacaaagcggagtagggagtcgaggaccttgcgtttccagttaattttgaccttcaggtcttgtgcgaatatattgcaccggattagcgtaagccagcagaaggttaggtatttcttgagctcctcccgattgtctggatgaaacggatcgtgggcaacgggtagtcggcgctgtgtatggtcatacccggccattcccagaatcgacagcactagctctgggagtaggcccttgctgcgcagaatgttgaatgcccatggtatatccgctgccggaggatgatgtggtatagtcttagcgcagttaaggaagacctcgaatggcaattgtccgtaagggaactcaggctcgtccaaagaccagttatccttgcataacttgagttggtcgaggaaatctcttaatccaggccagtcgtgcgcatgagcattgtcaatggagtattcatcgtggtactcgagatgtccgttagggatcccaaaaaactcttgatatatatattgtgatcggtgatgggtctgcgtatgtgcatcttctgtccattttctggtacaaaattgtgttcttatgatcattttctgttggcgacgcagggctatgggtctgatttcgtcttcgaatttcagcatctcatgattcgggcaagcagtagatgacattaagggccaggtaggcatccaacgtgtgctggtacaatactttctagccgagctggatagaaacgtcggagcactctgtcacgctcatccattgtacatagtcgacctctggatgagagcaggcgcgcaagatagggtccatctcttcatacggaaggagcgttttgacaagctccaagtgcaaaaaggcgccccggtttgcgcggtagaaattgtagcagttgttaaacacacattggcgcagaaatgcggatgctttctcctccttccatgacacggggcaagaacagccgactgtgaacccgccatcctcctctttctgccgtatcggatcgtcttccttgcgcgcttcactgacgtcggatctatgcgcgcatagtgcttttctaccagtctagcgcacgtcaagccacggtatgaatccgctgttgagctttgtgcgccatctgtacacaacgcggttgagtcgctgagccgtggcgtcgtctataagaatgtcgtcaggccgaggcggctcgtacttggcgggatattttgcccgctcagctactgtatgttcattcaggttgtcagcagaggactcggcgaaaatagtcaatatccttcgcctgtattgactcgaggccaagcacgatatccgaccgggtttctctgagaggatcgccggactgatatatcagatttcagactagggagccccagtgtatcccataagcttgatgtgccatattcaatttcaaagcgaaatgctctgactgattggaagaaaaggaagatgtggccaaaaggccagatggccagatgcttatagtgcttatactctagattctgtctttgcgctaggctgaatcaggcacgtggcgtatcctcatgtgccttggtagagtcattcctgcctgtgactcgctcttcttcatcgatgcagctgtttatatcgatctaatcatcatgggaaggatgactttactgaggtagttcttttgtcatgctgaaccactaagttcgcataagtttgcaacaatacctgtttgtttctatctcaccgtataaacatataatgtgaaccttcactggatatcaagctccacaatccagccagtcatttgatgatgttaacgagggatgaagtggcttggttaactactatgtaatcatcaggaagaggggtctaagatgactggatcacggacatcccaattattatgcgagaatagtagttatctatttttttgcctacattttgtcataaaaattaaggaatataaattaagaataaataaacattttcttttcgaaataaaggaacaggaaaaagaaagaaaaaaaggactagcactatcgttacacccataggagatgtctacatctaaaacacacattacacgttacacattactccatctattcccttcgcaaccaacccaccaagctcatctattttccaaccttctcaagatccccattcggccttgggtttttctccttcctgagtccctgcgtcgtttccaacgcacggttcaaatcataactctgcgtcaacacactaacggccagcgcaatcccacaaatgccacaacaaaccgcatacacaatccttagagagtctgtgtacgctgtccggagacctaatttctccgtcccgtccggcatgcgcttgatgacttccaccagtccagcggcatcttgcgagtactccgaggccatggacgcaagggctggaatcccagactcaacaaggttagagtacatttggttctggaagaccacatcccaatggcgacaccgacggcttggcccattgcgcggaagaagctgaacatgccgactgcgatggcgagcgtgtcattcgtggcggaggcttggattgcgaaaccgatggaggggaagagaaggcccagaccgatgccggggacgatattgatgaagatgaaagctgggatggaagtgtcaacatccatatagcaaaggagaccgaggccgaatgttgacagaacccagccaagccagactgcccagcggtagtgaccgtatttcgttactaggaccccgaccaggcccgcgctgggcgcaacggtgaacgtcgccgggaacagagcgacacccgccatgatgggggagtaccccttcactgcctcgtaatagagcggctggtaatagagcagacaccagagaacgagaccttggaggaacgagccggcaaatgagactgctgctgtgcggttttggaagatcttaggtggaatgatcgggtcctttgcgaagcggtattcatagaaactgaataccagcaaaccaacgacgccgatgattagtggcaccaaggtgcgccaagagtcccagtcgtaaaggattccaccccaggacagcgggatgaggaaggacgacatgctgccgacgaagattatcgttccgacatagtcgatctgccggagtttttcagcgagagaggtggggataatgttgagctttaaaaagaggataatcgccaccagaccgacaccgatgaaagggaagttaatgtagaagatccagcgctggtaatattagctaccttctctctttcccaaatatcagttgccgctagaagagcttacccaagtgacatcctgactgaacccgccgcccagtatcggcccagtcaccgagcccacactccacatggctgacaagataccaaagtactggcctcgtagcctgagaggaacaagatcagtcacgatgacctcgctcagggcaatcaagccaccaccgccaacaccctgaatagatcgcccgacaagcatatgagtaaaattattggcaacagaacacacgaccgttcccacaaagaagagcgttaacgccacaaggacaagagggcgccggccgaaaatgctggagagagaggcaaagttcggttgaaagactgtggaagcgagcaggaatgacgtcccactccagaaagcttctattgccgtccctttcaaatcctgcgtaatgatctagaaaatatcagcatcatttcggaggttaaaggaagttcgagctcacaggtaacgcgactgagatactcgtcccatcgagggcaaccatgagcgttaacacagacagcgtgaagaacgccatgataccccgtcgaccaagcacaaactcatccatctcctgtcccgtctcggtgccctcagagtcagacttggaaggccgagattggggcgtagcggggctggcgacttcagggtcgggaggagtaagagtgttctcgtctttttgattggccatggtagctgtgagaaataagcttttttggcggtactaaaaagaagcaagttgtagtagtctttgatgagtttcacatgtcctagtagagatgcaagcaactcatatatataggcatgacgggatcatgaagatttcatggcataggagtcaaaatccttgacggatagattccctccgcggctgaacctagcattgtggctgttagatcttcactggactatgactgaacgatcatgttgcccagttggggctgaagggtcatcgtgatcatcgaattgatccacggccgaatggccgggacaacatcagaccgtatcgggtttcccggcggatggtttattacaccgaagagacaaggttattcgttttggcttagcgcatgcccttttgagaatcgctttagccagatccggttagactagcgagtcggcccgattttggccagggttcatggcagagattgactgcctaaactgcctcaagggttaggcaacaaggtttcacatgcagcaaccatcaagcggattaagtaacattagttattagtggtaatctaatctctacaggtatggtatcattatattagataaaatgtcctcacgcttcatcaaccagagcccaaagtttcaagccactaatcctgtggcatatacaactgatctaactcatgcattccgtacgctggtggacactcgtcgcttgggttcagtgtttctgggagcggtatcgtctcaccacaaaacgaatcttcccatacgcgatagtacggggataggtatattagaaccggaatggccagacggagctagaactattagcagaggacattccttgggatggggtgtacacacttcgctttcatgaccgtctggattatgcatccgaacatggatcttcaacttgtgactgactctgacgcccatatcctccgtatcttgtacgcaatgtccaagagcctgtggaagttgaagtgttcgagagaactggtacgattccaatgctttgctggaatactcttcgccaagtgtataccgatcgctgcagacgatagtctcagtgcgggcggcgtgagcagatcctccgtcgttcggttccacgctaaggtcgcggacctccagaagctgtgactcgatgaatgcaatcttcatgtccctcaagagaggggcaaagacatagtctacatctatgcgggtgcctaatgcgacagtccggttctggatgccaatacgatatgcgatcttgttcgcccatacttcatccaaagcctgcatacatgttagacgcgaaagcgtagcagccaaggcgtactcacaaagtcgtgggagcacggctccaggtcagggaccctgatcacacgtagtggcttgtcgaatgtgatatcgcggccgtgtcgtcgcccaatctcgacagtgaacaagtacgagatcgacgcttccttcatgccttctaccgatgccggcaacgacccttccataaccacgtcgaacggatacttgtactccccggccggcaccgtcattggtgcttctcggtatccgtcaaaaaaattccacgttcggctgtagaactcgttctcgctgcagaatcttttccgtccggtgcgtgctgggagactgctttgagtgtcagatctgaagatgtcggtttgtttgcgctgaactcacgatacccgtcgcacaccacggagatgtaatcgaatgtacttgatagttgttgtttctttcaatcggagagagaggatcccgctgaggtataccgccagcgcctcttgttcagacccctggaagaggacgaagtctttgtcgagtctgtcgcaagagcgtattagccgggtaatattctcttgaagtgaattatataactcactgaataccaacacgatttccaacattcgcaccatgtcct

SEQ ID NO: 3597 - DNA, 1831 bp, Emericella nidulans
atgggtatttttgcattgcccctattcgtaatgaaagaaatacgtcagtgaacgatgcgtagagttccactctttcacctccgtccctcaaaatcccctcccctgccattcactctacattgcttagccaatctattgcctttatgacagtctgttgtccctgttggcaccaatacaaaaacctcagccagagccccgaacgcgaggcgccaacatagaaccgccctgccgggccctcctatttcaaacagtcaagctgaatctgagctagacacagacataggcgctgaaaatatatacacattttcactgacagcactatctctctacctacgccatcaacaccacagccaagactccacctgccaatgcatcaacgcagccatagtcgaggccgatgccgtcgtccaaggcgggtagagttcaccgagagaaggtgagtatacctttcattcttcgaacggcctacctccctatccgcaaacctcaaaggctaacctaacctattcaacatgtctagatggtcaagcaatgaatgcagacccccgtatccgcatcttcaggctcattcccactcccagaggcaaactcactctcacagtcaacaccaaaaacagtcccatatcactcctcacgcgtgccccacgccttactcccacgattgctatacctgcttcaagtcttcaacacgcgactgcgactgcgaagattacgagctcgaccgatgcggggatggatgccaactccagtctcgatgccagttacaggataatgtccatacacattgcatgtctggtgcagcaaacgtgaaattgacagccaccgcagctgcgatggctggccctgggggcggggcgtatgcgcatgctgcggcgcatggggatcgtgttacgcatgggcatgggcatggacaagcgcaagagagccaggaccggaggtatgaacgtcaagatcatgtgcgggtagaagggtgtggagggagatgtattcagattcatgatagttgtgatcgtggtggtgaatgcgggggtcattgtggacatggacataggcaggagcaggagatccactgttgtgtttctgttggtccggctgggatgcgtcataatgggcgggtttgtgcatcagattgtgaaggagaaatgggcgaaagttggcatcgggatgaatatgcgtatgggcctccgttgccgcctagtcttctgaatgttagacggggaggccgatgttttagatagcgagaatattgttctggacggtagacgcttgtcatcgggaaaaaaacaaagttctctatgatcgatttaagtcttttattcataacttaatacagggcagccaacataggaaaatatgatgaggtcaatgctacacggatattgctagcatggctagactagaggttacaagattgtcggtatatgatggggggaaactgtttagaagtggatggccttggagtaggtggccatggcagcctccttgaaggcttcggcgagggtagggtgggcgtggcatgtccgggcgatatcttcgcaggaagcgccgtactcaacggcgagggtggcctcagcaatcatctcaccggcgttggggccaatgatgtgcacaccgaggatgcggtcagtctcggcatcggcgatgaatttgacctgaccctcagtctcgaggttggtcttagcgcggggagttggcgctgaagggtaaggtgccgacacggtacttgatgccggcagccttgacctcctgctcgttctggcccccccaggcgacttcagggtgggtgtacatgaaactggggatggcgccgtagttgacgtgaccaactccc

SEQ ID NO: 3598 - DNA, 1702 bp, Emericella nidulans
caacccatagttccgccaacgacatcgccctcgcctacatcacaagttcctccaactcctccgaacccgtcatctctacctcctcgggcaccgcccacattcgcccccgagccaccaccgccggttccaatctccgaaagcgacaaccccgatgcaattgccctgcgctcagcgatctccattctgcagcttcaaaagcaacagagtctacgggatattcagacgttggagaggatgaaagaagcggcggccaaggatccggagagatttgcccgtgaacttattgatgggaaactggcgaggaaagagcagggtggatttatcgatttcaaccatgaagaagaggatcgtgatggagatacggagaccgcggaaggtggatcccgaatatcttcagagctgggaacactgcctgcagctcagaatatcgtccgcatgccggcaatcaactgggcgaagtaccaggtagttggggagagccttgataagatgcatgaggaacagcttcgccgtccttctcttggtgagccgagacgggatgaagcgccggtgccggcatcggcaacgccagcgccagcgccgttgcatttgctggcgtcgccgtatcaaccgctggtagataaactagagaattcgacgaaagcgaaagggagcaacaagggcaagaagtcatgagactgttattggtttctgatagtaatatatgatacctaacagtcctgctgaaaaacataatcataacgccattatgagggtttggccaagcccagaacagacaccaaggtgaaagcaaccgtcaccactggtccgagatactgaaatacttctgaaactcttgcatggtgcgtgaaggaacgatggacgcctcttcatagcacacagctacctgaagtctcccagtcgatctaaagaccttcatccactgtttatccttctcgtcgagaatataggggcgcccacgatagctgaatccgatcaggttgttatcctgcccatatgaggacgcctcactcggcaacgatatctcaggacttgctacagaattcgctccaaagaaaccaaacccaaccccgttctcaatgccatcatcatgaagcttaaacacaggggctttaacagctctgttcatagtccactcgctctttggccgcagctgtaacacctgccttcgaaggtcatcccgctgcttgaaaagcgccttcttcctctccttatcaacttcattcgccctgtgtgttcttatccacgtctgcgtggacgccgaagacggcgcacattgcagcaagatgttattaatagcctcgtttgagagaggagcgtagcgctctgtttcgtgttccggtatgaactgcggttgcggttccggctgtggctctgaatgctgctgcgggtgtacgctatcgcctctcactatagcagtctattcaaccattgttagtacctgtcacgtcgtgagaattacagcactttgaagcaccacccttcaaaactgataagacaattggagaacccacataatggccgtgctcgctgtcacagagacaatcaccctcatctagcaacacagactcctgtacgagaatctcaccattatcattatcgtcatagttggcatcatcgtaacactcgtcgtcataatcctcttcacacactgtccggtcagggctgggactgaggccgcagttgcagctagaaattctat

SEQ ID NO: 3599 - DNA, 1593 bp, Emericella nidulans
tcaaacatgagaattcgcggccgcataatacgactcactatagggatcacctcgggcgcaccacttgggctcgaaaagtatactgagaagagttgacagaagagttgttgcacggcgcgtgattggtgccctccaggcgccaactcaccgcattttccagaattgggtgcgacgatctgcattgctatcggacagacaaaagaaaaaagacaaaagacaactcagactccgactaaaagatttctttgacccattgtctggtttgagataagaccagtgtgggctgcagtcaacgggtcctgcagtatccccatcagctcttttgaaccagccgctgccggctgtaagctggcggtaagctggctgtaagctgcaagcacccttcgagtcgataccgggccgatgggcgactgcgattgtttagagctgcccaatgcaagcaaaccataatagagatcactgtggtgataagtgctgcagccccgcccgctaacggcctgctccactagcagggagctagtcactgcctaaagaggttggccctcggtgtctgagcgactctgcctcctgtctgaggtggagacctgggcagttcgactttttttttcctccccgggctctctgaggtttcccatagagcatacccccctcctctgattccagatagcactcctcatcattttcgaaggcttcccatctcatcgtcctccatcacctcgtctcccgaccttacctctttaatcctctatcgatagtgccaaagcgagcttgggacgttgactcgactacaccccgcccgctggaggtggaccgggacatgatggctaccatctctcctaagagaccccagtgtggacctgttattgctgagatgactaaaccttgacccaagaattgccgctcgcgcgaatgtactctttgtctgatttttagcgaatctcacgaccgttacgataataatggcctctcaagttggtgaaaccgtcgccgtccccattgcggatgagcagttgaaggacggtaagtgaaccaatgcgattcgggatctttaggggtcattgctaataagagttgggaaccagggaccacaagcagcgtcactcccgccacttctgcggacgaagccgttgagcaggtggctgaaaaggcgaaggagctggccaaagacattggggccgtccccgccgaggataagaatgacgctcctgtgcagaatggcacacataccgacgaggacaaggaacgtggtgctgagcagaatcccggtgtcgacgagaagcccgagccagcattggagctgctgtccaggccggatggcccggaagccgagccggctgtcgctgtctccgagaagcccgaatcgaacggcgtcacacccgagcaggctccggtcgctgaaccgacatcgacccaggtcaagtctgacacacccgctgtcgaggaaaagtcgaagcctgtcccggaaccgttggatcgaccagatgtcgcggctgacgagaaatcatccgtggccgagccggcgacaactgaagtcgcgcctcaagcaccggttgtagatgctccgactgttgagggatcaactaaagccgaagc

SEQ ID NO: 3600 - DNA, 4364 bp, Emericella nidulans
ctaacgcgtctggccgcgaatcatcgaacttgtacgcggagatataacacaaggcaggagagatcgagaaaaatctggggggtcaggtgttatacactcctgaggctgtcgctcattgttttgcctcatcctcattatgatgcttttcttaataactacatgttttcggtacctcgcatcaatgtcctctcactctcacctatgagtggtacaattagctgctttgggtaggtatggaggatttcagattctcagctacaacccgaagctggaaaaatatgcttggctttgattataagaaaggaaataatgacctccaaccggccggtcctcagatgactgctgtagaagttccggttctctctaatttacgcgagtatgaatggcttcccggtcattccaccgttcggtacatcatccacgaggtgttgtcggaggatagctacgagccttcgtatcttgtcaagctagaaagtcatgagttggaagttgtacgaagccaaccccctcaactaaagatgctttgactcacagctcctttctactcagatatcttcctcgcgtctgcaaaagcttgaaaatggccgcgaggcacttgaaactttccagaactcgcgtgttcgttatcgcgaaccttcctgtgagtccgagtcgaatatcgataaggaggaagatgaaggacaagagacgacgtgcagccccccggggtctgaattggatgacagcaggccgtcgcgccgagcaaagaagaccaagttcacggaattctttggtgcggttagcagcgacgatgacggaaaattgacaaagtccgattcaagcgatgaagatgttgttgcacccaggtcgaggcaaagtgtgctgaggaagcgtccaaactatcacagcaccttgaataatggctttggtgccaatgcgcactcaagaaccagggcttcaactaggtcccgtaaacctttgcggtacaatctccatgagatgtacgaggacgatatttccgaatatgaagccgtgctgtcaaatcatcgaaaatacgtgggcactaaggagaagttcgataagatcccatcgagtgatctattccgaggccgtcaccgagaagtctgcgaagtctgctcgattgaaggcgatcttcctgacaaagggcctcttgttttttgtcaaggctgtactgatgcctaccaccaggcttgcctaggcccacgaaccgcgcgagagcatcttgtcaccaaagtagcaagcgataaattcattctccagtgccgccgctgtttaggttcctctcacgccaaggattcaagattcccccatcaaggaatatgcactgggtgcaataaaccgggaaagatgtcaaatccattaagggagcgactaacatccaaacaagaacagcaacaacggcaggagaacggaggtgaagatcctattacagcggttagctcatacctcatcaacaatccagataatctactcttccgttgcaaggcttgccataggtcttttcacttcgatcacctccgggctggacgcatatccaactggcaatgccatgattgcaactcgctgcccggggaggtcaacgcaatggtcgcctggcgaccattgagtaccgcctcgaagaaatctcctaagatctcggaactggacaaagagtacctcataaaatggaaagagaagtcctacgctcattgtacttggatgcccggaagttgggtttggggttatatcaacccggtaatgcgtcgcgcgtttttgagatcagacaaaagccatctaccacggatgaccacagatgaggccatacccaatgattacttgcggttcgatatcatttttgatgtcaagttcgctgataatgatctccatatgtacggtgaggattacgacgaggatcttgagcgcattgataatgtttccaaagcctatgtaaagttcaaaggattaccctacgaggatgcggtatgggaagtacctccagaccgtagcaatactgaagcttggaatgatttcaaagctgcgtatgcagactgggccaagaaaccattcatcagcacaccaaatcaaatatcactacagaaacacctggctaatgtgaggaaacaaaagttcaagtcgagagaagctcagcccaggattatgacgggcggggagatcatggattaccagcgagatggcttgaactggctatacttcaaatggttcaagcagcagaacgccattcttgctgacgagatgggtcttgggaagactattcaagtgataggtttactggcaactctggtccaagatcataagtgctggccatttctcattgttgtgccaaactcaacatgtccgaattggagaaaagaattaaaaacatgggtcccttccctccgtgcagtcacctactatggctcttctctggcgcgcaaaatggcgcaagaacacgaaatgttcattaggggtgaccctgacctcagatgccatgttgtcataacttcatatgagacaatggtggatgattcttgtcgaaaggttttgtcaagaataccttgggccgggcttattgtcgacgaagggcagcggctaaagtctgacaagagccaaatctatgagggactatctaagatgaaatttcccttcaaggtactgatgactgggactccgttgcagaataacaccaaggaacttttcaaccttctgcaattctgtgatcagtccaagaacgcagaagaactggaggagaaatatggcaccctatccaaggagaatatcccggaactgcacgagttaatcaggccgttcttcctccggcgcacgaaggcccaggtccttactttccttccacctgttgttcagatcattgttcctgtcacgatgtctgttcttcagaagaagctttacaagtctatccttgcaaagaatactcagctcatcaaagctatcttccagagaaatgaggaggaccagccactaaaacaaacagagcgtcataatttgaacaatatcttgatgcagctgcggaagtgcttgtgtcatccctttatcttcagcaaggccattgaagagcgaacggacgacccagaagtagcccaccgcaatcttgtggatgctgcagggaagcttcagttattagagctaatgttaccaaaactccaagctcgcggtcatcgagttctagtattcagtcaattccttgagaacttggatgtcatggaggactttctcgatgggttaggtcttccccaccgacgcctcgacggaaggatgacttcacttgaaaaacaaagaatgattgacgattacaacgccgagaactctccatacttcgctttccttctctctactagatctggcggcgtcggtataaatcttgccactgcagatactgtcattatcatggaccctgatttcaaccctcaccaagacatgcaagcattgtctcgtgcccatcgtattgggcagaagaataaagtccttgtctttcagctcatgattcgagggagcgccgaggaaaagattatgcagattggcagaaaaaagatggtactcgatcacgttctcattgaccgtatggccgcggaagatgatgatggcgaagacttagaatccattcttcgtcacggagccaaagcattatttgatgacgacaactctggcgacataatctacacttccgaatctgttgataggctgcttgaccgcagccaggcggagcaggccacgaatccagacacgaatgtctctgcttctgagtttagctttgctcaagtatgggccgccgatagccaaggcctggaagaccaacttaatgttgcagaagaagatccaaccataagcaaccaaacgtgggagaaaatactacaagagcgtgaacgggctgcggctgaggaagcacgaaagaaagcagaaatccttggccgcggcaagcggaagcgggcgactgttgactactcagctgttgatgccgatccggcccctgccagagcgcttgcgagtcgcgagactgagagtgacgcggaattccgtgaggatgaagccggagtagcctctgattacagcatggaagacgatattagtgtttacgaaggggcgaccataaaacctaaaggtaattggcctatcgcaattgctttgttcaaacccccagaaagctaattccatctgcagttcatgcatttcagcgggtcatactccttccacaagttgcccaaactcctcagtcagtccaagcaccaacgccgaacggtgtagggatgaatggccatgtggaccgcaatggggatgcttgttttgtctgcggccgagttccccaatgggatcttgcccactcaagctggctggagttgaacattgcggtctctgtggactcgctcattatg

SEQ ID NO: 3601 - DNA, 6324 bp, Emericella nidulans
tatcagctaccttgttgtgacctggagtacatcttaagctggatcccttaccgttgacgaccttgtgagcctctggacggcttgctttttctcccacaccactggcgtggctttgagatactccgcagaggcttgaagctgaacaaaagaagcaaacggaccaggaacaagcaaataatatataaagtatcgagccagtatcaagatcaagacctagcacggtccagatcttccaagaccaacatgaaatggccgtgataaacaagaagaaattagggactccacttgatggacgtctagtctggtatataaaatctcaagagtcaggactggacgaacagtacggagtatctcaaatgcttaacaggcagtgacaacgaggaatgatctgaagacgatcctgacaatggggatcactagtaataagcaaatacgatccgccgggtttaatctcttttcaagaaaaccgaatgagataattagaaaaataaaatagaaaataaaataaggaggaataaaataaaataattattttctttttcgttggttcctgcaccctgatatgacgctacgatctagaacgatatatactctttttttttttgcttatccgcctcttccttccggtgtcccagagcagtggaagcagcgggggtgctaatcaacagggatcttgcctgttcacggtgtagctctgtctgttatactccgtacagcgcctcctttcgcagaatggacattagcgaggcgacaatctggcgaataatgatatgtaaattccgtactccgtacttgtcaacttcaagttaaccctatcaagcaaaaagtggtatttatatttctaatatcatcactaaaaagaaggagggacagcttaaatacagtaattacgactcgtcttttacactcggtttcttctaatagcccccaccaggcatctccaggcatcctgcctaagcctacgtcctccggggctggctcctgccctaggaacgatccctgctagctacctaacacccgcatgatctatgtggattggcagaggcaagacgtgcttccaaacctagtatagcggggagcagctaagatatagtccggagacgctagtagtagtttggttttcctagcgccttaacgagattctgagtaaggaattttgttaccacccgcctcaaaaccaacactttggggcagagaatcgtcaattgttatgacatattgcatctagtcactcgtgaggcagtcggaagaaggacggaccactcgtttcaagtccgatcgtgtcccgatcgctatcccgatcaggttggcattcacgcgcaccgcatccatggaagataccacggtagaacgtacctttgctgtacctcgatgcggtatgtatatttggattttggatcatcgctgatcataaacgaggcttgtttgcctcgagttcgaggagttcccaaactcgtcggtcggcttggctgacacagaagagaggcgaccactgagcatccaccgtttatgacattaatcacaagaattataactatcgtcacgattcccgcttcgctagttcgtatagctggatggaggtcatctgacccgaatgggtggtggaaagtgggccagtctccagagcatggacccgacaatccaaccagaagaacgtgcacggtgccgagcagtttgttcctgactgacagggtgatgatcgtcattgttggacagagctcggtcgctgttcagaggaccgatcaaataattgaatcttcaagccagcagctgagtagaggttgtcgcttgactgcttgcaaacaatccggcgacaaagttcaggggagacaccagatgagccacaataaacaggactgtgggcatgattcccgttcactgggataccctcgtctcccacgcaggcacctgaactcctatatgggggtcggtttcataaaaagccactctgcctagcggatcggcagtcatcatcacctggactcttctggggggtgcgaggctgtcgactgtggatcgtgctctttggacttttggggacttagcccaacaaaatgcgtgcaccaacatacgtacatccgtacggggtctactattttcgatccgaaaaatggaacaaaagatatgagatccgagcaaaaaaaaaaaaaaaagatcttggtccgtgaattggacgtcagggctatagcattcgcaccttgcagctcttggtctccattgtcatccttaataatgcaaccccggagctgacgggattgttgagactggctgcatctgctgcaggatgcccgaaacccgtcgaagtcgaagcctgctgctggctgagtcgctggaatgacatagctttgacatccatggagagacgtgtcaatcgagcgacaggcgatcagaaactgctgagtatcggcgtacttctttctggcgtcggattggagtcgagtaaatcgatggagggttcggcaaggctacaggacggaccgtcggcgggagatccaatagtgccgtagttcgctgcacgctcattcgatctgctcgcccccacgctccttttcttttggatcgcagcagccgcgactggcgctgaattcggcccagttcctgtcagaaattaatgcgaaaaacaaataatttctgcaagggtttctttgtctttgttgacagccgccaagggatgatatgacgaactatctgcactcacctggcagttcttgccaaggactcgtttcgcaacccacgaagaggcagaagtctgtttgacattccgactgcggacgacgtacagtatagtcacctgtactccatagtcaccctttgtctcagtagcgtcacgtcacttctccccaaaaccgatttctgagcagtctccgacgcattttgctagggatcaggatgaattgatgtgtgcatgctgatgcagatggctggaccactagaatgcctccccacaaatcccagcgtccgatcactcgtcgattttcatcgttcattggataagcgtgtagtggatccctgagattggcagcgcgtgtaccggtgtgcactgtgcccgctgcctagttggaagcctggaagtctcgaccagcttccgaccatggggtatagcaccactagtccccctagtgccaacaatagccctgattggcaaattattctgacggtgagatccaagtctcaacctcttgggagtcttgagaggcttcagaatccatgaggacttcagctcctgggtgaggctgggcacatcagcttctactcccccagcgcagcatgtactgaacacgatgggtccgaagtgggatcttcgttctcagctcctcgattcaaacattccagtagtgtgcggccgggaccgggaccacaaacagacagttatgctcacgtagcacagctcgtggctgagtcgggattggggcctagtcatgcccattgtcagcgcgattactccgaccagactccagatgccagatgcctcgtttatgttttcttttggtcgccgccgaggagcgggccgaccctttctcagtaataatgcctgcgcggctggaatcgtggttcgcatcggtgccgatggcattaggtccggggtttgttgctaaactattgatatacactcactatgtcgacaatagatttcaactcctgaccggcggtctccgacttacatataagacccgataggagttcaataccgtatatgtactgcggaccgtgcgcattcatctttgcgcaaactccggccaaagctggactacggactgtcttccagctaacctgccaattctcattatcctacggtacctgatcgacaagatcacagttaagggggaagcgaaccgtcaagtccgagcgcaacaccgggaattctgagacatcacaatgcagttttccaagtacataggtagcgtgtttacttacgcaggcgtcaggtacggactccttcctgcaggtgacatgaactgcgcgaaaaggtggcagcgaggctccctataattccgctctccaacacacgaacgccaaatcaatgctctttggaataagatcccaggatgatagagcgccgagactgagcattgagagagattgtggctgcactgacgcatgcaaccagccataacggagaatcaggtccgtctttgcgagtccgcttgcgtacatacgagcctacgccaattgcagcccttacccctcgttccaaggaccgtgctgaacagctttcatagttcgtctactgtatgatcaagatccgggacaatgcagccgccccaaatcattacaccaaataaccgcgttctgcccgcaaaggatcttcgcccgcaagtcattctggcttacagacaatcaccttgtatcattggcggcaggcttcacgagaatttgattcaccatgactgcgttaaccctgcaagtgcgcgcggcaagaatgtatgtacgtggtgtccaaatctcactacccgctcctgctggagaaatcgaagagaccgcttgactattgaggctgtgtgtgcagcggccaccttgcccggcaatctgacccaaccggtacgaattctcgcgggcacgggaaactgaacctgttaacccgcaggaaaggatcacattggccaatgacaacacccacataatcttacctggtgagtgagcttgcgccgaagcgttggatcatgacgccgttcgtattgggcaagctttggccgaacgtctgcaagtgttatgggctttctaagagttcatattcatcatcatagaataatctttcggtccatgatatgatgtaaacaggataagatagactgaaatcttctatcctgtctcttgataatctacagccgtcatcctaaccatttgctacaaagtacgatgatacaccaggatttccgagttctagccgcctgactagaagcgctgcagactaacgctggtctctgcagtctttctaagttgactactatataacggtggggaatcatcaatcttcctattacgcgctacaaagaatgcacaacagctaaagaacgcccagtccaaatcccaacattcataggggctgtggtctgattcctatccagattttccaccatatagcgaagtctgggatgtcattcctatcgtggccccaaggcagcgatgcaccatgaaaaaatggtgtaatggtagatgagcctagacgcgttaccggagacattttgaacccatttcgtacatgtccagcacagcggtcgtaagcgtcagctactacaaactttctgtcgagtccttttctgcgggcaccggaatctggctaacttacgaagcacaaagtagcaaagcgtgatacaaagacaggcgtttggtatcacatagatatgtatgtatcagcaccttcaatgcctctcgccaactcccttgatacgacctcgtaggctcgagttacgaattatcgccaagcgagaaggaaacactgaatttcatgcctgatcatggaggaagaatgccagacggtgtcgtgtgctcagctgattttgcaggacctatgcaatatgagctgcgctgctccttgccaagtcacgtgtaacttcctttaatccgtcctctctttgtacttgatctcaacctgatatataatgtacttctctgtgcttcataacaattgcattcatctttcagtatacctaaattcaccaaagatacaagggccctaactcaagggaaccaacagaaaagtacctcatcatacacaacccctttttgtggctctctttgttgccttagtttgtcggtgttgcgtcagagacgacccatacgaataattgagctataaaagaaaagggggaaagaacaaaacaatacaagaccataagccatttcgccgaaattccactggccggtattggttgaggatgtgagaggaacgcaaaaaggagaatgcagtagatcgagaatcgcgttgacgccgaagctttcccaaattcaatgattaccgtccagtgtacgcggagtatctgcagcacgttatggtcagcctaacatccaaatcttaggcagtgagatagggttagggaaagaagcgtacctccagattcttgcacgcatgtcaccactgccagtggcaaacaggttgccagtgggactgggtgcaactgagataactaattgcccaagttagatatatatttgatgaaataaatgttcttgcgaacaagcataccagagttcttgtgcccctgtagcatcatctgagcatttccagtgatgggatcccagaattgaacacccctatcttttgaaccactcatgacccagtgaccatcaggagtcaaacagacactaagcacaaagtcctgatat

SEQ ID NO: 3602 - DNA, 2692 bp, Emericella nidulans
  unsure (1)..(2692): unsure at all n locations
atcagcataaaaaacacgagcagagagccaaggaaatagttcataccaataatccgtgagcgatgtatcgtacccagcgtctctcttaccgttaaccgcatcgtacagatctctgtagtagcccgcggtgtcaagaatctgaataccgcccttgtcagggccttcgaggatggaattctggaattgccacacatcatcgttcgactgcagcgacgaaatggtggtgaaattattgatatagatggagccaacaagccagccaccgccgctaaggccagacaagtacgtcgcggattgcagcaagccaccgagttgaccttcgctggttgagttgtccgtccggctatcgaacgccttaagggctccagcaccgttcatcaaagcacgccatcctccgccagagactgcgattccaatgttgggcagattcgaggagttgctaccgatccgatcaaggtaaccgaccgcgtcaaaatttccaacgctgacatgaccaaagaagtcactcagagccgaccgcgtgacattgcggcgccgctcgagccatgaagtctcgttcggcgaaagtcccgtcgcaagccggatttctggacggttggacgggcaactcacgttcgcaggggtgtagccgtcaggggcattgggaaatgaccgctgcaccggggacacttcggacgatgcggcacctgcagggttcagattgaattagacaataacgcgcacgggacaaaaattgtaacgtaccgcacagcaatccggccaaagcaagcaccgtagttgaagtcctcatcttattaaccctgaagtgcttctcacactaatcgtggcagcgcaaggtgtacgttaactagtgacctatacaaggggcttctgccgcggtgccaggacggcggttaatatatatagatgtgagacgcacgggcccatgcagctcatcccaatttaatgtgccacattgatctcactcaagagcgccatgttagcaactggngccccatagccaagagtgccggagatcagagctgggtgggccaatcccttgaactacggctcgctattggcgtcgattcaggagaccatgatatcacagggcagggggatccggcagttccgctgggcttagaagctagaggccgaactttgcaacaagaagttcgttagtgctgatgctctgtcctggtttgttgtggctggtgctggacgcctgagcagtgttgttaagcagaacagccacgctagagtctttatccttaaccgccacgaattagccaggatctgaacgtcgatccgtgataccgatagtctgtagctcagtgctcaccgtcatgctaagttcgtggctttcagccttcgactcgtcgagctgtccgaagaacagcggcccaaggaacacagtctcatgatgcatgcgctagcggtgacccaagaagacagatttgcaggctgcaagattattctcgcggatcgaggcagtgatttgcgggacggtgtgggtcaaccattaaaggagaatggaaaaacgagggataacaactccggagtatgcagcgtgatggagagacaaagtcagaagtcggaaacgagtacgaactgccacaatggagtcagagcccggcggagagctcggaacttgggcggtcccatagatactgcagaataatatgaatgggcacaggtgaaaaatacatattttaagagagcaggcgtttgcatctcaactgattcgatttcggtttcatccgagctctagacaaacaagtgcaagctacctcatttttcacactcgctgcagagtgacgctgacgcccagattccaggccgtcactgtactgacagcgcctctcactcagtacgactctgactcgacaagctcatacatcacatccatcctcaaggtgaacttggtcccgcgaaacaccggatccccactatgaagcaattcgctctgctggaaaacaagagccgaccctgtcctcgggaagatcctcacatgcctctccttctcctcatatcgcggcagaaaagatgtcgcaccgtccagtaaacgcccttccacatctagattcatgcatcccctctccgacccttatggcccctctgcatcgatcgcacactttaattcctggaggtcctgctctccatctccattcagatacagttggatcgtgaaatacgatctatcgcgccggtcaggcgtggtatagcgtgcgtcccagtgtgggcggaaatactcgcccccaacgtactccttgtcgtcagtaacagggcgtctaccaagtaaggaccgagacttatacggtactgaccttaggacccttaacgttcgtttatcgcggaacctgatgtccaatcttccccaagcctggaagagcgttggtttcagcgacaactcattttttagaaagaaagttcctgcagtttaggattaagtgcaaatatccatgcgtgccaaagggatttttgggggcctcctatatagcctccttccgggcgtttaattagaaatctttttttgtgggtgtacccacaaatttatccttatagtgcttacgctgctaactaaacatgcctttaaacatcataacccataatccttcacctttaatcctattctttctttcttttttatttcgttgttcttggggccaacataacataaaaaaacatacactaatataaattatctactttt

SEQ ID NO: 3603 - DNA, 1339 bp, Emericella nidulans
ccactgaatccaggtcctccgtacccgccgtcaccagggccgtccgtctgccccttataggccagggacctaaagtctcgaagggacagggatctccaaaccgtggagtctcagatacaaagcctgaaggcctcgttgtattgattcaattcctgagcatttgcctcaaacgactgaaacacggtacatcaacccggattgactacgggaacttgactgatagctgtgctaccacgccgaagccgtcagtagtcgttaccggccatctattcttggcagatacgcgccggcttgttgcctgatttttctctagcagtttcaactgaggctgccgaacacccttccgacgcaggactcgaagcgatagctcaagggccgaatctggactcagtacagtccggtatatcgggctcttctgccgctgcgtcgaaggcgattttgcaagtggctccggtgtcagatgcacacttcaatctagcatccgatcgagaccaatatgaaaaggccagatccagccggccagcgccgtgtcagtcaataagagtttttcacgtgacccgcgtttcggaccctgaccgctaagtatctacatcgtagaaggcttcttgccagttgcaacggggtatactcgaacaaccgggacgcccttacagtcgcaagtctgatggccacccaactacactgaataaggccgtcgtaataatcttgaataagctcactctgatcaccggccaccgtcccgaccaatcgaccacaggtactgcgtatgcgtatctgcttcgtatcaacagtcaacgcactgctggtacatcctcttccgcattcgtcgaaggatcagcgtcagctcagctcgcaggatctcacaagccacaaacgtgccctcaacgagttagcgccttgcaactccctatcaccggggaggtcgcccgtcgatttccgttgataagcaaaagcttcacacatcgactatcggcggtcagcgttcaatgtgtccatcacccactgaaacaagttactgtttagtcaagtacatagtccactgcggagtacttcattttcatattcccatcttttagcgacggagcgtgtgggccggcgggtatatccgccgactctcagagagtgctgagtgctgacaagtgcaagacaggttgaagtttgcttgttcaggaataaaggatgcatctgaacagttagcctcggcgataagacggctaactcggattcctggtctgatagatcatggagagccgccatagtctacgaaactaccacgcgataagaacgatcctccttagccacgcgttcgaccgatcatcatctcctcgatctgatttgt

SEQ ID NO: 3604 - DNA, 9239 bp, Emericella nidulans
ttggcgtcctgttcgaatggcattccctctgtctatacggatgaatgtggagagaggcgatggtggggcatcgctgaatttggtacgattctcaacgcaggttcgtaggcgtcggagctgaaccgcactctctgctggagactcgaagaaggactcgcttgcggtttcggcagttgctccatcatggctcgactaatccttgcccctcactctttctctctggtctctttccgaaataccctcctctccctgctgaccagcacattcacttggtgagtcgtcgctgcacctcgcagtcagtcaaagcaatctctgacaggatcattgtatcacagaacttcaccatgtctctccaccgctgccctcctttccgcgtcgagcaccttggctccctcctgcgtactaaggagcttcttgacgtcaagaccgcctacgagaacggtaaagccaccaaggaacaactcgaagctgtcgagaagaaggatatcaaggatgttgtcgagctccagaagaagttgcggtactctgcgctctctgacggagagtactgccgacatagtaagttgagggggaaaaccaacgaagtttgctttttccgttttataagtgccgtggctaatgggaaccttgtggactacagtgttctggggctctttcttccccggccttgagggcttcgacgaagtctccgaccccagccccgaggtcttccgcccctacgcccccgacgtcgctgctttccttgaggcaggtcacaagcccggtgagagcgttttctgtaccggcaagatcaagcacgttggcagcacatacgtcgaccagttcaagtttctcgcctcgctcgttgcccccgaggaggtcaagaacctgaagctcaccctcgccgcccccaactggtaccacctccgctaccgtgaaggttacgcctaccccaaggaagtctacgccaatgtcgacgagtactttgccgatatcgccaaggcgtaccaggatgagctgaagatcctctacgatgctggttgccgcaacgtgcagtttgacgaccccaacctcgtttgtacgtctcttgccagtaaaaccccctacagatgctaacaaacattagatttctgctccgaaaagatgctccagggctggaaggaagatcccctgaacaccctcagcgccgacgagacttttgagaagtacatcaagctctacaacgactgtctcgccacccgccccaaggatttccacgttggtgtccacctctgccgcggcaacttcgtcggctcgcgccacttctccgagggcggctacgaccgcatcgcgaccaagctcttcaaggaactcaacgtcgacacctactaccttgagtacgacaccccccgcgccggtgggttcgagcccctcaaggaggttccccgccacaagtccgtcatctttggtgttgtcacctccaagttcccccagctcgaggacaaggaagagatgaagaagcgcgtctacgacgctgccaagttcattgccgagggtaatggcatcactctcgagcaggcgcttgatcaggttggtgtcagtcctcagtgtggtttcgcctctcaccgcgagggtaacgccattgatcgcgagggcatgatcaagaagctagagcttgtccgggctattgccgacgacatctggcccggccagctgtaattttctttatttcctctgttttcatcatgactacatcttacgggagcatttaacatggcatggttatgggtatatgaacgaattagctgtatatagtctagttacggggccttgcgagttcaaccaagcggggatcatgaattataaaaaatgacgaatatttatcgagtcctcagtgaactttcaaaccaggggtagcagttcacgtggtaagtatagggctgagaaatggagattggcttggcgttattagggcgggttgcttgagtataggggagctagcatatatgctcccggtcacctcaggaattgtagcatattggcagtagcgaatatttcatttgaatgcatgatttcgacaaaaccaatgattcatcgagggcataccggaggggctcaaacgtcttacacgtgcggcgcttctatgtgactcccggctacgtctattattaatgacttcagtcttcatcaacaagtggatctttatgggggcctgccctggctgtgcagttggtgtagggacatctgctagggagaggacggatgggtctccgaatcgcgcgacgaggattgctttcatgttaggcttttactctctgcttatcctctaaccaagaaaaccagagagccagagaattctgatggtctcgtaggaaagtgagtcattatcctcagggagcagtgcagtcctgcttattggaatggtgggttgagcttgggtgccatgctgactgacggcgacgttgtggtggctccttttggactagttacttggatggcctggttaacatgcatgataacctaatcttttgtactccatttttgcttagtgctagggttgacctatcagaaaacctcccctatcgtctgacaggcatgcggccaggttcgcacagaacccgtggtatggaaagccaactggaggtaagtttagatgagtgcgcttgaccgcagatttctagaaacaacaaagcgttcatcaattaatattgcgcaatattcacggcgatgccctggtttgttgaccattatgctgtttcttcggtcttatagaagcaatatacgagacttcgcattcatcaagcagccctagatacaagtctggatccatggttcgctcttgacaacccactgtgtcccgtgcccatctcttagctatctatataaattcccaacaatgtatattcgatccccatgtaatagccgagatgacatccagagcacacttcccttgccaatctgacttcctggacgagacttgacgctagagtcttattgctaggccgcgggcatggatgtagacaccataccagttgcattactgcgcgctgtaaccggctactgcattatctgccggacagtcctctctagaggtctacgtagactcgtcagctctgctctcgctgcgtatcgctaacgcatccccaagccttcagcactcctttggtccgtaacgacttttaaccaaccgtctcaactcctccccttccttctccttctctcagttccgtaactataccgaggtctactcttgaactacatacttttcagctgcaaacacatttgttccagcagagctgacttctactcctggcgacataacatgattttcgcatgtgctccagccaaggccgcggagagatattatgtcttgtggtacggcgttagtcttgacttactggtgtacctaggtcaaatccatgcttggctgtgcttctggttagagtttttttatagaagtttcatcagtgcacttacgtcggtggggtagaggtcaagagttgctggctgccagtgaaaaagaacataatccgtggcacgagtaggtatttaggctagcctcttattcatgttgaccgttgcactaagtgtgagggaatactttaccatgtgctctagtgtatttctgttcacatagattagtattatcattatttttcgtctcccactacccaagcgacatagacattgtacgtaatgtggtctgcagagtccaactgttccgcactaaaggcatgctaacatctacgcatcctcaggattatgccgcaacaattctgacccggtttagcagaaataatactgccaacgacgcgtatcatcggcagttgtgggagacccggggtggctcgaccagctgaaaaaaaaaaaggctctgtagctaatagagccggtagagctgaaaggatcattcgttagggatggccgcgcgtgtgagacatttctaaacggcttttcccttagattcacttatctggttggaacggtgcgacctgttgacatgttgagatctagcaaatctagacagctgtctgtctccacttggatccggtcatcaagttcttcagtaaaggatagttcggccagctcatgctatggaaaagagctggtggtttcgactgctcgagtcggttaaacagtaacatggcgctgcagtaaatgcacgccagtacaagagggacctggctagcatgttggtttgaaccctgacaacgtaaacaatacaaactgacaagagctagatccaaatcaaaagtggaatctgctgttgaagccgcgatgtagcacagccccagccaagcttcatactcggggcatcgaaccatgcccaaagcggccattagcggtttttaccgctgaaccctcaaagagccacccttcaaggacgaaattaggctatgtaagcagcgaggcttgcagtagtaagcctcttcaccgcagggtccagccattcaagcctctacaaaacaagccaggcaaaaacaggcgcgagatggccgcgtcatcctgttctattccttcagagcgggaccctgtacgatgaagggtcctaggcagaagcattatggttgaaacagagcgaattattctgagttgtaagtgctaaaaacttattttggtagaatcgagtcgagtggctacctgtgagccacaggaattatgccaaagtgaccctggtagacagtcgttgacggcgcctgtcctagaataatcactcatacaaagagcctcgagttgtagtagtatagtatggtgggacgtgctaggattggacagcttctgtttcttattttctctttttttcttgttatatgaggttgtagacgcttatggtatcacttaatgtcagtgctaccgctgctgtccttctgacatctgctcttcttcacatctatctaccgcgaaacgcatcatgctgctatgccttttatctgtatctgctcttcttctaagagggtctgcacttgcagccgagaatatagacttccagcctcatcctgtaccgccctttccagccaacgggtcatatactgccaacctggagtcttcagagtgtgcttttgcccccagcgattgtgtcaacgtgtcggggtattcctcgtccctggtgagcccgctacgtgcctgcctgtctgcctttttgatatgctgtcatgtgtcatcatcgattgaaactgctgaaacctcactaacaaggccacagaccatcagactcactctaaacaatggctccctgctcgccaacaacgttagcatcttccctccttctctacccacgcgtttccaagtcgagagacactgggccgtagactcgaaacctggatctggcagcgaaatcgtaacggtggcatataagacagacgtacagtctatcccgccgtcgcagaggctcaataccttacccgaacgcggcagaagcacattctaccgcctcaagcttagccttttcgatttgcaaggtcgacccgccactaaaagacctgtatctgtgggtctcgttcgtactcaagctcgacctgggaatgaaagcgggatcggggtcgagactgggtccgagagtggaacgctccaggtggtccagattgaagagaccgtccatcgcgtatatcaccatcacctccatacatctcagaatcgcaacccagatggtacatggagctggtggcggatgaaaagttggaagtcgtactttatttcaaacaatcgcgaggcttcagaatcatcagggcaggcagagacagcaacctctcgcctgcctcatcttgacactacatctgggatgacaggtaaatcaaagggaccggcccactggatcggcaaccggcattcctggcatctttcgaagctagtccttgttcccgggttcttggagctggccattgctgttctctgttctgtgactggttatctcatgggaatcgccattgttgcggtgtacgagtacttctgcgagagtgatacggcttgttctaaggggcctgaccctgaaagacctcccggggacgatgttatcttcgactctgataccgagaagcgcaggcttagtatcatatccagtgactcaagcgagtctgaggcgtatatatagatgccatccagacgagctagtagtatacgtgtttcaatacgtatacatataccgttgtcgatcccacagatattgttcaatattgttcaattacgttacgtatcacttgcctagcttctaggacagcccgaaacgagttcctcacttgacggcattgccgctcggcgtagtaattcatctacctggcctactataagttgtaaacacttcctctcctcgaaatcgagcaagagtccatacgtaaaatatgcggagtgtggagtacggagtattgactgcggttagggctcggctctggtatatatcgtcggttaccgctaatccggattaggctaatttaatccccattaatggagataacgccgttgacgtcaagtctccgtcacactgccgtaagttataatcctagtagcaataatgaataatgtcgtgcacggagatacgcgtcagcagacttatgctgacatcaagcattccatgagccagatgctgtggtagaatcagggcggatgggctggttcatgaaggcagactcgagtcggatgtccctgagaagccagaaaacctgatcagcgatcagcggctgattgatcgatcttgacggtagatcacggaagacatggattaaactctttggagctttgcggattgagaacaatgtcggacccggaccttattcggtactgaatttgtggaacggatgggcgtttttcagggccattccggttagggtttcttgtagtgggcactgggcgataaagttgatgtagagcatcatgcccgcaagcttggagacaagtgtctatcatcctccttagatttgaatggcaatgaatgccgcgttagttgaactcattggctacaaagctttggaggtgaggtcggcactgcccgcccaggccagcatgcgttgagtatgacgcaagaggatgcaggttgcattgaccttataacacataggttaaaaacgcctacgttcccagttcgataagcgttctgtaactgcgatttgaggacctgttctctgactgagtgaaaggggtctcatgtatcgatataaacgtcgctaatattaatattgatcgccaagatgctgtcgcgacgttttggagtttccctgctgcagtcatccgtgccgaagctggcgcggtccagctgcagggcgcaatacaacagagttggttttatcaagccgccgacgccggtcgtctgggcggccaggacgatggctggtccagcgaatctgaaagagaaactgcccgagaaggatgggaatcagcgattccgggagttcatgctggaggggaaagttttcgcagtgactggaggggcacggggactgggcttgacgatggcggaggctctggttgaagctggaggagagggttcgttcccagtcatatagatcctatgagaatgttgaggatgctgaccagtgcagtgtactgcctcgacagactacccgaaccagacgacgagttttacgccgcacaaaagcgcgcgaatcctgacttcgggggcgccctccactaccgccgcatggacgtcactgacgacgctaacaccgaagctatcttggatgatattgcgagcaagaaggaccgcctcgatggactgatcgcagccgcgggcgtcaaccacgtcaaagatgcattcgacctgacgcctgagatggtcgataagctcatccacatcaactataccggcgtcttcaggagcgcggtagcagccgcgcgcgcaatgacggctcgaaaatgccccggctcaatcctccttgtggctagcatgagcggtctgatcgcgaacaagggaatggcgtcggcgatctacaactcctccaaggcagcagttgtccaattgagccgcagccttgcaatggaatggtcagaatctcgcaaggacggaacgggagggatccgcgtgaacgctctgtgtccgggacatattgagacgtcgatggcgcagatggtgatggagaaggatccggagacgagggtcatctgggaaagcgagaatatgatgaagaggctggcaaggccagaggagtttagggggattacgctgctactgatgagtgatgcgagcagcttcatgactggcagtacggttgttgtggatggagggcatacagcttggtagtcatggccggttcatagactgcagtacctttgcatcaatacattctactctaccactcataatctgaagcctaaatatggtaatctcagatgctgctgccgtcacgtgtgaagaatgaccgtcggtttataacactgagatatcttctccaccaataatctcaaccttctaataaaatttggtaactcctgacacctacggtcactacgggctattagatacgacgcaatctggccggtcataagaacaatatcagttgaacttcgaaacccacttgcgaaagtggtaagtggcttatcgtggtctattcagaagatcaagggttgttggattactgggttgctgaatctgctggattacgaccttttagctttgcagaacgctcctgctaataagacccttagtaatggcttatgcgatcgtacgcgttttctatcttagatctgttgagggctgtatcctgcacggtgcttgaagctatgtgttcatacaaccaccttcgacgacgctatcgccagcaacaaaccgccacatgagctttacagagtgcgatatctgagtggagccgagcagcctatgaacaccactgttctgccctattcgttatcttccttctaaacggtgcaatttgaggtgctcttccgacagccagctgaatggtatcagccatcggacatcggaaggcaacgccgatcagggatttgagtattgtgcaacacttggctgattcaggagcagagacgaagtacaagcccttggcttatggtccttcttgtggatttccaggacacctatcggcgatgtcgcccatgtccgagaatacataactgcactccaacctatccacgccccggatttcccttcttgactgtttctgggaatgcggggctcctcgcctcacactcaatatagttagtacttgttattttctatggaagggtgatttttatcccgcctgattcgaatgacctcggaattgtcgagccaagaggcaatgccgtctttcacggccctagggagttgggcaaaataaatagacctaaatgatcctaag

SEQ ID NO: 3605 - DNA, 2673 bp, Emericella nidulans
tatttgtccctccagagtcttttttctctggaatcaatccagctccgccatccgacctgctccccaacacaagcgggcttctgagtagcgtaatcagcgaatttagtaccccaaattccatcttgagctttatgctatagagcagggcacagtacccgttcgcggcaagggcaaggtccatgtagatctgcactagaaaccctgtatccagtactagagccgcaacctgcacgggcatgagatacaccaatactctttttcccgcgcggccctttgcctgtgcgatcggatgcagattacgatacgcctgcacggtgtagatggcgcacacgacaaactcgcggacagtagcgcccagaaagacaatgcgttcgaggatgtactctgcccttgcaagacgcggttggcgcgtgctgaccagtgtcagcgtcaccgtcagctgtgcgggcacggagagcaccgaagtcacgatgatcattatcagaataccgcggaggatgcgatacgtgtgcaggacgaggtgtaaccgcgagtacagaacgaggatatgtgccgtcaagagagccgtgtacgagaaggcaaagatataaccggcagcgagaagctcgctgaagtctgtcctgaaagtccgcagcgactgagctatgacgtatgcggccagggagagggtagaggtgaggatgctgccaaagtacagcccccgccagcggtcgaaggtgttgaagatccacagcaagagctcgaggacattgtagccagcgatgctgaggaaaattgggttgataatatagaagggtgacgagcatgggaggccagacggaagggacgccgtgtcggacattgcatggtagacgaagatgcccagctcgtgattttttttttaaattttgattccagccgatatggtggctcgcatactagcaatattaatggaatttaatgacgactccctccaaggatcttcgaccctggtttctttgtcttgctggagaccaagacagatcacatcctagagcccagattgtgggctccgggatattgagacaaagaaagtctatagcgcaaagtaagcacacctttccggcttttccaactctattggatttggggttgcgcacgggccaaaggtaattcgacgataaattgatagcagggcgaaacctctatcctttccacaaatggcgctctaagaggtaggccgtgctgtccagggcccttcgagggacacccagggctgccctgctctgcttccgttcggtgtcacgacgggacaaccatgaacctccacatgggcacggccgatctaaactgtcgtaccgggggcaatagctgtcgatcgacaggtagctatcccgcgcggcggcgtgttacaagaggatcaattggtgcagggatgtagccgtgtgagccgtgcccgcagtcatgaatagatatacaaatcaagactctaattgtgcttaatcctgagcagccagatctcaagtaaccttattgattttgctttaccattttctttatttcttatccccttccttttttctttcttttcttttattttcttttcttttctcattttttttttttttttttttcaaatttatagcttcctttagttggacggaagcaagaagacgattggattggacaagctgtacacttccttcagcacgggttaaggcaaattctaaactgtgttcatagttgtatatgaatacacaccttacacaccatacacataattcacataatatatagtaataaataatagatgcgccagactgagcctcataaaccgtcagttttaatggctcgtattttcgagggtacgaggaaatcattagggctcgcctactaggccgtggggctaatgttaccggcaggtcctgctcgttagaattgtacctctacagagcgcaagctctaccaagaaatcagccacaggcccactgcattagcttcagatggcctttgtgcgaccataggcttctcgacaagatggtgatcgctactttaaccaattactaatactttaggtgtggtcgtattctgcgacaaggacctgtgcaaatagtcgtcacgtgttgggatagtattgcttgcgtggtttattacccgttttgatacgaaaaattgatgaatgagtgatctcaaaaaacatatctcgaatgcggtggctttgaagtctggtatgctgtatggtaaagtaccgtacagccccttcgcccaaccctaaagagtcgacttcatccaatttcttgtttgcactgcgcagcacttgccgagattgatctatttgtcgtgctcgtaagtctcctcaatgggagtttcggcgtgtcgcagtttcgtgggatcaccccgaagcagagacagctctgtcagcgcacatttctctacagtccttcgatatcccggcgccgcaaacctgcttgacccgctcacctccagccttattcggactcaccacctacgctgcagtcagcagtcggcatggccgatccttaggctccagccacgcaaccgagtacgaggaggatgaatgttcgtagcgccaaggcgccgagacccccgcagccagccgattaatctagtacatatcgacggtctcgcgcttttcctcatcttatgccctgacaatcaccactccattgtatgcgctccgtcagcgatggagaa

SEQ ID NO: 3606 - DNA, 12986 bp, Emericella nidulans
ctctgtgtttcttccttggaatgttgcactccccacactccgtgagcgaatatgccctctgatcgtgggcccctgactgggtgtggaatatcccaccactcgaactctggtgggctctgtgcatgctgtataacggcagtaccaggtgcattccgccgaaggcgctcctgacgttcagtcattctcctcgcccgttgactaggtttattctctctaacgctatcccagcgcgctgagccgctcggtggctgtgttggcggagcagccgctgctggcacgatagccagtctgctggatagatcatgatttgctggcgatgggtagggcggatgtcggcgcagtctgtttgcaaagtgttgacggaagaacgagtatggccctgtcgaatgcccacccgagagtttccccgcgaggtaggctgctgtgatcacggtgatgagggcgacagcagcccagagagggtaccagactacggacacagagaaggtagtcatcccgaagataccctatttatatacgtatgagctgcaatgatccagccaaggtcggactgctgatactcaccgagacaaaggatagaggtaggaatgcaaatgccagtatgttgagccgagcaactgcttgtccttgggcgacggtttcggtgttgaagacctccaaaaaacataacattattggcctcattctaccgacccaagaagtaagtataagccaaaaaaaaaagacttactaatccaagcaagctgctatactggcttgagatcaccgccgacgtttcccagtgatgatgcaagtcatccagcaggtcagccgccctctcggctagcgtctccctgaaaggagattccgatggccatggacccattgtacgttgcgaaatgtagtcccggatgcgctcgaaggaggcaatgtgcagtcttaaattctcacgcagggtgatcacgctcgaggcggctttgtgcagcttgcgcgtcaggtgcagcgtcgaaggacgcaacgagtcctcgtatgcttgagcatcgcgacgggcaacgtcgcgccgggccacatcccataccccgggccagtcgccacaggcctgaaaaagatccatgtaaatccagagcggacagtggaggagccgtttcatacgccagctgttattggggccccttaggtacctgtctagccgtgggagcagtgccagactcgccagccagagaatgatgaccggatcattgccctccatgttgcggtcgagtcgacaggccgagatgatgagtgctgctatgccttggaccgtgatcgtcccgtcttcgaaattcatagttgggacattctgctctgtcgggtcatggcttactgcgaggtggtttaaaaggaaactgaattctgtttgagtgggatctttctcagctggtgcagcaagctcgaagacacccggcacataccttttttctcttcgtcgtaggacggccttactgccatacttggaccttgcccgttttcgagattgaggtaattgaaaagatctcgtgggaagccattgaactccgaataaagcgtatcaagaagccacgattctgatggactgccaacaaatatgctgtgtgttgcattaatcactacccctcccatcaaaccctagtcaataatgcaggcttacacgatcagaacacgattttggattgaacacttcctcaagcttgcgcgcaggtgtggtccaatagtggtagcctgtgagtgtgagaagcgttgcgctacgaacaggggatcttccgccgcttggtcggggcgcgtgttcgtgtatactgtgacagcccgagggggatctggttgtagaggtgacttcgtcatgctctaatgctctactgtaggctggagacccgggaagataacagtggtttggattacttcgtggactttgtggtaattatatagggccggtgagcacgatgtgcccccccaagctgaggtccagcccagttcagccaggctagaaagcctgtgaggctgcccattctgcgtcgtgcggacgcgtcggactactatttgcaggggttgttattggcagagtcaagggatgcaaaccccaaatagagcgatcaagtgggggttaggcgcctaaaggagaaaaagccagtacaatcgaccaggcagaagcatcctgcaggaagatacaggatacccctgtatagatggcattataccaatagagtaggactttagattcggtctaattgataatatacaattcgagcagatctatgaacaagagatccggaaggcatgcttaagaggagtaagtgcaagcaatagggttctcggtcttctcaacacgggcagcgattccgacgcagtccttgttgccgcccgggttggcgacaccagcagaggcccagatgctgtaggcactatcaatgctgttgggacaagcaatgaggctgttgccgtcaaacacgaggtggttgttttcgtcaatggaccagccggtccgctcgctgttgcgagggccactggcattgtcaccggtggtgtatccgatcaagccctggcctgtcgtttgttagtattgaacagcaatacgggatgggacggcggtcatacccatgccggaacggtcgacataaatttcctgggtctcctcggaaccgtagagatagagggctccatccttgatgtagaacgtcgcgaaaccgctgtcagtgccctcacaggtggcgttctgcttggggaggccggcgaagatgctgccgagagcagcgttgaagccagcgtactggacagcatcaccagagcggatggcaacaaggccaaaggtctcgggcgtggagggagcagcggtagcagcgacggccagagaggcgagagcggcggtagaagtgagcttcattttgctacactcgaggatgacaatgaatcgtttggattgactgagatacgctgttggataggctgatgtgtgacagattgttgatgatgatgatggaataaagacgacggcactgggctgtatttataggttgcctctaccatgctcaatacatcaaatgaccctgaggaggcgtgattggcctccaccaaggtcaggattgatctgcacttgatgactgaaacctcggctgttgacctcatttctccacagaatgtctcggatgctcgccgtatctccacaagaagaatgaatccaggacgattgacgtcggatgtctaactccgtccggctattgacccactaggtctttgagcatggagagagaggtgccacatgaagaaggccattctaaatatactagttcctggtccaccctttccaacgacttcccctgagtgatgtaaccggtccgagccagtattaatgtcttattttgctgagacatgcagcacttggcaggcagcaacgctcagcccctgagcagtactgttgagtggcgtctttcaaacactgctgagtgttgtatcacttttccgctgtacaggacggcgttgggagcgtcttcgaccctgccgcatatggatgtgcacgtacaagtagacccttaaaatgcagccaggatggccggctcgataagcgcaacgttacaaaaagtgcaaaacttggcgtttcagtcagcggccttggtggcgttcgtctgaaggtttgtgcggatctgatgctgcgcccctagtccgaagatatattggctcccaggctagaccggatgtcatctgctgttccattgtggcgtaccagcacatccatctctttgattcttcttagtatcaacggctcgatgcttatttatccaaaaggcgtgtccgcgtcgatttgccgacggaaacagggtaataagcatatataattgttctagaaatctcataaaatgccatttggcaacaatatgaccagtgctggaaagattccccatcccagaacgggatcatcaatagataacgtgtaaaataggcaagcctatgactttcggcctgactgattattggatactgattgtggtagtacgaggagtatgcctgccagaacggtctagccattcagacaggtagaacttcggctgcccttggagcccagtcgatcattctctcaataagtggctagctgaactatttcatgccaacctgatcacgagatgctttggatctgcagcatgcgatgggcaccgtccttcagaacccgtaacctgatccctgcgccccattgtccagaccccgaccctgggtctgcagtagtttactcgtagtttcgctaggcccggactcagtctggggccagagtacatcgtatatgacaataagacacttaacggtctttggtaccaaatacgtttttgagttgacggcgacttcaataactagcacagcgattcaagctattccagaaacgtaaatagaattatgtctttagtatggtttatatcaatgcagtggaagctctacagttctgccttgctagagtctcaaatgtgcccgtcgtacgtccatgtcaaagtaacctaacaagcctctgcagtatggtttccttgctagaagtccttctcatttggtaaaggtcctctacaatatcaattgtaaggtctacaccagtccatcagggaaagcagcctttattcgaaacaaaagatgctgaaatccataaccgagaaacaaatgtccttggatccgagtagacatcaaacaggcttgtctcttcaaggagccagagaaaaaatatagatatatgaattagccgaagccatagcacttccgtctaagtgttagtactaaatagcggtcaatatctgtaattcccttccttcacccctgaatatagtgaacagacaacatccacacatccgacacaggcttatgctgtgcaagagacggcgagttcatgaaaagcgaccgagatacaatgagctgtttagaagtaagtctgattccctaccagtcggcatgcagtgacggcatcacctgagacatgggacccagtgacattgccaaatccagtgtaggcccagagggcactagtatgcaactcgtaatcctcgtggacagattcaatagtcagactggtgaacaacgttccaggtctgctcgtacgtgctgttcgagttcggtgaagtccaagcctagcacaagggttcagataacttaccgcctgtacgacgttgattctgacctgcagcggtgcagtgctcgtacctatcatatatcacaatggactggatcttattatgtgcggttttccctttgttaagatgcaattgacgccaggttcagtcgaggggggtcgggctagctcgaggttccaccgggggtcaaaccacttctgaggccgcttcttgtcaaaagcggccttcttgtttaccagaataacaagcccattgttctaccggtcggcatggtccgttgctcggtggaatcagcgccgaatacgaacagattgccgataccggtatttcgtgcgggtgtcgagagatcctaggtgatgtcagagaacgtcgctcccattggtagtagtacgtggttgcttgacagcctattcggaatgaaggagcagattataatctcgtccatagtgatgctgaatctgccgccccggctgttgacggtcaagtcctgcatcgtcaactaagaggattgattgtagacccgttcgttggtgctgtagatggcaccacggtataccgattaggcataggtatcatgacatgagctagaatcggttcctcgtagttgtcgtcgccagtgcatacgtccagctgtgtgggaggcattggcaacagcgctgttggaaatgttgaaattgaaggcggccgggaactgaagagcctagcgaggcatcagctctgataaagaagcgagtttagattttgtcactcctaccttacgggttcccagaccggtctcctgaggattgaagctgtagagaagcctcggtagactagcgcacgcggccagaagacaaacggcatggcgaactcggaaggaattaatatcgttaatcatgacattctggggttctgttagattcaaattccttttatacaacatttatgtatttcattttatctgtctattcaagttatcaagccatcgcttagcctacttagtcatcggtcgagcatctctacaagcaggcaactacctctcttcccttcttgtcttcaacccagcactgcatctaatgaagatgactccggctgtgcggcgatggcgacgcaagttcaaagcatgcgacccatgctttcgtaaaaaggcaggtgttgtgtaccataagagcccctgcgagacggcttgacgatcccctagatcaaatgcgatttggcagtgcccaagtgcaactggtgctatcaccatgacctatcatgcaccttcacttgtgataatatggcacgtgctccagggtatgtcgtctatagggtttctttatatagtgactttgctgatcctgtgcttgtgcctcgagtcacagagaccagtcttaaaccgcgcagagtcgggacttggacgccacccagactggtgatcagcagcaaggtgtcattgaaggcccacgaattggtctccttctgggcaacatctacgcgttcaacggcttgccattcttctcgcccagcggtcggcagtggattcgggcccagacagggcaagacgtcaacctcctgcagtatactcttccaagacgtttacggactctgcatcccaatgcggctttgacaaggatagagctacccgatatgcaggtgctctatcggtatgtcaatttatatactacgtctgccttttccgacatcttcccctttatcgacccctcgctcttcgaacggaccattgaaacggcctaccggggacgagatcccgcatccggcgacatggcctcgggccaggcttgtatctttgctttcatgtctgctgcatctcttctgttggacgaactaactgaccgtggagttctccaaaattgacgtgtatgctgctcaggcataccaactactgccaggattgtttggtgatccagccggtgtggacggtctgcatgctgtattgatgctagtatgaacctagtctgaaatttagtgggatgagcgcagctgatctcctcaacagcgcgtctacaaccaagccattgcgggcgatgtccctggcatggagctgctgctagcatcggcaacccgcttcgcgtatcacctgcgagggaatgtccatccagacaaagcgggtgttagaccttcacgtctcagtgctcatattcggaacttgttctggctctattatgtcttcaaccaggaaacaaccatgcggaccgctctaccaccggccattgactactcgaactgcgatctcactttgccgtcatttagaatgtccacctgcgttcttacaattcatacgggtgaccatcatacagtcccagatctaccgccggctgtactcggcctcggctatgggccagaccaacgcggagctcctctgtactattcggaacttgacaggaacctaaaggattggaaggagtcggtcccttcagactctcgacctactcttatgagacggcccgccgatgcagggagcatggcatcgtcggttctccagctgcaatatcactactgcgtggccgccattcaccaagcgagcggccgctgcaaatcctggactgacaatcaggacacccaggcacaaggatccagccttgcgattagtgtggctgcaagtcagtcactgctatgcaagttctctgagcttgaactgtattttcaccattataatctattgtgagtcaacgagaccttctgtatatgagacgtagctagctggccctaactgaccgtcttctaggttccatcttccatacctgacggctgccatgatccacctcttctgcaacatcctcctgtactcacgtgaagagagcagccagagcaacttggagcttatagtcggagtgccgatccgtatggggttgcaactacggtctgatgcgcctgccgcgttccgtatgcaggtcaagtacgtgcaggacctgtgcggtgaaatagaacgtcttgcacacattgctatttcctcgtcgaaacaataagttgctcatatccaccagcatccttcggcactctcctgttccactgcatctatccgatccatggatagatactgaatcagttgcagatccccctgccaagcattctgtggcgatccggtctgttacttccgttgagtcagcggtcttactgactaacacgttaccagcattcatatgcgcgatatgaacataaccatataacttatttcaaatagattcatgacccagtgggatcggctgtcagatatgtgccgtccaagcctggttcaagcctggttcaagcctggttcaagcctggttcaagccttttttgggaattgatataaatggacttttcattaggatctggactgtattgttgtctttaaatccagctgactacccagcatgtcagctccatccgctatacaagaagctacacaagaagctaacaagaagacattgtctttcccgaccccagatggcggccatttttggaaatttcccttcgtggccaaacatcaaaccggggttcttcgtcgccgtcagcatcagtttgctgataatccaggtcctctttctcgccaacctctcctacctcaacggatcccagttcaaagaatttgagcacacccacaacctcaatatcccagatgctgactacgacggcggtattgttggccagtctgttcttgatgtactatctacttgaaggcaacacctttcctacggttaagcacttacctaccgagaactttcctgccccgagcgatgtacggagtgctgtctgctctggtgactactggggcgccattcatcagtctagcggcagccctggtaaatggaagcaacgccgtgactccgactacgcttgcctatgtctggaacggggccaaggagatcaatatcaagccgagcaatcaagggacctgagttctctacaacagcgtgtcgatgatcatgcccataattatgcagttcttcttcatgatggcgcttaacggcgtctcagcgcagtatagactcttttcaacattaagctggtcgacgaaggggttgatccggatgtgcgtctcggtattctacaccctcgtcagctgcctctgtatgattgggtatacctgggctttcaaggaggattgggccgtgaacagcgcttagtttgtgctaagctggatgactatctggctgtacatgcacatcaacttcctactgttcgatatcatgactacgttcattcctatgcagtttatgcccttttgcattctcacctggatgatcacacacgtagctagcaccatcgctccgtttgagttgagtccaggagtctacccaggggtctaccgttgggcctatgcgcttcccgcgcgtaaggcgtattcgattctcagccaattctggagcgacgggtgcaacaaccaaccatactaccaatactcttctcttggtgggtcatcggagcccttgttgttgtctattccttacactaccgatgcaggcaagcgcgcatcatcgcaagacccaaatctcggacaatgcgatcaacgagaaccaggaagaccggccaaaaacaccggcaggtactccagatcgcattctgtcccgcgacaggcgttccccgatggagtcaatccagcttgagcagcgtgtgtatgggcccaaatattctactatgttaggacctttgataatcggtaattttcttgtttgtgatagaagtgtttttcgcttatactacttgaggcggactttgactggtgaatatatatagtgggacatgaactaatggacgatgctgctcatttctatcacattaagaacgagcctcataacacttcaaaaacccgccaatacagtagcgttaattaatcatatgttgagtcgtctgaatctgagatacagcaagtagaaaggagtgaaagtttcaaagttggaaatagctgggatatagtcgaaccgcaagtagtaaactaagttctggctagccttaccaataaatcatggaagaataacaactttctccccagaaactccagccctgttcttgtcgagcgcctcgtcgatcttgcccaacccgccctcgactataacgggccggttgggagtgaacttgccggtcgccagccaaccatcttcccccccaaggcttttcattaacggcacactcaggtatcgcaggtcggggctgctccccagacccagcacctgacgaacatcgatcttgagtgacttggaagcaccaagttccttagcctctgagttgacggcctggactacgaccacctggctctcgatgcctgctgagttgaggatctcgacgccgagtttctgagtatcagcatttgagatggcgtcaaagacaaagtccaagggaagaccgttgagggcagccacaaagtcttgcgggcctgcttgcttccggtcaagcaccacatgggctccaagctccttcaggtgcgcttcgtgggtgagactcgagttggtcacgatccggtcgtaaccagagagtctcgcaagctgaataacatactggccaactgaggaactgccaccaaggacgacaagagcatttccactgccggcgcggtcgccgccctgctcccaagggggcggggcgaggccccggcccgtcttgtcgtagaggccggtgataccggcaatggtggcaagactgatgcccgccgcctgctggtcgctgatagctttcggcgtcttgccgaccagctcagctggcattttgcagtactgctggaaagtactcgcgtcgtagttgcgaatgatgccctggaagaaaacgcggtcgccaacagccaggttctggacgctgtcgccgacagcgactacctccccggcagcatcgctaccgagcactgccggataggaggtcagaaagacagaatagtcgcggatcttccagtcgacggggttgatggctgtcgcggtgaccttaatggcgacctcgtcgctgccgaggggcccgagggagcgctcggcaatggtgtgttcagggctcttctcgtgcaggagagcagctcgaaatgatgaaggaacagacatgttcacgggctgatggatcgacagcaatccaagtagttattgttggatagaaatagaagaataatggaaatggcccatggaagcccgcagatactcgtagtgactgtctggtcgcgagcggggctcgcttgtgttatttaaaagcagatgacatcatctttatgcatggaactatgtattacatgcattatttaaacgtagaggtagctgaggtttatatatgaatttactgaaagacgagtcccgtagatcctccttgatcagatcagccgccttctctgctagagcaaagacaattgcctggatattgccccgcgggatcaggggcatgatgcctgcatcaacaacacgcaagttcttcgtgccatacactctcaaacgctcgtccaccaccccaccgttctctcgcggtgccatggccgtggtgcctgtgacgtggtagtgggccacaatacggtcccgagttagctctcgtgcagtgtccaggtcatcgacgcgtttgctgctgtgcagacgacgaccgtgtttcttgatcagagaagccattggttcggtcgaggccagggtctcgagccactgagtgtgcctcgcatggatctcaagatcaagaggatgcgagaagaacttggggtcaaagacgggcggcgcataggggtcgctggaggccaggtggacgtggccgcgcgagaagggacggttcagaacggagacaatactaacgaagcactctggctcagacatgccgaagatccctttagggctcggacccttttctggcgtgatctggaagggggcgagggtatattggccgctgggctccgtctcatcctccaacatctggcgcaggatgtggtactgagcctcacagccgggacgccgagggtactggtcgtcgtcgaggtattgcttgaggagcgccttcagctctccatcctgcagcgagggaagcgtcatgtaggcagacgccaacgggcagagtccgagaggaccggcacccgaatgctgctgccaggcctccatggccatctgagccacggccgggtcccggaggcgttcgcctgattgccggccgtctgcgatctcccagctgaaaggcacgaatccatgctcttgcaggttctcgccgacgttcgcgttgtctaccagaacctcaatgccgtgcttttccaagagtttggcgccgccaataccagacagctccagcagctgggggctttgacggccccggccgaaaggacgacctccacagcggcggcgaccgtccgctgcactccatccttgggagtgaactgcacgccagttgcaacgagcgagccgtccgcctctatcttcagtacgatccgcgcgacagtggcatcggcgaggacccgcagattgggccgcttagcaacctccttattgtagtatgccacgccagcgtggcttcggcttttgtcctttgggttgatggtcgccgggttgcagaaagctcccttggacacccctgaaatgggatcaccagtcagtcggtggttaagattctcgaacaccttgggccaggcggcgctgaacgcgggataaggcccgtctccaaatgagatatgcacagggccgttgccgccttgcagcgtctcatcgatatatcccagcgagagttcgtcacggatggacgggcttggggacgtgaacgtttcggatttgcgcaggtactcggatagtgaggcccagttccaacccggattgcccagttcttcccacgagtcgacgcccttcttgctggggtagatcaccatgccgaggttgatggccgaagagccgcccagtgtgcggccgcggggctcggcgatttggcggccattcaatccgtcctgcaagagaaggagaatagcattcagcatttgcttgacccgtcaatgtgccaggcatttgacaggag

SEQ ID NO: 3607 - DNA, 2096 bp, Emericella nidulans
aaagactacctctcaattaaatgtgtccaatgcacttccaaaacggcacgccagacagctgtaagatgtcaccttccatctccggacaagggtgtctgtggtctctttccccagctcctcaaagggtccacaacaatgacacagacggctaaagggtactgcagtttccagagtcgaagcccctgtggctgtttccaaacgttatgatactttaatacgttactagcccatgatatgttaccattctagagcggtcacatgtcagatggtcatgactgagaacaagcttgcacagctagcactagtcgggcatacaaagagaaggccggaataatgaacactcatcctccttgtattggccagagactgagcctcatctacgaagcctcgggcgatcactcggacgatcacggactcggactcggcctaatctagccagaccgctcacacttgagcaaacaaccaatggggaccttgggggaggctcttcgtgtcggtgacttttttttttcttttttttcctattttcccccttgttgaccctggtaaatgtgatgatccggaacacgcggcatcatacgacttccctctgcactaggaattaagaagcctgggactttaggcattcacgaatccaaactctttgatcatggtagaaaagcagcagaataccactaatcagtaggaaaattctggtacctgattccgcttagcctcttcggcttacgacacaagacaacgtaacatatccgaatatcaatgacataacacggctcagctcgcatagtcgtattgtagatgctgtatgccacctactagatacgggataggccgacagaacccctctcacctactgtgctttactcataacgcaacgcatcattgcccagcggcctgctccaatagtatcataccgtcagctcagggtccagtctggttcggttcattcgttccagcatggcgttctagtatctatccagtgacccccgcactctgggctgtagacattgtcgaatgccaaaactctccctaggtgagcgagacagaggtcaaatggccaacttactgctttctccatagctatgctcttgatcttgagtcgagttagggtgtgtccaaatcgtcaaaaattcgtgcctatggccatatacagatgacgcggatagggcaagcactaggcagaattgagggatcccaacatttttggaagaaccgcctcaatctattgatttgaaatcctgaatggccatccctgcactggcttggctgctgccgcgaaagcttttcgtcacgggagatgggacctacctgttttctaccagcgaggatacgacagcctgcaaccaccgcggcctatccccagttcgagcaactgttctccttcattgtcacattcaccttactcatatcttatcgacatccttttgacgcactttatctcagtcacgaaaagtccaacgcggtgacgcgttggccattcaattcatcgaatatacgctcatcctttcccaaattgattgaaaacccccgtttaataatgtaaactgctattagttatcattcaggttggtctctaacttgcaagccatgtcattcagtcgaccgggtcttactttattgtcctgtcaagcttattttgattcctcctcatactgacaagggattcgtggactacagacgcagcccaaggccgtctgtctccagaacagttccccctggttacgcttctgctcgattcaagtctaagggcactgtttctaggccatttctcttctttcagtctggtacagcagggtggcaccgggccaaattactgactagccgcaaccatgcacagccgaccaccgagaatttgtgataacttagatcaatctcttggacaaaggaccagtcgatacacaattggcagaaatcataggcaactggaggctggtgctatacaagagcggcttcaacaagcaatggaatagtgcaacaagtatcaggagtgccggcacagcattgccacggcgttcgcaatatagtaggtagacccaaattgcgagaccaggcttgcaggctctgtgattctatgtttccaggccctttcgaaattg

SEQ ID NO: 3608 - DNA, 3623 bp, Emericella nidulans
cgataatacgactactatagggatcctccgcaaattgcccacggccacaactgcaaccgctactacccaagtagcaggacgaggacgaggatccaacgtctgggtctccccagccgggtctctcatgttctcaactgtagtacgccacccaatggagaaaatgcagtctgctccggtcgtcctcatccagtacctcgccgcgttggcagtagttcagggcgtacgtagttacgatgagggctatgacgccgtgccagtcaagctgaaatggcccaatgatatctacgcgttggaccccggcgaacctgaacacaagaaacaatacaccaagatctgcggcatccttgtcaactcccaatactcttctaatgaatatacctctgtcgtcggcatcggcgttaacgccaccaacgccttcccaacaacgtccctgacagccctggctgctcgctttgtaggccacaaggcggctcctattacccttgagaaacttctcgcgcgtattctgactgtctttgaagacctttatactcggtttcttcgcacaggcttcgacagaagtttcgaggagatgtattacgaggcctggctgcataccaaccagatcgttacgcttaggctgagggaggtaccagggcgagaatcaagggagttacacgtgattatgggttgctccttgctgaagaacttagttgggatgaccggcctacgggaagagtgtggcagctgcagagtgatagtaatagcttcgattttatgaagggtttgttgaagaggaaagttaattgattactgacctgtgggtcggcccgaaattatatacaaggctgctataataagagatacatatcaaagacagcttctccaaaatgagtatgcatgtcatcatgccaatgtcttaggttactatttgagcataatggctatttagcaatgtgccagtcaaatccttccacagaaactcttactattgattccagtcaagtgaataagagttatagctagccagtgaggcctatcccgacacttgtaacaaaccctgaacctgctgtagagtcgcggactgccgcccgactcgcacacttatcaccacttccggcttagcagacaatgataatgacgtctcttagccttctacaaccacgctggaggcagggccagggggaaggggtgccatagagaagtggatagtagcgccatcaaatgaagataaaaacgacatatcgtcccaaaatgattcgggattaatcagagggatgtctgtcagcctggccttcatgattgactcttgctcagacacacctggagtttcaaacgctgcagctgttggttcacgagcctaccctaatacctacactgcttgagccttcctccatcagcattgatcaatccctgccatgaataatgacaaataaagataccctagtgcacaaacagtctactttgcgctaaaggtaaatcatttcaaaactcatagccagcggactgatttcaattcacgcaacgggatgcagaacaacatccaaaggatctcataaaattcatattaaagcacagtgatttaaagtgaaacagcattgccgcaatggggtatttcaaacatgaccctgaataagaatcttcagaccactgacagatcaattccagcctactccaaatcatcacccacatatacctgtagatcagaatataccacttcctcctcacaatagacccggcagcccgcgggtcctgtattgcgcgttttcatgctagctttactactcgcggcagtggaagccctaattgtggcgcttgtagcagcccgagcaccggcatgagccaggatcctcatgacatgggagacgatttcaaagccatgatttcgccattgtaggaaccatgtagagtactacagagagcaggattagagaagtcttattaggggagaaagaatattcggcggcaaggaaacgtctggaagggagaagagaggtgggaggggtggattacccgactcttattgtcgatatgggcaaacgcccactcagtgctgtcagtcgcaatgccgtagatttctccgtccatgttctctttcttgcgggcgtgatgaatcattgctagctcttcagcttcgtcccatctcagtgatcaaagtgggaaaggggatgcatacccatcaccttaagtaacgtccaaaccctagcctttcccctctttctagccttcagaacaactaaagccacttcgagattcctaggatcacctgtgaagattacatggtctacctttccagtcacctgcaagaccttcccgttattattgaacggcatgctgaagattcgcttgttggtgagactgatcaggctacttccacggaccccgttcgatcgggattcgttcattgcgttctcaaacaggacactcgttcgtacgggaatgagcatatttcgcgggaccctgaatgtcatgtttcgctcgagatctcgccatttgctgtctgggtcattttcatgttcatgttagtcgtcgccccatggtgaggatgatgatataggatgagacgagatggcgcacataccgatattcttcgtcaatagaaaagagccgcgtttatctttcttcgtaaaagtccacttcttactcgtctgcttttccccaagtgatgtgagattgtagtagcccggaactctgttgtcgtctggtccgtcctctatacgaccatagccgagtttcctgcgcttatcgtcatctttcgcttgcattctcaaggcgaagctgtttgcaagtcgtctgataaagatacagatgaagttattagggagactgcgggatttgggtgccgtagtggttgtagtgcgcgtagtcattctgtccgtggtgcgagtgctttccgatgagaatagtgggatctatgatggggaaggattggagatgctgaggagtcttagattcctgtctgcgagaagtcatattgcgtagtggttctggtactcggattgatgttcctggcgtatgggagtatcagcatggtctgctcggaatgggatcccaaagcatgctatcagggcatgctatggggaatttgtgcgccattagaatctaactacgatatactagaagttgatgggtttgtagaagattacagtctaaacaagggcgtccgtagaagtcggaggatagagaagagtaggcacggcgccatactccatagccctagatgtctaccagactggggaagccgaagccaaactccagggctatgccataaccactatagctgaaccaacagcgtatcactcaatctcctcgtattgagttgtacaagagaacaagttcaatttaacttccgcgcctgtccgactctgccccccatcaccacctgcagccataccggatccaacctcattcatccttcatctccttacgacagcgcactcttttcaaaatcatccaagtatgctttttctgtctgttcttcttgccttcgcggcatacctgctcatatatcagtatgcaatgaccaactggaaccacgctcgccgggcccgtctctggggatgctcccctttgcctcgctatccaacagacatactgggtctcgctaccctcagagagtctcttaaggccgataaagagaagaa

SEQ ID NO: 3609 - DNA, 9352 bp, Emericella nidulans
ggcgtgacaacgaagaagacggtttcgtgattctattactaggcagacgctgcgcagtattagacgacgtccccgccgaggacgaagcctgagccaacgcagcctcctcatcatcaagataatttcgaaacgtcttctgcgactgcaggatgcgacggacgttcgacgttactttcgttcttgttcctgtcccacattatttaaagttagcgatactcctactccttttactcttcgcaaccaacagaattgcttaaccgaggggggaaaagcggaagcctatacctcttgtcgcactctccctcggctgcgaatccttccgcgctggaatcgcaatcgcaacgtccctatgattctcccgatcaagctccgccaagtggcgtacaatcgcatttgcctggcgcgaagacacgtctgttcgcgctgggtcccgaattccgcgtttccggccggtggtcggtgcgattgcggcttttgctgggtcgaagcctttatcggggacgtaggtccagcccggcgtggcgttagacttggaggcgttcgggaggacttcgacgcggtacatgatgattccgatttgagtgttagcggagagggggaagtggagtattataaggtgtttattaaaaggccatgatatgtgtcggcgccgtttctgtgctttgaagattataatgctcgatttgttatcgatatctgatatgtacggagaggcagatgtttgctctgtttgctttcccactgccttgtataattgcttacttaagatatctttattggtacgttaacggcaaacaaatcaagtactctacatatcttcattaagctcaacgaatagatgaacggatatttgatcttattgtacacgaccgctcattgagtgagcttagtctcttaaagcttcgagagaatctccagatagagtaatcacgatcaacagaagcacttgaaaaaaatgaaggccagacgaccagaagcaacgtgtgcatgcagaaagacctaactccgaaatagggatgaataaagcaataaatataacttgcaagtaatgcagatagtcatagatgcagacagtggtcactcatttctttttctgcagttggtctactcgtgtttccagctcagagatgtaagtctggagcttttgggttgcggtttgtaaagcctatgacaattagcctagtcctaacgtatattgttcgcagagaatggaaggctgagaggccaaaaaggcaggaacgtacatcgatatcttcagtaagcatgctgttcgatatcctgtactcgccaaggatatagtagtagacgacagcaccggcaacaacggaaccagtaaggaaaccaaataatctggtggcaagcattagtacataaaccgtatcttgcgttacactgttggttgagtatagattcaccctccccgaaaagctccaacgggcttcttgactggcagtgtggccgttgatcctgcgtttttcacgaggggagtgctggagaagcatctccgcgttgacgcgatttttggcggcgtcatgacgagccggagcaacggtagcgaccgccgcatactgacagacatgttttattggccgtgattatgagagaatataatcaaaaaaaaatattatcgaagaagacgccggcttttaaaaaaatggtcgaagttgaagctcaagaagagtgacgttatttggagtgccgttttgagcgggaggagttggagcaaagcagccaatcaggtgatgcgctcttatagcaccaccaacactacctaggtatttctacggacgagtcccgagtgaagaatgtatagtgtttattcctagcgtatagtacatatagcgtaaataagatatgccgaagaaggctagtttgccatggtactttcgttgaacaaatctgccagcagatcatcacggcatgcttccaagttcggattgctgatgctgtaggtgctctcaaacgcatggatgctgagttggtcaaagaatggccggagaactcgatcgacaatctcatctttggcggtttcacgtatccagtccgccgccagacctggataccttacgccatggtggagattggtcgattctcgggttggatcagatgacgtggaccaacggacccctaagttgtgagatacctcatctgcgagcgccgtgggttcgaattgctctggggggtatatagcgtcgacagtatcagtaacatagagccattcaagtaattggaaatcgtcaggcgcaagaacaagcaatgtgtccagaagcttgcaggcctggagcaaagaatatggattgtacaactcctgctggtttccagatgagatagctgaaatagcttcttgaagctcactgtttattaacggccagaatgggctcagcgtggttgttgtgctcttcagtatgagtgctcggaggaccatgaagatttccgctcttgtagcggaagatggagatgatgaagcggtagctccaagaagatcctccagcttctgcagtagcgccggcatctctgcgataaaatagtcctcagctgtagataacaccaaaagacttatccgacgaagatttagttgggctttacgatcagcatccaaacgagctgcggatgcaccaacgccgaacattatgccagctgtggccggcggggttaggcgagtcattatctcagacagtcggtctttgtcaaccaaggcccattgccgcaaaagagtcatccagccgccctttaccaggtcgagttgcgacccgaaaaaccggggatcattgaaagcatcagccacatccttcttccaaacctttgccacttgggggattttcgagatatgttgcatcaaagccataaagctggtgttaagattattaggaaagagtcgggcacgtatgaacggcccgataatattggtagaaatatttgacacggccgtagtgattcgatccatgtcccctagtgtcatcgagaacgcaggcatggacgcaacaaggatacttaacatatcatctggccctatgcgctggatcgatgaactatcatagtctaatgaggcacgacctagaagcccttgttcctgcgtaaagcccatgggtttacttgtaaagatggcggtgaggaggcgcagtatcacatcctaggaaacattagttcgcggttttatgctaataagaagggagacttacccccaactcctttctcatccgacgatcttcgccaaagttcgtgttctcaagttttacgcccaagatggcagcaaactcaactagccgcgggaggatctgcctgtgagggaaagggttgcttagtacatctcgcaggaaagtcgtgcagtctatccatatctcatccaggacatcatcgtcaagagacctagcgtaagttaccaggaatcccgctaactcagtctctgttaaggccgttgtcatcgtcgacttgcggctggggtcaagcgcggcaggatttgttcgtgtatagatagcattgaagatagctggaatggcaatcttcggacgagacccgtccaaagtgtgaaggagattaaagatcagaggcgatgtatccctgtcagacttgatccacatatccaccattgtctctagacactccaatgcttcggcagtgaacaaatgctcgagaatccggcgagatctgttccgcattcgcagtgatgtatattggaacgacgctattgactccgtgtcttggggaaggctacttcgttccgcagcaccccacgaccaaatagaaaaacagagacgtacggcgtcttgaaacgacaatagaacagtaagtctgttgttcatcgccgcagagcgtggatggttagaatcagacgcgaagacacccgaaaccatattcccgaagaagccatgggtttgatccggactcttggctgccggcgcatttacttcttccatgagaaggcgctcatgagcagctgcaatacacgtctcaaaaccagtcaggagggatatagtggtctgctcgggacgatctttgggccaaccttctgtcttttcgaatgcggactggagattcgtgtatgactgtctaatctcccttcccaggcaatccaccaaagtcagcagaatttggaagatgcacgtagaatagattgggagtatttcacaaagcagcatgatccatttgtcgattatcgccctggatcttggagagctgaggcctttgagcaggcaatccaacaggcgttgaggaggctcaggggacggcagcagcacggatgatttctctggcttgtcgcttgtgaaggagagaagagagggactggtcaatttctcgcgagagccccctctttggtgcttaggttttgtaggaggcggcggtaaataagcttgggaaaagcgagcctttagcacagcgaggagcgtatcgatcaatgccgcttggattgcaatatctccaccctcgtcaagcatagaataaagccggtcgacaagaagtgagtcaattccggattccactagctcctcgacacctggtcccagcagaagttggcgcatgactaggagagatatctgctgcaatttgacctcctctgcgttcgcagttgcagtaccagacttgtagccactcacaatcttcagcgaagcctgaaaaacaactgagtggaggcttggggcttcggcattgtctgtaacaaaatggtcagaagggagaacttaaggttattgaatttactaaccctctgaagcagaagcgtcgtgccgcctgctgttatgcgccatcgtttgcgtaagaagagaaacccatccgttatgattaagtgcccccagaacgttgtggatcgtctcgaaaaggtagttgcactccgcatagtcgtctggggatacaacagtatttccttcaaaagtccctaattgatttccccggtgcaagacaccctccagctttgaaataattatacgaaaaaccctagatcaagttagaggaaatttagcaactaccactttggtggagtggtaaactcacttcgctaccgacggaagatcctggagccacaactgaaccacctgggctggttgagttgacccttgggacaataagtctaagacagtgaaaagcggccgttcaagcattgaagaatgataagaggcttgtgattgagccgagtcctgcaggttcttcggaggtagttcatatgtaccatggtggctgtgattccagagaatgaagtatctaccagcctcctcctcagaagagagttggtatgagcctggcgcaggtggagtaaacattaaggacgtgatggtcgattcaactaggtggtccgaccacgaaactgagtgcagattccataaacagcgaacggcttccacatgaaacttaggactcagtggtgagaggaattgccacagctgtctgacgagtggtgggattaagtcagagacctcctcataagtgatatagtagcccaatttgtggatacaatagagacttgttatcgttgtcgacatagaagagagatgtgagaatgaagctgttgataactcgactgtggacgcttgaatatgtttgccgatggctacatagagccttttgtcccgcaagatgcgcgatctaggaagctttttcaataccacgatcagaagattgagtctctctggtattgatttagcgtcattgcacgcattgacagcggatatggcctgttcataaacattcttgattatcaaatccgccaggtctgtaggcggaaagggaggcggctgcaggtcgagactgtttctgcttcgatcatagaactgatgtatttgtctcaagatcgcagaacctggacggtcaagcagcatcgacggttcatttactgagttcttggaatcagacttccggagaaaagcgcgatcaatcaataaccctgtcaacaaagtcaccacctttgataatccgttagatacagcttgtaattgatcgtgggctaccgaagtagtagcttccgaggatagctcgctcatcttgatcagggcggctaaggtcagtaacggggcatgattcagaaccatgtcttcttcgcggacattaaaatgatccaggataaagtgggccaagttcaagttgtccagtatccggggagcatcgttagccagactcttcgcgtcccaatctatcaaattgaggagctcggagaatatcatgccactttccactccatcgaaaaaagatgtggcacttcgaaaaacctcatcaaaatgggccttaggcgctgccaacttataagccttaacgctccgcatgaacggcagaaagacagcaggtactacatgcccgccaacttcccacctgtccatgagcgaaagtgttatcctgaaaggctttgccttctctgaagggagttcggtgtctcttttaagcaattgcagtaggccactcgccaagggttgcaaaccgaaccgactgaagtactgcgattgcgagagctcttcactttcagcggcggtctttgaagctgtgctggaaattgaggggcgagcctcaaaagaggcgcggtcacccacagggtcagggcccagaagccaagcccaaagccttctattcaaactcatgtctcgacgagaaacaacacctgctgccgcaacaatgagtcgttgaaggtcatccttggttatccgggtttgcagaataggcgaactcaaggggagatgcgttacaagaaggtcaaggaagttccgctgaaccaagacttgctcatccgtaagacctgttgcgaagcatcgaatcaacaatccgggttcgggtagaatgaccgagtccacagccacctgcatttcaaggggcatggccgtagcgtctacttcctcatgcctactcggtctccggtctgtgacgcccagcttaggaagataacggttcagataggccagaattcctagccgccggctagggctagtaattgaggcaaggaaaaagcattgccagaaatattggccgcttgaattcgtctccgcccctggccgttgtgtatccattcgactagctatttcacgaagggtattgagcaaacgaagtgtagagtcaaaatcgtcgctcgtttcctcttccagtccgggcaatagcgataagatgatcgccttcaacgcgggtcggattgcccatggttccaggtcgcaaacgtatgtttctaccaaagacaaaaataatgggcgaacagtaagagaggcgaatgtcagtgtcggtgcaataccagggtagtacaaaggaaggtcatgcgaaagaccttccggtttgattaggttgaagatgtaagtatagacttcgagcgccttctggtgaacccctgatggcaaggaaggattcatggactgagatagccgcttggcgacaagaaccttgtgaggaaccacaggctgatctggaggatgtgtctgaagggctttcagaagcctgctgaggaaggagatataatccgcccattcctgcagagtgttatcgaagagcgacagggcacgttcaacgctggaagcatatcggcggtaattcttgtcctttttcagggaccctgagcagaccatatatgttagactctgctctggcaatggatatgaattgtactatggatttcagaccttctttcccccgtagccgggagcgcgttagagagctgtcggagcttgcgggggaattggaccttgggaacgagctcggatcaaggctcatggtgcaattgttggttgattagacacagaaactggtagatctagctgcatcatagttcaagcatctagaccaaggagagagagagacaccactcaagaaaccagcatgccaagttgaaggcaggtgaagccacgcagccgggtcaggcagacgtaagtacgcttgtttgtccgctttcgcgagcttctccgccccaactaaacggagctgatcaaccacacttcctgcgaggaacctgctgttcatccagtaacacgatgggcgattcatccgaatctatcatcggtgctcattgcatacttacagctaggatgttacactgagttgatcaacctccgcattttcgccagttccaccttcggaggagcgtccccaatgcgctcggatggctagcatggacacgaaagacagcaattcctcgcaagccttggctattgatgggggcgcgcagacccgaccaactgatgatcatgcctccttgacaaagcgactcactcaacctcgatctgatcgcagccagagccccgaaggccgtccaccgccgttacccccgcgtccggagacactgatcctgttagaagatggaggggcagctcctgggacaccaagaccgaacgtttcagcagtgcatccaggcctgcaatcaagggctactacggccgtatcactggctgagatatcccaaaatgatcgaggaaaggatgctttggctgttcgctcttttcccggtactgttcgtgcgaaagccagtctcagccatctagcaacgccgaaggacggaagcgatgctggcgacagcgcaagcgttacaagttatgtcccttattccgagtcgggagatgtggaaaatatctttggctctctcgcgtcctccgaagtgggaatagctcaagaggaaagtaccggcttgatgcaatttcccgagttccaagccagccgatgtggaggacgacttcgcgagtgaactcgagccggtcggcgagatcgttgagggagggtagaacaaaggtacttgacctgcttacggttctaccaccgctgagactgaccaattgatagatctagtacttgagaaatggaaggcgaagcggaagcactacataatactttccgctgctggaaagccgatctggacaaggcatggcgacggcggtctcatctccacatatgtcggcattatccaaacaatcatttcatcctacgaagactccaatgaccggttgaacggcttcacagctggcgacaccaagtttacagtcgttgcgaaaggccctttatacttggttgccattagtcgaattcttgaaagtgatacccagctcaagcttcagctcgaggcgttgtatatgcaaatcctatccaccttgacgcttccagcgttgacccatctattctccgtgcggccatcgaccgatctgaagcgtcccctacaagggtccgagaccctactttcaacattagcagacagcttcactaagggctcgccatctacattgctttctgccctggagtgcctgaaaatccgcaaatcgcaccgtcaaaccatcaacaacactctcttaaaaacgaaggtcagcaaactgctatacggtctcgttgtcgcaggcggtcgtctcgtcagcgtcgtcaggccaaagaagcactcgctgcaccccggcgatctccagcttttattcaatatgat

SEQ ID NO: 3610 - DNA, 5951 bp, Emericella nidulans
ggggcacagacgatgatatctacaactttgatgaaactggctttgctatggtttctaattgcaacaacaaaagtggtatctcgagcagaaatgccaggcaaaccatggcttatacagccgggggattgcgagtaggttaccaccattgaatgcatcaattcaactggatggtcagttccatcaaccattatctttaagggaaagcgctatagagagggatggtttgaggaactctctattccacatgcctggaggattgaggttagtgataatagatagactacagatataattgggcttcgctggcttcaaaaatgctttattccagctatacagaggcggcgaaggggggagtatatactccttattctggacggccatggaagccacttgaccccggcctttgacactacatgcaaggataataacattatccccgtctgcatgcctcctcattcatctcacctcctgcaacccctggatgtgggctgttttggccccttgaagagggcatacagatccctgattgagcagaaggcacgcctaggatacaaccatgttgacaagcttgattttttgaaggcttattcagaagcctataagaaagtctttacaatagagaacattcaaagcggattcagggcaactgggttacatcctttctcacctgctgcagtactggataagctgcagttaagaccattgactcctacaccccccccccaagcagaggtactgcttcaatcccctcctctcaactctgtacgcctcatacagtccgtcaggtgtatcgaaaagcttcatcagtcaaaaagcttctaaaagagggctctaggagtccttcaagcccctcaaaacaggcgctggatgaatttgtaaagggctgtgaggtggctatttacaatgctgggttgctggcacaggaaaacaaggatctccgtttatttgtggcagataacatggcaaaaaagagtcgttctaggcgtctaatgactcctacagatggactctcatttaaagaagccagggaccttatttcgttgagaaataatgaattacaagctggtggggggggttcaagctccagtacccttccaacttcggagagacttaggcgcgcccccccaaggtgtacaaattgcggagtacaaggccataaaagaacaagctgtaaggttccgaatcatccttagtttatttagtttggataagaattgattgagttattgaaatcgaaagtttgtatagcagtggggtggatgagaaaactaccttccgcccgggacgcacctaccgcccgggatttacgttaacggcgtacggattagaagggcggaattactttcctcgcactaaaatgccaattgctacactcgccctgcaggtaaggctggaaccaaatctctcaattactatctatggatgattaatcttttacatattctgacattattattattcatggtgcgtagttgttatttgtgttctctcgcgccttgaagtttctcctggctttcatagcctcgcgtgctgccagcctcaggaccatgatctcaatctgcaccagatgactcggtactcatgggttgaaataccgttaactggttcaatattcccttccatatgacaagggccgaagaatgagctgttagcttgagtcctctatgccgagtgggttagagagactgcgaccagggtcgaggaccgctcggcaaagccttgttgctatgataagttaaattcgcgacttgtctccttgcttcgtgaatggcacatctggaagattgttgcttgtgtgtaggccctagctctgttacccaaggagatagctaagtcaatcagccatcagatgaaacaactatacgctgcttggtagtgcaagactgtagtcgtcactgttgaagaggcaaatctctgaaactttgaatgaatcagacaatggtcggcatttaagaaccaagataagcttgagctgctttgtgcctaggtaggaagggcatcgccgctcagcatattagtgattgcaactttcgagtccgtaagataccgcttcggagtgatcccattatcaaagcaaggagtaccagaaaggtgatagttatctctactgaccgtgaccagtggagatctttggaattctcagacggggctgttcaagccttagtcgtacttgcccactctggcctggcgcaaaatatcgcctagacatggcgtaaatagcagacgaatggctcttggctacaacccatctgaaagcagaagatgattcgtaagctattatggctactttgctggaagaaagagcaatatagggtccaggctcgtatagatcatagttcatcctctggaaatattttacgcctatcgagatatacaaaaacatgaaaaagctcttggtattaaaggagccccggcttcagtaatgaagaaattgatgctatcggccatgccccattgctgaacagaaggggacaatcaccggtcattgcagagcttcaatcggtttcacacagtcgaagtctgaatttgtctacttctccaagtaaagctggagtgcattgtgctcttcttgtttatgctggcagctttacctgaaatttgtttagttatcatacaaagtcacatccctttaggatcatctggaaagcacaacctttggcaagctagaggcatcaatcagccattttgaagacgaatataaatgtcaatgagttcatacagacacctaagtatatgcgaggtgaaaagacgaatacaatctcgaaggcctaagtactctgatatatttcaccacgcgcatagagccgtagaacatacagctggagcatatggatggatacactgttagatgaaagtgggctacttttactccccttagagacctaacgcccgaatagcaggggctgagtcttcattgcgtttctagcagcaggtacttagaaataagacggggacctgactaccaagaatggcgtcaaatgcgtgaactacggatccgaccgcaggcgacgcaaaagccgcgctatacgatatcgaagcagtaattctatatccttctataatagctactaactatgcgctatcccaaccatcatgaagccttttcctatactccaccaccatctccgcagtgacattgcttcctccacaaataacaataactatccggctgtccggcgtcagatcaggcatgtaatccctcagcttcaccgagccaccaacctctacactgataccacaagccaattcaacttgcaaccggtgttcatccgcgagccgaatcacgccttgggcagcttccgcatcagagccgacaacgctgacgacatctactctggcgggcgggcactgcgcgttcttcagagtctgcggcgccacttgaagtgctcctagcgatgtagcgagggacgtaatagccgggagcggctgcaatgtaccttttcgaagggacaaagcgagggaatcagttccttcagtttcgacggctaaaacgcggaccttgcccccaggagcatcgccatttttagttgccagatgtcgacccagcccctcaaccacaccattaaagaggccacctccaccaacgctacaaatcacagcatctgcgggaaaagaacctttcgaaacatccctaggcggcatttgctgtgcgatctcatcaatcatagtcccgacacccttccagatctgcggatgatcaaacggtggaacgtagatattcctctttgtcgcggcatcgctccttggtcctgattctcaataaatgtctcccgaagatacgtatcggcctcaaaccaactgtccccatgttggatcacatcagtggcaccggcctcccgcagctttgtgatcatcataggtttcgtcgagtacggcacgacaactgtacaacggcagccgagatcacgcgccgcgataacggcagccagaccggcgtttccgccagaggagctaaagaagtggagttctttgcctctgttggctgggtcttgaagggcattgcagatgaggtttccaattcctctggattatgggttagtataaactcggcggtggacaggctctttaacctacctagatttgaaagagccagaaggctgaaggaggtctagtttgaggaatactctgctgtttatgctattagtaagaatgcagagtgctaggagagttggtgcttaccatccagccgtctttgataaggaagcagattcaatcaggggtgtttcgatccagggtattctcttcacgaacgccattctgattagttgctctatgcttaaggaagattcttctgcgacagtgtcttttgcggtttataaggtgtcatatatgtttaggtagcagtagttggaatggtatcatgtttggagtggagcgcgccctgcgacaacttgagctactctgtaaagctgcgatggtgccctccagctgccaaatgatagggcggacaacccaaactgcccctattattatatttttaagcccctctgaccatggccatgggtctcttttaatgactttggcagataacagccacagcccattggtaacagaaaagcaatggtctatgctttaaaagtaggagtcacgtgaactgtcagatgtgcgtgcgtcatttggtcaagccatcctccataacccgagttcgagcagcagagttactcgtcccagcaaaatggcttttaaacctccactctcggtgtcgaaatccatactattccgcaattgcggccagtgcatccgcaaccgctatctccggccgaccgcaacgtctcgatatctttctacaagctctccgctccgcaataaccccctccgcgcacgcgcgaatgcaaactcgcgtgaagaggatgtcgctaagtaccgccggtcgatgattgtatccggcgccgggatattggcctgtgggatggcaatgtacggcgtgatcaagctcgacttgttcgggctagagctgcaacaacaacagaaggcccaggaggcggcagagaagaaaaagaataatgggacgatgagaatggacggtcccgatgggtttacgagtagtccttctgttatccggatccagggccaggatggtgtagaacaggtcacgactgggacaagctcggtgccgtatttcccgtctactattagactgcccaagtatgaaggggatggaagttcggcggcatccaagctcgcgccttgggacgaacttactggcaatggggaagatgaagaggaataccagctactagggttgggtgtccgcaccgtttcgtttttgaagatccaggtgtacgttgttggactgtacgtggctaagtcggacatttcggaactacagcagcgccttgtccatatggctgctcaccctccgagcgatcaggaggttatcacaaatcaggtaggcgccacttccgctacatcattagtgtctaccgagcgccagcggttgaaggatctcttgcttgacggcgagaaaggtgaagatgcctggaacgcgatactgaaggaggacggtctccggacggccatccggattgttcctacacggaacacagactttgcgcatttgcgcgacagctgggtgcgcggtatcacaacgcgcgcgcaaaaggccaatgccagggcgaaagccgctgctacggaagctggtgcgggcgctgttaatcctgatgaattccaggacgatgtctttggctccgcggtgaatgacttcaaaacgctgtttggtggcggtcagcgcaacgacgtacctaagggccagacgctactactgctgcgcaacagcccgcggggagctggatgcgctattccagcccgatgcgtcgaagccgtttcgatttatgggccgcgtctctgacgagcggatcagtaggttggtatggttgatatacctcggtggaaagaatgtgtccagtgaggaggcgcgacggaatattgttgatggcattatgggcatagtt

SEQ ID NO: 3611 - DNA, 2192 bp, Emericella nidulans
aggcgtttgacactcgcaagtttccggaagccgatcacgtcgacgactgtgactgtgtcgagggtacaggtaaccggcataaccgagctggcgaccgatagccaagtatcgcaggacgggatcgatgggacccttgttgtcagctgcaagagcggcagccttgagatgttcaatgaactttccaatcctcagaatctttcgtgttgttccgaactgcttcttgactgcattgtacggggcaatcgcggtttgcggctggttggtgcggtacagataccaggcatagaagcgcgagaagtattgaagggtgcgaagaagcttgtcacgaccgactattgaaccacattagaatccaggtatagtttgacgtaatagcctcttcgcgcttcttttaagctcggcttgctaacccgaacttggagcagcgagatggataaattattaagaacttcttcacgtacctgttgtagccacaaagcgcagatagtgcgccaaggcaaggtgataaaccagagcgtttgcaaccattttcgctatatgtcactggtcgcgataacctctgatccgtcggcaatgagtttgattccgattaccaggggaaagagggtgcagattaacaggccagctgtaaaagatagatagagacagtgtagaggcttggtgagatggccgctccacaaagaattaatgtagtgatgagatggagaaagacgggggaggggaagggaaatgggtcggtaattgaaggcgccggggattgcggctgttggctttgggacgagcgtcccgtcggcccatgaacctcggctcagcacaattccgggaatttcccccgtgagtattccagtctactttatactacgcagtgtacaaagtacgcgagcattcgctgctttgccatttcgcttgctttgctctggacctatctttgttacaggattatgtccgcaataaagttggaccaagggtatgatcaaagtgtacttcggatagtattagagactagtggtcggtaaagggctatcgagccccttcagaaatcgggttatgaatcaaatgtagggggtagcagaggcatgtcacagaacagtggctcgtctattccattagagatcgtagctgggggtcgctgccaggttatcactcattcgcagtcataactcggtacccggtaaaggccaagaggcttgagtctgcaaatcgaatgatctggccgtaagaatgtcagttccagagacacatcttagttatgtcaacaatctagtcttggtcataagggaggagctgatcgctggcgagtccaaagtactaggatccttgaagggttaggtcggaacggaagaacctttcaccagctgagcttgtgtcagctaccagactgacgaagcgacgtgatctgcctcaacatcatctcatgcacgcggcttcctgaccccattcggatttcctaccaccttcatcccactcactattgacatacaatcagttgatttgatatcttgagttttccaattctccttcgccgacatggggtccgatcctcagtatatcaagttccccgacctctctctcgcccaacatgtcttcaacctttcgaatcctgcatgcccccagacgctgcggcaatcttctcagaagaagcttcaagaagcaataactgagaagaaaatggcccccttctaccgacaccttgcccaccccgtcgaaggcattctgaaccactcgagtgagggcgcctcccagccaccgtcatcaagtgctgtcaagccgctcagcactctagcatcgcggagattgtcgcagaaaatagattttccctgggatgaagctctgtatcaatcactcgttgaagacaatcggaaggagttagcggagttccagaaggaagaagacgaagcggaggaagctgccggtgacaccgaggtgcaggccgcgcgagggaaacgtgcggagttctgggcgcgggtaggagataaggtgcgtactgagaataccatgcttatttaccatctcttgcggatgtgccgcgccatttacaggctgtatatttatactcactcatccggtaggacaaagcgattgagtccacgaaacgctcctagagaagacgacgttcctgggatcaagatcgatctagtgctcgcgatgattcgaattggactcttcttcggtgacactttatacgtgaagaa

SEQ ID NO: 3612 - DNA, 1659 bp, Emericella nidulans
gggctgtagggctgattactaagcccttatagtgggacgactatttctagctggcacagtgctatcgcccagccggtgacagcaccacctatccctgaaactatagtgctctctccagattcatttgaggtattcgctatggatagtggatgagccggtggatgagccaaaggtgagcgctttactgcccataaggaagcaggattccaacgttagcaatccaccctcccttcctgcgactgctacatcgccttttacagaagggtacttactgctcgctggcacagcgcctttgcctacccattgtgccgtatactctctttcaggtttcagtcgccatgaagaatgggggaatggatggtgagggatttgttgcctagtaactaagcaggactcaacagctgtttccgtcaacactgtcctctcctcctgtggtggcctttttccttcgtcccttcgcctccctatctgtcagttgcttccctcaccacgtgagttgcatcccccagcttcgattgataccttccctccatcttcatcaatcaacacgctgctgcgatgcctccactggccctgttgatactgccagctcgacacatccagtcatcggagccgagcaggcttgaaacaaacggcctgcccagggggctttgagtgtaagttcccagcgagaaccacaccagtcagctgctacgcgtcacctgtgggtaggaaaatgactcggcctcgggcattttgtgccatttcccatgtctgcgctgtgcaaagcagagctggatcttgtgtccgagaccaggacaggacgtagcatgctatttatagtttaattgatgctaagtacgcaatagtaagcgggtgatttctcgatatgactcagtaaatgatgagcttatcaatcagccggtcaaaggagtataagatctagccgtagtcggtgcaccgtactagaagccgagatgccggacttaatctactaagactaacatgtcgagaccgtggccgtaccattcatcctggaatacggctcgattttctcattgggtctttgaaggtatgtccactaactgctcgatcagctcacggtcccccagcgcgtccctcgtttcttctaacatcacgcatccgccctgtttctagtccgttggtccctctggaggacccatgtcagccatgcgagcagacagtatctcccgaccggacagtagacaagtgtcctgtccttgatctaagagtctcgttgcagcattcaagatcgccagatatcgcaattagaaccgaaagtcttcactttcacgcattcttgattgcaaatggcttatgcatacttagagttgaggtacctcgtattgaccgaatggcagatgggggctgctgtctctctttgcagtatagtcgggcgttcaagaccgagccagacttcaagcgtttgcactgctccactgatactgcgagtttgcgccagtcttacctgagcttagacagactccccacgactcagacgcagaagacgagtggcgccccctcaatgccttaatgatttacacagtggtccctgtctaaggactatgggcacaacaaatcttgactttcaaaatcaaagtatagactctttcttattcactctgccccatcttaatctccgacggcatactctcaatc

SEQ ID NO: 3613 - DNA, 2373 bp, Emericella nidulans
gaataaccctactaaagggatctcgcgctcactcagttgtcaccatggcagacgcggtgattgctggtcagcgcgtggaggccccggtcacatggaaggcgtaccttatgtgcgtgtacgcggccttcggtggtatattctgcggctacgactctggctatattaatggagttatgggcatggattatttcatccaagaatttacaggaaaggtgcgtaagatcccctgcttctgtagggccaagaatcacacgttctcctccatgtaggtcaaaagcgaaactcccgccgcgcagtttgtgatttcatcgtcgaataaatcccttatcacctctatcctgtctgcggggacgttctttggcgctattattgccggtgacctggcagactggtacggccgtcgcatcacgattatcaatggctgcggagtctttatggctggtgtggcttttcagattgcctctaccaccgtgcccatgcttgtcgtcggccgattgatcgcacgcgttggtggcggatttgtctctgcgaacatcattctgaacatgtctgagatttctccttgaaagttccctggtgctatcggatcgggctatcagttttgcatcaccattggtttgatgctggcctcctgcgtgaactatgggacggagaaccggaatgattcgggctcataccgtatcccgattgccctccaactcctctgggcgatcattcttgggataggtctgttcgtccttccagagtctccccgttattatgttcggaaaaacaatctggctgaagcagccaaaaccctcgctcgcgtgcgaggccagcccccggagtcagagtatatcacgcaagagctggcagaaatcgtggccaacaatgaatacgagatgcaggttattccccagggcggctattttgctacgtggttgaactgcttccgtggaggtctccggtctcctaacagcaaccttcgtcgtgttatccttgggacctctcttcagatgatgcaacagtgagtcgagacccaacctccttgagttctatcagtcatcagattgttggtgctctaacgcaatgcagatggactggagtgaacttcgtcttctattttggtactacgtttttccagaacgtatgctaccctgatacctcctgtgcggtgatggtggctaattttgattcagctcggtaccattgacgaccctttcctcatcagcatgatcaccacgattgtcaatgtcttttctactccgatctccttttacacgatggagaagctcggtcgtcgccctctactgctttggggcgctctgggcatggtcgtctgccaatttattgtggcgatcgctggaaccgtggatggagacaacagtaaaaccgtctcggcgcaaatctcgtttatctgcatttatatctgtaagtggtatacgcactatgaatcttgcgtctggctgatcatcattgcagttttctttgcttccacttggggccctggcgcttgggtcgttattggcgagattttcccgctgcccattcgttctcgtggcgttgcgctatcaacagcctccaactggctttggaactgcgtacgttatagctcgttgccaggatcttgggatttggcgctaacactactatagattattgcagttatcacaccgtacatggttgatatcgacaaggggaacctcaagtcccgagtgttctttatctggggatccctgtgtgcctgcgcatttgtctatgtctacttcctgattcccgagacaaaaggcctcaccctcgaacaagctgacaagatgatggacgagactcctccttgcacatctgcccaatggaagcctcactctacccttgcaccgagatggtatgactgagaaaaatgcgagtacaaccgtggaaagcgctgcctaaggaatacagcaaggatgtcccttccttgctcgttcgattcagttctgttttggaaacatcttacatccgccccgagtacgcatttgcaggttgggactagctttcacagaggatcgtaatagctatgggaaatagcaatgcctacatttactcttcttctctctccattgccccttaaattaatggagagccactttggaattatcacactactgcatcattcaataatggaatgttaatttcccttgactcttgccgctggaatacgccttgctgtataatgaacgaacgaacagtaattcctggagatcctgtcagcgtttctacaaactgcagcgtattatattgtctcaaattggtttcacctagttggtaccgccttgatgggacctttagggttcgagcacctacttgtattgacagaacatgcatgcggcatgcatagagtgtgatttatctatattt

SEQ ID NO: 3614 - DNA, 12222 bp, Emericella nidulans
  unsure (1)..(12222): unsure at all n locations
cgatggctatctggtaaatgaaggaccaagttaaggaaagaaaatcaagtagaagaatactctgaagtatcaacaaacgaacaagcctgaagaacagaaaaggggaccgggctgatcaaagataaataaaggcctcgggctctcgataagtcatcaactgggagtcgagagttagatcgactagcgctgtaactccgaacgagtggcgtcgggactggggagtgcgtaattgtatgaaaataaattgacattgaaagtcaaaaaaccgcagatgaagccataaactgggtaaaggagccaatccctgtggcgaggttcctgggatcccaaagtctggatttgcataactggggtgtcgcagtacggagggcttgacctcatttgacaatcgcaatatcatgtaacaagctgcccattacgccgaaacatcccctgccgctgcccaccatcgtcagtgcgttccgcattcttgtttttgccgtccattctgactctggcctattcgagccccgttagacatactgcaggaaaaggttgttaacagcgaggcttacaccacagcttgttgagaacaacaggcagtgtaaggcttcgtaacaaaacaggattgtcaggggatctcatccagtggttggatgtacatgacagccgagaagggctaagggccggtcataactctgaagagcggtgcgcgagcccactcgtccgaaacgctgtgatgtgaatggcctcaggcgttgatggatcatgagaaattcggaacgatgggggaatgccaagacccccatagcggacctagagagatcggccgcgtaggcagtggctcgcaattgtgattctggaatctccccagcctgccaatgtgtccaccgtcatctcaactgacgcgtacactctccgtaagccatttagctttgcaaaaaaaagactccatgcaccgtcaagcactgaaacacggctctccacaagacaacgaaaaactcgtatctgatcctcgctcatcagaagatcacttcgctttcttcaccaaatccgtcacagaaccgtgagaagaaagtatctcactccggctgtcgctatgtcaaatatcaattgatcaacccgagtgggtcctgtttgcttgttattttcaagccttgaccatatcgatctcaaaaaaagcagcagcacgcgacggcgacaaagggaagtggtggttggaacagccggacgcatggtctcagattcgccacctatcattgtattccgtagaagaaaacgtgctggcgggctagtgaggctgtttctactctcaatcttcgccaaaacccgcaattcatcgtcgggaacgtttttttgacaccttttgtcgaaccactagtattgagataccaggagtagccccgctgctcaaaccttggaactgaaccgccttcaggggtaatatatctcaagggtcagggcagagttgggtgtaatctccgccggcagtatactccgtatgattgatggaaaagctcaggatttcgaaatggctgcatcgaaggattcgtaacgctaaagccaagaggtcaattcatttttcgtccccggctcgccttgtcccagcgatgtcgatacgaggtaaatgaaggtatcatcgacagtggtaaactcaatgagacgggtcggttagataaggatcaccgatggatcgaatcggtttctcgttttttttgtagcgtaggcgatagctttgattgttgagtcctaaactcggggaggttcttccgtgtcatactcgtcgaggtcgccgcccacggcctggcatacagcgacgactcagtgaggcatcttcaatcgatgccagggtagctggacatttggccaagagtgttcccacgttcctcgtagtgctgggagtaaccattcttgcattgatggattcagctgagtcagaccttcaatttctccgtctcagctttgcggtgttctggtagcagcctgatcgttgagtggttggtatgctgtcgtagacttgtatcaagcagagcaataagacactggaagcaatgcttcaagtgaatgcgaggaaagaataataggggtctacttgtgcgatgtggtgcctttaaagtatcgatgccaagctatgttgtcaaatcccacggcatctcgcaattgtttctcgcgatcacctcacttncactaaatttactttgggataagacggccacttttcattcctgggtccgccaaacagagctactttaacctcagctcatgtcttgagtttaatttgcaccatcgctcgttattgatgaaatattcgatctgccgcgggccccgtcccgaccatagggctgatatggagaccctattgagcttgtctgagacacggcaacaaattcggctgttgggctcaggcagcactcaaaaggtctcagaatattggacgacgcttttactaaggtaatcagtaccctgatttaactgttttgacatctgcatctttaatcaagtatctacatgtgccttcaacatccatttaattatagaaaagggtataaagatgataggtcatgccagaccctattctggtcagcctggacacttgaaaaaaatcatataacgaaaatcctgtaactccagtgatgaccataatcagagggaggtcactcatgcaaatcccatgtatgcagccgttcacttatcacatgaacaataatcactccagtttatccagatgttctagccttgttaaaacgacttgtttgctcgtctcttctatctccccggcaaggaaaacttcgtccaggatcgcatatacctgtacaaaccacagagttagcgcattgtacaaccgtcagcggtgcgcgaagttctaatccgccattaccaaccttgtagaaattgaaaaccaagtccagctcgcacacgttgccgaagaattgatccaggacctcgacaaagaaatgaattgcctcgaggtatgctagttcattgtctgtggcgtcgacgcacgcgcagaagaagaggcctgcatatctccggtaaacgatcttcgtgcttcgtttgaattcgacaaagttcgactgatacttctgatcccgaggagccaccaagcgatggacctagtacaattacttctccgcacatacagagaccgggacgggctgcaaggggtcgcagaacgaacctctcccttaagcttcactttctcctcgtccttcaatcagaagtcgctattaggtcatcgtcgacgcattgttgaacttcgtgggggtcttacactgtacggcgcataccacttcgcaagtcgggtcttgcccctggttattcttgtaagcttctgaacagttcagcaagtaagcgacagagaatcacttactgacggttctgaacaagtataaatgataaaaccatcttgtctgatggcccgcggtgctccgtgcgagatccacggacgtggaatacagctcggcgtcgaagctggagctgtcagttcactccgcacccatgggggctgattgcgcgatactgccgactgacaccgcctttaacgcttctgtaacctgccgtctaatgtttgaagttctacggattatttaatattaatgcaggcacaggcctcatgcgcatgtacagcaattgtagcatgatcctggagataaaaaagagctttttttacattacattgtgcccaacaaagtaagcctatttaaaggtgactggtaaaataaaaaatgggttaaatatagtttgacgcagcgccaaggaccgttaacgatggatacgccgaatcgccgatgagagatcaaacgacgctcttcattccggcttccgcccacagcccagtcagcccgacagctccataccgacgagggtcgacgccacagaacggtacatttacacccctcactgggataatatgattgctcaaggatcgcattgggttatctgggcttttaccccctccgcatcactccctccacttctatcaggtccagactcattaccagcgttgacactagcaccgagggccgtcgtcgccttaccatgccagtctacatgctctacggcttccgatggccccgagctggttttaccggaatccgggtctacatcgtcttgcacaacctagaagacgctacggcggaatacatacaaagaccgataacgaacaagtcgctgctggactcatttaggaagacggagccggatatcatgtcgaatcttcccgaactacgcttcattgaacagtatgaccccgaggacgaaagcgatgaggcagtcagcaagccttatgcttatgttgctgcgaaaacgatcagtatacccgaggcagggtctcctaatgcagggagctcctggaataccgatatattccaggagaacccgctggatccggctagttcagaagcgttggccaaattccgggataaatatgcggctggggagaggattgggtggtggattgtatacaacggggatccagagcggtattttcctcatgacgaagatgaggatggtatgatggaggatgatggctacgatgacgatgacgacgagtatgaccgtgatgggtcgtctagtaacacaccgtcgacgccgacagtaagtttgcatgtgtggttagttgatgatgcgttgagtatgtactaatcgttgcggctttcactttgtatagatacggcttcccgagacattaacgcgattcttcaacaaaacgttttcgtgattgctgtacgagttatattacgactgatgattttatttccccaaacattgggaatgatggttatattgatcagcgggcttatggtgtctgtgggagtctaaatctcgttatgtgagcgggttacatgggtgggcattttgcattatttcatattatagcatcttgtttttcggtcaaaattagctggaaccatatttaccattctgccaagctgcatcgaacgtcgcctcatctacggcgaatcttcgaatatagtctttctccagatcatgcgctcttcgtcctaagaggaccaaactgtgcagtggccggcccatgtcgacttgagtcagttcctgtagagttcctgcaacaagcttctggtcttcagctccgacacgagcggctcccactgcaaggctgtctgggccccaaacaccctcctgtcgtttcttttcggttttcaacatttgggcggcgcattgtgcgacagtcataaacctcggaggctcataaatcaggcgacccctggccatgttctcgagcgactgttccttgaccttgatgtcgagcagtacaagagtatggagaccaatctgcacgttctccttcactcgatcataatacgaggatggctttcacgtctcagtgaaaaagaccatgctcactgtttgaccaaagttgtacagctggagacctgtgcacccaatgccggacatgatagaggcattcgggatgaccttggattcgatgcccaattcgcgcgcgcggaggacgaggtctgtatgcgtcgtcgccctaaatgcgcggatcgagttaatatcgaaaaccatgtccgggatatttaaagcgtacccaaagggatctccgaccacgaggaaggctacgtcgaccttgtctgcatttgcgaggatgtcgtcactaccggtctctacgagctcccggtctgcttcaataacaggacgtccatagaatgcttcctactgaagcgaccaaacattagttaattgactggcaaagaaaatagcacacatgctcaagaatgggtattgctggtaggtctcactagtttcgctttatcaacaaggagaatggctgtgtaagcttcaaggtaaactcgttcggcctttttcaccacctcgagaccgcggacagtgatgtccctttcatcggcgagaccgagtcctacaagatagagcatagtgcttttttctggtagataactcagtcaatggtttgttgtaatcgaattttgggtaccccaccatgtaaattgaagcgctgggcggcggacggaggaacaattgttcctggtagggcaccgcatggagactgaccacttctttgatcttaactatatcattaactatggtttgattggattattacttccttttaattgagaacattgtgatatctgattatagttcattgtacaagttaccttgttagaccttggtcccagattcgcaatatgtcgtctgatcgtactcctaagtaccggcaggagatccagcaggtaagcaacattattttgatgtattctgtgttgtctcaatataccctttgggaatctggcagaggtggggtggaagagctctatttttattacgttgcttcgttgtatcttgcgattgttctctctgctagagactcaagcaactcccttgtcttggacctgatacggatctcctttctcctgcgcctagacatcgtctgctcccatatttggaagcagaaatggtcttacaaatatacgtgtctgggaatttctctgatgcgtgtgggcgagaatcagggattgagaccgtgctcgccttacgtgatggcagtagtgctcttctgggagtctcgatctatgcatcgcgggcgagagcgacccttcaggttgaggctgtggatgaaactctggaatcaaacgagagctcttttgagagcaagagaatgtttgctgccaaaatgactaacttttctgctagatgatgtttgtatctggagaaactgctgagccttcaattgagaccaccacccttatagaagatattgtgcgacagcaagtagtcgagcttgtgagccactgcttcctcacggatcgtcggcgtatactaaccaatgcatgtatagcttgctcgcagtactgccttagctactcgccgtggtgtcagatccatatctactgatgatttgatctttttgattcgtcacgacaaggctaaagtgtcgcgtttgaagacatttctgtcatggaaagatgtccggaagaatgtgaaagactctgacgacaagggcggcgctgatgcggctgactttgccggggccgatgaccctatggctggtggcgtcgttgcaggtccccaggatgttgcatctaagcccaagaacaaaaaagcgcgtgttgggcttgcttgggacgtcaatagcttctactcagtccaagttccagagagagatgacgaagaagatgaagaagaggaggagcaaaactatgctaccctccagcgtcttgccgctgcagacgagcggaccaaacacatgactagagaagaatacgttttctggtccgaatgccgccaggcatcgttcacataccgcaagagtaagcggttcagagaatgggctgggtttgggattgttaccgaatcgaagcccaatgatgatatcgtcgatattctcggctttttgacctttgagattgtgcagactcttaccgaagaagcgctcaaggtcaaggaacgcgaagaccgcgagaaaaaccgccgtggaggagcagaaaacagcgcagaagatacaaagaaacgcaagcgcgagacggggctcttcgatcctcctgaggagggccgtacgcctgtggagccgagacacattcgcgaggcgtaccgcaagctgcaagctactccgaacaagaacattgcgatgctccttcataatggccgtctgccagcgcgaatgcctcttcgattggtaagtcgcttcatcgacctctgggtgctagttgctaatccctctagatctaagtgtgatggggagttcgtgttgactatatcatggactatatcgtggattgcatgggagtaaaccggagttagcagagatacccacataatgattgcttgttaaaatgggcgcagaattaaacagtttttgatgggactgagcatttgagaataaatccttagcgatgtgagcagagagtagtcttggtatcagcctatcattgaaacgcatattgatctttcatagtgctattatttggtaacatgaaaacaatcttggcatatctacaaacccgatttttcgctcatggtctcgattgatttttaagaatttctaagaaagcctgatactactagcatgcttgggtgatctccaacagtgtcgttagtaaacactggacaccgaacaccgaacaccgaactccgaaggatatcccggcactttcaacaccagccatctctcttcaacttccgtttctctcaatgtcctagcacccaagaattttcattgagatgagctcacgccggcgaaatggccaggctgcttcctgcgagccgtgtcggatggacaaggtgcgctgtgatcatcagctccctgtctgtggcagatgtcggaaacgcaatacagagagccattgctattaccatccagcccccctgacaaaagaccagacttacccagctcttcaactgggtagaccacgcgtatcgcgctcagcaaggaaacctgctcggaaggctccccaaaaagcagcgtcgcctacgccatcgtcggtcgagattgctatccggactccagaggcaaaccagtcccatccgccaggctattttggcccaagcagtattgtgtctacacttaccgggagcttagagaatacgctcacgccttcggacgatgaatatcaaggggtgggaagtagacactctgttttaccctcgtattgggtaaccgagacaacaaagatgttaagtatactaaccgaaggccctacaattgagcgattagtgtgtgagttctatggtgtaactcacactgctgttctgccaactgccttcgttctcagcctcatgaacgaagtacgggaatttataaaacagagcgaaacgtcacaaactctacacgaaaagacaatccaggttctggagagcactgcgcaaagaccacgagttccttctgatataatgggaagagacttccacaagctgtttagcagcaaccggatgcgcctggaaattattggcgtagtgtatgccattgctggacgggctagcttttttggatttgctcaagacaagttcccagcgtttgctggcaatgcattcgcagagcgtcttaaattctctagaaggatgttgtcggcgagcgaaacagctgtacagatatgcaggatgctgaccccaacgaacgacttatcggcttggatgttgtatgaaaactggctgctgtcttgcatgttccatggcgactccagtaggtccagcaagttcaattcatggctcagcacggtaaagatcatgagtacgagaatcgctgacgctgttcactacaaaggtcccccaacctggaatcggcttggagagttgtccagctgcattttcgagttgggtttacatcgtgacagtcatggtcacggccacaagggagaaaacattcctgtgttcctgcgagaagtacggcgaagactgtatgccggcttataccacaatgataagaatatagcaacgttttttggacgcccaccgcgcgtatcctggaggcattccgactgcggactccctctagatattagtgaggaagccttgctaggtgatgagcaagacctggagcgggccatggcggagctagatagcgagggctggagtgtcaatgctacctttcgtcgcgcctcctggtaccggattcgatatcttgttagctcgtttcgagaagagatacttgaattgtctctacggcctcttgaccatgaagctgccagaagactaaggtgagcatcactacaaatcaattcacatcatctctcacatccaagactgtgactagacagattgccactcgctgcacccagacctggaactcagcaccagctcacttacgatattcaatctgtgactggaacgacaaccaccgcgtggccgttcgtattatgctactttccacctacttaatatatctatataatttctttctcatatataggctacttgcccagcatgacccctccgccgagaaagcattgctcgacgtgagttcagagattctgtccgttgtcctaaagataggtaggcagcacgagcctacgatcgatatccggagtgatttcaactctatcgtgagacattcagtccacttcttctttagtacgcctattaacctgtgggatagattgtcttatacggcttttccagcgctggtaccctcatcaaagccctccagacgcaagcccgaactggcaacccaattccctataccggctctagagcagagctgatccgcaacctcagcgtttttaacgcgcatatagaatcaatggctcgaccattgacatcaaaccttaattacgcgctgtttgagcgcgcgagcaagatgtttaccgatatccttgacgagatcttggaatcttctttaccggtctcatcagcaacggccaatgccgcagaagtcgggatggttatgaatactccagcggaagaagatatgagtagttgggctgctgatggtatggagttcttggatactttggactttaacgtggtctttgaccagtgggtcttttagcgttcttatgctcagacttgtgcttcgtgctggattagggtaagacatctggagctttctaccactataccgtgttatctacctgtcgaatgagctcttactcgagcaactagtctttgatgaagcgtgatttagaacacatagaaacaagtaatgaaagactttgcagaatagccatcttggatatcgaagtgcagccgaaaaaagtctatgtccccatattttactctataatgaacctccaagatgtatcctaagtcggtaacctcattctcggcacttacttccttgatgcaatctcattaccgttaagcaatccaccgagaacatgtctgatctcttccaagaacctcgtaacctcgtcttctgttccaaccgtaatcctcaaacagccctcgcaacccaactcctttccgcggaaccgcactacaacgcctcgtttctcagccatagcctcgtacgtcgctagcgcgacggggttgctgggcttcccgccttgatccgcgggcttatcgaggatctcgacaagaaggaaattcgactcagtaccaccgcggaacgtccaataccagggatagagggaagctccttgaggattcggtcgcgctgagcaataatcttggagcgatacgatcgcatgacctcaaggttcttagggttcccaagagccgccattgccagtgcgctagtaggactggaaatgttataaggtgcttttagactgtttaaaagggtagcaatctcaggacttgtgaatgcaacgcctaatcggattccagcaaggccgaatgccttgctgagtgtctgcataacgacaaggtttggccactcagccacccattctgcaagactggatccctctggggcgaaatcaatgtatgcttcgtcaaggacgacaacgccgttccacgtcgggtgttctagcactttctggatgtcggactttgagacaagagttgcagtgggattcccgggcgagcagatataaacaagtttgattgtggggtcggcagagagcgcggcgttgatcttttcaggctgtagcgcgaatccgttgtccgtgtctagcgggaccttgacaatctcaacgtcgttgacgtccgcgctgacggagtacatgccgtatgtgggagggcaggtgagaattttgtctttaccgggaacgcagaaggcgcggagaagggcgtcaatggcttcgtctgatccgactccgacgaagaggttctcgggagtgatggtcttgtctgtgtgggtgtgggtgttgcggatgttgcagaagagttgcttgagcgggtgctggtggctatttcaagccgttgtgatcagaaaggtgagagttcagagcttggagggcatagttcacgtacggatcagggtatcggttcaatcccaagagatcaatctctggctttgatgagccggtcgagtggccattggccgctgactcttgaagggcacctccagagttcagtgcaagacccggtccataagcattctcgttcgcgtcaagtagtacatttgtcccatcgtctttgtagtcactggtgcgattgattagtttcggcgccgattgcggagggagggttaggggacgaacatactctctagcgcaacggtacggttgcaacttcaggatattcttgcgcgcgcatttggagaggtcgaaagccgtagtccgtgaagccatgttggtttgaaattaaaaagtgaaggtaataagttccttttgtcctggaggagcggaggaaaaggaatctggcggggaacgaggagtc

SEQ ID NO: 3615 - DNA, 1294 bp, Emericella nidulans
aagtttttgccttaggcccaaccatcgcctttaggcccataatagaaaggggggacaaaaaacacatccgttttttaccgtaaaagaacttgggtggaaaaaaaaacggcaaaaagacagcaccaggaattgaaatccattaggccggtttcccacctttccaactaaaggccccctggggaaaaaaacttgggctgaaaatccggtgccaaggatacgaaacgtaagaaatttcaaggctggcctggtaatggaaaaattcctgaaactgtttgtgtgttaccgatcgcgaagcgatttaggcctatggctaataatcgccataccaaacgccttttaacaggggtgtgggtatagaaatcttatttttaagagggtcttgggactgttagtgcgcttgtttgcttgttgggtgttaagggtaaagcgtacgagcagaatgcaagggcctcgtctcgcgcaaatgcgtaggccatccgggtgtctgcgagcattgcagagcatcctgtgaatagctgggcgaggacggctaacccccacataatcatgccgccagtttttccgcctgcgttgaggaagatttgggcagctggaagaccggttggtgtgtttagaatgccgtcgtagtcggtaagacagaaacatagggatatcgtcaggatccagcccatggcgccggaaactacgacagcagattggatggctatcgggccgaggatggcggcatcgtgggtctcttcagacatgctagataattgttagagatgtgttagacggattggtggatagttgaatacagactgacgtggctccatcagagtcggtcatggtccatgccacagctatgaagccgaggaggaaggcttagagcttggagccccagccggagccgtcggtgacgtgagtgaacacccacatggccggttgcttgtctggagtgttatataaaagtgcgatgcagatgataaccgttgcggtgactgagtgtgtgagatatgtggattacacaactaacccaagagacatactattaattggcgcaaaccagataaagatgcggtgcaacaattttgttgtcatcgagcagattacaccaaggaagatcagaagcgcgatcgacaagcgcactgtatcccacgcggtccttgaaacagtcagtagctgcgacgcaagacatagtttggcgacttacggtgtgtacgagtaactcccatcgactagcttggagttcatactaacagcagcaagcagcatctggcttactgtatacgcacgctagaaacccagcagtttg

SEQ ID NO: 3616 - DNA, 8358 bp, Emericella nidulans
cgcggatacgaactccaatccagtggcgaggtgctcttacaccttcctcgatatttctctccgtcaacaatatttttccataaatcaagcatgaccgtatatagtaccctttcttcatctatgcaccctgcagaatccatctcttggaccctgagcttcctgatcatgcaccactgccgccttgtcattcagggttcgttccattggaatcggaagcagccgatcattgccagcttttccggatgatgaaacgacggaaatgcttttcactccaataacattattcgctcctgcgccttcatttaagatggacgctcggcgcgcctttttctgaccgcgctcgcggctcctcccgtgctgaatcgggatggttggtctggaggctgcatgcgattcgaggggaaacatggggtgcgtttcttggcctggggaaacttcttcaggaagctgtatcactctaatcattctatactcggtgtatacaggtgccgagatggtcaacgctgcttaccgggtctgggatcgtctataaaaccctccggagagttcaccaggaagaggaatgcgatacagtccaacgcactttcttgcagtctctttgcgatctactacctcggttcatagtttctcagctgcacaatgaggttcacccctctcttcctgctggccgctgtggccattgcctcccctgcgccggacctcaacgcccgtcatgaattgacccgccgccaggcctcagaaagctgcccgatcgggtactgcacacagaacggtggcactaccggtggtgcggccggtgacaccgtgaccgtgaccaatctggccgacctgactgaagccgccgagagcgatgggccgctgacgatcatcgtgtctgggtccatctcgggcagtgccaagatccgcgtggcctcagataagacgatctttggagagtcgggtagttgtacgtcttctctttccaggcaaaaaggatagaaattagattcgtggacgtcgttgacttggggcgtagctatcaaccggatccggattctacattcgccgcgtcagcaatgtcatcatgcggaacttgaatatcagcaaggtcgacgcagacaacggcgatgccattggcattgatgcctcctccaatgtctgggtcgatcattgcgacctctctggagacctcagcggtgggaaggatgacttggacggactggtcgatatcagccatggcgcggaatggatcaccgtctcgaacacttacttccacgaccatgtccgtctacccagcccctttctggcccaagactactaacaatgagcagtggaaaggttcccttatcggccactccgacaacaatgaagacgaggacctaggccatctgcacgtcacctacgctaacaactactggtacaacgtgtacagccgtacacccctgatccggttcgccacagtgcacatcatcaacaactattgggacagcctgatcgacacgggcgtgaactgccgtatggatgcacaggtgctgatccagtcctccgcgttccacaactgccccgacagagcgatcttcttcgccgactcagactacaccgggtatgctgtcgtagacgatgttgacctgggcggctcgagtaactcggtgcccgagggaaccctgacgcctagctccttgccttatgcggccattactgcgctgggatctggccaggttgcaagcgtgattccgggtacagccggacagaaattgtaagtcattgagcgagcgcatagcgccatgcaggcttggatggaccgtctgtgctgggatgttcatctcctattaggtagttcatgctggaacttccagaccggatggtccaacatcagcgacgtttgtagtgctttgagttgatcattttatatgaatcgtctgaatggactatatcaatatgatatcgggtactcgtagcaacggtaactagcccagacaccttgcggactgaccccgggtccggccactgagcttgtagccaccaggtcagaggctgggcgtagtagtgctgactgcagcacaaatgttgcaatcagactttattaccaagcatccactatctctcagactgcaaccttagtttatgcttgtttcttgtacatcgggatgctcttttgcaatgccgtagaataagtcaacggggacttggccatggaaatatagagcttgtttgtccgacgagctgttattcagaccatcaagacctagcttattatccggtcctataaactagcttgtcggcctggtggagctgtttttcgccgcgctggaggagcggccaacggaacttctcacaggaagagagcagttgtaatctattccaattaagccatttcttatcgtttatttttcttcccctttctcttgtctttagtaatctgcttcataaagcccagctcgtcgacagttaatcgttccggtcccggtgacgatgccagtgatctagcaagatggacacggaaagggcatggcctatgtggtcctcgaatctgcgaatttcaaggctagaccatgaaatggtctcgctgaccggtctccacattgtaccttgagactttatgtacttcgctctggtagccgccgggaagcatatatgcaatgttgatatggaaatgacatgtgatgctcattctgtacaccagttgtacagaataagactgctggcttacgccatgtgatattgtggcttggccaagatctccaacccctgagggtctgacccttcaatgtatcgtattaagagattgaagagggtatctatcatcaacaagatagataatcaaccgtcatatggtgtttgatccttagtaggctatgttcgtgtagttgatccagtcccacttctgcccttccccctttgagcatatatgcgtacccacaacaaaggtattagcggctgcctgccgctggtgacggatttttgctttctagcctcgtactgattaagagatatcaagtgtgagactgcatctcagatctttggtcctcatttatccctttcgtctatatatcagtctatgtctgatatttcatcaaacccagacaaactccctctttgccagttgctgcccgaaattatcgcggcataataagtttgaagatactgctgacaaacccgggatgaaccctttgggccaaccaaccctcgtcgcttgcacaaagcacatgtatttactttagccatcatttgaccaggctgacttggtcgcttacctaaatgtctggattcgccaggcggcgccatgccccttcctcgaaatgcccttatacctctacgaccccaggctcagggcctggagatcaagtcccattgagcctagcgaggtcacgttaaaccacaaaaggttcatgcggaagaaatggttatgccctgagattatgtaatacatggcgcttggaccaagccagggcagccgctgacgtcattactgggctctcatctaacaatcgcagtgcaagggcgccgcgtagtttcctcaaacctcttgctctcgatctttgatcgcttcaaccctttgagcatgacgtcagattttcaagggccaccacgaacacttgccccattgcccgtttcgcagtatcttggccagcctcgccctgttccccggatctcgaaacggtcaaacgcatgcacggcatgcaaaacgcgaagaatcaaagtaagcagaacgaaatttcctcccgccacacagaatggccagtggttgacatggtacgtccattttgtagtgtcgcgggtccaagccatgtgacaactgcgctgcaaccaatcgcacctgcgtattcttggttgagaatgaccgacgcagaaaaaatgcactcagacgtgcagagcaagagctcaatacggtccagcagcatctagacaggatccttgaggtgttcaaggcaggcgacaagacgcagctcgactatctccttgccactgccgcggaatttcgcaccgcctcaaccttaggccctgctttgcaggatggtatgtttgcaggcatcgatcaggtatgtagagccatcgctagagctggagcgctattgtcgttctcgcagtcctaatgccgtttctagctctcggacattcccggcatcgatggggagaggcggacctctgaaaacacaggggaggacttcgccactgacgggcacatggtatgtcgaccatgtttcatgtttcgggtgttactctttgccttctagtaaagaaatcaagttgatacggatctcctgattcaaaacagtctgctcccggactgcccgagtccagttggagcacgcctccttcctttccaacgccctttttcatccccgtggggatcccaggtcaaggcgagttcctgaccaaggatcccaaccgcgacgaagccagtagagctacaggctacattggcagctcctcggagattgattggctgcaagagctaggtaataaggtcaacaactcgaccaagcatacagggcaacaatgctggcccaatattgatgattccgccgcggcgatgaactaccatttggactatactccgctacccgaaactattcccaccgaccaaaggtcgttgccgccgaagccatgggcgaaaaccctggtcggcctttttttcgaaacagtctatccttcgtttccagttgtcagtaaatcgttatttattatccaatttgaacaggcttataccttctctgcggttcagccatcgcgaaaatggcttgctgtcctcaacctgatactggcgctgggctccaggtactaccaagaaacagagccggtctctggacgggacgtcgatgatcgcgtctacatatcgcgggcacttgctctagccagtactcctgctacgcgtaccagctatgcaggcttacagcaggtccaggttgaagtcctgctagcgatctactatctagcctcgggccatgtcaaccagtaagagctccccctttctgtcttttaatgaacgctaacgcctgacttggatagatcatggcagactaatggccgtgctgcccgcttggctatctctatgggcctgaatctctgggcggacggggaccagatagaccccgtatcgaaggagacgcgaacgcggatccggtggtctatcttcaccctggagcatgccctttcaggcatgactggtcggccgtcgtgcatcgacagtcaattcatgtctgtgcgtttaccgctgccgttcgacgaggcccaattccaaaccccaggagtggaagaattgctgaaagcatccgctgcgcgtgaacgcaagctccagtggactgtgcatgcgaccgacgccgaactggacgcgagggaccagtggttcgtgactattcgcccgcgccagtctctctacttcttccatctggtcgacctttctgtcatcatgcaagcagcctcaagagccatttactgtttaaccaccgccaatgacggtgccgagggcaatattactttttataggggaaagctcaagtcgtggctgtctagcctgcagccagcattcgctttcactaccgacagtgccaacgctcgccgccggagctctggtgagatgccggtcttggcgagccactgtcgcgaaagaaccggtctcgccttagcctactatagttcccaggtcgtattgactcgttcatgtcttacctatccggaggtgcagtttgggacgagtgcccaaacttctcggtctcggttcggagacgatacggccaaatcttgtgtccatttcgctcttgctcttgtctctgttcttcccgaccagccagacatgaaatggatctcgaaactgacttcgtggtggtttttattgcactctatcatgcgcgcattgacggtcttgcttatccaactttcaatcggccaggtgccggtgcggagcatatcaggcgagcgggagggcatagcaagggaaggagagggtagcgatgcagttcgcgacgcaataaaaaagatccttctctggctacacagtatggccaagcaagaccctagctcgaagcgcgcgtttcatatcggccagagaattttcgccgccatcgcgcgcacgaacgggcttgatctgcaaggcgtggcgtccgtcttaatggcgaaagaagaggcttcaaaccttgaagatttggaccggggcagtttctatcccgagtcctcgaagatgcaggtggattttgcggactggggccccgacgttacggggtccgagagcggctatgagcaggatcaggttcctttcgttgacccagccttgttgtcatttgaagagtacaggttctaagcgggccgaagtttcatggcgtctgcccgtcgcggctggacatactctctcctatgccttttcgtgggtagatcagatattgaaccccaccactgctcaaaaatttagggttataagatgtatttcaaagtccagacgaactagactgaatcttcgagcgaagaccatgagagtcgccaggggtgaaataaattctatctcatcatatgattaatatatcgcaatgttcagagcccaagcggctgtaacatctgtaaccccttcctagtccgaaaaaaccactctaaacatcagacataagttaaaagctacggagtattctaccctgctcactcccgggtaagataaacagctccgtcaccataccccctgagcttctccttcaactcctcaaccgcctccggtctgaacccgaagcgcccccagaaagcctccgtgccataaaccgatactaaacaggtcctcgagaaccccttcgcagccgcaacccctagaaggcggcctatcccctgcgcagcgagaccctgccccctcagtcccggcaggaccgcaacatcgtggatatagtactcacctgcatcagcggggatctcacctagcagggtattcagtgctggcggctggtgatgtcggattggatgcgagatggcgtagccgtgaagctcgccagtttcgttaacgagggccagacacccgtccgggtagagggcgacgcgctcagcgaagatgctagcacgttctggtaggtctgggtgaatggtatttgcgacgtgcatgaggttgttgatgtcggatgcggttaggttgcgccagactgctgctggtgtgggggccatttccggctgtaattggagatacggtctgattgtggtagtctgcgaatgtaggtcagtaaatagtgcgaatgactgattgtggtcacagggaatctgcagtgtacttgcgagctttcaggtctgattggagagccaggagctacctctctagggcacggaatgataggcgaagaaaggtgcagctttcgaggatccaggaaagaagaagaggggcacgcagaaaaggatccgctagggaaaagcggggaaatacggcactatttaaatatacgagcgaaacattaaaggagcatttgctgctactcatcgacttatttccccaagctgcggaagcgtgtgatttctcttgtttataaagacaaaccaagacaagtgctctcaatgcatgaaaaaactctataacgccattcagtatctaggattgagatcaaatggcatcaaaatgaatcacatagggctcacaagtgcggctggatggcctctttccagcacgggccataggaaggtatctcatgaagctgagccagaagcctctatgccagggagacggagaaatatatttggtacctagacagtccaaattgacaggttgattgacggtgagttttcatttaccattttgcggccgtttccaaagaaggttcttattgataagtctcggtaacagcgcaatccttctggttagactatgaagacgttcactcgcagagtgccccccagtcagacatacatggacactcagtcctggcaccgggcccgtctctaactgcccagcaaagggtgacaattgattacgaagaacatatcatggatggtaggccgacagaggattgacggcttatgccaaccatgttagggacgacggtgcttggactatttaaagccgccttctataatgatagctggcgccccgtgcagaaaagatccatatggccatgcccagatttgagatggcgaacccaagagtcattaagatcaaggagaaccggcattcaactgcgagttctgattgagaccgggcgcttagggctgccactcaccactcccactgctatgggcattcaatcttctcataagggggtaagatctgacccggacctgtcagtacccttgtcggttggcgagcacacccctgtcctctccaactgcccgccacgggtgtagcctccatcagggacgccagctccaagatcacttgggtatccttgtcttctcacggtcctgagcctagaggaagtattattt

SEQ ID NO: 3617 - DNA, 1159 bp, Emericella nidulans
ttcttgtataggtataccactagaacggagtgatgttttgtcgtacattctttctggacttgagccatagtgcttttttaatttgtcggcaacgttcggcatcatatgttgtgtttgtgcttatggaatcggctggcatggatgggttaggctggggtaggttaggttgcatcatgcatgcgcacccagtgtgcaagtacttctgagcttcaatagtcttgtatatgtctgtgggtacggtaaagacttaggcggcaccagtagaactatagcatgacgagcctacttggcttgatagtgcattatcattagcttgatattcttcttctacatttcctcttcagtagtatagtcttggtcctagagggccgacactctatccggaataggcgtaataagatgtttgatggagaattctagacccgaagtcgagagggtcatggatgggccaagtatatctgccacggcttgggctaggacagaagatgtccaaactgttagtttcgccccaacgagagctgaagacggcattgtggcaggttcatcgaggtgaagaaatcatgaccggtttggtgcaggcctgatttaatcccaagagattctacagccgggtcagcaaggcacaagacgcttatatgggggaactaacgcaagcataatcccagcttcaactgcaacagccgcaaactggacaatcgttttcttgatctctacgcttttgttctttcccggcttcaacagcttgggaataactgagacctgtccgacgtacagaaacgttcccgccgtgaaaggggggagcatattgccccaggtaagacttgacccgagcaggccaaaaccggccaagatgaagaccgtccgaatgtggtggagccaaacctcctgctcttgacggaatgccattaagtcctagaagttccatcgttgtcaactgccgccatgcttgcctggaaagccattgatgggggccatccccactttggggttttggaaaggcgtcttcttttccctaaggggaactccaagagcaatggagtcttttattgccaaatcaacaatagacccctttgctggtaaccttgtttcgaagatgtgtgacccccccttgtgttgttttggtcctgcctttttttcgttaagttgtgcgggccccctt

SEQ ID NO: 3618 - DNA, 1376 bp, Emericella nidulans
acctgaacgaccgctccggtgccagcaccggcacagcactagaaacacctgctttaatcctggacaatacgcatcgcccgcggtggcataattgacgggaatgacagcgccagacttctccagtcatcactcacactcattgacctattcatacaatacactcaccgagtctatttcctttttattctaatcagcgcttcccttgggaataaagtcgagtcgagttcacttagctcgagactcaaagctcaaggaagactacccgtgactttctctttctgttctttcaaattccattctgccccctatgattgggtcttttccctatcttactgcgtctctttgaattcaccatttatgtatacccatttactctccaagtataatattaccaataccaggtctaattccagtccaacctgggtctgtctcggtagaaacaataaggagcgcattcccaagctctccagatagttcttcccatctacgctgggtatcgagctctgagccttgctgcttacttccatatttcataatcacagagagggcctcgtcagatggatatcatgcaatcaggtgtctaaggactgctatatacttcgcatatatgcaaatactcactcttgcaggcccaaacaggttccattcaccctcgccatactctcccatgtcggcctataaagttacagctgcctcactctcaaccgcatccgccatctcccccaaagtctcaaacttccagtcaaagacattctcctccacattccccataatagcaccaggcctcacaatccagacactcttaatcccaaccttcttcgccggttgatggtcatggaactggctctgcgccgtttgcagcacttgatccttctcaactccaaacttcttctttacagccgacagcatgtactcgaagttcctgagatctggcttataagatccgatatcctgcgccgtgagaaccagatcgaactcgaacccttccagacttccggcgttcgtcttcgcaaaggactccttgtctacattgctcaaaacaacgagcttgtatttcttcttgaggcggcgtagtgcggcaacggtgtctgggaaggcgggccagaagccgattgactcgccaaaggcttttgattcctgttccgttggaggtggaaggtcaagatctctgcagaggggtgcatgaatcgtagccaggacctcgtggtacagcatagaaggtgtcttggactgctggtctttctcgaggacgtggtagcatgaaggatctgtggcccgggttatgtgccacaggaagttaagagtgctgtcacccgagatgcgtctcgctgaccccatttgccattaaacacgcaccggtggttgacagacgttac

SEQ ID NO: 3619 - DNA, 11077 bp, Emericella nidulans
gtgaagattctcttggctgctggagcgaacccacgagctgttaactcacaaggcaatgagccaagtgatcttgtccccgatgactgcgatgagatccggcaactgttggagaaagcaaaagcccagcgaaggccagcaaacaggcgttcggaagagacaagcgtaccgccaaatcgcgattcgtcctcgcgacgaatctcaggcgccagcccacgcgagtcccccccagctagtggccaacgcagccctccgtatcccagcacaatggcgacaaagcgaaagagcgtaaggagtgaagccacgagaaacgatctgctgtggaccaaggctactccggaaaatcttcaggcatttgctgcgaaaggtgacattatgggtgtcgcgaatattcttaacgtaggacaaaaggcagacccagagtcgatgatagctgctgctaaaggtggccatgatgaggtattgtcccttcttcttggtatgggcgacgcggatcctgatcccgccccaatatcttctatgaagaccggacataacactccgatgcttgccgcaattggtcgtggaaatctcgctgttatcaagctttttctggatcagaaaggcttcaacccaactcgccgactttgtgatggcatgacctattatgagctatctaggaagcgcagggcagacaattgggaggaagaatatgatacactcaaagaggcatacgacaaatatatcaagaacaaaaagcaacgcagatctgatcacctatcaccgcgtcgaacacgagataaggagaaggatagcaagcgctctacccgcagggagtctccttcgcccgctaggtcaaggcaaaacggtagtcccggcccgcgtgataaggactcagcagccatgccaagagaaaagaaggggattgctcaaccgagggataaggcaggttccggcatacatcgtccgaagcatctacatcaagacatggatacggtccggtccgaaccgtccaggcagaaggcggtgtcgacggttaaggatagcgatccgaacaggggcgaagacgtaatcaagagaagacgcctcatcgcgggacgaccgccccaggatagggagcgcaaggtgcctagtttaccctcatcagattcaacgtccagccgtgaggacggtgtcaaacctcgtccggaccgttcttctgagccgacgtctaaaacttcacaacttaagcgaggacgtagcagcgctagccctgagcgacctcgttctcgcgggactggggctgatagtaataaccgtgatatgctgaagaagaagagaagagttttgtccgaggaaggggcgccgaatgttactaatggagctttaaagggacattacactgtcgcagttgatgatgtcaagtcgcctcctcgacaaaagcttggcatcagcgccagtgattccaaaagtgatcgttcgcaggattcacgttttgtgtcccctaaggaacaaaacttggtaaaagaagagcgggaaaaacaggaaacgcacggattggttggtattcctatggaagaggccaaggtagttgaagtggacaaagaatctcccccgccgatacatcaagtgcttgatcgaagcgaacctaatggcgataccgagaccgaaatccctcctagccaggattctgagaaaaagatggccaaggaaacagagcaggagcggctagctcaagaagcccgggctgccgacgcggaaaaggctcgcgcgcaggaagaagaggaacgagcagcccgagcggcctgtatagcgctggaaaaggaggaagaaaataagcggaaagaagctgagcagcggcgaattaagcaagcagaggacgagcatcagaagcgcctcgaacaggaaaggcagcggcttgcgaaaattcggagggagcaggaagcgcacgagcaacgtcgtcgagatgcacttcccagtcgcctttgtatagcagctaatcttgtcggatccaacaacccgcaatcacgcagccacacatggttgaagaaattcatgccagtggttacagcggagaccagacagcttgatcctagctgtagtgcagacgttgcaaatgagcgatgggttccaaactatctcgttgctccgctgctagctaccaacgacctccagttgtcccagtattccagttgggagaagcgccacgtaacacctacgcaaaggatgaatttgtggcgggttacacggcgaatgctcgtgcaggcggacgatacggagttcttgacagcatcgtttgggcagatcatgcagaaggatagtgaaactcggagcaagtactttgatatggatcatgtcttctgggtaaaggtacgtttttatgttaatgtagtatttcattcgataactgattttcgcagctttccgatttcatggacctcgtccctcatattcctcatctccatgggctggacatacagtttctgaagatgcacatcgatcgagaaccgagtttcaatcctgcctctcaaccatccctgtcaaatggacatattgatggaccgcatgagaaacctggaccttacgaacaaacacttaccaatggctatgcgcacaggcggccaagtacatatgtctgattctgtcagtccgcatcacttgtacaggtggacgattttccttgcatgtatgactatgataccttatgtgacgcgacacacgatgagtagttggatagacaagcttgcattctcactttttgaggctgcacattgaataacatgtctgatgaaaactgcaagccttgaggatgagtaatcacgtgatacaacaacacgtgactataacatgactaagtagggcacacggataggtctaggcgaggcagaatcgcattaccatcccacaatttccagattccttccccataacaccacgactcttcgaggatattccgacattcaaacatcgtactaacacatcatcaaaatggtgcgtacagctcatataatgccctcaaactgtcctcaacacgcagctatgcgcagtaaacgaacgcagaagccgaactaacattttctcccgcttttcagtcggacggagaagagacccaatccaacccccccgtcgccgctgaggaggtcgaggttcctgccgagtctggcgccggcggtcagatgtctgtcctcgatgctctcaagggtgtccttcgcattgccctgatccacgacggtcttgcccgtggtctccgcgaggccgctaaggccctcgaccgccgtcaggcccacatgtgtgttctcaacgagggctgcgaggaggaggcctacaagaagctcgttgtcgctctctgctctgagcacaagatccctctcatcaaggttcccgatggaaagatgctcggcgagtgggttggcctctgtacgtacctcgaacccccaaaaaacaactaccaaaggaccctggaggaattgcagaagttcactataggacgaatgctaacagttatttacttaacaggccagcttgaccgtgagggtaacgcgcgcaaggttgtcaactgctcttgcgttgttgttaaggactggggtgaggagagccaggagcgttctgttctcctcaactacttccagactgagcagtaaattgtctctatcccgcgacaacagcttaaggttcagattgatgtgatgtgatatggatgcgctggagggatttaactatctgtctgctggcgaggatattcacaggccccgtctgtctttgtgctttggtacagaccctgactgttgggattgagatctatctatttattgatgtcggaaaatgaaaaaataaagaacaaggattgacaagttccgtgctctctctacgtaattggcccaatggaatggtaaatttgcaactgtgatttacgcgataatagttctatacatcagtatagatagtaaactagtgactttggcttgaggaagtccgctagataatctcgaaagactatacacagataatcgtaaattgacaacaccaggtatgcagatgtatcttgtggaattacaaccgaacgcctagcgaaaggaaagaagcaagctcaagcgcgaccacaatattattgaatgaaaagccaactaccggaagctatacgagggtcgggtcatcatcttcgtttctggtttcaacgacaattgctgatacggtgagctgccggggtcgtaatatagtccttcaatattgccggtctcgcggtgcaaagaaatgtaatagaagcctgatattgtgaggccttggcgtgcatctgtaggggtaatgaaacatcgttctggaatttctattagctaacaagaccgtaaatagagggttaggacaggaaagtaggggtaatagtacctttccaacgcatcagaatccagcccttgcacagctcctccgtaatccatttcctggacactagatttcgggtcatctcatcatcggttagatccttgaacggctgcaattctcgccagtacgtgctgtcgatctcggcatctgctttaaaattcttcgtctcaagggtgtgtgagttgaagtcaataatctctccctcaagaaaagtaatgataaccgcgttttgcgatggtgaagttttgtcggggatattgtacgcttccatagtccccgacagggtcatgtcgtgagtgttgacatcgtggatggtcactttaaccggccagttctcttccttgccggtccgtaaattgtagacttgactggcaaaatatcttcttccgtttgttgtctgtatagtgatgcggttttgatcactgccattgactatcattgggtcgttggaggatgaactgggcccttgctgaggaaggatgacgctggcgctgctagcggctctttggaacccggagaaggtcatgcccgggcgaagccatgagcactctggtggggggcataatgaggaagtgtctagtataaagtcgtcctcgtcccaggaaataaggtctaattggacaaatccgccatcggtcgcggacctcaagctttcctcaaacgaacttgaatagcgtaaccgatcgagataacgaatagtttctttcagtctcgggctgggagggttttctaggtgcaactgtcggtgggcgctgacccgcgagcgaaggtcactatatgttagaggtcgatgtggctcgctgcggccgctgggaaggaatcgccacgcccgggaggtgactgcacttgatcgaggctcctccgtacgttcgaaaaggtaatcatgcagcggccgtgtccgggtgaagcggggctgacgaggtattgactgtggttgtgtttctgcggtagattcgtacggttggtgactattctctatcggatcgctggagtttgtctgaggatcgcggcgtgcggcacgccgagaggtactgcgttcggagagtcgaccgagccatgaggagagtgcgttgctttgtattggcggataagggttatcgtcctcgtcgtcggacgtcggagcccagccataaagtgtacgcgaattcgatacccggccttcatagtttgggaggttgctgtgcatggtactatacctctcttcgttcggcccggaacgctggcgacgcaaaatcggtatgcgacggtttatttcgacagaaaggcgctcatcgagttccatctcaagcccggacaggatctgttgtcggcggcgaagctggcgaccgagtaaagatgaagagggaccaggcggagaccgcacgcgagatctcagaaagttcacgttatcattatgagcatcgtcaaatccagcatggcggtggctacgatgagaggacgaggtagcagccagaggtgatcgagagggggcatcctgtggagaacgacagataagtacaggctatgatatggcgggaaaacaagagaaaccaaatgcgaagcagtatcctcgagataattttcggaagatggctaagattgtaggagaacgaatggaaagacgtacagtgggcgaatttaccgggggcatgatatccggggttatcggtgcgttcgccgcgaagatgcgcggacacggtgcgccagatgataaagcgcatgcagtattctaaggaggagaagggtaactgatgggcgggagtacgtagatagactgcaagggagatggatgaagcaaggggccggagtgaggcgagcaagaaagagtagaaagaggatgaggttatccaaggtggtcggagtgaaaccgaacttcaacatctgatcctcccacccgagcgccccaatcagtatacaactcacgctatcatttcaaatctgagttatctatataacagtggctacattgttctccgtaaatgccgtcgtctgctatcttctgggcgacagtacagctttaatcttcatccacacatctaaatacccttttagaaatcgacaatattccctgccaatggaacatatacctcaatcacttgctccatcgctagacttgtggacggcaatctctccggtgttttcttccctacacaagcattgacacaatcgcaaaacagtcccggaagcgttgccttgaagaccaggatccaaaatggcatcagctgctacggaaggatctgtcttagaaggtcgtgaagatgttctagctataatttcttgaaaaccttgccatcgcatctcggtagcggtttgtcaatgtggtccgctggagaaaggcccccgggtggcgatgtcaatgagtgtatacattggtctctaatgagcctccaagggcatagaacagagcgctctatgtgatcatattcaaacgtcgctggcaataacaacatatctgactggaaacataaccttcactacggtcgtcaaggtcaagcctacgattctacgaagcacgtcggatgacaaagctgcgttatagctcctcactggaggcaatattcgagaccactatgtgattgtgtggtctgtagttcgagacaaacgagaagagcaatcgtcacgcagcccttgactgcataccttgcacatttttggagttgtaaagcatggacgagttgttcgctttttcgtgtgcttggttttggttgatatggtaggttcaggggtggtcatattatagcatagcgctcgtctgcgctaggtgtggattcggtattctttcagtctatatttgcttgtgccatctgtagtgtatatactctctatcaactatatgtgctgtgaatattctccgtaacctgaagttacagcgcatgcgggcttaagctgctgtccgcgcactattcaactcatctgcccgcctgatacagtccacaataatattccagaacgcatcaatatcaactccgcggggaatggtgaccccagtagcgtgactggacactactgaacggccgagctgtcctaccatagcgacatctgttccatgaagtccatctgtaacgacggtgactgcaaaccgctcgccgttgcggtcatcaaactttaaagcctgctcgggatatctcctagcgaagtccgggttaagggttgaaataacagcggctactgcaagaggatcatggagcggaggacctgttgtgagaccaaattcggcttcgtaagttgacgcaaagaagaggagtagttcgtatagcatttggcgaaggacggtcggagctgttgaggggtcaccatcgccgtgcaaaatgcgggtttggacatcgcgagaggcgaggacttggtgcgtcaggtctagcgtcatcaggaaggtcttgggtgcgagaatctcgttgccgaagatcgattgggccgactcagggtcgcactatatcgccgtcagacttgagccaacactagtaatccttcattgagcgatgtacgtagatattgaactccgctaatggagtgacgttcccgacccggttttcatgcccgactagtctgcttattggggcattcgcaaatccatctccaacaccaccgcccattatgctgagacctttgatatgcactgcaacttctggaaaggtcgcaaacaacaaggcaatattggtcaatgttcccgtagctatgacccatggtgtgcccttgggctgagccataagagcatcacgcatagcaaggatgggatttttgtctgtgataggaggtctggaggctttcggaaggagttcagttccgtcaatgcctgagtcgcctgtcccaccatcgcggattagcttgctgtataaaattgagcgtgttccgttggcaactgaccatggatgttaggagcatggactgcaggcctgcaaaacggttttctggttccaggataaacagggatttcgggcctgccgatagcttctagcacccttgtggcattgatggtggtattctcgagagaagcattgccatgaatagtcgtgatgcccaaaaggttcagggatgggtgatgagctgcgagaaggattgcgaaagcatcctatgatcattggacggacgctgcgttagacttcgtagcataggtgtgcgacaacatcgctagaacctacatcgtggcctgaatattagtgtcagcttctatgctagatgatagaatcaatccgggttgggttgcagaccaggatcacaatccaaccagacaggaatcggaatgttcgttgcggctgtcattgtcaaccggttaaagcggtcactgggctacctccctgcgaattttgtcctctaactacactggaagatccaagcttgagactggagacagtatggagtccggagactaaggagacgggggatgcgataagcgataagcgcttatcaaaagccctgagccctatttctttatcgggactgcagtgacgttccatagtcgcgcgtcagagcagtcggtcgacattaggtagccaacaacgcctgcagatctgcgctttatctaacttcctgatttcgttgcgctcctacttgctttaactcaaccctcccttcgcctgcgatgaaatgaccaccgaccctgctccttcaggccttcaacccttttcacaacttaaggcgggtccaactacatccagctcgaagtcgactaccgtgccagccgcaaccactactatagcaccttcgcagtcttcccgccggttgcagcccaagagcgatagccggaatgaacagcttaatggagccaatgacagggcactagccgccttggttcgacgcgtgctttgtcctcaattgggaagctatggcggtgccacttctctgtatgctccagaggagctactaccgccgctgacgagctcgaatgacgtggaccgtcaactctacgctctagtcgccatgatggtcaaggaattcatctcttcctggtattcgaagattacgtcggatcaagctcttatcagtgaagtgctgcagttaatcgcccacctcactcgggcccttgagcaaagactgcgggaggtagacattgtacagctggttctggacgatattccctccctggtggaaacacatattacctgtaagtcatcttactgccatttggcaagacatggggtttcactaaccgcggcgtttgaggacaagcgtatcgattggccacggagcagacaaacttgtccggtttagcaccttcatcgcgcgaaatataccatgccctgaacccgcacccaggcctttcaccggttccagacccctctgatgcgaactcagtcgcgcagcaacgtgacagtgaagcgatatatcgaagactattagtaaatggtgttctgaccgttcttctaccaactgaggacctcgagaatgcatgtttgcgaaccttgttgagcgatattttatctgatctcattctgggaaaccaagtaagcgaaagggtatgcgaaggctggtttgtttgggagactacgacaaagctgctggatatgctctcaagggacaaagacggacgcgaagcaggggcggcagaaaccaaatcacctcgcccaaaccggctacatcaattcaatttgcttggaaacacagacaacgacaatgatactacctcttcacaaccctcgggctggatatggctcatccttcagtacgccttttacgcatatgtgactctacgatttattgtagttggattgttccgcaaagcctcctcatcgacactgaatccaagtctgcgtcctcctgacagctttgtgaacaagtcaactacgaaatatgccgtcacaggcaaacgcccggtacttgattatcggctgtttggcatgttgtcgcagctgctagatctctctcggcggatgccatggctgggaggactgatagccctctttcagtacttgatcctggctggcccaggaaaagtgggagaaaccggcagcgttcttgataggtgagttgctctgagtatttggattctgccctccttgcccctattcatcgcatggtcgcacgatgtatcacgagtctgtactcctgtccacatggcccaacctgccttcaggaaagatcaaggacactcaaggacagtcgactgttgaaaagaacgctgtggacgaatggcttggcgaatgagtcgtatgcggcttgatccccgaacggtgatctacgattggtgttgcaaacttggcaagtgctttcacaattcggccggctccaggcgattcattggaggaagggcggagggacagcggacgtcaatgcagtggatttacattgctcgcatgctgcatcgatcacttgatctgctggtagatgcacggctcatccttcgcaatcaccagcaagcggcgctcattcgctggagcatttattgtatcgagcgttacacacctgacctcaaaataccgtcatataacgaagcgcgtattgtcaatacggcgaaggagggaggtccccgactgacccctggcgagaccttcgggatcatttctcattctgtgcatgccctgaagtctgtttgtgccgcagtatcatggtcgccacttgtccagacctttactcttcaaggctacaggctcgggtatgaattcgcttgccgattggctgcgcgcaacagacagacaaatcgttcaatgtttccctccgagcttttgtgctttacattcacagcttatgtttgttcaggagtgattggacaggcccggccctttccgtcccgtgctggaaccagactccgctgtctatcgccgcctgaagcagg

SEQ ID NO: 3620 - DNA, 1221 bp, Emericella nidulans
  unsure (1)..(1221): unsure at all n locations
ttctatcacttggagagtgcttaagcccttttcacccacccgggggggggagtaggtatctcgaacagaagagcgggctatcgctaatcggtgatattctagagtaatgcttggccctcaaagtgcggcaatgggggaatcgactcagattacacccacgtctatgtcggcgcggtagcaaatgagctatatcttgcacttgctgctcagctcgccaatcgcgcctccgacagcgagtactaccttggctgggccaaacgccaatggtcctggttccgggatagcggattgattaatgagaattacacgataaatgacgggttgaccaacgactgcgcaaacaacggcgccacagcgtggacttacaatcagggcattatcctggggggtttggttgagttgaaccgcgccgtggataacgagacttcctcaaattcaacgtatctacaagaagctcataagattgcgatgagcgcaatcgccgcattgacagacgattaccatgtccttcatgaaccctgtgagccagataactgtgggggagaccaaacgcagttcaagggcatctttatgcgaaacttgaggctcctgcacgaggtgacaccaaatgatacctatgcccaggtggtcaatgcttcagctcagagtctgtgggcaaatgatcgaacggatgaaaaccagtttggaattgactggtctggtcctgtggacagtggcaaagtagatgcttcgacacagagctcggctcttgatgcgttgggttgctgccatttgggaatagaaattgtttgtgggacattcacccctggttttgacataatttttttatctatagaacagtttcgttggcgcattaccaaaaactgggttgaccttttctttcccaattaacccgggatagatgtttttaaggacgggttttttcattttcctctccccttcccaagttaggagggataaaatccccaccctcttacctttttgggggggggggtttttttttttttaaaaataatacaccaccctttttggcggggcagggagggggaaaaccttttttccaccacccctactaggagtttgctgtcccccccaataaaaaaatcctctctctgttgccactatataaaaaatgggggagactttttaaaactcccccattttttttgtggggggggttttcttncnggnggaatccctcttttggggcaaaaaaaaaaa

SEQ ID NO: 3621 - DNA, 1808 bp, Emericella nidulans
  unsure (1)..(1808): unsure at all n locations
tacagattatgattgaccatccgtgcttctgaaccccttcagccgcgaaaatttctattcttctttgccacctcatggtgctctgccttggcagatggactagtacggcacggtggcgccacataggagccctcacagcgcctgaacagcgacagtagtgaccacctgttcacatggcttgacggatgatataaatcccgtcttgggactaaagcctgccagttgtgtcctgcttttcctcgattcctgcagagttccgaggccctcgggatgcattggctacggtctatacacgccgttgttggcatttgtctggctgccgcctgcgtgaatgctaaggccgctgtggtcgcgtcaaaaactatagagctgtttccagaagtgacactcgaagaacgggctcccactattacaagccggccagaccctccagtagttgactttggtgatgcagagacatacagaccgcgtatcggcgtcgacaccaactatctgacatgggaggaatcgagtactaaagtgagtagactccagaattcccgaatatggggttgaagctcacgcgaggtaccgactcgcagtggatcggtgtgtggacagaatacctcacccaagggccctcgacgacggagtatataaagatgcacacagctacggcgacggaggacggccagcgtcctggtgatgttgctatcttggtacccccggtggttgctacagctcttgccaacaccgttacaaagtcaatggaagcatgtaaactcccaattgtgaaacgcagggtcaggacaggtggcatgtacccttcaagccccttctctcttatacataatcttatacagtaggtggctaactgtgtcagaactggtctgcctcctcgaagaagggtttggacatgtcgaaaaaggcgctttggaggtcatcccggattccgcctgggcactgccagagatccccatcaacgacatccttccacttgatacgtacggacaagagacgttgtccctaatgctgcaagtgctcaagacccaggcacgacggaacatgctgaagatgctttacgtgtcgtcgatcatctcgctatcagtcagcggtgtcgaggcgatcaagcacgaatggttccaccgattcaacatccccgccaatggaattcccaagcccaaagaagaggaagatgggctgacctgcgataagaacgcgcctcgcgatgagttctccctgacgtgcacggatcataactgcaatggaccgaatgagtgttctgatcccatagcttgttatacctcgaacgaccgctgcactactgggcatgacaagggctgtctctgtctgcatgagtctttcgatattatcgcagaatacattccattagagttctttgaagtgcaggatgagataatcgagggactgcttaattcctccgccggcgtcccttccaaacccttccctactttgaggttgttgcctttcggcgactcaatcacgaagggatctggcagcagtgacgacaacggataccgcaggaggctgcacgacttactgctcaatgatgcagacactggaggggacaacgatgacgacagggtatccaaagtggacttcattggcacgttccgtaatggcaacttcgaggaccgcgaccaccagggtctctctgggaagcgaatctcggacatcgcccctgcgtcagatcgtgttgtcaaggcacgtccccacgtcatcctcgcccacgtaggcaccancagtccgtagttgcgtaatcttcccgtccagtcatgcgccgcaccgcctgtgggcatccataaaca

SEQ ID NO: 3622 - DNA, 1245 bp, Emericella nidulans
ctggagcccaatcgttttattttaccaacccaaaacctcaagatgtagggttaagatataaacacccttacctctatacatattggcgtgaacaggcccctgtgcccaaagggatgcaccaatactaagtccggttgctactcgaaagaggatgggctatccatactaatgcaaccgttaagatgactggcgatgatgtggaagcgcctgaacaaactcattgctctgcaaggcctctatattggcaacggcagctgaaacattggcatcgtttgattttccatttgcgggtatattcctcactgcaagccacaaacatccaagaccagactagtggtcggtatccccggagcctctacgtgttagtacagtgactaccaccgttactgtaatcaaggtactcattcgacgaagctaacgacagggctgagtctgacgggcctactcgtcttatcccccaatctctttgatctcaggccacgaaagctccactaatatagcctcgttgtcataaagcagcgcacaggccgctagaggatcaagtttgacaggccagccatcagcagaacgtttcatgtccaatgtcgattcctggagatgctagactcgggaaatgtccggccctatcatgggcgtcctctctttaacctttaaacgctggagccacagagttaagccacctcttccatgctagtgacggaatggaaataactattgatacggttacagtctaccgaggtacgcaggatgaagaacccttccccgccggtatgggacactacactgtccctgcatgctcattagtccagcatgccaaagcctcatcaaaagctccatccaattgccttgggtatctgggttcactcccagtgctaaacgagcagataaggtggacccatcccttaggccactctctccaaaagcatcctctggttgttgcgataattggtttgtctaacttgagatatgcataatgcgttgggatcccagttttcagtcctcttgtctgccgtttggcccctttttcctgcattggcctgcattggcctgcattggaaggatcgattattaatcgtcttattgcgtgacactcggatcttaatattcaaccgggtacactgtgcttgagctctttgttgataggctcttttgagcgccgatgccagtccgctcttgggatgaatctggatggtttcaggagcaggggacaatggctcgctaatgcggcgattttatttctactgc

SEQ ID NO: 3623 - DNA, 9994 bp, Emericella nidulans
taacgcgctgaattgaaaccgttttctgcgtcaagcgaaaggatgagaggaccaggactagattccatgcagtaacaagtatctgatattgagcctgtctctgaaggatagaaattgtccggctcaggcaccagatagaaggttggaatccagccgcttggcagatgacgatcatcctattcgccggatctttggcaacttagtctgatgacatcgacctccaaggcccacgactggggcgcagtcttcattttcttcataatctccccttcaatctcgcagaggcacaacttgcgcaatctcagcataatctaccacgtcttatttttcctctgtacccgtatcgcagctctgtgaacaagagtctccacgcctccccagaccccttgggacatttccccggctcgtctccgaaaatctacatagtcaccatggatttctgtgggcgtcaaaaagtcgttcggcgcaagatggtgctcttgtcagtgtaacatacgacgaaaattctggccatcttatctgactgggaaacagaggagatggcgcttgcggtaaaacctcggccctgaacgtgttcacaagagggtaagtcgcctcatattctcgagccaatcgtgcgatcgctgataaacgtcatttagattctttccaacagtctagtgaggctccttcatccaatttcaattctagtattgacctgcgatgcgacatagtgaaccgactgtctttggtgtgtagttctcccgcataaagttgacctggtattgacttgacccttttagagaactacgtccatggtatttgcgccctcgctccttgctcccgggctgtacttacattcgcaagatatcttcgtcgataacgtgcatatggaactgtcgttatgggacacggctggccaagaagaatttgatcgattacgtgcactctcatatgaggatacgcatgtcataatgctgtgctttagtgtaaggtcgttgcccagcctccggcctagtggctaatacatggaaaacaggtcgacagccctgactcgttcgaaaacgtggccagtaaatggatcgaagagatctcggagaatgtgcctggagtgaaactggtcctaacagcgcttaagtgcgacttgcggaaggacgaatatatgaatgacaacccgaatgttatcacatacgagcaaggactggcaaaggcgaaggaaattggggctgtgaagtacctcggtaaggcgtcgatgctgttctggagtgagcgaccggagttggtctaatgctttcacagagtgctctgcggtccaaaaccgcggcattagggaagccttctacgaagccgccaaagttgcccttgaggtgaaggctcaaaacaccggctcgtcgcaaagccgctgcgtcattcagtgatctgacccctcgctgaatttcgccttaatattatttgtctatatacccgccgaacccagtgttcggattgccgatatctatcacatctcgccacaagtcctaagactctgctttacgactcaagcaatcagccatttagccccgcgatatctgctttaccgcctattttcgatatatatatattttctactttagatacaccactacactaatttcttaatttgtctggggaaagaaaatcgagatttttcccatattaagttaccagttgtgtacgctctctacacaccgtgtcccttttagtgtgcatgttcgcccctattccattgctgctggacataaagactactcctgcttacatcgtggacaaacttctatgcgtgtatttttattcgagtatgttttgtcatgatgtacggttggatcagacatactgcaacttgttaattcaatagcatgctcctctggcgagatcattagcgctgccccgtaggatttttgacattccactagcatatctatacagcaacagcaccagagcaactacctcatgagcttctgttaactcactatatcctgctcgctcaccttataaacctcctcaatcttctccccgagcgcaatctgcccacgagcataatcgttattcacccttcgcacaaacgcatcaacaaaccgccccgcaacctcatcggtggagacgcccttaatgccctgcccttccaggctcgttgcctccctcccctcaagtccacacgccacgatctgccggaaaaaccacatcggctcctccgtcacattgaatccaatcccgtagctgctgatattccgccttaagtgaacgccgacagccgtgatctttctgggcagctcatcgccattgctaccagtagaggaagggcgcggcacccaaacccccggatcctccgtgatcagcccatcaagcccgtacgaccgtagcacatccacaacactgttctctagtaaccggatatggcagcgtggacttaatcccatccgtcgcagatccagaatcgtatatgcgaccatctgcccggggccatggtacgttgtttgtccaccgcgcagtgtcgggtgatactctgctatcggcccatttttattgtgtaattttgaccccgactccggtggggtaagcaacgatcggattggttcgagagcaggagggagagagagggtctttgaggaggagggagaggtgtttgaaggtggcaggtcccgacgcccagtcgtgtatacggggtttggagtgaaagtgattattgttgggtccgggggcggcggtgttgttgttgcggcatcggcgaccagctttttgtgggcgaggaggcgggttgtgagggtttgttggagggctgcgacacgcgtgaaggaggttatgtcggggaagtgaaggtgggcgagtctcattgttctttttgtccttgtggaggagcgcagacttggtggcagaacgggggactgaatggatttcgaattgactgaatcattcgcttgtactgaagatagtcgaaggttgagagctgtaattgaagcaattgaaatctttggagctatgatacatccacgcccgacgtcattactgaaatcatgtgattgaggctttaacaagaagctggctctgagacggtacagaaccaatcgggttttttgctagctctatacagctacctggttactcttctttctgaaagaatatgcataacataagagcatttcgaattttgtactaattttggaaacgtcagtgggagtttgaagctgagggaagaagacaccgactggaaactaatcaatggccgtgtttatatgtacccaatcgtgtgatgtttagacttgaatgctcttttattttcaatacatataagatccatagatcatcggacatataaggaacaatccaaatagagcacgaagctcctacagtacgacaccgttaggagtggtttcgtcgggcccttcttcgccctcttggacgacaagccaatctcgcacgcctcctttccaatcagccagtcggccctcgcgcacccggatggtgatgactcggacatcatcgtcaattgaaagactgggccggcgctgaccaggttgctgtgcctggccaaaagtgctcatttcttcctcgaatgtgttattttccaagtgtctctctttacaccatgtttcctcctcggaattcggctgcaaaaagcgagcttcccccgtaatagtagtggaaatgctggacagcgcactcgtgttgaggttcagtagcagactagccagagaggaccgggttgctgcgggtggaggtgatccatcgcgagtattcccggggtttgaagcacgggtaggcggacgatgtgacacccaatcgtgtactagtagcgagactcgtgggttcgtctgtagatgagtggtcttccgagacgaggaattggtggtcatgataatcgtggggtacggatcgaagggtgttgagggcagatatgtgtaggacattagggaaatgtgtggagtgaggccatcacatgttgctaagtgaagctacagacattttttgcgttagtgacaaacagaaaggatcaagagtgtttagttcaacttacgaagcgggagttcttgaggcacgatgaaacctccggtgggagggtagttgcaacatggcgatgggtagttgtagcggaggcttcataagaaagcggagggttcagcgaatcgctcattgtttctggtctggcgttgtttcgagacggaggcaaatgcacaaagggcattctttcgttgtagctcttcgtcggagattgtgaggtagagggcgattacttcataatggcccgatggggtggcgaccggcggtcgcattttcctgacttggtctacggagcacagcaactggcttcgggccggccctcatctaaagctatacaattactacgagtaaaggggatagatataatttgagttatgtgcatcagtcagcagagactagcatgctttagcttacgtcttactgcatagaattgttgtttcccccattttcactgagttgagggtaaatgccgtggcagctggtcatttttggaataactgttgattgcgagaagccatgtgcacgtgacgtatacgcgctgggagaatactactcagacagggtggtctctttgcagaatagctttggcctcctgtacatgtaatcagtctccaactcaagccatgtcgtcatagatatggggaaactgaaccagatcactcatatctccccaataaaggggggatctcaaatctcaatacgaaccaacttactgtcattatttcatgatcaacaggcggcaatacagacaccgaggtcctttcacggcgagcacaattgaacgtcagcatcaactaaaggctctaggctgaagcttaggccccaagacactaaaacaccttccccgcacatcggcaccaaggaaagctacgagtgcagtgctatccccagcttcctcctcatttctcccctctttccatctcaaccgttaccattggtgtgttaattattcttgcatctccttcccaccatctgcaaatctaggaattctctctcgacgacttacttgactttgctgatcctggtctttgagcatgctgctttcttactggttcccgactgttactcctgctgtgttgcgcctgcctttaagccgtctcgtttgtgcaccccgtgtcatcttcagctaatccctgctccttgtcttctataatacgctctcttcagagtccctcttgtgatctattcgcctacggacaggtggtgatccctcctgcttcctgttgtatcttagtaaacaagcaccaccctttcctccctgacagtttttcactctcgttgtcgtctgcaaaatcttcctccgtgtttgattgtctgaataccatttacttccatctcagccatgcttgccccgcgacgctttcggcctgcatccctactcgcccgacccttccacacatctgcccctgtctttcgagcgccctccattcgggacatcacgcctgactcggctgaagagttcaatgctcgccagaaggagtttcgggagaacctggaagtagctcgcaagaagagagaacagcaagagagtcagtcagtcggtgcttctgcttccacctctgcatctgccccagcccctgttacccgtgatcgcctccgtgagtacactgacgctcctgctgcttcttccaagagcaacgcgagcgatgaaaagagccccatatttgacgccgccgatgttcttgataatcaagcattgggctcactttctacccaccgttctttaggagacgaacacttgctggaagtcaaccgatctccgaaacgcggaccactctcatctttaatttacggtacgaaagaaggccagcagcttgatagagacatcgaacgttctttctcgcaagttctcgcccgcggcaaatacgtgcactccattgttttccacgacgtgaaacccgatcgagtagacgaatatgtcgacctggttggcgaatggtaccctagaatggcggctgcggaagaaaaccgcgtgaatttggtgggaagctggcgaacgcaagtgggagacaatgacacctttggtaactatacccaagccaccaatctgttccgtttgcctgaccgaagcttcgacgctaacctcaatttcaagttcatatctgggaatatcagcggtatgaaggttaccatgcttctcttcacaatatctcgcgccacccaggattccctgccttcgacaagaaactcaagagtttgattaagagcaagaagacgtccttgatgcaggaattttcgttctggcctacaacgccgccgcgccgcctgggaggcctctttgaacttcgatcttacactcttcatcctggcaatcttcttgagtgggaaactcattggcgccgtggccttaaggctcgtcgcgaggtcatggaaggcgtgggcgcttggttcgtgcagattggagacctgaacacggtccaccatctgtggcagtttgcaaaccttgaagagcgcaagatccgccgggagcagtcttggggcatagaaggctgggctgagacggtgcataaaactgttccgctcatccaaaccatgcagagccgcatcttaatccccatgccctggagccctgtcggctaggcttcaggcctagtctggcgatggtccattcatttccccgaagtacgagctctgaataatggacaagttcgactaagttagtttgacgcggagggatagaaaggggtgatatgggttcgacggcagacagttaaatgtaacaggagtctgccagtctgcgtgcccgcgaggatgaagcgaatatatcggtgctctcggatcccgatctttttgggacgagtcatttcacttcgcggttctcttttgttgtatgctaaagaagagtatcattagcgctttcgcggacaacccattgcatgtatttagtgcgtcaatctcagggattttatgcatccgacactctttgttgcctcgtttctcggttccctagtcttaatttccctgctatcagatgacatcgcatgggagccactcggtcttgataggcagactcaaaacctagcgctttgacgtggtatgcctgctaccctcggataattcgcaggccatccatactcacaagacaaccccctcttggcagtcaatctatcgcgcaatgatcgtcatcagaatgtggaaggcgggcggagtaataatgccttggaccttggttcgctcttttcgttggagttaaagcacgtggtcttccgatacccaccaatacagtcaatactggccattctgagtgaggcacggtattctgtgacattccccgtacttcctgtaattccaattccccgcggccgccctcaaggaagccttttcaaccggcagaaaaaaagcgtcgcataaatacctaccaaagcgtgctggatttctggacactggacagtcgccagtcgacagttgtcaaagccactttgcagacctctctcttctcctgtttttctttgcgtttcttgcattattgccagattctgacctagactctcactgtttctctgctttcctcgacctatctatctctattttattcttccttcacggactctagaggacctgcccttggcaaggcaaacccaaccgcgaccaatcagttcggcgcaccagaaacaagcataatagggactttttataacgtagtccgccagtgcgaaagacgctttttccccgacagccaagatggtgtacatccggcaacatgaattatcgaacttgaagaactatcgatatgcaggcgtggaccattcgctcatcagtcgatatgtcctcaaaccgttctataataattttgtgatcaagttctttcccatgagcatggcgtgagtagtgacgctggtggcatttttttgtgtatggcttgactaacagccttctcttatcttagacctaatgctgtaagtctactagcctctcagccctatgcatcaaaataaagagcctcaggaaccaggaaataagagaccgatggcgctcatccctgaagacctgagcacaaaactgatgaaggatccgaaattaactgaagaccggtagatcactttgacaggcctattcttcgtcttgatcaacctctttaccgttctatactataacccaagcctggatcaggactgtccaccatgggtctatgccagttgcgccatcgggctattcttgtaccagacgtttgacgctgtagacggaatccaagcgtatgtttcatcatctgtcgtgtggaggatggaactaattcgccttatagaaggagaactaagcagagcggccctcttggcgagctttttgatcacagtaagtggagtagctgatattcttgcaaatcatgtcactgagacttgttctgcaggtgttgacgcctgcaacacggccctgggagtcttgatattcgccggagtcatgaacctcggccagacttgggctactgttctgacactttttggatgtatgttgttccggagcccagaagcagtgcgaaacctaatttcattcccatagctaccatgaccttctatgtccagacctgggatatgtattatacacaagtgttgacgttgggcatcgtctctggtcctgttgaaggggtactgacgctttgtgttgtcttcgggttcaccgcatatatgggaggcggaagtttctggcaccagcctatgttcgaaacgatcggtgttcctaaactcgagttcatccctaagcagctctatgacttgcccttcacgcagtggtatctcatttatggtgcggtcatgcttttcttcgccactggctcgagcatcgcgcatgtcatccaggttcgcaaggaacgtggtaaggattcgattggtccactcttcggtatccttcctctcgccttgacgtgggtagttgtaccggcgtacctgtacctaaacccgacaatcctcgagaactacctggttccctttgccctgtatgtcggcctggtcaacgcgtatgccgttggacgaataatatgtgcccatttggtacaccaagactttccctatttcaacattcttcttggacctcttgctttggctgttgttgacagtgccggtgcactttttggtgtctggtcgtcaactctgattggtacaatcggacagcctgctttcgttttcctatgcctgggtctgggccttggcgtctacgggagctttgtggtaagtcctgcctctacattaagcatttacaaatcgctaattgtcctagcatgatatcattaccaccatttgtgattatattgatatctggtgtttgacaatcaagcacccctatgtgccagaggagtccgtcaacggcaatgtggttcgagcagctaagaagaacctatagggagttgaagaggtacgctcacaagccaactaatatgagccctcgcggatcaaaactgcctggagctacgccggagtttgtcggcggctactgatttttgagttgggctcgtgcccgcttcatgaccgtatcattaaagtaatgttttatgtctgagcggattggattagcgatagagtaaagtatcaatagaagtttgtgatgacctatgcttctgtgcccgcgaattatgtagtagagtttatgcataatcatgccaaaaaatgctgctagtgactaatctattccagcggtttctggaacaagcggttagcgagggctcgaaccctacgcttgcccccaaacgggccgcccgggggaccagcgagaattcgcttcaaacctcgccatctccacgagacctcttttgtcgctttcacaccctcaagccagccatctcatcagcgctccatctcaactttcttcgctgatcgactttttgtctcgtcaagatggtaagttcagcatgtcaatttgtcctagacgaccgcccatatcgactgttcaaacgtcgatcaaatattcaaactctgctctcgtggtcaccttcgccgtcgtcgccagcacgatgcatttgacaaatcatcatgaaatctagtcattacgccaggagtcatttccaacaattgct

SEQ ID NO: 3624 - DNA, 1478 bp, Emericella nidulans
gcacccccccacaacctccgcgctgctctatgagccagacggatatttctcaactcctgatcaatggacataaacgtaattaaattgtggattgcagtgcgttcttgatcggaatctaaatacatataccttatctgccactcccttggtccagacgttcttttcatagtagtagatagtattacttgaccagcagtatcgccatctcgtatcagctacgtttgttgcgactacttgctctactggtataagaattcaagttcgcaatatatcatctatctctatgtggtcttcctcaatccctctatagacatccctgagaaccggcttctcgtcaagcacgggagtctcttctagcaattgcgttcgataaatacatttgacgagccctgagaattccaagtatgtaatgaccggaggagacgggagggataggtggaattgcggtagagcaggatgataaatgaaaatggaaaagtgaaaagtgagaagcaccattacatgagaagacaataaaatcagaaaaaagcaaaatctctcccaataaccaaaacgccgttcgcatagtgtgtactcttagcatggtgcgcccctggtatcatcgcttaactgtccttgaccacaagcactttcaacgggaataatcgcatagacacaaggctgagcccggggttattcgtaaggacatcatgttgttgaattcgatcagcggacagctgttgatagttcataggttaccttttctttcctttccttttttcctttctctcattctttcgctctttccagtcgtgctttcgcggccttatccctgctcttatgctcttgcacccattttggcagtgtcttttcagctatgctgctggtttcgatgtgtccgatgtctagacttcacgaccgtttgaacataacttagcggcgaagacgcttcgtgggcactggagaatgatcatacccatcgtccgtgtaggattgctctcctgtgacatgggaattggttcgctgaaaggatgtctgacggaagtcagcaggtgtggattgtggggagcgaaggagtccaaaggcgcctgggttcggagtgaacgcattttctagcatgatagaggtttcgtggatttcttgaggctgcgaaggatcttggttgctatacggtggaacacctagagggagagtctgctctgactgcgatcagccctgtcttagatttgttgggcgcctgttactggtggaataaaacagatgagctgggtagtggtgagattgttgatgttgcccgggctgggcctgataatccacatgcatatcgtggtccatcgacgaaaaccccgaatgcgtaaaagtactgaggctgggatcagaactggagtttggcgaagctgcaggtatctgttgatagggctgagtcctcaaacccgtgcagggtttcatgtggaatgatggattataagcaaattggcgttgtgaagcgctgctcagta

SEQ ID NO: 3625 - DNA, 1995 bp, Emericella nidulans
ttcttgatcgacatccattttgtcgtctcccgagggagcgtccgtgacttcagtgtcaccacttccctcaagtttctcgacttctgccttcagagcgggaacatcctgactttccttcttagcggcgttggctgtatcctgagaagttttttcccagtcgataagcttccgtgcaacacttggacgtcgaatccaaaaggcaacttcaggctggatgccgaaatctttgataagggacgcaatgtcagggacaaacgagtcgaattcgtccactgataaattgctgcgaagtaggtccagatactgagcgagaattcggtggatttcatcgaatatgttacccagcaacttgagctcagaggagttctctgattctttgaaaatgcacgtaagacgttcctgagcaatcgcaatgagcaactggccagcaaggtttgaggaggtaagtgatttcaaaagccgctttgaagtggttttggactcatgtcgtttatccaataattggaggatggtttgcgactgcaggatctcgccgcccgccatggcctgtatctgagagtcattgaaattggtatcggtgatgattccagccatcgaactaattatctgttccagaataataagatccgtggaattattttggcgtagttgctcaacaacgtattgcagcacgggggttggatccattactgaataccgtttgaaggttctgccagcaaaggtggccaaggcattaagccatcggcttgtgagcaggccaccgtcctgtacccggcttcgacctttttgaccaagcgaactgatcaatgcccatgtgaggatatcgtaaccgaggtaggtgaagtaacgagcacactccacaacgacttcgattagattctcgtaggattcaatttgacttatagcaacgttgatgactattcctggatttgcgtacgcaatcttggccaaagcacgagccattggccgtatgtttgttttgcttagtcttttgagtacatcctttgtttccgctcgtgcttggtcgaaagcagattgtatatcggggagtcgagaggtctggccaaagtaccactcagcatacatattgtaccgagtgtccctagggaaaaagctgatgaggtcgaaaacttcattcacaacgccggggttggccttagtgagacttatagctgggaccagtagtctcttgcaaagatcttgccaacgtgctctattttccgtggaatcatccttgttgagactgtgcctgccaattctggccagttttgtcaacaggctggagtcttgtccgatcttatgtccagagatgtttaggaaagactcgcaaagtgcgaaaacatcgtcaacagattgacagatgggaatgttgtcggaccagtcgtcccagtagaacctataatcagttccatcattcgtgtcttccttatcgagctgagcccatctcaacgtccgacgttggggtgcctctgttagtttgatgtggccctttggcacaccagtctgatcatgactgggtatttgtttctgttctcgaagctcactgatcggcggtagagggcgcacagaggcgtagaccttgctcaggcagtgatgaaggatgcgatgtatgaattcaggaagttcgggataggcatccatgagccagggaaacttgctcaggatgaatagtgactcaggaattgcgccgattgctagcaggctcttcaaaagcaataccttttgatctgatggctccggaagctcgttctcctccgatttagctgcagctgttctttccgcttcttgatctttcccgggagtcgctgaacgagcctcggagtctctaatacggggaataggtagcgtgtcgtctgaaagagcaccagcagtcataagagcatttaccccaccgccagtcgggctgccctctctctttctgccttttctttcatcttttcctccttcaatacatccatagaattgtcaggccgccagagatgagggtaaagatcg

SEQ ID NO: 3626 - DNA, 2513 bp, Emericella nidulans
agcgtcgtgatggccctttggggggtggtgaggatgatgctcttcggagaaccccaggatgccagtgtaccttcatagtctaaaattatgagccgtcgctttgcctgccggtacctgtcttcaagcttgttcatagggagtctgggaacagccatgatctcacgggacgactgttcatgccagaccctacttaacgtctcactgaacgacttcacccagtttgaagttgaattctgcagcactgcctcatgaagctgtgtccatacctgctgacgtttctcttcactgcgcgagagagctgtgtggattgcgtctgcacactggtggtagtcccaagggttgacgagtagggcatggttgccgaataccgatgcgctaccggtgaattcgctgagaataagtgatccgtatctttgggcgccgtattttccatcctgacagtaaacaaactcatggctcgtaagattcataccttcacgtagactagtaatcatcatcgcatctgctacagaaatcaaagcgaggtattgcgggaaggcaaggtcctgcttcaagaataccagaggttggtgtgcaagcgtcgagtgcgtagaattgatccgcatgacaatgtcggaaatcatggcctccagctccggctgttccgtcgtgcttgtagccacctgaatcaataccaccttttcgcgccactcggggtgagtgttgagaaagagctcatagctgagtaacttctgccggatgccgcgcacctggtcaatcttgtcgcgagccacaatgagcctctttcctgcataacgatcggaaatcgtcttgatccactgctcgacatctgccgctttacggcgcttatcccaagagagggggtcgataccgattgggaactttctcacgttcacgaatcggtcctccagctgaagcccgtcattcgtagcttcaacactgaggatacggctgcatgtctgcaggaaatggccacaatagtcttccgtctgtaacccccctaggttcgccccaagcagtccctcaagtagctccttgcgtggtgcgaggcaccggaacacctcagaggacgggaaagcaacatgaaggaaaaagccgatctgcgcgtcggggagaagtttccgtagcatcgccggcacaaggagcaagtgatagtcttggacccatatggtatcgccccgcctccagtttcgggcaattcgctccgcaaagacctggttgagcttcacatagtaaacccacgaatggtcctcatatgccttgctcttcgggttatcagggatttgataatgaaacacgggccagaggattgtcttgcagaaatgtgtgtaatgaccgtcgaaatcgctgtcactgacatcgaccattagacaatcgtattctccctccagcttctcggatatcgtggcttttgttgactccgtcaaggcatcagtcggcatacccagcgtaccaacccaaaccttgtcttcaagctgcccggtctccgcggcggcgcgtacggcgttgcgtaagccgccattgccctgttcagccgttgtgatcttccattcgttctcggagaatgagggctttcggttatggctacgcccagagggttttctgaagtgctttttcggcggcaccgatgacgggccatccacttttgggagggagtccgtcgacaaattcagtggctcttggtgtctgaggattgagggggaagccagaaacgctgattgtggcttgggttggttgagtcacggtccgtacgccccgggccggtgaatgcgctacactttccgtcaagtgttaatagtcgtagccattgtcggggttaggaacggggtattcagaccggtttgggtcaacagccttgtttggatcggaagtgaagatgcgctcatggtcggtggtcgcgcccggagtaagaccaacattgggtgtcttattccgcttctcaaacaagctgactgcagggtttggcgtggttgacacggactccggagcctgatgctgagacagagggcttgagggaagggcttgagactcctctggagggcggaagctgactgtgtaggggagaaacctggttgcattagcagggtggaattcacgagcaagcagatggtgggggttagtacagagaagctatgtagacggtcatcttgtggaaaggagacggcacaagtgaagatagaagaacgaaaaggtaggactgggtcaaagacgggtagagattgtgttctcccttaaaggttgtaagagttgtacggagtacagaaagaaatggcgaagagatgattctagttttctgcagtaaaaggtcgggctgtcaccactcatcaatacgtcattgaaacgtccagcccacctcactgggctaagaaactggatccagccgggctggaccaacttcttctgccttttatcctgcttggtaaagaatccatgaataagacgcgaaagcatgcatctactcagtcatcgactcttacgaagtaattaagtttggttctatctttttgctatat

SEQ ID NO: 3627 - DNA, 3484 bp, Emericella nidulans
gtgtgtctgcgccgtgctatgttagtgaaatggcacatccggcgtggaggtatgcaccgattttcgaaggcctaagcacgaaggagatactgacggttgtttctagaggcacaattacggggctctataactgcacctggtgagttacgcacattccccgcctggtcttcctgggcctatcctgacccccttctgacccctatgctctccccatggctggtatttctattctgagactctcccaataggtacatcggctccatcctcgctagctgggttgtttacggctgctcacagctcgacaatgccaactccttccgcatcccgatctggtgccagctgatatcgtccgcccttgtcgtgctcggagtctggtttatccccgagtcccctcgctggctgatggcgcaggaccgtgcagaagacgccgcaaagattcttaccagataccacggggagaacgaccccgatcaccctctcgtgcatctccagctcaaagagatgcagcagagcatcgccaccgatgcatcagacaagaaatggtgggactaccgcgagctctacaccggccactctgcacgtcgcaggctcatctgcgtgctcggcatggcctgttttggccagatctccggcaacagcgtcaccagctactacctcccggtcatgctggagaacgccggtattgtcagcgagagcaggaaactcctcttcaacggcatctatcccccactctcgctcatcggggctgtcgtcggcgcccgcatgacagacaccatcggccgacgcccgctactcatctactccctcctcttctgctctgtcgccttcgccatcatcaccggaacctcgaagctggcaaccgacgatcccaccaacaccgccgctgccaacaccacaatcgccttcatctacctttttggcatcgtcttctcctttggctggaccccgcttcagtcaatgtacatcgccgagaccctcacaacaacgacccgcgccagggcaccgcagtggggaatctggcctcgtccatcgcgagcacgatcatccagtacagctctggcccggctttcaaggatattcagtactacttttacctcgtctttgtgttctgggacctgattgagatcgtcattatgtacttctactttcctgagaccaaagaccgcacgctcgaggagctggaagaagtcttttcggccccgaatccggtcaagaggagtcttgtcaagagagatgcggcgacggtgttgaatacgatgcaggtggagcagcgggaattggtgagtaaagaggcacaggtgtagccataggcctgtaggtgactcggggtaacggtcttgaagacataggcagggttgacagatttacttggagttatacactcaacaattagcaggtttacatacctgctactatgggcactacttattctcgtcggtcagagttcttgtggcagtctctcagtagtgcaaacgatcttcgacctgcatgaatcgttgcatagaccaacctcagttaacgagccttgggctttgtagggccggcaaagtctgacttgcctccacatgtttcgcgcttagaccggctagataggatgacctgcgtttgttattgcctgaccctatttttgatatgatatatagttccttctgtgcaacgcttgcactttgtttgcatgcttacttgggaggaactctccaatatttctgccactgatacagaagctctacagaaagaagcatattgggaactatgttcgagatcgtctttggccgaatctcacgaccgtataatatgccactgctccagttaccttcccctaaagtgaaggcctctgaagtcagctgaccattttgtcagtgttgtgaatgctcgaaggggaaagggcagaaggaagctgtatcaactacacgaacgtagcctactaaggataaattgtcatatgacgattgattatctagatgacgatagttgtctctcttcttcaatgtgtacaactcttcgagggatcaggccaggggccagaaatcatgcaatacagattatgtggcacgtgacatgaggctcattggcaacaagtatactgtcagaacttagctctccaaggagggttagccctttttggctgagtgggaagttcgatactcatcgtgtacacctggtgtacacgatgaaggtcacatgacctttcgtatcagtcagcagaagcaacgctgacaaatctgacgttcgccgagtcacgttaaataataaaaccaaaccaaaccaaaccaaatctggcgttcacagtctgagcttgttttgctggcaacattcctccagcaatcaatcggtgctaatgcagaagctagagaataagttcagagaataaacagcaccgagtatgcctaatgctccactacggcggaagagagccgccagaaaggtggctccatggcccggcagcgtcccacgcgccctgcggaaggcccggccgagagcacgagtcacgagcaaagcgtcgaaaatgatcctgtcagactgactgaaggaccagtggagcctatgtctgccgttgaacggagacaggacgtttatgagtaagtagtttcactaatcccggtccgcacgcagcataaggggaatatcggtatatcaacacgctcctgcaggactggggcgcccgcatgaccctctctgcttcgaatgcctcagaccaaatgatctgatgtcctgcaatacatgtaggcgatcttaccacgtgaggtgcatgccgctggacgggcgggtcacgtccataccagatcttttaaaccctggcattgtcccatctgtttggcgcgcgggtggaaagacgttgcacgccggcccaagttaggaccagaagacttcccaatcttgtccgctacccttggagcccgcaggaatatacggcccatccagaagcgccgcgggatcgacgctggacagctgtcgtgtgcttcaacatatgaaaacggatgctgctgccctggcccgggaatcagcacaagcggcgactccgaatgtagatgcgcctgcacggttgcctgttgggactgaagaagaccgaaacagcatggctgtattttccgccaacgacattggaggggaagcttctaccctccagaaccagtaccctcctacaaaggctgcttctgcttctccttctgcttgtggctctggacatttgaagacggcgtcattaccatcatcgtcatcatctctacggaaatcccgcttcaacacgttatccgacgaagtcacctctgcgctttccgtcgtctaccgcgaactcgaagaggttcctttattgcgtaaaactgtggcagatctcgagcagaagatggctggtcttcgccaggagctgagcatctaccagaaacgagatttctctgagcaggaggatgggaggcggtaatgatataaagggcctcacagcaagaaagaatgatcttgagcgtgagaatgcagacttcgggcacag

SEQ ID NO: 3628 - DNA, 7358 bp, Emericella nidulans
  unsure (1)..(7358): unsure at all n locations
acctatctgacagcgaagaggaagaggaggccgccgtggagtttggagacttgctgcggaatattcttctgaggaccagcgagaatccagacgaattgcacgcatacgtcaactacgcttctgggtatgagggaccccggccatggtatgggtacgagccgtggaggcttgaaaagttgcaggaagtgaagaggaggtacgacccgcagggnaaattctcgttctatgcgccaattcctctatcataaaatgttgaatagggtgtctcccttccattactatatatcattagtcctatctttaattgttcggtggagggacactgtggacgtacgtgatagatatagtatgtgtaggacaagaaaggataaattataaatttcctgtggcgccaggaacttcccgcaaaataatttgtgcccctcccttccatactttccagaacccagcaaccttaccaacaaacaccgttagcccttctggcgccgtctgctcgaatcgccgagtacctcgttcgtcgaggtaaaattccggctcccatcatgtctcttgtccccgtcgacaccacgctgaaggttcctcctccggaccctgttcaggaaccacccaaggtggctatcacgccatgtgagggactgccggtacgctattatttcgaaggaggactgcgtcgcgtgtatccgtaccactacacctacaatacatactgcaaggaacgctggcgaaacagggagttgatagacatcttcacctctgaattccgcgaccgcgaacccggctactacgtacgttcacacccacagaaaatcctcccaacatccgctgacatttcatgataaactagaaaaaagccctcgaaagcggcaacgtctgtgtgaacggtaagcccgccggcccgcacaccgttctcaaaaatggcgaggtcatctcgcacaccctccaccggcacgaaccccccgtaaccggaaatgagattggcatcatacatgaaaccgacgatttactggttatcgacaaaccagcgggcgttcccgtgcactcaacaggacggtaccactacaacagcgtgatggagatcttgcggatccagaacggaggcgcatatgtgccacgcccttgtaaccgcttggaccggctgacgagcggtgtcatgtttgtgggcaagacagcgcagggggcggatcggatgactgtgaaattaaaagaacgcaccgtgcagaaggagtatgttgcgcgcgtgaaggggcggttccccgatggtgttgttgttgtcgaccagccgattatgagtgtcagtccaaaggttggactgaaccgggtcagagcaacgggcaaagaagccaagacgaagttcaggcggttggcgtattatcccccgccgtctcctactacatctacttccgacgagggtgagaatgctagaccagcaacaccgcccccttcgtacgtcaacgaaagcgagggctacagtattgtccactgttttccgcttactggccgcacgcaccaaatccgcgtgcatctacagtttctgggacacccgatcagcaacgacccgatttacagcaatagacgcgtgttcgggcctgatctgggtaagaatgactcgtctgcggatctggacgaggaaattatcgatcggctgatggcgatggggcgtacggaggtcccggatatagggcccgttgaaacgccgaaaccaaagccagcgctgtccacaaaaccaccctcagagcaaccgtcaggagagcaaagcacgagctcagacaaaggcgaggacaaggaccaggtctcctaccgaacgcacttcacaacacctcctcttctcccgcctgggacctcagcatccgttgtcgaagcaataatgacaaaagagcacgaggcagccgtggccgaataccaaaaacgcaagggtgaaagactttccggcgagaagtgcgacgtatgcgggacagagctgtataccgatccaggtgtgcatgagctgggtatatttttacatgcggttgcgtactcggatgcccacggcgaatggagctaccgcagtaagatgcccagttgggcacgcccccccaagggcgtcgagggaccgacggaggtgccgaagtgggttgaggaggaagaagggaaggaagtcgttgttggcgatggggtagtgccggacatcggagttgatgagggggatgttgcgaagaatgagaaaaggaaggggaagcagggtgctactgccctggttgagggggtgggcatgattgatatctcggcggcaaggcaggcggagtctgaagatgttgccacagctgctgccgggactgcttgaacgtcagttatgggtgactgttgatgggcgaaggctgagagaaaaagcgcttgtttggttgcgtgcatgttgcatcaattgggagttgaattgggctcattttcgctagacgttttcgtatactccggatactgattggaatatacccagaatcagaccttagataatagactacgctgtcaacccaatgtactgtctgagagcaccataaacgaggaattccatcactcaacaaccttcaagtcttgacaccaatagaacagacagagcaagtctcacactatcccttaagcacgcaagcaagcaaaaataaaccgagaagaccgcgaatccattcaacaactcatttggtatttaaatggatagatggatggtagggtatgtataacaaaatcgacccgtgccatattccaccccttgtccttgttcgatggacttcctccagcccagctcagcccagtccattcgtccgcgaccgcaaccgtaaccgtaccgcagagcccgcgctttatcaattcattcccagaatcattttcgctttttttcgtttcagtcaatcgcaacgcaaaccatttaagcctcagtagtgacacggccacgggggttggtgaccttgacaccgagggccttggccttggcgatgatgtcgacgcgcttgcgggaagagacggcggaggcgatcctagagaagagcatattagtcctccaatcgagttgatcaaattcataggtttaggattgcgggacgcactcagcagcgtaggtgcggttgtgcatgaggaggagctcgacgtccttaacgttgtgaacgaggaaagccttgtggccggagggcatcatgtgcttggtcttcttgttgctaccgtaaccgatctattcaggtatcaattagtctcgctgttcatctttttcatgtttcgatttgaatcgaactcgaaagcgtcttgtggcgggggacgcacagagggcatgggaatgttcgacttgaagcgtctgcggacacggttgtcgatacccttaggcttgcgccatgactccggcacgcacttgaagcggtcggactggtggcgggtgaagcgcttggtgcctatatagatgatcagtcagacttgatcatataaacgtgtggttgacccgagtcgctcgtcaattatatcctccattccattttcaaacaaaactgatcgggcgatcaagtttttccagtaagcctcctcttttcgtcttgtgctattttgcaatcctcctcttccactctcaaggcagggcagcgggtgataggtggtggtgacatacgcttcttgacgatagggacgtgcttcttagcgaggaccatcttcacgcaattgttagcatcaatgaacctcttgaaagagcagagtcaagcaatgaatataccttgtcgtttgtcccgttggcgctggagttgtcgaacggtcgaaatcggtctcgaaatttcgcgctgagggttggccgcccgagactgccagtgaccccgttagtgccctttgctaagcgagcggaaagacctgtgggcacgtgatagggttactgggccctgccctacgactttcttattttgacttagatcattcattttaactagcctagccttttatagaactatactttcgatccccgtcatgaagatcatgttcagtcttgcaacttcaaagtcttccgtccaccatcctcgccacttctaaacatcatctccagaacctccagatccgccaacgcctcgtccggcactaatttcttgttcaactctccattaacgatcgactctccaaatgctttgacttcctctttgacaccgaccccttcaaaagggatttcggttgcaacaccgttaacggtcaattgatcatcaaccagcgacaccacacccttctcacacgtaaactccagcacaaagctcttgaattcagatccaaatgaaaggctgaatacacccgcggcgccggatgccgtcgtcagcagcgcgtcgaccgtatctataggcggcaggtgttcctgtagttggcttgtctgcgcggtcagacttttaagactgttctttccgcgaccaaggatgagccgaacaccagccacagtatggatgccgccatcgaggagaaatccaccttgatattctgggattttacgccagggtgtgtctatacctgttagcgtgtcgcctcgacgaatgtcattgtagactgtagctgcgacagagaatgggacctactaaaatacttcccctccgtcccaaccttatttcgcacaacgactcggaaagtcttcacgccccccaatttctgcacctcctctgctgtcttcagccacttccgaatgaagcggaagttttccgcgacaccccaaaacgtcttggacttgtcaacgttggcgttgtcattgtaccatgccatcaggtcctgcgcggtagcaaggtccttggcgatcggtttttcggacaaaacgtgcttcttagcagccagggcttccttgatatatgccggttgcgcgacgatggggaggctaccaacgtcagacaaagtcagcgcttcctctaacccagatataagaccctcctgggtcagcatttcaacatcgtagacccttagggacaatctaggctatgacttgggcgttagagcctgggacaacaggttatacgcacgccaaaataacagctccgatatcttgtcttgcaaggagatcttggtaactcttccctgcgcctgagtcatccgaatacagatcaacaccctcaaggccttctgccagaccctgcgcggatttgagcgagcgcgagtatatggctttcagcgagaacatcggcgcttctttaattgctggctggattcgaaatcgttagtattcagtaccaagtcaatgcgctggtcaattcgtgagaatgacagcccattcagctggtgcattgtaaggtgacgtacgagatgttgctcacgggcaaagatgcctaatatgttgttagtttcatatatagcgactgaaaggttaaaagaaccaaccgctgccaatgatagcgacgccaatagtcattttgctcagttcttgaaattatcttactagatgagtgagaaggtatccaaatgaggtttccttgatctaatctgttggcggtcggagatatatatctgatgagggccaaggtgggggtagctgtcatcatggattcaaacaaggtccaggcttctgaccctgcgtattgtcggctgaacccgatctcgctccgctccaaagtaggtaagactatggcaaatccccgaaacctgtccggatgcattgggccagaatagcgatagctcattagccccgttgcctttggggccgaattgtactcacctaaatatgcacgtcatcggtatcgcacagtcgcttctctcccgcactgaccagtcgataattctagagtccattctctatcatgccttcaactactagatcatggcatctgcatcaacttgcaatgcttcttgctatcatcatactggttgagcggttctacagcagatgagatcctagcctttcgctctaccagggcccgctatgtacaactcttgaaaggcaatgtcatgctccatacttcaaacccttctgatctcgatactaaggacgtcgcaaaccaggttgaaaagcatatactgcggtccgaagacgacgagcccatagtgtttagggattgttgccagagaactggcccttgctcgcagtgcagtgcacctggacggctatgtgcctgactgcgtaccaacagtccctgacaaatacagttcatgacaaaatatggggtttcaaagtctgctacaaccgctcaagtggccattatcgcgatgcagatggaaagcctttggtgcggtgcgctagacatcttgtgccgtcttcgttgtcagccttgtcactgccctcttatcggtatcctacgtagtttgctccagtgcaaactcagcaatatctatagcggcaagaacactaagaatgggctagcgggctgattgtactgagtgagcacccaagcattctgtctgcgactgcctcgataagctctccccgcaagcaacagcgcccgcaccagtgcgtcccttatatgtaggctgacatttcatcctaggatagaccagaaattgctacttttctgatctacgtccaagttcattaaggtcaaatcaagcgcgtagggaatgctttccccctggcttgggacctcctacaagcggtacccgcgcattcttatgctcggctggtataccccgcaaaacctttcaatgcgaaggggacagccacccgttctttgcaagcttccgtggccgcacaaggtcgtaacatttgaagccttgccgcgcgagtatgtaaggccctgggtaaactagggcgggtgagagtgtatgattagcataagctattgtcagtaaccaataatataccatcataggagaatcagtaaatgtgctttgcatgtgtggctggcttgaactacacagtagatgcgcaaggaggagtttcttaagtatgaggctggagacgcttgggcaggctagcatagtatcaagatccaacaatgcgagctgtgcagaagacaaggatatgattcgctgtacactgcgtgatttcatatgatttttatggtcttttaaatcgtgaatttccaggacatcaatctagacccttgataatgacccatcacaaatggagggaagtcatggtggggtgcacgtgttcgttgtggaggactaaatagccgttggacaacttgggaggttagacagcgacacctcgaacaaattcccagccaggaatgggatcgaaacgatcgacaatcatacctgaagatctccagacattgagcctactccttctacgccggagacgaagatgccagcgcacccctgactcgcactgaaaccctgacagagagactattgacgctggtggctataattaggctgtccctgcgtttcggtcggtgttccagcttcggtcacaggctgtcctttgattctgctccttaaatccttcacctccacctgcgcac

SEQ ID NO: 3629 - DNA, 4517 bp, Emericella nidulans
  unsure (1)..(4517): unsure at all n locations
gcagcgatatttggtccttcgggtgcattatggttcgagtccttgccttcaagttagatggagtgcgcggtctccaggagttggatagacttcgtgcaaaggacgatgatggcgtcactatttattccaatgaccacttcaacagaggggagcctccaatattgaacccacatatcgccaactggatcaataatctgccagtcaggtatccaggttacaatggcgagttcctgcaagattgtgctgctgtgcttcggcgtactttggcgatcgacaaacacgatcgaccaaaggcgagtgaagttcaatacttactaggagagctcagatccctcttccatacatcaatgcataccccctcggagtccgcctcgtcggtaccctcacttggaacaccaaggtcgtcagtaactgatctcgcacctccgtcaagcgtaggcggtgctctccgggtggaggatcttttcaatgcaatcaggggctccaatctgcgtaaagttgaggcatgtcttgcagaaggcgtcgatatcgaaaagcacgatgaccacggtgatacaccactgggggtagctgctaggttgggacatgggccgattgtccagtgtttgttggaagcgagggcgcaagtcaatgcaaggtctgcaggaggcaaaacggctttgatgcttgcctcgtatgcaggcttcgagggtgttgtgcaactgcttcttcaccataacgcagattgtcaagaatactccaatgaaggactgacttgtctccactacgcaacctttcggcacgccagcgcaggactcatccggctcctgactcaacacttcaagcctgttgacatcccaacgagaagtcccaccgaggaaactccactagtgagcttgctcaagaactatgttcccagcaccgcatgggaagataaggtccgcgctctaatatccgcgggcgcagacgtgaacgcaactgacaagtttggaaacaaaccgatcgactatacagggggagtcaggtcagaagcagctcttgagatgcttcaagctcccgttggtccaccccgctcaattcggtcaagtattgatagcggacaatcacatcgttcctttagccttcgctggcgaagatcaaaaggttgagctaatttttcaacagcgctttgattctgatttgagcgccacccacaaactatagactacaatgttacatcaccatgtgcgcacgatgaatggggttcaatctccgtccgcgccgattcgagaacccacagaaggcgaggattgtcaacctggatctcgttatgtttggcgaaagtctgccaaattggtctgcagaaaggaagcggagctgctacctagcgctgaactgtttcttgttatcaggactagtctgaagattgcatcgtggtcggagctccagcgatagtgtcaagatatgtcccgggggcttctgataattaggaggttgggaggactgaagaagggcgaatggtaatttgtgtgtaattgggggtatgatgaggtttgagctcgttaggcagtctggcctaggaggaccgacttgtcgggacctggaaaggtgccgtgaagcgcaagcaacggggtgtgagggaggacagaggtgggtgggaagtcaagggacgtccgacgttggactgcgtggccagcgcaacaaggaagatgatgatgtgattggttattggaggcgtattggcgcatgctggaggaacatctaaggcacacggcccgaattcttacaatgggggcggattacttacaaatggctaacgtaaagattcatactaatataatagtagttgcctatctttaacaagcaaataatcgtcgagatatgaatactgctcaatccccggctctgtgcaatcgggccattccaggtgtacgtggaccagcagaattgcctgtagtgtctgagcactatcaataaacagagtagccgggctgcaaggcgaggtaagaaaccttttagacatccaaactgattatggctttacatcagaggtaatccttcgtcctagcctcacaaaactcccaaaactcctttgctctccccgatccaccatcctctgccaccttcatcgcgctcaataatgcgtccgccacctgatcatggattcggccaaacgggatgacatagcagccattgttttgcaacgatatcgcaggactaaacccagcatacagctctgtatgtgcagccaagcccgctctgtgcagcaagggataagagagtatcttcatcagcctcgcgtccttgagaagattcgtgtttgctgctccggggttctacgcaacgctgacgatcccacgggacccatatcgtcgggcgaactcggcagacaggagccagtttcctgtcttggagtttacgtagttgcggacattgtccttaggtgggctggtaagctcagacatgatgattccttcatccggcgaggagagctcagcgacttgactgcttgtccaaattactctcactgacccaggagatacggacgaggcaaccgccgcgtcgagtaaagggagtaacatctgcgtgaagaggaaggggccgaagcagttgacggctagctggagctcatggccttgtttggaaacgctacccaagggcggttgggagacgccggcattgttccacaggatatccagtttcgattcttgtgctttgaaggcttctaccgaagccttgatgctccttagatcatcaagctcgaggatgataaagtccagctcaccatgatgattaggtgcagaggcttggatttcttggatcgccttttctgctttctcttcgctgcgggcggtaatgtagaccttgccgccgtggcaatagagaatcttggcgagttccaacccaattccagacgtgccgccagtgatgaggaacactttgccttgctgttccgagaggttctcgctggtgaaggttgggtgggggggaaagaactgggagaactgggcgcccatctctcgagctgttgcaggggctagaaaggagttgtaaaagggaaggggggtctccaagtgagcggtgaaagataatgaccaaagaaagaaagggagataaggggggatgtaagagggtaaggcttgagctgatgccactaacgattccacttctttgtctaagccaagaaaagacagcgcggttacgagctagcctgccaaagaaccggtcttacattcttaagctgaagcagacgagggctttgtaagacaatctttgcaatctcggccaataatactgaaccgagcttgactaatacactctgctcgcaccatcacggtgctctgtacttctagctaacgtgataccgcgggcaatagatgctttacaccagattcccagtatgactcgccttgacagcctccaggtaggtcttcagatcatccgaaagccaccagcagcgcttctcttgctcgactacctgaaagtactgcttaatatagtatctgatctgctcggcgcagacccttttggcctncttctcgccaaccgactgctcctgcatgatcacccaaactgcattatacacatagtcaatccccaaccgctgagcctcctcgcagttcttgttccacgtgtagttgtcattcgtgagactaaccgcggcatatccaggccgggcaagtttcaagcagagctccagttcctcgttgcgaatgctaatggccatggcaaaggtcagtgttccgaaccaaatcaattccccagcatcgatgacccggctcgggagatacgcctccagtgtgcgcaatggccgtgagcgcgggtgggctgccagctgcaggaacctggtccaagccttctccgtcgtgcctgcgcgctcaggatcaatagccatcatctaggtgatgacttgttcttgcaacttctttgcttgcatatgcggcctgctagcgcccgctttactaaacgattcggccagagtatccgaatttcgggtaagcggtgcatgacgccgtagcttaagctgttctctcacgtcaatcagagactgcgaactcaaaacgtccaatactcacggtactgggtgattcataaaggcagtaaataccggagagactctttaataatggcctgcagataggtaaatctctcgagctcagcccactcggcacacgctctggccaacccgccatagtctcccagagttcatcgcggaggctcgagcgaatatccgggctatcggcgatgtagaacgaggcgaaagcgattgttcgtgcggtgctgctgtgccgccaccaaggaggacttgggcttcttttgcgaggcgctcgggcgaacggtcagactcgggcatgtcgctctgggctacatggggaaagagcgaggttacgggcttgctgttgttgtgcgtttggctgaagattctgtctatattttcccgtgcaacttggatagtccaaggtgaatattactagcattgtctatcctgtcagaatggttccgccgctaggaacgtgcgcactcgcttgaattcattaaagacttgaccttggggaaag

SEQ ID NO: 3630 - DNA, 3194 bp, Emericella nidulans
ggggagtgtgaacaggttgatgctgtttatcccactgtcgtcctaactcctgccgctcaatgtcacgctgagggtcactctcacgttccctgggaaccatctcctcctggcgttgtctttcaatgatctcccgatctctggaatctcgctcgcggtcctggttcatcgactgaggagaaggatgttgcatagcctggccaattcctggtagcgaatgtccgccaccgtgtgcgggagcaggagcatgctggccgtacgatggtggtgggtgcgggttaccgtgagtctggctcaattctgccaatcccggcagcgaatgtccacccgcttgaccggccgagtggtagggtgctaatgaggcacgcatgtcagttcagaacacacataacaagaattatatttccaaacatgcaggggcattcctaaccggctgggggtgggaggaccggccctgacggctgcgaagacgggccttgctggggggtcgggttctgactgcaaacagcgggataacgtattagcttctgtgactagattttaaagaaggcagcccccatatagcatgacatacctgaacgtgcccaacggtcgaggtggttgattcatttgatccatggcagggtgcgacgggccacctgggtgccaattatcgttcccagaattcatgcttttcggccaacgaaagtgccgtaaacgtctagaggcagatagcggcctccaagatactgagatatcgtacagtcagtgtagaaaagaggtaggaagctattgacgaccccagatcaagctgcaagcttcttattccttttcgcacggatcagtttctcttcccactcatctcacagaaacatcactggattaaatctgccaaccgcaggagatgcgaatccagacaaaatgaagatcaagaaatatagagcgaaagaacttcagcagcacgaaaggagacaagaaagtataaccgaatgaccaagccagcaacagcagacggattagcgacgatggtttgcgcgcgaccgatcacggatggtctccagagagaaggcggagagagtttggccgcactagtcttggtatggcttagtgtgtgataacggaacgggaattcttccggtccaccgaccaatgtaataacggtgcccaagaatcatacgctgcgccagtcgtgattggctgaataccgcgagaatggagcctgaggtttccgacgtcatcaggactggactggcctgagacggggttaatatagcagtaaagagcatttaaagggtattgagagcagatagatgcgccagttacatgcaccagcggcaagatcacggaagtaactgacatgaatttattatctacttgagcaacgctaagcggacaccaataccaagtcagtcctagcccttgggctatcggatccgtctctatctcgtccactgcgacaaagtcgtgggagagaaacttgtcttgcggtgcactaacgtactgccgcagtagacgcaccgaaattgaatacaggctttaactaagagagaaggaaatggaacattctggggcagctgcctgcttctcgctctatgtgaaccccagtataaacgccctccaccctcctccgtgaagaaaccatcaaaatcaccaaacttatccgggagcaatagtagaaagtgatatctcatagtagtcggtagcgatcgagtttttgaaagacggggaagaggcacgcaacctgactccaataacgtaacgcggataacaaagatagtgttcggaatcgagactggtaacctggagatggtaaaggtgcctttcccgtgcccgtgtcgttcacgataaccccggcacgttgtgcgccataacactgcgattgcgagtactttagctatctctagagagcagagaagacaataacttgattggttaaagttagcttcctctcgcagaccgaatatggcggtaaatgctactcacgttgcttgtggcagcaatggcaatgctatcctcaaacggatgccagctcatgtgcaggatcttcttgttaaaatcaatttgatctgcatctgtctccttcttcatgcggctgccaggaccagcagggctgctggtccttgagttactcttcttcccattggcacccttattcatcggcgttggtacgccgaccttcttcgccttgaacgcagacttgtcagcctgcaaaacaatctcggtttccttcgcgggatcggtaggataaatcatgaaattattgttgtaactgcctgtcataacgttctctgcatcgcccgaaaagaccacctcgaatttatcaaagatgctgtcgttctcgtacgtatcgcatagacgaggtcggagatgttcatgaatggggattgtcttcacgggttgtcgctccatgttgacgtcccaaatcttgacggtgaggtattctcgtgatacaatgtaccggccatcgtgagagaatcttacgtcagatatcggggaaatgatttcggagaagaaagaacgggaagaggcgtcttcttcttgctcaaacactacataaggcaagttagaacttgattcgaaagtgtcacgagaagaggacaacgatgaaaaacacatacgcttgtggtgggtatcacaaagagcccgttgtcgcatgtcggcaagcttgatggtcccctttgagctcgcgtacatgaaccagttacagcttgtaggatgaaactctgcggcggtgatgacttctgtaagctcttccatgtttgctggtttgatgtcgacaatgttgaagctctggtcttgaatattcaagttccagaggttgactcgcagatcgtcactgctaatgaacgtctccccgtcactgttgacagagatgctgttaatgtggtatgcatgggcgttagcgtatgttcgtctaggtacagctgcgacgacagtgtcgtgatgtgtcatttgtggaagcttcagtgctgaggaatctttaaaagacactggaggcgctctgggtgcccctccaccaccaacgcccgcaggggtaagctctgtagagagattgttttccgcaacgactttgagagatttatcaaacaccttccacagcttgattgttttgtgattagtcgagagtaggaaataaaacgctcaaaggcgccggcgccattttattttgttgatattctgttcattctgtagggattttaggtagtccaattctggcg

SEQ ID NO: 3631 - DNA, 2591 bp, Emericella nidulans
aaacacgaacttcatgacttcgtttgcgtctccatgaggaccgcgtaccaaagtcagacttccggctttcaggccagcgtttacttggagcttgacccattctctcggaacatcgacgctttccgtgatagttttcttctcgtcccaatcgatggcattgtagagttcctgccgctgttcctcagtcatggcagtttcttcggagtcctctttcttagaaccccatatccactcggaccatgtctgctgtcgcgggggcttcttcacgcctacgttctccttccgcaattgatttctcgcaagcgagcgccagaatcggatatcctcatagctcagctttctttccaaccggttgaactcttccgtttcctctgctgataacatctcctccctttttttcttcttgaagagatcaatgtacgcgatccgatcgtcccttcgttctttgatgtaatcccatgtccaccgcctgttcctatcatgaatcttactcagtacggcttctcctgcatacctaaaccaggccctggggtcctctttcggtcgcgactttggttgaagtttcctatactcctggtggcggataaaacagtggaagaggtcgacaagcatcaatgcatctcggtattgctcgtcgtctaaaacaaaaccgatctcgtcaaacaaaagtcgcgcattgacagctggttgttcatgatttccggttttatccatctctaagccagcacgtccactgacgggtcgcaggatgaactggtttccatcttcattgtctataccagacctcaacctctccagtagttccgcatggtcaattccctgtgcttctgcgcctacatcagagccccgacctgtgccaaaaagctcggcgtccgtattccaatatacagaaagcgcacccagaatagccatcttgtgggtagtgccggacgttgactggatgaaagttggcctccattccgcgtccgtgctcacggcactcagttccttcaacgtaaagccgacagcaaacgggtgccctggggaggctatcgagtcttcgtaacgaaaatgcacattcttgatagagatctgaaggttatcgattactgcagtgaccagactctgcgtaaagctctggttacggcgctgctcttcctggctcattccttcagaattgcgctctttgagaatctctgcgctctcgatcttgtccatcttgatggcattcgctcgcttttcctcttcctccggatcatagtcgatatcctcctttggcgcagcgagcaggaatacatcttcgatgtcgaccttgaccggtttccctcgtaggttcgaccagggtattgatagcgtaagttcaccaacatggccttcgacgacattgagagggagatgcaattgatccagagcttcccggcgcagctccagatttcgtaacttgacatccccagaccagataccgatgtttagctgcttggcgtcgaaattcttgacgtagatgcccaaaaaccggttgagcaggttagcgaccaagccttccaacatggtggcgggctgcggctgtgacccaagccggggtcgttactgcagcgacttaatcacgaaggacggttatagagaaactcctatctggctatgtgcataacaattgtcagtaccgttgggcgaagtgccgcgtaaggtgtagaccagcgaagaggggctgttgcgcaacagtagacagtgaagttggaatacctggtgcacatgggcgagggctaattgcactcgcaagatattaaaggaagcatccacaagattcacgctgggtaagcatgcacgcggttacgatgctgttccagccgcgggtcgggcgctagaatagacgagaaggtaatgacgttgctgtccaagacgtagaaggaagggatagctcggcagaatgagagagtaaaatggcgttccacatcaacctaatcctctaacagcgagtgtatttctttccaggatctttcaaagtccgatgaaggtgaattattcgttgtgcctggcgaaaaggggtgccagctaaagagtgacgtcgatgctgcttcacccgctgtctgttgttgcctgcttgttcaggctttaacgtcgaagtcccaagacagttagtcgtctagggctcaagacctgtgctgatagcggaggagcttccggcagctaccgtagagtcccggaattgcgtgcctgatggctcgggacagaatctgcgggataggcgcttgtggttcgccggaccagccattaccgcacctctacataatatcacctcgcccattcgctgcctcgaggattgattgctctcaacgccagataatctccgctctttcgagtcaactcccatcagcttcaaggtaagtacgccggttgccgcccttccctgtcaaatgccgctaccccgcgtcaattggtgcgggacatcgtgggccgagctctatccgggctttccaacggcggttgctaacgtgagtttccggtgaaaaaattagctgctcaaacaacaatgctttaccgacaaaccgctgcgcgctctgctctcagggccgtctcgagctccaatgccgccgtggcccgacaatcgctggtgg

SEQ ID NO: 3632 - DNA, 2312 bp, Emericella nidulans
catacattgagatccgatcgtctttacgctgtctagctggtccggtcgctgaagatggacagagtcatctaggccttatactgaattagaggtgtctcttcaagtcattactctagtcatacccatgtagagcccagaaagagaggacattacgtaccgctacagccaaagataataagaaagatattgggaaaaccggtcaaattgcctcgggtcttgatcaaaagcgactgtaatgcccaacgtacataaggaagacgcccggcaatcttccatgaactaacaatgtcaactcgaaaacataagagaaagacaacgccctcaaaatgccaatcaacatgaggaatgccgatatgcagttgaacaagcaacagacactgtaccgggataataagttattgtgtacatggccaggtataaaaataggcatggcacaggtaggttagggagaaagggaggtaaaacagagcccgaacgaagaacccggaagtaacaattcgagcagataggtagagtaggtaagaggcagtagtcgtgcctataatggaatagaattgaggaaaccaagcccagtagggcatggtctatgcatagggtgtgatgaaaatgaatggaaatagcgttcgcggcttgaggacgaggaaacaagggcgtcaataggggtatgcgacgccattggaattgatttggttggatttagtcatgaaaagcgtagaaaataggggagagggttatggacaaatgattcggatatccgctcaatctatttcgaaagaccaagaccaagaccagataacagggttactggcaatggtattcgtgttgctgggccagatctttaagattgacgagttgggtgcaggatcagtgcctggcgatgtaggcgtacgcggtgcggatataggggagcctcgcgggctatagatacgtcgtctaattatgtcttaatgatatttcaaggtggtgtgctggtttgacggacttccgggtgtgcgggctggcgccgcatgtacatcgcgtccgattctgactcccgtgccattggtcctgcctgagactgtgagtgttgttgttgttgttgttgttgttgttgctgctgctgctgctgagctacaatttcccgcgcatagaactccacaagcatggtcccgtatgcttccagttcttcgaccggtattgagaggcggaagtcatttaagagcagaaattgaagctcgaggtggttcagctcagctagaggaaggcctccgacctgatgcgaaagttagctaaagaacaagaacgagcatagggaaagaactaccttagcgtatcgagaattggtgtagaatacatcagagaagaatttactagcgcaagttacgccagcaataactagtcggtgaatattgaagctgtcgacaacaaaaaagtgtgagagatagtcctctccttgcagcggattcatggccggggaaacaggtgacgtcgatgccgagtcttgtgctgtaatcccagcagagggcggcggagtcaccattggtgaggtatgagacctctgtgtgatagacgactccgaagatctaggtctgaatgcgacgtcagattgtaaggcatctgtacgattgtagcgaccgcgtaaacggtctaattgacctttattgaccatctcggtcatgcgatcgaagtacactagtagactgagaaagacttcataggtcgtggggcaatacttgtgaatcctggtgagatagctcaggatactaatactcggaacgtttttgccgtgaaatgcaagcacgctgtgcgcttgttggctcaaattgctcgacccatcgacagaagggatttgccgatggacctgctcatgatgagaatcgttggtagtggtaatcttggtcagaagccctgcaaccatttcgataatgtccgtgaccggcatggaactgatttcgaactggcgctcttgagcccagtgccccgatgctcgggtcctctgtggcggagctagaaactcctcgctggcgaagctctggatgtgggacaggtcgcggatcttaatacggctaggagaactggcttctgagccccccagcgatcggagggaccgtaacgttggccttagctgcggtgaggctggggaagaatggctcgccgtatgccggcctccaaagcctggtggcgcagtgcccgtctgccccccttgacccgatggaaccacagagggcgggttcatctgcgcagatgttggtataggggtcggcccaggcgtgactgtcgaagattccgaagaccgcgagctaggatgcgaggatgctctgatataagccgga

SEQ ID NO: 3633 - DNA, 7194 bp, Emericella nidulans
catgttccttcatggcttttataaggttggaattttaggcaggaaaatttgactggtcatcctcttcattaggcctcccgtttcttgtttaagcgtatggtcataccttaaaccgtgggatacctttcccaccgcaagccgcaggttaagagatcatgcgtctggcaattactcaccacatcaagcctaaaaggtccccaagttcgtcgcgcgaaaactgcgcgacactatccttatgctccatcacgcctatccgcaagcccgattttcgtcacctgccgttgccatatcttttcctctaaactgccctgcagaaggatacggtagatatggcagtgatgcttctggccatcccggtggatgcgcgccatggcttgaatgtccgtggcagggttccagtctacgtcaaagaggacgagccggctggcgccaatcaagtttaaaccggttcctccggcctttgcggagaggagaaatgcaaagcaagtgctcgctgggtggcggttaaagtcctcgacgagggctttggcgcttttgcgcaggagtggagccgtcaaggcggaggaaaggaagcgagagagagcttagaaggttggcgagaagatccagggttgaagtgtagtttgagacaagcacaaccttttcagaggttgatgtgcgtaggtagtggagtagctggtctaggacgcgaatcttagcactgcatgacggggagaagtgacgcagaaggttaggtggcaaggatgacaagatggcagcgatggtctcgctcggcttttcgttggcatcctttaatgaaagcagagatggactattgcacagtttcttgaggatcgtgatcagctgcagagcactttcggaattacccagggcgccctgaaagactggcgaagcaagcacgttctggtatatcttcgcctgcgtattggttggtttgcaaaaaagcacatattccgtcttcggaggcaggtaatctgcaaggatatcggccgttctccgcagcataaactgagatgttaattctcggagctcttcatttctggcctctcccttttcaatgtccttctcggtagcttcaggctgtctactcctcacgatcggaccctcgaactccttgatgaaggacttgaacgatcccaggacgcctggattgacaagatccactgcggcaaagaattctttcaagtcattttggataggtgtacccgagaggattattctcttcgtagcgtttaatgattggatagcttgcccgcttttgttctggagcgttttcaatcgatgcccttcgtctgcaatgacgatatcgacaccattaccacgcgccagcccctcttgcacagacctcagtttctcatagccgacgatcatgatgctataggcttttcccattgtaaagtcagtcaatcgcttcctcttatcatcaaaaacaaagaccccaatccgctcgtttccgagccatttccggaattctctcctccagttatttatcaatgtgaccgggcaaacaataagagctttcttaatcactggagcggcctcgtaaatcggattctgttttagtagagtccatagcagagtgatggtctgtaatgtctttcccaaacccatgtcgtcagctagaatcgcgccttcgccattgaatgatcgcatccccataacacactcatacaagaacttcacgccctcgcgctggtgcggccggagatgttttgccaaaataggatccacaacaacatccactatgcgctttcccttgggcgccgagcccggccgcttcattatcaatgccccaggctgcttaggatcatggcggggagtaggctcatctaacgaagcagctggcataaccgtgctctcgagtaaaggcctcttataagcccctgaaatagaccctcgacttgctaagttcgcggcctgactctccttaacccgggtctcggccagtcccggactaggtgctgatatttcggatcgagatatatctttctcccggctcatcagcacgggaacagacgtcttctttgatggtaatggccttgtaagcgatggcggcgtcggggcctcggttttagtcattaaagaccgcttcccagagagatactcttccttgggaatctccgtatcaatttcaacttcttttcctccgaccgaaagtatgacgcccggcttcaggacagaaccatacatcgcccggcccatagccctccccgagatatcctgcagatagacgtatccatctcgcactgagacaatcccgtcgccgtcccaaatcttgttcttttttgtggtgggtttccgcctatgagccagtagatgttagtccatacaattcctgagagtaaaatgaacatcgtgtaaatcagggttctgggttaccatagcacgttgaaatacctcgcctcaggcaaggatgagtctacatatgcacttccatcgccacttccgccgctagtaagggcagacgcctcgctaacattagtgacctgaatcaaaggtttcctctggttcgctaacgtagtacgcgtgttctcagtgttgcttgtatcctgggaaaacagtcgtggccgctttgcaggcgggccgtcatcggtttcgagaggctttatggatggtttttgggttggatcggcaggctgaggtggcttccttatcgagagcggcttgaagggcttaaagaccatgacgagaaatggtctttgaaatgttgacgtagcataagccttgttgaaagttcaagtggaagagactcgcgtcaggcgccatgggaacgcgtgttcacgtgactccaatttcgtatgcatacgattttcctgctaaatactggataattgatgaatctcattaagagtcagttgatcgaagatagatggtatagttatcgcatatatacaagaatcataacgattgacattataaggatcttataatccgctaaattccagacttcatctaaagcgccatgtgcagtaactattggtacattcactcttcctgcgcgatttgtatccgatttttgttttggtttttctttttctatttggcgtcctccgccagagccctgtcagtcaacgggacaaacttggggccctcgtatgaacccattctgaagaaccagttgatggccacgaagatagtcagaccgccggtcatcaagctagcgtagttcatggaagccgcatcggtgggcagagcgaaggggaaacagaagataaccacgaaggcgagaatgtaaatgcagctaaggacattgatgacgtatccaatattgcccatccagaagtagccacggacaaaggacgagcggcgagtgagaacatgggggaagatggcggcgaagtatgaaagagaagagagctggacgaagcagccaacgaaagcattgaaggctgtggtggaaccaacataaatacacgccaggattgtgataacgccgccgcaaacgagggtggcattgaaggggttgtgcatagtcgagttgatacggccagtccagttggggaagggagtcgctcggtcgcgggcaagagaccagagggtacggcccgcagtgatgtagcaaccggcgcagttgatgacggtagggaggaaggtgatgatcaggagaccaagaccgccgcccttggatccggtcgcctggcggtagagctcagcgagagggaaaggcgcggccagaacagactcgagatcgttgacggcgtaaaaaagcgtgatcatgtaaagcaaggcagagatgaagccgatactcatctgagcaaggacagccttggggatgtttctgctgggtttagggatctcttcggcgagatgggtcgagcagtcgggtgtaccgacagcgtaagcaccgttcagcataccggcgacgaaaacgaagccattgctagagtatccggtcgagttcgtccaggtccgccagacatcctcattcgtggcatacggcacgccattaacatggggcatgcaggcggcgacaatgatgacaatgagcacaccagagagaataaagaatccgcccaggttattcaactgcgggaggaaccggttcaaaaataggacgatcgagcagcagagccatgtacagatgatgaagctgacaaagacgtgccatgccttcatctcgaatccggggtgcatcagcgcatacatcgagaccgtctgctggccaagaatggcggatacagaagcgccaccaagcacccaagccaagcagttccaccagcccgcgaagaacccgcagacgcgaccatacttcccagcagtaatagaagcccagtgatagactagataagcaaatcagccaaagcgaaagaacgcagcggagcgaggaatcataccaccaccagcagacggcattcctgacgccagttcagcaattgatgcagccaccatccagtagcagaccgagacggcgataaattcgtaaataactccagacgggcctccattagaaagagcagtcgctatacttcctccctgggcaatccatgtgtttccagtcgtgatggcaagagcacagatactcagcagaccgtaattgcgttggagctcttgacggtggccggacgcattcacaggcacttccaccgaagaaccttgttcctccttggctgagtcgaccgcgggcatcttttctgctgcctcagccattattgggagggtgagaaacgaacgaaatcgaacggaataagatcagaaacgaacgtggttcgggacctgataagagtcggttcccggtggcgtaaggtatgattcaatgaattctgtaggggatgggatgcacgactgcgagcgtcaccgtccgtcctggcttcctcaataggaggctgatcagtaggaaaaagggagaagccctgcaccgtttgagcaagcgaggacgattatcgaagcaaggcgactgttaggggtttatactgttacaactactttcgccgacgactactcctaccatgcagcaagggaagcacaactccggtgcgggtcggggttctgagttgagccggctggcccgcatatgggacgctggaaaccgtccagatcagccaatcagcatcatgaaggctctgtccatggtggcgacccagacccaagtgggactttgcagaatgattattggtcgatggaaggaaaaggaatcggacacgctaagcctgaagagggagcttcagcagatgccagagccacgagtcttaccatttggtcttgagcaatgaaagatttgataacggaatccctttgatcgtgggtaaagagggaaaactgagcagatctatgggtacttgttattgtaccactgtccacaagacggttaccccagatcttctccgtatactgcattgggcaggcgttcacggcttagggaccctgaaggttggccccagacctgaggtctagagaattgtgtgcagttctgcaaggaaagataacataacggtgttcggggtgctgatgatagacggttcctgcaggtgatattaattaatgataatgacattatattatggcgaaaatttagcaggactagcactgaatcgggccaaactacccatgtacaaggtacgagtaagcgagtgcaggactctggaagccggcgtcggagcccgccgccagatagtccgtctacaatgcatatgttctatcctggcccccaactcaatctcgactcatgtctcagaataatcccagtagtcttccaggaccaggaatctgcaacaagcggcgcatggctcaaacctgccgggggtattcttatcctggttgcgcccgagacactgctaagaactttattagaactttattttatccctacagaggtcgggtcaaggaacgtgagatacgatgaactcacggaagcccagtccgatcggctcacaaccgccgctaacgcgcactcttgttctaaatgctatggagagccaagcgccaggcgccagattaaatcattattaattatgacatagatgttcaaattaaggatagcaagcaatatactaacgtgagtttgagacaaagacttcggctatgtccgagctcaattgtaagaaaaggctggaccttgtgttgtgtttgatatagatgataagaatggatctggaatgacaaattctgttttatctgctagtgtaactgagggaattattttactgctggacttcgcatgcaacgcgatgcaaagatttaaggtggcatttcgatgcgctagtcggcgaattgagtttttttgggcaaccttcttagattgattctggcagactaggccaattctccgattctagagccgaagtcaagccaccgggagatggagatgaagcttgggatgggtgcctaaaaaagggttgagtggcatgatcagattaaggaacatgactcaatggtttccagccttttttttaattgcaaagaaatgtgggatgaggaccgtacatgagacgagcagatcgccgtgcggataacatgcggatagcatgcggacagctaaccaagtctactcgcagaacatcggcatgcgaatggggtcgaccagagaatttgattgctcctaattggcctccagcctttcagccatcaaggttcttgttgaaccgttggagtgcaggcttcagctcgcctctattccggatcgacgctcgtggagccgaccaagccctgacgatggagacggacacgtaacaatcattagtactagccaggcttatacgttgtgattctgtagggagcaaagtacctcgtcggacctgctcaatatgataataaatataatatcaataactcgacagttgaaaaccagcgcctccagagtctagaattcgacaggcactgtaggccagattaccgacgggccaggggctggagtctgccggtggttgctggtggttagatcgacgccgcatgatcctggactcgactataggttgagacaccggctagtccaaccctgggttccaggcttgagaattggaaagcaaccaaggcaggtcttctcgagtactctggtcctcgaatcaaaaccgtgccctgaatccagagctgcggactggttgctgagtggtcctcgcgtgccgcggaaaggctggggttgaaagagaaaaagcaagcatccgtttgtctgcaccttccatcgcaacattccctgaatttgatcgattgcatgttcgtggtcatctggccatcaggccatgtgcctgaagtcgcaggccg

SEQ ID NO: 3634 - DNA, 10548 bp, Emericella nidulans
ggttttatccttggggtttccattccacttgtcgagaatgatagcattctcaggctgcagacgggcgtgctcctccttggtgtcgatcaagatgaccttggaaaggtcacggttgaggtaagaaagatcctgatgaaccatgttagccatatataaagccctttgcagcaagtttcagctgttacgtaccttgatgtattctccatccttgtacctggtggcttccctgaacaagggccaacggatgatgcggtaagggtcaagcttgcggagcacctgatcggccatcatgctaggcacgctggtaaagaggacgagttcgtagtactggttgagatagcgaaggaagtagtcgactccaggtcgtttggccacacgccatccatgttcacggctccattcgctgtggacaagcaaatcttccagactcaggactaatgtataaggttggcgaaggtttggatcttcgtcgggaagcagtttcgggaaagcagggtctttgtaatagcttgtaaagtcgcccattcgagccttgatgcgattataccaaagtccaaaactccagccggatgggacatcaggatgggcattttcctcctcaacggtatcccagtttcgcccgagataagccataccaccgacacttccaagcaagaacagtgcatacatcaatttggccatgcgggctcgtttgcggtcaagagacgattcgtaaccacccttggggatatcaccacggccatcatcgctgtaatcttcttcaaaccgcgagggatcttcggtcaagttcaatgttccggagccacttttcttcgagcgagcctccagttccgcggcgagggtggaagggataccctgtgtaagatcggggagcggtctctggggcgcatcttgttcggattgtgaaggggaagattccggcttgaggattctggtcagatcagcgtacccgataaatctcgaagccctaaacttacagagctggaagcctgtgatgtggtgtttgcggtgttggcttgaggatctgatgtcgtctcaaactctgcctgttccgcggcatattgctcttgttgggagggcttggcgggttgctcaggcttcgaggacttaacagattcggggagtttgtaaggagtcttaggcttggaacctttcgcgtaacatcgtgagtgtgagacaggaagggctgataggcggggagcggaaacgagaccgctcggcctcgttaaaggcaagatagcacggcgaagcatgctgtgatgaatggatagaagtcaagaaacaatatactcttgctctgcacaagaggaagtgtgagagcgttggcttaacgccgggatgactccgctcggagcaaatgaattcaaaagataagacaaagtggtatccgcgagtaaagctggaaacccgaggcaatggtcaaggatcgaggtctcgctgccaggaaaacctgaagttccatcatcgctttgaatgctacggcggggcaaacagaccacttgcgctgttccggccaagtataaaaattttgtcgcttgccgatttcttacatttttcttttccttttttctccaattatgaaagttgatcacccagtccacaaatttgacccaacaagccaatttctcatgcatgccgggttgtattagctggggagactgatatcccacacccaagagccgcagcgaagaaacttttgtgcagctgcagccccgttagtgggatacaaaactcacctatcttctcttggtgataaaagcggtgggattacacctgcttatcttctgagaacgtatcttcgtgttcattctcgacttcagcttaagttcaataatggcatgatatagaccatcaatcgcctagtgacggctttctctcatttcgtatcgtttctgcgtataccctctagatcgcaatttctcaaattatcacgatggccgacgacctcatagaacccttgcaaagagtacgtttcgcggatccgcctgccggagccaatgcatacaagctccgaaatgtagcggcaacagcgtacgactccgaagaagatgaagaagacgaagaatatccaactccaagcgagccatttcgcttctttgacttacccgccgagatccgcctacgcatttatcactttgcgctgtttacacctcggcgtcgcaacagacagacgaacggcaatgttggagcctcgtcgaggaacccatcccgttcccctcagtcggaccgaattgctctatttctcacttcgagacgagtgcatgatgaagcgtctgattatttctattcgacgcaagcttttcgtgtcttccacatccaagactattcgcgaatacctactatcagtggaatacccaccaaatatcgctcttctatcggcacgatcgagttgatacttggctctagctggaccgcgccgcctcgctcttggagggttacccgccaactagggttggaggagatgactcgcctccgactattgaaggtctttgttgagtgcgacccatctcatcctgtctttaacggcttccgcatctccaataacttctatcaagattttgccggcgggttgttgcggcagatccttgagagactgccacgcttggaatttgttgagtttgatggaaacccatctgtaatgaaaggcggggcgttgatgaagcgactactgcatgaagcaagaacagcgggcaaaaaaatcgtctggggcccccagcgagggtggacagattatgataaggaggatatgattgccgaaagagttgtctacgggttgcagagtacggctagaagacctccagtgacttatatcagggagagctcttccttgttccagggagtcgtgtagataccattttccaatcaaaaaatgacttgtatatagctttttacccctattggaatgaagatttcacgagtaatgaggttcgatccctaggtcgttgacagaacacgaccgtctgaatgcatttcgtcaagccaataaagatctgtagctatttttcatgcatatatctactatagttcctcgtccacatccatgccgacgccgttctgaggctctttgccgtccgcgccgttagactgccgtgccaccgaagcctccttatcaatcatttgccgcgagacagcatcgatgttgtcttcgatcaattgctggcttacatcctcgatgtctggacgcatttgttaagaaaccgtcctgacattgtgagtggtaggtatgatgacttacgcttcttggggtcaacctttccgacatatcttgtcttcagctggtccttagtgagctccgtctcctccttcactcgtttctcgtagccctcggccaagttaacgagctgcttcatgcggtcaacattgtgctgacattcgtcgtgaaagtcattcatctgcaacgcttcggtccagacttgcttgtgcaggttcattagcatgttctcctcaagccccgtcttgcggtagttgatgccaatgctgtagtagtgtctgtttaatccgtggatcagagcctggatagacggcttgttcaggtgacccaggttggaggtggtttgtcggggctcttgacccatgacaaccgtctggggctgaatgagacggaaggcgtcaatgacaaccttgcctttgacggactgaattgggtcgacgacgacagcgacagcgcgaggagtaagctgctcgaacgattgctgagtgttgatatcaacggaggagagccagcatccaaacccaggatgcgagtgataccaaccgacaacgggttccggtctgaatcatgcattctcagcacaatgctgtcaaatcttatggttatagcttaccgtccggtttgcctaagcatgtccatcatttttgtttggaatacagggtcaacagcttcgacactgacgcctgtaccgctctgaggcatcgcaaagacgtcggttactcgtactgtatattcatccacgaattcacccagcataagacccatgacttccatagggacacctgctcgaccgtgccttaacatcttcaagagcgcaagagatgagatgtgtacggtttcggagttatcaaggaggttcggagtatcctagtcatccgatatgaatattagtttatgctaacttggccataataagtctccggtttcaaagcagctgaacacagaatgcccagcaatctgaaaatgtacaaacaagcggaagacagcatatgagcacaactcacagcacctggagcagagccgttcatccccataccctgggcggcctggatcatcctagtgagtctatccattgctgctgatgatgatgatgtctaggggaaatataatgtccgaattctggagggcaaaggactacttcctcaacgggaagctccaaacggtttgtaagtgtcggcgcggcaccgagacgtaagccaaaggtggaatgtagatcagatcggtaaggaatttgaagttgaggatgagaaagcacaggaaaggaacacgaagatgagggaaagctatcgaatggggtgttagttaagacgccgtgtccgcgatgatccagacttgagctgcgcaggaccgcaggcacgagaggctgacgagggcggtgaacgtagctcatctgcgggcaccgcctttcgctcggcctctccttcgtttcctcccagccggagtagattctctccactccgacccatctcgttattccattttctccaatgtattctcattaatatctcttcctggtagagttttctgcctgcttgttccttacgagatttggcctcaaacctttagtcatttttctgttcccacgactttctcgcgttccaaggaaacttcgcgctttagagatcttcccactcgtcctgattgaggactaactgtcgccttaccctcgaacttaccaaaaataatggcttcgggaacgtcggggccggctgggcctccgctggatcccatcgaccttaatgtgtctggagatcgcagcaagagggttgcctacttctacgactcagatgtgggaaactatgcatatgtgtcggggcatcccatgaagccgcaccgtatcaggatgacgcacagcttggtaatgaactacagtctctacaagaaaatggaaatctacgtgagttttcgtccatttgtacctcgcataggaacgtactaatgctcaaccttcgcagcgtgcaaagcccgcctccaaattcgaaatgacccaatttcacaccgatgagtacatcgacttcctttctaaagttacacccgataatatggacgcattcgcgaaagaacagagcaaatacaatgttggtgatgactgccctgtgtttgacgggcttttcgagttctgcggcatcagtgctggcggtagcatggagggtgccgcccggctcaatcgtaacaagtgtgacattgctgtgaactgggctggtggccttcaccacgctaaaaagagcgaggctagtgggttttgctatgtgaacggtatgtcaaagctgttctgcggtttcaacagtacactgataaaacgttgtagatatcgttcttggcattctggagttgctccgcttcaagcagcgggttctgtatgtcgacattgatgtccatcacggcgatggtgttgaagaagcgttctacaccacagatcgcgtgatgactgtttcattccacaagtacggcgagtacttcccaggaacaggtgaattgcgcgatattggagttggacagggcaaatactatgccgtcaactttcctctccgcgacggcatcgatgatgtctcgtacaagagcattttcgagcccgtcatcaagagcgtgatggaatggtaccgtcccgaggcagttgttctccaatgcggcggtgacagtctctcgggtgatcgcctaggatgcttcaacctcagcatgcgaggccacgcgaactgtgtcaaatatgtaaaaagcttcaatctcccgacgttaattgtcggaggcggtggctataccatgcgcaacgttgctcgaacctgggcatttgagactggtatccttgtcggtgacaacctaggatctgagctcccttataacgactattacgaggtaagtacacatcctggtgtatcggtaaatatgcttacgcaagacagtactttgcaccggattacgagctggacgtccgcccgtcaaatatggataatgccaatacgagagaatatctagacaagattcgaacacaggtcgttgagaacctaaagcgaacagcttttgccccatccgtgcagatgaccgacgttcctcgcgaacctttggtagacggtatggacgacgaagccgaggccgccctcgacgatttggatgaagatgagaacaaggacaaacgctttacaaagcgacgctttgatcaatatgttgagaagcccggcgagctcagcgacagcgaggatgaagatgagaatgcggcgaacggagtcacccgcaaaccggctcacttaaaacgacgcaaccaggccaactaccgactagaccttgctgattctggagtcgaaagcggaatggctaccccacaggacgcttcatcggtggctgatgaggagatggacactggcacggatgtgaagataacagaagcgcccgggccggaacctgactctgaagcccagggaacatcgtcagcagccgagccaccatcaagggcgggaaatggatctgttgatgagccatctgagatgatcgtcgattcgaaagagccacccaggtctgttcctgtctcgcgccctgtctctcccaaaccaacagacgaggatacggctatggaggatgcagatatgcctgtgcctgaggtaaatcaggagaacacgccagaagcaagccaggcaacgcagaataagcccgcggaaggaacacctgcttcggagagcgccgtggctaagttaacgtcgcaaacaaaggcgtccttcgagagcaacgagggccggaagcagctagaaccagagacagtgaaggaggccggccttgcagcagtgacaaccgagactaaggacaagactcctgaagcacctcgagcgggggctctccccgcggtaaccgcggagcaagagacgaccaaacaaggggagcctagcgcagaagcacaacccgaagccgcaaaggagtgaggactagcgcagcaattttggtggcggcgttggtactcgggttcctggcgcaaagggtatggtgtttggaatttactaactggcattgactttttaaaggagggtcctttttcttcatattgtgctattgctttacatttgagctggtgatgaaataattcatgtattgcattatgattctgtcttgcagtataacgcgccgtctcatgctcgttgggctgggctgccctatagattagaaagcaagatgaaaccgatatttgtctggcatggttagagccaccgataagagatgtgattcttgtgcgtatagaccttgtaaataataatgctcactgcttgacaggttgattttactgtctgtccatctagcttagtagttgcgtatgagggtggttggatcaggtccgtacgaagctgacaaagcaggtcgacctcttcccgaagcagcaaagtcttagggcttaacaggtccactcaactcaaccaatgaagtggctaccgccaagattttgcaagcacacccgcactaagcgagaacactgagaaacccaagcggaaagccatccaacttgtctcgacctctcgtcgcctcccttctgtcgccaaacccgttatccgacaccgttaacgcgaatacatagccaagatgtcttccaagagagggtgagtttttttgaatttattcggttgtgcttgtggttgcgctgggacacctacgccgtgaacggttcgattattcggcttgcgtcaatacatggagagagaaacgatccgaggatattgaaatggaacaagatctggaagctttgtgcgggatcagataaagacgatgcgaaaaatgatcggcttcgattccttgcaacctgtactggactcgatatggactcaggattcgaaatttgagattttgctaggaaagcgtcacgtcttaagaaaaagtagctgaccaaacttttttgaatagtcgtggtgttgccggcaacaagctgaagatgacgctcggtctgccttggtatgttccagccatgaaaccaacccaatccgattcaatacaagctttaccccgaacatcaagcatcgaacgtcggatataatcaattcctcaaatcgctctaccctcacctacattcaccaatacacacgattacacttcgaaaaacaaggaaaagcaaagactaacattcgaacagcggcgccgtcctcaactgctgcgacaactcaggtgcccgaaacctctacatcatctccgtcaagggcattggtgcgcgtgggaaccgtttacccgccgccggggtcggtgacatggtcatggccaccgtcaagaagggaaagcccgagcttcgtaagaaggttatgcccgctgtcgttgtccgccagagcaagccctggcgccgacctgacggcatctacctctacttcgaggacaatgccggtgttgtatgtttcactcctacaggctcacatgcttcgccatatcggccataatttatctaggctattcaggtgaaaattgtctaacatgaaatccgtttagatcgtcaatgccaagggtgaaatgaagggttccgctattaccggccccgtcggtaaggaggctgctgagctttggcctgtaagttatcctatccccgtgtcatatattactggcaccctgctaatatgaaccttcctcagcgtattgcctccaactccggtgttgtcatgtaaacgggttacagcggggaaatgggatgtattagaacgaaataccagcgggctctttttaaaatgaaaaagattttgatactctctccatcctgctctctatttcctggcctgttgatgcgtttatgatcctacgcggcatcgccttgaatacattttccatatggccattcgacctaacaatcgaatgacggaatattgagagaatttccgaatggtgcccatcacacctgcttattgcatttgttcggcgtcattgtcaagacgtgggaacactgttgtctacggatccatatgcctgtagttatttacggtagttaagccaagatgccgaaacgtatcatttatttaatcatcctttccaacactctcactttccaacactttatcatacacgggaggtttatcattaataatgtacagtagaaagaaacagcaatccctatgtcaaagaatagaggtacagcctccgttaaatccagctcatcccgtcttcttatcctccccaacaaccgcgggcggtatcgaagacgagtcggtgccaaaacattcagatatacgcaccaaggcgtacaagaatccaacaataaacgtggtaaggtcaacgacatgaacagcccaccagatatgctgtacgccggcgggacacatggtgacagcgtacctccactccgaagcggcagtgtcaaaccacaatgacagaaggcctgcgttgccgccgtactcccccatcatggagcgaagggtgatttctcgaatagatggagatgatgagtcctggggtccggatgggtcgtagcgggttgtgttccacgtccagctctgttggccactctcagcctcgtcggggaaagagccttcattattctcgacaggtggctgctgtggttgtttctgtatagaatgaacgacatcacaccccgtatggtcatggcccgtcaagatgagcccgttcctcccccgcccacccgccggcgcgccctcgtccccagtcatcccaaaaattccctgcaggatcccgttggaactgacaaactcactgagatggttctgctcgcgcagcccgccagctttataccgctttttcccggattcatcgtttttctcaaagaaagtaaaataagggccatccgtgcagacaccctcaggtttatggagcgggagatgtgtcagcaggagcgtgaacgtgctccggtcttcgactgggtatgatcggtcaataatactgttgatataagcgtatccttgagtctgaatgtcctgagaataagctggtccatcgagtgtcaagctgtttagattgattaagtgtagcgacggcgttatattaccaatcgggggatgctgaaacctgatatcccagttcgcgcggccgaagacttcttcgaagcgcgagatgcgctgttcgctggcgtcccccgagtacccgatgtcgtggttgccgacaatgttgatgattcggtgtgcccatgacggcgagaatggtaacagctcatctactttcacttcatcactttcagatttagcgtaccccttctcgcccgtccgagtgagctcatcgtccacacgctctccgcccctgaacacacgacgccaataccgactccccctccgctgaaactcctcatccgtaacccactgactccctattagatcgcccaagacggtgacatgcgtcggcctcgtccaccaatgtaaagtgcgaaaaatatgcgcgaggtagta

SEQ ID NO: 3635 - DNA, 5061 bp, Emericella nidulans
gcacatcgcaggcatggagaatcgaatcaagtggctggagtccattgtacaacatagatgccccgatatcgacttaagctgcggccctggaagcgcacgagaatcactggacgatggaatgcagacggaaacggtcaatgaacccacagaaccttacaccagagattaccaccaagcatcgcatgacccccttcaggcaagcagaaacccacaaattgaggttagtccacgggttgtgattaccggggaccaggaagcttcacgcgcttgttcacaacctgcagtaaatgaggaatctcatcaagcgcacgagatcgggctcgtgtccctatctccaggaggtgagcgtcggtatatcggcccctccagtggctatttctttgcgaaacggattctcgataatgctggttgccgtggtggcccaaggatctcaacgactgccgccttagactctgctcatctgtctcttgagcttttaaataccccagccaatgccggttcagaagcaaagcacaattgaactaacgaccacgtgcttacaatcactttaacacctatacccactattacaaaaacagatgcatacggtcgccaccgaaccctattacgcatgacaggaaaagcaccctcttgaaacgtcccaacgtatatatggccgtgaccatgacttatattaatgtctaaagccactgcactgggcgaacatgtgcagaaccctatcgccctgcagatttacaggttcaagactatctatgcaaccacggaatcgtgatgtgcatccagagctctctgttcctgatggtatatgcattatacagtcccagctgcaataacgcatctggcacctcaataagcatgcctgccagcgggttgacctggggcttcagcgtgacgttcgagcttcttcaacattacaaatatcgatgttcgatcaagagatgcgaacgcgtatattctgggttgtttacacgttcgatcgaacaggatgcactatgatgggccgaccgattggcattagagacgaggcctgcgatataagggaggggccacccatacttaattaagcctggagctaactcttatgtctagtttcccctcgcgatatcggatcatgaccttatcaagattggcaaggatactcagacgtacggagagtcaactttccacatgtcgtactcaatccacctatttaagttagctcagttgaactcggagataaagtacatcatgcatagcatcaaccgcagcgttccagcttatgcgctcccagtcatccgagacattctaagctggcaacaagaaatggtccagtccttggacagctggttcgctgcaatccctccacaaccgcccggtgtcagcgcggagatagtgctcttatgcaaggcaaaatatcacgagacaatgattttgttattacggtcaagtcctgggattccaaacccgtctgacgcagtccttgacgaatgcttcaaccatgcccttggtctacttcgaaagttcagcgagctctacacgatagggagtctcctttacagccgactagctgtgcactcaatcttcgtcggtgccctggtaatgcttaattgcatatggaaactgccagcggcagccgcgagggtccctgtggacgagttgatctcgaacttcaataccacacagaatatcctcagtggcatcggcgagcactggtctgaggctatgagagcgcgcgattgcgtcaaagagctattcaccgagacgattcagaggctattgagaacgcagccaggtcaaccacagtcatctacgtcacagccattatactatcctatccacagaagtactggtcaagctgcgatagaagggcacgcagatgttcatggagccgcaattcacgtgactcatagcgagctaaatacgggtttcgatccatctgcttccaattctgagttctcaaacctgtttgatgatttcctgcagggcgattttatgggttatagcggaatgtctgatattgatgggctcatgtgggagatatttaacagcgctgcaccatgatacttggagattcatacacgctgacgacaaaccctaatttcgtgcggacgacaggcgcagtagactgggtacttgccttcactagactgaaagtgacttaccatgacctttcgggcaattttgaattgaaaaagaagagaggaaggccatgcgaccatgtaaagagttacgaccaccaccttctccacttacactctccgtcccatacgtatcaccctgccgcatgccgatatccctcgcatatgctgatgatagtcaattccatcgcgccatcgttgtccacagtcgccgctccttcttctcgctttggaaaggcagatattttgatcgcaattgtacgatagcgaggtggttttcatgatgctgaagcggtgcataatgagagagatcaatggggtgggtcaatgaaagaggtataattcggcctgtgggattcttcccgcattgaaagcaatatatacgacgtatataaataaaatggagtttggatatggtcgagatactagataggaggtcgagtttataccatgtaacgcagggtaaaatttcaatacactatgtattcagagagcccagcaacactccgctattaccccaaaaagcattatgagtagccacgcacctgcaggatatcgtatgtatgtagcctgccctaatatgcaccatattaccaatgtccaaggaaatgccaaacgtctgtgcaggaagagacacaagtatatcctaaagcacgggaaacagcaacgcgccaaatcagcatggagagaatagaacacgtgttatcttagaagcaattcggaaattggtgagttgcttcgaaggtaaatatgaacaagaattggaacaaatcaaggggtatatgtaaaatggtgttggcctggctgacgagggacgaaggtataaaagaaacagagaaggcaacttgaacataactcatagacatagggcaaaggaaaggcgtgatggtacatctgcaaccagaaaaggatccagtacggaataataatacaaaaaataaaaagtttccaatccagcgcctgtatatggtgggtatgatgaaaatatgaactttccaacacgcataaacgatgataaagcaaagggcagacgttcaaatcatattcataagtcttgtggtccgtcgttctgggaaacggcgggcgccaccaggtgcttgccctggtagtccgaggttgttcggagagggcgggggacgtccatatggagctggaccaggacctggtctgccgctacggccaggtccagggccgtacgggcctggcgggcctggaggacgaggcccacgacctcggcctcggccaggaccgggatatcctggcgggggtggtcggccgcgagaaggagggggcataggcatgccgggcccaggaggaccaagaggggatgaaggcatagttgggcggcggaagccgtggggagagacggaagcagcggcgcgcctggcatctcgctcgcagtaaacatagccgttccattcgtagtactcgccttggaggtcgatgttgcaggtacgacaacgaaggcagtcgaggtggaatttctgggtatcgccgggcccaggaccagtgcgttcgtttgtctcaaggtattcgccttcgataccttcgtgacatccagcgcaaatcgagccgttgcgttcgtggtagtgttgggcgcagtagggtcggtccttgagcacgtaaaagtcgtttgtttcgaaggggaggcggcattggaagcagacgaagcaggcgcggtgatagcggcctgtcaggcggccgtcagcggaggagatggacttgccaatgatcatctcgccgcagccacggcatggcccacgtggcttgggttgttgtgggcggggtgtgggttctgtagcagctcgcgctaagggtttttgctcttccacctcttctaagttctgggcgctttgaggactcaaggggctttgggggcttcggggcccttgcgaaatcttgctgttctgagagatttcagagactagagacaaatcgccacctttcgacagggccgggtctgtcggtgagtcagggctgaagttgttctcggggatgcgaggcggttcaagggccgtatgactttctgactggcttttatccaggttctctgttttcgccccagtttcgttccgagggtcttcaacgacgggacctagacgacttagatcggatggtttccgcctggacgagctgacgtcggattgaatgcttgatagggaagtgccacttctagtttctgagggtgacgaatcagaagaagttgaatcttccacaccctcatcgttaatgtccaaaccaagagcgcgagcaaagttagaaaccgatatagcgctgtcatcagtagcgtccgaattcttcctgcgcgtgtctccttgcccattcgggtccgaagggtttggctgtagatagtcggaagctgaaggtctgaaggctttatattcgaccttcgcagattcagccggtgtctccgaccgaaattcggactcgggaagatcgaggggtgggccgtatgtgctttgcgccggactgctaaagaataactcggcagatccgcgcgaactgctgaggcgttccgagttcgcagccgaagaaactcgtaaagggctggctgcaggtttatcgagcgcaccaccgaaatcaaatccgctgtggacttcgttctttccatccctctttgccgatatatctgacattgaggaatctgagaaaactgaatgataaaacggacggggtggagattgcggaattgggggtatatcttcctcatatctatacccagctaaagcgacactcccaaacgatggtcgccgactggagattgcggtcgatcttttcgagctgcggtcgccgtaccgggtgctcgctaaggacgttctatagctgctcctgctgtctacagaaacagtgtgtttatgcgcgaacgagacatcgtccttcggtaacggcggtggtggctgttcccatctctgttgagtggtaatgcgcgctatcggtggatggc

SEQ ID NO: 3636 - DNA, 2738 bp, Emericella nidulans
gcagcaatgatgatgtgcaccatctccacccaggattaccagttcattctgcctatggtatacatcacatctctagtcactggatccatctgctcgggctctctgcgttgcagggtgatgcacgaaagcggtgatgcattcgtctgactactggggtgcccacgagaggcagcacctgattggataaaatgcgcgccttagcatttgtactcctgctgaccggcaccagtataggcggcgtcgagtctcatctgcttggagcatacttgtcctcgcttggacttggctgggccatccggatttgcacctttactctacccaccgtgacctaacgcctaccaccgaccccgaagcctgtctcgatcatgaatcacatccggccattgaaagaactgcccttgctaatgctaaagccggctgggcgcttttctacctggggatatacctacccttcaactacatcatcgtgcaggcggaatacgaagggatgtctgccgcgctggccgggtatctcatcccgatcctcaacggcgccagtctcttcagccgcataatacccggcaaagccgccgacaagctcggcaggctgaacacgatgattgccatgtgtgcttttgcagggattatcgtgctggcgctgtggctaccggggacggggaatgcgcctattatcgctttttcggcgctgtaatggttcgcctccggttgcgtttatctcccttatcccccactgacggcgcaaatcagtgatatcagggagattggagtgcggtcgggcactctctggttgattattgcgattgcggcgttggtggccagtccaattggaggcgcgcttcaggcccggaatggaggtgcgtttgttggactgcagatctttgccggcgtggctatgctgcttgggacggcactttttgctgttgtggggtgggcacttgctggttggaatgtttttgctaaagtgtgatttcccaaggaagtgattgattgaagagctcgatagggctaggggtctgcatcgaaaatatcgacggttttgcccgtgacgccgggagacttctctagtccgcaacagacgagattggctatattgatgtagcaatgatgagaaaatcagggcctaaacatgtgcatcgttgctgaaagggtccatctggcccagtattttgctatcatttgttgccgaaccgccgcaggaattcgtcctcgatggattaactggccggtctcggcagtaatcgccagattactctgcattgttagcttattccttcttgactctggtcgttgattagttggaaaaaccgggccgagtctagatctgaccagcagaggatatggaatctatccaccgtcagctcggagcagcatcatatcacagggtgcaccctcaagagaaacatcatggcgctaggtaggcctcctgttggttatgggtgttatcctagactggtaagactcccaccaaagaatggataaggcgactgctaaggtaatggtgaatcctgcaggaatgagctcctgttctgggtgacatcggaaatcaacagtccgttacttaatacgcgttctttattattgtatctagaaatctccatacttaggagatttagacagcgtgggttcacatgtaattgatacgatgggacctgtccacaatctgacgacatgcaaccctatcaatcgtctttcgccctccacaggtagcacaacaccacccagtctgaattccctaaagccaatctaccaaaaatgatccccatcttccaggtccagggaaaatcaaagtccagacctgctcccctcttcctcatacacgccatatcaggtttggccttgccctacaactcattcggcacccttgacttccgcggacgagccatctacgcgatcggatctcccctcaacgggccccgccggtaccggctgccatcatcaattgacgatgtcgctcgccaatacattcgcttcgtgctcagcaagcaggccacgggtccctatctactcggcggctgttcatttggcggcttggtggcactgaaaatggccgagatgctcagcgcacagggggagactatcctccagatcatttgaattgatacgcaaaatcccattgcccgtccggcctggggttgtgagggccaggagggactggcggtgctcacgtacaatgccattgcacagagagcggggcagccgatcctggacgcccggcagtctacgccctccagagaagatgcaaatgcaaaagagaacaaaggggatgagtcgacggccatgtgggaaaagatgtacaagcatatctacaacgtgctggcgctcgtgaagcgggccgcaaacggcgagttcgtttccgctctgagggaggtcaaggttgactttatcaagtgctcagttctggaagtacctcccgcaggaataatcacggagcccagtaggaagttctatctcgatcgctacgagaatgagtacatgggctggcagcctgggcagtttgccggctgggaagggcactctatagacgcggagcacgatagtgtgtctgatgctgagttgttgaagaaccctgaatcgaaggcgccaaggtcttgatcaagaaagtagacatattgggcatttgtctggaaagttagtgaggatgataatcagagaaaggatggcatgcactaataccgttcccttattcttaccatccgggtggtagaagctatcaacgctgaatctggtttctggcatct

SEQ ID NO: 3637 - DNA, 5199 bp, Emericella nidulans
tgcggtatgagccaaggccgagcgatccatcaggttgatcggccgggacatgttgtgctggatctttacggcagcagcagcggctctctggaacgactcggagatcacggttgggtgaataccctttccaagtaggcgctcggcagcacccagcaagcttcccgcaatcacgaccactgacgtcgttccatctccagcttcaacatcctgagccgcactgaggtcgacaagcatgcgagcagcggggtgcataacgctcatatctctcagcattgtgtttccgtcgttagtctgcgggggcggttagtgtcgcacttcggggggagatggaggaggcattcgtacgataatggtgtttcctttgggagtttggatctgaaaatgctttagcgcctgctcattcatagcaaacataaaacctaccatcttgtccattcccctgggtcccagtgactgtatagcgaattagcccctcatccttacagttcgtctgcacgcataccgttctgatcgcgtcggcgacagctgcacctcattagcaccacccttgaattagtgttacagtgtaacgcacctctggcagcgagaatgttggacgcccgcacggccatgggcttctccttgtcctgcacgatatcagatttggcccacagtaaattcccctctgcatcgacgaaccttgaaggcggtgctgctaggagcagcatggggagcagcagtagccatggtgtattaagctatgatgcagacaccgtagcgtataaaaacggggaaaagagaagggttgatttggataggtgatcaagtctggtccagagcggctcttgaaattcttccaggctgcgggtttgcaggttgggcggtgttgctgtccggggcttggcggccactagcgtcaacagctcaagctggacctgaagtcagaacagccagctctcgacatcatcctaccccaacttgcaccttattcatcttatttcattcatccctttttccttacaaaaacctccacttgccagtacttgctcacgctctcatctccggttgctaatctcgtctaatccgttctctcgccacaacctttcaccatgccttccgccacgggagagaactgggagaagtacaagaagaactttgccgatgacgaagagcccgagaagaagatcactcctcttacagatgagtatgtcgctcgatagatcccaacttccggcgcagtgtcgtgctttgaggtcggtcgctgacagacgcagggacattgcagtacttaagacctacggcgcggctccgtacgcgaacgcattaaaaaagctagagaagcagatcaaagaacggcaagcgagcgtgaatgagaagattggcgtcaaggttcgctttgacaggacatttttgcgacgacaggacgctgacgtgtctaggaatccgacactggtctcgcaccaccacatttatgggacgttgctgcggacaggcaacgcatggcagaggagcagccgctgcaggttgctcgttgcacgaagatcatccaagacgagaaggattcagacaagagcaaatatgtgatcaatgtcaagcagattgccaaatttgtggtcaacctgggggagcgagtgagtcctaccgatattgaggagggtatgcgagttgggtacgttcgtcttctactatctagacttatcccacactgaccgacttagtgtcgaccggaacaagtaccagattatgttgccgttgccgcccaagattgaccctagcgttacgatgatgactgtcgaagataagcccgatgttacatatggagatgttggaggctgcaaggagcaaatcgagaaactacgagaatgcgcgggaatagcattgacatctccagaatggagatgtgcttccctatgcatgtccgagagccgaggccgaactgtccagtaggttagtccttgatacttgcttaccgtctgaaggagtttatggcagcataccggcatatacatgtcattcatgaccttccacttctctggatcttccttttgagcctcaatccacctctctggctggaaggcctctgcatcctcaaacacggtgtcatcataatgcggtacccatgcgttaacccccacgactgtcccttctgggaagaaatatcctgcgatctccgcgccaccggctggaacgacacgccaaaagggcagcccagttgcgctgtgcattcggagcgcctctttcatgacagcctggaagtacggcatctcctggctttctttgaacgtcacgcggtcgctgcatttgccttgtactgtaaactcatcgatttcgtttcgaagcttgtctagaacatccggattgcggagaaggtagtacatgatggaggaaagacttatagctgttgtatccgagccagcgataacatttgacagacccatcatgaaaacgtggtagtccgtcaccttctcagggtctttgtctcttgccaggatcattttctcaaggaacgtttgggtcttcaggggaccgtgctcgacgtcgctctgtggtttctgcaaactgtgccgggcgatcttctgctggacataccgcattatatatgcgcggccgcctgcgccagaccagctgaatctgctgagcggcccgaacagcaacggatgccactcatggtagatgccgatcagcgagctgtaggccataaggttctgcagggcgccgatggttccgtcaatatcttggcccttgtcgagaaagcctaactatctgtcagcatatatccatatatagtagcaatgatagaaggtaaccaaccgaaacgctctccgtaagtaatctctccaataacgtcaaacgcatagaactgaaaccactctcccagattgaacttgacgtctcggtccgcaaactcgcccagccggtcgaagaagacatccgcacactggtccacgaactcctcgtagtgcactagcgagctcatcgagtagagactcgagaacctctttctcgtctcgcctgccgcgacgagtacatcagcacgcccgttccaccagacatccaaagcaatcaatcagcacaagacaacaaaataagcataccatgtctcttgatatctctatccggaaacagcgtccagcgctgcggatcaggatgcttccagccttcataccatgctgactttgcaaacttggtaccggaaccgtagatcgtcttcagtgcggcgtggtcgttgatactgtagtggtctggcgcaatgcggacaacagggccgtactgcttatgaaggttgacattgtcttcttcgaagtggccattccataaccggcgaaaataccaaaggcgcgtgaagcgggcccagaacgggccagggatggagtagagggtgcgtgttctgtagattgtgtaaagaagggtagccagatagcgggctataaggaagaggggagggagaaggaggaaagcgaggaggtgcattctgggaaagtatattgatttatcgatcctgtatgcctgatatgggtaccaagttgtattttataagcaggcttgggtaagcacgagctctgggtgtgtctgatactgtcagcgttgccggagtaagcgtatgcagatcaaccccgcccccaccgccactgcggagatcataacgatcgggatgcggagtaaaacatataaaagcttactagaggactgtgtgcagtgtacagtttctacggagtatacattggctgtgtgtgtcgggaagtggagggagaattgagctaaggatatgacaggaatgagatcatattcccaacaatctgacgtctcgctaaccagtaacaccatatccatatttcttagtagagtacaaatagaacattatcataagagttgctcagaacagcgtgcactgagtggagcgcctgaaaactgagtgccatatagagttcaggccattccaattacactagtgggtgggaagcagccacgctagccctccggcaaagtcggcaccgacacgcttatccaccttttaaggacggcgatcgccccagagtccaacaatgcccatcgacaacgcaaggccggcaaacaccgccctgacaccctgtaggcggcgctccgtctccatttccctccgcacaagcctccccgttgatatcacctttctcctcggcctcaacgacaacaatgtcgtcttccttcttctgagacttcttgcccagtagacatgaatatcccgtatcattcacgacactgcacacccaagccttaaagccactctgtcggtggaaccagtagtcgacgccgtaggtgccaaccgtagacatcagcgtcatccagagcaagtatggatgttttctgtgtcgtggcgagatgctgtacgcgaggaggaggcagatgttggagatgttggcgaggcgcaggcgtgcttacggttaaggcgcttgacttcggccagggacttggacgcatttgtcgaagtagagaggagactgagggagggaacggcgatagtagacgcggagtatgagaggccctagatgcttttagcgatggatttcacggggtctgagttgagcatactgttaacaggccgagggagatggtcccgacgaatttggagacggtgatcgggcaggccatggcgggccaaactgcggctgggcgcaaagacggattctagctattatcctgagttgtatgtatcgaattggagatgggcgagagtcgctagttgtagttgcgtatataaggctgatgggagaagacagaaggacggtgcctggcctgatctttagttttcgatgttttagaagtttggtgacgtctttgaaacctgaggcagtaaggcaatcaacttcacaaacgaatcagagcagcggatttgtcaaatcatttgcgctccctctaggccagcgggaacagtaatggcatgtaataattgatagatagaccaagtaaaaactagctagcacacaagttataatcatataaaacaagatctgaatggtacctgtatctagtttgagtattggcgcgttgaattgtgcatcacggttatgcaaattatacgatttactgataagcatcgactagcccgattcgggtatacccgaggctccgataaccgcggcagaagacgaggagaagcgagctgtcagcttcaactcttttcaggtttatgcccatcctacacttgcctcatactcattccttttgatttctgtgaccctgcag

SEQ ID NO: 3638 - DNA, 3443 bp, Emericella nidulans
ctagtaaaagtcccaagaccgggtccggtgcacggatttgtggccgatgatacctctatagttttgtctatggctttatggcactttcttttgaggggtccaaagagggccggggtgggatggggggtcgaaggaagtggaagatggccatacattcctataaaggcccgtccttgtcagggcatttgtctggagtcagtcctgaaggcaagagcaaagcattgcgctgccacttctgatatatcagtttttaccatatttcctagtctgactcgtgctctccgtcgaatcgttgccttgtaaaaatgcgccttacgtctttgtttccagccttgagtctggcagctgagcttgccagtgctgcctatgtgctgcaggacgactacagccccgatgtgtttttcgacaagtttacattctttacagatgctgatccgacccacggccatgtcgactacgttgatcgaggcacggcgcagagcgcaggcctaatctcctcaggctcttccgtctacatgggcgttgaccacaccaacatcgccagctcgggccgccaaagcgtgcgtctttcaagcacgcagacctaccaccacggcctcttcatcatcgacctttcacacatgcctacaggctgcggtacctggccggccttgtaagtccatccgacactaacctatcaaatccatttcaacagaaacaagggcactgatagactacagctggattctcggcccggactggcccaacggcggtgagattgacgttattgaaaacgtcaacgtcgcaacgaacaaccacatgaccttgcacaccagtgatggctgcacaatcgactcttccggtttcacaggaaccctgctcacctcaaactgcttcgtcaatgctcccggccaagccaacaatgccggctgcggcattcaatcccccgacagcaactcctacggcgctgggttcaattccaactccggcggcgtctatgccaccgaatggacgagtgaccatatctcaatttggtttttcccgcgcagttctattccctctgatatcacggctgggaatccagatccgagtacatggggcacacctgcagcacgatttgcagggaactgcgacattgagtcccacttcacagatatgcagattatctttgatatcacgttttgcggggactgggcagggaatgtctgggaaagcagtacttgcgcttcgttgggtagctgcactgattatgtgtcgaacaatccagaggcatttgcggatgcttactgggatattaattctcttagggtttatcaggattcggcggctgcgaagagggatgagattgaggggcgggagaagacaagtgctaaaggttttccgaggaagtcgatgagggcgaggagagacgctggattatagctctgagatgaaaggacattatctttcaagtatatattagcacatacctggttagtttgaggtcctgtgggggttgtgtttttggaggatttgctgggatctggagactgtacatattttgagttaccgagaagggaacacggaccaatgtttatggtaaatttaaacgcagcggtaggtcgtatcgggatacatgatatattcaactaagcaaatgcaccaacgaatgccattaaaagagcgccagcggcaactgctatacacgcttccaagcgtcgccggccccgtagaatcacgtaactttcttcactcaagaaatcctcggccaagagctctaccaagccggcaaatagcaatagtccactgctgatcgcgttcgtgattcccaccatgagaagaccagtagcactggctgggtcatagaaattatgaagaactagaccaatggcttgaccgatgggggttgtagtcccataggctagggacattagccatggcttcattgatgacggaggaaagagatccgggattagagacgcaatccgagagcctaaagcgaaaccctcaaatgtctgatggaagcagatggcgactagaagaacaatgaaagaggtgcccgtggcaacgctgacagccattccgataaagatactatggaaaagtataccagcctcaaggaggagacattgcaagagctgacggtgggggttttgcaacgtcattttggggtctgtattgtcatccatgttagggccagaagagacttgtgctggatagcgggaactcaagttggcgcgaacaaccggattcctgccttctccaagtgcaggaagagcgccattcttaataaaattcgttgaagacctgtccaggctagattcttctgttgagttccttggcatgttcatggacgcagagctctcacgcattgccgaaaggtgaatatcgtctactgattcacttgcctcgagcctcgagtagtctgaatcgcgatcgccattggcgttcgcttcactaattaattgatcatactcgcttccatggacatggcccgcgcctttcatggcaaaaaacatctccaccagaacgacgccaaagaccgagatcatggccacaaagccaggcatggcacggtaagtctcgctccagaattggggaaggcatggatcggttaaggaaacaaatgccgttgggagtaaatgaacgaaagccgtagcaatcagcacgcccgtcccaaagtgtcttgataagaatagaaatcgccggggaataggaagccgcggaaaccggcgagcgaggatggggaatgaacaggctttgataatgagtccaaatagtcatgaccaatgagtgaaagacatacccagcgtgcttagcactaagatgagaaatagcgccatgacatggagcgaagtgttatacgcgccttgtttgatcgatccgcatgaagatttgccatcgctcgaatcccgataaatgtttcgtcggtgttgctcctcttggggaagaacgacattcggtatccccaagagcgctggggtactaacttgtgactctatggaagcttaggatcgtaccactgaagctggtgagggtagcccttgcacttacttggatactccatattcgcatggccttgtttgtgttcgatctttggacctttaggctttggacatatcaataaccgtaagcggctttctggccaaagtgtgcaaatttgtgtgactaggaggagtgctagctcatgaaaccaacaactatagccaagtgtttaagtcacttgagcgtctaagcaagccaaggacaaatcgcattgctgcaaagaaaaaaattgttctgaccgagcgaagtccaatgctgttgagaacacacgttgttcaaagtcgttatcttatcgatctacttaatctagcttaataagcatcctgctccgagccaatctttctaaccaaaaattgctggtgagcccgtcaaaaacacaatgattagtcccacgacacacaaacgtgactctgagctaggcagcgtttataaacaatgct

SEQ ID NO: 3639 - DNA, 2161 bp, Emericella nidulans
ttcgctcagtgatgcgagtttcacctgttcatatttccattattcttcttcgccgaaccacgcatatttctgaattcttatttctctcaaattctacgggcggcatggtgtatttctgtggtatagcacgctcggcgttagggcagctgtttttactggggaattctgttttttattagacgccggaaaccgtactgggggttgcatttgtttctcacggtctccaatcgatcgcacagcagcaaatatcacaaagctaaaaagggcgacggaacgcattttcatggagcagctcactcttccccttttttttctcttttgcctcactccttcgtcccctcgactccatcgtcccctcacgtgcacgcgattataccgttttcttccctgtcaccatcatgtctgtatattggaaatcgtcctggtctgacgatttgtccaggttgacattgacaccaacagcattccatttggactttgaagacatttgcgtattatatcccgaaccaagcggttatttatttatcctagcaaagcacataaaaaaataaataaatgtttattactactcagtttccatctaagcaaacccattcttaacatagcttcacttgaacagagacgtataggtagctgaagtgctagacgggactggtacgcatgccatgcacaccgtacttttgcacattcagcacaatagaccacggtacttgatacgaaggacttaacgtacataaattctccgactcggtctcttcaagtctcctcccatacatacatacaaccagcctatagatgcagagttcagtatggagtacagagtacctgtcaaaagacgaaccgaaacgccacagcccacaatcacaatcccatttttgaaaccatccagccagccgccagccaccattcagcccattggccaaattttgctgatggaagatatccgtcgacgctttacgcctaaggattcagaaatccttctccggcatgaggtatcttactgtactgagtacggagtgccaagtgctaaggtactttgactagtatgtacaggaacatagctggggctactgtagagcccggctacgctgacagagcttgtacactcgaccatattacctaggcttaggctaagatgaaggctcgaaataatacgtttactctgtgcctctctttttgtggtgcttattgatcaaaccgttgtattagggaaatattcggcggagaaaacaccgagagattgttttgatattcaggctttaaaaaataatggttggtcttttatacctcatgcaaggaaaggaatgagattgtttattctacgtcacatacataccccaaaatcatcctttaataacctctttcaaaccagcaagcaatgtttcctctgctcggatcaactcagagaccgcagatatcgataaagaagaataatagacctaagatactggttgattgatggttgaacagcttgtttggggggagttccccttcagatgtcaggtcacgtataacatggactgcctacctatctcttgtttgggagagtgaacatgataggcaagttaaagggagggaccgactaagagatgcaggtttcgcgcggtctttcgtttgcacaagccgcatacgtcatttgtgttcttgactagtgtagattagcatccaaaactatatcgatccaaaacgatgggtggcacatcgcaggcctcttccggtggaagtcgtaagctacccagcgcattcgtctatgaaccgctgagatcgaccgacacagagaagtttacgtctcggtagcaaccgatttgagccgtcgggtcaagtaagtcacacctctcgccaaacggtatacagatatactacatggaactatgaatttcaactttctttaagccactgtcggactgagatctaaactcgagctaaggcgacaacaaacgccaggtggcacaaaagaggtaggaccaagacaaatttcataacatagtcaaggcttgggaatgggaagcgatccgatgggggagggtggtaagggaaaggtattctttgagacgaggtaataggcaaaatgtaaattaaaagcgaccaacggaatatatgaatcgacgtgccgcggatggagcaaccgatcaccagccatgctgtcatcgtaggaagaaag

SEQ ID NO: 3640 - DNA, 6833 bp, Emericella nidulans
ggggtaaacaaactagcgttattgaatatgaaaaatatatcaaaatgtcctttaacaattcaaccccagggcgttatatgtcatattgtcaaaacccattctccaattgaacccctagggcacccctaggggtcctcatgaaagctcaaagccagtcccattcaagttggcggaataaaatggcgcattggtttccactggacggtttccaagggccattatcgtaaatcctaaaccggcgcaatgttggataaggtctggataacttgaaccgattggtcaccgatccggataacctgcgaatcgccttgatgcgatcccacgaattccactccaccaccgagatacaccagaacagaggctcgagatgtgtttccgagactgtgtaattcccatcgttctacttcagaattccgtagaacaagcatcaagaagaataatctcccgtagtcatccgctagcaaccatctctggctatcgacctgctcccaggccacgaaaattgtcgcttcttcaagaggttgtgatacgatttcattgttgtccgcatcaacgtatttgattgacgtttcacccagtataaggaggccacctgcggcggctattagcaaactccagatagagcctaactacagacaaactcaccgagtggagcaggaactggtatgagatgggatgccccaaggtccagttcctgcgcataatccgcaatgcttgtaaattcagactcagcacctgccgcggtgctgtacttcaactcacggaccttgagtttgacctttttctggttgtcctcgtacaatagcgccaaccgcggcgaaccagcttgcacatgcaagaaagcggacgagcgcacgaaaagctcatcaatccgagtaatgatcggttcacccagctctccaattcgcggagcatcgggaccagtaggcaaagcgacctgtcgccctctcctcttgctcggcagttgtataataggtattaccacgatcatgccatcgtagatctccagcgtcatgaaccggccgcttggatcgatcatgcaccggctccccgttcgtgcatcgcgggaagacggatctgcgatatcgacataatccctctccgtcctgacttggttccgtgcactatcccaggagagtgtgaagtatgagtagcgatccgtaccgacgaagaggtggtctgtcggcgagtttgcgggtgcggggagacatgctagcatcgttactctggcgaatatcgagcatgatgtaacgagggcgagcccatcgggtgtgacggagtagaattcgagttgatttgcttttctgtagaatatcaaagtgtcagcaaagaacctctaatctgcggctccagagttctcatcgcgagattctgggtacgtacgcaactactaggcactcgtcctcagcgttcaagaaatgcagcttcaatgcatgccgaatgctgctggcgcgatgaattggcgcaatgtacgacatctttctaaaaggaaagtgtccggatcccaacgttgcgtttcagggtcacctgcggggaagcacgcttatcccaaaaacaggaaggagaagctgctcggaagtgaaagtcgacctcaagaaagcatctataattgcaccgtcctggatcgggaggcgctaagattggggcagataggacacggtcgaaggaactgtggtagagaaagatgagaggtctcgaatatgcagaagttccctgggcgggcgtttatgcagaaattcgatgacgctcgctgcggactcctggtcttaactccgcgccagcctatttagacatttcaattcatatattgatcattacgaataactcaactgaacaatcttggaacttgaaaataaagagaagtcttaatagatgactaagctgtgcataaagtattaataatgatacttgactccgagaaatagagttgcgatcgtagggacattctgtcccttaacagcattcgtcataccgtctatcacgttcatacagtgtcagaactccttttgcggtggtcaaccgtgagaggggtagtagtaaagcactaggcatacatgaaccgcgccgagataaccaaaaaaaacgggagtatatgtgcaaaaatcagtcaggctgaaaacagaatttaacatagtcatgacgagtgaatggtggaaggagaggcgaatcatgaccagacatcctcctggtagctgccactgctacgcatatgcttcaccatctcctctcccttctcggcgggcagaccacgctgagccgcgataatttgacctagcacaaggttaacctcgcgagccatgttcgcagcgtcaccgcaaacatagaatgtcgccttttgcttgagcagatcactgacaagctcggcatgttccttaagccggtgctggacgtaaaccttcttctccgattcgcgggagaaggcagtgataatcttcaggctgtcaccaagttggtcctggaaaacctatagcaaacatcgttgttagaacggctcaaggaaaaaattcctcgtttcaagattacataccttccattcatccttgtataggaaatcttcgtcgcgcttgcggcagccaaagaacaagacagttggaccaaccttctcaccacgggcagccagagcagctcgttcttgaatgaaaccacggaaaggagcgacgccagtaccgggaccaatcatgatgataggacgcgaaggatcagaaggcagcttgaagttggaatgtctgacatgaacgggaacatgaataccatcgtacttgttgcgcgggccgttaatcgcatacgtctggccatgagggtcaggcgaagggtcaccgttttgcttctgcttcagtgcaaggagatagttcgtagtcacgcctttaacaatatgggtagccccgggcaagcgggtagactccacaactgcggtgatgctaatcttgtccttttggacgagagaagacgaggagatcgagtaataacgaggctggatcttgttcaaaccctcaatgagcagggagaacgggacattggagaaaggcttagaggtgatgctctgcagagcctgagcgatgttgaaacactgattggtgatcttttcatggaagtaatccttatcgctacccaggcgtacaatttccgtcttagtctcctcatcgggggcaaaagcagccagagtcgagacgaactgacgagaaacaggagcacagacttccatgtagtaacggacggcggcatcataggtggtaggcgtagggataggaactttggcggtaacatcgattcccttaatattgatgaccgagtgacgcttctcctcaagaccaaagacattcaggaaccgatccacctctgcgcctgcgttggtgggccaaatggcaatatggtctccagtttgataagtgaggttggttccagcgatgctaatttccatgtgcaagcagttgcggtctttgacggtgaacagctcacgagattcaacaatgggtgcgatgtaggggttgtgcgcagagtaaggaccgtttggttggccttcaagatgtcccttggtaggctcaccgaggtaaacggagttgtcctctggggtcaatgattcgtcttccgtaacacagaaaaccggttcataagaggcctcgcgctcctgcaagttcatagcctcagaaagcgcagcccacataggttccttccatgccaagaagtcttcttccattgtaccagcgccatcatcaccctctccagcggagccaattcgttgcgcaccgagtttagtcaaggcagcgtccacttggcgaaccatggcgttgtagtgctcatacgtgttattacccagaccgaaagcgacatacttgagggaggacagcggcttatcctcagcggagccaccaccctcgaaactcacgtcgtcgccagtgatgaactgatagaattcgacagcgttatcggtaggctcaccctctccataagtagccagaacaaaaaacgcaaccttgtcttcgggaaactggtccagattctcgtagtcgtactcttcgatgtcggccaccattgtcttgaggccgaatcgctgagatccttcctttgccaatctcgaggcatagtcctctgccgttccagtttgggatccgtaaaagataacacagtttttgccagtttcgtccattttctcaattatgttgcgagacttgccagccttggccacgccgttcatggccggtccggaagacgcatagggatctttagcgacagcccagaaggtgcccttggtgaagtaggcaatgctacccgccaagagcaccgcgaggacaacgacatcaagagtatcgagttgtgccatgatgcagctcgtctgcgacggccgcaggaactgaccgaaataccgctcgagctaagagaggggcggttaagaacacgacccctatcgctggaccacgctttgccaaaagcagtgcctggttccaatgccgagaggaaaagagggatgaagagagggagaagaaatcaaaggcaagcctgaagagagagaaaaggccacgcagaaggtaagaaagcggagagagagtcggagtccaggtgggcgttcttaagtggcccgcataagacgattcggaagacggaaagtcaatgggatgcttgtgatggggccaaaagttatgactgaaatctaaggcaccaaaagggaccactctcaccgagaaacggcccctgctgtcagtgtatcaagggggtgaccgtgatgaaaagtgcgtgtacttggtggggccctgaccgacacctcgttctgggctgatgctctcagataaaggataagaaagtgctaagatattctgttgtaatttacacttggacaacagacgcaatacccggcgatatatatgcagttgcagtcccccgcgctggccggtgcctgtccgggctgaagtatgacttcggaagagaagttcggacttgcctcagggaaaactggaggtggcggcggagcgggtgctgccaccaaagcgctttgagagcatagacccaagaacggagacgacaacacccatgattctggggcttcatacggggaaatctcccgaacgggctgccgagcacactttctagccgaattccgccttttgagtcctccagctaccatgtttacgactcttaggccacgaggcgaattgccgcaattgagcccttgtctgagttcttctgatgatactggtctgtaccctgataagacgctgcggaccttgaacagccgaccgcgatgctgatcgttaccggcatgtgaccttgagatatgcgctcgcaagggcgtgacagtcactggcaggaatactttgcgccagttcgataaccctggaacactacctgttcctgaagttttttttattccgctctcgcacgttgtttgatagacgaggggaattccagtgtggctgcatggtggtatccttgctggttcagaggacggacaaattccgcacaattccagtccaaacctagcgtacagtacattgtgaagcacgatgacggcgatagaaacacattccgcggaaagattgatcaagattgatcgactaaaaattgaataaggtgaaaatagtattgcctggcgtggctctttccactatttcagtgctgtgtcagatctctaaagtgtgagatatataattgatcacagcagtgaccctgaggaacctcccaaggtttgcgaggttcagacgcaaattgaactgagtatcaaggctatctaagggccagaaaaggaccaatccgcattgcagtaggattttccttcgacaaaccactcgtccgtaaaaaaaggccatttgaggctgttgatgtgatacccaaacttgattgcactgcatctcaaaactaaaagctgcagacttcgggtttattcaaccatttattgagacgaagcctttatgcttacaatgccgactgccttagcctcgttgaagtctgctgtgtaccgcttcatcgccctgttgagcaacgggatgccataaatcacagtgagtttgctgttgggactccaatatatatagtgttctgtttggatatggacaaaagcaatcaataaacgttgcgttagccccagtcagccgtcaatcgagttcgagctcccgaaccttatgggagacgactttcgaattggactcccagagacggttagagaggatcattaagcacacagatgtgctggactatcgctcgatgctcgagaggacggctgcatgcgcgtacctataatttcaatgcatcagccaaagaccatatgctgggctgaactgtcctactgaagaaagtagctcgaattggccgggtgtttaccttaagtcgtagatatcaaaagtccaatcccggaaccaagataacccagtgctaacctacctactattctcttcattcactttgaggaaattgagctacggccagctcaagcttttgggcatcgcatcttagattgggataagccgaggaactcaggcaccagtggccagctccattgaagtagttgtggaccgtggaagcttgggttatcgcattcaaggcaaccaaagagtcaatggcagtttctgggcccagttgaatgaaaatttggcgagaaggataaaagaaaagaaaaaaaaagtgttgcagttgtcgaactgtctgaactgaggctgggagttgacttgttcagcagggaggctcgtgctcgggctcctcaatcgaaccgctgttcaaagaaaagcttaggatgctcttcgccttgaatgctccccatctcccaacaccgacaccccgaactccgggtcaatcatgagctgctcacgcgtggtcttttcttcattcttagctgtcggagtcttggg

SEQ ID NO: 3641 - DNA, 1356 bp, Emericella nidulans
atataatcttcaacaacagataacgcgctttgcattatacagagcatagatgtttcagctttaatggcgaaaactcgcttatcggctgtggactcgtgatgtcgctattatgtgggaatcaagcgccatagacagcggtggtcgcgccaaagcatgccgccaagccactagccaagccgctagactcagtacagggacccttagtcatttactagggagagtcgcggacgaacttgtcgctagtacagggtcttgattcgagcacgaagacgccatctacccgcaaaattggggcagacccttggttgctggtagcgcgctctgggattcggcagaatttggccccaatctaggatccgtggctccagcactgtccctgagccgtcgccctatggctctgtagccaccgttttggctgccgtgactggcctgtgtcgccctcagtcactacccctgaatatggctctaatccacgctgtatcagagattgccttgctgaagtcgttcccgatgtttgagaggccactgtgggttgaaagctgagactgcagtgtgcctgtgccataattatgcatccgataagagatgtggatttgtgacctcgctgcgttatgcggcatggatcgccaccgtgagagcaagaatggttctgcctatctctgattactattctgggggaccccgttgaactgtcagtctcaggactcagcgcacgttttcaagatcatctcctttgcaaattctgtttcgcttctttacttggagctgtgtggatatcgctctctcggcattgctcctagttcaatactgcttcgcgttgatcatttttacctggtcgttcactttccctttttttcaagtctcaatcactcggtctccagaccgagccccgtatttcagccctctagggcctagctttctctgggattctgtgtcctttctagagatctcctccttttgcctgttccttctccaaccagccaactgtccttgactgccacgttccattccatgcagagttgaagcaaacaacctcatcccttcacactcctttggtccgtttttgggtttcgtttagcattatatgagcttgctttcgatctactagtcttggtgcaggatgtcccaagctgcctatttgtacactcggattcgagaggcactcccttggagtggcggtgatccaaacgtcaagggtagatcctcggaaaagcgtcaaatggattgatgtacgagcccttaatcctacctgtttggattcgtctaatggaactgactccattgcagggcctccgaggtatcgcgttcttcttgtcgacctcacccaccttgatagagctgggatgacaatgtgtg

SEQ ID NO: 3642 - DNA, 2521 bp, Emericella nidulans
tatagggacatgggtattggcaatgggaagagcggagataagattaaccccgcgtactgacctaacctaataaggaagacctatcagcgcttatgtcagcgctccggtagctcttgtttacttataccgaactcgcttcttaattctcgacctcgccccgcaggactaactgtcagctctgcactgccgcgatggacgatgaaccggatacctatccagctccgtatgggcgcgcctgctccaattgctccaccgccaagtgcaagtgcatctttccgagagctggtggacggtgccagaggtaagagcagcgaacctcgagttgctgaagggcttttgaccaaagatggcggtttgcaggtgccagcgtctggacaaagaatgtcgccagcctccgtcgcataaacgtcaatcgactcggcaatccgcgaggtcaaaagccgcccggttggaagagaagttggagaatctggttgagctgcttcgcgccggtgttcagcccccagcagtcaatccgatcaccaatgctctgtcgacgccagattcctcgttcgatgtccttcgcgataatgcaacacagcatactgtactcccgccgatccccaccacgttgactccagacacaaatgtcttcgaacccaccagtcgatctcccgccgcaatctccacccccgccgagccaacatcgttgcaggccgaagagtgcctggccacgttccgcagccagctccttccatacttcccgtgtatacatatatcaccttgcatgactgcgcagcggctctgtgagagcagcccgttcacttggctgtggatcatggccgtcaccatctaatctgattcgccacggccagctttgtgatgataggctcatagccagcgtggtgcacaagcgatggtacgctactcggcaagcacagacattgacatttctccttggacttttgatatatcttggctggtactttgttctttctttgcattcggtctcgcccactgatataataacaggtcaaatcaacaagtacacaacatggcaaatctacacgttttcagccagcttgtccatgctgcagtatatgagctcggtatccataacccattcgcgaagcccaagatgatggcgttgtgcgtctacatggaagaaaaagaaaacgcaccgacccctggccagtccttggaggagcgccgcgcggtcttggcatcgttcctcatcacatcaatgtattctctcctctcctgttccacttctgctgctgatctccagaatctcgactttcgtgcagaaaacggactcgttgcgctggacccctttcatggccgactgcctgcgccaagtggaggaggagcgggaatgcatcaacgatgagatcctggtccaacaggtccggttgcagcaaatcacagataatatcagcatgaccaccgggctcgcctctacctccgactcaattcaagtgccgcccgccttctatctccgctctatgcacaacgagctacagagcatccagccccgcgttgcggaacagccacaagcgcatagtatgttttctctcattctcacttgctggatgtttgccgctaaacatctcagaaatcctccttctccaccatcactatactaccctcacgctccacgaatccgctcttaccaattcccctataaccaccacgacgctcgatttccagcaactggagcaccactacgcttgtctcgaagccgccaaatcatggttcgagctgttcctctccatccctccggtggagtacatcggctttccgttctcgatttttgcgcagatggtccacaatctagtcgttctgtaccaactttccatttttgagaatccctcctgggatgtcgcgaccgtccgcaaaacagtagatgtgctcgcggttctcgagacggtgatccggaacatggatgtggtagctgccgcggccggattagaaggcgagccggagagtgatgttttctccgttgtcgcgaagatgtataaatctgtgcaggttgggtgggaggttaatctggcgccagctctgttcaatggagactttccgttctcaccgagctttgaacagcatgtcgactaattgcctctggtattagatgattggtcgctgaagtgttcgacttcttgtataagatagctgggtgagtcgaatctctgcctagttacgttaatactgtgacttattttttcgtctgcaatattaccgttgaagcttgctgtctctgtaccagcgtttccacgaagcaccttcaacagacggctcgaactatcttcgacctattggtcactaagtcggtacactttgaacatgtcggcgatagcttctgtggtggcggctaatccagcaataacaataactggtccgagagtcaggatagatcgctttgcacgagactgcttcggcaactgaagatattcagagcgtggtctagccgagaagctgagacctcctgcaattctggatttgaaatgcttctagatggggggttttgcaccggcctatggaa

SEQ ID NO: 3643 - DNA, 2286 bp, Emericella nidulans
tgagtcgtgaggtttctcttgcataccgtgcgtgcttaattgtcttacacggtactcgtctccatattactgtacattcccactaagaggtttgggcttctgtgaaacttgcttttatgagcggggctgaggaatgtttgcctttttgcggacgttcccggtagtgaactgggagccctcggcagagcccagccacggccgagtcggctttggcgttcggtcttgtgatgattattctgcagactgatgcactgcagtattgtgatttcctattcactgtatgtagactagacatggggatgagaagaggcctgtgataacccacctgccggtacttttatatccgcacagaatgaagacttgttcgttcacgcaagtagatcttcagccgttacatttgtcactacatacaatacaggtttaggtcgagaaaaacagatgaagctggtacacacgagtaggggaagaaagacaaatggtcggagtgtatcgcttcagagagtggaaggctcgtctggttcaagtctggtctgttgggatggcgcgatccaaactagagcagagaaaagcagaggcgagcaggccggattggttttccggtgcagaaaaaaaaagaaaaagcaaagcaaagcaaagggtgaccctgtcggagtatataatgacaaacaaaggaaaatgatgaagatcagagaaggaaggtagggtaaaaatgaaaagaccacccagtgtggcagccccgctgtccagaaacaggaagaataaaaagtaaagaagtatcatcagacattaaaaggacatttcggttcataaaccatgtcagtcgtttcatcagttaatcgtaacacagttgccgtccctcgcccattcgtcaggtccaacccaaatgcaacaaaaggtcaaaaaagtagggcgtcaaacatcacgaagatcccaagaatataaatcgcagaaaatagaaggaaaaaatgtttgtcttcgatcgggtatggtccgaacaacgctttcggagatccagagtagtagatgacattgaggacgccgagcccttagctcatatcgaactaccctgtgtcgagtaacgccgaacgaaggatggatagagtgtacagaatgcagatgctctttgtcggcccgtgagatccgttccaaagcattatcgggacgctaatgaaaccatatgtacgccgataacccgcaaaaaaagtatcaaaacatcgctaaattgtcgcacggtgatgagaaagctagtcgataacatatatccaggcgaaggaaagtaagttgttctatgcatgtatatggcttaagtgtggctatagctggccaacagtcgtatatcgttagatttgtcatttgaaaaggacgtaacagtcgagggctgagaggtcaaaggatcagattggtgtttgggaggaactaatgcggccgaatgatagctgctctttggatcccctgaatgaaaactcctggtctactcaggcctggggggaagcctgaagcttattctcgggcagcaggggcgccgtattcctggaccattcgccggaagtcgcgaatcaccttttcaggaacacgatcccacagaagggaccgggagtagacatcagaggtagccttgagaggcgtcctggcctgcgcagcattgcctctcattgcagccaatgcctgctgtagattagaaggctgctgtgacttgtagccggcgccagtttcatcaaaagtggtgagcgaattatactgctcagcgttgagagcaaaagcttgctcctgttcttgctccttggtcggcatcgcaagagtttcatgaagctcgtccaggttcgatgtcggtgctgaccctgtcatctgcgccatctcagcaccagtaatggttgtgggaagcaacccaacggacgaagaaacaggaggctggttcgacgacgattgcgcaagctctggtggtgacgaagccagcactgccttgagaacatttgcagattctgcgcggtattcctcagagagacgcggaagagagcgagctgggagtgaagcactgttggaggcgatgaaggcaccaaaaagcaggcacatgtagaaagcattccagctgaatggatactcgtttgcatgcttttcggagcctttctcgttcgtggcgacaaccatagcctgcgaaggctgagcggcgggggcaacagagtccgtgtctagagataggctgttgaccatggtaaagtcttcccaagggctgctctccatggtcaaattctcaaagtcagaaaactcattggaaacgttagttctaac

SEQ ID NO: 3644 - DNA, 2006 bp, Emericella nidulans
atactggcgtaattttattggctctcgggttctgtgccctcgtcttgcggacgggtggagtgctgacgagtcggagtacgaatccggagttggacctactcggaaggtccctgggatatttgagcatcgtctactacatgctgctggttattttggttattcccaaaaggatccaacaagaggaggaactgctcaggaagtcctacagcaaggagtgggtagagtaccatagttcacggccaggcttattccctgggtcttgtagtagtggcaggagtaatatcagctctgccagtcgtcgaccatgttgttcgtcgtgaactgggtgatcgtcgtagtcatctggttgagctgtattatatccgctactacagagtatagcacatatatatctacgtcaatggcgaaagaggtttctgcggacgctactagatcatctctgtaaaattcttggataggaaccttacacggtgtttggatgaactgatgggacagagctacacggactctgatgctcacctctattgcgctacatccgtgggagactaggcccaaaatgggctgtagatcgcctgcttatacatgccttcacgcagccttgatctatgtgattcctcagaagctcgcgccggtaacctgcactgtatagtccaaaccagcctgtacctcactagacaactcaaaggggttatactggatgagttcttcaggggtattcaccacaaccagactcgcctcctcgctctcaccaacgatgacctcaccctttccgttctccagatcaacataccgaaccgacccgctattcgtgctacggatagcaagggtcgcagtgaatgctgccttggaggaaacagtcatactcacactccccgagccagagagcgtgacgtgcttgatgttggctccaaaatactgtggctggcggtccgatttgacagtgtaggtcccatcgctggataactcgaggttgtcatatgtcagactctcccgttgctgcaggaagacctcattggcagcatcactgatatcgacgtacgccatatgcgcccagtaccgcccaataacctttgcgataggcgtggcaccaaccaggcgctgcagggtgtggagcggcgtttcattgctaccgacatcatattgcttgttcagctggagaacagagtcggtaccgaggcctgtgaaattatcgggattgttggtcatgtatgtgaacagcggccaggactggtagtagttgcccgtatctgtcgagccatcaacgataacctggtagctgtcgccaatgaccttttgcaactcgatgaccgagcttccggcctcctggttatattgctctctggcgctcgcgcacaggtcagacgtcatccaggtatcagcgaaccagttcgccagtggctcccaccacgcgccagtcatagtctggtctacccagttgcgaacgtggtaggtgagtgcatggccgtactcgtgcaccgtaacggacggatctgcgaggaacgtgtttacgacctgtacgtagctgtagcccgttgtatagtcagagcccatgacgccggcagcgttgccgtcgagagaggcaacagagtacacattctccttgtaccatatctccgctgtatcagagttggagtcgtaggagaggcctgaagagcgccagccgaggtcagtcacaaagcaggtgtatgcggactcgagcatttgtagtgcgttctccgcgtcagtgcccgttgcgccgtagatgcgaaagcgcgcggagtcggtgtaggtgtcgccgccaccgccaacggagggattggcagtgaattcagacggttcggagctagagttggagcttacactggaactcggggaggcgccgggagtgggaatcgaagtgggagttgatacggaactagtagagatcgtgctgccaattggccctggtcctggctctgcggattggatgggatgaactgcggtgggaactggggagccggagctgccagagccccagcggcgaagac

SEQ ID NO: 3645 - DNA, 2113 bp, Emericella nidulans
acagaagatattttaacccaggagtcacgtgagaaagttgaactcttcaagcaatactatttcgtctgtttccgaacgttctatcaactcgacaagacgagcgagcagttcatggagcctgtgaacttctatatggtcgtcttccgcgatggtgttttgtcgttctcatttaccgagaatccccacgccgcaaatgtccgaaaaagaattgggaagctccgtgactatgtatcgctcagcagcgattggatctgttatgctatgatgtaggttgctctcccgctttctgctggttgcaagcagagacttggtgctaatggtctaaagcgatgacattgtagatagttttggtcccgttatccgggagattgaggttgaaaccgaagccatcgaagacctcgtgtttattgcgcgcatggatgacttcgaatcattcttacctcgcattgggaatttgcggaaaaaggtaatgagcttgatgcgtctcttgggaggcaaagccgacgttattcgtgggttctccaagcgctgcaacgagcagtactcagtgacgcctcggggcgacattggactttaccttggtgatatccaggaccacgttgtgaccatgatgtctaatctagcacatttcgagaagatgctcagtcgctcccatacaaactaccttgctcagttgaatgtgacaaatctggttctaggtaaccatgccaacaaggtcttgagcaaggtgacacttatcgctaccatactcgtccccatgaacctcatctgcggtctgtttggcatgaacgttcatgttcccgggcaagacgtaccaggatacggatggtttttcggcatcatcggggtccttgctgcggttgttattattagtggcctggctgctcggttttacaagcttgtatgagaccggccgttcgcaaaatacgcattggttcatgttgacttggtatatacaatccgttcttatgtttatattctggcaattgagttgagacatccagtctgtaccatcaatctagctactctttggacactataccacatgccaaaaaaaatgacttcgatatttgtattgttcgtactagcccaatactgctgtactatatttggaaacacagggtgtggcggtgtagtaatataatctgtaacagtggcagagcgccaggcagaaagaatgcatatcgtctccaattgaccagattattaccttcccgcagtcaggtatggtagctaccccattcaatgcaatatgatattgcacctcagcctgacagttaggagtcaaaagctgctactgcccgaactttgcgtatgactcgacttactctccttcacctccgccctttacgtatcggctgccccgtcatgcgtcaacagtgttgctatctttcagccgtttgacgatctctggttaccgacggtccaacgctggatcggagcacttgacctcccatgcaacggcaaaacgcgcccgcacagtctcgctttggtgcgagagtgagcgtcactatcctccttgcggtactcatatccgcatttgctaccggcacagaccttggacctcttacttcggactacggacaaggccgtctactcgccaaagatgatacccttggtggcttcccttaccttcttggctctttcagcggcctgggcatagatcgtgagggggatagagcgcgtgaaccgcagggcttggatattctcaaccgggcttctgacgaccggcggtctctcgggaacaaccggttcggagagagcgagatcttgatgggtgagcttcagcaatggttgtttgtgccagattccacggctggcaacagctccgatgctcagagcgacaacatctcgaagcgcgctagtactgcagtttacgtatccctcacgatttgctctgcgccaattcttaatgagtctatttcgaacactgcccaggcattacctcagctggctgtttatgtttcgacttctgactcccttcaggacccaggtccgcatcataagagcgatagtggtcaaactgtttatcactcttcagagggatacatgagtgcgactgtaagtgctacatctgaggtgtacattgctgtactgcgccgagtaatgggaa

SEQ ID NO: 3646 - DNA, 5261 bp, Emericella nidulans
  unsure (1)..(5261): unsure at all n locations
tcttttcgatgagcgaggaaattcagggttcgtcgcggggctaggatgctcgggcgttggtgggaagaggtgttcgttaccgacggagctaacaaaggcgactatctcgacaccgtgcgagaggcgcaggtacttctcaggcgatggcgccggcggcgacgcggcctgtcgtcaaatcatattagaatctcgcgaggtagcggcaaagagaacctgctcaccaattgtctctcgggcactgcttcggccaccaccactgctagccttgacgccgtacttttcgagataggtgaagtccgcatggctggggcgggggtacatgtccatggtcttgttgccgtagtctttagggcgctgatcctcattgcgcacgaccatggcaattggagtacccagggtgacgccgaactcggttcctgattgaatctcaactcggtctttctcgttgcgcggggtcgtgagggcgctctggccggggcggcggcgggtcatttgaggttggatgtcatcctcagtgagttccatgcccggggggcagccgtcgacgatacagccgacggagcggcagtgagattcaccataactagaagagtagctgcgttagtggcgggggttggtaggcgtgcttgagaaaacttacgtggtgactcgaaagtagtcaccccacgttgacatggtgggcagtggattgaagtctgagtgcgcggcttcaggtgtttagtctggtattctatgctgcaagccgtaacttaataggagctcctgttgtttagcgaagcaagcttgaggcaattgagagactattggacgattgtggaacaacttatgatgctcaagagtgactcgagatcgggaatattttcggtgactactgatactcgtttcggcttagcgcccgcgatcggagctctgcatggataccggagctttcaggctgacggcggacatgtgataagaaaatcaagataataattgacagcgccctgacctgtttctgcctttgagagttccatcaatggttctattctctcaagccacatgctggaaagcttaccgctttaaaaagagccggggcggcctctttgtccggttcaattccgcatttagctctgatcgcttcgcgcaactcgcgtctcgaccagcttccatccaccagatctaccagtccctctcgaccgatccttacgtgaatctttcaatcgagcacttcctgctagagaaagccccgccagattcgagtatactttttctgtacgtcaatcgaccatgcgtcgttattggacgaaatcagaacccttggcttgagaccaaccttcaaaagctccataatgatcgcgaagagagtaccaaacacagtgatggagcgttacttgtccgacggcgatcaggcggtggcgctgtctttcatgacgccggcaacctgaactacagcgtgatttctccccgggctacctttacgcggaacaaacatgcggagatgatgatgcgggcattgcaccgtgtgggagcagttaacacaagcgttaatgagcgccatgatatagtcatgtcggagtctgacggtcagccacggaagatttcagggtcggccttcaagctgactaggttccgggggctgcaccacgggacatgcctgctcgattcgccgaacatcaatgaactcgggtcctttctccgatcccctgctagagaatatatcagagcgaagggtgttgagagcgttcggtctccggtggccaatgtatcctcatcaatggaagatgctcccgctggattttcgatgcaggctgtcattgctagtgtgatggatgagtttgcgcagctgtataacgctagtccggacgccgtccgccgagctcaacgggctcatgctgttgaacccgaactatacgcaggggacaactgggtggccggggctgtgggtgatctggaagcggacgctgtgcctgagatcaagaagggtatggacgagctaaaggtaagaatcttcaggtggaaggctggattagattgctgatcttttgaatcagtctctggagtggaagtatactcagacaccgcagttcacattctctacgtacccgattgaggaagacccccgtgaaagaccagcccttccgccttctctacccccttcggtaagattaacaatatctcttacgcgagataataggctgacaagtactagacgcgagtattcttacgactgaagcacggcgctatcattgagagttgtatatcgacttcaaatgatccatcacttgccgcagagcaggcgagtcgcgtacacgaagccctaaaggggcgaaacttgcatgagctgcagccatcgcagtggactgaagttctggtcagtcggttatccgcagacgaagaaccagttaccgtacaggagctcgcaagcttcattaccagcaaattcggctcatgaacaccacgaatgtaagataggtagataccccaatcccagtcgaggatcaaggcataatcggatgatgcgcaaataatgccactgtatctcttgccccgtacatcaagcgcagcagcaaatcgcaacttgagagacctaaaggggttagattaagatatacattgaacaccttccatgatatacgatgaacggacttcgcccggtgatgacacgcgcccggtcaagcgatgtctctgacagtaaatggcgacgctgactggttaacccatcgatatatactaagatggtgatcgtcttagatccagaaaggcatggcaaccgcgtcatcccgtagcggttgctgattccagacaagcaatctaatctgacgactgaactgcgccgcttatcccatctcggcgctgaaggtatattagtcgcatgatcttcatccgacactatttgaggcatgaggatctcgaaccggataggattgcggggaaatcttctatttggagctccatactccaagcctcgatgcgatacgtgataagtggataatcaccttccacctatcaggttgtgtcctctgaagggtcaggttggaggtctgagcccttgttcacttctagagagcagatgaattccgtcaactcatagtgctcaaagcgctgcttccgtacttccactccgtatttagcccccgggtaaattgccgacgttgtttctcgtcggtcttccacccgaacaccgagcatgagatagacatatatgaatgcatgttagctgagggccggcatctcaagtatctgtagatttaaagaaccagagcccatcatgtcagtacatgcaaacggaaagacccctactcaacctttcagccagtccccttttcgtactcgcaccgacctccaagatgcctgtaaggcgctcctcgatcctcttataccccgcttcacccctgggggcagccgcgtaaagattggatcatcgaccaccaggtttgatgaagggggcgcacagattgagggcttcgctcgtcccttatggggtcttgctgcccttctcggcggtggttgtgattatgcggaagcctctcgatggcgcgatggcttcatacaaggaacagaccctgagagcccagagtactggggggacattgaagacatggaccaacgcatggtggagatgtgcccaatcggtttctcactggccgttgcaccgcatgtattctggaatccattgaccgacaaacagaaggagaacgttgcgaagtggctagcaagcattaatgaacgagagatgccgaacacaaattggtatgtagttccccaagattactttatggccgacggcgctcacagagaacaccgcatataggctatggtttcgagtctttgctaatctgggcctgcgaaagaacggagcaccgtactcacttgctcgtattgaggctgatatggatcacttggataccttccatgtaggcggaggttggagcaatgacggccccaagagccaccaccagatggattattactcgggttcgttcgcaattcagtttctgcagctgctttattccaaattggccgcggactttgacgagcctcgtgcggaacgataccgagcccgcgccaaagaattcgcgctcgatttcgtgtactatttcgaccctgatgggaggtcagtaccctttggacggtccatgacataccgattcgcgatggttggtttttggggtgccctagcttttgcggacgtcactcctcctgcgccgctcacatgggggatggtgaaaggcatcttgcttcggcatttccgctggtgggccacgcaggaagacatattcaataatgatggaactttgaatctcgggtactcgtacgccaacatgtacctaaccgagaactacaactccccgggctccccatactggtgctgcttgtccttcgtgccgcttgtgctgcccgatacgcatcctttctgggcggccgaggaggaagcgtatccgtcactctcagcggtagcagccctcaaatatcccaagcacatcattgtacaccgaggaggacataccttccttctttcatcaggacaagcttgccactatccggtcagagcgattcaggcaaagtatgggaaattcgcatacagtgcctctttcggctattccgtgccaaccgggggctatcagctggagcagcatgctcctgacagcatgctggccctttctgaggatggaggcgacatttggcagacacggagggtcgtggaaaatgcacgcatcgagtaccgcgagaatctgcctgttctgatctcggaatggcggccatggacagatgttgtcgtcgaaacgttcttgattcctcctgctgaaggaagcgagaactggcacatccgcgctcatcgtgttcggaccagtcgtgatctccaaagttcggaaggagcgtttgcaatctatggatgccagagtagcaacggccgtttcctccaacccttcaaggaacccctcaacccgctatctgaagggacttcagctgcaccccacagtgcacttacggtttcctcagcaggagctgtaggtattgtggaactacaaccaagcacagatcgtgcagggagggtggtcttagcggaccccaattcgaaccttcttcactgccgtactctgctggcatccctaggtgctgacctgaaatcaggtacgcagacctggtttgtgacggccgtgcttgctttgccggcgcatgtgaatggctatggcncaatactgaagaatatctgatcgatagatggaataacggtcagatatttcgggttgttaatggaactgtgagaggtgagcccaatg

SEQ ID NO: 3647 - DNA, 1941 bp, Emericella nidulans
gtggcccgccagtttcgagaattgtctgaagacggaagtccgtaagatggtgcaagaccgtacggacatagtcttggtcatagatgcaaaaaaagtggcggactaggtggccgcatatttcatcagtctcattctactgggagggggtaaaaagagagccaaacgcactgaatattataactgtcgtgatctcacccttctcgaggatcaggtccccgaaacgtactgggttgccggaggcggattgcagctcgaggttgtatgcgtcgcgcagatcggaggcgccggagaggatctctggggatctggtgatggtaccgggcatggctagcatgtaaataatttatatgaatatttcgatctaaatctctagccatcttgatggacacacctgtcctttatataggatctgttttagatcaactggctagaaccttcatgagccgcttcctgctgctctggcgtactcggtgatggaacgaactctatacagaagccgttccatggctctcacggccctcaaaaatcacattgatgtcattgtcatataaacggaaaatgtgcttctctgacaatcagtcctaatgttcgaacagcagcctagatttcgttggcgttcgtaaccctaacacccttgatagctccataatgatccaactacaatgagccttacccacaaggcaagaaccggctatgaacccttggtagacttcgttgtttccctcagcaagactgatacccacttacacatgtacagaaatagcacgcttgctcggttcgactagggcctcatcgaactggatccgtccctttgaaaggcgactatgatgttggaggcgcatactgaaagaggcctagttcatcgcctttcttgatttccgcaccgggtttctgccatttctcgtggatcctaccgtcgtcagcatccttcatcaagagtgtatatctagatgatagagcagggcaggattagggcaggaaacatactcaacagtgcccacttggctagccccaatagcaacaaagagcacctcgccgaactcctccgtctcaatgaccacatagtcccttgcattccgcgtcagaatatcgacgccgctccggatagccagcggatcaacctcatagtaatcccccggcatactgcgaaagaccttgatcttccctgaaaccggactatggtagcgatggtaatcctgcggggaaagacggaaactcgcaacggggccgtctccgaactgcggacccaatttacgatccatgacgaggttcgtgatagagaagtcctcccccttgatccagatcttcttgctctcggcgacgtgctcgtagaccacgacgcgcgagtccgcgacgcacactgcagaggacgggttctctgcctcgaatatgggccgcgttccgggcttgtgatgacggacgaagaactcttcgaatgagcgaaaggctgccgggtcggagggctcgaactcgtccatgttgatgtggaagaaggagatgaattctcggatgcgtttggccgaggctggggctgcttcttgcttccctgctcaaacaaactctattagctactccctgttctttccgtttcagcctttgggattgagtaccctctttgatcgcgctgttatgcatatatagtctcatcgcgtgcgtcgtatcgagccatgttgtcagcgggttgaagaggaggaggagtttgagtttcttccagagaggctgctgttcgcgcatatattttccggtctgctccactgttaaagatcattacaaactgactatattctttccactctaccttgcggtcgatggtgagccagccgacttcgcggttctggatctattcatcatcttagctgcttctcttggataagtgaattgcgcgtaccagcttggcccagccgagaagccagtctaccgcggcatgaactaatccgatta

SEQ ID NO: 3648 - DNA, 1271 bp, Emericella nidulans
aactcttttaacaaaagcggacgttgcagctggaaaggacggtagcggaaaggatggcatttgggaggtcgacgctttgtcactggcgattaagcaaattcccggcgttttagatgttggtatcttctctggagtgaccgggcctcaggccaggcgctcggcggcattggaggccagaagcccgttgcggcttactttgggatgcctgacggctcagtgcaggtcagaaaagcggacgcttgaggtatctcgacaatggtgcatataagatcaaattggtgataaagtaaatacgagtaatacgattagattctacatagattacatcaattagtattggtttggagcctccaagttcctcgagaactttacgagtacctacttggattatgcgccattcataaaatgttagtttcgtgattatgctccattatctcgcacctcttcccatagctagcgtcaccccgagttcgcgtacatagttcctgaccgtcccgtcagtaagatcatcctttccatcctcgtatcctgggctgatggcaattgcgaggtatttcccattagagctaaatgccacagccgctacactggaaggatatttctggtactgtctgatcctcctctttgcgatgccatcccaaagggccaccacaccatcaccgcctccagatgcgaatgttccatgaattggatggaaagccagcgagttgacgggatacaccacatcgacatcatccgacgtctgtcgatggcatttgaaggcgtacttccgcgcttgcgactcggctgagggatcaaaccactcaacagccacccgcccttcgatgctagatgaagcgtatccggcgtcatcgggcatgcaagcaacgcagcgcgtcataaacttcaggctgctttcccgtcgctgccatggctcaacttcaaccttggccggcgccacaccttcttccgactgtcccgttaagagcgaaagtgattttagatcgtaaatgtgtagggctcgcgaggccatgcccacaacaagcttcgatgctgtgagagacatggagaaagggcttgattgtaggtgttttgaaatctttatggagaacctcttctttcctatggcattgcacatctaatctattctcccatttacatgcttatccctccgtttctctctccaatcaatactttctgcctcattacataactagtaacatccatttctctcaattatcctttccaatcacctttgatactcaaatactcctcttatatgtcaatctcac

SEQ ID NO: 3649 - DNA, 1230 bp, Emericella nidulans
aggcctttaactaagatattggctatcttagtgagggggaatgattgtcatcagcaccaaccgcggctcctcggagcccttttcaggtgtgagattataggacgaaaatgtccatgtggtgggctcctgataggatgacagaacgcctaatgctgatccctgcctccacagattcgtccacttgcccgctctgcatgattgtcaagtcttgtgcaacctgtgagatattgcacacctaccgtcggtggatatgagacgcctaacatggtgcaaccgcacaaatcgggaagggaactaaagaccatccctagtcagctgtgaatgagggtggtggggaagttttctatttgactttgcctttcagaggaacagctgaaaacagtcttatttcggtttacatacctgattgtcctatattgagtcgatgcttacccttcccgtctaggtattcaaggcctcctcgcgcaattcgccaacaagtgtccagctattgcagtcaggtactagagtcagctaatgagtcagcgaatgtatttttgtatccgggcaagtgctctctggagggacttggtgggataactttataccagtgtacgttggcccgacgcattttgattcaccagcttgcagacatcaagcgatgaacgagtctaaaggaacctctgcccctgaatagaatgtggatctcaaagccatagagatagttgtaggtctcaatgaaagttgaggctgaataagaatttaacgaagaggtggaaaaaagggaaaccccatcatgcccacatttaaggctgtctaggctcaagccagacaagcactaagtagtcaaaatagaacccatagtaatatctcagatctagccagctagataagaccagaaaaaggcaagtggttcctatgtatttctgtatggagccagccaccagggtaggaaggcgtttccgtcgagccctagcttatatctacctaggtttaccagacgattaatttaccctatctcgtctatcctgttatcaccaagaccaagactctaccttcctgtttctacgactgatcgcgatacacccattgttctcatctgcattgatatatctttcccatatacgacaatgtccgacctcaatctaaacggtatccttgtcgccctcgtaaccccttcactgacgacaaaaccgccatcgacgaagccagactagattacatattagcacatgctcgacgccggatcac

SEQ ID NO: 3650 - DNA, 2193 bp, Emericella nidulans
taaagccgattgatatgtttagtcagaggtattaagatatgttcgacaagacctcggtaaggcgcgatttgatacttaaatacctggaggacacttgccagaataatgatgttgtccttcaggggattacaggttaggagaatgcaggaccccgtttccataccggccgttatatgtaatcccggccctatcggatcgtttttaaatccgggatgtcgtgaacaaggggtgatcacacatacaattctgggtgcaggtgtggcactacaagcatgcgggggtaaagcttaaggtcaggagtgttttttcctatagtctcgccgttagtgtaagcccaggatccagtatgccttagccttacccgagctcaaggcatgtgtgtccaaattcgggatgataacccgcgcaaggtatgggacctgtgagcgctttctcgccggaacctttaccagggttcgggtatgattgaataacaaattaggagactgccttaggcgtttttaatgcgcggagacgtcctccgcgaacgtgaagagtggctatagtcactgactcggagcccgcgatactgtccggggcttagcgagcccgagttatgccaaggccgcattctcatagcggcatcaaggtcaaaaaagtgaatggcgacatcaagtcatgaattgagccattgttcggatcccggatgctcgagattcaagtccatggactgttctctggagaaaaggcgagttcttggcgtggcataacagatcgccgggagaggctttgtcagggtcccgtgaccgcaggatacagtgtactcgtggcagttatcacaatgtcgaccatgcctcgggcggccatccgcatgcagggttagagaaaatctgcatgagcttggcatactttacaatcaagcttagccacaggaaattgagcagcctgacgctattgtagatcgctagcgaacctggtagtgctatcgcgagtcccaacagtttagacggcagggcgtcagccacaccctgcggatcgctacgcgcgtttgttactgctctgatggggcacgcggagcacgtcgtcagcaagggagacctggagcggcaaagctgaagaattagaatccaatataagaggcttaggagcataaaatagtatcagttatgatggtgcctatgccgtggctacgcgtacggtcgttggcttgaaccttatgccgagcatgtatagacacagacttggtatagacacagcgcagagccagtcagcttagtgctaggcactccggcgaaatcccgtctaagactctgggttcgatagtttacgttagatagcctgggttcaatataggaggttgctttctttgctgtgttcctaggtcacatggtctactcgatgatagaacaaaagacccgattgagaattgtgaatgaaatgtccagtggcaatcggtgacgccgtggcaaaagatgtaaaaagaccagactggatcttcaggaaccacacccagcctgtaaaagagactgtggatcgacgaggtagaatccagaatctaccaccggccaagcaggggagggcagtgcaggggttactagataaacctacccgtgagtgtccgccatctgcagtgctgctgcgcctcaccacagacgaagacggaaggctgtcaatccggattctccttataagaaaggtctataaaactacctgtctgtttcaatcgaatcgttcatccttaagtcaaagcacattacatcaaaacctcttttatcgcctttcatcttgtggcgacatcgctactactattataacacccctccctctcctccaccgtctctctacacattcagagtactcaagacgtcaaaagcccttactcttgaatcgacttacctcgtgattcttatgcatcaacgcaacgaaatgacgggcacactctccccacaatcagcaccctcttccccttccatctcgacccgccgctcgtcgcggtcctcccaaaagccatcactgtcaatcgacctctcctccctcccaccactatcccagccttccccgccaacaaacacgctcctgatcacagaactcaatgacctttacctctttcaaccgtcctctctttctcagattcggcaactcatcgaatccatcgcccccctaaactcgttctccccgcttccgtccttccgccgcatcgtcgcttctttccgt

SEQ ID NO: 3651 - DNA, 7621 bp, Emericella nidulans
  unsure (1)..(7621): unsure at all n locations
ttgtcagtaaccaagagctgaatcaaggattaatcaactatcagggaagcgtcgacgttattaagggcaccgacccaccgaggatggccacttggatacccactctttctgctatcacaagtggtctgccagtgggtcgagtggatgttaagctcctacgagagatgacgccctccgcgaatgagtgcggccatgaaacaggccacggtgcagaggcctccgtaggcatactgcagaatattacaaagttggtaattatgaggcgttcgatcaggagacgatgaaacttacagccgagtcatgctatcagcggtcttacgacggtgcaaagtttgcaagaaaacgccaagggccggccatgggcgggggctaaaacccaatggctgtgctggactgcgaggcttccaggactgctagtagtagtgcatgcataccttacgtcatgaggtttgacactctcagactgtcgggttcacccacgctgaccctctcttttccctagtccatctttggatctcgctcctcaacctctcacctcttaccaggcatcaccgcgtgggacttacagcctaaggcggggtacccaaatttcgagcatccatcgacatcccgcatttgagacaaccagtgacgccattggcatgggaagcccactctggccatgattgccagcattctttaccacggtgcgcattcctgatgcaaattgccagactgcggttgttccacgccaggtcgggtcctactcgtggcctactcgtgcccttacaggctcaagcggtctgtcaaagcccaactttcaagcctcgagtctttcactagatcagcagcccactccccgcagttatggagtttgccaatttcgagctgatccggggtcgaattgcggagccgtttgtacatttagattgccgacatgttggtagggttacgcaagaacgcaaggaacacaagctataagccagagttctgggttgttaatgcggtgcaagtcgctgcaagtcgctgcaagtcgctgcgttacaataccccagcagaaacgaagggcattgtttcctttattgcgattgattaccctgctcggcaaatgccagaagatttcaacaatccgcctgcgtatcctcgccattaatggtggtgttgccatctgatttgcggttcagtaagaactcccacaagcatgatccgtaaatgcgtgcagcccggcgttaaggcctgctcccgaccggccaaagtgttgtcgaattcggcttgtacggaccggccgccggcaaacactggaaatgtgccttccgcctggtgattcctccgcgtcggaacaaacttagtagcgcgccggcctgcaacacaacagcggtgcacgtaaaacacagcatttgcatcaacttcggaatgcgacaactaatacgtctttctgcggagcctctccgaaattgactggaacattgggttaaccagactccggcgacgatatattgcagtgtcacgcagatccagcttcagacaagtgagcagaggactgaagaataacagtttcataatcgactggctcgttgaatgggtgtaataccgtacgatctggtccggaacttgatatagctgattatgacaacttcaagttagtacttcaagaatgtttggtcatggaaccgaatgaatacccctgggcccctcagcctcgccaaacggcatcccgttcacccgcccgggagcgagtgtacatcgataataacatgcatgccgtaccatacggcatttctcaacattcttaagaatgagacttgaaggagactttattttcggtataaagctgtaaacccacaccttaagcagaattaggtatttaactgtagagtggtttatatcccggctttatacaactgtctactgcggtgggtgatttaagtcgggtagcggcgttcaagcacggaatcgcactggattatacccgttaatcgctatctatagtgcactcttcgcgagccatccgcagaagtcgactccgttcgctttgcatgtgcttcatttttgatattgactggttccgagagcgataggtcttcgcaaggtttcttacctgcaataggaaatttgcagaagagaggtgaatgtcagcagtattattgaaactttcacaacgggaagcttgctaagttgttcctctatgggactgaggctagtgagggatatttcagtcgagacaacagcatttggctatattgatcggtctcttagatggttctcacaccaactacttcgacacagtgctaatttcctaaatttgttacgagtggacaaccagatacattagttaggtgaaaacagcgaagtcagcgtctgatcactctctcgttgcaatgcaccattcaagacagtaggtacatgtatttcagaagaatataacggacccaggctgaagctcggtgctacggcgacatagtttcctactgtacatgtcatgcgggtgatttcaagcaacattagtccttagaatagcattgagcttgagctgctgcttccagtggcctcattggtgtgttatatatccctctattgtgggatgatacacatccttgaaatccaatgacccattcattcattacacctgctcatattcacctcgataacccataccattgtaccttgtcaaaagcaatttgcggaagtagtgaacaagacaaactgtcccgttccacttcccctcagtcccaggatataacccgtccccaaaatccacacatacccaatgctctaatatatgtatcggaaactagacaactctttgttagccacgtcatggcatacagcaaagcaaaccagacaaagaaaactaaaacacacgtggggagtggaaaggacatacttcagattctcacgatccgtcaaatccaagaacgctgtggctccaaggtcccgtccctccaagccgacctccatctggctctgaatccgatcgcgcttcttgttctcccagcggaggagcaagcccagtgtactgattaggacagcttcgatgagatgcgaaacgatcatggaccatatgccgagtgagtaggtcggtctagttatcaaatgagatcatcagtatcttgttgatagaggagtgaagggaagaaggtaagcaaagggcatctacttttgactctctttgtaaaagaacggccccgcaatattcccagtgcagtaacccaggaaaaggactgcgtttgtgacaactttctttgtatgtcctgttaacccacatcatccagtagcgattagcatccttcatatctcaaattacacccagcagagctgagatgagggcgtcgaccagacataccggcagtgttagcggtctgcatactaagaatcaacacaaaagccgcattatacggccctgtgagataatagcagatcagccggccgatttgttcgctctcgggaacgaagcgcagcccgaatgctcccgctagattggggatcaggaatagcaaaatgaatacgcatcggcgattttcaaagcggtcgttcaggtagacgcacgctaggattgagagtgcgattaggacgccgtagggaatcttcacatgtcagtccgtttggatggtttgatggggttgtgaatgagtatgtcagacaaacgtacctgcatcagagtcgtaacgagagtcgagaatccgaagcctttgataatgattgtcccgaagttggagataccgccgttggggatgttgcctgaatgcggatgtcaatctctatcaatctgtacgcgattaatcggtgggaccatagcgacgtacagacacagcccagcacgaagaagaagtacatcttgtagtcggtgaatgcctcaaggacctgctgtggctttaggtgcttgttctcgataccggtttggttttcccgtagtcgttcaacggcaatccgacgttctcgttgtgtcaagcctggcgcattgaccggggagtcgggaaggaaaatgaacatgacaatgccccaggctgagcaaagagcgccactacccttatcagcacaaggtatgcctacttcaggaagaagacgtacatcacgatgaactcgtacttccatgacggaagcgcacccttaatattaccaatcccgtaacccaacaggccgccgagagcaatgccaaagccgttggctgtataccaaagccccatacgcactggctgttcgcgccgtgtgtaccacatgctcgtgattagcatgaatgcagggtctgcgcaggcttcggcagcaccacctagggctcggaggacggcgagagtggtgaagttatggcatgccgcttggatgatgagaaaaacgcccctgattcttagctgggtgtccgagctgataggtgaatggggctcttaccacatgaagatattgatgccgagatactttcctgggcagaattaggtctgtggaacaaggtagcaaacatatcaaacccacgtaccaattggaaaccgttgcagcatgagattagtaggctgccgggatcagtatctgatcgtttctgtatcttctcgcacataccaatgcccaaaccaagaaaccaaagtagccaatagtagtaagccaggtacattgtgtcccatgaaggttcagatcctcgttgatcccaaagatggccgcgtaagtgagcgtagtctgtccaacaaagtcaggtccaacatgatcagtctgggaaagggggaggtgtaccatatcaatatagaagagcgcataacaaaccgccaagtaaggcagaatcatcaaatcgatcttccagagcaccagtagtgcctcggccggatcaacctcctcatgaagctcttccgggctactgaacaaggcctgagcaacatcaccgtctttcccgctagtgaagactggctttgtcgggacttcttcggcgtgatttgtggtggctgcgttgttatccttcgtaatgtccgagccgccgtgcgactggaaacgagatgttatggccatctttttctcctaatatcgttctttaaatctaagccaaagtaccagagacgaagacggggcaggcagacgtgaagcagcgtggagcggcgcgttttatatactgtcgctggatccgggaatagacgcgagcatgatttcggacatcacagcgattagtccattaccctgctccttctccaacagacttccccgcttagattgatcaggtaatcagagagtgtgagctggtagaaagatgaattactcggggttattccgccatacgtcaagattagggaaaccctgagtgagagatccactggctatctgcagcggaataggacggattgcggagaccaccagctataccccatgcaccccgctttgacggcgtgacggtgctcgaagcttgggctcggcatatctgcgcgggtatatcattagttgccaaccagtttctgcagctctgacggtagtctgaggacagagaccgagtcaaaacccgtacggaggatcaggcgatgtcggacgtacgccgagcacattgggaagataaaaggaatgataggtgggaaaacacgaagagcagcagaataaggaggtgaggatgaacaaaggatgaggaaacggcaaagagctgcaatggccgataatggtgtgggggtagagcgtggggttccaaacctccactctcatttgcggggataatctggggttacatgaaaagtaggatgcgtactatggattaggtaggtatatgttgacagacttttattctatccacttctgctaaacggcttttgcgattacacctccacaccgcatggttccagccacctcacattttcattctgtcttaccgccggttaaagttcaaataacgagcctgccagcgttagtaagtaagccaatcaccagaagggagagcctgcaaatcagaaagtcttacagccatgaacaaaattatcaggttagacccgacaaaagccgcataaatgcccaaatccctccaccggtggtcaaagctcatctcgaaggcctggtaatactcgtctccaactcgataagcacagtactcgcaattctgagtcgcattgttggccaggtatccaatcccacctcggtcgaagaatgactgcatgtactcgccgcaagtctggccggcgggagcctggaaccggttgtactcgcctggagtacagacaacagggcgttcgtgcagttccgtcgtgaccatcccgctgatgatgcgcgtgaacgggtcgagttcgtagaaccagactcgccagaacttcggcatctgaggtttcgggatcatgacgccgcagaataaactgaacaagatcatgagtggcgggttgcactgggatgcgatcatgctgttgggagtaagggcttgaatcatttgacccaatgtcacggcgaacaattgcgtgatcatgatcatgaagaactggtagcccgcccggtcggaggcgccttgaaaaccggggatatagtaaaggaagacgaagaagataatcccgcacatgatgcagtatgggatttcggcgacgaccatagacacggcaaaggcgaagtccttgtatgtctttgacgcggcttctcgataaaatactaaccgcgacatctcgtatcgaggctcgaccatttgaatgatgataattgggataactgtgacgttgaacaggacgaagatgcggtactgcagcgaagctcgggagtcgtcgagttgcaggaacgcaagaccggtgatcagagaaatgttgaagtgggtgaagagccgagtgaagccatacttgtgagagcgccagaagacgatattcgtccgcttacaaacagtcttgatctggtgccaaagtggagttgcgtattccttctcaaccggcttcgttgcttgattccgtctagcctcctcagcgcgtcgactctttatttcagcgatctcttgtttgacccgctccctctccggtgacgctctccagaactcaacccagtcacagtttccaagatggcgagtcgaaccagcgccaatggcgtcaagcatccactcagcggggttcgcatcaggaggacactctgcaccgttacgccggaagtaagcgagtagtgtacttgaatcttttccaatatcgccaaagtacacacattcgccttcactcttcagcaacagcaaccggtcaaagttttcgaaaagagcaaaagtcggctgtggatagtacataaaatagcctgtcccgggcagcatgcttgcggggaatcgaacaactaccccggttatctatagtaagagcatggcattgcaactactttgaccgcaattgttgccaaccgaattgctagtcaaaatgcagtttccgttttttgccgtaaacgtgggaacttttttttttagaaggcctttagcggcatactgtttgagattcactccggagattttttcctaatttttgcctggattacataaagtgtgaaccaatctccctgttgtttgcattttttttaagaggtctagtaactctttctttcaaggttattctttttttgggaataaagtnttttcttgctctggcttcttgttctctgtgtgctggcggagatatctgtgtgttgcgtgctgttcccnntgggccaatcataaaatcatatttttgtttattcaccttatatttttctt

SEQ ID NO: 3652 - DNA, 945 bp, Emericella nidulans
cttctgcctcagagagtcctcgatccactctaggacctgaagcgcaactagatccaagcgcgacgctatcttcaactccgctcccggaagctccacagcgggtccagttcccagtgtcccagcgcgccaaaactatggctgacacaaccaattccacaactacggccgacaccaagcatgacgctgatccggccgctgataacaatgccgtcaaagtcgacacgaagcccgcggtctccgttgcagagagtaatgcgaggaagactgtttgcaagaaacacaccgggaaggaaaaagagcccagctcgcgggaccgcgaaccgaagaagtcacggaaggcagcgaagaattcgtcaatagttacgcccagcgatgatagctcttccgatgcaagctcgtcttcagagagcacgaacaccagcggatctagttcagaagatgatgacgattcctcggcggtttcagaatcggaaattgaccggcattcccgacgcagggttacaaggacaaagacgaagcaaagcatgaagcgcaataagaagaaaacgaagctcaggtcacgctacgatgaggagacagaaaaagggtctgatacagaggagacagagcagagcagttcttgcgatgagaagcaactcagaaaatttgtttccaaactcagagccgagaaggccaggatgcttaaccctgtggatgattctatcggaggacaacgatgtgacgatggtgataccgaattgatcgatatgtcgctagccctggccaaggagaagctgaggtcgaaagaggggactggaaaacgtactaaattgcgcgggatgcggaatctgcttggtgatgcactaggtgatgcgcagaaaaattatgcccaaaaaggcttgcagaaaaagttagcgagaaaggctggttcaaaaatggccttcaagagagttgatcaatgtgcgt

SEQ ID NO: 3653 - DNA, 1438 bp, Emericella nidulans
cccgaattaaccctactaaagggatctaagagatcaacatatccatcacactcattctcttccgcggccgttttttctgcttataccgctcctcctgggagacggaggcagaagaacccgtcgaggcagaccctccatgacctgaatcgatagaccccctaagatccctattcagcatgagcaacgcagccgaagcttcgtggtccatgtcagccgaggacgcattcgagaaacgagactgagtcgccggcgacgttgcaagagacggcagtatccaagtgcgctcgttcgggcggatcggccccagcgcgggactgggcaaaatggatggtgggatctctgatagagcagctgcactagagggaattcgactgcgcggagagtacattggcgaagggctgggtattgctttcgggatgtacctcgggtgacactgaggcagagtatgtactgccttgtgggtcgccgaggaattcgggggatgttggtgacagaggggcggaaggaatgttattatgtttcacgcccttttaattttcctacatatccttctcctacgtttcactatataattttcaccatatttaccttcacttatcttctaaatattcccatcttccatatatttaatcaaccttcatctaccctaatctttcatctctaatacctctctatcaattcttataccattcatctctatttcatcatcctttttccacttattcacttctaattcatcattttttccctcccctttcctctaaatttcactacactctttaactctctactcctctacttattttacttcttacttaataatcttattctcttattcacctcttcacaacttatctcctataaacttttcatcaataactctaatttccctccctttttcccatacatccaccttttattcctatatcccttttccatttcccacctccatctttaaccattctcctctcaatccacctttccctattctaaaattatattcccttttctctcttacttatctaatccacatttaactccctatctttcacacataactcttaatcttctgcctttcaccaatcttctttcctcctctttttaaactacataataataccatttcttttaaactcatctcatctattctcttttaaacctataacacaccatcctctctcatatcactccttatattcctactttaatccatccaccttcttaattccatcctcatccactttaccctaccttattatatatcctcctctctctatcaatttcacttatactctcaactataaccttctccttcttatcattatacaacatctactatctatcataatcttttctcttctactctttcctatctacactcttcaatcatatatcatctttcattcttccccattctcttacatcatctcttctctca

SEQ ID NO: 3654 - DNA, 2769 bp, Emericella nidulans
agaaccccagacatatggtgttatcttatatatagtgtggctggtaaaaactaggaaaagcagcgcaagtagcaaatcactggctgagctattggtgcctgatattccggtgcccactgtgataacttattcgccgacgcgtgctaactgcttcatctatctctagccagaataacctacatgcctcgtagcgatccagtgcattgctggtgcaccattttcatggcatatttattgaccaagctgcgtttatgtcacaggtgagccaactacgtaggggcgatcgagaaaataggactactggcagtaacctttgctgtcaattctgagattgtttgtccggacagatgctcatatagttaatctgtggcgatattccaagccaggatgcatgagtgatctagattcatgaccacatggtctgatctgctcgaatcgcgcctaaatatctagcttactcgcgacaataagccctcgggattttagtaccttttagacagcagtagatagcttatatcaagcttatgacaacaacctgctaattcttcaaactgcaaggccccttcccgccactcccagctctgtctgagctatattagaatacaggcgttcgatatcgttaaaacacattgcatagaaaaatgctccatgtaggatgtgattaggttatttggcatgacacatgaccgccactcacattgagttatgattatgaaaggaagcagatcgcctcagccctcagcttttgaaatccgccaaacacatagccacaatgctagcatcccacctgagaggccaatgatgaatggctgtagaatctgcactccctaggttgtgcgattgcaccaactgctaatagcagtaaagcagctccagcccctccgaccgccgtggcgaattcaattgagctcacgtgtagcgattctggaagcatctgggtgaccactacaacaatgacagggaacagtgggcctaaaaagaagccttgcagggacaccgcgactgctgaaatatagaagtttggcacgagccaaaaaaagccgctaaagataatcgccaatgaagaacaatacagctgcaagaagtcagcattggcctttaaccatccttgagtgatacaataaccatggtgaactaaatattaaacaagattgtagaaaagacgtatagaggagtgaaatatatcataccgtaactgagagttcttctccaaccatcggcgtaacgaatccgagaaagattcgaccacaggttacatccaaccagaaccccatgacggccatatcactagcgaatgggctaccgtggcgcacttgcatcatgaaaatcacggtccagccgcccaaagcaacttcaactcccatgtataacagaaggtagagggcgcaaacccaagtcatcgccataaataattgtagttgaggcagtcgaagtaagaacatgtagattagaaagacggtctcgcaacgcgcgaagactcatgggcggtacagtagccttaaatatgccgtttcatatatcatccgtaacttcccttttttctcctcaccggtcggcaaagcacttggataaggcacattggacggggcgactaatgcgccggcgggtgtgggggaggctccatcatcaatcctgaattatagctggcacgatccgaagcgcggtcatcgcaggttcagcacgactggagactgacccctgacatggcagttgtcaaggtcactgcggtcctcgtccgtaccgacgatagcgttaacggacaggactccggggaatggcacagtgtcagcaaaacaagctgcctcgtatcctggaaagatccacttcccctcaggcttgtaatcaagctttgacgtttatggagacatggagacatttgaatgctcagatcgatgcattctcctcccgctcggcagaattcttgctgtttgctgtccaagacactgcggcatcgcccagcgcagcgagctgaccggcaggatgagctcggtgcgtacgccgaacccaggcagaatgacgggctttccatttttgaggtacttgtgatatgcctcgcggaagagcgactcacaatcggttagatatgcaaggcgcgtttttagactgaagctggtttttccaggacgttcacggatgaaaggcactcctctgggtaaacagcgccaaagaagacagtattgatgatataaagcaacgcggcgggcaggaggaaatataatcctactccaagtaaactgtcgacggcgttcatgatatgcatggcgaccgtctaggtgtcggaccctccacgtggagtgttttggtcgggcccttgcccttttaataatggcaaacgctggaggctgaggatgggggctgacattatttaccccacaatagctggaagttaactactttttattggctgatttatctacatttgcagggactggcctgtctgagaccaagcttagctctttctggtgctagactagcctctataggactagccttatcttagtgctgatgggctgggttctggccttcttgggttgctgacgggctgactcgctagatttggctatgtagctttagcgatggatggccgctgggctaacaaactgaatgttgaataatcgtccgagatgtcaattgttctgactgaaagggtagtcggcaacatcaaccctcgggtgtttcacacatagggcgcaccccttctcccctactatgtacctaatctaggtgctcttcgtaaccaggctgcccctaaggccatatcccagcgca

SEQ ID NO: 3655 - DNA, 6234 bp, Emericella nidulans
gaagcaccaatggcggagcgaaagatttcctatgctgccgacgtcgagaatggtgaccattctcgtcctactgatgtgaacgatagcgctggccttgacgaatatggcgctctcaaccgctacatttcgaccgctcgcgacaaccgtcgtggatcgacctctagtgctggtgctcttagcatgaagcagaagaagaagccctggtacaagttctgggccaaggctggtggtgagaatggcgaggagggcttcgttgctcctgaagactggctcgagaccgatctcaacggtcttccttccagccagatcgagcctcgccgcaagcgtggtggctggaacgagttgaccaccgagaagaccaacttcttcgtccagtttattggttacttccgtggtcccattctttatggtgagtagcccggtctgccggtgttccatgtgaatatttctaactgaaattgctcccatctagttatggaattggctgttctccttgctgctggtcttcgtgactggattgatctcggtgttattatcggtattcttatgctcaacgctgtcgtcggttggtaccaggaaaagcaggctgccgacgttgtcgctagtttgaagggtgacattgctatgaaggctgttgtcaagcgtgatggtcaggagcaggagatccttgctcgtgaacttgttactggtgatatcgtgagttgcccaattcgtcctttccacgttctactgccacattgctaactgccatcgcctaattaggtcgtcattgaggaaggtactatcgtgcccgccgatgttcgcctcatctgcgactacgacaagcccgagacctacgagacctacaaggaatacctcgccactgccaacgatgacacccttaaggagaactatgatgatgacgacgaccatggcattgatgcccgccttggtgtttcactctttgccgtctaccagtccgccatcactggtgaatctctcgctgtcgacaagtacatggctgacacctgctactacaccactggttgcaagcgtggaaaggcctacgccatcgttactgctacggctaagcactcgtttgttggtaagaccgctgctctcgttcagggcgctcaggaccagggtcacttcaaggctgtcatggacaacatcggtacctccctgcttgttctggttatgttctggatcctcgccgcctggattggtggtttctaccgtcacctgaagatcgccactcctgagcactctgacaacactctccttcactggactttgattcttcttatcatcggtgtccccgtcggtcttcccgttgtcacaaccaccaccctcgctgtcggtgctgcttatcttgcggagcagaaggccattgtccagaagctcactgctattgagtctcttgctggtgtcgacattctctgctctgataagaccggtacccttaccgctaaccagctctctattcgtgagccctacgtcaatgaaggtgtggatgtgaactggatgatggctgttgctgctattgcttccaaccacaacgttaagaacctcgaccccatcgacaaagttacgatccttactcttcgccgctaccccaaggcgcgtgaaatccttgctcggaactgggttaccgagaagtacactcctttcgatcctgtctctaagcgtattactaccatctgtacctgcgacggtgtccgctacacctgtgctaagggtgctcccaaggctatccttgccatgtctgagtgctccccggaggaggctcagaagttccgtgagaaggcttccgaattcgctcgccgtggtttccgttctcttggtgtcgccgtccagaaggagggtgagccctggcaattgctcggcatgtaccccatgtttgaccctcctcgtgaggacactgcccacaccattgctgaagctcagcatctcggtctttccgtcaagatgttgactggtgatgctcttgccattgccaaggaaacttgcaagatgcttgctcttagcaccaaggtttacgactctgagcgtcttatccacggtggtcttgctggttctgcccagcatgacctcgttgagaaggctgatggtttcgccgaagttttccccgagcacaagtaccaggtcgtcgagatgcttcagcagcgtggtcacttgactgccatgactggtgacggtgttaacgatgctccttcccttaagaaggctgactgtggtattgctgtcgagggttccactgaagccgctcaggccgcttttatcattgtcttcctcgcccccggtcttagcaccattgttgatgctatcaagcttgctcgtcagatcttccagcgtatgaaggcgtacatccagtaccgtatcgctttgtgtatccaccttgagctttacctcgtcacctccatgatcatcatcaacgaaaccatcaaggccgaccttattgtcttcattgccctgtttgctgatttggctaccatcgccgtcgcttacgacaatgctcactttgaggctcgtcccgtcgagtggcagttgcccaagatctgggttatctccgtcgttcttggtgttctccttgctgctggtacctggatcatgcgtgcttctctcttccttgagaacggtggtatcatccagaactttggttctcctcagcctatgctcttcttggaagtctctcttactgagaactggctcatcttcgtcacccgtgtggtaagacctggccctcgtggcagctggttggtgccatcttcgttgtcgatgtcctcgccaccctcttctgtgtcttcggctggctcgccggcgactacgttgagaccagcccccccagccaggccactttctccaccaacaacgacaccgacattgtcaccgttgttgttatctgggcttactcgattggtgtcacaatcatcattgctgtggtctactacctcctcaccatcatccctgcccttgacaacctcggccgcaagaaccgctctgtcgttgacaccaaggtcgagaacctgcttaaccacctctctaagctggctatcgaacacgaagttgatgctaatggcaagtcacgatacacccttggcgctcgtgctgagcctgaggacgatgagtaaacgctttcgctcatcattcttttctaatttcctatcatctggatatcacttgctcatacatgcataagtcagttaccctggctttttaacccgtattatagacttttttcctccctattacccttgctctaagttgatagagtcaattttttcttctttacatgtatgtatgtgattaatagtgataaatttagtgaatcaagggttcaagaattactttctattgacataggattccagaattagaaacagtctttcaactgatatctttctgactctactggcttcggtatggatttggcaaactaggaagccgttgaagtctccagatctaaaacctgcctagtttggccctcatctccgagctcgacgtctgcagcctcgtcctcgatttgtggaggaagttcgcatgcgcacagtgcgacgctaaggaatagtgcaatttcgtccagtgtatccacaacccacacagctttccggatttcctcctatgacgactcgcccccttttgtttgattcggatcggcctggagcagcggagccccatcgcgagcatcgtgcccatcgctctcttgcgttgcttgaggcgcgctgtaactcgtcggactctcaccgaggctggattcgtaacctttctccgtacttctccagctttgtttcaggactccagccgccagccttccgaggccaaccgcctgtcgtgtgctgccttggccggttagcttgcttaaagctccgcggagtgactgagttctcttcattggggactactttgcagcttcgcagcttcgtagctggctagcttggtgggccgcggtttggaactattgatgacgaatgtttgggatgagacgacttgattaggatcgcacatctgcaacgtgtattgatactcaattatgatttgcatgatacagtagcgaagacttgaagtggagggttatcgcgttcgtcgtagtcatagattctgctaaaggaaaaagtaaatgggacacgtacaagctcgaagtggacactagaaggagatgactttcatggcctgaggcaccgaattctcgttcttgaacttggcctcatgcttgaatatccttatcaattcttatcgttgagatcctccttgtccgcacagacagacgccttcagcttcgatattcccttcttgtgtgatgtattccagcccagccagctagttcatggagcgcctcccggctccccttctcatgacaacggctttgtgtatacgccatgtgttggggttcagcaagtccgttttcatgtactccgcactgtgttcttgctaattcctacaggcgggatccaattctccgtcatgctgtccttcgatttttccgtcaacccagctagctcatatttccggggataggctgattatctccctccgttgtagctgatgcactttgccattggaagaaatcctgagctctagttggcatatacagccccggagcttcgtatgcttgattcaactaaacaatgcttaggaggccagtcaattcctcacccacgaagacctgccgcttcccccgcatttctcccggattcatggatggagattttccggggacggtagctagctatgtataagagccattgatggccatggcactgagatcgattcatccaggcaatcagctcatatagtacgatgccgaaattacgctcttgggcttcccctgcttctcaatgtgctcctagccagcgcagcgggcatcccttcgagccgctataggaattgccagagatcgcgcaaagcgtgccctgaaggcactctcgttgtctctgcatccgaccctaaggctgacttttcaaccgtccaagccgcagttgagtccctgccgcacgataacagcagccagacgatcctgatcctagcagggacatatacggaacaagtcaatgtcacccgtcccggcccagtcacgctgctcggccaaacagaccatgtcaccgacgcctccaagaaccaggtgacaatcaactgggcacaagccaaccatgacagcacgggccagagtgttgacaatgttttcggaagcgttttgactgtcgcacctactctgaacgcgagttacactggctctggtcccacgggattccctgtacctgaggatactccctttggctcagtcgactttcgtgcgtacaacattgattttaccaacacctgggcggactattcagacggcccggcacatgcactcagcttcagcagggctaatggcgggttctactattgcgggttctattcctaccaggatactgtaggtctgcctaacctcttgcgaaataatctgacaatcataggtctacgtaggcaaactcggcaacgcatactttcacaggagcataatagccggccaaactgacttcatctacgggttcggcacagcttggattcaatcgtctgatatcctcctccgcaactgcggcggcggcatcacagcctggaagggtaccaacacgaccttcgagaacaaatacggcgtctacatcgtcgactcatccgtgcaagctgccaatgcctcaattgccccggaaatcgtcggtgcttgccccctcggcaggccttggaatgaactacaccgctccatcttcgttcgttcctatgaggatgctagcattgatcctgaagggtacattgattgggtcgttgatggtgtaagccgtctgtcaaacaagactttcatggccgagtatcgcacctttgggccggggttcaacgtctcgagtcgcgcttcgactaatgcatcaattgtcttgtcagccaaggaatatgcgccgtatgattctcctgcgaaggttttcttgaccccggacggaaaggccaacaatatcggctggattgactggcaggcatagctagccatcaaactgtttataccgtacatagtagcagtagcaacagcaggctcttagtctctcaaaacaatcttttcaactccccctttgcagccaaataagccgcccccgtgtccgcccaaacctcataattccgaactttcacctcctttatttcctcatcctcaaccagcccaatccggtaaataaacacctcatcccagccttcctcgctttctttactcacaaacctcgcatgcccctt

SEQ ID NO: 3656 - DNA, 5384 bp, Emericella nidulans
cggggctggaacggggggggtgcactgaggttgtcctggaggcactcagagagcaagatgcacctggcccgcactatcgttgtgccagctacgacttcaccgacatttcgtcaggtttcttcgaagctgccagtgagagattcaaagaagcaggtgatgtgatggaattcaaaaagctgaatattgaagaagacccgtcggggcagggattcgagagcaacagctatgatcttgtgattgccagtcaggtcttgcatgcaactaaaaatatcaatcgcacactggcaaatgtcagaaagctgctgcgtccgggaggaaagctcctcctggtggaaatcactcgggatgagatcgacctgcagctgatatttggaactttacctggatggtggctaggtaagcatggccaacctgggaagatcaagtaacaactactaacattaattgcaggagaggaggccgagcgtcagtccagcccttcacttaccatccctgaatggcagatagcaatgaagagtacgggctttgatggtatcgatatggaactacatgactgtgaggatgaacacttttatgctttcagtgtcctgctggcaagtgctgccattccagatccagtcatttatccacaattcacgattgtgtacaaagagatgccacccactaagtggctgaataaactgatcacatccctcgaacaattgacgacattcaagccggatgtacaacagctcggcacctttgatgctgaaggcaaaacctgcttgttcctgggagagatgcatgaggctttgctccacgagccgagctcaacggagtttggctcgatacaatctctcctcatccaggctgccggtgttctttgggtttcacgcggcagtgcgattcactgcgaacgaccgcataacagtttgcatactggactacttcgcacccttcgaaccgaatacagcagcaagttattggtctcactggatattgaccccactactgcgagatggccggctagcgctattgcgaccatgcttgaagtgtccgaaggcgctttcccctggacaagacccatgccatgtggacaatgaatacgccgagcgtggggggatcatatgtgtacccggtgtgtttgtgactgacgttgagagctcggcatctacccgtaggattgagagcgccgagactaaaacagagttgttccgtcaatccagtcgaaagctgcgtctccaggtgagcacccctgggcttttggataccctcggctttgtgggtgagcccatgcaaaccgatccgttaccagaggagtcaattgaagttgagcccatggcgtttgggctgaactttcgggacgtcatggtcgcgatgggccagttgagcacggatgtaatgggcttcgaatgcagcggtgtcgtgacccaggtgggctcactggcatcccagcacggattcaagattggagaccgcgtatgtgctctcatgcgaggacactgggagaatcgtgtacgcctgcattggactagtgtcgttgccattccggacggcatgacttttgacgcggccgcttccattcccatggcattcacgacctcatactacgccctgtacgagactgcacgtcttcagcttggggaaaccgtgcttatccatgctgctgcaggaggtgtcggccaagcagcaatcaccctggcgcagagggtgggggccgaggtgtttgtgacggctggatcaccagagaagcgggagtatctcagccgcgagtttggcatccccgaagatcatattttctcgagccgcgatggcgaatttgccgctcgactcatggagatgaccgccggaaagggggtcgatgttgtgctcaactctttggccggggagttcctccaacgtaccttcaactgtgttgcaccttttgggcgattcgttgagattggtaaacgcgacctggagcagaataagcagttggagatgcacgcctttacccgccatgtttccttctctagtgttgatctgattgctctcggagaactcaagggagcggtggtgtctcgcatcatgaacgacatcatgcgactgatcaaggatgaaggacttcggctcatccaaccgactaccacctaccctatctcgagaatcaaggaggccttccggatgctgcaggcgggcaggcatattggaaaagtgattgtgattcccggtccggatgatcgagtgaacgtaagttcgcgtgtccagtttactgtttaaacggagccaagaatactaacgcacaattgcagcttcttccgtctgaatggtctcttcacctgcactctgaatccacgcatctggtaattggaggcatgggtggagttggccgatctatctgcgaatggctggtccagcgaggcgctcgaaacttgattatcatgtctcggaatgccgaccagcaagcacagggcaacgcctatgtgaactcactgcgggcatcaggatgcacggtggtcgttgctagctgcgatatctccgacaagtctgatctcaagcggactctagacggttgcttgcagtcgatgccacctcttcggggagtcatccatagcggaatggtacttcaggtgagcaatcccccgtctcctctaaacttactcttggctaatcgcaccacaggataccgtctatgagaagatgtcggtggaagactatgccagggccatccggccgaaagtacaaggtagctggaacctgcatgaggtgttgtccgacgtggatctggaatatttcatcatgctatcctcactgaatggaataaccggcaacgtgagccaagcgaactatgccgcgggtaataccttccaggatgcgattgcccgtcatcgcagcgcacgaggactgccagcggttgccattgacttgggaatggtccgcggggtgggatatgtcgctgaaacggacggagtggccaaccgacttgagcgcatgggcttccgcgcggtggatgaagaagaggtcctgcacctcatccaggacgcgattttgcacccaatccgccatgccactgactcgcagatccttaccgggtttaattcccatcccggggccggtaacacgaatgtattctgggccaaggacccgatactgggcggcgtcctacgcgcaacgggcatcaagtcgaaaacacgatcaaaccgggttcatgatgcgatggacctccgcgaacagctggcgaatgtgccactcccagacgatcgattggttgtgcttcagactgccattgtgcgtaagctagccgcgatgttcttcgtcgacgacgaaaccattcaagtgggcgaatctctcgctagatatggagttgattcgctggtggcagtggagttgcgtaactggcttgtcgtccagctggcaatagaggtgtccattttcgacatcatgcaaagcgcgtctgtgaagcagttggctagcagtcttgcggccaaatgggctgctgctgccgcctaagcctcgaatagcattcgctctgaaaactatcttgtcatgtttttgatagatgctcgttcaggagttagtccggtaaaagaaaatcaaactcgcttgctaagacgacgatactgttaggttagtagttagtagttgttagccatagtctctcaagtcatcggagtgcgtccaaacttaatttcgatatagtaaggccagagaagaatactacgatagcattccgttgtattgggtgtgcatggtttacaggtgctacagctcgatatattaaccaagggactgcttgggccggattattggtgatatgtcagttgcggaagtccttagctatatcccgcccatgcaccctgatatattctttcatagtggataatcgacacttgatgcagccctgaggataccatggtgctcataattctgcgagatttattcgaacagcgggagttccaacccaatattccaatcgatttccttacgtagtcgcgtacggcagtattaactgatgcatgtaccagaggaattcctagcaccacgaccactatactattggcatctgctaaggcatctacttggtagttactaggggatccaagtgcgcatggacgagtgatttgttgagagtctaaaatcgtatgaggtgcgaaacatctacagtaatactcaataagcattggcgcgacgactacctactactacgagtatccaaacaccaggctggaattgcgattttggacccaacagaccatgctttccatcgccctctgccctttgcccgtcaaccactcatacgcctaaaggtttccgtcttttcgtcgtcgcaccagcacctccaccgtttcatccggcatattctgcagctcgaatgtatagttagcgggccgctcagtccgacctccagcaaattggaaatcatagttgagcaagaaataggccatgatcagctttatttcgttggccgcgaagaagcgcccagagcatgcgtgcttcccgtacccccagctcagacttgacgatgcgttggtggtgacaaacccggccgtcttctctccaggagctgaggggacaaatcgaaacggtgaaaatgtcgagggggatgggtagaaatccccatcttgcgagatcgcgtgggcgggcacgccgatgatcgtgccctttggaatcactagtccgtcatggaggatgcggtctgactggatgactcggccaaaagtgactatatatgattatgtcgtccactgtcagtgaccggatggcttttgtcaaaaaaatggacggagggcaattgacgggactcacggagagagagaggattgaaccgttgagattccttcataaagctgtccagcttgagcagtttattcagagccgccttggtgaaaatactcccttcctcgcgaagcactgattcgatctcttctcgcagcggcgcaatatactctggccgggcacacagatcgtagagcagatgggtcggcaccgaggaactagtgcgaattgcagcaaatgaaatggccagggcagtataggccatgaactctggagtctgatcaaccggctcggcaccttcccagagcatctgcaggaggtcgagaggctttttggtgtcattatcagattcagaccgcttctgcacaattggacagatgacttgacgggcaacagtaaagtgacggcgcacccgccccatctcaggcaagagatgctggatgacgggccggagccatgccgggtaccgtttgagctgctgcgaggccaaccacgtatcggtggtgaagttgatggacgtatccgtccagtcgcggtttcggctgagggctttgccccccaacatgcgattcgatgctcgtgagatgatttgtgtgaagatttcggacattcggaccggttgccaatctagctctcatacatcgattagt

SEQ ID NO: 3657 - DNA, 4811 bp, Emericella nidulans
  unsure (1)..(4811): unsure at all n locations
catttcgttagctgttattttgccttatatgtcaaggcctgagtcgcacccagtaagacgatatgtgattcactagcccccggcaccgcacccacgtgttcagcaggtatatcgttcccgcactgtgcgaggccagagtaacggaggaaatgcataggtgagcaagcagacgtgggacagtgtcgacccatacgtcaatgcgcctcacaagcggtacatcggtcgaagcgcccatacctggccggtcaaccaacatctattttatcttagggactttgggtagttaactacgaattatctttgatcaggttgccagccgtgctcgctttcatgtcaaggtcgtccctatgcggtcaaactaaggaagagtccacaatctactcggtgttgacgacgatagattccttgagatctccctccttttatgaagccgttgtcgatgcggttaacccgctcaatttcaaggaacgtatatacatatataaatcaaacagctctattgaataggcattctcgtgaacacaccgtgagtaggacatgactctaaccctccaactcattgcatcgacggccttcaacgatggggtaggcaattccatgatctcctgcatttaatcagcacacaagagttataaccactagctgaacaagctgatacctcgcgctaccgactgcaacatcaagataagtagccgttgtgctagacattgttcagttaaggacgaggcacttgctgggtggccaacgtaccatgttcatctgcacacgtcaacgttgatctactccggtattggtatacacgtgtcacgtccaagttgctttctgcaacccaaaccagatcatcgcaagggatggatacttggtccaacctggaaaactgccgcaacgcttccaatgacactgcttgagtaatcagcaagggagcgggctctcatggaatggcatccaccatacgtttaacactcagacatatggatctcgatgcgttcgaaataagcatgcgatactcttctgcgttcgcgtttacaacgtgcttaaagacggcatttcttatgtgatagttgtctaacatcaaaaagccaaggtttctgcgagcagatcgtcaattccagtctcaaggttcgtgttgggcagtcatttggaacctacaactcgaatactagcttctcatttcgtagcatgttttggatcttgcagaggagcaagccctcttgcagatgcttcatttgctgaacaagatagcttgcatctaggcacgttagcaaacgaccaacaatacgggctttcttaccgttcgtgttcgtcagctctacgtccacatctattcctttcactatgttttcttgcccggagtttgttctggaaagacagtctgcttgcgatacacgaacatttgacgcggtctttccgagggtgatttgtgtttgaccgctcactgtggaagtttagctctctcatccgctacatcacagactggtggacgttcaccagtgagggtaaattcgaacggttcatcctctgtggagtcaacaaggcgcgtatttaagggaacaaccaatacaatagccgccgtttcattgaaaacccccgctccatcaccagtcaaattccggtaatgaaccattcggattgcttcgatagcgccagtagagtatatgtgtccgctggccctcagtctcacattttcgatcttattgtataattcgcttgcatcacttaactggctattagagggggattactcttgtaagggttcgctatggacctaccaaagcatattcaggactgaaaccacaggaatcccggtatacgggttggtggatggagacaccatcaaggaggccattccttgatggaacgctcgtctagccattctggttgcgagattggatatgacaccatcgaatatactgagttctttattaaatcagtggcgtgtccaaaattggatacggaggctcacatacttgatatgggtatggttcggattatgaggcatgtgagctgngatgctttgccagaggacaaccatattttccaggactgtgaaaggccatttaagcgcacattcaagctcattggagatcctgacaaggcattagaagtcattggagcctataggatgcacgataaggattaaacttactgaagtctgcatcagctcttcatcgtgaatgtcaccgaatctggtgcgtcggagctgacagtaacacttgaagactggctgatccggagtttggagccagttcgcattgaaagacgcattgtcgcaaagagcagcagcgtcaaacggcgcacgctctcctaggtgcagtgcgaaagacagctcgggtggcgtctcttgtgatctcgatgaaggctcatagaaactcatagttcggcctttcaaattgctcgtgaaccaggcatggatttcttgcagcatttcatgaacgtcctctaccttccggcccgtgttctgattaattccactattgataacggtttagcgaccacagagacatcaggaaaggggtatcacctgttcaggactgctattataaggttgaggctgttaatatggaccccaagatgatgctggagtatcgtgagatcgcctccttcccttgtccaccgcacttttttccagttcttccgaatctcctcacgccatcgccttttcttcgattcagtgggtccactttcgttctcaatgatcatgtacttgtttacgagtgcctcgaggtgttccagtgtgaagcggcagttctgcaggatccgcgcgatactgctaactggcgccccatcgtcgtgtcctggggagaccctggacagtgatttcaacgattccagtgcatgggtgagtgagctgagctgattctgcacttcctggaactctgctggtgccgacttcctgcccgatgtgaaggcctgcgtgacatcccaggcaagcttcgacagcattaatatatcgccgatcgatatctggaacgccatgccgattgaccgtgggttatcgagggatgcgacaaggtatgcacagaggatggaaccgccaatgttgtagtcggtgcgagtgaatcatgaagtctttcgtttgatcttcgtgtggtctccatacgaggctgtgcaaggctgactggccaaaaatcggggagaggtggcctgaacgctgaatctaacagtataaataagcaaagcactccctccagtgtcgatgattccccaattctatgttacccagacttcagccccgcccctatggatgtgcttgatcgggtccaatctggtcttctcgtccacgccagcgtcctcaactctattccggccattccaaagtctcacatttcgtcccacagagtcctgcccccgatcgattacgtcgataatgcttcattcagcatcccgaccgcctcttcatcttccataaacgatcgccctacccttgaagtctcactcccgttactgagtgtctcggccaacgtggacatccaggggagactgtgcactaccacggtgacgcagcaattctgcaacgcttcctcctcggtctcacaaaatgcgaaatacgtctttcccatttacgatggatcggttgtcacctccttccgctgcagtatcggcaacgagagactcctcgaaggatctgtgaaagccaaagaagcggcaaggagagattttaagcaagctgtctcccaacgcaaggtcgctgtgctggttgaggaactggttccggaagttttcgaaacgagcgtaggaaatatccctgcacaaaccacagttaagattgagatcacgtatgccaacctcctgaaggtggataatagcactggaggactggttctcacgatcccgacatctattgcgccgcgatacggaaacgcgccggcaggatacaacggaaatcaatccattctcacggaagggttgagaataaatgttcaagcatcgatgccagcagccatccgtaggatgagtcgcgatcacacccgatctcagtcgagatgggggcagtttcccataaaagtttcaaggattttgcagatggtgcatcttctgaggtgcttgattgctccaagggacgggcaacgttatcggacagggagcccattcttcatcaagattttgtcttactcgtcctgtgtaattctcgcgaactttcgcagtcacaggctattgctgtggcgcacatggtcagcccgctcactccacgattgccgtcaccatccatcccggggatatattgcgtcaaaatgtctacgtggaggattttgtcggcgaaattatcttcatggcggatcgatcagggtcgatggagtccaagatctcctctcttatcaatgtcatgaatatatttatacggagtctccctgaagcatgttcgttcaacatcgcctcctttggttccgaagtcacgtggttatggccttgttcgaagagatacagccaagaaaacttggacgttgcctcgaaacacgtggattcattccgggcaaactacggtggtacgaatatttattgcgcactggagagtgttctggatcatttcaacaagcaggatgacgtaccaaccaatgtgattttgttgactgacggcgaggtttgggatgtcgacaatgtgatacaactagtgcgcagaacggtctcaatgaatggatcgaatattagatttttctccttaggaattggagatcgagtctcacatcgcctggtcgagggcatagggctgcaaggagccggatatgcagaggttgtgccagagaccacgatgggttcgtggcaggaaagagtgatacaaatgttaaggcggcgttgtcaccatcagcctcagt

SEQ ID NO: 3658 - DNA, 7666 bp, Emericella nidulans
ttcaatagttacgagaacaatacaaccctctactaatcttctggaatatgggatgatgttctcagcagcgaatgttgagtgaagatctatatacttggcggtccctgcggatctccgtgccaagacttcgatctgtcttcggtcttttttccgtccaactgagcgtacggtatctattatgtagaccatccatccttcaccatcacagggacttgtgctgcttgctcacggcaaaccttgccaactctgccgctattttgagttctgccagagctcttatttcatttggtataccgaactctacggacatggcctcccatccagaacaacaatcgtcctcttcatccgccgacgtctcctccagctcctgggggaaggtggagcgaaagttcactaagtacgttgctcttgacctgcatcaagtactcccaaaaatcaactagtaaatcttgcctggggaataacagccccgcgtcatgggcaaggcacctctgtgtataccagtcgcatctacctcatcatgatttcgtcctatttttgccgttgagccgactctaatcgcaatattcagcaaatctgccagcgagtactacgacccttgtcaggatttcgcggaccggagtcttagatgcatgaagcgcaaccccgatgatagagatatgtgtcacgattacttccagtatgtatttccctacgatgttcaacccctatcattacgtcgagctatctgcttttccttggctatatggtcgtaagccatggaactgcaaaggtcaaggtctacactcggtctagttcatttgatcctactgacaccgatattcagagcatatcgcgattgtaaaaagcagtgggtgagtaccaatgccgcatttggcctttgtgttctgggtgaatggcaggagaattcagtgccgaatctccattgtgaagtctactacacccttggctctgcctatatgaagctgacaaatcgacagttgacccagaagaaactcggttcaagctcgaccgccaaataatgaagcaaaggaagaccaaactcgttccatgatgcatattgtggtatcatgtcaagttcggacttgctacactaagtttgtttggattttgaagcgctatcttgagcggtcaatatccagagatccgcagcacgggcttttgggatgatctaaaatcgataaactgttgacgtctctctcagaatatgccgcaatggtctcattttatattcgagagccaggcgaccaacttgctccggtgcttagactttgtcctcgcggttcagtcggctgcactgcacaataagcgtcttttttgcgcctccccagactcatttgcattttcctgttcctggatgtatattttttttttcctgtacaactggccatgatggctaatatgtgggctataagtattaccatctctcgttgaggaccctcttcccataccatcatttgtgatctcgtgcaccgcatggcgatcagcatgttggagccgaaccctggacttaaggtatccgtgctctcgtggtgctggtatctatgtagtacattaacggttcgctacaatatatttgtcgaaatttgagcaaaaaaccaaccgtgaatccataaatccaagcattaatttgtagcattgtgtagtcagaagcttgcttctaaaacttagaccatgagacgcagtatgatcagttgaatctctcatgaaagaaagatctatctaaattgctgttgtatttacgatttttccatttcactacgcactcgacctaccctaggtatatctttcgttcctggcatcaccgccttccgcgagtggcttccccgcccactttaagctgccagtatgaagagaaatatttccccctcatcatccttcgattaccttccccgcacaccgtgtgctgtgcttgaccgcgcagcatacgatcttctcctaccggacacgcgactgcaaccttgaaaccggcagacctcagcctgtatatcggtacttggagttcgagcaccgttcacaatgtcgaccaacgacgccgtgttccaacggcgaaacaagcagatcgaagatgccattgacggacagaatctgaagcaggcgctgcagctgattgaaaagaggatcaagaaaggagaagatacgccatttttaaaggtacggcttcgactgcgtatggaagctgtcttaccatcttacttctattgcttcttcaagagaagactactcttcttcacctaatttatggtttctagcatcgcttacactgtgtgataggcatggagggcgcaaattctattccatcacgccgacgaagcccaccgccagcggggtattgcagagactctccagctgtgtaaagcggacccagcggtgaccgaccttgactctctggagatgctgtatgagacgttgcagaagatcggtggacatgaggagactatgaggagtatctgggagagggctgcgaaagcaaaccgcagcttcgggacatacagacgaggtggttcgactacgctttcgaaggagacgactggaagtcggcgcaaaaggtacgcgccttgttcttgcttgtcccagcgcttggaaggacttgagaactaaaggatccgggttcaacaggctgctatgtctctgcagaataacttcccaaagaagcgaaagtattatatctgggccatcttcctctgttaccttcttgctgtcgacgaagccagctccgaaacggaccgaaaactctttggtacccttgcatatcgcatggtttcaaaagccgctgaaagcgttccggcagatccggtatgttatgcccttttagtactctttccgccgccctcaactctacttttcgtgatattgctcgaatcaggatggtaatatttctgcttaacaatatagaaggaattactgagccctcctagagctatccaatcagctgaggagctattgttacttgttaggatcttcgaatctcaagggcgacatgccgaaatcatcaagatcttagatagtgacaaccttggcattaactcgaggattattcaaaacgactggtccttcgttggcgtcaaactgtccaacttggaaaaggccaagatgtggactgaaggcttgttatatgctaaggagcttcttgctatcccttccagtgaggaagagagaaaggctatacaggagcgtgacgattgggctgtctggcatttacttgtcaccgctacgcagaagattgacaccgcagagtaagtctgacaataacgataaccatggctgagggtgaccgctggcttctaggaccacatccgagacgcgagacttcatagataagtttattatggtccaacccaagtccagaaacgcgcaattggcacgcttagacttggtattctccagctcccaatcgggagcggtgaaacaggaagagttgctgttagcttgccaggcttattttgaccatgccaaaaacaagctttactgttttggcgatctcttggactatctaccagccttaagtaaagactctatcagatcgtttgtggaatatgcgtcaaagaattctggaaatacagaggtatgtggcttgcggttgacagctggtatgtccgctaaccatcatctaaggtaactggcccattcagaggtgttgctgtaatcaacgccctgaaattggagtactgtttcctattgtcgtcaaatgcgtcggacgtgtctagagaggaagtagaagactttgtttcgcgctgtttgaaagagtatcgcgaggtcgaacgtcctgaccgaggttctgcgccgtctactattgaaagccagccaagtgatgacctatgcatcctcgcagccatgggtttactccgtttcagtggtaattgggtctcgagaaagcaggaagaaatccctgatattatgctcatccgcgccgctgcaattctagagcgtttgatcgtcgattctccgcataactaccaagcattgctccttctcgtgcggctttacctgcgcttgggcgtaggatctctcgcactgaaaacgtttagcaagctttcggtcaagcaaatgcagttcgagacagtcgcccataatctctttactcgtcttgcaactattcaccctcactcagcaccgcccatcgatggtgcagaatacaaggacttcaatccccagtcagcctttgtgcaagctatgatattctaccttagtgcaaatgccacttcgaccagacatcgctcaaatggtctggagtacggcagctatattaacgtcgaggggaccatcgagcttcaaaggcgacttaaacgaagcatctgccgcaggatgtgggcgctggaagtgaaacgagtacaaagactgacgggtggggagcctgttggacgttacgatgaaatgggtttgtggtatcacccggcatgaagagctacctgctaatccatgttatagcgagagacacttcgccgttagttgaccagcgtacgtttgatgcattcatgaattgcgaagcgcctggtcaacctactttcgagcagctgatgcgtgtaggccctctgccccaggtacgtgcttccgatgtccgtgttgtatacgactagaaagttaatggatacagaaacactgggttacgtcagcgcaaatgaccgatagactctggggactcctcaaagacttggcggtccagaagccgatcttagcaacgccggagatccctgagcttgataagctcgtgggagctagcgcggagtctgagatgactccttcagagatcgagtgcacaagaaccaacctgagtctcctaaggttggctgtttatatcagtggatcaaaatctgttacatccgagcaagttgaaaagagtcttggtcttctggaggagtggttgaaatccaaattagaagctctggccacggacgggaacagtatctccccgatcatgtcacaaacaaccattttcttacagtcggatgctccatatgcaccaacatggcggttcttccacggtattttcagcatacttgactccgtgaaggcgttagtttttctgtgctccaccgcatcgagaaagggctcaaagggcgccaagttacccaaggatcgagtcgaaagcttattggatttggggcgtaaggtacaccagggcgcccatgcgaacatccgcgccctcaagaaacggttgtctgagccagggaagcttggctcattgatggacctggttattgctggcaagggcattggtgaagatggcgaccagcttcgcggtgagctcgagaaaatgcttgatacatcgtccttggaactcttctgtggcgagttgatggagagttgggatgaggcacttggtggaatgttggctgtgaggatgtgaataatggtatatagatatctactgttttagcaatatttgaatatagagatgtcgtccttggttgacctcttacaattttgctaagattctccagatctccgcagactgcataccacgccatcaacgtttcgctaatcttgtcctttcttttccccctctgattatccaaaaccctttcctggcccctgcacaggatccaagcagaacgacgacgcgatgaccaattgtccaacaaaaaaatgtttgtgtcccacctagcactgaagtcacacctctcacgagacttggagaccatgactctgagcgctgaagcgaatgctgatccgctgcatgcaagggatctccgcgaaacgaataacgactggttttgtgctggctacccttgatacttggagtgcctcttgaattctccgcctcttgcctgccatagcgcatctactgcaggaaagcaacaattcgagtcgttttttggcttcgacctggaaagggaagagcggggttacactgcattgagtgaacccttcaatgtcaaatcagcacgggaagtggccatcccttctagtggctatggggagttgccttcccgtgtgctgcttcccgagttacatctcttgctctggctactgttctcctggtgccccccctttgacactgagattataggcagagcagagcctcttaaaatgagccatcgtcagatccgttcgattcatgcccgtctggcgtaatatacttggggctgctcttgttgaatcatatggattaacccggacactactgagcaccgcttctcctgtcgccgactttcagcatgtttggcgccgagttggttggtcgcgagaccggcggtcaatccacggaccagccatatagctaccgagactcggctcgaacttgggatacggttacccagtcggtatgccttagtgcaagcacgatctgcatagggatgcgaatgtacacgaagtttcaggtcttgaaagcgccaggatgggaagactgtaagtatcctctgagcctcaggcttctacggagggtgactaaactggtttcctagtctgctgttttctagcttgggtataacgcctgcgggctttcttctccaggcatcactccaagctaaccggggtcgtgtagctcggattgatagcatatgccgtgatcacgattgaagcggacaaacatggcaacggggctcatcaggaaacagtggcgccgtcggacttacgccagtacgcgaaagtaagactgtctctttgcccggtgggttgcagcatatgttgacagtgcagcatgtgtagctggccaaccgttcgcaaatactctatgcgcctttgatcttcgtcacaaagctgtctattttccttctgtacctgcgcgtgtttgcgtcagcccggcgaggcatgacatatctatccattcacttgctgatttggttcaatctggccttctacttggccaactttttcttgaagattttccaatgtattccgcgtgctaaaatctgggactcgaatacttcaggtcactgtatcaatattaacataccgattctcgtgacagctgctatcaatgtggtgtctgatctcctgatgctatgtttacccattatttgcgtttggcgactgcaaatgtcgattaggaggaagttaggtatttctgctatatttgctgctggtatcttgtaagtctcaccaacttggcgcacttgcctgatgtcggaagccggcggcgttctaactttgatatctagcggatgctttgcaagtattatgcgtcttgaagtcagcgtcagggacaggaacactaaggacccaacatacgactggtacagtgagtttttgtggacgtgagctcgccatcctaagacttcaaattaaattttacaagactaactgctaccagtacagccgagatcacctgcgggatcctcgcgagctgcctccctgcactgccgacgtttttccgccacttcttcggcaaagctagaactatgctttcaaggagtcgtacaagaggatcctcgaatcgtagtcaagaccggtctctggagaaagcaacagagctgtataccctaacatatccgcgcggccaaaaacatcacataattaccgataaccgattgatcgatcaagaccgggaactggacgatgacaggacccagatttttagtgggcctagctatgcggtgaccgaggctagagtggaagggagaacccctctaggccaaagggcctatcatggagatgatacggtgttgaatggagaggacggcagtggtcattgtaggggaatattgaaagtcgttgaggtagatgt

SEQ ID NO: 3659 - DNA, 2520 bp, Emericella nidulans
aaaccccagcgccggttccggtaaaggtcccatggatccttccaccgggaatgttgcttgcgtccccgacgctaggaaaaacgctctcgcaggcgccgggcggcttgcgctcaagggtaagtaccccgtcaccgctggctgttggcgcaggaatctaacgaagagcagggaatcactgttagcatcatccttctcgtcatcggcgctctcggcttgaccctcacgaacttgggcaactacgttcaaaacgcattcacatactccgaacggtctatgctgtacgagtcttccgagtacaaagagtacctggccaagtacgaggcggccagcttcctgtcgtcgttattttactgcatggccttttatgctgccgtcagggtggccagtcagcgtgtcaacgcagctgatacgatgtctgcgtatgcgcctccgcccccgcccccgcagcctccgatgacattcatgacggggaacgaaggctatcataactcggggccagcttattatcataacctggggcaggagcaggggtacgggagaaatccagagtatgtgcggtagtgggcggccacagttatgatggaatggtgcaatgggatatttcgcgtccgtaacggcagctttatgtttcccttgtatatatgttctctctcatttctgcttctttctttactgtcgttttctcttgttcttttcttttcgttattttcggtatacccagttggctaaacgagcctcacgctagcagtacgtatatatgtctaatcataatttcagtcggcaccaacacaagcatgatcttttcaagcctcccattttacagtctcaacccttcgtccccccaaaacagatccatattccccagccccgacgaaattattgacgtgaattgcccccaaccaggacaatcggacgacgagcgactgaggcttagcccctgtatttcgttgccgttcgtgtccggggcaaacccaacggcgctcccttcgagtgagccgctataactcgttgcggtcgtatgcggactggtttgggcatcgcacgggatccccgcctgggcttgactaagagctgtagagtaaaaggtcgtctccggtgacgcgggaaaatgcgtgcgggcattgctatatccgttcctaatattctccctgttcgctggtgcgaaagatccatcaccagctgtgtgcctgggctgactggcctgccgcatcgcctccacacgtagttcctcaaggacaagacaataccgctcggaaagcgagcccttctcggcaatgtccgaaaggtgggattgacatcttgttgcggctgagaggtacgtgctgtacatgtggaacggaagggcacggctctggatgacgtggatatagagcactatcgtggcgttgaaagcgaagtaggacgttatctggcggtatatgcgttagcatagacgaagaaagaagtgaaataaatagcatagtaaagccggatggttggatggggatgtagtaggcatacccagagcgcccctaacagctggcgattctgggtgatctcatctatgatatcaacgattctcatagcagcatttaggcactgcttgatactttcttgtgcctgggccgctaccgcgatgcaggtgctagatcccacactgacttgcgcttgtgaaccgttcccgccagcgcctcccttgctcgaacgagaccgaccatcttggacgcgtgtaagatttcctagcatagatggccgatgcgtgaggatggtcgaatgccaatacgtaaggttaagcacgttccgctgtcgctgaaagatcggcatgagtaacgatgcactcagcacatctgcatcgagaaaccatgccagctcggaccgccagacgctaagctccttgctgatcgattgtacgaaggacagacgcttactgtccgagaccggtctgatggagtacagttcccgtagaatgcggcttataatgcgggcgatcttcatgtgtgctaggggcgctagcattgtcgataatgctgggctcgtatttccgcgctgaggctgttcctgcggctgggggagatggagctggtggtcttcaagacatgccggaaactcggtatcgatatcctcgtcgtggaacgagcgaggtcttcccaatgcagcactgaggtatgcatcgagggtgtacgcgcaccagaatgtgcggcggcggcactcggcctcgataacactcatcccgcccccatttatagagggatcggccttcctctctcgattcaacccgatagcgagcgcgagatgtgagactgtcccgaacaaactccagcagtgatttatgcgcgactgggagaggaggtagtagcattgcgtcagccgtgcttgcacgcttgtgagtctgatcgagcccttttcctggcttagctggtgctcggcggctagatagtagcgggcactgctcatttaatcatcatccatcagtactggcgctactgaatgaataggggcctacgtggatgatacctcaagtctgccggcccgggcctttcc

SEQ ID NO: 3660 - DNA, 2845 bp, Emericella nidulans
gaaacaataaaaatatacataaaaataagagatgaattaaaaaatagtaattaacacacataaaaatatggtggtaaaaaaagtggaaaacgagaaggtacaaagccaggggaggataaaacctaacttagaacaaaaaaaacacatctaaagaagataggtaaatgtttgccctggacaccacaaaaagcaaagatttgaacaaatttttcaatccaccccctgtaatagtggcattttacaacacggagggccatataaagtattaagacccacgccttttcccctaaaaatggcggggtcaaagtggcctagtatcggtccaggactttccagctctgcaaaattgggacttgcccgcagttatatttatcatgcgggggccttctttgttcccgatcttgtccaaatgggctttggtcttaagcgtgtgtggtcggaatttgtcaacatccacccgcaagaacttcctgtcccgtaacgagtatccgtagactcttttggaaagcagcgctagatcttcgtccgtccattcctcttttataaagacccggtcgtcgatcacccatttgttgtcgaggagatatcgctcccttgctcgccagtagacaaggtcttcgcgcgtgagtatcctgttcagcttctctgccacagtcttcttttcagtcatatgccatagacagaacttcgcgccgtcgttgatggcaaggcttcccttcgttgtgaaaggctcacggagagaggaccagtcgtccatatgtcgtcgtgcttcctgggtgtccagaaagacctcgctatcgacatactctgaatcctccggcttggactccgtggactttccgtctgactcggtccgttcaaagagaccagtaatgagcgtccaacctgcgtagtagtggtgcaagttttcgtcctccacgagcgctcggaatgctgttccctgccgagcacggtttgataggaatcgctcgtaatttggatgaaatttcaagggatagaagggcaaagcggtaatgtctttctccccgtcgaaatattccatctccaatttgcgccaacagacggtgtattcttcaccatcatggtccaggcagtatacatccgccagaagacgtcctatgtcggaggacagccagccgctgtcgtcgatgctgatcggatgatcggctgggattcgggtcaaacatcggaaaacagtctggactgctgatcgatccagcatcttcgtcgtcatgagcgagggggcgacgtagattagctcacccggctcaagcagcaatgagatttccgcataagacaatcttctactggtttgggcgtccagctgtcggagagcggtatggatgggtaggatcgaactttccacgaactgaacgaagcacttcatctggtcaatgggcgacggcgacactgatggagacaggcctttgggctcaggctcgctgggggggatagagccagacgccagcactcctctctccatgtcagctaggatttcacgcatgtcgtcaagatagactcctaagatgtaaaaggggtacataaacaccaagttgtcctcctcattcaaaatagaaccgttacccagcttgcgggttagacgttcgagatgactgagcactgttggcgatcttatgcgcacccggtgcaacttgcggttttcaccaattttttccggagattcggccatcagaggcctgtgattgccggaatatgtcttcttctcgattgcttctctcctcctgagttcttcacgaatctcttccagaaggttgggccggccgatgcagacttcaatcgtataatcccagtcgtcccccacagttcgattcataaagccctggaaattatagtatcttaccccgagatttactctccggtcctctttcacttcatcttcagagttttttggcacgtccggtgagctttccgttctcttctccgtctctttcttcccgtcattctcctcctcagtcatcctagcttctgccccttcactcctagcgctcgtggtagtagacgtggaaggttctttagacatagggaccagctcctggtcaggattgggcctggaatcctcttggggattaatagaagacatgttcagctcttctttcattatttttcctccttggtttctatgaaaaaggtagttgagtaagctgcaagaccggaacagaaaggctttaagcgaggaaagaaaaacgagacgtagcgaggattgtcgactcaagagctgacgacgcgtatttaatactcctacgtgaactcggcgacagccctgtcagcattaacgagagtgctagccgcagcctcaggcgtggagtaacgaggctgcagtagtggccttcacctcactgctgtcatgaacatatccttgcatcaacaaacagtcgtggatgagagaagaggggcaccttcattgtcagccgaagacagaacggcggtcctgtcagtagtagcaagggttgtggccaacaggctcaggcgtgaagaaacgaggctgcgctagctgattgctcatcccactgctgtcattcacgtatccttgcaataccaagcagtcatagacgagtagaagagggaagcctccgactactcagctcagcctctcagcctggcgagcctatggcagcatgtcagcaatgggataaatatcgagaaaccattttatctcttctgcgctcctcccaacacaccgaacccttacgctttccagcctcagaaactatcatgggcaaagagaagcatcatttttcaagacacattccatggagaaaatctgagccagcaacggatgaggatgaggcagggatgcgaaagaaaacaagggctcagcacgcac

SEQ ID NO: 3661 - DNA, 7688 bp, Emericella nidulans
caacgtctcgtgcattcttactctacccatacaccagcgaaagggttatggaaatctcctcattgacttctcttacctccttactcgcatcgaaggcaaaacgggctcgcctgaaaagcctctttccgatatgggcttggtttcctatcgaaattattggcggcttgtcttgtcataccagctgcgaaatcaaaagacgccggtcagcattgccgagctttccgaacgcacaggtatgacggcagatgatgtcgtttctgggctggaagcattacgcgctttagtacgagatcccgtgaccagaacatacgctctccgtctcgattacgactattttgaggaatgtattcgcggctgggaaagcaagggatatgtgacgctaaacccaaatgcacttgtttggaccccgtacatcatgggtaggaataatcagtcacaattcgaccgcgctcctatacataccgtcgcgccacgcgaggggcttgaagaagacgatgatgaaagaaaagagctagttgaagaagcttcaaagcagttggaggcctccaagcggaacagtcaagcgctggttaacggcataagtagcgcggaagtcgccggtacactgcatgaacctgcaggtcctccttctatagattccctgtctaacaccaatggcgtccatcatcaaacatcaacaggcgcggccggacaaaaggagtcgggacctttgagcaatgttccggcatggcggttcgaaatataccccccagttcaagcaccagtctccaaaaagcgttctggccgcccgtttggggcgaagtcatttcaaaaaacctctatcactccgactactactcgcaccagcggtcgtactacgccccgaaaggccgcctccctttcaacaataaccccaacagcaaacgaacatagtgttagacgaggtcggagtgcgaagctatttgactccccttcgatcggaacggaaaacgtggcaacgaacggtatagagccagatcagctcgatctcgctggtgaaacaggaatcaacagcggccaggaggctgtccgttttacggttggagaacaagggaccccagatctatctgaaaatccgagtgatgcccaaataccgcccacggccaatggcgttaatggatcaaaagcggtcgaagagcagcaagggccagtgacaccttcgaaagggaagattgtcgaaggcagagccaaactcacgcggtccgctagtcgaaaatctgttgtggagaaaatcgaaatgcttataccagcggagggtgaaggcgtcgctgtgcctgacgatcatggaagcgatgtcgatgcggagggcgatatcgatatggaggagacataatactttgctgacaggctatgatatcaaagagtacgatctggcattgacgggcgttttgattttccttatttttgtctgtttttcctcgtctctgttgtgtcaagcaaggagtgggcaggaaccggagttcttaatggtcttgtctttttgtctaggctatcgcttttatttctatcgatcgagcttcttctcagacactgtgttgacttgtgagtcggtttggtttaatcagtagtgtgaaacaagttataactgtgacatactccgtatatctctccgtaccatcgatatagacatagtcaactgttgttcgccgttagtttgggctagtcggtaagccatcctccgtcctaattacataagccatgactcggcctttgcgtaaatcgccggctcgctaggaaactggggtggggaatcctgccctccagtcaccaccagtgtttgattgacgacaacactctaaagcggagattcagagatcattttcatgcgagagctactcacaaggctaaaaaatggcatcaatgatctggccattgaaccgtgccagtgaatcggaaccgttccggtgtaaaggcaggggaagtggcgtctgcgcaccagagcacgactcatgggtttacgggatacggactccagactttactactccacagcaatgatccgccataccagcaagctggatctactgctggccaacaatctacgggggaaatcacagatccaaacctcgaggcgcactagtaaactcagagtgcttgttgtggtatggatatgcgcaaaacgccgaatttttgctgaagaccaaccaggaagcctcacactccatctattattgtcatcgcaactatggatgcacgagaaattggtacagccctcacgtcaagacttcgcagttgctgcctccgtgctgctctgggctgtgccgaattcatgcccggaagctggtagctgcgtagatcgccaccatcatttgagttattctgcatgatctacggtatccaggaacctgttcatgcaccatgcacgtaccatgggtcccaccaacgattcatataatcaccgtcggtgtcctcgagcgctggccgagcatcctacagccttctcggtcaaccgtcagacgcagccttcgtctgctccatgcccaacatggagattccaccggacgttccatcctgtgcagtatgtatcccatatccctttctatcatccaaccgcagattactgacgtcttccagctgacgtgcctgatttcagctgtcggtaactcgacatgttccttcaacgacctcgactgtgtctgcggcgatgcccagctcaatgcgcagtcaacagcctgtgttctcgggtcctgcacggttatggagtctctgtgtacgcctccgcgctcttcaggatcccgatcctgccaccgctgaccgaacttgcagctgcgaagaatatgacatacacattatgtggatggccaaccagtgatgatacgcacgttttccccgttaccaacattgtcggtattgttgtcgccatcatctctgtcgcattgcgcttgacgagtcgtgctctggacaaacgattgggctgggatgacttgctgatcttcattgctctggtaattgaccgtgacggaatcaatgggacgagtgctaacgcaacttcagctttttgctgcctcaatttccggcattggacttaaacgtatgtaccttggcatccacggttgaaatgctgctaatgccctgcagtcaaggataccggtctcggcaaagatatatggaccgttccgttcgaggatatcaggcgaacactcaaggtaagaccgctccagaaactgattggatataccccactaatgactgctgcagctgttctttattgaggaagagctctattgcatatgcattgctcttgtaaaatgttctatgctgatgctctatcttcgtctctttccgaacaggggcttacgcattgctgttttcgtcactcttacctgtaccctcttgtggggcgttggagcatttttcgtcttactcttttcttgccgcccaatatctcactattggaactcatgggatggggagcataaaggtagttgtctcagtcataacgatatccttctcgcacattctaccatcaacatcattcttgacgttgctatcactatcatacctatgccgattgtgcttaagctccacatgccggttgggaaacgtcttgcggtattgttcatgtttggcgtaggcttagcgtgagtctaacacacatcgcttctacatcgatgcttgcagaactaatagtatgcagggtcaccattatcagtataatgcggctcgtggaaacagtgggattcaacagcacacaaaacccaacaagtacgttcatgtttgttatattcaccagtccagcggagtgctaacgcgccttacagaggatttcgtcccggtgggaatatggagtcttttggagttcgatgtggccatcctatgtgcctgcatgccagccatgagaacattatttattcgcctcgtcacgaagccaactgacacctatgcttacggctcaaatcggtacaattacaaggtcagcggtgcttctgtttcccaaactgcaaacagctcccgtgcccggcagtcgcaacacatatcttcaaaagcgctcccgtccactgtaaccacggtcgaaggcgtccgactagagcaggagtttattcggctcgaggaagtcgagaccgaatcgggatctcttaagcaagacactcataactcttacgaagacccgaggactcgctcagcggctcatttagtccgcaaggagagttcttgaacgctacgtcagtcatgtctttctatattcttttggcccaagcggctaggacactctttatcatttcatgtacatacttagcagctggtgtatgaataatgaaggtttttctcttatcaatattgctctgctttcgatttattctgagcctgaaaagagtagcttcctagcccctttaagcaaggctcctagctaaagagacttttatatatccagaatgattccgggtgatgtccagacaccacccctctactcattcgccaataaatgcatgaccgctttcccgtgaacattaagccttcgccgtcaaagcattataatgctccccaagtccatacgtatgcctataataagccaaccagataacccgtttcgcccgctcctcctcttcaacatccccagcctcaattttctcaatcctcccatcgccctgcacgacattgatatccaccccataagcccgcgcaatagcttgcagctccaactgcccgccccattccgctgtgagcttaatcttccgcgtgtaagactccaggggctcctccatgaacggttcgaattcatctttgtgttcagcaataaaatccgccgtcaccgcgcgcacggccctatacccgtcgtgtttgggacttgcgactgtatcgatccgcgtctgagttgtgggtcctatgacaatgcgtgagggatcagggcgcagtcctaggcccagttcgtctagttgagttgcgactgcggaaaagaggcagtggccatctgggtttatttcgatttctttcacgttgagtttcttgaaggccgcgtccatcgcctcttgttcggtcccgcgatggttcgttagctgagaggcttcctctgaggctgcggctgcggccgcagtttgttctgcggcgcgtctggccaagcgcgctttttgtcggttgggctttttggtacgagtggttgtgctcgttgcgctcggcgacgatgaccctgatgaaattgatgctgatgctgaagcagaatttggtgtcgttgactctcccgcagtgccattaggtgtgctccccaagtccttggtatctccattcgtcgcactgtcgccatttaaacttaaattctccaagtcgtcaacgggaggttcgctttgatgttgtattgtctcgccggtcaattccgcaatctctgcctgatggcgctcggagagttctcgttggagccgctcgcattcatcgttaactcctcggcgggttttcttggttgcggactttttcttctgggtaatgcgggcttgtaaatctttttgttctttgcggtggcgcgagaggaggtcttccattctatatggtttgtgatcgggaggggtcgtcgggtatagagtaatgttagaagctggtctatggggttgattgacgaacgggtataaagaagcagtaaagagtgacagtaatagaaatttgaaatgctatgcctattgcgcaaatgaagtagcaaagatgggctgatgttctgaaacattaaaactcgtgccccacgataagtatcccactttattaatcgggtatagcgtggtgatctatcccctctgggcctggggtattgccagcaacgctagcagtacccttcactcgcacaacattaaccagttggatctattctccgatcccataccttgttagtgtatatactgatcaagttccagccaatcccacctcactagcggagaatacttcgaggcaatatgcgattgtcggtcataacggactaacattgttccgctcatgagcctcggcccagctcggtctggggtgctctcggttgaggtcgagctggggaggaggcagtgcctcgatctttctgtacataagtcgcaagatctcctgtagaataaattcatccttttctcatactgtgaacaaaactcaactcacaatggatctccagagcctattcgacgtcaaggtacgcaacatctccgcatacgtcgtgtgcaaacgccctgtgcattgtgctacgaagctaatcaagatcctgtagggcaaagtggtgttggtcaccggcggcgccaaaggcatcggccgcatgatctccgagggttacgttacgaacggtgcaactgtttacatctcgtcccgggacgcgaaggcttgtgagcaagccgtgaaggagctcaatgcgctcggcaagggcaaggcgcacgccattccggcggatttctacaaggaggaggatgtcaagaagcttgctgaggagcttgccaagcgggaaagcagtacgtgtcctaccctagcggagaaaggaagagctaatgggacttctagagctccacgtccttgtcaacaactccgggtcaaactggggtgctccctacgacgagtacccgtcttctgcatggactagggttcttacgctcaatctccaccgtgtctttgaccttacaaagctcgtgactcccctactggagaaggcagcggcgccgaacgaccctgctagaatcatcaatatcggtagtatcgatggactgagggttccggcgttggagacatttgcgtacagtgctagcaaggcgggcctgcatcatatgagccgtgttctcgcgaaccatctcgggaagaggaacattacgtatgtgctttgaaccgctgctcgattgttttgttggacgtatgggaagttactgacctagcatagatcgaacactctcgcctgcggcccgttccagagtaagatgatggctgcaacgctgaagaacttccgggagcagatcgagtctggtattccactaaaacgtatcggtacgccagaggacgttgcaggggcttgtctattcttgagtagtcgggctggtgcatatgttaatgggtcgacgatcgcagtcgacgggggtagtgttgtggctgcgaagctgtagtaaatatattttgggtattataggaatgatagaattgctgggcagacgacatcaccaactaatcaagtggagtgcttgatagatagcgcttaagcaggcaagcttttgccatcctcaatcgcaatttctttcagtagtttgccagcgctttgttgtctccatacgtcatgacactatgactacactcttttgccaactctcaggccttccactaaccagatgaccttctcagcacaaatcgcacagaccaaactaaacaactgattcgcaaccacgcgccacgatcttcaaaggccaagacttttttgacattcaagaaccgatttcgcggtgtcaattgccgagcctgtcggtttgtggattcggtttgtggaggctgaggccttcactatagaaaaaaaaacgccaacggatcctgacaattggctggcaatattccctctcagataaagtaaatgagcagctttcgaaaggatccgtggggtggagagcatcgctcgacgatattggatttgtaaatgcctcaatggatctactggagctatctcatctacgcggcagtggaacctatcatcaagagctgacggttgacatccactaaactcgaccgttttgattagacctttc

SEQ ID NO: 3662 - DNA, 6144 bp, Emericella nidulans
tggaaatggccatctcgattaaaacccttactatttcaatcgtgaaaaaaaaaacccctatttttaaacactttggaacaaaacttcttaacagggccctgcccatgccggaagaaagttctccaagtaatgttcaactcacactgtaaatctgcttcggggccatgaataatatgaagttaggagtatggtgcaaagaaagtgaagcatgtaaaatggagaatcaataactagtccccgcgcccagaagctcccttattgattcgtaccacgtagtacctatctatttaataccacaactgaaattcgtctgttaggcccaagcaagagtgtagctaggtaacagcgctcaactcggtcacgtgctatttttctcgaaactctggcttcgtagacaaataacaagaacttctaatcttgggccctcgaaaaagcctccaatatcttataaagtcatgcttattgcagccaaacagtatagccaatggcttccagcatgcagggcggttaaaggaattaatcatgaaaagtggctctgtgctggactcggaaagccttctcgaagattgaaaagttcacagaacgcgcaagcacctactgtcttttctggaatccaacccacgggcgtaccacatctgggtaacttccttggcgctcttcgtgaatggtttaaaattcaagaagctgccaccgagaacaccaagttgatattctccattgttgatttacatgcattgactgtgcctcagcaaagcagtcagctgaggaaatggaggaaagaggccctcgcaacattgatagctgtgggtttagatccaaaccggtcgacaatattctatcagtcttctgtatgctgcaatcgctccagcttctactagtcggctaatttacccgtcaggtcccccaacatgctgagttattttggatcttgagtactgtagcttctacgggttatctatctcgtatgactcaatggaaggtgagtttcgagtactgcaagtcattctgtggtctccggtacgataacatccgcagagcaaactccaactgccagaggatgcgagcttggacaactccgaggttcgatcaaatctacgccttggtctcttctcctacccagtgctccaagctgcagatatcctggttcataggtgtggttgccaacagttttgatgaatatcatttgctaaggtgatacagagccactcatgttccagtcggagaagaccaaagacaacatctggagtttgccaggtataccgcaaatagctttaaccatctatatgggccgatttttccctctccagaagcactaatctgtgagcccgtttgaactgtatgaacgatttttggactaactgtcgttagcccccgcaaagagagtaatgtctctgaaagagccgacactcaaaatgtcgaaatctcatgcggatggacgctcgagaatcatcctcaccgactctcctgaggatatccgacgaaagatcaaagttgcactcacagactcagagcctggcataacttatgatccgatacgccggccgggcatctcaaatctcatagaaattttcagccatctcgaaggaaagccgtgctctgagattgcctcattgtaccaggacgcaaccccccgtgctctcaaagagcatttatctgacaaaatctgccaaattttatctccgatcagagagaagtttcatgcggtaatggcagacggccatgcgttgagcgcgatttcagagcagggggcgcaggaagcacgtgccaatgctgagattactatgaaaaaagttcgagatgccatgggtctttgaagccctgatgctgtgctgcgtccatgtattttcaagggaccaatcagtcccgtatagcatgtctgagcgttcaatccacgactatatacgcgtgtcacatatcacttttaatctgttcaactctttatggtagccacacaaatgtatatacatttcttacgatgtttgactctaagcgatctatccacaagtatctgtagctagctaattgcctggattgggaggtgtacgttactagttatagaaccatggggatcaccgcgcgtgccacaataccctagttccatggaaattcccacgccggtctcaaacttattcttaccgccaaacatctgtgccttctgagccccgcttgacctcgcagaagcaatctagatggtgcctagttgagtatgagggtccggagtgggattttcaaataccatcagcctattacattgaagccggcgatcgcggacaattaaggtttccggccggtccgacttggcagagcttacgtcgctttcagtcattattgtagggtggcttgaatccttttatggagtctgttatcgcttgtattattgtggttgtattcaactttttaaacctctgcaattcttttgtgatgattcataaagcgttcaccactcacactatatgagggattgttcgtggacctatctgtctgatagtactgctacacatcatattcaaagagtcctatcagcaccttcagatacaaagtccagacacaggccagcccccggatggctccccactgtcagcctgtactactactagctcagtggtgacgacaacacaagatgcgacatagaaccagtggatcatagccccattcaaagccccctccccaatccaggcagcaatagaaatacgacaaattacaaaaagctcaccatgtcccactcattcaagccgagcaaaatttcactatttgttgtttaaacagagacagccaatcaccccagacaatcaaacaacacacctgatcttcgagcacttacgacagcagttggagctaacctgcggcggaagtccgccgttgtatcaacaagtgcacaatgtggaaggttatttttgttataggagcttttctcttcacaagatgctcagggttggctttgatgcttcgacgaagtgactcaccatcagtagttgagttaaatatccatcgcagtgagattccagaccctgtagcaagggaccgaaggaggcgaaaacgagaccaaacagttgcgcaactgatagacaatgaggtaagtcagtaataagtatatatgccatcgtacttacgtccctataggaaacgctgtatttctgcaacctaactgttggaactccagggcagagtttgcgattaattcttgatactggtagcagcgatttatggtgcaacgccgcgaattcaacactctgttcttctccgaaagatccatgtcgcatatctggatcatttgacccaagctcgtcatcatcttattcttatatatcttctgatttcaacattacctacgcagacggaactggagccgccggggactatgccactgacacagtcagtattggtggtgcaacaattaaagacttccagtttggaatcggctacacatccagttcagcaggtatgttgagaaaatgttttgttgtatcagtagctgtaatattgatagctctcagagggcgtcttaggaatcggttatccatcaaatgaagtccaggttgctcgatacggagacgatgcttatcccaatcttcctcggttcctgatgcaaaatggatttgttcagtcgagcgcttatagcctctggctaaatgaccttgaagcgaataccggctcaatcctgtttggaggggttgatacagagaagtatcgtggcgacctgcaaactctccccattcagaccgtcaatggagagtattctgagctgataatagctctcactggcgtctcgctggatactgaagccaggaagcatacagtgtcttcaaacgcgctaccagcagctgtgctcctagactccggcagctctctatcatatctacctgactcaattgccgaaaaaatatacgatgaccttcgcatttcctatgagccgtccactggtgcaggatacgcgccatgcagtttggcccggcaaaatattaatgtgacctttacgttctcttcacccgaaatcgcggttggcattgatgaactcattatagatgccggagatcttcgtttttctaacggtgaacgcgcttgcatattcggccttgttcctgctggagataataccgctgtactaggggatacctttctgcgcagcgcatatgttgtctatgatttgacaaacaacgagatttctatcgccaaaaccaatttcaactcgacaaagagtaacatcctagaaattggaaccggtagtgacgccgttcctggagctacaaaggtatcgcatcctgtcacttcagtagtggctgatgggtctgggtctagaattggtgcgccaacgaacactgaagatattgtgccatcggcgagtacaggcgcagcggttgtgctagggagatcgacaatatctccggtgctcgttggcgctgcagcattggggtatatgtttgctttttgaaattttcgtacagataaagctgatttctaggtagatgaatatcaatataagaccctttgaacatgatgtacgtgcgtataagagaggctcggggaatcaaaatcagaaatactttaactagctagctcagatcggttctagagtaagatgtgcgggcagatggtgagcaagtaccacacttgtaggcgcccggagataactacttggtgtacacttatgatcgacgtgctcgaggtgtaaacagcctagtttggttatcatctatcccgtggtgggtctcccacctcttgtaccctactttcagtactagtgctttgaacatgttctgcagaccgcgcactatccggggccgtctcggacaatccgccgagcttaaaccacagccacaccaccctgtggtccagcttgcaactttttgaaagttgtctcggtagggctgacttcggaaggcggccgaatcaccacctgagtacagactaattatgctgagtataaaatctagtcagtcccatttgcgctgatcccgcacaagacgatccaaatgccccggctcacaacaagggctatcctcgaagcaaacaaatacgaccgcctacttcctcttctcttaaaagagtgtcgctcactcagctctgcggtaaatgagtttcgatggcttcaggaacgagcacagcgtgtcgtatctctgaagtcgatgcacgacaggaatggctggaaacaagccccgtctggcaggagaaggctcctgaaatcaatgtgtctggcacgatccaggggtgtgcccctccagtatatacttggtgatcagccctttggtgaacttgacatcaaatgtacgaaaggtgttttaattccgaggtaacatttcctggccaattttacatttaagcagatccgaatctctcctaatctcccagcatatcaggcatgaaacggaagctataactatccacaccgcgaagctgatacaggatcgcatgacctgtgtggaaagggatggagcagcacccctacgcatcttggatctgtgtacgggcacggggtgtatatcactacttctgcacagcctgctttcgccctgttttccgcgattatcaattgtcggtgttgacgttagtgccatagctatcagattggcgaaggaaaatgtcgagcggaacgttcgcttgggattactgtcagaacgtgctctaaatgaagtcgactttcaacacggcgatgtgctcgggcttagctctggtcctctctcacaactggaaggccttttcgaccgtacgaccggtctatctgcatcttctggacctcgctgtgatgtcatcatctccaacccgccgtatgtttccgtcgaagaataccatgacggaacaacatcgcgcagtgtccgattgtttgaaccaaggcttgcactagtgccgccggacagtactctttcaagtataatagaatcaaagcatgtccggcgtgaagacatattttactatcatatcgcatgcttggcagcactttttagagccagaatgacggtgctagagtgtgggaaccgttcccaggcaaaaagggtcgccaccctatgcaaatctgtcactggagagcatggttattgggatggtccagtactggttgatgtttggtcagtgacgggctctgatacaggtcccagtgcagtgattatatatagtcctagatgataacttgctgctttgatgtggatcgcg

SEQ ID NO: 3663 - DNA, 1406 bp, Emericella nidulans
cctaggaagggaaagcaatcttctaacgttccagaaacctttgaagagaaaaccttgttggtaccggtaaccggtctctataaccaggtatacattaacagcatttatcaagcatatattacctaggaaaaacttcaataactagcctatatgttaatgtaccaccattcgtgatccgcgatggcagttattaggatctctcaacttccttgacccggccagtcaagccatcaagatcttctgtctgtattccaaccctctctcacaaggtcttccggatcagattctcgccttatcatttgccaacgagcagcattgttaccgccattgaagtgcttcaagatggcctaagacttcggaagcgttgtcgaggcacctgtattcgagcatctgccgccgcgccggtacctgattgaagaaactaggccttcacatcctatatgtgtgagcggatagaaatgcaagcccaaaagcgacatcgtgtgtagaccgccattatcgcaaagaaagcacagcttttccctaatttccttcagctgtcttctaaccctgattgttgaatagtcaacgccaagccgctcaagcacgaggacccattctcctcttcattattcctaataatatatgcagcaaaagtaaagaacttacttccctattcttataatccggcccaaagcgtagcctctttaccttttactgaccctaaaagcctggtaccgccaccgccatttgcagaaatagccctaggtatgtaagctccagcggaagagtttgaggtcagtaaggaagcgttgcatagtcttgttcaaaataacccgttaaatggatactggttcttcttctgtcggtcattaagagcaagaacataagactttccagagccacgcaagcctagctagttcgcaacaccagggtttttctttcaaaaaaacaaatgactctgtggatcgcccatcaaagcagcatgaatttgcggttcgtaatagacaagaactggggggtttgagaggatttatataatgactaaataggaccaacttgtaatttgggggatcgggtggctaccttgagtaagacgttggaagagccaacaatcgaagggtctgcgcctcatctgtacacccctaggctagtataaactgtgctcaccaaatgcgctacgcgttatcactagccatatacataggccacaagtacgtgttaagtgtgcagctcaagctaccctacaaagagattggcataatatgcaataaccgttgatatcggtggaggttcatagatgtcgaggtcaatgactctgggaatgactgaataggtttagggtagagagatctacagactccggctcacacaggctgcatatgcggccagcgttagatgttacggggatataatagactgcgagg

SEQ ID NO: 3664 - DNA, 2757 bp, Emericella nidulans
ctcattccatcctgttggggtcaagttagttcccaacagtctgtacgtgcacccagttagcctgattaggtgagcacgctctccaggcgttttttcaccatcttcgaaagccggggctaataatctcatgaatggctagctgaacccatccctggacttgttccaggtctgtggtagcctatctcatgttcatggaatccagtgctttcagtccgcgacgcgcgtattgatagaacgagtgtccaatattctcatgcagcgcagataccgaagccccaagtgtccagatcgcatattgtaagcacgactgagcctcagttttgattggctgtcggcgccaggaaaagtagcaactctgatgctgaatgggcataaaatgatggatccggtcgaaatataattggtccctgtactcatttagtatgcttgtcctgggtgaagacgaaatgtactgccggcttacaagtctgcctggatgagatctgagatcttaggctcacatatgtcctccacattctccattccctttatatgtgaaccaacgtccggcattgtcagttcaacgggaatacttgaggatcggtgcgggggagagatcgagttcaccccagagccggcattggtcatgattgtccccgacgaactgttagccttggacgcagcgtacacgccgttcaacgaagactcgtcatccatcaccggcaattgccatccagacaggtcgatctggtcatccagcatgggagtgtctagcgggtgatcatcggtgggtccactgaaattggtagtactctgttgcagcaaagctccttcgagggcagctgtaaaagatacgataaacaatgtcagcccctgtcctgacgtcttctgtcatatgggaatgaaagtatagcctggtggacccaccaatgcgttcctgtaacaccttgagatatccacgcttcgggccgcgcgagggtcttgccgtgatgacctggcattctacaccggatgcctcgcacagtctgcattgcggttgacggcgatcacaccgcagctttcggcgtctgcactcttcacatgcagcgccgggtttctgacggggttttggggattcggtgggctctgggcttttgacatgttgagacatcggctagctggggttcctgaatcggcggatgagtgtatctaggggttgcaaatatagttgccgccaacctcttttgatacagatgccactcgagacgagtgattcctgatcggcgcaactggggctagaatgtacaggtgaagaaaaagcttgggggggttggcaactcttggtactcgacggcggaaccacaaggcagcatatatatacacatggtttcagtcaagaatcctgccgatgacggtggggacgagaagacaaggcgtagtcttacatttcttggatagaaatgtttttatttttatttcgttttcatttttacttttttctccccccatataaacgctcgcggggcattgctgggcgtgcctgttgcagcagacatgcatctagtgtgagcaggggcacaacgctggtcaatcgagacggaccaatcggtgcttattatagacgagatatatcaagttgactcagataaaagccaggataatacgatctgaaaccccaccagcaagagatccaattgccaggtcaagcttatgggttgccattaacgcgacatcggcggcgcgcctgacggacgctgcagcccgccgtcggacacccagagcccatcagggtcctcctggccctattgaacagactggccgaatatttgagccgcaagcattttggttttcattctcaatttttgctttcttttctcgttcatattttattgatagtccatcaatgagaatccttctcgcttacagcctttttgcagctgctgttcgggtggagacgagccaagccctagctagtggatgtcccacctaagagggtgctaagttcatggcagacgtgcagttcactcgacgcagagtttggatactagaagggtatattggtatatcagtatacatatcggctgaaacaaccaataatgagctggacgaatcaaatctggtccgtaatgaaaacttaggagacttcttcagatattcggtacatggcgggctgtaaaaccgtcgtctctttctacaggttgggttatttcctcagcgctaagtatggtcagcgccaatatcaagagtattacagacgacgtgtgcaaattttactttgaaatgtagaactaataaattgcaataactccttttgtcaggatgcgagaatttgaaaagcttaccatgccatggcccagcacttcaaacggcgtgatcaactacaggccacgcgaattcgacacgaggctggcgatctcgtcagccaatggatggggagggaatcactgtgattgctcttataccccaaaggagcccatgtcgctgcatctagccacgatactccgggcaacctgcttgtgcttcaatcctagccaatagagcgggattgctgttgtatgccggtaccttttttaaaaaaaggtggcttcgttaactatcctggattgcacatttcccatagcttttcaattactattcatcaacagccagttcatcatctttcttggctcacgctatatgacattgttattgtccaggctaaattgaagattttcttctcggcaaagaccgttagcgcctagtggcggtagaatctgaattgagtctccctcttagacttttgagttggagtttcaaggt

SEQ ID NO: 3665 - DNA, 4481 bp, Emericella nidulans
atgcttcgcccggcgtccagggtgactatcaaggaatagcactggaaaatgtcgatccgaatgttttgactcccggctcttgagtggctgattgagctcattccgcttgttttttccctactcacgctatccttattgggttgtcgttcctggaaaatggaacaaccagagcgcctcgcgtcccggaactgaccggctagcatcatttattgaagcaactccatctattatggaaatatcggctatgtgccgatacttcgtcttttggcgaagagggatatatctctgtttgcgacatatgttccgaacatattcatttttttttctcgttgtattaatatccttctacttcgcggccggcccttagcgatttcttaaagcccacacagtggcatttcttatctttctttcttactttcccctcttctgtttaccattttgccttttgcccttggcctttttctttttttctttttattcctttacctggtcgggcatttaacgcggtcatgcaagaagtcggactaagatggcgattcccttttgatttacaggtcggcgggttaggatttgtttgcatattccctttgtgattgattgtgattgagcctccatttccttgtgcattgccctgcttctaagtatctatgcttataggagctgaaaatctcctgctgcgagtgaggtcagtaattaatccacaggtttcactcacattatctctagaacccataaatgtacagagaatatcatagttataagccgtaaagtgacaggggtatcataatatgtactagctctaattgcagtcatctctcgactcgaacccccttggcgccggagccttcaaccctttggactccctcaaatatcgctctacccagacttccattttttcaagcacattcctctttccctttgtcacctcctccccgactccgtcccgacaccaaacactccatgcccccatctccttagccatgagcacatccgtccccaaccgatctcccacaacagcaatctcgtcggctcgctgcactactcctcgctcccggaaccactctagcacctcatttccacagaacggctttttctcaacattcacgccctccttcggtgatgacggtaaccggaacactggaattttgagttctgccagacgctcttcaatctcgagagcctcggattcgtaacgcggatgcgatcccgcacggttcgaaacgatgaggatggagtttggggcagtggaaatgttaaatggagatgtaggtgagttgcggagcgtatggaggtgcgcgtagatcttcgatgggaaagtcgttgtcttcgcgggacagagcgtgttgtctttatcaagaatcagggcgcgtattgttatttctcgccctttttcgggttgctgacctgcttttcggccgtaatgggtttcaaggagcggacctattgactcggggagctgggtgattgttgggactgttaggtgcggcagtaactgggatggtgtgcttagaagggtttgaacggcgagattgaaggcgcggatgttggtgtttgaagggttcatgtggctcgggccaagtatgccgcactgtctttagtcagtcgtatatacgtacttgtagttcacaggctgtagtggttcgtccgtaagtaagtaggcagtgtgttgaaatttccagtcttgacaaaggatccagcgccaaaacctccgccatcagacgcgcgacaaccagctttcctcctctcgcctctcaattgtccacctaccaagcccccgctcccttcattcttattctttatacctgatcttctgcgcacagtcatagatagccaagatgggcaagttaaccagcacaatcggtatcccgatcaagcttttgaacgaagcgcaggtacgcttgactgtcgcccttgcggatatcgcaacaagaccctggaagattcaatttacagatgagctaacggtctatagggtcacgttgtcaccctcgaaatcacctctggtgtcgtctaccgcgggaaactcctcgagggtgcggcccatccaacccaccttacaccgtacatttgaagactgacaggtttcgatagcggaggataacatgaacgtccaactgaaagacattaccgtcacagcgcgcgatggccgcgtctcgcatctcgaccaggtttacatccgcggcagccacgtacgattctttattgtgccggatatgctacggtgcgtccagtctattcttctatgatccgtattcggcagcttcgagcttaaagctgatcacttactcgttctatagaaatgcccccatgttccgtacacgaggacagcgcggcagaggtgtcggtctggcgcgtggtaaggcgacggtgcagagggcccggggacagaggagaggataggtgtattgaagatgaaaaggggtcaatcggatcagggctcagcgaggtaggtaaggatactaccggactcgaaaagacggattttctgcccgtcggtaaaagtgtccgtcagggcggggatgcggccgttggggtttatttcgaggaaccagctgttgcaatttagttctgaggtatgttgtagataggaagtgagttatacggctccttctggacgttcttgctgatgtcgatcttctcgactttgtaggggatgctgtggcaagttaacgttggctatagatataacggtaagttgacataccccaattcctctaaagcaatggagattttaatcccattgggggtctgggctgtgtacaacgtgatatccggcctagacatgacgggtgaagtagtagaaaagagccgattgtagggacgagatgaagctgagtttaatagttgagaatgtttaagaggaatgcggagattggaattgaagctgaactgggagaagcagcctttaagtagcctaagagcaggcgttaccccgctcattatctacacaaatccaatactctattattaatgaaggtggtgcaagtcattttgcctggccggagatccggcatttgtactctgtactctgttcggatcggatgcgatgatgccatcagtccctcgacatccggagaccccacaagagctgatttctaagcttcggtaatgagcttcgtgttcaccaactaacactggtatcttgacaattagcgatgaatgattgacgaataaaataatctacataagggcttttctaacagcggtaacagaatactgtcatctttggcagtctttccctcgctctatccaatcggtttaaaccgtcttcctcagagctccagccttctatagggctctttactctgtgcccgcggccttaagtggaatcatctaattgcggggcgctgcagaaagtggcgtaaagtaggacagaagccatgacaaggctagaattgaaatatctacaacgaaagtgtaatgtgtcgacactaacctacccaagctgtctgctagatgagccctaagcgcctgagaaaccagcattttcactagcaacccgaaaagcttgatcgcttgatctgaaagcctcatattctggccatccgtaagattctttacatcaaccactctcaccccgcaggcttggttaagcagactaccacgtgaaactctcctcaacaaaatcaatttgcgtccgatcctgtcgagtccggcaggcacggcgaacatcgtcactcaaactgccattaccgcagaccagcacacccatagccccgacctgattctcaacctccatcccaataagtgtgtcgatgttcggtcgtcccgggaacatctgcacggtggaactggggctctggatttctttagtattacgcggccgcgtgatgaacagctgaatccgcaggacctcgcggcggcggttcatggccagaatgctggtcatccagggtcggatcccctccaagtgctcaggagactgaataatccaaacaagagtgacgcggcgtgcagccacagttccctccgcgtatcccttgacgagatggcggcagaatggcaccaagtgcgtgatgccgacacctccagcgaacaaaataaccgacccgtacgagtccatggagtgaatgctgccatatggcccttccgcaaaagctgtaagagagaccttgcaatcgacggcgctcacagcgcgctggaagagcttgtcggtgaatccagtccggcggcgaaccagcagagagatggttgttttttgagggccataaacatcccgactgcttacagggaggctcttctcgtcgcccatgacgtcctccgcatcactccatccaattgagaaggggtgggacgtccaccagccaattgcgggaatatacagatacatatgctgaccgggttcaaaggcccatgggcgcgacagctttagggtgattctcatggcgtcaccgggcagggcctccaccacggcagttgtagcacgccctccgacgttgcggtacactatgatcacaagacgtgcaaatctttccaacgcc

SEQ ID NO: 3666 - DNA, 3167 bp, Emericella nidulans
ttagcttactgcattgaggggatatatttagtcgatgcgaatagcttcaaccccaatgcggagaactatattttggtggatgatcggaccgcatggtgaatcacgctaatggcttagggaggcggcgtggatgactaaacaggggaatcatgcgacttcagagaaagacgtcatactttattggcataatccgcattcttgtgctgcagtctctcccaagtcattcgaaagacgcacggctaatatctcagaatgcattcaggtgacgaagggacatgtcccgaagcaaggcactctcatacctcacaaagaaagagcactaagtatctccctagcaactgtctgaaagtgagaagcgtcacttcagtaagtacggaaagctgctgcgtggaggctcacttggtaaaagaactaaggtaatagaacattgtctatcacgtcatgtgctaataaagagctataaggaacgaatgtacttcgactccggcgacttcgctctttccgctggtaattgcgagacggataatggtgctatccaaacaggaaaagagcatccccaccgtgacagcatttcgcatccttacgccgctatcccagccgcgagcaatgttgataagaatgcaaacgaagacctgtataggaggagtgcaagccctgcaacgagtcctctcctgcagcagacaaatttcaaagatcaaggatccaaaaaggatgagggacaggataagccagcctctcaagactgttaaaacggaactatggccttcagattgatgatattatttaacaggatagcaagagtagcacaaacagtgaataggtttcgtgcaggagttttgtatactttgtctagccacaatcaaataggcattcgagcaagaactctcacatctagggccggctccttgccatgctgagccctgatctatgctatattattgggcctgctctccttgttaacataagtaccgagccacccgaccactgaagcaatcatgtaatgtatcctagaacgcaagacctcgatgtaagaaatagtgtagggcatgtaggtagataaaccaagacatgagaccataggatagagttggccaactgtatccaagggggaagatcgttcacgtgatagtccaagcaaaaggtgactcggatttcaccgagctgctttcgcacccttctttggtatgttcatcgtttgcataatcctgtgcatcgccggatccaatctcagcaccgaggtctggcaaagccttacccccgacacgtccaagtccctggagcggagcgccatctttttcataaacctccagtctccgcttcaactcatgaacctcccgctgcagactctcaatatagttcagcgcactatcgataatcgatgccttgggcggctgcgatcgattggcctgggtcgcgatggcggatacaggtgcagacgcggggccttctgagttggaattcgcagagttggaacttccattggcattggcgatatccggaacgaaggtcggatcggtcctgcagaagacgatctcgtggagcttgcggaacttgctgttgaggtttatgcggtacggcttctcgacgatgttgtgcgaggcgcgacggttggcgtgcttggtttgccgctccagttcgtgcaggcttagttctggtgcggagttgcggcggatacggtcgagtttacccggtgtatggttgggatggagattccgtagggaggtcggatttgtgggtggaaggagatttgcggtggcatgtgaggcggtatttgaggtggcacgggcggggattggtgttgctgttgttgttgttgttgctgctgctggagaggagaattgccggactcggcatcgtccgtaggctgcggcgattcgacaaagggggatatgttgaagttgatgggcaagccctcctctggcgtgattccccctcctccggcaagagtctgaggcgtcagctatggtgggttaaatgcatgaccaagggggcgtacgttctgggacagcgggccgagattcataaactccgttccgcctattgagatctggggagccaacgcgactgatagtaagcaagtttaaaaactcgttaactgctggattcatgtccaacgaaatcaacacaacgcgcgaactacttcttatcctcttgtcttccacgtgcagtcatgaagctcaaacagtctacaaagcttaatccagaggctcacttgatatatgcgcttcgcctgtgcaccaaactactctccaaacatccagatctaaggctcagcaacagagttattaacgttcttaatgaaatagataacctatgcaaagacaatcgccaatgcggcttagcgtatcgcaagcgaaaacagaaagatcctgcttaccggcctacgaagccgatcaaacgcgtacgcatggcgcccacagctcaacgtgttgacttggatgcttctcgcgacccggcaaactttcccaataatacatctcgcgataaaacctatcctgaaacctttccacgaacctctggcggaacctctgacggccctgcaacatcccgtgatgctatctcccatgctacctccggtgcgacaatcgatccctctagaacttcgcctgaaacgttcgggcatccatcaataaacagccatccagcctcacatggcgcaatcggtcacccacaagaacccgcaagtgaaccctcttgcgatgtgataattcagtcgcatgcaacctctctagaggccttgaactcctcccgagaagacaactgcgagacctctcgcgagcaagcagctattttccacgcagtctctcaagaatcaatggtcgcccacaagaatatgctcgcgtaacttctttcgactcactaacacgctctcttgaaccctccctggacgcctcagcaggcgatgaaaccacctcttgcgctcaatcaatcacggtagcaatggcgattgatacactccgtcggttcatacaggagctttacgtgccccccccagcatatttatgcagagatagtacgatggggttaggagaaccgtcagatgcgatggtccggtcaccgatcgtggaggtatagccttggacatcttttgccacggctcaagcagtggaactcaaaaaccctcttgggaacattggggcctcggaagggtttatcagcgaggtatg

SEQ ID NO: 3667 - DNA, 1019 bp, Emericella nidulans
  unsure (1)..(1019): unsure at all n locations
aatcggagcgcggagaaagtcctagggtgaagaaaccgacgggctgtcagaaaatgacggtgttggtcctgcccttccaaatagaactcatcgcaaaaggattcaacgacgtaacggacgaggggcattgcactttaggattctttcggcctctgtagccggagcccgttgactaagcattgttcttggcgcaatcagctccgctgcgctgagctaaggcccgccgcatccagtgcggagtgtagctccttgttgttcgttgtcagtacgaccaatctttccgcggggctgtcgtctggcctgccgctaacttgtaagtcacatctctggtcttcaatccatctcatatgtttatggaggtcgctaggcctagaactctagacccgtccgctcacagctggttctccacgttatgcgctgtgcatacgattatccattgagccgccctacattattttgtcgacagtgacaaccatcgtgttagttcgagatgctagttactataggtccttgcagctcttgcggtcaatgtgtccaccagtctgttgaaaaccgtctccggtagagaagattggcagagccgttcaacgactggtatttaatagcgccgaaaatgtccgactccaatgaaccgaagccattggcttcggcctttgatagtccgacatttggagaggacagctcttttcatgtagaccaaccggttggttccatgtctatctctccatgcggtcgagacgtggttctggcgtcgaaggagggtcttcacattattgacctggattcaccttactctccacctcggtatcttccacaccatactccttgggaagttgcggacgttcaatggtctccatttgctgctcgagactattgggttgttagcacatctaatcagaaggcgttggtatggaacttggcgatgcggagttaccagaattccatcgagcatgtcttgcatgcacacacccgcgccatcacggatataaacttctcagcacatcaccctgngctttgca

SEQ ID NO: 3668 - DNA, 2960 bp, Emericella nidulans
gaggaggagggggcgctttcgcgacttcggcgtaggactttttcggactcgacgagacgagagtttcattcttacggggagccatcttctcgtgatgtatgcggtataaaccagcttcaaagggtgcagggcggaagttcgcaacagtggtgagaaaaaaaatggaaagataaaaaggaacaagttcgatttaatggtggtgggatggtagctgggccgtgaacatgtgatgatgtcaccgacgattagacctgggcatgacagctctaaccaagagggatataccgcccttaaccttggaaccttcttttagaacggtttacccctctcccaagcattattagtattactggtagtactcggagtatattctagctggcagtaaagtgctctcggcttatcgtatacctagaatctgaagcaaatgtcctgccctctagtggagactaatctgcgataacgtcatttggcatgaacgatttagtgttgactgatcaagatggagactacatttccatggttgagagctgtcaagaataacaacagttgtattgaatagaatgaggttgtcggtcccggatctcatccctgtgcagagcagatcaatcgtcgagcaccgactggaagtcttagaaaatatatatatagaagcggtagttaaaatcgatagccaattgatcatcagtgcacaagtacggcaggggtatagggcctatgcgccggcccaaacaaataaatcataaacattcctcttacatcttgataattggatgacatctcagtcgtcatctttctccacgggtttgggaagatcttcaaagtcccctgctcgcgacccttggtatcccgcatcgctatctggtactttccatgatcccagagatccttgatcgttagttctctggtgcggcccaagctctcaatagcactaatacgctcaagggtggcttccaggtgctcttcaaatccgggctgggagcagacttcgcggaacgcgtgctgcataggtaccgaatcggcccgaaccatcgcgcgcgagttgatggtgaagacattctcgtgatcatagctctggatgaagtcggccctggtcataatctgtcgtgcctcgtgaagtggtatttccggaagtatatggcctttctcttcgtcgtacgttttctccatcgctttttccttatccaccagcgcctttgccatcaccatagccgcagactgtttctcattagagctggagaattcggcatgcatcaatgcatacttacaagatacttttgctggtccatgacatcgtcatccatctcctctccaaggatccagcatttgttgaggaaccaagtcttctcagcttcgcagatatcgttgcatagcttcatgaaatccggggcctttgcaaccctgctgaggtacgataggcggcctccaaccttgtcgtagactgctttgaggacttcatcagataggtgctcgttgaagtagtctttgcggtattttctcaacgctgccattgctttttctttggggaggtccaccactgggatggtttccatcctggttgcgtaacgctttagtctttcataaacccagtagtcatcactgttgaaaactattcatgctgcagtcagcccggatctacttcaaatttggatattcacatgtatacaaacctgttgtaacaaggttactggctgcccactgctcggccctttgctggatcatctcaagaaggtcttggccatcggggtcgtccctgaccatgtgtgtgctgttgatgatcagtacaagcggagctttcccattagacctccttttcattgcgactttctccaacttgttgaatgcacgctcaatatccaagagggcggtggtatccctcggtcctttaatgctgaagaggctaccgatgtaactgcggaggtgcgtcagtacagatcctcacgtgcaattcaagaaaatatcctgcgtactcttcatgaaactcgaagtctagcgctttcccaagccggatccggaaaatctcctgatcaccatgagcatcgaaaattgcgcacccgtctccattgattttgcgcatggcctccagaagcatagaagtcttcccagtacctttctcaccgatgagcaggaagtaatggcccgggatcccaccggagatgatctggtcgatcttgtgttgctcgtctcgaaccaaccagtgctcctcatggttatactgcttcgcacccacgccggcaacctcaagcgcagggtcacctggttcaaaagcgttctccatcttttgaagaatgagatacttgtaatatttatggtatgagtacccagcaatgctattactggttagtcaacagccaatacaagctcaattctaggatggatataccctaagacagcaattgacgcgaaagtcgttgccgctgactccagcattttcaggatggtcgatttgagattaggctcctggtcattgtctttgcctttaccgtcgtcttggttcggctgatcctgaggatcaggagctccagggattgcgctctgtgtgaaattctggccagaaaacatcgcgcacaccctaccgggccgcctcggtgggagccatgggcgcgctcgagttgaagaaaccaggtatcgctgaatggagcgcgaaaacatgttgaacaggtttaaaagcgaaataaggaatttttcttagaaaaagagagacaggtcgatactgactgataaatagggaataaataggagggaatggcggtgtagaccgacgtggttgaacttgaagctgggatcctgacaattggtatacaaatattaagcggcgattactggacgcaattgcagcagttcaggaggttccagaaatcgattgtacctgacctgcagaggaaaagtcccacaagaatgtcttaatgagtgtcaagggtgggattgagggaagaagaaagaaaaagaaaacaaagacagag

SEQ ID NO: 3669 - DNA, 1648 bp, Emericella nidulans
aaaacggtattagcatccgtcgctatacgtgaagccctatagtgtgtacgtacgtcgattgcgcggattttcagactcccattatgatgctagaaacgacctggcgcgtacactgggggctgcgtcatcatccatgccggagattctctgcactgacagacactgccgcttgacaccgcgacaataatctgcatttcccctattgctgatttcaagcaagagctcgctctccttgagactgctcgcattgggtgcgatcaactgatgtagggctttcatactgttgaacgaagagcgaaaccgttgccacactttgcgcggcttgtaccgtgtaaggaatgatgctgagggtttgcggtcccatatgcggtggactttagaggattccaccggcgtcaagtgtatctggttttgatcggtatgactgctacgtcattgaagtgttagcaatcgcctcgtgaagatacctggcttgtatgtttgaagtattgcaagcggacgctcgcgatgcgatgaattgggttgggcggcacgccgacgatgaagaaaaggaaaaggggttgggccccctaactctaacagcatcccctcttcggcgcttcatgcccgcgcgagaatgttgcaggcaccgatagaagatatccgcactcaccatgattgtatttgtgggaggtgatatttggccgtggtcatcttgtcgacgcgcggaatgctcctcgccggatgggatggcggaagggcgaagaatgtaagattctggaagatgcgttcttgataagagataccgatctgtaaatgataaacaacaagatagagtaagatgtaggagtctttgaaattgcaaaggcaagtatggcgcgtcaaggagttagtgaagaagtctggactttgagggtcaatattgttttattggccgagtgaggcgggtggttgccctgccaacggaaggccagggactgccgactgagccgattaaagatgcaaagtgagaactaattggctgacgaaaaagagcttattgatctgtatcagtagaactctggggtaaactgtatcatcatccttggttgagacggagaactgccacggcgcctcgccagggtactagccgtccgagctacccagtgagtacaaaatctcaagtgtcgaatctaacacgagcaggattgaaatgcaaaagatcgctgcgacggttcataacctcatttgaaatattccagaaatgccacatccatggtcatatcgcataatttatcgcgtaacaacgcgatccgcgtctaaaaataagagaccagacaaagagtagaacaccaaacgccaaccatgcactgaactctaacccagcttttcttcatatcgcgctcgtcgaacgggtcttcgaattcatctaaacaagagtttagcctaagagcttacacgtacaattaccatattgatggccggagagaccacaatgcacgcactcctgaataggaggccgactgaggagagggactaacagattcagtcgatatacgactcatggcgcgaaccctcctgtcgtatcatcaaagtcgggggtggatctcgtctctgggccgatactgggtttttttaccccttgtggttgagcggggaagcccggcccaatgggctgggtggtttgtgg

SEQ ID NO: 3670 - DNA, 4830 bp, Emericella nidulans
catcttctcttgtcaatcttctgatgatatcctgtagacgtgtaacttcggctaccgcacgcccatgagcttcatgctgttcatccttctcttgctgaacttcctccactatagtctgaaggcgtgtggtttcggcttctgcacgctcatgagcttcacgatgctcatctttttcttgttgaatctgatgaataacagcttggaggcggtctatttcggcctcagcgcgtctatgagcttcgcaatgttcatccttctcctgttgaatttcttggattacgctctgaaggcgagcaatctcggcttctgcatgttgttgagcttcattcttggagttaccaagatctctgctgctatgcgtctcccgagactctaacagctcacgtctcacatcttcaagctccttcagtgtcaggtcgtgatcttctttcgactgttggccttcacgttcagcaagttcgagctctttacgaaggtgggccagttgttcgatcaaatcagcaatcttggcgtccctttctgcatccgacttggagttaagctcccgctgctgctggatctgggttgtgagaatgctcttttgctcaagcaatttctcaacacgactttctaagccattaatcccaacactcaggaacgtaagatgcttcgcaagatcgctgtcagttggatcaggagccgtcggtagggtttgggcgcggggtaacccgggattttccatgatgctaagtaactgcgtgcgcatctccactaactgctgttcgctgacagggtccagactctggctggccatatcggctttgggcagagaaccgagtgcactgattccattctcgatgtatctcagatgagcatcgatcattgctgagggttcgaaagagtcgccgctggtagatggctggggaatctggctgaactcgctgtccggatccagctgtagtagcatatctcgcagtctgctgctcatcgactctagctttctctccgtctcttgcatgctgttatcatgcgctagattatcgggaggtggtgccctcgtctcataggtttctggcccatccagcgggtccgacgctttgtacaggctccggtcatcgaaatcgtccaccgtattgctgctggagaggctctcgggtgtatgcggcatgccgtttttcgaattcttcttcaaacctttgtgcgttaactgcagtaccccggcagtatgttccaacaacctcttctgtatctcttgtactttccgctcggagtaccagatgtccattgatagttcttcgcatttgcggttaatgtgtacaagttcctcgttcgtcttatcggtattcggctcgttccgtcctgacccatcaacatcgtgttcctccttatggtgcaatcggcttagcgacatagccgcatcacgaagtttcagttccagggccagtttccttttagcggcattcatacggttagagagtactcgcagctcctttttcaatccctcgacctcctcgactgacaagatctcgtaattgacgctgtcgcccatggcagtttcggtcaatagatacatggctactgggtcgtttgcgctgggtgggatagatcggcgaggatgcgacgtcgggtttgcctggagagtaaacgcctagaattagctgttttcttaggttattcatgcagcctgcgttctcaccgagttgtacagcgacttctctgcattagcgggacctagagcatcccggtagccgtccaggagaactttggttggtggcggttggggtacgccgtatgaggcgtccgagaagtgcctcgggtcgccatatgacgactgactggaccgaaaatcgaagccgttcatcgtgtccaaaggacgaggagtcgtgagatcgttcagaaaaggagcgttaaagagactcggtctaacaggcactatacattattctcgaaggcctccggtttgaccgccaggggaacggggttggactcgtccaacgaagatgcaccgggagaagcagatgtgatatgattaaggagtgaacagggtatatagataggaagaaggcaaggctggctgatggcacaaattgctggaagaggcgcagtcgcacagttgagctgagttgaaggaaccgagagtccagaatggcgccagtcacgagaagatctgcaatgccccaaggcggctggccaagccgttcaggaacggaataaatagatcaatcggattctctgcagtccctcattgataaatcaagagccgaccgattatatactgcttactctgcactatcttggtcttttgcctatgctagatgctatcaggataagcgtcggctatatgcatggctgggggttggtgctctgttaggctctccaggcttgagataaagcgcgtgcccctggcaatgataacatcgaaaattgtggaggcgagcccttacttggggatacaaagtattcttgcacatgtgcagaccattaacctaaacttgattgatttcaagcttcttattccccacagaaggtagagcctaaagtcgcggaatttgatgagaaggggcacacaggaatgccaatgcggagaagcccacgaactgtgacgaacacctgatcgaacgtgaaacgcagccaacctcaggccaggatagaaattggtctcaaagcgaaacagaccctagtctagctttcctatcaccgaccggggtccaaatgtgatatattctattgcggcccgcggctgggatgttatgtccaatctttgctggatcaacctcctttcgatctgtagtgtcacaccctcacgatgggctttgatgaacatgagaccacagtcgagcttccaccatcaggtcctgcttaccggatctataagcggagattttgggggttagcacagcttgtcttgctgaacattattgttagttgggatgtacgttgcccgcccgcaccggcctttcgcggaggggttgtatagacaagtgactgactctcgcccggtagtggttaaccttttctgccgtctcaaccaccgcagccgaatactttgacgtgtctgagagcgctattaattggctgagtactggctacatgttcgctttctgcgtagcgagtccgtgagtgtcctcttgctgctcttgtcagttttcgtagatgcgctaatcacgtgtgccaatctagtattgtcatagtcaccctcaacaaaggcggccccaaaccggccataattgttacctcgtctcttctcttggtgggtaattggatccgtttcgcaggggccaaagcgaatggaggcattttcggggtgaccatgttcggccagatcctaatcggtctggcccaaccgttctgcctcagtgctccaaccagatatagcgacctctggttttcagaccgtggacgaaccagtgcgacggctgtagccacattggctaacccacttggtctgcgctgggccaattgatcaactcgttctgggcgagcaagccgcatgaggttccagacatggtcttatacatttcgatcatggtaagcatatcccgcatatttcacatttaaaacaaagcagtatgagttgacagagtgagggcgaaaaaggcaacagtcgcatccattccatcatttttcattccagcaaagcccccaacaccacccagcgcatcgtctgccgcaagcaaaacacccctcgtcccagccatcaagcagctcatccggacccccgagttctggcttgtcctgataccctttggcatctacgtcggtttcttcaatagcgtttcgtctctcctaaatcaaatcctttctccttacaacttctccgagacagaagccggcatcgcaggtggcatcctcattatagtcggcctcatctcctcagctatactttcccctctcaccgaccgctacaagcactacctcggcacaatccgtatcctggttcccatcgtcgcagtcgcgtacatcgcgctcatatttgcaccatccagcccggcaggcattggtccatcgtacgccataatggccatcttaggcgcctcctcctttggcctcctccccgtagtgctcgagtatcttgtcgaaattacgtaccctttctcacctgagattggaagcacaatttgctggactgcaggtcagttgctcggcgcggtgtttattctcgtccaggatgcgctcaaggcgggagatgacgcccacccgccactgaatatgcgcagtgcgcttatcttttctgcggtgattgcctgtgtggctgtgccattcccgatctgcattgggctttttgggcgtgatgttagaaggcgccggcttgatttcgatagaggcgtgaacatggatgaggtgcaggcgcatcaagcagagagcgtccgtagcgctgctggggttggagtgactagcggatgtccagcggtagagtccggaaaatcgacgttcggtctcaacttaaagataccgtggggaaagaactaataacacttaacctcaatgttcgatcttcttgcatttccccctcatttcgtcaagtcctttgaatatggtaacgacgtatgctgtacctgcctagcctgttcgaaatgattgtgtcacttctccactcaatttagtttagccagtcaaattcagacgccttcacgaatcgtgctgcgttgcataaatttcgttggtttagcggtatggggaatgtatgccggcgtcactgggcggactcctaaatgagggccgttcctaaagtctgtatcaagaccaaaatatctgaaatttatgcagctcatttcaagctgtctcaagctaaggacaagtacccgaagacgtaaagtctagagaaaagtagcagtcatctaaacaaaaggt

SEQ ID NO: 3671 - DNA, 3871 bp, Emericella nidulans
gctcgataggatccaagtactatgagtcttttctgctagctctgtttactcgatgcgcaaaggacttgaccatgaccgaccgtctggggaatgggacacaatatacagacaatgaagccgtcatcgcgagcgaattacggaatccagataccaacgctgctttctacgtgaccacccacttggatactacagtcggcacggatgagtcgttcaagttgcacgtcaacacatccaaaggcgctctcacaatcccaaggcacggaggtactatccggctcaacggtcatcactccaaaatcatcgtgaccgatttcaactttggatccgagacacttctgtattctacagcagaagttttgacctacgcggtcttcgaccgtaagccaactcttgtcctctgggtgccgacgggtgaatctggcgaatttgccatcaagggcgcgaaatcgggatcggtcgcgaaatgctcaggatgttcaaatataaagttccaccgcgatagcggatcattgacagttgcgtttacccagggagaagggataagtgtcctgcagctagataatggtgtacgagtggttttgcttgacagacagaaggcatacacattttgggctcctgcattgacagacaacccgcttgttcctgagggtgaaagtggtaggtttcttggattctatttcatagtctgtactaaccggcaaacagttctcgttagcggcccctacctcgtccgaacggccagactagcaaggtcgacgttaacattacgaggcgactccaagggcgaaacattggagatctttgcacccaggaagatcaaaaaggttacatggaacgggaaggctgtagaggcgacaagaacctcatatggcagcctcaaagctattctggccaagccgccttctgtcgaactgcctactctcaacgggtggaaatacagcgacagtcttcctgagcgattcccaacctacgatgactcgggcgctgcatgggttggtaagtgtttacatcagtaatggagtagattggaaacattaattagagatagatgcgaatcatatgacaaccccgaaccctaacaaaccagctacactgcccgtcctctatgccgacgaatatggtatgtattctctagtcaccccaaataacaagcagctaacaaaccgcaggattccacaacggcgtgcggctatggcgcggctacttcaacagtagcgcctcaggcgtttacctcaacatccaaggcggcgccgcattgtacgttgttattcccagcctagccctgacaaaacaagaaactaacgattactcttcctcaaagcggctggtccgcctggctaaacggccacttccttggctctcacctaggctcggcctctattcagcaagcaaatggcaccctcgacttcccagcaaacactttgaacacagagggcacgcccaacgtcctcctcgtcgtccacgacgacacaggccacgaccaagacaacaggcgttcttaacccacgaggcattctcgaagcgcggctactctctgaagcttcagacaacaacgacgatgactcaccaggattcacgcactggcgcgttgccggcaccgcagggggggaatcagacctcgaccccgtccgcggcgtctacaatgaagacggcctgtacgccgaacgcgtgggttggcatcttccgggattcgacgacagcaagtgggccacagttaacgggacctcgctctccttcactggggcaacagtccggttcttccgcaccgtcattccaccactctctatccctgaaaacactgacgtttctatctccttcgtcttctcgactcccaacgtgaacaatacatcagcaggcaatacatccgctttccgcgcccagctctttgttaacgggtatcagtacggccggtataacccctacgttgggaatcaggttgtgtaccctgttcctcctgggatcctggactataacggggagaacacgattggtgttgctgtttgggcccagacagaggccggcgcgaggttgaatcttgactggagggttaattatgtgcttgggagttcgcttgatgctgggcggctggatgtgagtgggctaaggccgggatggaatgaagagagggaaaggtttgcatataaccaaagttacttttgaggttttcggaaaatgaaatacggatgtttaaaagaaggagagctgtctcgtttggtgggtattagactccaaaacagctatccttcgttgcaattgcctacgtctacatattcggatgtcttcaactatgaacccggcgaatgttaagtatcccctagacaccaccaaacatcaagtgccagctcttcaatgatctcggtcgttattaaccctgaggatgctacgggttttagaaccggagtagtagagagcagcatcgtggaaccctagtttctttctgatgttccaactcagtcctatcaataacaagcttccaataacagagtcgaaaatgggaaactggaaaagagctagagtttgatctgtggggttattatttgggaaggtgagttggatgagttttcgtagataaaagaaaaggccgaaaccgctttcagggaacgtggcgtcgagtatcaaataacatggatcatctaacctcatatttcacaaagaccatcgcaaagctaatgcttcttccaccctcaaggcataaatgagttcttcccaatgtttcttgaacctctgcagctaacatttctcggtaccatggtaaattcggtctaaccccgatagattcccctccgagcctacatgacatcaagggacggtcttaagaggcttgctgcgggcgaaatggtcccgactgctgagacttcccaaactgatctgattacacttatgatatatcagctacctaaatcacaagccagaaggaagctacttgaaacatgcacgggcgcaagaatagatatgaatttgtttgcatgccatccaaccagatacagtaccagcaacagctatgagacaaatgagagcgtgtgcgcgagagaaacgacagaacgtggatacagttcaaatgccgaataacagatagagcacaagtgaaagacaaaaagcaagccctgaatatgctgcaattagaccggtcaataacagatgttcaaactgcctgagatatgccagtgcatcgatttccagaacacgaacacacgatgaaaagtggccagcgagtttgacagcgacaagagattgtagacactatgaaatgatgatcaataatgggactgcccagtccacgcttgccaaagacaaaattaaaaagactgaatggaatcgagcttgtgtcgaaaatgaggaaagggaaacaaaaatccatgaacgtggctggatctgggacaggatagaaaaaagaaaaatagatcaaagcccaaaatcctgagcgcaaggtagatcaatatcgtgcgacctgaagtagctgagggtagagcgtctccaacatccgaccgctccgttttctatttctgtccgctgctggatccgcataaggtcggagtgcatgcacaaagaaacaccctttccatcacaagaagtaagagagatcgccgtcaccgtaacaccataagactgtgccagggaccgaagcagtcaaattgtgatccgcaggttggaaaggcccgacgatgccggataaccgagccggtcaggacaccaaactgggaccgaccgcgcaaccaaaacgagttgctctagagaaataaaccaggtctacaagacgccaaatgtggataccacaccctttcatagatccgtcgccgttcgagattaaatgacacacgagatacgaagagaacgataacgccgattgcaatgccgcattcaagagaagtga

SEQ ID NO: 3672 - DNA, 1979 bp, Emericella nidulans
tctcgctctcatcaacatttgccactgtcgcgctgtccgtcctctcgttgacgagcacatcagccgcctccctcaacctcccgaagactgcctaccccttgcccgcgcgcacagcggacccctcaaacccagcattaacatggcacgtctcgcagttcgacctgggctgctctcccggcggctgcgtctacagctttaacatcctgggccacgcctcggaaaatacacccggcttcaacacgtcctgcaatggtacaagcacgcaggacgactacgcgccctgcaaggacgagggcatcctcgcgcagatcgagccggctacctatcccaattggactgtctctgtacagcaccagtggcgcgaggcaatgttcgaggagtattatgcgtttggtgagaagaacgtcagcgttgcgggcaactcgacaaggacctttacgatccccgtgacgagtgtctatggggttgcttaaatgccatccgactttttttttcagctgcgggctgattggaggaagacgagacttggtctgagctgcgaggtcagctctttgggaatttaggaactggaactggtaatggaatcggtctacggggtaccgcagaggtggtatcaagtatgttttggtgctagcatctgcgatgctactgttatagtttaatgtaatgtattgaatcgtctaaggtagttctactcggatgagccacatcagctgtctctcctatactctactgcagacaatgcatcaatataatttatttgcatgggacgagcctatatgtaccccgtatattgtaactatacaatgcgcccccaatgacatcagtgtcttggcgcccgttgaccatcgtgaaggacgagccgaacgcgtctttagaggcaagcacgtacagatagtgatcctttgtacagactcgcctcgccctaatcccctaatcctacttccagtacgtcattccgtggtaggattggcgctatacagttccaacaattcatggtatgcaacccctccattcatcgatacaccgcagcgcccagactgacttgcacacttggctttcgaccaacacaggcctcaattttgcgacagcttgtagctggaccgcgacttcaacatccagagacaggtctagatctttgctatgtcgccgataacagtgagccaagccccatctctaccctatccaacgctgctcgatacctccctggccggtttatcctgtaagctaaccttatttctactcctgcagtaattgcaacctctgggccctcgacaaactaccctaaacttgcatacaggacaccgctaaagcaacttgtcaatttcctcgacagtaaacatggcgccgactggtgcatctgggagttccgtgccgagggcactggataccctgactcggaggtctacggacgaatccaccatttcccgttcccggatcaccacccgccgccatttgcgctgattccgaaggtcatggctagcatgcgaaactggttgcagcggttggatgggtcgggagcggacggacaggagaatcagaggaaggggcaacgggttgcagtcgtgcattgcaaagctggtaaagggcgcacgggacaatggcgtgctcgtacctgattagccaggaggggtggaagatggaggatgcgttgcaacggttcacggagcgccggatgagagtaggattcgggtctggcgtcagtatacccagtcagctcagatgggtacggtatgtgaatcggtggacgaacgaactggggaaaaggtacgttgagcggccggttgagattcttgagattcatgtttggggtctacgggatggagtcaaggtcgtggtggagggcttcgtggaggaaggacagaagattaagcagtttcacctgtttcgaaaggatgaacggacggtcatgtcagatagtacattgcagtctcagtcgtccaacggtcgtccacacaactagcgaagacgacgaagac

SEQ ID NO: 3673 - DNA, 2337 bp, Emericella nidulans
ctctgtctgctctgtgatttgctgtcagatcacttacgaatgctgtggtctagtggaccaagctgaagtgtcgatgcggggagaatgggctggaattgcgataaacctgcggaccagcatgaccgagtctgacgccattcgcgatggagtggacaagatactggggacagcggcttcaaggctcgctgcgtgaagattcagcgtgagaatgaggagctcgactgccgggctcaattggagcgtctgatctcagaagctttatgactaatgcacgatatagagtcggatgctgagaaattccacaaatggcaaggtagtaatctaggtttgagaaccggcgatatcgtcagcccacgctgtcagatctcgtaaaatatctccagtttgggctagaccaggccgaacaggaatatgaactcttgtactactctcggctctgaggggtctcttttgtagtttgtagagactcatcggtgggtttgtgagtcgacgccctgtgcccccgcgcccccatgtcgaatatagtgcgtgatgcccttttcgtaccgtctatttccaaactcaaggtccgcttactcaaattgaaaccatccgcgccgccactctccgaattgtttcgctcctattggcgtgagcttggaatagatggcgtgagtaaagaacgctgctgacgagcccagcccccatgttcacatgtggaaaagattcggattaacagactaatggcagcccccaccgactacagtgtagtcatatcatccgcgtacacaccacgactggagtcaagtgcgcgttcctgtattgcctagcattggtttgcaatggcaccgtaaatggcagagcgtcgcctttgattgatgtgccatctcccggcaacagctgatccggctgatatctaacagagatacgctgttgttcatggtgtatatcagttggagataaataccttttcgtcccagccctcgtgcagtactgaagtggaccgcatcgacagagtcgtaaggctatgttcaccgtggatgtatggacggcggcatctcatgctgaccattccataaagcttgcgagctatgactccaagatgcacggtgccatagcccagtggaggcttcgaatgaagtagagtctactagatacccaaagccggttcagccggctcagcctggtccatggcatcttgggaaaaccaacgtatgttgtttgaagatattgacaggcagaagggttaattctaaagaggaaggatcttctaaggccccaatgtatgtaggcagttgcccgacaacagtatggtgtaggaatcttgtcggctgaagactggaatatgggaaccacctgaactgacagccttttggtgacatcaaaccactcggtttcctgtgattactgatgagtccactatagtcaacgctagatagaggccgggagtaaccaatccatagcggccactgagttgataggcttttgttctgatgaggataacgtgaccctggttcacaactgccaccccgccgtccaattgattataggccgtatttattttttgaaccaacgatgcaatcacgaaatgatctcggaggggacacgggcccagtgggccaacggtcgggtgtgtatcaagcaaagggggtggagcactcgcgacgtggctgcgatcgctgctgctgaatcctcagtttagggcacaagatattgaactatcgaccggggccttaggtttgccgatgtgattcgagcagaaccgccaaggtttcaccctgcttggctgttttatgttgattgcatcagcaggacccgggagcctaagatcgtgacctggagataaagcatcgcgccgttccacctggatccggagagacgctacgtttaaattatatcgaagacaacatgcgatgaactggatcgaaaccggcgatctgggttcgaatagagataatctgatccatccctttcttggttcaaggcgagccagcgacacaatgcctgcctggcttcttgcggtcgaccgcatctttccggtgccgatgcgcttgcatctaggaaacatcttctgtgacgctgcttatttcaggcaagaaggcgcctactttgggttgttgaccttttgattgtgttcttcctgccctgtatcctttcatccctggtggcgacctattgcccccattattgatccagtccacgaccgttttctttttccacctcccacccactcccgttcaaacctggtttccgcccgctccttacgttgttgtgatctgttctatatgttatcaccctccttgttattacctatcctgctctttctaggcctcccctcatttatttatttctggggtt

SEQ ID NO: 3674 - DNA, 1954 bp, Emericella nidulans
gtcgcccaagccgagtattaggggtatatctccagatgccgtttgcatgtgagatacgtacactccagatcggcatgcattgcatcagcggaatatggtcgatcagtgactgtactccgagtatatcgactatatatcgactatatccatttttccttatttttccttcgtttttcttgattattggagtttttccttctttttttatcttagccgttgacacgagttaccggatctggcagcccggagtttgacggcgacgatcgattcgtcgcactagatgactagtggcttcggagcctgcagagaccaagagactaacaagccagccgagccgtcagtataccaggaaaggagagatatgcgatggcggccttcccccaccgggataaagtacgtgcgttgagagggacgatccacttagggcccaaggcagccggtgcagaagtggcagaaagtactacagacactggccagagatacacaatctcgtaaagagaaaaaatgtcgctcttctctggtttcaatcactattgtcaagaagaagcttttttcttccttgcagtggcgttgttagcttgctaccgagagggtgggtttgccagcatatttgcggatgagccctaatgaggcgatgcgactcgtcaaccacaccctgcgttctttgaggattctgcagccagcaaaacctgcagtcgaccgactcattgactcgcgctccccatcggttctggccgcggatgtcaaattggcaatttatgtgaaacgacggcccactctggtggctggccactgcccgtctgggcccgtctgggcccgctggcagctttccgcgcgtgccagcgggccccggcgaacaatggcgatcagtagttagacatcgatgggggactgttcgcttacaattcgctctcttcctagcccacgggcctcacaaggtcctgcagaagcctcttgtgagtttggcctctgtgcagagccaatttgcggcctcctgattggcaacgtatcgacatacggcggcttcgtgggcccggcgatgccagttttgggcaagagaacggggccaacaggaagggggttgaccaactcgagacggcgcatatcaaatcggtgtttcagcggtcgaagcgtggttgatacatcttttctctccatggttcttcccttgcagggagtgtgaggctgaccagtgcactactgagaccactgccaccagatcgaggcaccatgggactcggggaactggctctctcgcagctgacgctggccaatgtcgtgctgggcggcattgcttatatcgtcctaaagttcatctatcagattgtttattaccggttcttccacccgctctcggtctttccaggtcccttctggggatccgtcacccggctctggatcgcatggcataacctgaaggagacggaattgccaaccatctatggcttgacgaagaaatacggtaggtggcgaaactcttcaaatggctggttgttcctacatttgtgtctgccgctaaaccggtcttgctgcatgcataggacctgtcgttcgagtgacacctacactgctccttgtcagcgatcccaccaaactccctgagatctaccatcgcaatgccgacaagactggtcactacataaccggctccttcggcgagaccgagtcgctcttcaatatgaggtcgcacaagacccatgccgcgttccgcaagcacgccgctggaccggtaagatcgatgcaacaagggtcccacaggaaagtaaatgcatgctgagattaagcagtacagtttctcgagcgtgaagcggatggagccgctcatcgatgcccgcattcgtgactggtccaacaaactcaatgagaagtacgtccagacggatgaggcgttcgacttctcatggtgggctgtgcaaggatatctacattgagataggggttggagcctcacccc

SEQ ID NO: 3675 - DNA, 1610 bp, Emericella nidulans
caggaactgtcattcctgtggctcctcactgattgacgggccatcatttttctcttcgttctggggatttcatacccactatccctatatcgagacatcgccaaggtttgaacccactgatagttctatgtctaccgctgactcttggttagttagcgaaagcatcaactttggccttggttagcatggcagtcattgttattgccgtggtcactcagggctttcgagttccacaagactcgcgcggtgacgtgaaaaacctactcttgttgaataccggcttttttcaagccgtgggggttatttcctttggtatgtccagttgccacccctgcatatttcaaaacctggtactaattatgcttagcatttgtttgccgtacgtggtagtccccggatagcactcagacaactgacttttcaacaagaccacaatagcctcttgatctatggttcactgaaaaagccaacgttggatcggtttgccaaggtcactcactactcgaccgggatatcgctcttaatgtgcctactcatgggtgtctctggcttcctattcttcgggtccgagacacaaggcaacgtgcttaataatttcccgtccgataatattctgataaatatcgcgcgactgtaagagcaagatctacctaaaaataagcccaatattagtgagctgacactcgcatagttgctttggcctcaacatgctcactacgttaccgcttgaagccttcgtgtgtcgtgaggtcatgacgacttactatttccctgacgagcctttcaacatgaatcggcacttaatcttcacatctgccctggtactaacatccgtagcaatggcactgctaacgtgcgacctgggcgccgtgttcgaactgattggggcgacaagcgcagcctcgttggcctatatctttcctccgctgtgctatatcaagctgagtaatggctcgcaaaaagcgaaaatccccgcgtacgcgtgcatcgtcttcggagtcaccgtcatgggcgtcagccttctacaggcagttgggaagatgataaagagtaggtgtccctcctatccataaaataagtgcataactcagaatgtttatagatgaaggcggcacggcgacttgcagcacttaatcagagggtagcgttttacttttatacatatctacaataggctatggctaaccggtcgtgaccgaatgtacatatagacaaatgtctcgagctaacaccaaccccaaaacaattttttgtcaagttcccagctcttgatgaattgacaatagccgttaaaagaagccagaaaaattacaccagaagaacaacgcttcgcagataaaactcttgcattgagcaaggagcaaacatagactagcgagaacatttatgtctcctgcaacgtctgctgcgcgggcgtttcatctaagaacctagttaggatctctcctcaacccgtccacctcttcgcattcaaaattgcagattttttgcagcagtcctttctaattgcaaatactgcatcctttctacacgatttcgatctcactctttctattttcatgcttcagagagtgaggtaagctgtacacatgctctgtgaaaagagagtg

SEQ ID NO: 3676 - DNA, 3138 bp, Emericella nidulans
ccatgctctttgaccagaaccaccgcgaaagccatcggacgagatgccccctatagcaagtccgtcgtcttttcaagtggccaatatcccctagaaccatcacggtcgcaaacggcacaggccagactgacttcactggcaagcgaccaggagcagcgatgccagcagaatgagactccagaagagctggcagcgtcatcgaattcgacccttttgctcggccactcgaacgagcctgcgcggcgatctcctacgccgggagattcccaacgaattataccaaggtcgtcgcatttcgtaccgagtcctccattcgtagtgcttgtgccatcgatataaacagatggaatacaggcaaggctgctcgaggtgcagcgcatgcggaccatggtgcggcattatatggtcaagggtcaacccccgggtccctcgtttcaatgaagcacagctgtatgggaatatcgaatcactacttgcggggaagagttgatctcaggagcagctccagttatcagcaatggttgacctgattttggcagtgatccaggtaatggctggcgaaacggtggaaggcaacaagtcaactacagctggctgggctgagttccagcacgcagaacacgttttgagtgcctggcctgggatgctaaatatcaggagcattcagtgcctagtgctcaagacaatgtacctgatctacacgagtagaaacgagctagcttatgatgcagtggcctccatggcgaggctctgttttcagctagggttatacaacgaaaggctggagttcatgttccccatttgaggaccatctgcggcgcattgcttggacaacattctaactggagctacatgtctcagaaacatgcaattgccttacctgatccgacgttgtgacttggatgttgccttggatgttgctctgcccctgcatatcgacgacagcaaactacggaccgacctagaggcactgccatcagaggatcccgctgctcctatccaccatacttacttctgctacaaccatgcgttactattcacagagctttgggactgcttgttgggtcacggcgcccaaaaacctccggacgacgcaatgataaacaccttcgacgaacgtgtggaatcattacgctggcaagttccctcatttttgcagtggaatccagctacggtcctatcttgcacactcagattaatgccctccaacatttaggtattgcagcaaatatcagggcagaccctttgcatcctgacacatggtatggccctcttgttgacaaagcccagttcaaccatatatgtagctatgttaaagaagccagggctttgctgggtctactggtaggaggtgtaccatgtggcccgcagatcccgatgggagggttccagttgagtaacattggtcgcaaattggtcgagtacacgttgagacactatacagagtctaaaacaggttttattaagtgagtcgcccattgtattagtcgagctctgacttagacttagggcacgggtgctgggggcaagacactgttcgatgtccacacaatgctacacagacatgaatcttataggctcagttaatcagacttccattagaagcatcctattcacctattactgacccatgtatctctctcacatagcaaacaagacatcagagtgcgatgtctgcctgtcacgtgggtgccctctggttgcgagcatgagacgtagaagggtttacagccacaccagtgcgcaaacccatcttcactttcagcagaaaatagaaagaaatacaggattttagcttttgaaagactttaggtctacaatgaaaatgctacctcgtacagttaattctagctataaccctcatattggcgtgggatgaagaatcggttgaaggtatctgatcggcttatggcattgacttctattaaagcttcctgtgacctatctgactgaattgtcatagctctccctaatctgtttcaagagctactgtgaatgcctttccttttcgaaacacctctcacatatgcagtatctcctaaaagaactgcgccaccattcttcccttctccaccttgccagctttcataagatcgatcatctcattgatatcctccaagcggaattttctgggattgacttttagagaggatgtttttcctcagcgaaaactcgaggcactcgctagctgcagtccggccagggactagggcgccgatcaacctgtggctgatcagtatatgatgtagcgttacggaagactgacatactgcagcgcccgagagataagctggctaatggcgatcgggatatctttgctgggaataccaaccgccacaattcgtccctctgcccggacagaactcaaggtagttgcatatgccgggaactgctccagaagtcacaacgactgtatcaacgagccgtccatcaatgagggcagcaagccgactcgcaacctggtcacttgggatgttccattatccttgacagttttcagctgctagccttgtatgtctagtgcaatcacccgcactcccattgcgcgggcgcactgtcaggcgacctgtccaagaccaccggttacaacagtggcgacaacgtctgtaacctgtaatctcgctcgctaggatgcattccaaacagtaaggccagcacataaatgaggtgcatgtgatgcaggggacgcgatgacatactttgggatgaccactgcactggccgccatcgacaagcgtaatattcgcaaagcacccctcggcgcagtaaggcctttttcaccatctttgtaggacataagatctgacgttgcgctcctaacaatgtatacactgcaggcacatgccgtgccacagtggtgcgccaacttggtcacctacttgaagcccatttgacataatcgggtccaagagcttcgcctacagagacagcttagtggccgacaataaacgggacctgaatgggtcctagacctccacttgtgatggtgatgtctgaatgacacagcgacccggcctggacgcgggccagcacttcgcggccttgtgaaaccggcacaggcacctgctcgatgacgatcggttgtaaagtcaattcaggttagccagaggctgtaggataacatgaatgcccgcaggt

SEQ ID NO: 3677 - DNA, 1604 bp, Emericella nidulans
catcacctcccttctttcgtcaacgctttttgtcctcgatctatacgacgtgcactcagtcattacaacgcagattctctcgcaactctactactggttgggagcggagctcttcaaccggattctctctacaaaacgatatctagcccgaactaaggcgatgcaaattcgcatgaatgtgtcgacattggaggactgggctcgtaccaacaaccgacagccggaacactatgagaacggatcgaccacgtgtacgggcgacagcaccatggattccgcgcgtaaacatctggcaccggtgatccagctcctgcaatggctccagtgcttctcatcactaggcgaggacttcgagtctctcgtcaacacactcctccagctacaagacctgacgccagcccagatgcttcatgcggtcaagcactaccggcctgaagtaggagaaaagggccttccgaagtccgccatgaaattcttggtagagctccaacgcgaccccgaactgatatttagggagcagttgaggcttgtccaaataaaagcagattccctggccccaacgtcagcgccaaccgaggaagggcgcccgcaaactccacgccaggaccacgccccttcaacgtccaattcgcccaattctagcgttgcctctccacgaccggggccaagctcacgggtagatgaccgcaacggcgctaccaccgtgttcttagatcctgcattgactcttccgttttcgctgccgactagcacggacatgctcatcagctacggggccggttggggcggaaaccacaaagagcgggcgcgccagtacattccaacggtactgcctgaggtactggagcgctttgaccgtgacgtttgagctggtgggaagaagcatagtatgctagtatatattagcatctacattgtgccttgttacgccgtcatgactgaagaagatgcatatgatccttagttatctcattcgggaagctagcgacgaatggacgattcagagtaaatccacgacggcgaaagcaggaccccaagctggactgtttgatgtccaggcttcaaaattctggtaataatacgcgacgcccagaaaatccctgaaataattacgcctgataacgataatcattaggcttactggaaccggacggacagacgagcagcgaagccttgtcattctaactgaaacaagcactggggaggggcggaacattgaagatcaattttaatatgatcatggtgatggcttggccgcttgatacacctaggacctggttaatttgcgagtctcaagtttgtcacttgtgccctgattgtcgtcaataataaaaccataacatcggagcgggccgtcttgacatattcggccttttcggagatttctcgttgctttttccagagtctagattcagaaaaaaggtacacgtttcgtttacttcgtcgtcatcactaggccccgcccacgcaatatgggctttagcctgccgcttccagcttgttacgtcttttgattattattgctcttgcccaggacataccagaatccaatcaggtgtcttctgtgcacctttcttgcctcgttgtgctcaggcacagtggca

SEQ ID NO: 3678 - DNA, 5654 bp, Emericella nidulans
  unsure (1)..(5654): unsure at all n locations
gccttatcgtgcctcttgatcctgtccgcagcactggtagcagccaagactctcttgcgcgtcacgatccctcaccttctccgcaagcgagggattcgtcggctacttcgcttgttccttctagctcggagcagcttcggacaagcacatcctccccctcccctgatcaacggcgtctaaagaagcgccgacacgtgatcaaagaactcgttgacaccgaatacacatttgggagagatatgaaagttgtggacgacatttataaagggacttcaagttcctgcctggatctgtccgccgaggatataaaaatcctctttgccaattctgaccaaattgtgcatttctcaatgactttccaggatgcactgaaggaggcggccaaaagcgtgtacgttatgcccaaatcgcagcggtggagcagtaagcgtagtgggcgaaattcccacgtttctaagaatgattcagaatcaattgaaggagcaggcccttcggatctagaaaaggacagagcaacgtccataggtcagggctttctgaaccatatttcccaaatggagaaggtctataccgagtatctgaagaatcacgatgccgctaataagaaactccaaacgcttcagcgaagtgcaaacgtgacaatctggttgaacgagtgcagggagtgggcgtcggatctcacgagcgcttgggacttggattcgctgctagtgaagcccgtgcaacggattctgaagtatcctcttttgatttccgaactgcttgactcgacaccgccggaccatccagaccacgcatctctcgtgaaagctttggaagaggttactaacatttctgttcgcatcaacgagttgaagagacgggcagatgtggttgggcaagctgttggccgaaagaggaaagaatcagacgtgagaatgggattttctaaagcctttcgccgtcgaacggagaaatngagacagcaagttggtttatccgacatggttgctgacanggatacgatgctctcgcccagagatttggcgataacttctttcaactgcaagtggtcatgcgcgacgctgaaatgtatactcgtgagacccaggcttctttggatcgattctccgagttcgtcactgctatcgaagcgttcatcgatgtttcgcataccagctatcctgagctcgagggcaagtggcgcgtttttaaaatatctgttcaagatatcatggcagcgaccttgcctgagcatgtgagttctgccctcttttcttctctttcgcgaatcattcttgctaacgcagatttccatttagctcgatgttgttaggaagagtgtaatcgacccaatggtcactttgctcaaactccatgaaggcccacagagggtcatgaaaaagcgtgacaagcgtctcatggactatgcccgcttcaaaagtattaaagcccgaggagataagcctgacaagaagactgccgaacaagcggatcagttcgttgcgctcaacgaaacgctcaaagatgagctcccgaagctctactccttgacggccagattaatggaggcttgtttgaagaacttcgtccaaatccaaacgacgtggtacattgtcctgcagaaaaagattgggcctttgattgatacgtttccggaagaggtccagaagatcgtcgatgactggaccacgcgtttcgacttttcggaagcacgggcactctcactaggtatctgcaatggctctttacttgccgatacagtcaatctggtcaacttcaatactccttccacagcaccgggggttagctctccgcgtcgtccatcgaccgtacacagtactagtactcgtgctatggacgagtcccctaaagtatctcatgacttcaatgctagcaatcagtccttccagagccctattatggatgctcaatctcaggtgtcttttggccgccatcgtgctgactcggcattctctactcggattgcttccgagaccccagaccttttaatcacacaagtcttgcagcagggcaacaacgcatcaacatcgtctgttccatccccacagtcgcaaacagaatctttccccaggcttcccagtattagcctcgacactccatttctggcggacgtcataccactcgcaaataacgacaacgcagcagatgagaaccgtcctagttcgtctgccggccgatattcgggcttcttctcgtcagcgatgcctatgtccgacagttcacaggaaatcgccgaatcagaggccaatgtggttaaagagcctactgttttattccttgccgctagcatttacgaatttaatatagaccgagcccgacgtgaggctggttacccttatttgacgtatgttgcgggtgagatcttcgatgtcatcgctgaaaagggtgagctctggctagctcgaaaccaagacgacgcaacgcatcaagttggctggatatggaacaagcatttcgccaaactttcaacctgagatttcactgtcctttcaaaagcccttgcgagactttcgggttcgagactgaaaaactgaaatcggaggtcgccattgcgctcatgcttggtgctaacataacctccaagagtcaggtcccttggctggatctattatgacatctgatgaacgtgtttctttattctcatcttcctattcttcaggaacagtctacattcgataaggactgcttaccctcgtgcctttctctatcaaactgtggagttacttggatcagatgctggcagaatgtccgctctgtttctctttgtgtgtcgtttcctccgacataaatctatttggcgagcgagttgaattatttgctttgtaagagccggtgtttgcttttcggccgcattgatgaaagaaaaactgcatatccgcaagaatggccgcgaaatgtacatctagataccccttgacatcaatgagaatctcatagctttactgctcagttttgtcccagtatcttgtattatatctagatgtggaatgcgcgagtctgcagtcaagccacagtgccacaggtgacgtcctttgggtgccacactttccccagagtggcaccagcctgatcgccgtccgcttgtcacaggcagccaacgccctgctttctttcccatcctttcagctattctctactgctcacgctcagccggtcgctcgtggctacagttctcttcagtttacaatattctcccatccgatgaactattctcaactcggacttgtgattgcaatatctgattcaggtcgccatttctaccccacgtcactaagtacctacctatttacccaggcggacaatctcaacaccggcgcgctgagtacaaccagtattggtccatttgtatacagcccagtcccctggcaggagctctgaattttccgcacttctcgacgaaccgggttaacgtcgcgtgcgctactatagacgatagaggttcgtgattagaccatcagataagatgcgcgacggagggctaggaaagctccagaagaggatgaggcgattcggcgatactgtatgtcctaagtatctccttgttttgtacgccgaatgagatttaatggacacgcagttaaacccggacgatgcataccttagctgtgagtcttctatgagtacttacctcggctgattacgggaatgaggtttgatctgactgggttggagctcatagatcacgacatcaggtgtatgccgtgctctgatcctagttgaaactggactgtcactaacttcttttcctggatattagtgacaagaggggatttacaatctctcaaggatgactggctaacggataacgttcgtttgatcacatttctgtatgattaatgccgaaactgactgaacttatagattatttctttctgggaggagtgagtctggaatcctggatacgcaatgaccggcgccatggctgatcgtcccaggtatctggaacgcgagttcctcacggaatacaagtcatccaacattgttctacttcggccgagcatgtcctttatgattctccagactccgaatcctcattcccttcgtgacgccctacctgacttcacacgcacaacgcacgttttcctgcctataaacgactgccgaaacgtcacagaagctgaggggggcacacactggtctctgctcctaatctcgatagtggacggagtagcattccactatgactcattaccaccagggaattactgggaggcgaagacagttacaatgaagtttggcgctctccttaaccgtcccatacggtttgtcaacctcgacgattcaccaacccaagagaacggcagtgattgcggcgtgtttgtttgcttatctatgcggcacctcctcttaaaacgattactgcgagcaaactctaatgagaaagttagtatgagtttgggtggctggaaggtagacgcgcgcttggggcgcaaggaaatagccaaaattatcgaagggttccggaaggagggcgaaaggcgaagatcgtatgtttccaagctcccttgcttcttctgcagtcgctgacggcgcatggtcctccagagctagtttaagcccttcaggaaagaaatcgaggagtccgccgcgtattgagtgatagttggcccgaccgcttctaccgtacatacgagcatttacttttctacttggcgcacttggaggatggtttactaattactcagttgcattgggcgtaatgacgtcggttggacgagacgagaccttacatcttcctcaattgaggacacgagcatggagcatgagcaacgcatttgttctggagaggggaatatgatgctgtgctttggttctcgtctattaatacatcattttcggtctgcgttttggatgcgattctgacttcactggcaaaccagttctctatcatatgtggatagcatggtctcttggtacttagcgtaatagtgaactttcgaacgagttgcgtttttaccgtatagtttgagatctcgagcgtacctctggtggtcggttcaggtctggacattgcacgtagctgaggtcaaagcctcagctgcctgtatccgcttatatcctccggaggctaataatcaggtttacatccagctccgaatggttacgcgactactttccattctcaccaagagacttcatgcatgagtttcgcactgcctgctcaccgtatggatatttcttactcccctgaatgtgggaatctaggcgtcgatgatgcctttaatccaatggatgtctctcaaccgctgcctgtgtagctttaatgttcgagttcacgctatacctgggctgcagtgttgtccgagaggcttttagtgaggtacttactaatgctggtttttcgtactggttgctacagcaccgagtggcaacgtctcctcaaagaccggggagaaagggagagctgagctccagcattattggaatgaggttactttaatctaggcttctttgccatttgcatggttacagtgcctgttaagctgttagtgtgcaatagcttgtctctggaattctctacagcttcaacatcaatgcaggatgtttagggcttcgtcatcggcatcttttgaaagcgccgtgaagtccaatccgcggttgctatgctcggaggatgttccttcttctaccttaacgttgacctcgattta

SEQ ID NO: 3679 - DNA, 3069 bp, Emericella nidulans
  unsure (1)..(3069): unsure at all n locations
ccatcctctgtgtgctcagaagtggcccatatgttgattatctgctcagtgtctttatcttgacgcagaatatgggatacttccagagggccaacgcttatggtacgaagctgtgccgactcttttgatggctggaccgatcctcccttgttgctagccacactccctgaggactgcggaggtttggcggtctcctttggttggtctgagctctgaatgccacgtttggacgaccacataatgctgcggcggggtttcagacctggccccttgacggaattgctggcggtaggaggctttggcgaggttgttccttcgcgagaagctgaaggtgcagtctgaactggagtgcttgcggaagcaacctccggtgctcgaacgctcactaaaagatagagcttaggcccgcttgctgatccatccccaatatccgtagccgccaattcagtgaagagagtctttagcttattgctctgccctgaacttgcgaattgttctggggaaggaatatccagaacatacgtctcggacaatgcttttagagggccggtgtccgataccgtgcacagactgacggcgagaactactggcccaggggcatttcctgatacagcattgacttccacgagcaaatgatgaagagctgcggtgtccgacgcaggcgtgggactgctctcgagcatgctcatttcggactggagctttgctaaatgtacggcagaatcctcgcctgtcaacagtcgacctcgttgttcaggatcccgcacaatcacttccccaccaagtagcttgttaccccgaacaagtttccaaacaacctcttgcctgagcacctccttctcttttgaagttagcacgttgtataggagctgtcgtctggcataatcaagctcctggacgatagtcgacatttcttccacaacctgatattgctgcgacagaagcagctcatgtagcttagtcgaatgccactcacgcaaacatgatgcgatctcgtcgaccaacggctcggaaagtgaggtgggagtttcgtcgcctattttgagcataggcactggcgcacgtggcttgggtgcatcaggatcccgcggggctacattgaccggcgtaagtggaagcattccccagggactggcccgcgcccctcgtggagtcgactggtcatcatcgtctgtcttctggatgaaaatctgtgaaggcttctcttttcgcgcgaccaatacttcagatatctcgcccgaaacttgttcgtcgtattgagaagaagctaaactgctccgcacatccacctccgcatcttccgccctgtcgtcaattgagcagtccccatttgtcaaggtcttatttccttcgctatcacccaggacttcgcggatctccacgcaattgcgggggaagatacccgaaaatactcgcgcctcaagggtctggcctttggtgctcgttaaacccgccagcaaagacggcggagcaaccaagtagccgcgacaccattcaccattgttcccgccttgttctattatatacagctcatcaccgagttctaacggtaggtcggccggagtagagggctggaaggggtagatggcaacggcaaaagcgattcgaggcagaggccgccagggcatgtctgcagtcgaggcggcggaccagagcgcaccccgcagcagtcgtcgccggtacggggccgtctcgaggaatggaggggcagcggttcagcggaggcagaaagaaagcaggaattctggtttgatcaaggggacaagccgcgacatgcagtaatccctccgagtgtatcgtgcgatttgagaggaatgtagattaaactcaacgccgcacggatcagaaacagtgatagctgagttccttagactaggaattgctgtaaacttgaaacctaagcagagacaacaattagcttgagaattcttgtctgagacgggccctaaataggccaactgaaaagagttgagcgcaagccacagctcagcaacgagctaggagccaaagttgtaagtccacgagagcaaaacagttggcacgtcaagtatacggatgaattgaatactaatcgcatcctagtcctgtgcgatatctgaccccctagtgggcggaggtggagtccccggtcgagagcctttgctcagcttggcgggaacggtggagaaggtaaaagaagggggtgcgagaaaagcataccggctgtgagagactgagggtaggagtcaacagacgaaaggagtggtcgtctgagagaaagcggaaagaaaaactagaattgagcacaagcccgtgaaactcgaaggtgtcaaatgggaaaatggcgatcgcgcaggagcgaaagatccagagggtcgccgggtcgatcagttcgtcgagcgtgaggcggagagtagggacagatccaatcgtattcaagctgccagggccggactcagaaaggactttgttgtctcttgagaagggttgaatgataaggcaatcatgtttgcccggctagtagcatttctcctgcttaccgtccccccgggatgtttggtgtgatagtgatagcccctgaacctgaaatgaaccacttcatcccatggctctgcgcctgagcacccaaacttgggcgatcccaaagcaatcaatctttttccacaggcatcctgccgcccactcgttatgttttaacattgcagtccagcttcttgagaaattctttactgtactcaagttggtttctactgtcgatgctccctgtttgggcatatcgtaggcatctcaaaactacatttgtcgctgaaatagtagataaaaggtgatggattgctaaacatattcaatgagaatccaagcaagcgccattctatgaaacctgcatagtagaataatagcgcaggaggataccggttgggacggatagacatagaaagatacattatcatttcctaaacgtagcggcaacatcctctttgcgccactcaagctcaagctgaccttcatatactgcacggatcacatgttgcgttcggtcataggcctgctcataacgactntcacattcccgagcactttgattaccag

SEQ ID NO: 3680 - DNA, 10380 bp, Emericella nidulans
  unsure (1)..(10380): unsure at all n locations
aaaaacctccggagtcgagtaagatttggcatgtgctgccgacgtttttgttttatctactgtactactttcaagtcgggcgggttagttgagccttcatcattaatctgtgttccttgttcaacattactcatttattatgtattttcagatctgccttgatttagaaattctaggggctctaaaattaaagcattttcacaggtccggcagctccacactcctactggaattccagagctacactcaccaccttcatcctcgctaggatagatgaagattttggataaaatgctttgtgtgctcctagccgtcatggccaggtcaatccagtcgacgtccgctatttgccaaattctgtgatgtcaacagttaatccactccactggacatgatacacgatgagtcttctccgctatcttatttctgacgtcgaagcggctattgcccgctcatggtcttagttctggactggcaaagttgtatgttgtattacaagctgtgcctgcatactgaaattcttgtcagcttgcttccccccccctctctttcaactaagaccaggttctctgtccgactggttgttgaaacatcaccaatgccgcacttcgataccttccgttagctgaagttccttgagctctttggaaaggggtagaaaaaggcaggcgtatctccatggacaaacaaagcaagcgaaccgagcaaaatgcgggaaataggagggcgaaggtgagcacttcgttccaatctggacacggaatgcttattcagggaaatattgcgtccaaaggtcttcttatggaggtctttaggccacagacgagccataccgaaggccttgaatggctgttttctatggttgacggcactcgtcttatccggtgtcggaatccagctatctcacgtacgagatgttgacctgaatgtgagcgtcctgtctgtcaattgccccgccatatcgttatgagctataacctacacgatcgattgatagcaacagctgtcatggaccagaaatgcaccgctagaaaggaacttaggcgaactaaggtctgtgcagagttcttgcgactgtgcacgaatcatcgctggcttccaactggtgaacgagcaatttgactatacaccatgtcggcatgtctgttcacagatcttggccagagttctggcgaatggacggccagagctcaacaacattattcttttctacgtcatttcgatctaggcgaactgcatcattacaaattagttctgttggctaactggctaactggctgacattatgatacatccttgctttgcttatggcggcgatgccaaacaaaaggtaataagaatataatcaaaaaaaattgttcaaagttgcatttactagaaggcattctttgtgatagttacagatttaatctaaaactcataatgtaattgcggatgacttgcagcacactgttcttcggctatctgaacatcggagtcatataaccaaaactctcatatattagatggcaaaagagtagcttctcatcacttcttcaaccacagctccaaggccttgaaaagagatagaaatgctcgaaagatactggtcgtatacaagtgagatggattgtccacatgaatgacaaaagaaagccggaatccaactcgaaagagcgatagctcgacgacttatggcgactgcctagccatcaatctcctaactagctacagctgacccggcttcctagaatcgcaatctgcaacaggctaggagcacctcagcaccacttaagatcgtcgatactgatactttaaatgaaattcatggtgcttaaaatattaatctgtgtatgttgtaggcaagatttaaggcttatagacgaggcgcttgtgcagatctacttatggcatcattgtgcaccagatcattacggaagtccccatctactccccatctacaagtttatataatgcctctactatatagatatccgaaaaactcgacactagagtagtacttctcgggtataccccagtctccataacagtgcgtgtcgtttatcccaataagtaagtggatcccatgattctgtgccgttcaaaccgatccatcaaccattttgagtccccactaccgcagcctacgaaccactgctcggtttatcttcgaaagtcgtctgccctctcccccgacatatctttaacacacagcacgattgttgtagaccaggaattcctggcgttacctcgactggaagactaaacactcgtcacggtcaattcacaacgctggtttgggttgtcggttgatctgcgagatcatccgctctcgagcttggcaggtgtgaactgactcgtccaagaagttgattttcttcaaggacgcaaaagagaagatgtttgaagttagataatcatcggccattgaatgcatatgacgatgcatcttgaacttccgccgcctcccagacacctacgatctcccggtgctgagggctaccgtacgccaacgatcgaggacacggaaaaagagttgtcaagaacattatcagaaagcaatgtagcccttcagccaacaggttcgctggtgcgagaggcgcattcctcagcgctagagtctacacatgactcttttcgtaaccggcacagtggagtcgacatgtcactaaatcggacgataactgaatcctcgggggggaagctcaactggaagaaacgaatacggcactttacctgggcgttcttcactctaacaatggccacaggtggtattgccaatgttatatattctagtaagtcgccaggcccttaagccatcagccactaacggcaaacagtaccttatagattccgaggcttggatactattggaattatcttcttcctcgcaaatattgtcttctatattgtaatctgggctatactgcttacgcgcttttacttgtttccatatactttcaaggcgtctcttttgcatcccacagagtcattgtttgtaccagcatcggtggtctcttttgggacaatcttgattaatatctcacagtatggcactgataatactggaccatggcttactaacgctgtccatattttattctggattgatgccgccctggctgttatctcgtctgccgggatttatcttcttctgtatgcccaaccctgtccatgtcattaagatatggcttggcaggctaattgtagcaggtggtcaacgcagacctttaccatagcgcaaatgacgccaatctggatttttccggcctatcctatgctgataattgggcctcatgctgggctttatgcgctaagttgaagccctctagagccctgcccatcattgttgggggcacgactatccagggagtggggttcctggtttcattgatggtgtattcggccttcatctaccgattgatgtcccagaagctgccaagggagaatatccggcctgggatgtttgtctctgttggcccaagcgcatttacggtagcaggacttgtgactatggctgctcaggcgaacagtgttttcccggatgattttatgggcgacggcattttggccgccaacgtcttaaagatcgtggtcaattttgcctccttatggctctgggggtgagtacttttgctgccacagatttccaagctgacctctcagtcttgcaatattcttcttcttcatcgcaagcttcgcgcacctatccgccatcggccctgggcgaatgattttcacgatgggctggttctcgtttgtctttccgaatactgcgctgatcacgtcgacatttgcagtgggaaatgcattttcctgcaaacctattctaattatagggtgtgtcatggttattcctcttgtgctgatgtggctcttcgttgtttatatgatgatccgcgctataatcttacgtcacatcctctggccacagaaaggagaagacaaagacgagggagggtttgaaatcaatgagatcaggcctggcactctcggtgcagaattccagtaaggtttctactgacgcagatgattgtgctgctaccatttgaatgaatgatcatagtttggagggatttgaaagattttgtatacatgtgatttaaaccaaaccattcaatgccattcgaaaaaaaagcaggctatataacctcacggatttgggctctgaacacccatccacagtagtatgcatagtatagaagtaatcacagctggcgtcggcaggctccgatggcaagggttcgcaggctccaccttcttgggaacggtccaatccatggcgggcgtgccacatggaaccttatccatctaacttggctgttttttttttctgcccctcggactctgtcttcttaaaatattattacgcgttttcctctcctctgcttaatatctgttgcttgaagaacactcgctgttgagctttcggctttatcacgcacagctcttatccatctctcgtcttatcgcgctatcgggaaacctcttatcgtcaatatgccccaaaaagtctatgtcacctacaaccaggtatgaattgctcagtctgcgcattcaagattccagagttgcagaactaccctacacaacatacccgccttaagggctcttcactggatactcgtatgtcgacgtcaggtcggtctaacaattgttgggtataggtccacaagctatgccaatcctcggctgaacaaatcctcaacacattccaccccaacttgatgatcgctattggtggaggcggttatgtccctgcccgcatcctccggtaaatcgaccagatatcatagagaaattatgatctgatcaatcactagatcgttcctcaagcgccccggcgagcccaacatccctattcaggccattggtctgtcgctctacgaggatcttggtcgcggtgacccagaggaggtccccggtacaaaggttacccgaacacaatggctggacctgagttccctggaaatggccaacctgattggcaagaacattctcattgtcgacgaggtcgatgacacccggacaacactggaatatgccgttcgtgaactgcaaaaggatgttgagcttgcgcaaaagcagcttggtcgcgaaggcgagaagacgaatttcttcgtgtttgtgctacacgtatgtccctaccatgatttgtgttgtgaggatgccaacagcttgaacagaacaaaaacaagtcgaagaaggccaactgcccactgacatgatggagtccggccggtaccacgccgctgtcaccactgatgacgtttggatttgctacccatgggaggcgaagtatgatcaaagccttttcatttagaaccagttacttatcagtttatagggatattgatgaacacgacgcactcgcgaaggcaaaccccctagtctaaggttcagtcagcgaaaacctcaatctttcgcatctgttatgatctcgaaatgcgctccctccgccggttactagaatcgtcccccctctgcttcgaggagccaacgatctcaggcgtcttttacgaatgggttttatagataaaagcaatcacttcagcatatcttcataagaggatctatctacctgcagggaatagaccatttttttgcgtggtcgctttttggaacattcacttttttatgagttctcacgcccaggcacgatcccacaaaaacaatctcactctgcgatctacacatacctggcatacgcattttatgatactgtatgcagccaaaatgcaaacagaccgtatcattgtagtatatattacaatatctcctttacctctcgtgaacctatgccgcccatatgagtggccagaggcctcgcctcaaatgctataatagaaagttatcgttcgattctcgcatttagtccacgtcaacatttgcccggcgcagttcagccttggcctgctcgatctccccctgcagctccttgtgcgcctcaggcacatcgtggaaagtgaagatcgccagacccaggcggccgagaaggtagcatccgaaagatatgagggcgtaaaaaggtagctagataacgcgcgaatggcgtccgtcagcttgggcattggaactgaaaaggggtagaagggcccaaaatgacgtacaacaggaatgatttcttgttgtatagtttcgttcagtgggataagtccgaggtagagagataggtagaactaagcttttgttagtttctgttaattgaagggggatagatgtgatcgcacagaggagacgaggaggaggacggagagggtctgctgggcgcgcgtcattgtaagggtgcttgagatattgaattgttctgtaatatgttgatcaggatagaaacgaacatgaaaagattaacgaaagcaagtgggcttcaggaaagagcgcaggttgaagataaatgagggactgggtttgaaagaggaattggataatggacacctgagctcaccaaaggttgaccgcggagatgtggctgtacggacgtattataaattacctacagatgtctaaacaacactgggagactccagcaggtattactgtagagcagagtattgagtactcatgtagcttaatcctatcttgtccatgcgatttttctctcgttctataaggagctccacttgaataactgaggtagttctatctactctgaagcgatacactactcgtaccgccacgctaaagttcgttgtctcttgacgccttaggccgcgacgtttttcacgatgcatcaatccatcttgcctgtataacgagtgattatcgcttttgtcattcgggtcagatcttagaacagagattgggcaaaggcatcgcccaatcacttcttacaggtctaccaacggatagccttctgcacagagtagtgagtacagcctatctatctgcgaacacctttccggtttacagacctctaaggtgctataaaagagatgagcagcagcaatgacgccaataacctggacacccaggctggaaatatagaaggattgcatttcccttcgctggaggagattctccagacgcaacgtccggcaccagagccgcccctcgccgagacgctaccattagaggagcaagaagcccttttgtactccgtggacgatgccctgaaaaggcncaatgagggcgattcggcagcctttgaaggtatgctggacgctttatccaagctctggcattgccaatcccaattcttactgcgggctacagaagcccctggcgaacgggagtagaaaccgtcagtatatccaaccagctactatgccagttgcttacctgcttaccgtttgcagcttcgcttcgtcttgtgtacggccggacgggagttctggatttcttcctccagcttatatcttcaaaagagattgcggagagtagcctgattcttcattcccttaggctcattgggaattcttgtgctgacacaggtaagtcttttcttcgtggatacagacttcagatttataaattatccagatgaaaaccgggcgactgtggtgaattatataccagccattctgcagtacctactgcagcctgaactccgccaggtcataattcctgtcgtatataatctatgcattgactatggtatgtactctgctttctagatgttctgcctgactgacgacatgaagaacccgcccagtctcagttagcggcgaacaaaatagtgtatatccttttaacactggtcaaggatgatgcattccagggaaatgatgctctaattgaccatgtctacgaactaatagagctcgtgggcgagcagggtatgcatcgtctcttattcgctagtactcactaacgattgcagaacaaggcgttgaaaattctcctgatgggacaatttcattactactagccatgactgctgctgaaccagcccaattctgtatccttgcgaactgcaccgcggcttatataaccaacactagatttcaggatatctgcatatcaagacgcatggtctcggatatcttgtcaatgctcacacggtctatatccttcgacacagcaggctctgatgacacgcaagcaatcgcacagtcacggctgaagataaaccaggctttagcagagttatctgcctcgccgcgttttgcaatgtcctacccgctaaactcatccctctcgcagacgctcagatcttggctaaatagcccagaagaccaacttcagatctgcgcctgcgtcatgctcggcaacttggcacgctccgacgagatctgcgtggccatggtaaaggaacaaaaaatccacgaagagctgatagccgtcctaaacagcaatgccagaggagcagcactacactctgcccttggatttcttaaaaacctggcaatagccagtgacaataggatcattataggcaaagctgggatcgtgccagccatcgcgcgcctatgggcgtatgaaaccatcccgcaagtccagctttcagcaacaagtatcaccagacagcttgtcaattcgtctgtcgagaatatcagtcggctactggagccagcagagggagaggaagcgcagtcttacctctcattacttcttgctctgttcaaaaggaccgattcaattccaatcaaaacagagatggggcgcatcgcagccgcgatatgtcgcacgctcattcccagatacaaagccgccggtgactgtgttctcgaatctctattcactcacaaagacatagcccttccactaggcgccatggtaacgcaaactcaatggcctgtagtgcggagcgaggggtggtttgctctcgcactgatggcatccacaaaggcaggctctgatgcggtcgtcaattgtctgcaaaacattgatggtttctctttaattgagcagactctaggcgctgcagaaccaccggagaccgaggcagacaaggtgcagtggggcaaggaccgagataatattataattctcgtgcaggagctgctaaaggatgaggtgagtctcttaactgccaattatactcaggctgatcgatatcctcaggccgatactgttgacgcttcctggaaaattactatgcaaggcctgatgagacgccatgtctcaaagtatcttaagcagggtaattgacactgaacttgaacttgaacctgtgtgttcttgatagaccagatatgctttcccaatcaactgatgttaaaatatcttgctcaacatcatacctttgtcaattgcgtcgggtatatatttcattccaaactgtcacgtggtgatatccacagcatgtggtccacctaccgaggtcaggactcctttggattaaatctaaaactagatactagccagtttactattcgtcttggagacatccttcgttttaactgctgtaattgtaatgtctgacgacagtgacaagcggaaatcggtcctaatcacggggtaagcctatccttaacattgggctacactgtagctagctcgactcagggaatccctactgagccttgcctatcctttgatacagctgcgctcccggaggaatagggaatgctcttgctcgtgaattttacagaaatggtctgcgagtatttgcaacagctcgaaatgcgagtcagcttgaggatcttgaagccataggcatcgagacgctgagtttgaccgtcgacgatgaagatagcgtccaattatgctttgcagaggtggagaggagactgggtcataagggtctagattatctggtgaacaacgcgtgagtttcagatgttaaaggctaacacctttgtgctgactacgccataggggtcgcagcatgtatacgaacgggtatctataggccgcggcactgacgacagccagattttacgggccctgctaccggagctgttcttaccctagacatcgcgtctttctgactgctccccttcttccttgtacatcatctactcatatttttttccctttgttcatctagtgtttcttctgctttctttctcgcttctgtcgccttccttctttttctcctctcttacctccttctctacttcgttctttcctctttctccctgccttactccacattatctccttaatcatttatctctcctcctctgtccccctttctttttttttcttccctccatttctctctttcttctccttctaccctctcttcttctacccttctcttctctcctttccccccaccttttctctttccccctcctacttctactcatatactctttctttcttcttttctaacttccccctttcactctttttcttttcactccttatttctttttcatcttacctctatctttcttctctttacctactttctattgccttacctatttaacctccttcatattttctattttcctctgctcctctcttttcctcttctctttcctttttcattcatttcatcctctcctc

SEQ ID NO: 3681 - DNA, 2843 bp, Emericella nidulans
ggaagaagagagagagaatatagagagtaaatagaagattatgaaaagagagagaggaatatgagaaaagaggttaaaaggaatagggaggagaagaaagagagaatgaaaaaggaaataggaaaaggagataaaaagggagggagagagaatgaatgatagaagagataaaggaaaggttgtaaatagggaaaagaagagaggcagaatagaagatggatcaaagagaagtcacgtaatgaaatgataaaaaagggaaagaggaagaaggaagaatatcaaaagaggacaatgaacaataggccgagaagtgaggagaagcagtataagagactgagccggacaagagagatagacgatgaacggaaatgagacaagaacaagaaacagacaaaggataaaatagaacagagaagtggaacacaaaccccagtagagtctatgcgcaagtaaggacaagaaaaagtgagtcgaaagacgaaccagcgccggacccatgggcctgcccgatccatgccttatctaccatatacacagtatggactctgcacctgtactccatactcccccacctcactgtgtacgcgtagtgcacgctgctgcagccaactccaagccaactgccccaccagcccttctaccaaccagtggaatgcgtcaaaaagcgagtttcatgtcttataatccactgcaattcgtggttgaagggttccctgtgaatatggagttaacatgatggggtatatctgacgtttgatcggcgccgaaacggttcgtctcaggcttccccgggacattgatgaaatgcgtcctttggtttccgaagttatgattcatgcttctgttgaattctccgcagattggttgggagaggtagtggctgagagtctaaagtcacataatgacgctttaatgggccatcactgcgatctgatcttttcttgatacatcattgcacagataccagatattcatagaggtagagaacacagttcagtcactattagatacagttgatctttcgttggttaatgtacatattatacagataagtctcagctattttcagtcgcccgcgaagtcaaagaagccaatgctgtataagcaccaaatctgaacacaaacccccatcgtgctggacatcataacgtcgtacagtaattgtcaatataatacagtgagaaagtcatagcacagcatgcaatagaaacaatcatcacacctgtgtatagaaaacagaacaataacagacggtctttttatccatgcttccacccatgcacaaaacacacgcaatctatagctcaatcgagaaaaaggaacaaggctggcttgctgaatcaatacaaaagtagtaaccataaaggaaatcgaagatgagagaaggagaaagaaatgcgtcatcgagcatcaacaaggaggtaaactgaaagttgggacgtaagttgtgttataggtgacgtcatgggtcctaatgcacccgccaaaatggaaagtctgatgacgatcgggatttgtcagcagtgcgtacccccttcttcccctttgagcgacgcctatgacatcagaggctggctcatcgcatgtcgagtcattcggtgctctcacgaactcgtgaggcagttgatcccattcgctaagttcgcggggttagggaaggctctagcagagcaatactgcatcccctgagaaattggataactctctactccctcgtcctgcgcttctgtttgccgggccattccacttcgggatgtaccacccgcatgtgccgtgtcagagcgtcattgcgcgaaaaggtcttttcctcggtgcacagatgacagcggactttctgtttgcgggcattgtggatcgtatcttcgtgccgtgtaagatcgtaaggccgagagaagatagaattgcaaggctttcctgtcgaaggattcggacgggtgcatttgtggggaccagcttgcgagttgcgtgatgtcccgtcacgcggtgccaggtgaccccccggtgtggtttgacgatgcgcctcgcgtttgtgtttttgtaaatcagatggtgtctcaaaacgctgcgtacagccatggtacgtgcaggtgtaggtgccaccatttgacgatgtgttcgcaggtcgctgcactgggccagccgtcttcgacagagtaggcgacgttagaccattcgagtaagcttcactgttcgtagactcgaatcgagggattgacgcaggaaactcaggagtgtgatgcaggaagttctgttgctgttgctgttgctgggatggtcgtcgactggaaggttgcgactgaggctgtggctggttgaaggtgaactgggactggttgaactgagcagggaatgattccatggaagggaaattcggagccggctgaaagctttcctgacgaagtccaagattgtcacctaggttgaagtcggtctggtaaagcggtagcccatgatcgttaccctcattgaaatcgttgagcactgcgtcctttggggaaattgtctttggctcagtctggggctgatgctgcattgccattccaggttggctggtaggcgcgctagtcatagcctgctgttcgtactcggcagccatgggagaattttgtctgaacggagaacgttcccgggctattgagccacgggagactgtacgcgtgcacagagatggcccttgtttgcatcctgtacccggttcgcaacgatattgttgtaggagaggggccagcaagttctgctggttctcgttgtcttgcacagagagctgtggtgtttacatcattgtcggactgaagagctcgtcttgataagcatctgtgatcgttcggttgagttttgtggat

SEQ ID NO: 3682 - DNA, 2503 bp, Emericella nidulans
  unsure (1)..(2503): unsure at all n locations
ttattcatattgtacactcacaaggtcatatagagagggtcaagtcgatcctaaatcatcactaccgagtgtactaatgattttgcgcctatggcggcctcgagcagcattcataaggaatacctgggtccgaagcgaaagttcatttttgtttcctatcctcgactgaaagaagacctcttagccaagccggcacttgggcttcttgaaactctggggctgcctaaggagactgcggtcccggaagttgaagagccgccgactggaacccaggactccaatactttgcagtctccatcaccgcatatcctcgagctagaaaacattgtacatcaacttggacggtcagaatgcccagtcaaatttgcgtacgctcaagatttggagcagagtatcgcagctctgaagacaattagggatacagaccagctccatcgagccaatccactaatggaaaaaggaacacttgatcaggatattataatatcgcgcaataagatcaaagactactatgactgcatcagcaattctctgtctgcttctgatgaaacgttcaagtggctatctataggcaacctatggccgaccctgactccaactacaattctacaacagctacgttcgacatcccgtcatgagtttggacctgacatgaaagaattatttgtctcgtacgctctagcgattgccaagctgcagaagcttctcaggctgaaagaggctgccacgaagcgcgaggaaaatacggtcaaccacgattgtacggatcctggccatgtgaactggaatccgttcgattttcctgactggatactactcgagatcgatgcaaactttcaaattaggcaggaccaggttactgtagccatggagatgatttcaccttcctctgggtccaattccgtccttcagatgaatatgggccaggggaaaacgtctgtaattatgccaatggtagccgcggttctggctaatggtgaggtactcagcaggcttcttgttccaaaagccctactatctcaggcagcgcagatccttcagtcacgccttgggggtctccttgggcgagatattgtacacgtcccgttttccagaaggactcggacaacccactctcttctggaagactaccgtcaattacatgaggggactttgctgagctcaggtataatactaggggtgccggagcatatcttgtcgttcaaactcagtggactccaacgactcgctgactcgaaactgccagaagcaggtgtgatgatcgacacgcagaaatggctggaggaagtttctcgggatgtgattgacgaagcggactttacgctggctgtaaagacgcagctcatatacccaggcgcctcgcagctagcggttgatggccatcctaaacgatgggaggtcgccatgactcttcttggtctctgtgcatgctatctcaaagatctctcaaaagaatacccccggagcatcgacattctcgagcggaactcaaccgggtttcctgtgacttacatactacggaaagacgtggaacacgctttggttcacaagattgcgcaggatatatgcaacgaaaagacatctttgttgccgctccgggattgcaacaaaatggacaaagaagcgatcaggctgttcattaccgaggaaaaagtcgaaaagtctgtgactaaacgcgttgcaaaactgttccctgacacccccaaattgcgcaaagttgtttatctactgagaggtctgctggtacacgggatcctcattctgtgcctcaagaaacgctggaacgtcgagtacggacttcaccccggtagggacccaatcgcagtgcccttccacgctaagggagtcccatctgagcaggctgaatggggtcatccggatgtcgcaatcttgttcacttgcctcgcattctactacgagggcttgagccagcagcagcttaagaaaagcctgggagcagttctaaaaagcgatcatccgttcactgaatatgagcgttggacgcaaacctcggccacgcttccggaggcgttacgacattgggctgccatcacggtggacgacgcaggcttggttgcggaaatatggaggcacttgcgctacacgcgcgaggttatcaatcatttcctgagcaactttgtgttccctctgcatgccagacaatttgccaccaaattgtcagcgtctgggtgggatttaattttgagtcgcggctctcaatatcgctcgacagatgggctatgggtccatcctggtttcaccaccggcttctccgggacaaatgacaaccgccgacttctcccactcaccattgagcagtgcgacctgcctggcttgtcacatacgaatgcagagggtgttgacctatctccttcagcccaggaatcggtgttatcgtgtggctatcgngccgtacgaaagacgcatgtccgagaatgcgttgttggagtatctgtataaggagaatattcggttctcattgatgccggtgcttttatcatgg

SEQ ID NO: 3683 - DNA, 12377 bp, Emericella nidulans
  unsure (1)..(12377): unsure at all n locations
ccggatgctgcgcttttatcggtttgacttcaaaagcgacggtatttgaatccaggctaagatgttctcttggggcgggatgggtacgaatgggtggataaccatagcgactattactgtttcgatactattgattttggctgttatctacagcaaagtcagctagacatcgggttcgagcgggctttggatctgattcattggagcatattgactttcttctcacgacagtagtggaacgtgtatgatagcaccatccattcagctttcatgataataaaccagtacctaatcttctgacatacccaacgttgactgcatctcttcccgctaacgaggcgacaaagtaacaaaagaaacgggtatcacgggcatcagtagtcatctaatcatagaaaacgtgaaaacgtaaaaacctctataaatcaccttaaccacagcctggatcccagcaggccgccttatcaacccataatgcgcatcgctccgaaggcgatattaaccaccacgcccacaaacaccgccaaccccttccgccagctccagacgccttcctccctacgtaaccacatcgcacaaccaacaggccagaagaaccccatgacagcaccccagagcatatcatcgatcgctccccttgagttcgacccaaagccgccatcatcatccgtgaatgaaactccctctccacccgcgacagttccgcccgtcgccattgtcgatgacccctcatctaaccatctgtcctcaagctcacgtagttctgccccagtaggcatcgtatcccgagtacgagaaacagatagagtagccatgaactgagatcggagggctgtgacttctgccgcagtaaacccggctgatagtagtcggtcgaatcctcgcggcgcgggtatcgtggaagaagaggcttggccgtcatgactttgctggcgagagtgagaatctttggttttctcatcgctagaccggtgtgagttgtgaccctggatttgaagcgttgaaacagccgcagcttcggcttcgaggtctgcggcgctcaagacaatatcaccaattgagcagtgaacatagagccgtggtggctcacggatgggtgccttgcccttgtcccgttttgtagatatgccctgattactggtatcctcgctggctgcatctttgtctggtgccgataatgacttggagaaccgatttgagggaggtggtaacttgagggagacagctagcggggtggtatcttcgagaccacgaccagcgtagatcagacggagacgatgcgaggataagcttggtgggagccgagctcggatggcttgcttgagacctgtggctgtggtggtttcggggtagtcgatgtcaagacggaggtctggtattgacgcggagaagcgtactgtgatgaagagagtgttgttctccggccccggagggttaggagcaaatacacctggagggggcaacattgcctataattgccttttctgaagtattagatgatgtgtgtcatggcaagctctctcataaggtgtaaagacaataatgggttgtggttgcctcgacaatgatctcacgccacgtgatatcgtgcaataagcagttagaagttctatggaaagcccttacgtaggatacatactcctcaccctaacaccgttcgattctatacgtgcgtttatagtgtagtattctctattctcaactgccgacttccacgcagaagtacttctcggctagtattccctccatttgtactcccgtacagcgataggttcaccgtccgttcatgcagaggtgcctggttgatagccatgggctagtgaggactgtagaagaaaactgatgctcttactgagggcggctacaaatattacacttcataattcgaaagagttcgtgttggtcgttctatagcgctgctcagtagaaggtgaaaatgtgataggatcagggtgcttgaaaacaggccaggaaaaccgagccttgtgtgttgtacaggtgttgggataaataccccgggaatcattaataaggtatttctaagcaatcatccgaaagaacgccgcccgatgcactgaggacacagctcaagagagcagtggtcataatgtataaccaagggaaagtttcatatgaaacgctagaccatgaatgattcgccacagccacattcctcctctaaatcgtgcgttagcaaaaggaacaagcaagctccggttaaggaggacactcactgatattagggttgcgaaacacgaatctcgcgctcaatttatcttcttgccagtccatttcactgccaataatactgaaaagggccttgctgtcaatcagaacctttacgccgtcctgctcgacgacctcgtcaaaagtgcctggcttatcgacatattctaggtgataagcgagaccggagcagccacgattcttgacaccaactcggataagcctcggctcaggctgcgacacatncttccgaagctgttcgacggcaataggcgtcagtttcatagccgccttgcaggccggagcttcctgcgaggtttctcggcgggtttcgaggtggtgggcgtggattcaacgggcttcgacttctggggctctccctggttgacatctgcctttagctcagtgttctgtatctgtgagttacgttgggcaggttcgcggtaatggacaaagtcggcggcgacagaggaatcctttgctccaggactgggcgaaattgggaaagaagaaggcaacgtatgaggtcggtaggccgttgctgtctgcatatcgcgcttcgacgaccgatgagcgttcccatatgaagagaagagacggtaatttggcgccatgcgtatgctaggaggctgcttcaggcagcgcaagaaggcggatgatgtcaccgaatattgcatcgttggtttgcagagcgacatggtgtgtgaagacaattgatggtggcagacaaatctatgatgtgagggaagatggcgtatctatcgggtttttgttttcgttctataagacaagttgatatttaaggcgaagtaggctgagtgactcggtagcagttcgtgttctttagtggtttggaggcggaaaagttcccagcagcagttggcggcggaatcggttaaaacggggcagtcgccagtcagagtaaccgggtgcgccaatcaccattaaggtgtttctacacaggatggcgccactcactatgctatctcctgagaacttagctgacaaccattttggtaatcacgacactcggaaccaagtgcgctttaatccttcatcactacacccagcttctagcctcttctttgggagatgtgtctatatagctcgcttctgaagacggtttatgagccacccgccctgcaactcagagcataaaattagtaagcatcatgtgacttggtatgactaatgctattgagaagtgccaagatgtggcctgaattcaagccacatgtaaggctgggtcggccatgtcacatgtggccgctctgaggaattacacggttgttgagacagctcgaattgagctggatggagtcaaagacgagatagcttcctcagtattcattgtcatcgctcctcatcattcatcatcgccatttcgtgcaatgctggctgcggacgatgtctaccatcatggaatcccccttaacgcagcaaagtagacccgaaacctttaagcccaaagttgttcagctctatgagaatctattccaagtaccatcccagtcgccgctgaaacgctacataagacctatactaatcaatttatagagttcagattacgctgaaccctcggaggggttttggagggaattcttcctgctgccgcctgatcgggcccaactgaatgccatcctggaagctcttagtccagatgagacactcagccttcaggtccgtatggcttttgatgatggacgtatgaattgctaacaatctcagtcacaaactcagcagctctttgctcgtggaatccgggaggctgcctccggatccagcccggtgaactcttatgctctgcaggtatgtgaccctacatgaaagatgtcgtccggtttctaaggcagacgcagaccttgacggtcttcttagcctgtattcttaaaaagaagtacaccaaccctagctccgacatcattactgttctggcaggtctcgacaaagttgaccaggtcatatccaatttcgttgccgtcttggacagcatcatccgcagcggtacgaacagtgagcatttgtcgttcctttgcaacattgactataagctaatactcccgcagatgatattcgattcatggccattaggacagctattgctatgacgagtggagcctataagacgagcctagtatcgtactttacacatcgggatctattcccttcaattatgaaagttggtagtccatttacaccgatgacatcttccaacagtgtgcaaatgctgacaaaactacttcaagcttgtgcatgagtcggagtcaccgatgcaagtcttcgagcctttcttactactgggactgcttgccaactacaacaaatttgagttccagaacccatatcaactgcggctcgatgattttgtaaatgaaacaagcatccaaaagatcattaaaggcgtgggtctctcatgtggtgctttaaggaacggctatgtggcggtacaggacgatttccctgagggctggaccctgatgggaacattgatgtattttggactgggtgtgctggcaccaggcagaaaagagaagcctactcctccttcgccggaggaggcaaaagagatgtttgcggctttgtatgttaaatccttgcaccactacatcgtatctttgctaatgagattagacccgcgcaacaagcagccatcttgctagcaacctatgacttcaccaacgcgaataagctttttggctaccatctaatcaattccccttctgataaagacactgaggagtcacccttctcaagcttcctctccctgacctcctatctcttgcatcacgcctatcgctccacgcgcgttaggcactacgcagagcttagcctttttgttcttcgaattctctcagaggactcaacttcgtgcaagttgctctgtagcgaagaaagcaagcgaaaagtccgtctctgtcgccaaaggcagccctatcttccccttgtggcaggagacagagtgctcgcgacagttatcttcgacattacaatcgatgccatttcgcacaatcttcgacgtcgtctcgatgtccaaatatacaggtatgaggatcctcatcgtaaatcttgcatctctaacctgggtttacagccacacaattgccatccttctccgggttctcacctacctttccatgaacaggattcgcctctcctaccactggtccgagctctggcgcactctgctctccctcatgcgcttcctaacaacatacgtctccgatctaaccacaagcccacatatatcaaccctaacaacatcattagtcgaccttatcgcattctgcgtctcttcaggtgacaccttcctccccgacccagcctcctacgacgacctcttctacaaactcgtcgaaacgggtcccattatcgccaaatttcgcgatgtttacaatctcaagcccacctcgtcctccaacaccccttcgtccctttctaaatccgccgatgcaaacaaggatatccacgttgcggccgtcgaaacactcatctccgtttccacacatttctatacgctcttgttcaatccaggcacgaccagcgctgatgcagacaaagccgccactaaggccaacggtgatcaaagtcagaacccaacaccgattccggcggctcaaaaaaagaatatgagtccgcgtgaggtccaccgtattattaaacaggggtatgatacgttgagtattcagcctcctgaaggcttgagcgcgtggacaagataccgcgagacggattggaagccggacttgaagcgggcggcacggtgcgcggtggatgatgctacgcagctggtggcgtagtaggctattatctttctctattattcaaataatactattcgacaatcgtcgcctctacgccctcctcttcgccttctaatattgttggctggccttttcagtcgaaagatcagcaatccgctgttgggtttactgggtagctgtatagctgtatatgtcagatgacttcagttggagtgaaaaccaatataaaacgtgaatattcacctttagcttattcttcactcttctagctcctaagtgtctgtttgatggaggttcgcatcctatttctgaatttgccattcgaataatatattgatacaagagaaatatttaatcccagcaataggtataaaggggcaaaatttgtgttccggccatttgctgcgagaggtgacatgattaaatagcgaaaagagataaggacttgaggacataaaaagacagaactgaaaagcttcaagcacatgatgatgaagctcttcgcgagcccgttgccaggctaacaggagtcacttcaaacaagtcgcgaggtggcagtcccaggagctggattcgggacgccgcgtgatttctcaatgtattcattgcttgcggtgacatatcgtgttgcaaaatagtgattagaattcttgctcagccagatggtgaattttgatagctcctctcgaagtcggttcgttgattgaaggtccatatttgtctgcgcaatgagctcgggcatcgtggctagcagtagattagtgttacctcgtaaactacttgatttgctttgctggggatcataccgaaaaggcgtgtcaagtgctctgcgccatagacatcaaggggccctttgtctgcagtttcagattcccacctcttgcggaggacacgatactgctcccgttcgaatctatagagaagaatcttgtcaagagatttgtcaaaatagtcgcgtatacccatgaccacttcctccagcacatctacttcggatgaaccagtgcgcttgggtctctcctctttaagatagtcgtccaagatctgattaaccgagctcttggctggcaacgccaccacttgctggtttttcgtaacattttcccagtcatcgacgagcagcgatttgagattgtctggcatcacaattctcactgatggtcgggtgtagaaatgttcctcctagataggaaattcagcatacgttacgcataacgaccgacgtggtagcggtggcttcaagccccctcacttagcggcatttgtgcaggtactgggaacggaccttttcaatatcattatccctggcccgtttagtccctcggccaggaacagatgtttgtctttcctcgcttccacgggcggagctgtggtcagagcctcccttcttcttcagagaggttttcgtgctcttctggcgaagcgcagcctcggcttcccgacgaagggtggttgccaactctctgttctcctccgtaaatttacgaaggcgatcttggggtacccaatcatcccatctgtttcacataaaggtcagtataagtccgtcaagatttatagaggacgcgctgccattttccccaccaaggttacgagctgccactcgggaagtcaggggcgttaggcacaaaatcttcctcccaataacaagagatcacagcacacatttgaccaaatgcgcgtagatttcagagcattaatcacggattgaagcaaataagtgatacatacgtgttcttccagcccttataatggactagatactcatatgggctctttcgatcatcaggatctgtgtgtcgaaggtcgagaatcttcgcctcatagaggatctcatgatgaaaacagaggaccctctcgtccttctgataggtagtttggccagccggtgccatttcgtgggcgataggtctcaggcaaatggttgaagtccgggacgttggtggcagtcagttatcaagagccggaagcgtagtgagtcgcagacgcagctcctaacgtgacagcacaatgatgctgcaggagtaagcaagaccgttaaggctcaatcgaattaatgggtggtcacttgattgccctattttcgggaagatatgatccttgctggagcactagctcacgccgaaatgcaacaggaagcgtggcgtatcacagaagctttctcaatccgtctattggaccaacacgatgaagccaggcgataaagggcctgaatttgcttcggaaggttagatcctgggatcagatggccaggcaggcgttggcgtagactcaagtttgcgaacacagaagacttgacttattgatataatgatcaagaccaagtgacataaatcgagataaatgcaagcgggttgttctaccagtgagttgttggcaggaagggaggagacaggaagagaaggacttgcggaagaaccactttacgcgtgcctcaccaaaagggaaaatcgcgaactctggccggcctggccaccaaactactcttctgcgcccttcaacccaaactcatcctcccttttattgtcattcccatctgaaaacctgctaattgcacgctagctttgtgttgatactatcaattcccttgtgttaactctctctatcatcaagggcctctttggatttgcggtcacccgcagttctgtccacactgctattgtgagcgcactgagaccagcctgagccatggctccatcagaaacctccatcctcagcaacttcttactgtctgctgcgtctttgccgcaaattatgtcattgaagcagtttacagggctgttcccaaagcgtctgcagtcacatccgcatatcagggttctttaccgtgaactacagcaactgcgagagacagacatggacatagtcaatgaaaacattgacaaagaagtccgtctaggggatgctcaaaaggcagaactccggaagtccattgtaaaaacaggtgttgatggctcaggcgccaacgaccaacgggaaatggacatggattttgagttgtttggtccaacgtcggctggctctgacgagcagcactcagtctcaagccttctctccgcgatggaggcggcctgttctgatatcgagcgtgaaatagctggagtggacggagaggcggcctctcttttgtcggagctcaattctactgttggtgaccttagtgacctgcgatacgggaagatgcacggctcagttggagccacagacgcagaggtagtcagcgaggctatccggggccttgataaccttgaggacgcatgctcccgtaagagcgctgtttaatagcttacgtctttttggcttccgcgtgtcaatttgaattctggactgggtctacaccactttcaatatgaacttgcccctgactcctttgtcgcggttcaaaacgataaccaaccgaaacgtcagaagtcaacgatagcagagttttccagcccgtcaattcttcatgcgccatattccattttcgagcgtagacagctcgggcggcggacagaatcgtgcacacattgcatcacggcgtattccaatagatgatctgatggcaaatcctcagaatatctctaggcaagcaatgtctcgccgaaacaaagaaagaggacgaaggttgttggcgggctaggttataaagcagtaagcacgcattttgaaggcaatagagaggcttgctgcggcctttcctcctgctgtttaatcttcaaaatgatacagctgaattaagatttttataccttgtttataacagtgtctatgtacaaatatatatatacttgtctttgtcccatattctttagcatctagatgtatgatcgccgagacccagcttgtttcaggcagtggagacgcgctaacaatcaacttcgcgactcgatctccatatctgtttccagcctcgaccttgtttaaagaaaacgtcaaacagctgagtctcgttttcagattgcttcaacaccatatctattctgaaccgcgagttgacctccaaaagctatgccgtctatttccctccacccccgcgcgtcgtcacgcaacaacgctcacaatcccctcccccagcttctccaaaccccctccggcctcgccctcctcgagctccaaggcacgataaatctaccattccaggaaaatcttgacgccgagaacgaatccaccgattttaacagcccctccacatacgagaccccaatcggcaagctcatgtttccggactactcgcaaaacgcgaaagacgacacgagctggatgaaaagagcttacctctatgttggacggtaccagaggatgacaggcgaagtcaagaaattacccaagccacttgcgattattcagcggcggcagacggacggcgcggacgatgcacgggaacagctagaggttgtggaaattgtgaaatataagctcatattcaagaaccggccggagccggttaatgatgtttgattgccgggattgcagtattaacatctagagatggagagaatgggctccgctgtacagtcctggttcgtgatcgatatgtctacgacaggctcgtgcaccgtacgagtcgagccggctcaaaatctgttaggtttctatcgcagcatacaagaatactcggttgatggcctgatgcgcgtgtaggcgcgaacacagcgcctcccagacctgaccgcatataagcaacaaaccccgatgaaactacttctacgtgcgactcagaggcatgattcaaaatgtttcggccattcattactgcgaccatccaaaatttaccttggctcattcactcgacccggacttgactcgcgataagacttgataatccggcgtgacgcatgtggaaactcggagattttgccctatctcgcgacgactcctcaagccatcctgtgctcagtggggggcagcgtggctattccgtgagccgagcgcaggttcgtcttcccggctctttctctaaggtggtaaaggcgcgcgagcctacaccacacctatccagaacaagcccgggattaaatttctaagtgtctgaggatggtgggtcgtctctgaatacgtgcacttcagttattctaggcatcccagtgaagctgattgatgtcaggattccgcgcgcggaccgagtgtaagaatacccgtagcggaatatacccgacgtctgggattgattccgcactattaacaataaaaatgacttgaaacagcgcgtactatgtgcttgctaattgcattcgtagacatcagatcagaggtttgtaatatagaaatcttgtgctttggctactggactctccgcaaatctataatcattctgtagcgcaagaatctatgagcgttcaacatccgacgctacccgtttccgacgaaattatcgggataattccagacaccaaggcattgatcgaaattcagagccttgaactggagaccattataataggccagaattagtaatagtaatagtgctgctccaatgtacaccagaacctctacaccccgcacagagccaggccgctgcctgcttactataaagtggcctctccccttcgcaaccgattacgtgcgtacaggtataccacgattatcttctcactatccctctcccttcgtctcgcacataaaaaagtgcagcgtcctcccgtttgtaatcgtcgatacacaacatcaacatcaactccgccaacccaatcctgcacaacaatggcccccatcgagcgcatcacccttttcaagatccccgacgaagcagcccgagatcgtgtgctggagcagtacaaggtccttgcgaagacggctgttaaggtgcgtaaagccagttggcttttgtttgcaactgagtaacccatccgcctccctaggacggcaaaccgtacattgtctccgccgcagcaggaccgacgatcccggacccgcgatgtaaaggtttcaatctctccgttaagacaacgttcgcatcgctggaggatatgaagtactatgatacagagtgtgaggcgcacaaggcgttgaaggcggttgcggcgccggtgaaggaggatgttttgacgacttacttcgagagtgtgctttgagttggtagtatattttgttacttcgttacgtatacctcttgatataaatggtataatttctatcaacgatcgaatgctacttaagtatggtatggagagactattcgtgatattcatttgtggccactgcgcattccttgtgactccgctatgtgaaaggaagggttggttgtgttttaagttaaacaggagagaggaaagatacatggcatttgtaacgcatctgcggcgttgctagacgacaccgttgccatatgggcggtcaaataggatacaaaacatgaacatgacacagtaacgtctaggtctcatccaggagtaccatagaccaatatct

SEQ ID NO: 3684 - DNA, 4643 bp, Emericella nidulans
cagcaggaaactacgtgttcatgctgcggcacggtgtttcctacctgcgcctctgagaaccaatctgaactgacctcgccgatcgtgtggcacagcgataaaggtgtcagatggtgggacccattgtttcgaatgcttcgaaaagaaaaataaaaaaaatctttggcgtatgccgctgcgagaggctaatttcgtcgctgccttggatatttccgatctatacacagcatcggacgcaactgcggtctttgtggatggcatccgattagaccagaacgcaacctttcttggtgagtgcacgacttgtcgagggtgtacgttctttgtgcttagtgtccctaagtcatttcgctccattgttggattgggcattaccggccaggctgactccgtggtgtataaaggcgggtgtgttctctgattgttcaatggcctcgagacgaaaactactcataaccatcagactcgcttgggcttactccatctgaaccctctgagaaaaaaacttcagatctgcacttcctcgagagatctggtcccacttgcggcactatatcgtctttttaaaggttccatccacaaactgaaaggcatttcatcaactgttgaacaatggacaagagaagcaccaacaacaataacggcggttctaccagggccagcaggctctccgctcaagaccttgcccgctaccaagccgaattgatctggatgcacaataggactgttcgcgaaataaaggaagcccaaggcacgttccattcttatctatagttccctacagaccggtctaatcttgcctgttttacacagagaaggatgcgagagaagcagagctgagagcgaagcagtcgtctcaggagactggaaaataggcaaaaagctatgaggtaactgggtgaatttacgcgggcaatatggacttgattgtgatgtgtgaccttgttccgtgtttatggcggcgtggataatggggtactgggcgttatttgggcactcggcatttttcaagatatccctgccagctatcgaaacatttgtttcatatccccttgtcgataaatgaattggcttctgctttctctgtaactacgtcaccggcctgatctgacctatcgcgccttccatcatggtacggaccctcgtccaactcggtacgtggcaaatcaatacggagtaccgtattgatttcagatcgttattcagatcgccatcacctcgatctgactcggttgtcttaggtccagcctgacggtacgggcagagagcattccaagaaagcaaccagcagccttgaaactaagaaaatgagcacgtcacctgcatgaatcgggcttcatcccggttcgcccagcttgaatctctgcatgacgtctgtcgtttcactggcgatggtcatgatactagtctatattccaggtctgggcgcactaccttacccaccgtccttctcgttgggtgcatcttggtactaggattcctccatcacgcgaggccattaacatgggagcgaacttaggctgagatagaacatcacctatcccgagttccacgtatctaacattgaaacaatccggttgacccctcagactggaaaaagcaagtcaaccccatagaccatctatttagcctcacttttccggtttctacaattggcctgttgcagtccagagaggctaggagccactgggttaactgatgctgatttgcgcaacatgcatcagactccacgtggaggccaggaggtccctgtcactacgcgatttattccattatgtctagaacaagtgaacattgtatataaacttttgggaccccgatgagcaggttaactgtcccttctcatacgcggatggaacctccgtgggcccacgaggcactgcagctttacaaatcctcagcaccattctgcatggagttttgaggctaacgcggcatcctttgagctacccgataattcacacaagtttgatcgttgttcgactagtgactaggaatcgattcgacagttctgattctcagttgcggatacgggatctcatgtgctcctcggatttccacgacttcaatcagtggttaaacactgctgagaccgtaaggtcaatacactatcaatcagggcgcctaggcttctgccttgtcgactgatagctaacacaccaggcccacgaagtgcgaagaagtatccaggtccaaggactcgttggagcttgtcaacctcgccatgcagatatccatttactatggcatgctctatctggagtctatgcatgaggccggttgctaatgtacttttgaaagagcaaggctggcctgtcgtagcgactaattaataagctatgctattccttgaaactagactagcgcgtattgccttgcattcccacgaacctacagacagctcatggctacaccgacagtgccacggccacccagcgagtgattttcgtctcgttgaatcagggagacttaaacagatcgttgagcgctaatcaaacaagagcgttgatttccacgaattgctaaataaataatctggagaaaaggtgactgccaaatctatcaatcgcctggacggtctattcaatctggaccctgcatttcgcacgctccccataaaccctgggctaagcatttgctctaatcctgctgcacgcgctcagaccgacatcccatccgcactctcggcacttgtgtctcatacattggctgattggatgcattccaatgtgccttgcttggctagaccagcctttcttgtaaccccttgaccaattagctatcctcgccgagctcccatcgaagagagcgcaaggactggctagcattattgttaactattgcatagtacctgacaaagcttgactatcaaatgcgacgtagatatggtagctaggctgcttataactgcgcatgacgacgagctaggttcaatagaatcctatggcgatcagtgagctctatgttctacccctgatgtggtgatacatagtagttctaagacccagctgaccctatattgctagacagccttaacgttcttcggatttccaaaagaagacaagataacaggaccacctatcctcttcacttggtctacatccagatcgcaaaataacaacagatttttcgtcactggatcgcaaatgtgcgcgcagagaacacacagtcttaagcacctcgtaagccaaatatggtgccaagtgctcagcttcctaatgaggaagctcaaggctgcagtatctcaacgcttgttactaccgcaagcaccagatatatgcatgctaacagttttggcaggactaatccagacatcgtctcatggaaccaagtgggacgaatgtatcgagtcttttatccctactttcaccgagtattgctcaacaagctaggtacctaggcgcggctctaaggagcgcaagttggaagcattgccttctgctttagaaagtaacaatactgtatttacagaccgaacgtagtgttaatgttgagaagttatttttttgtgtagatcgcaatccatgtagttgggcatctaaccagctgatctactgtaccggcatctaacctgccatcgagatgcaaacaccgacagctggtttgaaagagcagtgacggtattttctacgtccaacaaatcgtacttcgtcggcctttgtagagatgcaaggtgggcagtcaggtgacagaatccttacaggtgctagatcatagctgtaggagctagatattcggatccgacgcacccgagttgctcaacttctcgagtatcccatcggtggcccatcatttgacctcctttaagaaatgcatgacttcgccgcccaaacgtaaatcgcaagtctccgtcaggcgacggcccagcctcagctccaagctcagcttcgaggctagcagcagtcttcttgtacttcttaaggccattaatgcagtacgcgcgaacaacaaccagttcttacgcatatttctaaagtaaggcaagaagatgacttctcggtctcttagacattgaaaacaaagcagaaaagatctgttgtagatggttttgggttgagaaatataaatataattataattatgattatatatattatcacacagcctccgtatcagtgtatctgaaccagtctgtgactttcggctaatgtggaatcttcagtcacctgcgcagtacgagcaagcttggcagcggcctgaaggccgcacgcgcaccctgatcaggatggtgaactgttgagtcactgttggtttgaaccagttcagcacttcaacccagctatggacggagtcggagacggagacggacggatgaaaatccatccggagagatcagaagaaagctagtgtctggaagctttacctaaacaggaaggagcacgtggagtccaggttctttatgccataaagaaaacataacataatcaacagatgcacagaggccttgtacatagcaactccataaagatcatggtagatgttctgcccacgagataatgcagactgcagtgttcgtgcatatctggcgttctagcaaaccagcatctgctgagattacatctgattcctttgtttgaaaagaaaaagcctcggctgagatcactgatcgtcctaagattccccgctctctgggtctgcagaca

SEQ ID NO: 3685 - DNA, 2706 bp, Emericella nidulans
gaaattattttaaattaggaacgatatgaaaatgttatacggtggagggagaggcccaagaagtgttaaaaaaaaatgcattgaccagaaggggggggacactagagaaggtcaaaaaatgggggcaaaaacacttgcaaagggagctttcaattttttcaagggttttagagtcagccactcatggataatccaaaaaaggagcaaaacccctcaaatgtaacaacgtcaaacctcaaacttggacttttcaaatggcaaaataagtctccagtccggggaattgtggttttaagtacctcttaaactcccggagggcacaagaacatcctcatttgtaagcacccaagtcccccagtgaaaccaaaagccctcttgcattgggtatccggcaagatctcaacagcatcgtgcgggtctgcatgcatggggctcatgaaccatcacggatgatacgcgccgatggggatcagccctagatcgaacggtccccgatactcacctacttgcttgaaagcagggcacgagggataattatgttcaggactgtggtcgtcaacatgatctggaagtgtcggcaccgatcgataccccgtatcgctgaatggagcgctcttgtaagcagttacacaagtggcgcaatgattgaagatcgcttacccagcaaaatatactttgcggcctccggactcaacgtaccacgaggcccagagtgttttgcatcggtcaaacggtgttcgggcactgaaatgctggcaaggcaagcagccaattcgagcggtgatgtccgccagctttgagtcagtatttccatcagctgggtctacctgagtggcagactttgttggagaaagcagtatatcgcgttcatcccaccagtcgagttctgttgcattcggtatgccggttttgtcaaaccattctttgttacccagaggaacaaagaaatggcagttcgggtgtcgcttatggatttctcgtacagttggaagggacaaatgatcgtaatggttatgagagatcacaacggcatcaatagtgggaatatccatgatctgacaaggcggctcggtataacgctttggtcctagccaagagaatggggagcatcgatcctcaaaaaccggatcaaataggacccggagcccactcgggaactcgacataataacaagcgtgtcctaaccaagttgctcgcagagtaggtgtttcacgactaggcaaaaacactggcttatgtaccgggacggttggaggagtcgtatcagggcgattggcctttccactcaacatgcgcctgaattctgtcagatccgaaaatattcaaataagccaatgctggactcaccacaaaatctgtgtttgcttgtcgaaaggtgaagtgaacgagctgtcgtgatcagtatagggtttaagccgagccataattcgacctacttccatggattgtcaaagccatttttaacatggtgcgcttttgcactggcatcatcaggagcagaagaagcgggagaggcggacagagtcagagcgtagagagcagccgcagtagatgaggccattctgaagttggtagcagtgaaggctcgtgggaaaggagatgccttgctggtaaagcgagagctgaaccagcgtcgcgtaaatggtggcatgccggttttgcgccaaagttaccagcttatataggtaggaagggaggggttaggcacggggtataatatgtcctttgcgttctgtatggatgatgaagagcttcacctcatcttacagctggatcagccaaaaaaaaaagtggctgatggtcattcttagccggatcttatgcttgcttatagccgttatccccgagcaatcattactccggacacgggcaacaagttttcaattcatccgaatgacattggcatcaacaatgttatccatccgtcagactccaggctgcaggctccgcagcatcgtataggctctaagcgtaagctgcctacctatagttcacgtgtaagtagtcgtaggccccaggaacagagtcttgttcaaaggcacagcgtagagctaggtagatcggcccgtgttagcgccgaccgcggatggctaatccagattgggagtctcttagagagttcaacacaactaaggcctcgactccgaatgatctttcgatgactggtacggatcatactggatcgatatctccagggctaccagcgcctggagattcaattgtccagcgaagaaatgaggccatccaggccgcaacgcagcagccgactgcggacgaggggatgctgtctcaacttacaagcaacccttttttcacagcggtgaggacccccaaaatgcgagtttgttaagtgttaggataaatactgatggcttatccttattattagggatttggccttgcagggctcggtgtcggcgcaaggcttgcccagcaaggtcttcggcgtggcgcggatctgattcggagacggatgctcatcgatgtcgagatcacacataaggacgattcatatccatggtttctgaattggatgacacaatatcaacagtcgcagctcagcgcatctcggtcccaagccagcgggtctggtttcgtggactcgctcttgaccaaactcacgcccaggatgcgccaactttcagtcgatactaagacagtcaaacactcgaacggcgccataaacacccatttcacattggtcct

SEQ ID NO: 3686 - DNA, 8089 bp, Emericella nidulans
cttgtaggtctcttggataagattgaaaccttggatcttagttaggtcggccatggtgagcttgtcaggttgattggggctgtcagatagtgaggtccaaccctccctttatagaatgaaccgcctggagagtacgtgccggatcccttcggagtgaacgactttcgcgagctcaccaatcaccttttgagttgtcagatattgcatcgtttccgtgctttcatctagccaatcatcaatctttggcacgggagtctgcaatgcaaaggcatcccagctggacaacctattggataatatgtcatggatattgatcctggaccctacggctaaacactagaacttggcacttccgcacttgtaatatgaagaacgctactaaagatgccgggctttgcacaccgtgttgtctacggcgctctgccaggcccgagataaatcgttggggtaaatggcccctctgccaacgtaggccgctccaccaaaaagcataaaatctatttgatggctgcgataaatacgccgaagggtgaactgagttgtttgaaggttgattcctctctctgaatatggaccttatcgtggagaaagagatgcatggaacttcgtcactatgattggggcacagcgcggttgagagtctcaatgtccggtgagggacgagagaataataactgaacaggttgaaagttcgcattcccaataatgtatgtcgcaccctatctggaaggtggagcctagtacgggagacacctaccggtccgtgagagttcttgagatagccgtagatcatattttctagacagtgtaaagaaccatcagttttgtttgtgaccggctgaatggggttgatctttggatgacccacgatcataagagagaggaaaggtcaataagtgcgtatgcaaactgggcgacgactgaagcatgctccagttgaggataaaaaaatcctctagaatatctggttactgtaggaacacgagatatgtcagtaatattaattttctatgtgctataatattcgcttagtgacttgtttaccgatgcgaggaggagatttcgcactcgtagatgatatatgcgacagactggtttcttttgcatggtttccgcaggccaagattcctgtattcacgccaatcgagccagcaaaaacttcggtttcatcgcatcgggcgacgcagctccgatttagagaccagtgacgcctctgccttggccaatgaggagagtgcgctgcgcaaaaccgaatcaccacataatccacacatagctgttggcttccggccatgatgctacagatccgacacagtaatcgttgctatgggaaggcatcaggttgaccctgtgcggtacggctttgaggcggcgcccgttggaagatacccctgctcggtcacgtcaaatccgcagagtctcaccttggatcggcatctggatgcagattagcactgtagcggaagccgaggggactcgtcaagagatctgcgggccgtccaggatgatcgtcatgcaaggggcggaagccagcgaacatggacgggagacgacgcgatagggtcgatctctctctcctgcttgaagcagcggacatccttgcgcaaaacgtgccgtaaccccatttgtcgctatcaggggtatagcacatagcagatactggtgcagctgcagcacggtgtcttgggtgcctttgaaagcaacggggccgctttcttgactcgataggaggacgctgattacccctggggtatcaagaggagatactgcgtgtgagaaagcgccggcagatgacttgcacgagcctgtatccactcccactgtcacccgaacggccaaaggtgtatagcctgcgccgatattgaccggattttccgtgactctcatgcaaataggtcgcgcagagtgctgaaacagctgcattatgaggctggtaagcaagcggtcgcagcctgggtctggtagaccgggtgcgaagtatgctgggcgtcgatttgcattgagtcagaatgtgaagagtaaggccggatacttttgccgacgttcgcgaggatgctgtggggagagctgataatggcagggttgacggtggagatagctgacaggctgcataaaatatacccttgccctgacattttgcccttgacaagaatgcatgcgtatgtcattcgggtaccgtagagcaaggctctcattggtcgttcgtggacgcaacagcgcagacatcagtctgaacaccaactggaaggaattgcacaggctgtgttgttgcgcgaatgaaggcgttgtttctgagctggagtcccctctgcagaaatagagtctgggcagttggatatagatcgcccacgttcaatgacaggtcacgacaccaccgctatggagacaaaaattacttgaaccttgccccgatcttccccgaccaggaaatatgccagtttgccgcccaatagcctagacagtcaacggacactttctgctgggccaatattagccgaagaccagtccagtggagtggccgaaggttctcgcggatgcgaggtaactgggtcgcggagatggaatggcaaacagtagcagccaagggcctagaattgtgcttcgttcagacagagactgggaggaaaagccttgtcaaaacaggaaaataccgcgagtgaccggcactggtactcgtggcagctagtatgcacttcatctattatgctctccgtcaaccttctgcaacacgccaccgggattgagcagtgacaaaataagcgggaggagcgggaggcagggtagcgggcacattagctattgtttctggctcgttcaaatggacttttcatggttatagtgttacggcttcctccaagaatgtcagcccgtctgcgagcagagaactggggaacatgcgccagcaggcctaggtaaaaatcatagttaaagacttatctagctgactagtctgtaaactgggagtaacaccatagcgccatttatcgcgtcaacaagactgctactgcttttcatattccagtggcaccaaacagattaaaccggctcacatgcacccaccttaagcactaaaatggatcatctgatgtcccaggccctggtggacacttcgactggactctgggcgggatttcaaagtatgaggggggtcgtctgttccgtcctccgcccctgatatacgatctccgttcccaatcgggaagtcctgaagaacgggcccgggaatcgaggatcagcctccgtggggaaatgaggctagtcctgcatgccagttcttcagggcattcagtggcggcctgggccagtgcatttacgggattttcatatctgggcacgaatcatggtcaaggcgaaggatcatgaagtcccttggccatggaattcctccatacacctcatgtatacaatggcgacagcggataccggctgcataaacaggataatagcggtattcaactgcatatggattcttcatgtacaaggaatcccgttaatggatatacaatcgctgggaacgagtgaggtataaatcagaggccatgtccagggagggtttctccataaccacaactgaaacatacttcaaattgacattgagccagaacaatgaaaggcgccggctctgcttcctttctcctaacccttctcagcacgatcacccgcacctccgcccacgggtatgtctccaacatcgtgatcaacggcgtctcgtaccggggctggctcccatcccaagacccctacagcccctctccacccattggagtcggctgggaaacccccaatctgagcaacggcttcgttacccccgaagaagcctccaccgatgcgattatctgtcataaggaggcaaccccagcccgcgggcacgccactgtcgcagcaggagacaagatttacatccagtggcagcctatcccgtggcctgactcacatcacggcccggtgttggactatctcgccccctgcaatggggactgccagacagtcgacaagaacagcctcgagttcttcaagatctccggcgtcggcctgattgacggctcctctccgccgggctactgggcggatgatgagctgatcgagaacggaaacggatggctcgtccagatccccgccgatatcaagccgggaaattacgtgctccggcacgagatcatcgcgctgcacggtgcgggtagccagaacggggcacaactgtacccgcagtgcttcaatctgaagatcaccgggtcgggcactgctgagccggccggtgttccagggcccgaactctactcgcctacagacccaggcattctgatcaacatctaccaggtcctgacagattatgttgtgcctggaccgacgccaatcccgcaggccgttgaggttgcgcagtcttagaaggaaatcacagcaacaggaacgccgacgccggtatagtatctcgttctcctatgttcgtgctgagggcttgacagatgctgtatactgtttataggctgggaggactagtgattcctgtttatcaatagggtgctctgtttcgcgccatcgaagccctaccttaagcctcagagccctcgttcaagtgtcactgtttacgctcttatgagttagcttatcgcactagccaaatacatcactgatttcgcatgcctattatttgaaatagtgtcgagtcggggctgttcggagtatcccctgacgtcacactcacgtgtggccattaactctataccgactcggagggcttaacctctcacttagcactcttgagatcccttgcaaccttgagaccacttagccaacaaccaaaatgcagcacataacaatagacccaaagaaggtgcagccgccgacccgcgacggtactgcgaaagatacaccggagcacctgccagtcgccaaagccagcaacacccacccgaccaagcctggtggagagaatgcgtcaatctatttcgtagggacggctactactatcatgtcagctttttttgctctatagcattgtagttatgctaagctttggatagagaatggcaaggggtcaggatcatgacggatgtacgttcagccctcccaacacgacggagtcctcctgaccagaagcagccaaatttcctccacgctggcgaccatgtccatctgggtcccggcgtcacatcagcacgcaggacgaatcccgcggtggacctgcacgagttgccgcggatcgatctggtgctgttgtcgcattatcatgggtatgccatttacccgcaagccagaccatgaacgctaacctcatctgaagcgaccatttcgaccaacacgtcgaagcatctctgcggcgcaatcttccaatcgtgaccactggccacgccaagaagattttgacctcgaaagggccggagtctttcacaagcatatacgacctcgagccgtttcaacagatgatgataaacattgcctcggagaccgagcaggcgcacacgcccagtctacgagttaccggtatgccgggcaagcatatccctatggcaaaaccggttgagaaacttaacgagttggtcggcgcggtacgtccacctgccaacctcccatctattttgccacctccctctacctaccaaaacctcttctggcaacttcacctggcaacctttattgacttaaccccgagcctcatttccccatgctgacaaaaccagatccccccaacaaacggctggatagtcgaactcggtcacggtaaagacgcctcttcattcaagcctggctaccgcatctacatatctggggataccctgatgttcgacgagctgaaggagatccccaagcgatacggcgagcataatattgacttgatgctgatccatctcggcgggacgactgtgccgtcgccggcaatgtccccgttaaccctgatggtgaccatggacgggaagcagggggtggagttgatgcagctggtaaagccggatgtaacgattccgatccattacgatgactacgatgtctttgcgagtccgctgagtgattttaaagagcaggtcgagaaggctggacttgggggcggggttgtgtatctggaccgaggggaggagtatcggtttgccgtgagggattagtccgccagaaccagaactactcggtacaggaattctgatagtacggcaattaatctgcaatccagactaaccggaagtcctatttgctatgaggttactgataacaagtaagttacattgtagaaatgtggcctgacgctgtggagcgccgcgtcgtaacgatgacgtcgtcgccacgctccgctgatcaaccggacactgaagccagaattatggcagcccattccgccaatggacaacgtcttttcgcgtcgtcaggcatgaggttatacaaattacccgtggactatggtcaagggttcaacctggtttattgttccacaacgcttggtgggtggccgcccctgccttctttgttgctcctgcttcgacgtttaaaaaccaaaacctcgctctcagtattgagacaacatattctaccaattttatattctaaaattttttaggaacccatttttgaagccgtgtctaaaaccattatcagctctgatatttcagctctgatagtacattgaacacagaacgcgatatgtccaccacctcgcctacctcgccgacctcatccacctcaacttcgaccttcgcctcaagcccaaccctctcacccgacaacctgaaaagacaacctcaaccgtccgcgtctacaaaccaagttcctactgtgggctcgctgaagaacttcaaacgctcggtctcgtacaacatccacacatccgtccctgaagaggacgcacaccggcacgcgcacaccacctcgcccactggatggacgcttgacgaagccggctgcaaccagatgatgaaagcgtcgctaaccggtctgcttaactgccaggaagtcaagagcggcgcggcgagcgcaccgtgcagaacatgcttatgaataccgaaagggatctccgacgcgcgcgaagagccagtttgaggactggggcgttgagtgcaaagagaagcacgaacgcgagtccagatctagctgtcagatccaataaaggctctctagatgggccgaagggggataagtgaacgaaccaactgccgtgcgatgggatatcgtttctttaaacatgccgcgtccagaaagcggatgagagcgattggcttgaaacatctatactggaaagcgacgcaatcacctctacaattccaaccgccgaagggcgtctcagagaagcgccaggctcgtgcccatggcaggaaaaggggctcatcccgccgttcatgcaaccgatccttctattgctagtaaagccaagtctatagcgcttctagaacaatcaaattgtggtaggatgaattctaggccatgaattcttagccttgaatcctaagccggatgggaaatccatcgctgtgtatgtagtatgacgtgttatgactgccgctcctgattggctggccgctattacctcgtcatgaagtcatgcggcggccatatttatattgacagagagtcctttcggttctgcaacatctaacgacgactttcagaatttataacgttcagaatgacaatgactatctcagctctccccctccgccgcaccgccggccttctctcccgcacccgcctcgctggcagtacgtccctcaactgcactgtaaaacaagccctaacaagaccagcacccctccgcttcgcaagcaccaagaaagcacagagtacgaaagaagccgacccagcctttagctccaacgccaagaaccccgtctccagcagcggcgcctcacaatctatcaacctgtcgcgcggcaaggaagctcgatcctctgatacagcggatacgcgatccgtgcagagccctatttcgtcacaggatggaccgacgagcgagcagcatgccggagaggagcagacgagcgcggacgcaatgatcaagaatgaccccagcgaaccggccgagaaaaagagggcgaatgtagaagcggcagggaggaggaagttgggacccgaggatgatcagtgatctaaaggtttagaagaggattga

SEQ ID NO: 3687 - DNA, 4708 bp, Emericella nidulans
gtatacagcttcggcaggtgtctagagaattcactatgtgtgatagccccgttaatactattatatgctcgtaagcacctgttatatgatcccagagctggacgttcccatacgatcagtcactaaaagtggtcatctagcgagaatgaattgaccaaacaatcgccaggggaaaaagcaacagtttccatccagcattggatagcttaacttatggcgttccaatagcagcgttcaaatactggcgcattggccattctaatataaactcatgtcaatctcttaacggctaaagtccgtaatggcatcgtttttggtctttgggttgctacaaatatttctcgcaaccacctcaaaacatgaccaccatcaactgacaaacaaaaggtggtatttcataaaaaagtaatgaagatatatgcctgttttggtaagccctatcggtagttgatcaggcactgaggttgctaagaaacataatacccccgctcagggcaggaccgataacactcccatgatcttcatcaaggtactctttaacctccagcttacagagtcttccactggccagaagctccgagtaaagctcctcgcagttgtcgttcatccgacgctgctcagcagcgcgctgccttcgcttaaacatttcatccgattcaacccgttggcggacaggatactgctccctcgagccgaatgacaaccggagaacaggatgggcgcttgaaaaaagtgctgcaccacttatgaaccgtcttgcttcggtcaggatagaccggttattccaccagattgacggactggcagcgaggtaaacgtcgaaacttgatggttttgtgaagagggcatgaagcgcgaatagcccgccataagagtggccgaatagcgcagtacggccgaaagagacgcgcggaaatactttcaactccacaaatggcctgactatctctgcgataaaggtcaagaactcatcggcgcctccatgggcttccggtttcgggctcccatccggcccctcgggcgggatgtaatgatcacaaggaggcgttaggtcatagctacgccgagggctgaagacagagtctgtaataggataaccaatggcgatgacgacggttcctgtctcacttggtcgatgcgactcccgtcgtcgaagggtctcggttgcggtgaggaagagcgcgtttccgtctacaaggtagctggcgtggaaaaaaaaatatgattaaatttcgaccgccagagcaagattgtgcattgccaggagctccacttacactgcgtttgcgcttttaccggaggcatctccagactcagaccaggtcagcggccatgaaacatcgatctggtaaggtccgtctttctttcctgcaatctgccacgcggccatattccgggctgcccccggctgaatgggactaaatgcccagtgagtcatcacacttcaactctgtaatcacaaggattgtctaatgagaccaggcaaggaatccgactctttaagccgggataactccgatttcaatcctcccaggcttgcgtggcttgaagcggacgccttggctttgacttggcatttgttatctgatcttctgatttcttgtaaactgggcctagataagattaagttcgcttatgatgggacgctattgggtacagttcgcttcttgtggctgctcgtgggtcttttcgcgtggtctgacaatctaggtcaatacgaaggctgctcccaatcgagggcagaccgacgaggtgcggaagaagacgttccgaacggacggcctcttaagcccttgttagactagaccattggaggtcttgcatatttgaattgtctggcagccttccaaagttcagttcgagatccctcacatccacaacaatggctctcgacgatatttcagcagtgcccaaaggtgcactggataccgatcctgctgtggagagaccacctccactgcttgatgctgaccgttcagactcggagaggcttcagcccggtgtgaaaagagctgagatgctgcgcaagggatggacgagacagggtttgattatagcttttactgggtacgcatcttataccggctcgtctgcccagcagctaccgaatcagattaaccggtgccgcgaatagtctctttctcgcaacgctatcaatcaacttcggcgactattcaacccaagtgtacgtaccgtacgcgacatctgcgttcaagcaacactcggccatgtccgctgcgcgggttgtagggaacatcactcggatcgcggcgtaccctatcattgcgaaattgggagatgcaagtctgcgatccccacttaggcgtaccggagctgactcgttttgtttttttgtaaaggtgtttggtcgagcggagatgttcatcctctcgattgtgttccaggctgttgggtatgcgatctatgcggggtgtaagaacgtgggacagtatatcgtgagtcacagcgcatatgtgacatagattttcgctgcgcatagcggttgacgtgctcatatcacaggctggcggaatcttcgaggcaatcgggttagtacactctttttatacctgatctcatcaccctgacgtgcatacgcagctcaactggcttcggcttaacccaacaagtcttcgtagctgatgtcacgaacctcatcaaccgcgccgtatggtctactcttccggactctctaaccgttattccagccctgtacctcgggaccgagattgcagaagctgtgctcgagaagaacgaatggcgctgggggttcgggatgtgggctatcatagagcccgtgtgttccgtccttctggtcgggactatgctctactatcaaaagcgtgcgcggaaggacccatccccggcagagttcgcatcggagccgacggagagaaatgtggatgatggctggtggaagcggatttataacctcgtttgggtgcaattggacgcgtttggcgcaatcctccttctgttgggtctgtcgctcttcctggttccgctgtcgctaacaggctcggggaacagcgatgactggcataggggctcgttcatcgcgatgcttgtcctgggcgtcgtgatttttgtagcgttccttgcttgggacacgtggtgtgcgaagaaaccgtttatcccgtataggatgatcaagaaccgtactgttgctgcagcttgtttactgggaatcctcgacttctttcattattcggtcttttctgttttctttacgagctatcttcaggtcgcggcgcatcatggggccggaccggcaacgaggattgagtacgtgccatcgagcctagccctattttccggcataagacgctgaccaatttttcatcacacagcaactccctccgagtcgccttccaagttgccgggatatttgcagcgtatttcatgaaatttaccaaacggtcgcaggtttgggtgttcaccggcgtacccctctgtgtcctaggcatgggcgtcctgctctacctggtcgacatgggcgagggccgcgtaggcaacgaagcggcatttgtaacagcgaaatccctcattggtatcggacgaggcttctaccagacggcttcgcaggtttcggtccaagcgaaggtatcgcggggcgaggtctcagtcgttaccgctgttttctttgctgctatgagtatcggcggggctatcgggactaggtgcgtaaacagcatggccggcctctaacttttgttttcttttggttcttgatcggccatggtatatatttaagaagtgtatatgctgattatatgcagtgttgctggcgcaatctggcgcagtaccctacccccaaagctagctcagcatctccccgctgaacttaaggaccaagcgcaggccatcttcggtagcatcgttgtcgcgcagaaatacgaggttggaacgccagcacgagacgcaatcgatatgtgctatcgacaatcgcagcggatgttggctattgcagcgttggcagcgttggcgcccatgctgattattatgttcttcctagagaacgtacctttgactgatgaaactacgttgatcgagctgcatgggaatagagaggctgttaagaagaaccatagtggaggggaaggaaaggaggcgaggtcatgaacgcttcgaatgtgctagtaaatgttgggccaggaatttcgatgtatagaagctattattaatgaactaaaaacttggattgatattgatacggaaatatgaggccacgtgatctctggtagattgaccggacatcgcctgtttctagaaggttcctaccctctatatatatatagtggggagagaggaatacacacaagaaaggcaatgaaggaatctatcgtcaacaagataggtgtcaatcgtcacatggcatccgatccttagtaggctacgttggtgtagttgatgcagtttcctcctgccctttatcctctgagcatattccacaacagatatcgaaggtatttcccgaaagtctctacaaacatgattggaaggtttctatatcgccggtagcacagctggcctgacttcaccatgcaatgtcgccggtgtcccgcgctgtttctgagacggaaatgacgttgattagacctcgaggccggggcgttttggtctcacaccgatgggttagtcgtgcgtcctgagatatgcatagacgacaggtggagatatggaatcaagggatagacccaaaacaagg

SEQ ID NO: 3688 - DNA, 4577 bp, Emericella nidulans
  unsure (1)..(4577): unsure at all n locations
taccactgagctcccaaaatgctctcaccgtcacgtccaccgattggcaagtgccatcagcacccgataacttgggcaggccgcatccgagtgtattgccattccggtcaagaaacgtatcagtaccgaacccagatatctttacagactcaccggccacaccctcaatgaatgcatttcccacgttggatcttcagaagggaattgcggcggcttcgatgaacgctttacctacaccaagcgctgtcaacttcgcgccgagcgggctttcaagtgatggcctctatctattcgacaactatattcattcgccagccagtcctggcttttctactgcgctcgacccaaacgcgcctctgccgctcgagccctgtcccgaatcgtttcttttgcgtcccttttggctcatgcggtgcatctatcaaacaattgcccaccctcgcggcggttacttgtcaacaaagttattcgttcctcgagaggtctggcgcgtgaaaaatgttaaaatcaaagcagtcgaagaaaaaatctctaattgtgatctgctaactgcagcgttgctcaaattatccaaggtggatacttatgacgctgatgctgttttggaagagatgcaagcatttgagagtgtgcttgatcaggtgcaaatgtcactatctaagaaggtcggcaatgaagtaggtgtccagggggctatgcctcttttcaaagctgcgccaatgcttgacgatcccgccactgcggatgcaatgccttcaaaaatgtcaaatggcccaagcaaatcatacttgagttcctggagaaagctacggtccaagaattccgggttcggtgcaaccgcactgtccagctcaaaggaagcaagtaaagaccatctgacaataagctcacttccaatgaccccaataccaaatgctcagcattccaatcggaatatagcgcaggtgcagtttgatgggcctcacgcaaactatatgagcgcactagctcggctttgcgatgctgctcaggtactgggtgagtaaacaagaaatgcattgattttttactttgctgacttcgttttgcctgccagaccaaattgctcaacaagtcgaagatccaggcttgaaacattcctctcaaacacttgtcgggctagagcttagcactcgccatgccgccgaattcttcggtttttacatatgccgattcgctcttaatgacattgggataatgcttgacaagttcattaagaggggaagtgagtgggtcctcctctaacaagcgcagcgttggtttctcttataacatattctactttcaacctgagtgcgacattcttagctataccccttgtaaccgttcttttcccattggtcggcgttatttagcttatataatgacaacaccatgtcgtgccatgcttatggagatatatttgcgggctaaggttatttcgcctgtatataatgccatgtacctgtatgcaagtgactatcatgtttacttctgttgatatatgaactgaaatcgtggatgtttcgctgcagcttgcgagtaatacttctgatttacctaaaaggattccacgaatacgtaaaaggctgctacatcagatagccgcacagcatcccttttgacaacagggctacagcttagacacgccggattgtaatgatatagaatgtctatagggagggaatttagcatctggcggaacggtcacgctccggagttgattcctacgtccaaaatcatttttttatactctgcttcccgaggatctgagacaaatctgacgccgcctttcggcgtcacggaggatttctgaggatagcttgagacttggcgcaagatgcgcatacctgtcgacctccactataacgctggatataatttcgtccacgcgcaaagtaggggggagtagacttgagagcgcaggggacatagttgcgcccatgattagaagtgactgcgagaccattgatagagcgccctgccacaaatacgggagatgaccctcacgatgggtggttacgctttccagctgataaagcgtagcctccaagcaacgccggcaacattccctcacccacgaatcccctgaagcttgctcgttctcgaagacagccaggatgtacggtcggtagatgatcgtccggcaggcaaagtatcttagtcggaggacagtctgcactggatgtgatataggagcgtgggacagaggaaatctgacgggctgaggtaggccttcataccattgngacagctgaaaatccaactctgagacgattggcgctagagaagccagtgtcaggctgtgtctttctgatagagcatatgactgactcgattgagtagccttctaagggcgatctcggctagaaaaaaccagagttcgtcgcaaccaatgggactgaccagtttgttgccagtatcgccgtcgtcttcgtcttcatcatcttcgatctcatcaaacccgcccggaagatctaccagctcttcaaaattcacgattccagagtgcggtaaatccaattcggccaacaaatcactttcgtacagtagggcgttccagtacactctaacactcagctctctccactggacaggcacacgagacgggttgccgaataatagttgtagcttcatgctggcattcgaaagtagtgtccaggcctcgagtggtcgaaccaggtagaacaagtaagcagcggccaggatgatacattgggcggcgacgactgaattacgcatcatgactgatggtagaagattccaggccgctataaaatacggcacgccaggaggatctctgtcggttgatattaaagcaatactgccgcattgagcggcgcaaccaagagctagaaccaagagaacaacacagctctctggaccctctcgaaagctgagggatacagcggcgtcatagtattttgaccaggtgtatggattaacacaggcgtaccagacgttgactttctcaaagaaggttctgatataaagcggcgcacaagatagatctacggccataggaggtgtcattttcagcggttcgcgagccatttccaactgcaaaagggtctgggaatcatatggtcgagccactaagtcccggatcaggggccatttcaaaaggttcaatgcaggcgtggtgtgtactctcggcatggtcgatatgcttgtcggcgggttcgcccatgaggcgagtcctacaatggaagtagttctcccggttaccgccagatgagttgacgctttcgcaaccgtgtcgtcgctcccaacgttggttccgttactggttgcgggagaagtcgaagacaacgtaagctgtgagttttgtgctgctaagctggtttgtaagagcccttcaattcttgcaagtctttcaatgatcaatttgtccccagcatccagcttgatcccaggttctcggtagacgcattctgcatcaaggtcagtgcagagctggcactttggacgagctccgttgcacctcgtctttcgtagacgacagatttgacactattgtgcttataatttgtggtcaacagtgctccgaagccaaccctttttgtcccgaggcagtgagagcagaatgaggaagccgagaaatccagcgcagatcggatggacagacaagaagaatggaaaagttgcagggttgcgaggacttacagcgatggttgcgcgccttcgaggatattctgttgcttcggaattggagcgcttcttgtttattaactcgtttagtgaagctgaggtggaatccaagattccttccctatctctctccggagaggaagacatgaccttgggaatgcgacgtagcgtatttcacatgtgccaagtgtgattaggatgagttgatacgaaagttcaagaagcgacttctggtcttatcaagtaaactttgcatatcatcgaaatcagcgttttcgcacggcaatgctccacagtcttggacttacgctccaagatttaaggcattttcccggtagaaagggcaagatgtaagatattcgaacaattgcggtaattattgctgtatgtgtaggcaaggccccagcgaacgccactgtagcccaggtcaacatgggtaactgcgatggttcggcatgtctctagacggtgagaaaaacggtggagggagtttccagagcgaagatggcagtagtagagacgacagagaataccggcgtcaacacagagcttgcaaactccaccatgaacagatgattttcttcgaagcggggaaaggtaagcatcaggtagtagtggtggttcctgcgcggaacaccaacctaccagcaattcggcaatagcgtggaatcagtgtacctccagtagtagtaaattcaaccccgagacgatgcgactctgatctgaccgcgctggatacctttactatccctgatacggtccgtcgtccgtgttgaatgctcaacggagccactagatttagtctgattgaaaatcatgatggactgctcttctgattaatccgtctagtcagagacgagaaatttgctagaatgatattggctaaattggaagatcaaaacttcgctgaatggctcggttagtgtact

SEQ ID NO: 3689 - DNA, 7770 bp, Emericella nidulans
ggaatcccattagtactttcaaggccattaatattccattgagccgacatggaaggtaagacggtaatagtgagagaaaggggaaacgcaccagcaccggaaaaatgtatgcacacggtaaatatcatggataacggagatagtgctctgcgccgcgtcgaggcatttggagatcgtggcagataaaagggtctcagtattgtccccgtctggtgcgcctgcgttcttgttcaagtttgcggcggtggctgctggagttgttacagtgtcagagcgagttttgcccccgttcgctgtcttcgacctagatctggatcgaggtctagatgtggattttgaggtggcgtggcggaggaacggacggaaaaggagggttttgacgttgtaatagcctacaccattattgttagtataatctcactcgcgtttttggagtcatccggatgggcatacggatccctagaacaagcctctgcctccgtgcccacttcggatcttttagatcattcctccctgcaccaccaattgctatcccagtcttcgtcccgtcctcacttgatcctgcggcgccctccccaccttctcctctatcaactgccataattccagtcccactcccagctctagagtcagccttgatgaaccctggccgaatccattccggcaaatttcgaatccagcagtccagctcattctcaatcgccaacgcagtggccaatttctcctctaacgttagttgtcggtgataaatctgcacggagaccttgcgcgttatgcgcgcaaagtccaccatccacgggatgatggcatactgtgtattgtctcgtggtgggagggggcggttatggtaatcgtctaggccgagggtgtcgggacggccgagcgagaaggacatttctctgttttaagttagaagggaagatattaatactgtggctagaggttaagggacagatacatctcgagggagtagagaccccaccaagttcgggagatccattctgcacgcgggtcgctggtgtgtcggacgttacgattgaagcctgctgctagacaggtacggacggcaaggccgagatacatatatgccactgtaactattagcttgtcatatgcatgcggatggagaggcgtacagttaggattcagttcgttttggcatattttggcctgtataagtcagcttagcatccccacacatagacaataaaggggacgaaccataagatacaaacattgcaccgcatcaagattgttcggaaaatgcagatgattcagataaagctgcgcctcgccaaacagcttccggctccactcgaatctggtcaagccacccagttgcgcttcatcccaaacccgcaacaacgcgccaaatgacagtacacttagataaagtgcaataaagctcggatcaggagtaggagtccgcctcatccagagatcgtgcgcgcggatgtaaaaatcttccttgtcgatgaacgggtggatgaaatgaacgttctcaaagtacccactcataaaaacatgcgcttgttcaaagtagtagttgtgttcgtgcacagcagctaatgattgtgacgctgacgctgcggtcgtggccgttggcgagaagctggcgttgtgcagcgttgagacaatcgagtattctggggctcgagcgcgaatagaccattgcgccgagctcgagggttccagctgagggtctcgtgctttctggagatggccgaggaatgcgacggaagatgtgctcccatgaaactcgatgccattggtgtggtgatttagctcagtgatttcgtcgtcgacggggtcgctagtttcagcttcatcggagtcattatctttcgagtaaagttccggctcttccggttgtcgcgagttcagatttgacgtcggcggtgttggccttgacattgagcatggtgttgcatcgatagctggtgctgaagttgtcgattcctgattgcggtgtgagagtttcgcttcagcagcttgaagtttggacgcgagttcttcgactcttctctctaggtccaggacgtagctactagtgttagcagcagtacaccttattgaggtggtgacgcacctagcagatcggctgttctccagctggcgatagttcccttgatagacacaatttaggttgctttctactcttgtcagtcccatctcatgttataacagcggtcgacgtactcttgcagtgcgagcaaggatagagctcatcgcacttgtacttcttggacctgcatctgtcgcacgcctgcgcagcgcgaggtcgcttcgaccgaggcggatcggccgcgggtggcatgatccatcgatgcagatgatttcacctggattggatctggagaaggaacagttgcagatgaacttctggggcgatggtctggggaagaaaactcggaaatgccgaccccatagagagacagtggaggtgctcaaagccaaaggtctccacgttaatccccgcattacgtactctgtgcataagaacggtactgtgtacatacggagctatgcaatgcgtcatcatttaatatttatgtacataaggacgtacctcttactcgagtgtcaagctcagctctttagctactttatccactctcccttcgtccacatccagcccctccaccgtctccggcaataccactctgctgactgccttaccggctctctgaatcaatgattcaatgccgtccccgtcggtaaacgaccatacccgtacatacttgctccggaactccagcgcgaacgcctgtccggcggggataaccaccgtctcgccctcgcggaacacttcctctcgctgttcttggcccttcaatcttactactaaggtcccctccataacagccaaacaatgatccactttctcaaacgtcataaacctcgacagcactgaagaggatgcgccataaacattcgaggactcaatgctcgaaattgcgcatactccagcgcactgcttcgtcgtaataaatggcctgctcatcacacttccgagcatctagcgcggccctgtgtttgcccttaggtagtacggcgccggcgattcgccctcgggagcttctcatcgtctgcatcccagtcgcctacttgcggaggaacatagttcggctggaaaacaacgtcgaattgcccttttgccgccatgactttagggatcaggagggccttcagatcgcgatcatcggcttcgggaacaagtatgccggtatacggctcggagatgtaccggaaaaagtcaatccagtcgcctggggtcacgacgccaaaggtctcagtgtgcgggcccaggagttcagggttgtggacaacggcctgatcacgttaacacgagcctccgcgaagagtacagggtaagtggtaggtaccggcggcacgtaggcaaaatccccgggccccataatccgacacttgtccccattccacagtttaagatagccctttgtaacgaggaacacatcatgcgcgtggttatggtaatgaaaccctggtgcgtcggagagagtcgcgccgctttggaatacggccatcaagccattggtctgctttgaggacgcaaggatccgaaatgtgcccttgctgccgggaatcgtaagacgttctccttctagctggggtattgcgtagggcgttcggctggggggtggtgtaggggtccagagagatgaagacatgttgactgttgtcgagatcgccgtagcagaagaggttcaggtgggcttgtggtttaggataaggcagtatgggagagaggtaggtgtaaggctagaggtaaacttgagactcgaagctgccattgcgagagcgcgaggatggcatatttaagagatatcattaagatcagtggggcttttgagagtctgggaccagcaattcggctccatcttcatctcggataatccatccatggcatgatgtcggaatttccggtcagcgtagacgaagtccaaagtggccggggacagaatgatagcagggcccataggtggagtagatccatgtcgatatctctagcctcatcagtcagaccttgccagtggtgatcacaggcaggaccttgctgtaagtatgatatgaaggcacgctcgtgaaaagagcggtctgtagagttgctgctgtacgacggtcctttatccagcacttactaatgctacattagtatacaaggaaggcagccgtaagcgaacgtctgccacatgtttcggatatggcgattggcagaacaatgagattgactatgtacgtcgtgatatatataggaaacgccttgactaccagccctaactagtgattccagcaggttcagatcaaatcatacaacgggaaagatggcaaaaatatagtcagagaaatgaagttccaatcccggtgccggggccggtaccagtcccgtcgggtaccagcaccacctgcacctcctctacttgtggctgcgcggcggattattttccacgcgtccgctcccggaggcaccgccccgcgagttcggtgcaagacggtcgttatacgatgagactgaggtagaggagctccggctcagagacgccggcgtggaagacgccgaggtaccggcagaaatgtgacggttgaccactgtggttgggttgcagtgtgcgcagacaaaaatgttaaacccacggccgctgcagccgctgcagatggtggttctgggattgttaatgctgttatcactgaatggagaaagggtgacaaacctaggggcatttccggcacagcttcggcaggtcaggaccgtccgcccgccaatgcaggaggtatgggttgggtcaaggtcaagagaggaagcttggttgaccatgttggacgaagccttgtggttaatgagggtttgatgaggattgttggtaatggctgagatatcgattgattgacgaggtgtacaaggttcgaagagtcgatgggtagatggcgagactttatgttggggttcatttaagatttatcaatcagtgcagccccgtcgatggctgaatgattataaatgccgcatggccggtcgaagccgacctgatcatctagaggaaagagaagcgagtctggtgagatctgctgcaactgcaagccaaccaggccgctccctgccggtgcaatgatatctgactgtgagacatacagacacagggttcctgatcccggtaggttcgagtcaaggcctgtcgtctaattccatttcggcaccgccgaacaagatgggccggcagctgggaccaacgaatccacagcgacgagatccggtcaaatcgagaatgcctatagtaagccgcgccaatggcacaacgtcggacggttagggcatcgaccaaggattccaggcatgaccacataaccggcccccagtgttggccgggttagctgtgtcaggcgagccagcaacatgggagttctgaactaggtcatcgagctgccgaagaaccgcggcggggactggctaatatccttagcccgactgttggcaacagaaccaagtaaatcacactgcacgtcaagcacagcaactgctcgactactgcgactgccacaacaaatggggtacatcagcttaaattaaacgagcaggtagctgcaggagtgggtactatattctggatttttgatcaagaaaaccggaaagagtctcagcacgtatgcctatcacggaagataaggcagaagcatggcagccacggagagctgtacgactcgcttcgcaagcaaccggcatcactaacagatgaagagtccctattttaaccttttaggctgtccattgaatccaccgacgggtagacgcagcggatgtaagagcacgatcttaagccccaatgccagatacgagcactcgacagcgcaccggcagcgaaaatggacgcaatccagtgacaccaaataacaaaacatcctcaattatcaatatgcaattcaactgagttagctttggtcaggtgcctcaggttatggaattccagcatgcactgacaccccgagagttcaccgtgccgtgtgctgggtctgggaccagagcgcagtgacacctccgattgagtttggacacatccatcaggcaacggtcgtcgtctcaagggcaaatgctcttgtcccctttcatattggcttggaaatatcccccacatgtacagttgcgtacagcactgacaacaagcaactctttgccgagtcgaaggatcgacactactgcaatggcagtgacaatacatcaactcgatgaggaaaccccgaggcctgggtggagtgactccgtggcccacaaaaagcaaagaaacatagcattttctctctaaacattgaactataccagcatcattcggccatcggcgggggacagtgagccacgaagctgaacggaccagctaatgtgaaaagacataatgcatgactatgtgatcccgtggtgcttcagattgtcgacctttgtgggcccgtatccgcgatgcgactcagaggcgcatgcaagtatccgactcgcagagaatcgatgagagtccaccgccaggccgcgcagtgattgctccacgtgagtccggagaaattagacagcattcgccgctatttgcacgagaagtcaataatcaggatggatgtcagaccaattaccggtgtccgaaccggcgtctgttgtgcgagtcatctatcatctatcctgccatatcagtcgtatacgatgcatagaagagatagatactcgcatggattcgcaaagggatcgcggggtccggaacctggtggtccgattgggggtaacaatgtacgagacggcatcgagtcgttccgctcctcgagggccagtcgccgagttgtatagtgtatacgaaggcagaaaatatcctgtgatcaaccaaccatctgtcagctcaacacagagagagaaagtggatgcgagtttgatgattactcctgttccagatgaacgctaagagtaagcgagctgcaggtgtccgtcataaatcacgcaccgggctgggacctgaatgagatcagtcattgttactgttcgcttggatcagacaataatagccaggggagcaggggagcgtagccctgggctaggtagcaggcattcttcgacgcctgagaggaacgaggcgagacagaggcggactgggggaacacaaggttgcacaaggcttcggtgacacgacggccctctcgagggaaaaggaaagtcaggacggaagctaccgatcagctgatacagtaagctgtctttactgctgtgaacacctcatctatctgccaagataaggaatgagggagaaaaagaaagcatacgagtgacaagactacgctcgcgaaggggttgatcaattgagtcatcaattgagtccaatttctagcattcctacggagaatgaacgagtaccaacagaataaaagctaggaacatgcaaaagaactagcgagaggagtgggaaacctcgatattgaataagccctgaccctagaaccttagacccagaattagccaccgtaacgccatcatactattgttcaaaatccagttacgcgaagtaatctgggggaagcgaagccaaagccgcaatagttcctactgctcccacaactgcccccaagattgccgtcgtagcgtggcttctaatgctacccctgtgcgaagtcttgttcaatttcagacggccgctcgactctctttggcctccttaccgattccccgggacgctcacagttgtaagctgggagtcaaagcatcaagagcatttgactcggtattgagaa

SEQ ID NO: 3690 - DNA, 1572 bp, Emericella nidulans
  unsure (1)..(1572): unsure at all n locations
ggatgactgttttacactcttcgcaggtgcgccgcttcttactggttgagtggacggagaaggagggatattgaataacacacccatcatttgaaacgtccgtgcgccacgcgtgaatgcaagacagaaacctatgcccacgatggcaaggatatacaccacctggccagtcttatcacccccaagctttccccaggggaactcttcgcctggaacagacaagagccacaatagaggcgcgaggaggccacaagaaaccgtcgtcggatagcgtaatccaattcgatcacgcagccagccgactccaggacctagcgcgatcgtggggatctgcagacagaagaagatcagtcccacggggagactgccccagccgaagacgtcccggacgtgcagagggagggtagtgtcgaacgaggcaagtgtgagagagagggcgagagtgttgaacatggaggcgaggatctgcgggttggtcaacatgatcctgtagaagccgcgcgaagcgcganttatggcatcgccggccgcagttcctgtctcgttctcatgatcttgggctgtctggccgctcgatgccgctaggagggggctttgttcctgtgcgtcagacgctgattcggattttctagctgacggggtctcgatcataagcagtctcgccaaaaaatccaccaccagcagaagcaaagcggcaaaccacgcaggccagtagccgaccaactccagcagaaatcctgacaccatagggccagcgaaaatgcccattgaaataaaggacattgccgtggcggtgacctttcccttgctacgctcgtcgacattgtcgagagtgtcgcgaacggaaaatccacacagacgcactggcaatggactgcaagatttgaccggccatcaacaaccatactgtactttatcagcctcgccaagttgaagcaataggatatgtgtatagatgtaccggtcttagcgcacgcaacgagaaccgttccggacgcacacgcggacagcgacaaaagcagtggaatctttctgctcggcgtcttatccgcaaagtgcgcgatgaatggggctgagacgagcgagacggcgccataaatggtcagcagtgtcgtggtgaagtgttgggttcgcgaggggtcgagatggaggcgcgtctcgagcatatatggaaggatgggcacaacgaagccgaagaggaagcattctgcgactgcattaacaggtatcttattatgtttcccgcctcgcagaggaaaactgcgcaccagaaaacaagctgagagtcgcagtcgtgataatgaacaactgagaagagcgccatttgtacccccagggtaatttggcgttgtcggcggtcatggtggtgagattctaacaaactggaaaaatccagctcgcaagcacgacgaccggggggatcagattgtctttaagcttgcgctcagctgctccaatattctcttatttatattttttattgtattgtattctagatttttttcggtttcgcgatcgctagttgtctcgttggttcaggccggacatctgggcgggcgtgaccgataagat

SEQ ID NO: 3691 - DNA, 2880 bp, Emericella nidulans
ccttggcctgaatcttaccattatgtattgggctgctgctccgtacggtacggtgttaatgcgagatgtataagagacacaaatcttttctaatctatataaaccctatcccctatctctaaattcatataaaagcaggcggtatagtcaactttccttagtcaactaagcacccctctttctccccgggtccagcgtattcctccgactgaccgatccccttatcatcccatcccccttcttccctagcacaacttctaacgcctgaattaagccattagaatcatacctcatcccaataggaacttcagcctccgcgccatcagtcgacgctacaatcttccgtccgtaaagacgaagcgtctcaatccccatctcggcgaggcggtctttgtccacatgtggtgtcccgggtccttcgaggtgaaggacatgtgtaatgtatgaggtgtagggcagggcggacttgctggatccatgtccatttgggaataaagaggggaatgctccgggaccagttgtagatcccaaacttgaagtagacggtggagattgtggaggttcaagcgtcactcggccgcgactttcctctcccgcgcgggtaatcgcctcgacaaagtccgcagccgtgaatggatctgaagagggaccggtctctcgatctagggaaccgttcaagataagaatcttgtggcgtgctggagacgagacaatggcttgcccgacgccctgcaggattatactagggatgagcgacgtatatagcgatccgatgctgtaaattattgcctgtgcatcgcgcagggattccaggacacgcgggttggcgcgcggcctgatttcttggccgtaagggttaatataccacaccctagtaatgcgggctgggagatcctcattctcggatttagagaagttaatattcttgttgcgcaagtgcgggaggaatcctggtggttgatcgtcttcgtagagagctgtatcaaggacatcagacggctcggtgtagtcgatcgttattgccagttcggcgtttgcgccgtttccattttcttcagcatgaagggctttcctcggtcgtggcgatgccggacgtggtgggagactaggatgcgaaatgctgttttgacccacgatgatggtcccgttggccaatgacgccgaaatatgatgggagaaattagagttgatggcagggatgacacggatgagatctgaggagacgtcgcagatgctgcctaggaggtagattgcgctctcgaaactcccactgaagagccgggcaccagtgaggaacagattgccgacacttgcggacgaaaagtcaaaggtcgatgagggcggccgcgcgcgcttgaggatctctaggttaagtaggttgaaaaaggatctgataagctctttctttgcgggtgtgattgacttccatagagatgatgtcccatccacgatggcaagccattcgctgtgagcggactcgtctgccgggagcctatagttgaataattttttaatggcagctcgctctgagttggggggcgacggtggaattagacggaccaatctacctgtacagcatcagccactgaaaacatagatacgacgggcttagagcactcactcctcacatcgccgataccaggccccccaaaaatccggatcagctccgaagatgagcctccattatcactgattgggatgatataactaagggggcaatccttgctctccctgacagaattaaagacctcgacaaggttattggcagcacttcctccagaaaagaccacaaggcccctattcggagcagaaggcgtacttgacatctggttgaaatcagctttcgttaaattaggctgtatcgtgatgacttactggatgattggaatccaatcgatgagagaactgatagaagcaccagtaaaatatagtgagtcaacaacaaatatatattctcagagaggcgagtacacgataaggaccattcagctaggagaactcaaccgctagattctgaaaatgtgtcctttggaaatgtgtcctttcagatcaatgcaaccttaaaaggccagatctcaaaatttgagaacgaaatagtgagatctcaaaagcgagttggatgatttgcccagtttggtaggtgaaagaacgttcctagaagaagggagaaagaggcgaaactcggcggtcacgccgacgtcaaaaatcgcccaacacggcaacacgccagctatagcactatttttatatttttttttatatctaggccgttgacgagtccagaccgagatattcaaacagtatacagaaaagactatataatttctctataaatcattcatccccagaaattcaaactactggcctgccaacgctcatgcataagcggcccagcctaatccacatcagttagcgctctcctatttatagatatccagccagatggaggagtaaacataccgcagtaaagaacagcaaggttcttctcatcagtcgcctgttgaatcagttcattcaccgtcgccgtaacactcaatgtcttgctcagtttctttgcaacaaccgtcagcgctctgtcagcctcgctcggttcattggttggccgctgttgatcagtcgtagaccccggtagaactggcggcccatcactggtgtcctgttcttgcatctttttcattcgcagtggcgacaccgtccagctgtagagcggatcgtacctcagcacgtctaggatggtcatgatgctgtatgattcctggcgcagtgcttcgagggtgaactcgcagcagcgtcggaagacgcccttcggtttggtgatgcccattccgtctaccaaatcgcgcgtgaagccgaaagggaccacttcaggcacagggagga

SEQ ID NO: 3692 - DNA, 1587 bp, Emericella nidulans
ctttagtcactaaaacttattaaaggccacccgtacatctccccagagcatatcatttcagcgcccaaaggtcgtctacagcgaagaagcagggcagtaccatgtaggtcacccggggggtcccggtacgcgcgctaagtagagcagatgctatggcacgccgataactccacctatggatggctcctccaaggcctagcggctgccgacaccgtcgcaggtccatacgaatttgtttctgcgacgtccccgttgggcaattggagtcaagattttggtttgtttaccgaccgcacggatggcagatcatacgctctttactccaacggtgacagtgttgacggccgagatgtttacctcacccgatacaacacaaatattactgccctcgaggaagtggtacgaatcgttccggattacgcagaagtttttttttttttttttttactcttctgacaccgtcctaggtctaccgcttccccaaatatgacctagaagccccaaccattatccagacagaccacagctactgggctttgatgagccacaagactggctatcgcccgaacagtatgcatgatatccatcctgagaaaagctgaaagaaactgacacctacagacgtcgttgccttccgcgccgacgagctcagcggaccatggtcacagccattcattgtggccccgctcaacactcgcacgttcaactctcagtccggattcaccatcaggattgacgggacgaagcaaacaacatacctctacctcggcgaccaatgggattcaaattccctctgggagtcgcggtacatctggctccctctccagattgatgagcgcaagaagaccctcgagttagaatggcatgacgtctacgatctgaacgtgtgagtattacggtcatgaaccagggagacagttgttaattttttaggaaaaccggagaatggcgaagcatcaagggaaagacatacacagccagcaaagcaaaaacaaacggcgatgcctatctgcaggaggctgtacgtttagagccctcacgatacccttccatcgaggcatcctaactctgaacacagaactttggcaccgacggggtcatagcaactggcatttacggaaatgatagcacaatcactttcgaaggtatcgaaggcaccggcaagccgcagtgggtttctttctactaccagagtatgcctccttttattcactgaatgcagccctacttactaatgtctttctctccattcagatactgacgacatgggcttcggcgaccaacgtatgtaccttcctactatcctatctaacatgaccctctgaacttctctagctaacctctaacagctggcggcacacctgaccgcatcggcggaagctggcaactcagacgcatctcctccgtggttgtaaacggtgacaccgagaacgtacagactctctaccaacgcgacacccataagggcatcattctgtcgacgccactgcagctaacgctgaagaaagggaaacgcaataccattactgttgggggtctttacaacggttttgactacaaaggagcggatctggaccgtattgttgt

SEQ ID NO: 3693 - DNA, 4322 bp, Emericella nidulans
gaagtctcaaccctcctgtatatctatattcaaatccgtcgctcaggaaatatctggcaccggccacttgctcggcgaccatctgttgcctggcagcgaatacagacagccggaacaatctcacttatacggcaaccatttgcttccaggacagcgcgtgacaccgactactatttacaagcagactgtccctgaaactaccgagttcgccttggctagtgggtgcccaagaatctgtttgccgatactgttactaatctgcttgcagaagcggctatatctaagccagctcccgctgttctctccttttctccgccaaacaaacaaggtcaaaccgctactaaatcattgcccgctaacttcaccatccctctgccctctgaaccgatcaggattgtggatccgaacatcttggtatctagcatagcaaagtcttcaagcggtgcttcagcggctctaggtgcaccgtctagcacaaccctaacgactgcacaaaagacaccctcgatgatgaagtctatctacgcaccgcagctgaaggaagccccaccctcgatcatggatgtgaagaagggatcgccggcctcgcaatagtcggacttgtagtgaccgcaaaacactgtttgctcaacttgctccttcacctccgacgtcgtgagtaaacatggctctgcgacacaaagagcagcattgcctcgaagtctttgaatcttaaaagcgacagtcaccgcttttgttagggttcagctctggattccatctctttcctttccaattctcccccctttccttgtgttctcgtaaaacggcattaaacgccatggaggacccttatttcaatcagatcgccaaaacgaaacacatttaattatgtcactcgccttaaccgctgatgttaccttctttatttgccaatatttagtttcaattactatgcttccattgcctttgataaagctggcgttgattatcactcactccgcgatgcagactacttcatcctaaagaatcgccatgctttttaacttccaaacccgatctactaaagcaagtgggagcgcttatcgactatgcaatctcgtcgtatacaggtagtagtgagaaacagcaagatatgattggagtgattacctcactttctgtgttcttcgtacgccggatggaattcactaggagatatgcggccttgtgaaataggtatataagtcgcgtacggaggccttgactcaagtccaattagacatttaaagttcaatagtactcacacgaaagtaacagcttataattgaagccgacatatgaggtatggtatgttgaagaatacaagcacttgaagcaagtggctggattgaaatgcacggtattacaagtaacttcatggaaaaaaaaaagagagaaaacggaacttcgcttttaatagcaatgcagggtattatttaaccagggggaagggtgctggcgtcaacaacgtcggcagcttccttctcgagctcttcattggcctcaaacagaggagaccggggcaaagccatcagaccggttcgggtggactcgagaataccgaagggggaaatgagcttcatgaaggagtcaatacggctgggcttggcagagctatcaagaagtctgtcagtatagggactagctgaaaagagtgagaagggaggactgacagttcaacgatgcagttgttagtactgatatccaagaccttgccaccgaactggtgggttaatcgtgtgattgcatccagatgctcgtgcttgtgtctcaaagcctgactgctaggaaggttgcgggggtgatattcctcggttttcgtggaggccttgctatcggtgctcttcttctgcgcctccatagactcaacgggggtggtgatctcgcggtgatgctggagaagctcctcgaagtactctgggcccaaaatgctgaccttggccagaagcagctcacgctgaacaagcgcagagtccgtgtaatcgaggacagcccagacggggacaagatcatccagctggcggcgggcctgctcgacaacgccatcctgaccctgcagcacgatggtcatgcgagacaaatcctccacctcggtattgcaaacgacaagactgtcaatattgaagccgcgggcggccaagatccccgaaacgcgggagagcacaccgggctcgttttgtaccagacagttcaagacatgacgcttgggcgggtttgtcggccgaacgggggtctcgtagagaattgacgagacggcggtctgggcgtcccattgctgcgagacatccgttacggggagtgtgagcggggaacgtcggtgcagcgccttgtaggccaatgctgaggttgagctggaggaggccctggtggttgtagcgaaagtggatcgggtcgccagtccagaggtgcggctggctgccgataagaaagacgatgatgccgtcttggacaacatccgggtataccggaaagccatgatctccccgggatggaagagacaggcggatttaacacggtgcaggcgggttggaatgaagaatcgtagaccgatggactttcgcatttccttttatctgggtccggtcacgggtccgacctcggggagctgactcattctccggccggggagcctgaatggctctccgtatgggaaataccgctagcctaatgtagactagtgcgctctatatacatgtgaccacaagtcttgaagggttcccttttctgatatgcaaggcgttgtgtcttcttgggcaatgtgccaggaactgagcagcttcatcttcagttgactttagcgccttggtggcttgcctgtctgcatattggatgtgattgcaacgaatactctgggtccagccctcttacagattcacactagtctgggatcgtcttttgactccaccgccaaactaaacttcttgcaaaatactggcctagtctacagccacagactacagcattctcaccctataatcaattccactccagatctcagattcataatagctaccatggctgacgaagatcgccgtccaaaacgctctcgcttcgaccaaaccactccggagcctcggcgacagtcgcggttcgaccgtcgttctcggtccccttcgtcgcgacaatccgaaaccactcgaactcgcagccctctcagtcgcgagcctcggagccctggtgctggcagcaaagcggacccggttgctgcagctggtacgtcaagacccttcttcggtctgggtatgtatagcaggatgcaactaaccgcagaataacagctgccgctgccgccaaaatcaacgcccagctgcaggctaaaaaaggaatacaacatgtcgaagtgcctccaattcgcgccgtcagttcactatcgctagtttacacctcttcggtatcgcgcatatgctgacactattttgctgtagacatccagcccatcccaatcagctactcccactggcggggatgcgaaactcaacgccgaaatatacgttgccgacggggattatattaaggacattgagatcaatgacctgcgcaatcgctacacactgaccaaaggatctacgcagaagatggtaattactcctattgcactcgctgatcttcgaggcgtctttccccttaaccaaactcctctctgctgtgattgtgaagaagcttacccagtccattcatagcatctctctcccctcatttgcatctgctgacctccattgcctgatatctagatcaaagatgaaactggcgccggtacgccttcattccatgttatatgtttaacaacttttttttatcaagaagcaagctcatcaatctgatttcaagatgttactacgcgaggaaactattatccggacaaaagcatggccacagcagcggtatgtgagctccgaccctcattatttcctgctgtctaactagtgtttcttatctacagaaccccccgttatacctccacgtgacgagtacctcgaaagaaggactcgaaaaagcggtcgcgctgattgaagatcttatgaagaaagagctgcccaatctagtggatgaacgacgatttcgccgccgtgaaccagagcaagttgagcgggatgaatttggtcgcgtaagtttcattgtccatgaatgcatcattacattactgattgtccacagcgcaaatggcctgaagagaaaatacccgtcggcctggagccaattcctggatttaaccttcgtgcgcaagtcgtcgggcaaggtggtatgtacgtaaaacatatccagcagcagacgagatgcaaggttcaaattaaaggccggggatctggtttcttggacccagc

SEQ ID NO: 3694 - DNA, 7616 bp, Emericella nidulans
  unsure (1)..(7616): unsure at all n locations
gtggaatcagaactggaacgctgcgctgaatacgataggacgccaatttgatctacagggccgcaagaggttacggcgactcaaggtgcagaaactcttaacgaagatgtcctcaccttcgggcgggtgatatgataagctaggcttggatatggtactgtgcaattctcgacaacacataccgcgaatctacaccgtccacttcaggacaacttcgttcgccggacggcaacccgagagactcgtatattgaccttcacgagagtcatgtgacggaccgcaataccctgttggtgacggcctacaatgtgacccagcacgatctcacttcaattggtggccgtccggatgaccacatgctggacgggaagttctatgagattgacattgcaaccaatgagattgtgttctcttggagcgctttggatcatttagatgatatacctctggaggagtcgaaacaaggctggggagacgatgtcgggtctcaggagacgccttatgatgcatatcatattaactcggttgaactcatggaagatggctatattatctcgctccggcacttttggtctgggtactttgtccataacaatggctccgttctttggagactgagcgtacgttccctaaaaccttttttctgtaacctaaggaactatcattgactctcagtagggtgaagaaggcactggcgatttcgagatcgatgaccgtgctgcgttctcttggcagcatgatatccgcatctataaccagaccgaagaaggatttgcgatgagcttattcaacaacgccaatactccaaccaacgaggtagccgcgactactgggctgagtttcgatgttgatatgattaaccgcaaggtccacactcgtcggattttgaacgacacggacgatgtgattcacagcgtcagccagggaagttatcagctcctcagcgaagagactcaacacgtacttttgggttatggttccatcgcccaggtaaaagagtacgacgccgacaataaagaggtcctcactgtcaagtttggcgaggacaatgcagttgcgtcataccgtggctacaagtgccaatggaaagccactcccttctggaagcccgccctggtcgttcgccggacgggcccagactccatctttgtctacatgagctggaatggggcgactgagtatgacaactgggccgtctactcatcaacgtattccgacgggtccgaccctaaatttgaagccactgtcgaacggaccggattcgaatctagcattgaactgcacggcttacctagcgggttccttcaagtgattgcacgaaagggtgacattccactaggatcttcggacgtcgcatccctgcagacggaggtgggcggcgaggtggagacagagacaggcaattaggaacaagtcgctggtcgcattttccttgatcatggaaggttggtatgttgcacgaactactgagaaatggttcgtggctaggtggacaaagagtaactgccgaatcgcgggattgaactgtaaatatattcttgtacataacctattctagattgaaaatacaccagatgtacaacatcacacaaacagctccctttacagttgtttagccgacgaacttaatcatgattcatcatcgccagggccaatgtcgtgaccacggccactttccgccattcaacgtgctcaaattcggatcattgattctggttcgatagggccaaatcgccggctcggcagtcgctttcttatctgtttccattcaactggctacagttcgctggtaaagtcgtaactcgaatcatgttaaatcatatcttgctctcatagctataaaccttcgtccctaggcatttaagcataccatgactgacatatctgcaatacctgagctcaaccgcaatatctgctaccaggcgcccgtagcagttcatgcaggtacgtcttctgtacgtctctgtcacacccatgaatcgcgatctccctaggcgttaccacgaaaagcaactgcatggtgctattgtacgacgtgctcctgatgtgattaatcaccgagccgttcccaggtccaggggagttttggccgatatacggactggcgttcggcaagacgttatagacccgaacagataattgggaatatctctcgattacgtcgttggacgggtgctaatgtatgtttcctcccggccaggaaaatgttgataacgggttcggatgtaagtacgacgctactacgacgatgctacgccggccatctggatggcgtggctccccattcatggatgatggtgagagaaagaggatatgagtataaaggggagccctgatgccgcgagacaaagaccatccccacagagaagagctagacagacaaaaagcaagccaacgcaaggtcaaccgccaattgctcaatagtcaagatgcatttcaaacttgcagctatcctctccctcgcacctctcgcctttgcaggcatctccaacgccagaatactcaacaacatggacaacaccaacattgtcatgactgagcccaacagcatgaaaaccaacgggatggaaaccatgaagcgtccttttatgatgcgtccagccacgaatgagactattgcaattgggcacgccatcgtcgcgaacctctgcgagcagccaatctacctctggtctgtcggccaagacataagtccacagtacatgatcaatccgggcgaggaatatgttgaggaatttcgccgcgacccgcagaccggaggaatcgcgatcaagattaccaccgtcaaagacggcctgtacaccagcgccccgcagactgtgtttgcgtataatcttgtcgaggacctggtttggtatgacctttctgacgtctttggtgaccccttccaggggcagattgtgagcatcgagccttcggagccagaaatccattgggagaacggagtgccgccgagtgggagtcaggtgcgcatgttggaggcctcgactgatttagtgttgagtatttgctaaagcgatgacgttgctcaagccactgtatggatttcgggggttatgagttgcctgagtgaaaagccgataattaaggaacggtggcgtgcctgggtagcagtaataacggttaggtagttgagaatgccatgttgcttttcatgcatcctttttccaatttcgtgtctaccaatccctctatgaaacagctgtgcacattcataagtcagccctataagctgagtgcactctaccttttgagcatttcggtcttcttgatgcacggcgatgtttcccttctacatcaacagaatcagaatttccatgttaccaactgctacaaacgtgtatagatcgctgagttggtagattgactcacaaattctatgccattcgaggactgtagtgattctagagtctgcgtaggaccaggctagttcagctgctgtgtcttcacatagatgcgtgtcatatcggcgtgattgccggccgcttttgtgcggtatccttctatgtctgcatgttgaggaataggtctggactgggatcctgttctaggcgatacctgaagatgcgggtcttcggtccaactgcccacgcattgttcagaggttcaaccctcgcgattgccctgacagcagaaggttcggagatgtccccgaactcaatagcagcatcaactggcccgcgacatgtccctgcgaaaacaaccagcattctagcataagcacggtcccacgccactaagtaccctgtttcttccagtcgaggtgaaacgtcggaaccctcctcagaggaccttggccgctctgcgaggaggtagccaagctggatcaagtgcagagtttgtacaagggcgtacggactctcttctttacttgcaatgactctggccaaccctactttcgagagcaaaacgtcctgagaatagtcagatacggaaatagccttgccgagttccagcggtgaacgttgtggtgtccaatagaactttgtatccgacgttggccaggattcgatggagataggtatcaaactcccctcatagtcgtccaacaggtcggcaatcttacaatagtcggcaatggatttggaattcccatgagcccggatttctgcaaccagcctttcagggctttcataaccagaactatctccgtccatatcaaatattggctggtcactagcagcgcggttgtcggaaagcccaaggtggagggattcgtccggttctagatcattaagccaagtgatcccaagcctttgctcgatatcacttaacttgatatctaagatttttgcatactcccgttcactgacgatctggcttaacacctcctttatggcatcatcctctagaagatcccttacgcgctcgaaatgtgatataccaggcaagtcattccttgcaagtactgacacttgcttcagagcacttacagcccccggtgagtcgccagcatccaccagagacatagcataaacgtatgcggactggtattcccgaaagatgggagatcggttgcgaacggtgcgttgcagatattcgttccatatcttatggcgaatggtgtcgtctttagctctgacgagcagagacagatatcctcccacgctcatgggactaacgtcgtttctcgcccaaaagagtattctatgcaggctcggactttcaggaccggcctccccagtaactaggcgaagcaggccgcttacgtcgcgctttggatcttgaaatgacagagtctggagggccgacagaagccgctccaccaaggcaaggctttcatatagcccaagcgttttaccaccagcggcgaggtaactctgtaaatgatggcgcaaagagggctcagataaggcagagcatgcataccgaattcccatatgatggatatgagcagccacatgattcccgccatcaatgagtttcagcctcgcctctagcccgttgatgaaagcaagaatgtctccgtctgtactgccacgctcgcatcgctccaatgccccttggaataccactggtggttcaaagatcttatgagcgttggcagagttgctattcacacgcttttctatagcatgttgtgccattcgaaggctttgcgcttgtttcatcgtgggattctttctttcggggtcctccactcccgctggttgagaggtccataacggggctggcgaggtattgaacggccattttgccagaaaaacatcagcaaggtttcgctccgagcccctgtaaggggaatggtcagtcctagtaagggcaaatctgagcagctcagactgtacaggcccgcgcctgtctgcgatgcttgtagtagtatggcgtcgcagtccatacaaggctgacggtatcctgcagaccgccagctgagatggctggaagagccgatattttacatagctaaccattgaagaatagatttcgaggacaataagaataagttagtgccacgatggagtcggttgttgacaacatggcccaacacctctaagagcctaagccgttatcagctgacattggcagggacagggatcctagggccagctaaacgatggaagcatcaaggcggtgtaaaaggcggcgagggctgaagcgcttaatctccgaatcacgagatagttacatttgcgagcatcattcaccaggtttcgtcaagaactcgcttttatcatatacttaggatattacttaccagactctctggtgtgctatcaactttacgcctagaaatgtcatcggagcgtgaccaggagcaactttctttagaagagagcagagaaggtgaaggaaagtcgacaacatcgcaaactgaatccaatgcttcagatgtcgcggaggacccttccacaaaagaacagacaggcgacaaagaagacagtgcagctgcaagagcccgcgaaagaaaggagaggttcaaagctcttcaagcgcgcgcagtaagtgcttttggccgcatcaccacctcatgaccctgacagtgcaacagaaatctgcaactgaacgcaacctgaaagagacagcagccgaaactcagcgactagcaactgacccgtcacttctctcctctctatcgcgcaaacatgcttttgcctcacacaacctacttaaagctgacacggaggctgctggagaggactttgaacgcaaacgggcttgggactggactgttgacgaatccgagaaatgggataggcggatggaaaaaaagcagcgccatcgagacgatgtcgcattccaggattatacccaggatgcacggaaagtgtacaagaggcagctacgggaaatgaaacctgacctggagggctatgagaacgaaaaaatggcagcgattgaaaaggctgcagcaagcggcgatctcgagattgttgaaaccaatgatggagaaatgattgcagtggataagaacggtactttctattccacagccgatacgattggatttaccgagagcaagcccgatcgtgctgctgtcgataaactagtcgcggatctgaggaaggccgaagaagtccgcctcaagaaacgcagagaccgccgtggcggcgacgaagatggcgatgtcacttacatcaacgaaaagaacaaacagttcaaccagaaattggctcgcttctataacaaggtttgtcctcacttccctctaagacttatgggctgagctaatcatctttcagtacactaccgaaatacgtgacagcttcgagcgaggtaccatgatatgatataatacatctactatacaaaacttgcaaccatctgcagctattaattcagccggcggtagacattgccttgtcgcgcccatcttcagcagaataccgcaaaaaaacgccatcatatctcagcggggcatttatagcatactctttctccacgccttagtggccaaggcttcgatcttctttggtccgaccggcccgcttacggacgggtcttccagcgcttccaccaccgcctcgcctaccatgtccacttggaacggcttgtccaccatcgagccaaagaaatttagtctgttacccacaagcgcattgagttgcgatgcaacgaagccgccgagggcgatcggcaaggtgagcttcctgctcgaatcatacatgaatggagggcggacgaagatgctccgcaactctggaagctgagtggctatcgttgtttccgcttctcgtttggttgttatgtatctactcggaagaatcggggcgcctgaggatgcagagatgtagaggaacgttgaggcatgctcattcagagactcttgcgctaaaagaatagcttttcgtacagaaatgttagcttcgcttttgcgacactcncgcgttggtacataccggaatctcttgtcataagctcatatgtaaactggccgtctttttcctgcgctttaagtgcttcgccttcttgcttntggagggaatttgcttccccgttttgacgactgaagccttttgagccaaaaatatcggtcccgccttggacactccttgagcagtttaaaggaaccctgtttgacccccggttggttttaaaacggttgatggtcgttaggaattgttagccatccacgatttccccccgactgggggggtggaacatcctggttccccccc

SEQ ID NO: 3695 - DNA, 4014 bp, Emericella nidulans
tctttattatccttcagacgtgagttgcgagatttctatccatgttagccgctgatcttgagaaattttagcgggctatgacatgctttacgtacctgagcaaagctagcctgatagccaaggtagaagaagcctcgtatacaattctcacatgactcgaagttgaagtactggacaaagccaaacctgtgtcactgttagtaacaatcatgccgtcctgaagagaaagaaaaagagcatcgaaccctttacaaagaccggtatccaagtctacaattgccttacaacggtctatcttaccgaagcgggaggcgtaagcatgcaacatctcgtcagtggtctccggaaggaagcctcggatgtagacgttggtgattccctcccggttctcaaggcacttggcaagggtcaggtcggtaggattggtccacatagcggggacagctctggggatagcaggttcctgctgaaccaagctttcgagatcctggagtatgtaacccgtcggcgtcttcatcatctgaagtgcaggcttgcctgtcctccctgaggaatgttattcatcgcgtagtttgaaagcgcagagccatcgagactggggagagcaccaaaaaattcactttggttgctaccatcggatgctgagggcccagctgccttttgttcgtcgttaccattccaatggttccgcttctggccagtcgggtcctgcatatcgcagttcatgagatgatatgggaaagggtaaccttgcatagccgccgggacgcagccaggggcaaggcccggatacatggtgttgggcaggtacgggatctggccaacttgatcatgtccgggaagtgtaccttgcggaaacggggaaacgggggcgtgaggaagtccttgaaatacactgccatttggaagcaggaccagctggttgttataggaacgagggccagcgagctccaaaggcgggggcatggcaactggcaaccctcccttgagggtattaaacttgccgccggagccttggttctgaatgttcaaaccaccaaacaatgaagccaagtcaggacggttgccttgctgatgaccgccaccaaatgcaccacggttgttctgagtaaagtgaccgttatggctcgcttgagtcggagcgttctcgggggcagcctgttgctgggtctgagtaggcatcgctaggaatctggaataacagttctgcaataacagttagcaggggtcccagagcatacggggttgagccaatgggaattgaaggatactacagtgagaacaacagacatgggaaacataggagtggaacagaggaaggagaagcaagaaaaccggacaaaaggtataggctgcccactgtctcgaacaagcccaaagaatgtcgtacttaccacaacgatatgggcccaacgcttggggaaaagcgggaagtgacaagaagctggacatatcgtaagctcgagcttctcatcaattagaaaaccaatcactgaaacttacatgattcttcagatgaatgaaggctagagtaccacagaagtggatgaggatccggaggcagaacgaacgtcagcgaaagccagagccttcaagatgagcacaataggagcgataatggctgaagctagctagagaaaggtaattcggtagcaagctcgaaagttgtgggatgtggaatagctaaaagagacgatgggatgaagaagttgatgaagcaatgcgagacgagagatgatgagaggagaaagatgggagaacacaaagcgagagaactaggggatcaaggaccaggactggaagggaaggagcccttgaactcacccgcagaagaggtaaagcagggagggaaagagcttctgtgagctgcgaatcatggaaggcactgaaaggcacaataagaatgattaggaagatggacaagtgaatggtaaggtgtgggtgtgagtggcagaggagaaatgaaatctggagggatgtctcagcggtgcataaaaaactcatcatcacagttgaagtaaagtgctcaatgtacatgaaatcgagttgtctacagagtttccaggctctctgcaatataaacacaacagccggagctgtatagccactgattacgagtagcaatgtatagcaatgtatagaaacactcgaaactttcatgagctacgtagagcgtcactcgcgtaagtctagacaacctttcaaatatctttcaaagacagctaggtatgaaacttcctgacgtctattccagagtatgatgcagcagaggagagaagagccaaagggagacaccaaactccggcgactgatatcaagtggcatatctttcgaaaaacaaaacgcagtgtcagtatcatgccatcattgtgggtgtgactggtcccgcatccatttatacaccacagaaaagtctttcccacggtgttcagcttccaccacgttatatacaacgcgagccacctcagccagcgccaaaggagtaccagactccttcgcagctgtgagggctagtcgtaagtccttattcatgagactaatgccaaacccgccctcgtaatcacgggaggctggcgcaccctccacaacgccgggaacgggattgttgacatccatcggccagcatctgccggtggacgcgctaaccaaatcttgcagagctttggggtcaagtccgcagcgcattcccaggttcatagcctccgccgtcgcgatgttattgatcgctaaaatgtagttgttagcgagtttcgctgaacgccagttccagccccgcccatgtgccatgcctttttgcccatgagtaacagaatggctttgactcgctccactagctctcctgttcgagaggatgctccaaacataaaagatagagtaccacggcgagcgcccacaactccgcctgagacgggtgcgtcgacaaaccgcccttgattagtcgaatggatcgcattcgcaatctccttggtagaagccggatcgattgtcgacgtatcgataaaaattcgctctttttctagggcgggtagggtgccttgacgaagcattgaataaaaaacatccttgacgtgctggggttccggaagactagtgattatcacattctgcaaagacacaattagaacagcctagatcgacataatacatgtaaacctaccgacttctccgcgatttcccttgcattatcagcaactataacttctggcaggacattgctggcgccagagctcttggctgtatcccgagcctctcgaacaaatcgtgctgtcgattcctcgttcacatcccgaataataagtatatctgatggtgggatctttgcgtggaggttcttggccatgttgtatcctgtcaatgtaatgttagcagcttcggatgggaatagatcgagcaactgcgacgatgcaagccgcgattggaggcagtcaaggaagcgtacccatctgtcccagtccaataaatccccaagtatcatctcgtcgtaaactggttgaaaaggccttcgtcgatcgcggtgttggttttcgaaggcggacgagtgtgtagcatgaccttggagcggcacccctgcgcacgaggggagtggcacacgagaagctcattctaagaggctggaagtgagcactaagaatcctatggcgatcttcgtttgcccttatttgagaaaaaatgcatatattcctgagaagataagaggaaagaacgcggagtagagccgtgagcaagtctgaggcgacagccgtaacgtgatcaaccaaaagagttctgaggggtatgcataagtacctggccgaatgccgtgaatatccgaggtctcatcggtaaatgaagatcaaagctgcgcttcaagactactgatcttcctctagcctccacaagggattcatgcggggaagtcctaaaccggaaaagtagcgaaggcacgggcccgccgtcgaaaacaaccatttctgatttatttccacgagcataattatgagataatgaaagaatataagtgcacctggtatatcc

SEQ ID NO: 3696 - DNA, 6445 bp, Emericella nidulans
gtccagcagctctccttgccgccttggatgtgggtgtaaaacaggacttgtccagcttgctaggggcatcggtgacgtccaccactacaccaccactcactggcacctgattctcaacgacaaccaatacttctggctctgaggcgtcctcggtcgggcaggataaacacgcacagaacgggaaggttccgtaccagcctgagagctggattgcaagccctgattcatttaagaacaactatgacagcgataccgctgaaactagggagcttgagcaaatgattgatgagttcgatcttgactggtcatcagatcgctccagcaccatgcactagagcctggtgaactctaatactccagcgcttcctccttgccatttcacgattctatttctcatccttcacaaattcgttttactctggccttcaattgactttcgaatgattattgtccctcatacagccatggtttcctgacgactggactctcgttttagtatgctcctcatagtgttttctacctttcttcggctataaatcatctctgcaaaccgtccagttcctttgtacatagactacccattcttccaaaactgtcaattagataggcaaaattatccaagaccagaaatatttcacccacaaatatcacattactctccatctagcggcacgtgaagtccaatagttgtagaagaaccccatcgtttgccctaacttgacaacacgtcaatgcttagtcatttacttaggctgagttatcagcggccgatcatcaagcttgttgacaacagaagaacaaacagcctcactctcacacaaatcaaacgaccccacgccgcgggtcaaacttacagctactaattcctggactaccttaagcagcgccataatcagtctcaatgcggccccatcttcgctagctagttttccaaagtgccttacttcgaagcccaatccccgcaacaccacaacatggccaactcgacctcagtacgcacattcctcgagacaaaagctcctgggaatgaaatatgactaacagttatatctacccagggcccccaaattccccaacatgtctccgcgctcctctcccacctcacctcgcgcccgggcgtccaatcgaccctgatcctctcccgcaaagacggctcaattatccagacgacgggtctccttgctcctcctaaacggacacccgtaacgagcggagcatcaaccccggttccaacctcgggaacagaaagcgcacctacagatactcctaccgacaccgctacggacaccacgactccctcctcccctcccacagaagcagaaccccaacaactacaatcttccagcaccacctcagcgcaaatacacgcgcaaagtcaaccccaggcgcaatcgaagccctaccaaccaacccaggccgaagctctagcagcacagatcttctctttcgtctcggccgcgtcgagtctcagtttgtcgctttcaaacccgcccagtgaagacgcgaacgggaatagcacgcttgagtctgggttggttaatgggaatgggagtggacgagacgagggcgaagcagatggctcagaagggcaggacgatgacgaggtgaagctgctacgactgaggacgaagaagcatgaggttgtaattgtgccggataggaggtacttgctttgcgttgtgcaggatgcaacgccgagtgctgctgggagtggtggaagtgggagtgggagcagcgggttagggacaaggaggttatcaaggtagaataaatgattagcctaatgtggatgacacctaatgtgagggagactactgtgcccagtgggatatacctcgattgaaatacaggtaattgtaaatatgaagatgtgtggtttggagaatttctttcagagtaacaaaagattaagggttcgaaaaatatatgatcgtcaaacagcaatcttgtgcatgtcattggtgcaacaataaatacttcaggataagggtatcttttgcaggcgatagccatattggccacctagcttctcaacgtaacaaactcgaaacatacttattgcataatatgttctcaagcaaagcttgccttcaatctgggcagtcacgcagtgttatccatttccggcctagtgcggattaacacaacaaaatgcataatttccactgagtcatgagacatcaatctgtttatgaagatccactagcggcaggcctgggcacattaaccaccttccgcatgcggaaggaatttaggccgcttttggagcatctcccggtgaatagcattcggaaatattcgtaatctcgactcagtgctccggatgaaaccggaaggactgtacagtacgtagtaggggtgagggttggatttctgtactccagagtatgtccatgatactgttcaggtcccgctatttcttaggcttatacgttgttcgtaaagcgactttagcctggccaacaccttagagctgacgtagctacttgatgtgtcaaggctcgtcttggagcttcttctttcggccggttcgacattcagtaggtctttagcccatttccaagtattcacaaggctcccgagtataaaactcataatagaatgttcatctgccgcgatatcgggccgcaaaaaggtacgagatgaacagaacatcaatctaagttactcccttgcctttgtacttgataaccagtcatatttttcaggatatatacccttgactacagagtaaagtttgcccagttctcaccgcggggaaccaatgtgatcttgtatctctcagagaaccaataaatccattgccattggctgggacttttgtaggtggattcaagcacgtttgcatgactcaaagtacgtggggcgtgggtaatgtacggaattccgaattactccgtcagtccttctccagcccccgagcaggctccgacaaggcttgaatgctggaatggagaggggacaatgatgcggtggcagtgagctcgatgttattcttaggataccgtgccctgccctgcccgccttgctcagcctgcgtgcgcgtctctttggagtttagatctgcggactatcaaacttatgtgatttatgctgtttgggcaacgcggcccagctgtcggcgtcggatgttattacatactgcattcctttgaatcgcacaccacaccacgggccaagtatagttgggcgttttaaggctctcgtgattattatgagtgttgacaaagttgggaccatccgaccaagatctgagtcaggtcaagcgccctgcaaagtatctcctcctggaacattcgattggatgtaaactagccatctggatgatgctgcctggttggttccacagccagttgtcatgatgctgtgatgcagcgggcgtacgaccggaaattctagtcgtgaaatctagctaggagaagagtcttcgggcttctattttctgtttcttaaaagcaggtgttgtgatagaccactacgactcgaggctgagcatctgcctggaagtgctgccttgaggtcattgtcgtcgtcaacgacgatggccaggggtggcgttactggcgtggctggcaattccagccgtggtggttggctgaccactctgatttttctttgggccgccgtcaacctccgcaccagagccaacgccattccaacgacgactggctcgccgctttcaggtcatcatggtgttcatgcggtcgcggtcgcggtctctgtcgaatgacgggcgcgcggatggagtctcattactctcttaggaactgcacatctcgttcatagtcatcgcagcccagcaaacccatatcgcgctactctactttccattctagtcgaccccagagttgtctatcagcccaaaccagcactcccagagtccaaggctccacaagacacctgtcgataaccatagtgatctgtatatccgctatcgtgacttatcttagaatccctgggcctcaaggtctgatcagagtagtcgaccgtctaactttgtaaagaaaaaatctgatggacagagccgttgctgattgggagctcatgttccagtgaaatgaggaatgccagagtacagtgaatttattagcgaaaggtgtggaatgatattagaaaccattataaccattataccataaaaaaagcctaaggctgtgtgctatcgccggagagaggacgaaagagtcatcgatatccgctcccgtcctcgctgctcagcgtctccagcgtcccggcctggcctctgcgtctgcctcttgtctccccgaccctctccctcttctcttttcctccccagggtgactcttctgcccttcaaaacatctctatcttcttccacttctcaacaacctcatttctaatatttattctcgatgattattattccggcgtctgtttagttcccttgttattctgttcctggttttttcgccttcggtggtccctgcatccgctctctttctcagtcccgccactcttgccactgaccacggtgagtaacagcttgcaaaagtaattctaattcctcgtcccttattgttcctcgctcttcagtgccaccccctactgctgttttcatcccatctgcccgacccaatcatcgttttgttgctttgactgggcccccaagagttagtcacttgccttaaactccgccgccctcgccatatagtcaccagacggcgggacccttggtttctgcccgttccccttccaagtaggagtcataaccaggcggcaaaggctccataaatttagcggaatcgctttgctgactagctctctctcacatcagcctattcgagcctcataacgactgtcttcctcgtcgcttgatctctcgtgtttgcctcccgatacaacagctgactgcctggacaagcgcggacggaccctgtacctgcctgcttgccctatcggtccgccgttctatcggccctctataacttcatatttcgccttctcttcaaaatgtaccctgctgtttcgtctgttgttccggtcacctctatcgcagaatccattaccccagatatcaaaggcttttccgacatggttgctgtctcttactgagtcatatcgcatacaactgtcttgaaagaagagtcacgatagctctatcgacgtgcctcttatactgcctcacgatatttggcctttacttggaccctactataggtgatcggaacactagacggtgactcctcttccactccttgtcacgttctcctacctcgacttatacttacctaccctaactcgccactacctcgttgggtgactcttcatctaacgccccaaccttctgaccttgatactcttaatacaaactggagtaccattgttcttaaggctcgccgtcgcctgcgaaatcaagacggtatcttgtcttatcgcttctcgtttacggttacttgcacaacggtatatttgacaaattcacggttttaacaacgtcgccacatcgctaccatattcgattgtttttatcttacgccaaaacgatcatactttgaggtgtttggtcgcgagactatataacattggatatgaacgggattgacgcgttaggtttgagagactcaaaccaaagcatacagtttaaggcatcctatgcgcatccgtatgcctcgtcgatctcatcgtcggcttcctcctcttcctcctcggttttctctctagatgcggtgtccacccaaagctccatctcttcatcgtccacaagttccgttgatgtgatctgggagaatgaaggtgaataccaggccggaggaagacttggtaccaccggcggtgtgcgtggttgtttaaggggcaatgccccgacagctgccgatgtcgctgttccgccggagttgcgtaagcatccccgacggaccaacagtggcctgcagccttccggcgtatctggggcgcgccctccgccctgtcttttacggcagtctgagcggaaggtcaattttgtcgacaatcttgtgggtgagtgaaaaatacaggaacttggaagaatccgtgctaagttgtgatataagacactgcctccatgatcgtcgaaaccatctggcctttatccgcggtctcactgcggagtgattcagctacaggatgcaagggtgtcttgcctctgcgtacctttattcaagaaacactccgccggtcgcggacgagctacagcacgttgcaggtagcgctctactacttgatcaagatcaaggcgcacgtgccaagttcagaacagacgcaggatcagtcgcgatcgagaccagtctgccgggccatgcagtgtggccgacgcatgttcttagctgctttgatccttgcctcaaaatatcttcaggaccggaactattccgctcgtgcctggagaaagatatctggtctgaacacagcagaaatcaaccaaaatgaactgctattcctggaagctgttactgaaaactcgcat

SEQ ID NO: 3697 - DNA, 7344 bp, Emericella nidulans
tccacttcaatgctaatcacgcattgtcattattggcagtggtgccacggcggtcactctgctcccttatctggttgagaaggcacagcacgtgactatgctacagcgaagtccaacgtatattctggcccttccgaaccgcaagcctcttatgagctggatactcccagcttttattgctcgccgtctgattcgggtcagctggatgctcacgtctcgaattttcttcctcttttgccaggctttcccgctgctcgcgcgtttcattctccgcttccgaaccaagacattattgcctaaggacgtcccctgggatccacacttcaagccaaactataacccatgggaccagcgtctttgtgtttcgccagatggtgatttctacaagagtctacacacgggcaaagccgctgtaaaaacagacaccatcaagaccgtcacgccaaagggcattgagctcaattcgggcgaattcttggacgccgacatgatcgtcccagcaacgggtctccgtttgaggattgctggcggtgcctccattagcgtcgacggtgccccggtgcacctcaacgacaagtttatttggcacggtatgatgctccaggacatgccaaacgctgcctttatcattggatatacaaacgcatcatggacacttggcgccgacgccacagctcttaccatctgtcgaattcttaagaatctcgaaaagcgcggcttcgcggccgttgtgccgcgcctctcgccctcactcgcttcgaacattcaaccccggcggctgctcaatctttcgtctacatacatcacgaaagcagaaaaggacctaccgcgggcggcagatcgtggaccctgggtgcctcgagacaactacttcagtgatctgtggttcgccaaatacggcaatatcgacgatgggatggagttcttgggagagaagaagactctgtaattgtagattttctttcacctttatttagacatgaaaacgtaatgactgataccaataatgattttttgatattttcctttcaaaagtcgtacgaaaaccgcataaatggcattctgcgtggttctaaccctagttacctataatcctactacgactttactctgaatacaatccggcagcaagacaataaaccctatttgaaaatgagcaaatgtattatttatctatttcactgattcacattgcggtataagcatttagcgccaactgccccccaaggtgcgcatacagcacattcgccccctcctgtatttccccctttcttaccatatccatcatcccattcaggctcttcccttcatacacaggatccgtaatgaaagcctcagtcctggccccaaacttgatcgcctcaatggtcgcctcatctggaatcccatacacaccagcgtgataccgatcatctaatatcacatcctccgccgtgatatcctcctcgtccaaacctatcttgacacctgtgaactttgcaatgcgcaatatttgctcaaatgtctgctccaccgtcgctgacgcatcaatcccaatgatcttccgcttgcggctcccgtttactttctgcgcgagcttgaagcccgcaatcatgcccgccattgtactccctgttactgcgcacacaatcacagtgtcaaagaatacaccgagctccttctcctgcatctcaacctcaaacgcccacctggcgaagcctaagccgcccaatgggtgatctgatgctcctgcagggatgtaatatggctttccgcccctggctctgatttcctcctccaagttcttgagggtcaatttatgttcaatcccgaagccggacatatcgagtctcgtgtctgcgcccatcagccgcgaaagctggatattccccgccttgtcgtaaacgccatttttgtcgtcccaatcaacccatttttcctgtacaagcgcaacttcgaggccaagcttccgcgcgacggccgcgacttgccgcgtgtggttgctttggaagccgccgatcgacaccaacgtatctgccttttgagcgagggcgtcggacgcgaggtactcaagtttccgggtcttgttgcccccgaaagcgaggccgctgttgacatcttcgcgtttaggtagatgttgacttttccgcctagcgcggcagtgatgttagggaggtattggatgggtgaggggccgaagtcagggtttctcgaggaacagaagcaaatggctctggtagggggacgtcttgtgagggcattctgatggtggttattgtggtggtagggaagtgagagtttcgacggttggaggggtagaggggtaaaagttagatgaagatggagatgcatatatatagctaggagctgtttatctgactcatatgtaaggtaatagaatcatccaatgatacatcctattcagttgagttactttagtagactagctcggtcattgacaagaatagacggggtaattgtcgtatacaatatcgaagaacatgggtctgctatactccatgctcagagccctcgagtcatcaggctatttatttcggaaaagaaaaaacgtgattggcggaacgtgtactaatctatcggaatattccgacggaaaacctgtgtctatcgccattgagatctacgattccgatcaatgtgggaaaacggctcgcatgttgccaacaagtgtataggtatagaaatgatcatgatcatgaactgtttgcacatgggcggttgtgtgatctcaaacaatacttcaacttttccttggtgtacggtaaaagtaacctgtcttaccacaagtctaaacccagctcacatccattatttagtgggcgcaccccaaacaatcaaatctcatatatcaccacgattgcgccaggtattcaaaaaatctaaactcatgcaagctgcgatattggtaccttgctccaccagaactccgtctcctccctcgcccagttatcactcacaaactttgcaggaggtgcaacactcccaccaataagctcctcattgttctcgccaaacaccaaaattcccggagaggatggcttatacggcttccactcaggccgtgttccataccgtcctttgatggaatttggatctccgtgtgtgatgaagctggtaatgtacgcatgcaaggtccctgaaagctccttctgtgattcggaaagacccgtgatttcgtcgttgtatgtttcgtagtacatgttgtcgccatgattagcgcggccgattattgtgcgcgggagggcccaatggtaaaggtataccgatggagccccggggatagaggcggcaaagtgtgctgtctgccgtgcgggcgcaacataggcgtaatgcccgtacgctgcctcaatgcgtttgtattgcggtcctaggtccaaccctgttctagtttcgacgtagggagacgttgggtcggtgctggggtctgggtagagacggtcaattgtgtccaggtcctccttcgtcagttgcggcagtagctcctgccagaatttgcggaactgcgcagaatccgacattgacttgtctacatacatggttccctcgttggagttgaaacccgtcatgatgggtactctgtgccacagaccggcagtccatgcatctaacggttttcgagggatgacatcgtcgtcgatgacaggctggaacgcccagcgcagggaggggttgtacttatcaaagacggctatttgagcattggtaatcacagaactcggtagagagcgcagaaaggggaagatttcagattcggccagggtcgaagggcatccgacttcttggaggaaatcgcggaattgctgttcatggatttcggcattgtacggacggacggcgcgcgatgtcggcgaaccagattcgaggatgacacggtgaaagagcggagttttgtggccatcatagttgagcagatgatgtccaatctaccttctattagtgtcgttcgagctcaaaacatgggtggtaccgtaccgaatgggcaccagcagaaagaccaaacagagtgactgtcccaggatctcctccaaacagagcaatattttcctgcacccattgaaacaggaatgactgatcgcgcaacccgagatttagcagtccctccttcttcgaaacactagacggcagaaatcccaacgcccccagacggtagccgaaagtgactgcgataaacggctcctctgaccaagctaccattgacgcagttttatgcatcgctgctgaaccccggttgtatgcgcccccatgtacataaatagccactggaagtttctcagccaagtttgacttcgacggccggaaaatgttcacgcttaggcagtcttcgctttgcctgagcgccgggcctcctggtaacagggcttttcctggagcggcgggaccataattggaagcgtcaataatttcagttgaattggggaacctttcagcaggtctgaagcgcaagtcgccaacaggagggcgagcatagggaatacctaaaaaggcgtcgacaggctgtgggaatttgtattcgagtcggattccgacaactttgccctggggaagcgtgactgaaggccgtgccatagtgaatagtcaataggcattcctctaagcaggaaaaagcgacaaggacagcgagctctacttatcctccaatagagcgctgacgtgctcggaaagcgtgttggagtcttcagagtttggagtaacagcacccccgcaatatcggaaaacaatcgcatggatttatcatttatcagtgttcggcttgataccgacgatgggcatatctcgtcctgtcggccagctatctgggtttgtcagggatgctggagatattggatagtactcgcccatccatatatagggcctgtccggtcatgtttccatttcaaaacccattactcaatcatggatgaaaaggctccccccaacggaagttgccctgacaaagacatccaagtcgggactgtcactgtcagtgacctcgatgaaggccggctctttctgagacaacacaatatcacaaacaatgacctagagggcttccttgccgatgaggttcgcaacaaagccctcgtgcgcaaggtcgacctcatcctcctgccgctcctcgcagggacatatatgctgcaatatatagacaagacggccctggcttattcagccgtcttcgacctgctgccatcgaccaacatgaccagcgagcagtatagctggcttgcctcaatcttctacttcgcgtacctcgtcgccgagtatccatggacaatcctggcccagagaacggccatggccaaggtagtttcgggcaacgtcattgcctggggctcaatccttatgataacagcagcttgcaagaactttgcaggcatagcaacttgccggttttttctcggtatattcgaagcgcccattacaaactgcttcatgatgattgtggggatgtggtatacccgacgtgagcagcccttccgcgctgggatcttctactcctgtaacggaatgggcgctatagtcggcggaatcctgacttacggcattggccaaatcaagaccatcgccgtctggcgcgccatcttcctcatcctcggtggtatcaccgttgcatggggccttgtcttgctccttttcttgcctgacgatattctctctgcgaagcgtttcacaatcgaagagaaagcacttctcgttgccagaggaaggctcgcgcgcactggaattcttagccaccagatcaaatggtaccaaattcgtgaagccctgctcgacccgcaagtctggatcttgttcctattcatgctgctaaacgaaaccatcaacggcgggctcgccaacttcagcaagcttatcatcaaaggtctcacagatgacagtctcaggaccgtggccttgggcataccattcggcgccttccagctcctttgggtcttgtcagggacattcattgcgtcgaaaattccaaatactcgcacaatcgtgatgtttgtgtatctaatcccctctcttgttggcatcatcatgctgtggaagctctcccacgaaacccagagaatcgcagtgttgttcgggtactacatctcgggtggctatgtgtgtagtttggtccttgccttgcagatgccagccaccaacctgggcggatacacgaaacgcgcgactagtgttgccttggtatttctggcgtactgtgccggcaacatcatcggaccgcatgcctttctcgcggcggaagcacccatctatcagacaggatgcaagcttatcatatcatgcctagctgtgcaggcggccttgtctatttgtctgcggtttcttttgattcggaggaacaagcaaagggactctgctaccgctgatgcaccggtgtcagaagaggaagaattggcggatataactgattttgaggttagtttctatcctaattctcttagatggtggactgacaaaaggtactcacagaatcctcgattccgatacgtgctttgatattgggtaactggtcagtatattcatctactgcagcgtgattagcaaatatagcgagaccttgagctgagtcaaagccttgtaatatccgtccggcatgttgcgcccattcataagcttctcacggcaattatatcatttcttcacccagatcctgatcgtcgtcctacattctgtccatagtttgagccgccccgaatagatttacgtcttattcgccaatgctggctttgcactgaggaaagtgcgtgcaggcttctctgctggaacaatacatagcaagtagcggcgttatgtagtaccaatagttaggtttcttccaggagaatctataaggatacaatctccactgattgactaggcaagtgtgggccttatcagaggactaaagtccacgagaaccatactcgtccatgtacggcatttgccagaggtcaggaaatgggggtgactctgccatcaagcctggcatagatccgaaggtcatgaacgtctgaagaaagctaggatccccaatcccattgattccaatatcatctgccatggcttgatttgtctgtgcttgttgaataatgaactcgtcctggccttctggatttggtacattgttgtgagctgcgaaatggaatgacggagcgttgactccatgtcccggctgtgttctatccaaggcatattcaccctgggaatgcggatgagggttcttccgccacatctcaaggtactctgtatcgcacaacttctcaacgacagcctcacattgtcctaggcagatatcggcgagatcccagttgacctcgttcttgatgcggcgaagaaagtcaattagtttctttgcacttgctatgcattcttgcgcagtgtctgcatttt

SEQ ID NO: 3698 - DNA, 8425 bp, Emericella nidulans
ccatccaaactccaacatgcagtgagtcgttatattcgctgataggtactaatgcataggcgacctgtgatcataatggatgtaagaagtatgaatctaaccgataatccgtagcgtaacctgaacggtcgatcaaaacgaataaataaagggctaagttgtttcatgatcatcgtgaatgccaaaggctccatccttgaaacgccttcttaccgtcccgcttgtaaatgcgccagatataaacggggaccccagcgacaatgaatgctactacaatgagagtttgtagtggttcggagatgacggcacgactgagcaagaaaagactgacacagcagaatataattggcgtcgaaatccaggtcttatagggccgctctagctgcggttcccgaacgcgaagcacgatgagacccagcacggtgagaaagtagaacgtgtatcctgcaacgccgtagaaggtgacaagggtgccgaactcgccaacgatgacatatagcaaagtaaggatgccattcagcgccatcgcattaatgggtgtgtagccaatccatgtcccattgccaaagacccgacggactaacttgctcatccacgactggcgttgaagccggttcatgctgctggacgagccttgcgtccaaaggttgccgaacagtgttggaagatagccttccttaccagctgcgtagactaggcgtccgctcgtgaaaacagtcgcattcaaagcaccgaaacagcttgcagaaacgataagcgcaaaaatcaaggcacctatactgccaaataccttgtcaccgaactggacggcaatggtgttggtagcttcaatggtggaatgcggcaggacgaagaagtaggagacattggccaagagataagaaacaataacaaggggcattgcagtatgaatcacacgcgggaggtctcgatttgggtttttaaattcgcccgtcacgtagtttgtctgcgctgtgtcagtgggccgatctgaaagttgtattggcgatacccacattgtcccagccatcgaatgcccacagacctgcatacaatgccatagcccaacctgaaatatccatgttcgtgccctcgaaccagctgattttccattcctgattggcctgccccttcgctgacaggccagtggcggcaacaataatcccaataatggcgacaccgatcaatgcgacaaatttgaatatcatgaataaatctccaatccgagcagctaaccgagtagagagacagttgagacaaatgacaacaagaagtccaccaaaggcaacgcctttgttgatccaagggctgatctgttcgacttcggcacctaatatagctcgaaccacatattctccgaagatgatcgagataatggctgcactgccaggcttgagcactaagacagcgcaccacgtaaagaggaatcccgccaattctccgaatattttagacagataagcctgggcaccaccatttagagggattgcgcctcccagctcagcataacttgctgctccggtccaagctaataatccggcaacgagccaggcaatcagtgcaccaccaggtgatcccacattagcgttgacttggctaggtgatgagaagattcccgagccgatcaccagtcccactaccagggacaatccattgatataagtcaacgtcttattccgctctaacgaaccatcaataccaccgccatctccatcgatttgagttggagcccccaagggagcgtagccatcggcagtctgggacagaggaaacagattcctcccaaaatcgaatgcggaagagatagagtatgaccgatcaggtcgcggtcgtgacgacaagtgggtcatatgtggattggagttcgaaagggggtcctcatcctctagcgatagcttgcgcgaggacgaaatgcctgagggggaagatgagcgagagaggtcgagggcggattcgggagaggacgaggccaaagacgcgagttctagcgagtctctagcgccattttcagatctcgattcgggagcattaaaggttattcgggacatggcgttgtagatatgttggttgtcgaaaggaggtcctggttggtggttattgatcggagcagtgactgtcgaaagggtgccatgccctttggtagggaacagcgagaaagagcgtctctagtgtcagggaacaaagggctgatcccagagcgttgaataacataaatgagggaagtccgaaatcctagggaagaagggcgacaggctaatcttgccttctggctggcacaagtaaacggagctcgagcgcttgaggatcgtcattcgtgcccaattcggactagtgcttcacccttgcaaaaaagaccaggggcggctatgtgcggagttccagagaccgcgatatcttctactttgagattttagaccgtcccatgaagcccagaattcgattacggggcttcctccttcaagatgcgttttcagcgcggtcgttagctcggacacagcgacgacatgccactggttcctcgtcctctcctcaacctccccgggcgtccccggcttcccgtcggtggctgcggctgacattggtaaccgtcacagctgcgggaattggtgcatacataaaatggatgcaggacatgaaaacagcctctacgaccttgaacccaggtcgattcacgtcataccaattagtatctcgcgaacctgtctcatccaccggcagcttgtttacgatcaagcctccaaaatcagatggaagcaatctcaaagtatatgaagatgcatggaatactggggtatggagtgttatgttcaagcaaccacagttgcaaatcggccgtgactatactcctctgccgccaacgtcagctaatgaggacgatgagtgcctgcgattcttcattcgcaaagacccctttggagaagtttcccggtacctgcacagcctgaagataggtgcacgcattgaagtacgtggacctcgaatcgagtgcgagattcctccagatacagacaggattctctttattgctggtgggactggaattgcgcctgctctgcaggcgggacataccctccttcgacgtacggaccatatcagaaaacccacaatacacattctttgggcaaatcggcagcggcaagattgcgctggtgggtacaatgagactacggacacaactgctgaaacacgaaatgtcatggctttacgggctctttggatcttcaaaatcagttaccaggccggctcctgctgaggtagcggatactgtggagccgtctcttattgttcgagagatagaggctctcaaagcgcagtatcctgagcaagttaccgtgcagtatttcgttgatgaggaaagcagtttcattgggaagaagaccatattggaatgcaccaaaaccgccgtgccgtcctcccccgacaagagcaaacgcaatttgatctttgtttcgggaccggagggcttcatcagctacatggctggacccaagctctgggcgcaaggcatggagctgcagggtcctctacaaggcatcataaaggagcttgatcttcaggattgggccgtttggaagctttgacagtcgtaggcctgattcatccaaatatccacccctcttgtagtacagatgtaatgcattgtcgttttaacgatagagagtatccgctaccagactacactgtattaaatcgataatgccgataacggaggcggcggcgcccttttcgccgagcgatcctcgaacttgagtcttgaagaccgggttgaccaatgataatccgcgccacctgattcgtcaggaacaaaggtagaagaccgaaacccgcaaaataattcggacaccctcaaccatcttctccgcactccgcaagaagaacaatgactgtaagttgccctgcggatactgtcaattgtgctgtatgtactgtacttccgggtcactgattcaatgcagtcgcgtttagtgtcgcaaagcggcctcggtcgccgctgggcagtgctgcgatgcgcgctgtcaaagacctaccaacgacgaacactcacttccaccagacgccaattccaagacgtttttcagtcgcaacttgaagatcctacctcagctgcgctattttctgctttgaactcttcaaaagccgtaccccaaacgcttaccgaaaagatcgtacagaagtactctgtgggattgccacagggcaagttcgtcaagtctggcgactatgttactatccaaccccaccgttgcatgagtatgttcaatatccaggagctagctccaaacgaatgttggccggagttgtggctaataagatgaattctagcacatgacaacagttggccatgcgcattgaagtttatgtccattggtgcttctcgtttgcataacccggatcagattgtgatgactctcgaccatgatgtgcagaataagtctgacaagaacttgaaaaaatatcggcaaatcgaggaattcgccactcagcacggcgtggaattttaccccgctggtagaggtattggccatcagatcatgatcgaagagggatttgcctggcctggtactcttgctgtcgcgagtgactcgcacagtaacatgtacggtggtgttgggtgtctgggcactccaatcgtgagaactgacgcggctagtgtttgggcgactggtaaaacctggtggcagattccccctgtggcgaaggtgacgttcaagggcgtcttaccaccaggtgtgaccggtaaagatgttattgtcgccctttgtggtctgttcaacaaggacgatgttttgaatcatgcgattgaattcactggatctgaggagacaatgcgaagcctctcagtggatactcggttgaccatcgccaacatgacaactgagtggggggctttgtctggactcttccccattgacagcgtgctgaaggggtggctgaggggcaaggccacgacggcagccatggggcttgcggacggtcctttcaagacccgggctgctgagcgattcacgcacccgctcctagagcagctgttcgagaatccgttgactgctgataaaggcgccaaatatgccaaggagctgttcctggacctttcaagcctttctccttacgtctctggacccaactcagtcaaggtggctactcctcttaaagagcttgaggcccagaacatcaaagtggacaaagcataccttgtctcctgcacaaactctcgagcctcagatattgctgccgctgcgaaggttttcaaggaggctgccgaaaagaacggcggcaagatccccaaaatcgccgacggcgtcaagttttacatcgcggctgcgtcaattccggagcagttagcagccgagggaaatggtgattggcagacgttacttgaagctggagcaacgcagctgcccgctgggtgtggaccctgcatcggtatgggccagggtctgctggaacctggcgaagtcggtattagtgcttcgaaccgtaacttcaagggtcgcatgggtagtactgaggcgaaggcgtatctgggaagcccggaggtcgtcgctgccagcgcgctgagcggaaagctcagtgggcccggctggtaccaaacccctgaaggctggacagaagtgattcgcggtgaaggagacggcatccgcgaagaggatcgaatgctgacgaacgaagaagctctggagaagataattggtcagctggatgaccttgtggccgatggtgagaagcgttttgcttcggagaccccagcagttgaggaatccgagcaaggcctgacagagatctaccccggatttcccgaacgcgtctctggagaacttgtcttctgcgacgccgataatgtcaacacagatgggatctaccctggaaagtacacctatcaagacgacgtgccccctgagactatggcccgcgtctgcatggagaattacgatccagaattctcgaccactgctaaggaaggggatatcctggtaagcggtttcaacttcggctgtggcagctctcgagagcaagctgccactgctatcttggcgaagaagattcctttggttgtatcaggcagctttggaaacattttctcccgtaacagtattaacaatgctctgatgggcctcgaggtcccacggctggtcaaccgccttcgtgagacatttggatctggcgacaaggttctcactcgccgtactggctggactctgacctgggacgtgcggaagagccagatcgaggttcaggaaggcccgggcggacccaagtggacgcacaaggttggagagctaccaccaaacgtccaggagatcattgccaagggcggtttggagaaatgggttaagaacgccattggtgcttgatcaatgagcctgttactgaacgaggatggattttttgtgttctattatacccagcgtgctcccttatatgtccaggggaattcaaccgcattgacataacccggcgttgagtcaagctgttatgcgttcaggtgcttatttctggcatctgctgttgttccgatcttagagccttggtgaaggatgtgtatgtacctatataaaagcgatcttattgctcaattagacagattttattgcttctctcaactgtgcaggttcgtcagtcttgatctaggttctactaacattccgcagcagctaaaaggctattatcaatgcatgcctcctgctttgagggagagtctaggcgggatagtggtcaatgattttcgccttcaggcccatcgcattcaagtttgacagtctcgccgcttgtactttcgcctcgacccaacgttaatatctgcattttatttacgccggcatgttcatcattgactggataagagccaggcctcacgatactccagctgaacacaatagaaattggatattgcacttgatgaatgctgcatggtcatggaagccctccttgtaagggttgaggttcttacacaaggcatataggctctcgcaatcgtatgagggtgctctgtaagggagatgtcataaggagacattagggaaggcttcattcaccgatattctcaacagacagatttttatacgaaaatcctcctcagatagtctgcgctcaggcctctttctccagaagccgtacaataaacccaactgaattccttggcttttccgtcttcgtactctgctccttcttcacagagccgataagggggcgaggacaattatgtcaaggcgtggagtcccaggccattctcacactactcctattttcctggatatcgtcgacaaacaagcatactcacctcgatttaatgcactggtcatggaaggccgataggggcagatatgtgtccccctcatgagaaaactgacttgtgctttgccgaagtaactagatcttataatgtaacctccccggccaataatgaagagggttgcagaaggatcaaacccccagggcatcaaatgtccattgtctctctcccaagcctacccttggcctgcttcgagcgcacccagctgacaacgacgcttttgttgatgcctccatgcatcctacttccgaccaatcgcctcaagagactagcaaacaggacactgcccttgctgagcctcccacttcaggcaggtatgatggctctgccagacttagattggatggtagtggcaaaagcccttaaagccccggatgttgcgaataccgtaccgatcaagtatcttaggcgtgattggtgtcacacagcacggtctatgcctacttcccaacacagaacttctcgaaaaccacgcccaacacgtcttcgacatcgccgctttcacccttgcccgtaattgaggcaagagcatctgcagcataacgcaagtgctcagcggccactacaatatccacctccgattcaaccgagtccggtcccggagaccctgaatatgggccatcaggggtatcgcgagatgaggagggatttgcttgagctaggaattcttctaagctctgaaggcacagctgcaggttagagctttgacgatgactaaccccgagtgagtcttcccagtacgatcgatcgtactgcccgttggcgtctccgtctactccggctggggtggccatttcctcgaatgtggagattaggccctgcaggaaggacggccaggagttcgtcatcggctgttcgagtccatccgaagattcaagacatgagatgccgaagacgcgcttcttcggtacttctgggaatatctggttcactttctgggctatttcgtgtggcacttgactggcctcgctctgatccagtggtggcaaccggtcgcatttattgatggccacaattatttgcttgccggcacgcacgcactcgttggctgcatctacaacgtccggctccatggcaagtcggaatggtgccccttcatccgatccttcctccaccgagatcaccacaacaaca
